United States Patent Application Publication US 2017/0009304 A1 - sequence listing, part 29

SEQ ID NO: 604260 - DNA, 82 bp, Homo sapiens
tgcaaggctgtgtgtgtggaggcgaagccccatgtgccactcccctgatctgcagcttcggtaggccggtggacctggagaa

SEQ ID NO: 604261 - DNA, 75 bp, Homo sapiens
caagctgcattttagacatagctggcaagagtattttcgtgtgttatagttttgccgctggactcttccctccct

SEQ ID NO: 604262 - DNA, 74 bp, Homo sapiens
agaccttgtggaggccttgcaggagtttggacccatcagggtgtgtccgcagccggccaggtggtatccctgaa

SEQ ID NO: 604263 - DNA, 50 bp, Homo sapiens
gacagcctcaagtctccttcgagctttggatccagattagatgatcaaag

SEQ ID NO: 604264 - DNA, 98 bp, Homo sapiens
cggccgacgggcgggaagtggtgtgccacgcctcggcttgggacttctacaacaggaaagacttcaggaagctgaagagggaactacccttttcattc

SEQ ID NO: 604265 - DNA, 87 bp, Homo sapiens
ctcccccgaggtgtccagcatcaaccaggaggcgttggtgctcacggccaaggccacgacaatgcagatcttcgtgaagactctgac

SEQ ID NO: 604266 - DNA, 90 bp, Homo sapiens
ggcccgccgcctagcaaagactattaccagttactggtcacccggtctcaggtggcttcgtcctgttcatcgccaactaggggaagcgaa

SEQ ID NO: 604267 - DNA, 96 bp, Homo sapiens
gcgaataaaattcgagccaagttaaaggtatctggagtccatctttcaccatcttctcctgagattgtactggaccgtgaccactcttcttccatt

SEQ ID NO: 604268 - DNA, 104 bp, Homo sapiens
ctagcacgtggaattcgcgaagctgccaaagccttagacaagtctcattcaggaacgtcgcctgataacactgcaccaccacctccccctccaaggccacagcc

SEQ ID NO: 604269 - DNA, 75 bp, Homo sapiens
caaagaagatgcctcgaactaaacaaattcatcccagaaatctaagaggcaagagggcacattgggagattcagc

SEQ ID NO: 604270 - DNA, 80 bp, Homo sapiens
ccagaagcgaagtggagagcgccagagtaatggttaatatgatcctctgttgaagcaagaagacaaactgtatggtggag

SEQ ID NO: 604271 - DNA, 82 bp, Homo sapiens
ttcaggactactttaatccagctactctacctctaacacagtacctgttaacaacatcattcccagtgaccccttctgggtg

SEQ ID NO: 604272 - DNA, 75 bp, Homo sapiens
caggaggctgtgcgggccccgctccgcttcgaatgggacatggtccggcgaggagagatcatcgacaatgacacc

SEQ ID NO: 604273 - DNA, 100 bp, Homo sapiens
cacagacagaatccctgctaccagtgccaatgggtcatgtttggttagaaggtgacaatctacagaattctacagattccaggtgctatggacctattcc

SEQ ID NO: 604274 - DNA, 101 bp, Homo sapiens
aacgagcgacggcggaacccgtgggcctgtggactgcagcctcggcggtcagcagccgctgccatggcccagacactgcagatggagatcccgaacttcgg

SEQ ID NO: 604275 - DNA, 98 bp, Homo sapiens
tcagaatcctcttctgagtgatggagatttgtctaccatgattggcaagcaaaacctgtgataagtcctcttgaacttcggatggaagaattaaggca

SEQ ID NO: 604276 - DNA, 96 bp, Homo sapiens
ctgcacttcttttttgagaaaggaaggaatatatcctgactgattgagttattcctgatgaagctaaagctttgtctctgttggcaccagctaatg

SEQ ID NO: 604277 - DNA, 100 bp, Homo sapiens
gtctctctgctgcggcgcggggaccgctgtgctctcgaatgcagagagcagtttgcagcagaagaatgaagccatcacatcctttgaaggaaaaaccaac

SEQ ID NO: 604278 - DNA, 129 bp, Homo sapiens
ctggaggctccgggcgcggggaagtcatgctcgcttcacggaggcaatagctagccggtagacatagctgacattgagaatgaagagaaccgctactgtctattcatggaactcctggaatctagtcac

SEQ ID NO: 604279 - DNA, 82 bp, Homo sapiens
gaggctgatggccgagtacaaacacattatacaacgtgaaggctgagatctttcccccttcgggaatggagtattgcagaac

SEQ ID NO: 604280 - DNA, 99 bp, Homo sapiens
tacatgatgtctgaagtcttggccaaagaggaggcgcgccgtgcactggagacaccctcgcaccacctgccctggtcagctccagccagtccctgctgg

SEQ ID NO: 604281 - DNA, 100 bp, Homo sapiens
ccggcccctgccctggttccgttgcgcgccccggatgtggcgcggctgcgcgaggagcaggaaaagaatgccgggacattctgcttcctgtcatcaccaa

SEQ ID NO: 604282 - DNA, 101 bp, Homo sapiens
ctttgacttggtgttgaaagtgaaatgtcatgcctctgaaaatgaaggactctgtctactagtgacgatgtcgaagacagggaaaatgaaaagggtcgcct

SEQ ID NO: 604283 - DNA, 100 bp, Homo sapiens
acagcagcgcagccgcccagacgcgaggggacgacacagcaatgccagcacaacgccgcaggggagttctgcgagctttgtgcccctggctactacggag

SEQ ID NO: 604284 - DNA, 82 bp, Homo sapiens
ctggccctggccctgatcatcctgctgggcttcgtccagatcgggaagggtgaccctggcaaagatgagagtgcacatttcg

SEQ ID NO: 604285 - DNA, 88 bp, Homo sapiens
cgacccgacgcgacgcgccagcagcgcagcaccgattcctctcgggctcttgggcgctgctctgagcctcctgacaaggtgatccggg

SEQ ID NO: 604286 - DNA, 75 bp, Homo sapiens
cagaggtattctagaagaagaaattgtttgtctgccattgtggatttcctgggcagagtggagtgaaggtgccaa

SEQ ID NO: 604287 - DNA, 82 bp, Homo sapiens
tttaattccttttcgaccttcaatccagttccaaggactccacggggtgccactgattaatgaacttgaatcagcaatacat

SEQ ID NO: 604288 - DNA, 101 bp, Homo sapiens
attgattatatacaacaaaaaatagttatggcgactttcagaaacaatcacatgaagactaaagcatctgtcagaaaagttcctagaagccaaaccaaact

SEQ ID NO: 604289 - DNA, 100 bp, Homo sapiens
atgtctgcgagccaggattcccgatgaggacggggacttggttgccttttccagtgacgaggaattgacaatggccatgtcctacgtgaaggatgacatc

SEQ ID NO: 604290 - DNA, 50 bp, Homo sapiens
gggggacccgcccgccatggccaccaagatctattaatgagatgaagcgg

SEQ ID NO: 604291 - DNA, 83 bp, Homo sapiens
ctggattcatatccttcgaaaacgacgcattttgaaagcgaagcagaagccgtagaatcagcggcgagcctgttgaaagaacc

SEQ ID NO: 604292 - DNA, 90 bp, Homo sapiens
tgctcaaaaattagcagatgaaattctttcccaaaattcagaaatcaaccaagttcatgaaatgaggtcattatcagaactactaggccc

SEQ ID NO: 604293 - DNA, 50 bp, Homo sapiens
gtttctaggaaaggccggacaccaggccagaagaatgtttgaaggtgaga

SEQ ID NO: 604294 - DNA, 75 bp, Homo sapiens
tcctgcaggcacagttgccgattacagtttgctgctttgtggtgcacaagcggtgccatgaatttgtcacattct

SEQ ID NO: 604295 - DNA, 74 bp, Homo sapiens
caagaagacagaggtgctgatggagaacttccgcagggccattgtgtgtaagctgctgagcacagagctacagg

SEQ ID NO: 604296 - DNA, 82 bp, Homo sapiens
ccagaggttccctccgagccccttcctgagaagatcccaggcggcggcggcggcgcccgggagccggagccttcgcggcgtc

SEQ ID NO: 604297 - DNA, 90 bp, Homo sapiens
tcagcgactgaaggtgcccgcatcccagctctgccaggaagcaaaggtgcccagcagagtgccaccgtggccaacccagtgcctggtgcc

SEQ ID NO: 604298 - DNA, 90 bp, Homo sapiens
aatgcagacggacagtacctcttctgcaggtactggaaacccacaggcacacccaaaaccaggtcccgccccccagcacccgagccctcc

SEQ ID NO: 604299 - DNA, 82 bp, Homo sapiens
cacaggccatgctctggcaaaaacgtggatccataaagaacccagccaacccgcagagggaggggaggggctgagctgtgag

SEQ ID NO: 604300 - DNA, 50 bp, Homo sapiens
agcttaagcagtagctggaaaaacaaatttacatgtattggagaccagac

SEQ ID NO: 604301 - DNA, 83 bp, Homo sapiens
cacctggcggccatcgtcatcctgctgctgaagatctggaagacgcgctcctgcgccgctcaccatggatgatgatatcgccg

SEQ ID NO: 604302 - DNA, 90 bp, Homo sapiens
tcttccccagaactacaggggctctggccatcttcgtgattgatgaactcccagagggcgctgtgaagcctccagcaaacaagtatccta

SEQ ID NO: 604303 - DNA, 97 bp, Homo sapiens
tcagcgcagcgctgcggcctttcggcagccgaacggccgcggcaggagttaatgttcaagacagccaaagtagaaaatgtgttagaagcaacgtgca

SEQ ID NO: 604304 - DNA, 100 bp, Homo sapiens
agccgattgaaacattcctccttgcatctttcttctgtgattgcatctatttgttagtagcatagagaccaatgataagtctacttttcttccacgtaac

SEQ ID NO: 604305 - DNA, 82 bp, Homo sapiens
cttttttgaagaaagagagaatcttcgttttgacttgtttactcctggcttgggggcattaggaagcactggaggctcttcg

SEQ ID NO: 604306 - DNA, 100 bp, Homo sapiens
tctccttcctgcgcgcgcgcctgaagtcggcgtgggcgtttgaggaagctgggctcctggatttggatttggaattgcaatatctggtggacgagataat

SEQ ID NO: 604307 - DNA, 100 bp, Homo sapiens
acaaactaaagaaagacttgtgttacctccagggcccacaacggcagtgtcctacatgtcggtgaaatgtgtggatgcccgtaagaaccatcacaagaca

SEQ ID NO: 604308 - DNA, 98 bp, Homo sapiens
atcaacccacctcacagcacttcattatgcagctaagaacacagatatgtagaactcttcttgaattctacagcaggagcaagcggtggtgcttatgg

SEQ ID NO: 604309 - DNA, 50 bp, Homo sapiens
gaaaggtgtgctgtgcctgaggccaggtgacctcacagtgactcaagcta

SEQ ID NO: 604310 - DNA, 98 bp, Homo sapiens
caatttggcctctcatttgccaggattttttgtacgtcctgatctaggacccaggttgtgcagtgcctatggtgccttggaacactatgttaattgcc

SEQ ID NO: 604311 - DNA, 50 bp, Homo sapiens
tgggagcaaccagggttgcaaatggggcgcctacccttcttcagcaagat

SEQ ID NO: 604312 - DNA, 73 bp, Homo sapiens
gcaggaatgcttactgttgcgtggttcgttattaacagctttgaaagccaacacatcctcctgagaggggaca

SEQ ID NO: 604313 - DNA, 100 bp, Homo sapiens
cctgtggtttcagctggcgctgtgcttcggccctgcacagctcacgggcggagagtcaagccctacccgtcgagaagctgtgaagagaagaacagccgag

SEQ ID NO: 604314 - DNA, 75 bp, Homo sapiens
caaggctatgcaagtggagagctgctcctcagccgtgggggttcagttccggaaggtgtcttagaggacattaaa

SEQ ID NO: 604315 - DNA, 107 bp, Homo sapiens
gcaagattttccggccccctcgcgcctcccattgcagcctttgtgataactgcgtagaccatgttccgtgctccccaccttgcactgaggtgcgtggaagttggcct

SEQ ID NO: 604316 - DNA, 90 bp, Homo sapiens
ctgtgacttcagagacactgccaagcagccttagccctagtgtagaggtatcatgatattagctggtttgacatcaagtcatttgtgagt

SEQ ID NO: 604317 - DNA, 100 bp, Homo sapiens
gcgagtctcggagaagatgtggtggcttccgtttgttggtggaggaggtggcaggcctcggcgtgcaggaatcacagccatggcccccaccctccaggat

SEQ ID NO: 604318 - DNA, 100 bp, Homo sapiens
tacaactgagtcagaaaggttacagactcagcccgcctgcacccaggtgaaatatacagccttgttgctcacacaaagcctgtttggtggtttcttcaca

SEQ ID NO: 604319 - DNA, 100 bp, Homo sapiens
aacctcattatccgctatgatgtggaccgggccatctccgggggctccattcaggcctgggcaatatttaagggaaagtataaggagggggacacaggag

SEQ ID NO: 604320 - DNA, 90 bp, Homo sapiens
cagtcatcgcgcagaccttcatggatgcctgcacgcgcacggagcataagctgagccgcgtggtgttcccactgatgaagagcaggcgac

SEQ ID NO: 604321 - DNA, 100 bp, Homo sapiens
gagataccggcgccatgtccagcgctcggacccccctacccacgctgaacgagagggacacggagcagacaaaatagaagccacctggaggcaacttcct

SEQ ID NO: 604322 - DNA, 90 bp, Homo sapiens
agaaaaagcaagagtttgttatatagcaaaaatgatccacagtctatttctcataaactgttccggtgacatatttctagagaagcactg

SEQ ID NO: 604323 - DNA, 82 bp, Homo sapiens
atgccagtcataatagatttcgagacaacagtggccttctgatgaatactttaagtgcaggtgatggtcctaccagtgtgtc

SEQ ID NO: 604324 - DNA, 83 bp, Homo sapiens
gcgaccccagtcggtgctccggggaggtcacctgacgaggaggaagctcttcgtgggcggtcttgactggagcacgacccaag

SEQ ID NO: 604325 - DNA, 83 bp, Homo sapiens
aaagaagatgtccacgcctgttgaagttttatgtaaggatggcccaacagcaggccttgaggttccgaggtccggctccccca

SEQ ID NO: 604326 - DNA, 89 bp, Homo sapiens
acatccgctccttgcccgagaacatccagtttgatgtttactacaagcatgcagccagtaaagatcccagagaagttcgagaagctaga

SEQ ID NO: 604327 - DNA, 90 bp, Homo sapiens
gcggcaggctcaggtgcagccgctgatgatctcaatgccacccaccaacactgtgttttggccggttcacaacctcggtttagttccacc

SEQ ID NO: 604328 - DNA, 90 bp, Homo sapiens
aattctacaaggaacttcaggcacatggtgctgatgagaactgggcacctccgggctgtgaaaagttagggaagtgtctgacacctccag

SEQ ID NO: 604329 - DNA, 125 bp, Homo sapiens
ttgttcttccggccctgctgtctgcctccccggctgattggattcgttactgctttgcaacgcgcacctaactccagcttgccagcaaagcacggacagagaaggaggagaagctgagccaggcc

SEQ ID NO: 604330 - DNA, 75 bp, Homo sapiens
attcccaaatgccccaaggatgaagaacggagacgaaatgcactcggtgatggaaagagagccactattctgaag

SEQ ID NO: 604331 - DNA, 83 bp, Homo sapiens
gtggatcgctgtgatcgtcacttgctctaagcgaaagacatgaggcctcagcctgaaatgaggttgttttgaggtcatctgat

SEQ ID NO: 604332 - DNA, 82 bp, Homo sapiens
gaggaggcgcgggaggtgttcgagaacgaccccgagacgttcaaatctgaacatcaatgatgtactagggaactactcattg

SEQ ID NO: 604333 - DNA, 101 bp, Homo sapiens
caggagcaagtactccaggaagcacagagctgtaccagtacacggcccacgttgccaggatgaggatgggacagaagaggataacagtcgtgttgaacctg

SEQ ID NO: 604334 - DNA, 101 bp, Homo sapiens
gcagaagcccggcgccgggaagcctcagctcgcctgaagtgttggaaaaccttggacagacaattgtccccgatttgggatcactggaaagtcagcatgat

SEQ ID NO: 604335 - DNA, 73 bp, Homo sapiens
ctgtgcgagagcctcctcacttggtccagaatgacagggtccagaaactggcgagccacgagggacatgtgta

SEQ ID NO: 604336 - DNA, 100 bp, Homo sapiens
aacacccgcttcctggccatcgtcaccgagagcgcagggggcggctccttcctcgtcatccccctggagcagactcagtattcatttaaacaagtatttg

SEQ ID NO: 604337 - DNA, 98 bp, Homo sapiens
gcgaaccgagcgggcggcgggcgcgcgcaccatgggggagaaacccgggaccagattctgcctgatcaatgcaggagtcctgtacctctacttcagca

SEQ ID NO: 604338 - DNA, 95 bp, Homo sapiens
gtgttctccaaataccagctcgacaaagatggggttgtcctctttaagaaggagctgaaaatcctggtggactacgacgagaaaggctacctcct

SEQ ID NO: 604339 - DNA, 50 bp, Homo sapiens
gttcacggctccatcgctgttagtctttcatggtgctgattcagacatag

SEQ ID NO: 604340 - DNA, 108 bp, Homo sapiens
ccttcccaaagaagaaacttcagggtcttgtggctgcaaccatcacgccaatgactgagaatggatggactagaggcttttaccagatttcttaaaactgaattcagt

SEQ ID NO: 604341 - DNA, 75 bp, Homo sapiens
gaggcggccgccgcagcccaggcgcgggggcgacgacaggaagatgagaatgtgcctactgctcctgatcctcca

SEQ ID NO: 604342 - DNA, 75 bp, Homo sapiens
aaattgaaaacatctcccaatgaagccatattttctgctcttaagaatcttcaagataagattcgacgcttggaa

SEQ ID NO: 604343 - DNA, 74 bp, Homo sapiens
gcaaaccactgccctttgggactctgggagtacacaaggatcgcctggagcatctgcggaggcagtgtggcccc

SEQ ID NO: 604344 - DNA, 100 bp, Homo sapiens
tggatgatgccaaagttttattagattagtgatgatgaaccaggttatgaccttgatttattttgcatacctaatcattatgctgaggatttggaaaggg

SEQ ID NO: 604345 - DNA, 89 bp, Homo sapiens
tcgggctggtgctgccattaatcctgtgggccgacagaagtgcagatccaaaatacggagctggcatatacttcaccaagaacctcaaa

SEQ ID NO: 604346 - DNA, 100 bp, Homo sapiens
gtctgggttctgctgtcaatggtgttgtccagcaatctgaaagcaaatcctgtttagatgcaggcgaaggttcctggtgacccaggctctcaccttaccg

SEQ ID NO: 604347 - DNA, 100 bp, Homo sapiens
cagcccaacttccagcaggacaaggatggaggcgtcctgcctagagctggcgctggagggcgagcgtctgtgcaaggcgggcgacttcaagacaggcgtg

SEQ ID NO: 604348 - DNA, 100 bp, Homo sapiens
cgggactttgccgagaaggagttgtttcccattgcagcccaggtggataaggaacatctcttcccagcggctcagattacctggctggtgtttgcttgtt

SEQ ID NO: 604349 - DNA, 97 bp, Homo sapiens
gctacaaaatcaatggccggacgaaaaataacaagcctttgtattcatttgaagataatgcagactatgtttatgatgttatgtggtcacctaccca

SEQ ID NO: 604350 - DNA, 98 bp, Homo sapiens
ctgagacgtgggtattaacattggctggagtagcaaggatcttcaacactagaagatatttgctgcagcctttagatatcagaaaaccaggactctgc

SEQ ID NO: 604351 - DNA, 100 bp, Homo sapiens
gcccggagtttcatctacgtcgctgtcatgaactacctgcccactctggagttctcccaccctcacaggctgcgggcctctcgggtgcttcttgtcggct

SEQ ID NO: 604352 - DNA, 101 bp, Homo sapiens
ccagtggcctcggcgattatggacccggccgaggcggtgctgcaagagaaggcactcaagtttatgagttcaaagaggccttttcattgtttgaccggacc

SEQ ID NO: 604353 - DNA, 98 bp, Homo sapiens
agcaaaggctgctctgaagcgcacgacctccgactactttctccttcaagatggattaccgggccttggtgcatgagcgagatgaggcagcctatggg

SEQ ID NO: 604354 - DNA, 83 bp, Homo sapiens
catcgtagcgaacacggtgctactcaaggcccgggaaggtgtggacactgccagcggctgcagccgacttggaatgacctggg

SEQ ID NO: 604355 - DNA, 91 bp, Homo sapiens
ctcccaggctcaagcaatcctaccatgtcagccttcccagtagctggaactacaggcgcatattaaatttcctattgactacccctattca

SEQ ID NO: 604356 - DNA, 88 bp, Homo sapiens
tgaaccggagaccccgaaaacggaagcgcagggagaaggaagaggtgtttgaaaagaactgggcaccaatccgctgaagagctcagga

SEQ ID NO: 604357 - DNA, 100 bp, Homo sapiens
gcctcccaagtagcttggattacagctggcctgctgctgtgggtctgcaggctgctctctctgctgtgattgctgccccaggattcggcagtccctcagc

SEQ ID NO: 604358 - DNA, 82 bp, Homo sapiens
cagtagtttctgcatttagtgagataaggtgtttgatcagtatgtaaagaccagggcagaggaagaacgcagggaaaagaaa

SEQ ID NO: 604359 - DNA, 83 bp, Homo sapiens
gtgaaagtcagtttctgaggaatttcatcagatttgaaaaagggcgcatctatacgttcattggagaagtcgtcgtttctgtg

SEQ ID NO: 604360 - DNA, 97 bp, Homo sapiens
gaaacttgggactctgcaatagatacatggagcccatcagaatggcagatggcttatgaaccacaggacagagcgggatgccaccagcttgtccaaa

SEQ ID NO: 604361 - DNA, 100 bp, Homo sapiens
ctcttcttacaacagggaagcagccctcaaggccagcggagtcttcagcacccccacaagcatgcaggtactaggttttgacaagcttgcatcatgcgtg

SEQ ID NO: 604362 - DNA, 73 bp, Homo sapiens
ctcccgatagtgagagacctgctcaagctctcttaagagattatgatgggtccgctgtgtgcagaggctccat

SEQ ID NO: 604363 - DNA, 83 bp, Homo sapiens
gcagcagcaccaggctctgcagcggcaacccccagcggcttaagccatggccaattctgtggtgttcttggtcacacatttat

SEQ ID NO: 604364 - DNA, 75 bp, Homo sapiens
ctatccaaggacatgagcagtttacacatctcacccaattcagaatgtataataagatgtggcatcagacccaag

SEQ ID NO: 604365 - DNA, 100 bp, Homo sapiens
acaggccatgcctttcaagtgcatgcagctcactgatttcatcctcaagtttccgcacagagccagccccagtgcctgctgagccgtttgacaacactac

SEQ ID NO: 604366 - DNA, 75 bp, Homo sapiens
cacatgaactgaagcttctgtcagaatgccaatacaagcagttgaggagaagaagatgattctttggccatcaaa

SEQ ID NO: 604367 - DNA, 75 bp, Homo sapiens
ctaggacggggaacgacaattaccttcttggacacttaatgattgttggcaagaaatgtgctgctgatctgggcc

SEQ ID NO: 604368 - DNA, 74 bp, Homo sapiens
gaaggggctaggccggcttgaaaagagccagtgatggtgtctggagtgcatcataaattgaactctgaactttg

SEQ ID NO: 604369 - DNA, 82 bp, Homo sapiens
gctgggagagaggtacctctccttttccctctccctttccctaaggactggagactgatgcatgagggggctacggaggcgc

SEQ ID NO: 604370 - DNA, 75 bp, Homo sapiens
cggcgagcccccgcggcgacagctgtcgacttgctggagaagatgcttgtattggactcagataagagaattaca

SEQ ID NO: 604371 - DNA, 82 bp, Homo sapiens
ggagctggacggcgagcgcgagcggcgcgagaaatgacaaccatgagtggaaaaaactaattatggttcagcactggcctga

SEQ ID NO: 604372 - DNA, 99 bp, Homo sapiens
ggaggacggagaggatgtgttcgaggtggagaagatcctggacatgaagaccgaggggcttccaattgaagacttgtgcagtttaacatcccagtcact

SEQ ID NO: 604373 - DNA, 104 bp, Homo sapiens
ccggcggccgagacgggggcggcggccgcgcgggtctggcgggaccggtttggaagactttgccggcctgcagatgacgtccggttgtttgccttcgtgcgctt

SEQ ID NO: 604374 - DNA, 100 bp, Homo sapiens
caggaggcggtggagcgcagagcgggcgagcgcgatgggctcctttaagccaggaggccgagtgatcctggccacggagaatgattactgtaagctctgt

SEQ ID NO: 604375 - DNA, 98 bp, Homo sapiens
ctgtccctcagtgcagcccggtttgctttgcttcgattggaggaaggacctccacacactaaaaactggagaaatcatttctaccagttcggagagat

SEQ ID NO: 604376 - DNA, 100 bp, Homo sapiens
ctgagaatttgaaaaatgaagatgatgtagacactggactattaggtttgtggagaaaaacagcgctttgagaagttgatggaacatttcaggaatgaag

SEQ ID NO: 604377 - DNA, 100 bp, Homo sapiens
agttgacacacctcatggtatatttgcagccagtactctatatgaacaatccgtctggatcacggatgtaggaagtgaatgggtaaaggacgaggaagat

SEQ ID NO: 604378 - DNA, 88 bp, Homo sapiens
tccccggcgcgaagaggctggactcggattcgttgcctgagagcctggcccaactagagaatctgtgcaaacagctgtatgaaaccac

SEQ ID NO: 604379 - DNA, 82 bp, Homo sapiens
gccggcgaaggaggaggcgttgccggaacatcatcaagaaggtgatcgggcagaagtttgtgtacaagtttgtctctttccc

SEQ ID NO: 604380 - DNA, 90 bp, Homo sapiens
ccagagcatggctgtgtgacagggaagacgactgtggtgaccagacagatgaaatggcatcttgtgagcacaaagttatcattgttgggc

SEQ ID NO: 604381 - DNA, 75 bp, Homo sapiens
ggtggggctggagaacccgaagcacctcccggcgccgggacgcttcttctgggcctttatcatctgctggactcc

SEQ ID NO: 604382 - DNA, 59 bp, Homo sapiens
gaggatctaaatacaagagtggcctattggtggtatggtcaggaaaaagactacaatgt

SEQ ID NO: 604383 - DNA, 75 bp, Homo sapiens
acctgcgctatgaagacacgcttcttctggaagaccagccaacaggagttcatgatcaagtgttgcccacaccaa

SEQ ID NO: 604384 - DNA, 100 bp, Homo sapiens
tctgtctgcctgtgtccctgaccatggctccctgcagtaccctttaacggtgctggagaatctggtaaaagcaccattgtgaagcagatgaggatcctgc

SEQ ID NO: 604385 - DNA, 100 bp, Homo sapiens
gcactctcttcggacctacgacatcgcggcttctctggcgttggccagtcagccacagcttcctccagattaggccgagcacttgctgagctatttggac

SEQ ID NO: 604386 - DNA, 89 bp, Homo sapiens
cgctgggtcggtggcggaggctgaggagaaggaggagcgggccgtggaggcttcgccgcctagcactcctgtaggaggcctgctgatgg

SEQ ID NO: 604387 - DNA, 75 bp, Homo sapiens
aatgaactgtctaattcttgcaaggagtgtgtcatgaacaatgtcacctgtactcggatctatgaaaaagtagaa

SEQ ID NO: 604388 - DNA, 83 bp, Homo sapiens
cggggacattattgcgcgtggaacggctgcttttggaagggtgcaaatagctatgggcaacttggcctcggccataaggaaga

SEQ ID NO: 604389 - DNA, 101 bp, Homo sapiens
cccctcccagaacactccatgccactggaactcaggagcgcaggaatgaatctgaagtctgctgcagtaaaacacagaaggctttaaaatgttttcttgca

SEQ ID NO: 604390 - DNA, 100 bp, Homo sapiens
aatatttgatgaaattcaccagtgaagccgtgacatcctgggatattctttgttgagagcaggcttatggctatgggccatacggtggtgcgtacccgcc

SEQ ID NO: 604391 - DNA, 76 bp, Homo sapiens
gaactcatgcagcagctgacggagttccagctctttgacctcatctaccgcgaggagacgctgttcaacgtcatca

SEQ ID NO: 604392 - DNA, 75 bp, Homo sapiens
gcatgtggagttcggaggaaaagggctcagacttaattcagtgcacaaatgagatgaatgtgaacatcccacagt

SEQ ID NO: 604393 - DNA, 75 bp, Homo sapiens
tcaagaatctcgtgctcaccggtttctcccacatcgacctggtcaattttgataaagatccaatggaaatgcgcc

SEQ ID NO: 604394 - DNA, 98 bp, Homo sapiens
tggagcagggagaggagctgtggataacgggaggtgaatttccatgtcaacatagtcctggagctgatggtacacacatggatggtgatcaaattgtt

SEQ ID NO: 604395 - DNA, 75 bp, Homo sapiens
gtcatcttcgattagctaataaccaactgcaattcctacctccagttttggcaagcgttctgcaggaagttttag

SEQ ID NO: 604396 - DNA, 74 bp, Homo sapiens
gtcaggaatggttcttcctcaggcaaagtgtttcatggatttcaaagctggaggcgccttatgtcacattcttg

SEQ ID NO: 604397 - DNA, 98 bp, Homo sapiens
ttcccgtccgacgaggatatcgtgtctggagcagtggagcccaaagacccctggagacatgatcatggaagggaagtggttgctgtgtatgttactgg

SEQ ID NO: 604398 - DNA, 75 bp, Homo sapiens
ccacgctgaggggctgggagccgcgcacaccaccatcacatataagcagctcaccatccaggtgctgctggacag

SEQ ID NO: 604399 - DNA, 74 bp, Homo sapiens
tctttgctgagcacatcagtgatgaatgcaagaggcgtttctataagaattgggtaattaaaaccatggaggcg

SEQ ID NO: 604400 - DNA, 74 bp, Homo sapiens
cctccagagaggctacggtggaatacaaatgagaaacaagccaacgacctggtggccacactgatgaggtgcac

SEQ ID NO: 604401 - DNA, 83 bp, Homo sapiens
gttgctgtcgcgccgctgctggttgctgtccctgtgtgccgtgcaggtgaagctggagctggggcaccgcgcccaggtgagga

SEQ ID NO: 604402 - DNA, 100 bp, Homo sapiens
gcctcgtgtctcatcctgttttgagcttcctgtaccgctggatatatgatggggagcttgaggacacttaccacgaagccatctgagtgaggatccccgg

SEQ ID NO: 604403 - DNA, 87 bp, Homo sapiens
acctcttgaggatcgaatcttcactcccgctgtctcagcagtctacagcacggtgtttcagtcacctccagtaacacgggcgtgcca

SEQ ID NO: 604404 - DNA, 103 bp, Homo sapiens
catgctgctcactagaaaaggggctgtgaactaaggctctcaaaataggctgctgcaaaagctggtatattgtccggttgctctctcagaatctcgcgtgtca

SEQ ID NO: 604405 - DNA, 82 bp, Homo sapiens
tttcgcaagtgacaggatttctttgcaccgagatcttggaccagacactcgacctcctgagaatagctattcagtcagacag

SEQ ID NO: 604406 - DNA, 83 bp, Homo sapiens
tgggaccggaggagacatcggcctctgcaggcttgccgaagaagggagggcagcgggtggcatgagacgtgggaacatgggcc

SEQ ID NO: 604407 - DNA, 126 bp, Homo sapiens
ccggagaactgtgcccattacttctgcctggactgcattgtcgaatggtccaaggtgctgaaggtcgccatcctggctgagaagtacgcggtggactacacctggtatgtggataccatcttgaac

SEQ ID NO: 604408 - DNA, 110 bp, Homo sapiens
tgctggccctcgggctgcgggagccgggctaggacgccgagcggtgactccccgccgctcccgggggccgtgacggtaagaatgattgatgttggctgatattggagtgc

SEQ ID NO: 604409 - DNA, 51 bp, Homo sapiens
gtgaccgagaccgcggccgggaccgagggagcccagcagccggggccgccc

SEQ ID NO: 604410 - DNA, 75 bp, Homo sapiens
gccggtaacaaacgagggttcccgggattggaccgacgcagccatgtgaatgatttgggaggggacttcaaagga

SEQ ID NO: 604411 - DNA, 75 bp, Homo sapiens
tcgctatggccccccatccaggcggtctgaaaacagagtggttgtctctgcaggaacgaatgcaggaatttggga

SEQ ID NO: 604412 - DNA, 100 bp, Homo sapiens
gggacttcggcggcggcgcctcaggcacctcggcccgggacttaaccaccaccatgtcgagcaaaagaacaaagaccaagaccaagaagcgccctcagcg

SEQ ID NO: 604413 - DNA, 82 bp, Homo sapiens
gcatgcctggggttacacctaaacagttctagctccgaaacaccctggattacagtctttgaagaagtaggagagccggtgg

SEQ ID NO: 604414 - DNA, 82 bp, Homo sapiens
ctgcttctgcttccaaaggagaaccgcagtgaaaggaatggcggcgctagatagtaaggcatcagggaagatgggaatgcga

SEQ ID NO: 604415 - DNA, 82 bp, Homo sapiens
gacgttgaagatgtcggccttctgagccgactgcggtggtcaagagctattcaggattatgaaactgctcaggaacacaatg

SEQ ID NO: 604416 - DNA, 74 bp, Homo sapiens
tgacacagtactagtttggataagtttagcaagacggtctggaaaatcccgaagcagaagcccgtattcatcta

SEQ ID NO: 604417 - DNA, 74 bp, Homo sapiens
agggaaccctggtcaccgtctcctcagagatggctccgaagtcaaaaaagaaggggcaccccgggagggagcag

SEQ ID NO: 604418 - DNA, 75 bp, Homo sapiens
tctcttcctttctcatgttttggctttggggctagggagaaattgtcgtaaatgaagtcaattttgtgagaaaat

SEQ ID NO: 604419 - DNA, 100 bp, Homo sapiens
ctcggctgagcggcggcggcggcaccaacggcaccaactattcgcggagctggaatgactggcaacccaggcaaacagtttcgaatctaaagattatctc

SEQ ID NO: 604420 - DNA, 82 bp, Homo sapiens
agaactcttaacggccgatgcagctcttccaaagctaaggttgaaatcacaaagattagacacctttttagataggtgttct

SEQ ID NO: 604421 - DNA, 101 bp, Homo sapiens
ctagtgttttcttatttagccggagtgagaagcaagaaggccctggacacagcaatatctctgggctttcacaggcagcacacttctgcttttgttccttc

SEQ ID NO: 604422 - DNA, 75 bp, Homo sapiens
gctggggatattacattaggaagtgttcatgatgatgattattctccaccgtctaagagaccaaaggccaatgag

SEQ ID NO: 604423 - DNA, 89 bp, Homo sapiens
gctgcagggctttttggctgccgagcaggacatccgagaggtaaacactcgataatctggataactgactagcaccattatgatcacca

SEQ ID NO: 604424 - DNA, 73 bp, Homo sapiens
acacaggtccatggaacaatcacagggttccgctatggaagtgatatagttcctttctctaaagtggatgagg

SEQ ID NO: 604425 - DNA, 100 bp, Homo sapiens
aggagataccattcaaagatgatccaagagatgagacctacaaaccccacttagaaaggtgtcattccacacatccacaaatctctgattgggaagaaag

SEQ ID NO: 604426 - DNA, 132 bp, Homo sapiens
cggcgcggagaatctgctgtcgcctgcagctgctcgcctgtctccgtcggaagggagcccaagctttgcagagatgctggcatcaccatctacatcaggtcagctgtctcagtttggggcaagtttatacgg

SEQ ID NO: 604427 - DNA, 75 bp, Homo sapiens
ctccccagccacgtggaactgatttggtgctatggagaaatttttggtagaatataagagtgcagtggagaagaa

SEQ ID NO: 604428 - DNA, 90 bp, Homo sapiens
cctttcttcctgttctttcacggaggatactggcagagcggaagtgtgttaacagggcacaaccattatgtgatgtgtgctcagttccac

SEQ ID NO: 604429 - DNA, 99 bp, Homo sapiens
cgcgtggaggagccggtgctgcagaaccagatccgggagcacgtcatcgccatcgaaggagctacagggagctggccgactgcacctggcacatggcgg

SEQ ID NO: 604430 - DNA, 131 bp, Homo sapiens
tcttgcagatcatcccgatgcacccatgtcccaggtgtatggagcgccacatctcctgagattatttgggcttatttcaaaacctttgtccctcagttccaggaggcagcatttgccaatggaaagctcta

SEQ ID NO: 604431 - DNA, 101 bp, Homo sapiens
cgaggggagcctgatcctatcgttttgacgccagactcagcccacctgcacccaggtgaaataaacagctttattgctcacacgaagcctgtttggtggtc

SEQ ID NO: 604432 - DNA, 82 bp, Homo sapiens
caattattaatgccttcgtgcttccaagaaatgggagattaacccttcagaactgacctttatgagggaattgggaagtgga

SEQ ID NO: 604433 - DNA, 80 bp, Homo sapiens
agcaactgaggcagcggcaggctcaggtgcagccgctgtttttcagaagaagtgaagtcaagatgaagaaccatttgctt

SEQ ID NO: 604434 - DNA, 90 bp, Homo sapiens
tattcctgtccggagacagcctaaggacctgtgcaacagacctgcagaccaaagctgaccgattggcacagatgagcatatgttcttcat

SEQ ID NO: 604435 - DNA, 100 bp, Homo sapiens
gtgctagagacagccaacaaaatattcatggttcttgagttttgccccacaaaagctgaggcccggaggagtgctgcaaagattgcgctaatgaattctg

SEQ ID NO: 604436 - DNA, 82 bp, Homo sapiens
cgctcgctgggagagaggtacctctccttttccctctccctttccctaagtcttcccaagggattgttgaagaaacttctga

SEQ ID NO: 604437 - DNA, 100 bp, Homo sapiens
gaaggaaacgggactaaactggcgggctccgtggaagcgtggccggcagcgtcccggacgaggagggttggggtctgctaggtccccggaatgagttgtt

SEQ ID NO: 604438 - DNA, 100 bp, Homo sapiens
cgcagcctcttcgagcgccgcggacgcgtcatcgagtgtgacgtggtgaaagagacacctatggctgccgatgaaggctcagcagagaaacaggcaggag

SEQ ID NO: 604439 - DNA, 100 bp, Homo sapiens
tgacagaattgactataacgttgaacagtcctgtatcaaaactgaagatggtttgaaacagcttcacaagatcctgaggaggatgaaggggctggccctg

SEQ ID NO: 604440 - DNA, 121 bp, Homo sapiens
gggcggctctgcgctggccgggggcgcgggcggcggcgccggcaggaaggaagatttcgatgtcgatcattttgtgtctgactgtaggaagcgggtccagctggaagaactgagagatgac

SEQ ID NO: 604441 - DNA, 101 bp, Homo sapiens
ggctgagtttgcggagaggtcagtaactaaattggagaaaagcattgatgacttagaaggccgaatacatcaagcaatggtaacatctttaaatgaagata

SEQ ID NO: 604442 - DNA, 85 bp, Homo sapiens
ggtgaatgtgtccctggggagcaggaaccagagcccatcttaatcccgaggctgacccgcggctgattgagtccctctcccagat

SEQ ID NO: 604443 - DNA, 100 bp, Homo sapiens
cccagttctacctggctgagatggtgctggccatccactcgctgcaccagctgggttatgtccacagcccagctggtcctgtccttcctgcaccttcatc

SEQ ID NO: 604444 - DNA, 50 bp, Homo sapiens
gctaccttgagccaggagggcctccagcagggtgcgtgaacgcagtgaac

SEQ ID NO: 604445 - DNA, 76 bp, Homo sapiens
tcatatgctaggccactatacagatgagtgaacaaccaaggcgatgggctgtaggatgttgatacatctgaggggc

SEQ ID NO: 604446 - DNA, 100 bp, Homo sapiens
gccatggagtccatccagggtggcgccgcgcgcggggaggccatcgaatcggatgacacgtgggcaaacgcagaggcgggaacaaactagccctcaagac

SEQ ID NO: 604447 - DNA, 100 bp, Homo sapiens
tcgaatctcttctccctccccttcttgattgtaaaccatggctgtgtggatacaagctcagcagctccaaggagaagcccttcatcagatgcaagcgtta

SEQ ID NO: 604448 - DNA, 100 bp, Homo sapiens
ctcggtctgggcttctctgaggcggcgagagatggtcaggtctggagctcgaccgggccagccttacccctcgtgaattcaactcttacggagctcgaag

SEQ ID NO: 604449 - DNA, 100 bp, Homo sapiens
gggatgtgtatgaccttcacctcattaacaattgtgaataagtggaatacagctctcattggccttatgacatactttcgggaggctgtggtgaacaccc

SEQ ID NO: 604450 - DNA, 109 bp, Homo sapiens
ccgggagagggggagtgcgcggcggccgcagctgccacaaaccaggtactccaaagattcaggtttactcacgtcatccagcagagaatggaaagtcaaatttcctgaa

SEQ ID NO: 604451 - DNA, 100 bp, Homo sapiens
tcagttttagattttggaatacaacgttatgaagaggacatgtactggaggagaatggaggaagaacaacatcattgggatgatcgccgccgaatgccag

SEQ ID NO: 604452 - DNA, 100 bp, Homo sapiens
caggaatgtccagcttgttaccggctggtaaaggataaggcactacctggcagcaccatctaaacctgtatcatctgctgtggtcccagttactcaggag

SEQ ID NO: 604453 - DNA, 100 bp, Homo sapiens
ctcaaagggcggcgcatcagcaagctgcggccagagttcgtcatcatggacccgcggacagatagcaaaccaggcaggggaaatggaaggtgatgcagtc

SEQ ID NO: 604454 - DNA, 90 bp, Homo sapiens
aaggacacaaatagatgtaggcagaatacctttacagaggttaaaattgatccagtttgctgaccagaagcaagaattcaacaaacgtcc

SEQ ID NO: 604455 - DNA, 86 bp, Homo sapiens
ccactccgtcccccgcgggtctgctctgtgtgccatggacggcttcggaaccaaaaagaagcttcccagagccggggccaggagcc

SEQ ID NO: 604456 - DNA, 124 bp, Homo sapiens
accctggagcctcagttggaagcagccgatccagcctgcggagcctgtggggcagggaaatcctcattgacgattcaatttgttgaaggccaatttgtggactcctacgatccaaccatagaaa

SEQ ID NO: 604457 - DNA, 82 bp, Homo sapiens
cattgtctcggacgtgcggggcctgggcctcccggtccgcaagcaggtgagaagccctaccactgcaactgggacggctgcg

SEQ ID NO: 604458 - DNA, 100 bp, Homo sapiens
actcgccgcttttctacatcgcggtggtctttacctgcttcatcgtgaccaccggcctggtattgggatggagctggaggctcgggtgccagaaggtcag

SEQ ID NO: 604459 - DNA, 90 bp, Homo sapiens
ggactgcctcactgagcaaccaagaggtcatcacactgaaacggtgttcaaccgggttttgccagggcctattgcaccagagagcagcaa

SEQ ID NO: 604460 - DNA, 83 bp, Homo sapiens
gtctgatgatgagaacacagccacgcttacggcttgaagtagaaaatgccatgatgagaaaaactattaaaaaacaggatgac

SEQ ID NO: 604461 - DNA, 100 bp, Homo sapiens
cttccagctgtttgaccgaacaggaccctcaggggcggcacgtaaaaacctatgaggtgtctctccgagaaaaggaattcaataagggcccttggaaaca

SEQ ID NO: 604462 - DNA, 80 bp, Homo sapiens
cctccatgcgcagtcatgagtcgcttcaagtttatcggaactgtggctgcaccatctgtcttcatcttcccgccatctga

SEQ ID NO: 604463 - DNA, 99 bp, Homo sapiens
cgagtgggagggccaggacagcgacagcgatcagctgttttacaccaagatcttcttggacccggagaagagggtcagaatggcggcagcggagcatcg

SEQ ID NO: 604464 - DNA, 76 bp, Homo sapiens
gttcaatggccagctgctatttgatagaccaatgcacgtcaagatggctcagcttgtcaatcggaaacagaaatta

SEQ ID NO: 604465 - DNA, 100 bp, Homo sapiens
ccctgccagaccccagtccaccatgatccatctgggtcacatcctcttcctgcttttgctcccagctttaatgaagcaccagttgagattcccagtcctt

SEQ ID NO: 604466 - DNA, 83 bp, Homo sapiens
cagatggcagtgaagatctggagcctctggcaggaggaagcccagaagcaacaagccctggctggagtgcaatggcacaatct

SEQ ID NO: 604467 - DNA, 74 bp, Homo sapiens
ctgatgtcaatcttgagggctagcaagggcaagtattttgtaaccttcccatatccatatatgaatggacgcct

SEQ ID NO: 604468 - DNA, 100 bp, Homo sapiens
aggaaagtgtgtgggaggcgttgacctgccccttgtcctggccccggctttttcttctggggtggatctttccatggcttctccaaagctggtgacttcc

SEQ ID NO: 604469 - DNA, 100 bp, Homo sapiens
ggaagactcatcggagcgtgtggatttgagccgccgcattttttaaccctagatctcgtgcgaggacgacgggcagacgttcttcagcctagatgacggg

SEQ ID NO: 604470 - DNA, 100 bp, Homo sapiens
ggtggtcggatttcaccacaagaagggctgccaggatttaagtgccctgtatgctcaaaatttgtatcctcagatgaaatggatttgcatcttgtaatgt

SEQ ID NO: 604471 - DNA, 98 bp, Homo sapiens
gccggcaccacgagagcccggcccgcctgtgtggacggtgctggagaatctggtaaaagcaccattgtgaagcagatgaggatcctgcatgttaatgg

SEQ ID NO: 604472 - DNA, 115 bp, Homo sapiens
taagccgcggagctaattggagatggtttcacagcacgcagtggcttcgggatcatgattctggaaggaggtggtgtaatgaatctcaaccccggcaacaacctccttcaccagc

SEQ ID NO: 604473 - DNA, 100 bp, Homo sapiens
gcgggggcgtccccaggagccggacagacccggcactacgtgggctcagcagctgcttttgcagggacaccagagcatggacaattccaaggcagtcctg

SEQ ID NO: 604474 - DNA, 74 bp, Homo sapiens
acagcccaaatatcctcggaagagcgctcccaggagaaacaaagccccccaagatgaacccagtggtggagcca

SEQ ID NO: 604475 - DNA, 75 bp, Homo sapiens
ggcatgggcatgtacaacaccgacgagcatcgccctgagcaactggtggtttgtggcccacctgacagacctgct

SEQ ID NO: 604476 - DNA, 100 bp, Homo sapiens
cttttggaaatggcgggtgaaattacagagaccggggaactctactcttcctacgtgctccttgtcttctgagatgttgggcccctcttgggatggagat

SEQ ID NO: 604477 - DNA, 111 bp, Homo sapiens
ctctgttgttttcacaaggcaaaatgtatggttatgtggataccttacttactatgttagccatgcttttaaagttgctcgataatgtggaaaataagatgaaaggcacct

SEQ ID NO: 604478 - DNA, 90 bp, Homo sapiens
ccctctaaatatggaggagcctcccgtggaggaaccgttggtgttggtattaggagatctgcacatcccacaccggtgcaacagtttgcc

SEQ ID NO: 604479 - DNA, 75 bp, Homo sapiens
tttgcactgtaaaactttacacattgtgctattcactctgctttacaaggtaccaaccaagaagctgaagaaata

SEQ ID NO: 604480 - DNA, 100 bp, Homo sapiens
ttccagtgactagtaatggagaagttgatgactctcgtgaacatagctttaatagggtgtttgatcagtatgtaaagaccagggcagaggaagaacgcag

SEQ ID NO: 604481 - DNA, 83 bp, Homo sapiens
cacgatcggcgcccgcctgaaccgagtagaagacaagacatgcaagaaagcacttcagccaagcagaagggagccagctggac

SEQ ID NO: 604482 - DNA, 116 bp, Homo sapiens
tgtgaaactcataggagttcccgctgacgctgaggccttaagtgaaagaagtggaaacacccctaactctcccagttggggaatggcggtcaatgtgtattctacctcgataaccc

SEQ ID NO: 604483 - DNA, 50 bp, Homo sapiens
aagggacagactccggttcactgagggttttaaaatcaaagatgggaaaa

SEQ ID NO: 604484 - DNA, 100 bp, Homo sapiens
cggagcgcaggcctcgtgccgttacggccatcacggcggccgcagtggcgtcctggagccctcctcaggtgattttcttccacccccacctccacctcta

SEQ ID NO: 604485 - DNA, 83 bp, Homo sapiens
gaagagcagagcggagggagccccagacacgaagttttcatgggctgagctgctgagttcagcctgggaactgaggccaacaa

SEQ ID NO: 604486 - DNA, 90 bp, Homo sapiens
gaagctgctgagcaagcccccgttccgctacctgcacgacatcatcacggagggttgtgagtcccggcccagcccctccacccccctgcc

SEQ ID NO: 604487 - DNA, 100 bp, Homo sapiens
aggcaaccatgtgaagaagaacaagcctgcagctcattttctgcctaaaccactgaaagatgggcttccccaaggatttattgacattgctacttgagtg

SEQ ID NO: 604488 - DNA, 75 bp, Homo sapiens
atctccccgacaaacaccacgagaattccgcagcccacacggacagagcgggatgccaccagcttgtccaaaggg

SEQ ID NO: 604489 - DNA, 97 bp, Homo sapiens
ctcccaagcctcccagtgcaccttctaggagacaagcaagccgacatcggcctggctgcctggggacgcaaggccctggacattgctgagaacgaga

SEQ ID NO: 604490 - DNA, 82 bp, Homo sapiens
aacattcccaacagccaccaccaccaccagatggcccgctacaacttcatccgaagcatggccgcctacagcctcctgctgt

SEQ ID NO: 604491 - DNA, 97 bp, Homo sapiens
tcatagtcaactgcgtggaagagaaggtcaacgtattgaaacttactgttgaagacttggagaaagagagggatttctacttcggaaagctacggaa

SEQ ID NO: 604492 - DNA, 50 bp, Homo sapiens
tcctgctggtcagcactgcggctggtgtttcagggacaattggattgttt

SEQ ID NO: 604493 - DNA, 75 bp, Homo sapiens
cccacgtccacacctactcctcctcaggtctggtccatcgaactcatatgtcatcctgtcgggtggataagccct

SEQ ID NO: 604494 - DNA, 100 bp, Homo sapiens
cgcggcgcggcgggaccatggagctcagagcgcagccccggcgccggcggcgggaccgcggaccgaggatggcattccctgtggatatgctggaaaattg

SEQ ID NO: 604495 - DNA, 96 bp, Homo sapiens
gatgaagattcaccaaataagctatatactttggttacctatgtacctgttaccactttcaaaaaattcagacctaccttcagtcaacaaagccaa

SEQ ID NO: 604496 - DNA, 50 bp, Homo sapiens
cggcgacctcatccacgccatgccagggtatttgaagtataccatacaac

SEQ ID NO: 604497 - DNA, 75 bp, Homo sapiens
gaatacccactttgctgtggtcacagtggagaaggaactgtacacttgggtggaattactcaaggtgatgaggac

SEQ ID NO: 604498 - DNA, 83 bp, Homo sapiens
actgtggaagtcattaggaacaatggtgcaaggttgaaaactaagcatggggaagagctgcaaggtggtcgtgtgtggccagg

SEQ ID NO: 604499 - DNA, 112 bp, Homo sapiens
cggcctgcagcacccgccaccgtcgccggccgcccgcacgtccgtccgctgatggtgagaccattctaaaaggcctccagtccattttccaggagcaggggatggcggagtc

SEQ ID NO: 604500 - DNA, 82 bp, Homo sapiens
cggcagccgaggccgcgaactgcatcatggagaggctgggaggcggcagaatgcagccagaggagggcacaggctggctgct

SEQ ID NO: 604501 - DNA, 82 bp, Homo sapiens
ctttgactggaacatgctgaaattcgtgtccctggccagtgtccttccacctgtccacaagcatggggaacatcttcgccaa

SEQ ID NO: 604502 - DNA, 83 bp, Homo sapiens
cacggactgcaagcgaggcacttgctaactcttgggctaccggctctctgaccagttccacgacatcctcattcgaaagtttg

SEQ ID NO: 604503 - DNA, 98 bp, Homo sapiens
aggtgttaccggaacggcggcgacaagggtgttcccgaactagagtgggaactcgaatcatttatgacagaaagtttctgttggatcgtcgcaattct

SEQ ID NO: 604504 - DNA, 100 bp, Homo sapiens
gcctatccgtcattgagacttattcatgctgtcagaggctggaatagtcaaatgatttcagttcgtgaagccaaagccattccaaggcctgatggtattg

SEQ ID NO: 604505 - DNA, 100 bp, Homo sapiens
gaggagacccttctacgcctggttacccaagtgtcggtgtcatggagaaactccagctgggcccagagattctgcagcgggaaaatccaaggcttattta

SEQ ID NO: 604506 - DNA, 74 bp, Homo sapiens
ttcatttagagctgcggaacaggacgccctctgatgtatccgttacagcactgatgtgagtgtagatgaagtaa

SEQ ID NO: 604507 - DNA, 75 bp, Homo sapiens
cccagaggtcgtggaggtggccgtggaggcagaggtggcatggggctgctttgctggctctgcaagaaaatggac

SEQ ID NO: 604508 - DNA, 75 bp, Homo sapiens
tagataacaggatcatttcatctaagttttgtccatcaactaaaggcacaaacagatacctcacttctactggtg

SEQ ID NO: 604509 - DNA, 98 bp, Homo sapiens
ggctctccgccgtccccagccctgcctctccctgggctctgcaagtgcagccgcggagccctgtacacaggcttttccatcctggtgactctgctcct

SEQ ID NO: 604510 - DNA, 100 bp, Homo sapiens
cgataacacaagtgcagcctccagctagcactggacagagggccaagatgggtcgccgagctcaacaggagtcagcgcaggccgagaatcacctcaatgg

SEQ ID NO: 604511 - DNA, 75 bp, Homo sapiens
agaatagagccataaagaaagcaaagcgcagaaatgttggatttgaagtgaagcatatatgcgtttaagcaaact

SEQ ID NO: 604512 - DNA, 75 bp, Homo sapiens
caacggctccccgtcgtcctggtgctgcagcggagctgagagaagataatatcattttaattgaaaccaaggcca

SEQ ID NO: 604513 - DNA, 100 bp, Homo sapiens
agatcggcggagaccctcgaagtgcgcaaacttgacactcaccctgaccgactgtgaaattattcgatgacatgatgtatgaattaaccagtcaagccag

SEQ ID NO: 604514 - DNA, 75 bp, Homo sapiens
ggactggagtggtttgtctgtgatggctggaagttcctctgtaccaggttaattggactcctgagattaacaaag

SEQ ID NO: 604515 - DNA, 48 bp, Homo sapiens
ctgccgctaaagcagccaaatatggtacaggtttgcagattccgccag

SEQ ID NO: 604516 - DNA, 100 bp, Homo sapiens
cggacagcgaggacagcaacttttccgaggaggaggacagcgagcgcagcagtgacggcgaggaggccgagcactatggagatgaccgccatggccacgg

SEQ ID NO: 604517 - DNA, 100 bp, Homo sapiens
gctgggccgaccccagagcggcgctggacagacttcagctacgggacggacgagtacgacggagaggggaatgaggagcagaaggggcccccggagggct

SEQ ID NO: 604518 - DNA, 122 bp, Homo sapiens
aactttcggcccgacgaccccacccgcaaaaccaaagccctgctgcagttggatggcaagcatgtggtgtttggcaaagtgaaagaaggcatgaatattgtggaggccatggagcgctttgg

SEQ ID NO: 604519 - DNA, 100 bp, Homo sapiens
gttcgtcgcctccttgcccgtgaccgtcgctagaactcagttgtgcgttgcggccagtcgccactgctctatacctgcaggcccgcttcacttggcgagg

SEQ ID NO: 604520 - DNA, 101 bp, Homo sapiens
tttcttattgcagcaaaaattcccgtaccaatgtcagtgctaggacagaccatggattcttacagtgcaccagagtcaactcctagtgcatcctcaagacc

SEQ ID NO: 604521 - DNA, 80 bp, Homo sapiens
cgctgcgggcccgggccatggccgccgccgatgccgagcacaggaagtcctggagaacctgaaggaccgctggtaccagg

SEQ ID NO: 604522 - DNA, 96 bp, Homo sapiens
ccctctttaagacgaattaaagggagattacacagaagcaaaagccttgatagcatggatttctgtgagctcactatggtgtctcgttctgtcacc

SEQ ID NO: 604523 - DNA, 100 bp, Homo sapiens
cccacactggcggccacggagcagagtccctcacccccaccagctgtagctgaacgtctggatggtggagaagagcaggaatgggtccctattatccagc

SEQ ID NO: 604524 - DNA, 99 bp, Homo sapiens
aagtcaagttcataaagaatgtatgaaggttctcaacttgaaacgttatcctgaatacatgtctaacaattttccttgcaacgttagctgttgtttttc

SEQ ID NO: 604525 - DNA, 105 bp, Homo sapiens
atcaaaggagcagggaagaaggaatcatcgaggcatgggggtccacactgcaatgtttttgtggaacatgtaggtaaccagttaggggccttggtacatcaaagg

SEQ ID NO: 604526 - DNA, 100 bp, Homo sapiens
aggcctccccagccacatggaactgtttaatacaacatggaagccaccaaggcttacagaatgtgctttccagagctgtgacctgaactgtacctggggc

SEQ ID NO: 604527 - DNA, 100 bp, Homo sapiens
ctcggctcctgtcgtccgttctctcaggctcccgttcaggtatggacctgtctgccaatcaggacgaggagaccgaccaggagaccttccagctggagat

SEQ ID NO: 604528 - DNA, 100 bp, Homo sapiens
gctctccagtttggggtgtctacttctctgtggaagtattacactagccctgggaaatgcacagaaattgccaaaagattggatttgtcctgtatccccc

SEQ ID NO: 604529 - DNA, 90 bp, Homo sapiens
ctgaacccccactggaacgagaccttcctctttgaaggctaaagtcatcattggactggcctttgactgcgtggacaagatggtttactg

SEQ ID NO: 604530 - DNA, 101 bp, Homo sapiens
ccaagagccattgaatatgttaagcaatggtacaacagctccatgaacgtgatctgcacctggttgacggaccggatggacttacagcttcatatttatca

SEQ ID NO: 604531 - DNA, 100 bp, Homo sapiens
ggggaccctgactgccctgatgattcagacgagtctttagatacctcttgtacctccttttaaacctcaagtaacatctgagacagatactagatatttt

SEQ ID NO: 604532 - DNA, 87 bp, Homo sapiens
aagaggacgagggggccaaggcttcctccgggaacccttcttcttggcgagaccacgatgatgcaacctcaacccactcagcaggca

SEQ ID NO: 604533 - DNA, 82 bp, Homo sapiens
cggctttgaggccagcaccgacgcagccctggaggtactccaaagattcaggtttactcacgtcatccagcagagaatggaa

SEQ ID NO: 604534 - DNA, 87 bp, Homo sapiens
gaagagctatggtgaaacaccactgaagcattgccaaggtgatgggcagaggcttcagtgtccccttcgcctccgcaggagaggaga

SEQ ID NO: 604535 - DNA, 100 bp, Homo sapiens
agcgcgggcgcggccggagaccgtggggcccccggttgccgccccctcgggtacatgtcccagagcaagcacacggaggcccgggagctcatgtactcgg

SEQ ID NO: 604536 - DNA, 101 bp, Homo sapiens
gcattttccgcagaggcctggtcaaggtggctcagaccacagtgatgtcttggcattgcccattttcaagcaggaagattccagccttccattggatggtg

SEQ ID NO: 604537 - DNA, 100 bp, Homo sapiens
caggccctctattgccaactgttaaatggcttggctggaggacaagcaaattgaggacattggcaacggagtgatcaaaatgatagatcatgaggcctaa

SEQ ID NO: 604538 - DNA, 83 bp, Homo sapiens
atgccggcgacggttgtgtcgcaggtggaagttaaacgagctgagcctcgggacagcaagagccaagcgccgggacagccagg

SEQ ID NO: 604539 - DNA, 90 bp, Homo sapiens
cttcagggtttccaccgttcgttcaagtgttatccaagataaattctgtgggattataaacatttcagtagaaggcctgcatgatgtcat

SEQ ID NO: 604540 - DNA, 75 bp, Homo sapiens
tcctgcaggggctgctcggcgtcgtggccttcagcacgttaatgcatgccttcaattaagttgcagagttctgat

SEQ ID NO: 604541 - DNA, 75 bp, Homo sapiens
ctgggttctggactttgggcgtcccattgccatgccttcatctcctcgtcctccaggcagcacaagccattgtgg

SEQ ID NO: 604542 - DNA, 74 bp, Homo sapiens
gcctggcgcgctccaaaggcttccgcgtccttgacgcctgcaggccctagactggagctggttacagacggaag

SEQ ID NO: 604543 - DNA, 126 bp, Homo sapiens
ggagatctctctcatctcgctcggctgcgggaaatcgggctgaagcgactgagtccgcgatggagactgctgagaaggaagaatttgaacatcaacagaaagagctggagaaagtttgcaacccca

SEQ ID NO: 604544 - DNA, 90 bp, Homo sapiens
ggttgggctgccgtgctgctcggcggcgctgagcaaagagagcaggatgaatggacagtaccagcagcccacggacagtctcaacaatga

SEQ ID NO: 604545 - DNA, 74 bp, Homo sapiens
caagaactgtaatacttctggaatccagacagaatgctgccactgcagagccccgccatggaagacacgccgtt

SEQ ID NO: 604546 - DNA, 75 bp, Homo sapiens
agacaacagagtcattgatcttagggtccctccggatcacctggcctgaacggcttgcatggattgaaaggtcag

SEQ ID NO: 604547 - DNA, 82 bp, Homo sapiens
gccgccgcccgcgaagccggagctcgagccgcagcggggtgaggtggctttgaccccgggttgcccggccagcacgaccgag

SEQ ID NO: 604548 - DNA, 83 bp, Homo sapiens
ccaggaagcgcgcaagacgtccgccgcagcctggtggagttgacagaagagatcctgaagctgctgatggaactggtcttccg

SEQ ID NO: 604549 - DNA, 83 bp, Homo sapiens
acgagctccgcaatgaagacgtgcaggttccttcaatggtgccttagctgctgttcctgtccaggacctgggctccactgtca

SEQ ID NO: 604550 - DNA, 51 bp, Homo sapiens
tgatgacctcaccggatttttacagttactaaaagatgtaactgaactgca

SEQ ID NO: 604551 - DNA, 83 bp, Homo sapiens
ggcagattcctccgggcagcagggtgcccgtggttgacacgagctgtgtccccagctgttcccgtctacaatggcatcatctt

SEQ ID NO: 604552 - DNA, 51 bp, Homo sapiens
ctgggcgtggcggccgggatgacccacagggcctgctttcttccccgggcg

SEQ ID NO: 604553 - DNA, 101 bp, Homo sapiens
gaaggggcgtctgcggctctccgccgtccccagccctgcctctccctgggctctggtgctttactccatgaactgtctaatgacggtgctcataagcagtt

SEQ ID NO: 604554 - DNA, 50 bp, Homo sapiens
gattccaagtaactcttatttgtgtgtttcctgtaacaaatcgttcaaga

SEQ ID NO: 604555 - DNA, 98 bp, Homo sapiens
ccactgtctgctcaggcttccaaagctacaacctgccagcctatgctccatacctgccctgcgagccccactgcaggccccaccatggcgccgttcct

SEQ ID NO: 604556 - DNA, 83 bp, Homo sapiens
gatgacggccatcttcccccgagacatctgaacagctgacccctgaggaagaggctgaggagacagaggcctgggccaagcct

SEQ ID NO: 604557 - DNA, 99 bp, Homo sapiens
aaactatggctaaattacatattccagtaatggtggatgaagttgttcattgtttgtcaccacaaaaaggacagatctatttaggtccacctgaggaaa

SEQ ID NO: 604558 - DNA, 75 bp, Homo sapiens
ccaaaaccaaaaccacctccaaacagccattaagaagcctgtgggaaagacaaaggaggaactggctttggagaa

SEQ ID NO: 604559 - DNA, 50 bp, Homo sapiens
gagacatcccgatctggggaatgcctccggagccagcgtggtggccatag

SEQ ID NO: 604560 - DNA, 100 bp, Homo sapiens
ccgccatgggctactcagtttacagccactgcagtatcacagccaggtacttgtcttgggccttagacacaaatcaggaagaacgagacaagggtaaaac

SEQ ID NO: 604561 - DNA, 100 bp, Homo sapiens
gcggacggaggcatattcgtgtggattcagtacgagggcaggtggtctgtggagctggtcaacgaccgcggggcgcagtagagacggggtttcgccgtgt

SEQ ID NO: 604562 - DNA, 76 bp, Homo sapiens
atgtcctctgaaaactcgggaatttgtcactgaaatggtgacaggagtccagttacaacacagggatcacaacaaa

SEQ ID NO: 604563 - DNA, 100 bp, Homo sapiens
gccggagttccttgtggccgacgtgcaccaagaccccatgccacagctggatgtgactgaggccaacaaggagttcatggaacagagtgaggagctgtat

SEQ ID NO: 604564 - DNA, 100 bp, Homo sapiens
gtaaacggggctgctggtgggccgcgtcgaagacatggaccagggctacggagggatgtttcagcagcccctgagaaggaagaggaggaagctgagggcc

SEQ ID NO: 604565 - DNA, 74 bp, Homo sapiens
cgacttgtgcacacatgtagagacctttgtatgttctgaagatgaaacaagaatagatatgcaatatcctgctc

SEQ ID NO: 604566 - DNA, 100 bp, Homo sapiens
ctttgctcttccatccgcctttgatcgtcttcctcttcagccatccagggactgttgacatttagggatgtggccatagaattctctctggaggagtggc

SEQ ID NO: 604567 - DNA, 82 bp, Homo sapiens
gtatgccggaagctggttttcaggccacaaatgctttcacaggtgagaagccctaccactgcaactgggacggctgcggctg

SEQ ID NO: 604568 - DNA, 82 bp, Homo sapiens
cgggcgccgaccaggcctggctcgcgcctctcccaggacccgcctggctgcgagatatgttaatttggagtggcccctggag

SEQ ID NO: 604569 - DNA, 96 bp, Homo sapiens
agctgaaaaagggagtcaaagggggcctggtcactgtagaagatgagcaggcgtggatggcatcttataaatatgtaggtgctaccactaatatcc

SEQ ID NO: 604570 - DNA, 98 bp, Homo sapiens
gggaggagcctgttcccctgagtgctggtcccaaaggcgataacatctatgaatggagatcaaccattctagggcctccaggatccgtgtatgagggt

SEQ ID NO: 604571 - DNA, 99 bp, Homo sapiens
taccactcacactgtacttccagggagacaccgattataagaagagaaactcagcgctggggaagaagagagctgtagtacacatggatgaacgacgag

SEQ ID NO: 604572 - DNA, 83 bp, Homo sapiens
ccagtcgacactctcgcgcccggagcaccaatagctgcaggaactggcccaaatttttctctctcagatttggaaagttcttc

SEQ ID NO: 604573 - DNA, 82 bp, Homo sapiens
gaaaagactcaggacggacaagcacagtcttcggaagatgtccggcaggataatgctgctggcagagctggctccagtagcc

SEQ ID NO: 604574 - DNA, 74 bp, Homo sapiens
cttttccccagaggcgtcggaatggacctgtgccacccagggccgtgggcaagacctgccttctcatcagctac

SEQ ID NO: 604575 - DNA, 74 bp, Homo sapiens
gttgctgcgggggattgtgggagtctccgcgtcccgctcgctgggagagagtgagcaggggtgagcgcagccac

SEQ ID NO: 604576 - DNA, 115 bp, Homo sapiens
cccgcgtccccgcccagcctgctcctatgcggtacttgaaggatggcgaagaggtcgcgcaggagaggagaggcagcagcatggcgagtgtcctgtcccgacgccttggaaagcg

SEQ ID NO: 604577 - DNA, 100 bp, Homo sapiens
tttggccggctatggagcttaccgtgtctccaatgacaaacgagatgtaaaagtgtcactgtgtgaaatgacaatggatgctctgttggctcgattgaaa

SEQ ID NO: 604578 - DNA, 50 bp, Homo sapiens
actgcagcctatggccactttggtatagactatgtgatacctaaaacagg

SEQ ID NO: 604579 - DNA, 83 bp, Homo sapiens
agtcacctgcaaggatattcaacgcatccccagcttaccgcccagtacgcagactctgagtgagctgagtcgacagaaacttc

SEQ ID NO: 604580 - DNA, 98 bp, Homo sapiens
gagattcaagatctgggtgccatcattttctggttctgttgatgaccctcttccaggttggggtgactcagtgggaacgccatctgagcggggcatga

SEQ ID NO: 604581 - DNA, 76 bp, Homo sapiens
attctgactgacaactgcctttactactttgagtataccacggttcagcttgttggtttagatgaggagagttcag

SEQ ID NO: 604582 - DNA, 100 bp, Homo sapiens
ttcaaggcaagaccgaattcagaaggatatcgacgtcgtgatccagaagtccagagctgaggactgcctgtttgcagcccgtgatgctgatgagcgagag

SEQ ID NO: 604583 - DNA, 82 bp, Homo sapiens
aaggaggtcctgccgtccatgcggaagatcgtcgccacctggatgctggagggagtaccctgacttctaccggaagctctac

SEQ ID NO: 604584 - DNA, 90 bp, Homo sapiens
gacgcaagatggcagccaccacgggctcggattccagaattctctgatggtttctggactgggtcccagctggcgtgctggacgaattcg

SEQ ID NO: 604585 - DNA, 90 bp, Homo sapiens
ggaccatctaatggctatgggagatggttactcctggatggagcacctctgatagcaatccacaaagccaggtattacaagaggaaagat

SEQ ID NO: 604586 - DNA, 100 bp, Homo sapiens
actttagtacagtcgccaactgatgtctacagcactagggcgcaagagaagccgtactggaatattacactactcagcacaagacaggtttaatcttttt

SEQ ID NO: 604587 - DNA, 100 bp, Homo sapiens
cacataccaaattggatctatccagatatgtcttctccgactactatgaagaagcctgaaaagccattgttcagctctgcatctccacaggattcttccc

SEQ ID NO: 604588 - DNA, 100 bp, Homo sapiens
atacctgataagccacggcatatccagatgaaactagccagactggaatttgagtctttggaggcactcaagcagcaggacatgaacaagctgagtggag

SEQ ID NO: 604589 - DNA, 98 bp, Homo sapiens
agtggccctacatgattgtaatggagatgtgaacaaagctatcaatatattgctggaagggaattcagacacagatagaatttttgcggcatttgaag

SEQ ID NO: 604590 - DNA, 76 bp, Homo sapiens
ttcttgaactggtgctgtctgggcttcatagcattcgcctactccgtgaaggtcgcaatggaagaagagatcgccg

SEQ ID NO: 604591 - DNA, 50 bp, Homo sapiens
cgaggatcaggaaaaactatggctctcgaacagtgtggcctgatgaaact

SEQ ID NO: 604592 - DNA, 74 bp, Homo sapiens
accaccaaatgttgacctgacgaaattccacaaaacctcttctggaaacaagcagcccgacggccatggaggct

SEQ ID NO: 604593 - DNA, 90 bp, Homo sapiens
ttttggggtagtgtctgggatccagtacgagttgaatcattgttcaaataagttgctctaggtcgtaaccagcctttgaaaaaggagaaa

SEQ ID NO: 604594 - DNA, 90 bp, Homo sapiens
gcagctttgcattttgccccctcatcatgtgaatgttcttcccccacttcatattaaaacaggtcgtggtggccgagttggaacccacgg

SEQ ID NO: 604595 - DNA, 75 bp, Homo sapiens
ttccatcctggaggaaggacccaccaagagctgacacccctatcagagctgtcacaagatgaaggtagaggcaca

SEQ ID NO: 604596 - DNA, 82 bp, Homo sapiens
ccagctgtgcggagctaggacgcggaacatcccagaggccagcatcaacatgaggaggacttcatccaacccagcagccgag

SEQ ID NO: 604597 - DNA, 74 bp, Homo sapiens
gtcctctttggcaatgttttcttggacggcttctttcatcgagacttaaagcctgagaacctcctctgcatggg

SEQ ID NO: 604598 - DNA, 74 bp, Homo sapiens
aggatcaagtggtggaaggcttgcaaggcacttcaaaaaacgtatcagaagatacttcgagaaaaagaaagtgc

SEQ ID NO: 604599 - DNA, 75 bp, Homo sapiens
ttgaagaggaaatgaagggtattgccgctgttactgatatacctttagcatgaactggaaaatattgaacctact

SEQ ID NO: 604600 - DNA, 100 bp, Homo sapiens
atcacccacgctctgacctctgacagccagctaaaggtgtggatgagcaaatacggctggagtgccgacgagtcggggcagatcttcatctgtagccaag

SEQ ID NO: 604601 - DNA, 75 bp, Homo sapiens
gagctgcatcatgaattcaggagcatcgcatgcttcccaagagccaagtgacagatacacttgccaaagaaggtc

SEQ ID NO: 604602 - DNA, 100 bp, Homo sapiens
aggggatgcagttatgggctctgtcgccgtgggtgataaagtcatcccactcgctattcctcagtgtggaaaatgcagaatttgtaaaaacccggagagc

SEQ ID NO: 604603 - DNA, 75 bp, Homo sapiens
agttcgagcagatcgacaagtccgggagctgggcggccatttaccagggagactgccagactcgggaggaggcag

SEQ ID NO: 604604 - DNA, 83 bp, Homo sapiens
gcccgagcagtctggctgcggcggcagagctgaagtgagcggagccaccaggtgcgcgcggagccatggttatcatgtcggag

SEQ ID NO: 604605 - DNA, 100 bp, Homo sapiens
ctcaaacatccagcctatctgcatccctcaggagaatttccaggtggaagcaccaaagagtactcagtggtgcttggcacctccaagctgcagcccatga

SEQ ID NO: 604606 - DNA, 75 bp, Homo sapiens
gctaggtcgtcacaggctccggctcatggcatcaagtggcatccatcataaggcaccacactgtaactcgaggca

SEQ ID NO: 604607 - DNA, 50 bp, Homo sapiens
gaagtttggctggatcaagggtgtattactcactaccctgggaaatctta

SEQ ID NO: 604608 - DNA, 100 bp, Homo sapiens
cgtggggcccaagcccccgtgaagatggtgtcctggatgatctccagagccgtggtcatccaccagctgaggaacaaagtatcagaggagcatgatgttc

SEQ ID NO: 604609 - DNA, 82 bp, Homo sapiens
cctgcccagactctgataatagctgggtgcttgctggctccgaggcatgtcgggccccaggcctgtggtgctgagcgggcct

SEQ ID NO: 604610 - DNA, 101 bp, Homo sapiens
atctctgagccgctctgtcagcacctgggtttggtgaagccaggcacttatcccgaggtgcctcctgagaaggagtatggatgtgtccaacagccaaaaac

SEQ ID NO: 604611 - DNA, 125 bp, Homo sapiens
ccgaaatgatccgcctgcctcagcctccaaagtagctgagactacagatcaatgaactgagccatgttcaaatccctgttatgttgatgccagatgacttcaaagcctattcaaaaataaaggtg

SEQ ID NO: 604612 - DNA, 51 bp, Homo sapiens
cgccgccgcttgtgctgcagccatgatcatgtttgagaccttcaacacccc

SEQ ID NO: 604613 - DNA, 75 bp, Homo sapiens
ccaacgatgaccagtccaggcccagcctctcgaatgggcacacctgtgtagccctatttttgaggaagatacacc

SEQ ID NO: 604614 - DNA, 100 bp, Homo sapiens
caaagaccaggaagtgctgcttcaaacgggcagggctctaggaaacatatgttacgatagccgttacgagaagtttctgagaagctgaacaaatataatt

SEQ ID NO: 604615 - DNA, 83 bp, Homo sapiens
gaaggtttttgctgcgccaacgcagtgaccgaaggctccgctcacgcccggatgatatcatcaagttgaatcgaaaggaaggg

SEQ ID NO: 604616 - DNA, 75 bp, Homo sapiens
aaaatatggatctttacatgttgaatccttgcagcactaaaatttggatatttggccttgacattaaaggcagag

SEQ ID NO: 604617 - DNA, 50 bp, Homo sapiens
tgctgtttgctccataggcttacattaggattcactccttctccagttgc

SEQ ID NO: 604618 - DNA, 98 bp, Homo sapiens
gcggttcctgaggccagggcatgaccctgtgcgggagaggctcaagcgggacctgttccagtttaacaagagtaaagccaatcccagctgaaggaatc

SEQ ID NO: 604619 - DNA, 83 bp, Homo sapiens
ggaactcgtcctacgtaacacagccagttaggattatattccatcacaacaagatattctgcttgccagaagacccaccaaag

SEQ ID NO: 604620 - DNA, 100 bp, Homo sapiens
accccgccagctccagagccacgcctcattgctacgatttcagagtaccctggtaatagctgagcatgcaaatgattccctagcacccattactttaaat

SEQ ID NO: 604621 - DNA, 75 bp, Homo sapiens
gcagaaccagatccgggagcacgtcatcgccatcgaagggtgtcctgatgtcagaagaagaagtgtttgaacttg

SEQ ID NO: 604622 - DNA, 98 bp, Homo sapiens
caacatcgcggtgcagcgaatcaagcgggagttcaaggaggtgctgaagagcgaggagttatgcaaagggtgacctggacatatcttacatcacatcc

SEQ ID NO: 604623 - DNA, 75 bp, Homo sapiens
tggtctctgcacctcctttctagattgagaatttatcacaagttgatggtcctcaagtggaagagcaacttcttt

SEQ ID NO: 604624 - DNA, 96 bp, Homo sapiens
gctgccgggccgtcagcttcggtcagagacgctgtgggacagcccccgagggaggtccttgaatgggcaagagggcacatgaagtacggcgtcctc

SEQ ID NO: 604625 - DNA, 96 bp, Homo sapiens
aataactgaaacctggaaagcttacaacagtgactttgaggaatcagtttcctcgctgatctcttcatgccgtgtaatttcacatggactttcaag

SEQ ID NO: 604626 - DNA, 75 bp, Homo sapiens
tcagagctttacgatgtcacttgggaagatatgcacccaatgtccagggagcgtgcaaaatttgtcaaaagtggc

SEQ ID NO: 604627 - DNA, 101 bp, Homo sapiens
gcgggacggagcggacccgagtgatacccgggagactagcttggccacaggagacaacgttgaggtacagacagacatccacgacagcgatggcagttcca

SEQ ID NO: 604628 - DNA, 74 bp, Homo sapiens
gtaaaattgaaggaatagtgtggcattgcagtgatggctgtttaataaagttgctggaagtgcaggtgcgggaa

SEQ ID NO: 604629 - DNA, 75 bp, Homo sapiens
tatgaatgatggctatgcaccacctgatatcaccaactatcctgtttgaccaaactcagagatcaattaaggcac

SEQ ID NO: 604630 - DNA, 98 bp, Homo sapiens
ggcctgcgtgtggcctccgagcagtcctctcagcccacttgcacggtccccttcccctgagcccatctacaatagcgaggggaagcggcttaacaccc

SEQ ID NO: 604631 - DNA, 100 bp, Homo sapiens
cagaatcctgtcggagttgtagccatgccctaggattctgatcttcgaagtgcacttcttttggaacaggcagcacattgctttataaacatgaaaagtc

SEQ ID NO: 604632 - DNA, 92 bp, Homo sapiens
aattgtggcttgtatcaacactgttactttcgtacattggactatgaattgcaactgatgacatacaaggcctttgtggaatcgcagcagaa

SEQ ID NO: 604633 - DNA, 51 bp, Homo sapiens
gcatgccgctcaccgtagacgaggctcaggggagagagaaagcccagaaag

SEQ ID NO: 604634 - DNA, 75 bp, Homo sapiens
cgaagtcaaggctctgggggccatgtggaaactacataagcctggagtactcgggtactttgagttcagtggctc

SEQ ID NO: 604635 - DNA, 75 bp, Homo sapiens
ctgtgtgggccattggtactggcaagactgcaacaccccaacaggcccaagtgcgacgagaacggcaactatctg

SEQ ID NO: 604636 - DNA, 75 bp, Homo sapiens
gggctgcaggagaagatggcggtctccacagaggatcaagctcctccttcctcccttttagttcataagcttatt

SEQ ID NO: 604637 - DNA, 83 bp, Homo sapiens
gttgaaactccagcagcgccggacccgggaagaactggtgagccaagggatcatgccgcgtcagcccaaggccaaccccactg

SEQ ID NO: 604638 - DNA, 75 bp, Homo sapiens
tcgcgtctctctgctgcggcgcggggaccgctgtgctctcggaactactataatgtctccagggatcctgtggtc

SEQ ID NO: 604639 - DNA, 83 bp, Homo sapiens
gttccagaaataaatgactggacccactgtgtagaaacaagtcaaaggacttaaccaccaccatgtcgagcaaaagaacaaag

SEQ ID NO: 604640 - DNA, 88 bp, Homo sapiens
gccctgacggaggggaggaagtgagtatgagcgtagagtggaacgggaatcagctgaaccaagccagttggaagttccagccacagaa

SEQ ID NO: 604641 - DNA, 100 bp, Homo sapiens
tgaagattcgaggctccctggccagggcagcccttcaggagctccttagtaaaggcctttcagacatcccaggtgaagccatggtgaagctctactgccc

SEQ ID NO: 604642 - DNA, 100 bp, Homo sapiens
ggccagcgcaccggtcccccagcggcagccgagcccgcccgcgcgccgggaaacagatggccaagcctcggggggcagtgattctggggactggatcttc

SEQ ID NO: 604643 - DNA, 75 bp, Homo sapiens
caagcaggtccggacccactggctgctggagcttgtcaccaccaggttgagaacttgttgcttagtaaccaaggg

SEQ ID NO: 604644 - DNA, 83 bp, Homo sapiens
ctgtcggccccggcccgactctatcacaagaagtttctccttggaccaagatgactgatggaaaactctccacctctacaaat

SEQ ID NO: 604645 - DNA, 100 bp, Homo sapiens
cgccggagccgaggcgagcgccgcgcgcaccactggttcctaaatatttgtcacagcaatgggctaaagcctctggaagaggtgaagttgggaaactgcg

SEQ ID NO: 604646 - DNA, 74 bp, Homo sapiens
gaaggagggacttcttggcttctcccagcatagccccaggttaaaaatctgtaagagcctgattttagaattca

SEQ ID NO: 604647 - DNA, 97 bp, Homo sapiens
ccaacacccgctgctgcccgcccgctgcctgcctgcctggcatctctctctcccggacatgatccacatcgcggacaccaaggtcgccaggcgttat

SEQ ID NO: 604648 - DNA, 100 bp, Homo sapiens
aacaaaatgtcaacaaattgatggtctctagtgatccctgaaaagttccagcatattttgcgagtactcaacaccaacatcgatgggcggcggaaaatag

SEQ ID NO: 604649 - DNA, 98 bp, Homo sapiens
ctcgggatggtgccacaggaggctgtgcgggccccgctccgcttcgaatgggcacgtctgagaatggtggatgtggtggagaaagaagatgtgaatga

SEQ ID NO: 604650 - DNA, 100 bp, Homo sapiens
cgcactgtgacatgtctgatcccttgctcccatccctgcagcatgaacaagggacacagcaggtcaggagagattcaacagcattacctcagcttattac

SEQ ID NO: 604651 - DNA, 83 bp, Homo sapiens
cttcttggtgctgtggctgatgcatttcatggctatcatctacacgagccttcacgtaaatgggtccagtcatgcctcccagt

SEQ ID NO: 604652 - DNA, 88 bp, Homo sapiens
ggagcttcatccgggcacttcataagggatccgcagctgctcccgctctccagtggagtagggcgaaactggggctgggcatctgcag

SEQ ID NO: 604653 - DNA, 98 bp, Homo sapiens
aggtgctggacatgtacccggcctttgcggagagcttctggagtaagctggaggtcaccttcaacctgcgggactccctagatgacactgagctccgg

SEQ ID NO: 604654 - DNA, 98 bp, Homo sapiens
gcgaagacgccttcccacctagctctcctctctttgcagagccatacaaagttaggcaaatttctggagatgtgcaatgatctcttagctagagtgga

SEQ ID NO: 604655 - DNA, 100 bp, Homo sapiens
acctgcaaccagcccctgatgtaccaggcccaggagaggaagacccagtacagctggacgtttgccgtccactctgaggctgtttcctctgcgagaacca

SEQ ID NO: 604656 - DNA, 48 bp, Homo sapiens
gttcacagcaagctcaagctggaccttcgtggggatccaggcctctga

SEQ ID NO: 604657 - DNA, 100 bp, Homo sapiens
gtgtttatcattttggttattacctgttctgaagcaactatacttctttgctatttccacctatgtgcagagaaacgatggaaagaactttctaaggaag

SEQ ID NO: 604658 - DNA, 99 bp, Homo sapiens
caagaaggccctggacacagcaatatctctgggctttcacagtgacaaagcataaatcatggacaccagagaataaggtggacctcaggaatccggaaa

SEQ ID NO: 604659 - DNA, 74 bp, Homo sapiens
aaacactggaagaagatgaagaggaactttttaaaataatgtttggaatggttttggaaaaaattattattcct

SEQ ID NO: 604660 - DNA, 99 bp, Homo sapiens
gagacggcgggggaaagggagacggcgagacgcgcagcgccggcgcccgggagacccaggaggagcccgcaggcatgggctgatgcctttcgaagcagt

SEQ ID NO: 604661 - DNA, 100 bp, Homo sapiens
gatgttgcagatgttttacttcaagcaggggctgatttaatctttgtagaatttgatggctgtaactggaagcaacactcctgggtaaaagttcatgctg

SEQ ID NO: 604662 - DNA, 88 bp, Homo sapiens
cagtgaagcgaagaaaaggatcccagaaagtttcaggtctcagcatcagaggagcccaggaggaggaccctcccgatccccagctaat

SEQ ID NO: 604663 - DNA, 90 bp, Homo sapiens
cttggtttgcgtcctgcactgaaaggaaatgacggattttgaggatacgaagcgttttcggcttcctgcccggagctgtgcagcaaacag

SEQ ID NO: 604664 - DNA, 100 bp, Homo sapiens
cagatgcgtctcgctcaagtgatctttgataagaatgattcagattttgaagctaaagttaagcagccaaatttgtatcctactgtggggcttcaaacac

SEQ ID NO: 604665 - DNA, 80 bp, Homo sapiens
ctccagtgaatggttattttggaggaagtctgtatgctagacaaggagaggtgtctgcacttccatgtacaacaaacgct

SEQ ID NO: 604666 - DNA, 75 bp, Homo sapiens
tctggctgtggcaaatgtgactgccatggagtgaagggacaaaaggtagctacagcaagctgggtagcaggcaga

SEQ ID NO: 604667 - DNA, 92 bp, Homo sapiens
gcaaaaccaacgcctggctcggagcagcagcctctgagaacaccttccaccatgaccacctcagcaagttcccacttaaataaaggcatcaa

SEQ ID NO: 604668 - DNA, 101 bp, Homo sapiens
cgccgaggcaccgaggcactcagaggaggtgcccgtggttgacacgagctgtgtccccagctgttcccgtctacaatggcatcatcttcctctttgtcctg

SEQ ID NO: 604669 - DNA, 100 bp, Homo sapiens
ctcatccccgggagtgttgagttgagtaccttgtacagcagaatgtaataccaccgttctgtaatttactgtcagtgaaagattctcaagtggttcaggt

SEQ ID NO: 604670 - DNA, 100 bp, Homo sapiens
ccccagccgaccttgagctccaggagttcgtctcttacgtctgcggaagtgcagctgcctcagttcttagcgcagggacctaatacctatcattgctgct

SEQ ID NO: 604671 - DNA, 83 bp, Homo sapiens
aaaagcggaagtttgccacacgatattaataaggcagcggaaagaagaaatatgaatacggctccatcaagacccagccccac

SEQ ID NO: 604672 - DNA, 148 bp, Homo sapiens
tttcccctcccttccctatccccgacgaccggatcctgaggaggcagctgcggtggcagctgctgagttctcggtgaagcctcttctgaaacagtctccctggagcaaccatcagagcagtggctggggcactggaagtatgtcctgg

SEQ ID NO: 604673 - DNA, 82 bp, Homo sapiens
ctccactccgtcccccgcgggtctgctctgtgtgccatggacgggggacaccgtggtgtttaaggatggccagtactggatc

SEQ ID NO: 604674 - DNA, 82 bp, Homo sapiens
cagatcttcaacaagaggacccaggagaaattcgccctcaaacaccagcagaaccaaaatcgtgtgtggtggcagatcctcc

SEQ ID NO: 604675 - DNA, 74 bp, Homo sapiens
aaagacccctcggggctgctcatctctgtgatcagggttctcatgtatcagccatcttctgtaagggtgcccag

SEQ ID NO: 604676 - DNA, 96 bp, Homo sapiens
gaagccctcgagcatccccacagtctcgctctgtcgtccaggctggagtccaatgctgcgatcttggatcactgcaacctctgcctgctgggttta

SEQ ID NO: 604677 - DNA, 90 bp, Homo sapiens
gttttgcagatcttcaacaagaggacccaggagaaattcgccctcaaaagtctcaaacattgtctcagcagcagcatcatatcttacaaa

SEQ ID NO: 604678 - DNA, 75 bp, Homo sapiens
agaggggatcgttgtagaagtctaactggaaaacccaaacttttcattattcagattactgaagatttcattgct

SEQ ID NO: 604679 - DNA, 100 bp, Homo sapiens
aaacaaattgagcaccaagtactttcttccgagtgtcatagtaaacaaggcagttaatagtatcatatctatcgtttttggtactcgaagaattgcctgg

SEQ ID NO: 604680 - DNA, 75 bp, Homo sapiens
tcacgtgatccggcacgccatgaacctggaggccgtgaacacctacgaaggccactgcttcagaagtacagacca

SEQ ID NO: 604681 - DNA, 100 bp, Homo sapiens
aaagggagtgggactggcgcctacggtggccgaagtgggacgcgccgagccggaggctgcaggatggcatggctttgggaagaagacaagaatttgagat

SEQ ID NO: 604682 - DNA, 82 bp, Homo sapiens
cttcatacattacagtggttggaataaaaagatgatggtggcccttcgaggagcttctgcattgctggttctgttccttgca

SEQ ID NO: 604683 - DNA, 90 bp, Homo sapiens
gaacgtctttagcaaaacccgttcgacaaaggctgagatcgtcaaaaggctgaacgggatttgtgcccaggtcctgccctacctctccca

SEQ ID NO: 604684 - DNA, 99 bp, Homo sapiens
cacggccgagcagattctacaacacatggtggaatgtatccgggaggtcaacgaggtcatccaggtaataaaaggcctgacatatctgagggagaagca

SEQ ID NO: 604685 - DNA, 90 bp, Homo sapiens
tctatcttttgttctctggcatggaaggggtcctcagagttactgggctcagagtcaagatctccactgaagttggcatcacaaatgttg

SEQ ID NO: 604686 - DNA, 50 bp, Homo sapiens
catcctcaccagcatttggtgtggattgttgatggaattgaagatggaaa

SEQ ID NO: 604687 - DNA, 75 bp, Homo sapiens
ggaaaacaagaggccccagagggaaaagaagcccaaagttttaaaggtttttggattcaaagcataaaaaccatt

SEQ ID NO: 604688 - DNA, 80 bp, Homo sapiens
cccagggaagacagggcgacctggaagtccaactacttccttaagatcatcgagagctcaaaggatggctactgacatgc

SEQ ID NO: 604689 - DNA, 101 bp, Homo sapiens
ttaaattgacaacaatggccatgtatccactctgagatttgcccacctgatgaccttgccagcttgccatcatgcaaagaaaatcctgaagatgttctgag

SEQ ID NO: 604690 - DNA, 82 bp, Homo sapiens
agaagtcgcgtgtctaggtgagtcgcggtgggtcctcgcttgcagttcagcgaccacggttttgggatttgagattgacgcg

SEQ ID NO: 604691 - DNA, 100 bp, Homo sapiens
tttgtggacatgctgttgaagatcaaagctgtgagggctgctaagatacatactgccatgaaagaaagctcacctttatttgatgatgggcagccttggg

SEQ ID NO: 604692 - DNA, 90 bp, Homo sapiens
tgatgtctgtggggccgccggcggcccggcttcagactcggggtctaaatgtgagaccaagaagttacctccaaatcaatgcaacaaatc

SEQ ID NO: 604693 - DNA, 82 bp, Homo sapiens
caaccccagatccatttacactttacagtttcccaccgttttcgagaactcatgcagctcttccacactgcctgtgaagcca

SEQ ID NO: 604694 - DNA, 75 bp, Homo sapiens
ccaactgcagaggaactggaacagaggaacattttgaaacgactatcggacaaaacctttctgctgcagcgcttg

SEQ ID NO: 604695 - DNA, 74 bp, Homo sapiens
gaatgaataatcaaaagtttccttgagtgttttgctactttgggaacagtttgaagatatcagtcatcatagct

SEQ ID NO: 604696 - DNA, 119 bp, Homo sapiens
aggggagtcatcatgagcgatgttaccattgtgaaagaaggttgggttcagaagaggggtttaagaaaatctacgaagaaacgcagtgagtctccacctgctgagctccccagtttgag

SEQ ID NO: 604697 - DNA, 100 bp, Homo sapiens
ctggacagcatcttccgccgtatcagtggttttatgaagaaacagaaagcagtgatgatgttgaagtgctgactctcaagaaattcaaaggagacctggc

SEQ ID NO: 604698 - DNA, 90 bp, Homo sapiens
gggtgtaataatgttaactgagggggaaatttgcagtggtgagaaaatgtataaagaaagattctgggaaagaatttgctgcaaagttca

SEQ ID NO: 604699 - DNA, 75 bp, Homo sapiens
accatcttcctgcacacagccacgatttgcaaagacagaaccaagttgtattgttagacacactggaacaagaga

SEQ ID NO: 604700 - DNA, 88 bp, Homo sapiens
ttatgaggcagagcctaagagaactatggcaacatcaggtgactgtcccagaagtgaatcgcaggtctgccatcatggatgttctcgc

SEQ ID NO: 604701 - DNA, 75 bp, Homo sapiens
tccatttgccaatatataggcatctccgaagatttattttgtcagtgagcagcccgacggccatggaggctgaag

SEQ ID NO: 604702 - DNA, 100 bp, Homo sapiens
ctggaggaagcccatcgagagaagagcaaaggagactgcaccatccgtgtgaatgaaaactttgccattgatttgatagcagagcagcccgtgagcgagg

SEQ ID NO: 604703 - DNA, 98 bp, Homo sapiens
gatggtgtagcgctttaggggaaggttcttctttgcggtccagttggtccaaagctacatgagcttcttgatgacaatgtctttgttccaccagagtc

SEQ ID NO: 604704 - DNA, 85 bp, Homo sapiens
gggtccctcgcccaggtccccttggacaaatggacccatcctcatgccaacaaactacccttgaaggattctttcacttacgagg

SEQ ID NO: 604705 - DNA, 90 bp, Homo sapiens
ctggaaagcatcatcagacccaagtgccaagttatttactttcccatcaggtttcctgatgtgagcagatattttggtaaaagacctcag

SEQ ID NO: 604706 - DNA, 82 bp, Homo sapiens
cgaatcgttaaacatctgaaagggtcagacatgaagagtatttctggagaagaatcatcccatggagtgattatgacaaggc

SEQ ID NO: 604707 - DNA, 75 bp, Homo sapiens
ctgagctgttcctcccagctacgagctgccccaggtatgcagttttgtgtggctatgtatctgagtttgagggtt

SEQ ID NO: 604708 - DNA, 97 bp, Homo sapiens
ccgcgccgcgcgcgggcctcgcacagatcgcctgctttgggccttccatgtcgtcagctgctcagatggaagataaaaagccctttatcctgtcttc

SEQ ID NO: 604709 - DNA, 75 bp, Homo sapiens
ggcaccccatgccccccatagaaagaccacagcaagattctttcattcgtctcctcctagcctgggggaccaggc

SEQ ID NO: 604710 - DNA, 88 bp, Homo sapiens
cagcccacgctcatgatcgacttcctcacccgcgcctgcgacctcgcctgggccgagccagtggcccccagaggatgagaaggaggtg

SEQ ID NO: 604711 - DNA, 83 bp, Homo sapiens
cgacaagccgctggcagccgcggatctcaccgccgctcagggttgctgcttttgctcagaggacatccatgaccctaatggtc

SEQ ID NO: 604712 - DNA, 100 bp, Homo sapiens
aagctcgtagcctgccactccgtgcaggaattcttcagttggataaagtggacgtcatacctgtgacagctatcaacttatatccagatggtccagagaa

SEQ ID NO: 604713 - DNA, 90 bp, Homo sapiens
gtcttccccagctctgcagccacatactatccgtttgttcaggaaccaccagtgacagagaggaggtgcgccagtctgtaactcctgccg

SEQ ID NO: 604714 - DNA, 110 bp, Homo sapiens
cagaagtcgcgtgtctaggtgagtcgcggtgggtcctcgcttgcagttcagcgaccacgatgatatcatcaagttgaatcgaaaggaagggaagaagcagaattttccaa

SEQ ID NO: 604715 - DNA, 75 bp, Homo sapiens
ccgggcgggccgtcgcgggagaggacaatcatctatctctccttggtgtatgtgcttggccatgtgatcaagtcc

SEQ ID NO: 604716 - DNA, 96 bp, Homo sapiens
gccaagttagatgccgattacccacttcgagtcctttattgtggagtcatggctccgatcttcatcttgaagaagagtgacattgggtgactgctg

SEQ ID NO: 604717 - DNA, 75 bp, Homo sapiens
aagccggcgactggcttcccccttggctcctctctccgtgattccctctacggaggctgccggcgtggaccgcgg

SEQ ID NO: 604718 - DNA, 90 bp, Homo sapiens
cgtgtttgcggttcagccctttgatgaccgcagcaggcctatgagagctacaagaagaaggactacacccaggtggactacttaatcaac

SEQ ID NO: 604719 - DNA, 75 bp, Homo sapiens
cggacatcctgcccaagtggctgcgcttcatccgagaaggccggggtcagaaagaaaaaagagggtcccggggcc

SEQ ID NO: 604720 - DNA, 87 bp, Homo sapiens
ccgctgttctgcaaattttcagtctaatctcattgaaagccactcaacaactctttatgtgacagccatctgttgaatcttcaagtc

SEQ ID NO: 604721 - DNA, 100 bp, Homo sapiens
gtcaactattacaatcgcttgtacaaaggagagtttaaacagccaaaacagttcattcatattcagcgtcttcaaagcttcacctttctccaaaggcaga

SEQ ID NO: 604722 - DNA, 83 bp, Homo sapiens
gccgcggtggatgagtatttccggcagcctgtggtggtccccagtcccaagcggaagttggaagaaccagttctggagttcag

SEQ ID NO: 604723 - DNA, 83 bp, Homo sapiens
tgagcaagttccgaggcctacggaaggttgtgcaggaccagcgttccctgtgcaggcgccactgcgtttcctgcagattccga

SEQ ID NO: 604724 - DNA, 100 bp, Homo sapiens
gacttggtgcaaaccctgggagaagaaacaagtgttgaaaatgttaaaggctgtgctgaagaagagccgagagggaggaaagggaggcaagaaggaagca

SEQ ID NO: 604725 - DNA, 75 bp, Homo sapiens
ccaggacgaaggccctactgggcaaggacattctgagcatgtgagacctgaggactgcaaacagctataagaggc

SEQ ID NO: 604726 - DNA, 100 bp, Homo sapiens
caccacctgccccttccagacaactggaaaagtcagatcagcggtttgagtgctacgtttgcagaaattttcttggaaataatccaaagcagtcttcctg

SEQ ID NO: 604727 - DNA, 90 bp, Homo sapiens
gaaaaccacaggctattcagacagagttgacctttggactccacagaagcacttacatgtgggcccctcaccttaactatgggggcagga

SEQ ID NO: 604728 - DNA, 50 bp, Homo sapiens
aacaagtgcgacctctcagatattagattataccgaaaagaagttctaga

SEQ ID NO: 604729 - DNA, 75 bp, Homo sapiens
gagctgcttcccaataaggaaacacagctcttgccaggtaaaaagttttgggaaacagatgaatccagcaaagat

SEQ ID NO: 604730 - DNA, 75 bp, Homo sapiens
cagatcagaggtagtcggacctttcccgctggcgcgcagcctcagctagggcgccctgcgtccggcagaggaggc

SEQ ID NO: 604731 - DNA, 97 bp, Homo sapiens
gacatccataaaaattcatcagagagcattttactactgagctgcaaagacaacagcagttctgtagagagtttaaatatgaaggaatggcaggacg

SEQ ID NO: 604732 - DNA, 90 bp, Homo sapiens
cggattatagtctctcgccacagcggcctcggcctccccttggattcagacgccgattcgcccagagacggtaaagaacaggtccaagaa

SEQ ID NO: 604733 - DNA, 110 bp, Homo sapiens
gcagagcagggacggctgtgtggatatcggcttcgaaagtgcacttgcaggaaagacatggtgaagatttcaatggatatctttgtgaggaaatttcagccagacagata

SEQ ID NO: 604734 - DNA, 75 bp, Homo sapiens
ctgccctgcagcccgagcccatcaaggtgtacggacaggcaatgaatcgctccctggctaatgtgattcttggag

SEQ ID NO: 604735 - DNA, 101 bp, Homo sapiens
caaactttggttcaaacaagatgataagttttttttgccgaaggcttgtctcaactttgaatttttcagtgagaaagatcagtctaaagaaaaggagaaga

SEQ ID NO: 604736 - DNA, 110 bp, Homo sapiens
caaccctgtaaaaccagccttagactatttttcaaacagtgtcatggagaaactccagctgggcccagagattctgcagcgggaaaatccaaggcttatttatgccaggc

SEQ ID NO: 604737 - DNA, 97 bp, Homo sapiens
tgttgtcaggtcttcagggtctcgaggaggtggccaggtggaagtaaaatctgagaagcttgacttcaaggacagagtccagtcgaagattgggtcc

SEQ ID NO: 604738 - DNA, 100 bp, Homo sapiens
acattgaaggatttcagctaccagttacttttacgtgtgatggaggaatgcaggctcaggttggaatgccaggaagtggaccagtgtccatggaacgggg

SEQ ID NO: 604739 - DNA, 100 bp, Homo sapiens
ttagccagattggacatatgtaaagggacatcagtatatctggatcatcaggccacggaaaggtatgatatatttgatccaagacagtccattccagtcc

SEQ ID NO: 604740 - DNA, 75 bp, Homo sapiens
ggccgaggtggcggcggctcctcaggttaacacagaaatctgcctcctgggccatgccgcttctaaggcctgttt

SEQ ID NO: 604741 - DNA, 82 bp, Homo sapiens
cagtgtgtgcaaaaaagcgccccccagtgcagagcagagcgggcggaggaccccgggcgcgggcgcggacggcacgcggggc

SEQ ID NO: 604742 - DNA, 83 bp, Homo sapiens
tgccccaatgaccggcagcttgcccttcgagccaaaatgttgtaccatctttgggtaggcagacttccctgacgacatcagtg

SEQ ID NO: 604743 - DNA, 101 bp, Homo sapiens
ccagagattccctgccctgattccaggagaacctggcagatcttttgagaatatcagctgcatccagtgtccccagacgagaatacaagccaaggcctgtg

SEQ ID NO: 604744 - DNA, 54 bp, Homo sapiens
accctaaagtggagaatgaggatgaggtagagtggaacccccagctattagagg

SEQ ID NO: 604745 - DNA, 51 bp, Homo sapiens
gggaggaggagccacggccggggacagtaccactgggcttgtaccatgttc

SEQ ID NO: 604746 - DNA, 82 bp, Homo sapiens
gcagaaccagatccgggagcacgtcatctccatcgaggtgcctccggagccagcgtggtggccatagacaacaagatcgaac

SEQ ID NO: 604747 - DNA, 83 bp, Homo sapiens
caaagcccttccattcaccagacattgtttccaacggcttggcaactcttgtgaaatttcatagatctcgtcgcttactggga

SEQ ID NO: 604748 - DNA, 50 bp, Homo sapiens
tgcaagcagatactggtgcctatgaaggatttgggggcagagcacttggc

SEQ ID NO: 604749 - DNA, 74 bp, Homo sapiens
tttccaccccgaaattcgccccgattaaagactgtgttgcattatcaggagcttactccacgggaacagcctct

SEQ ID NO: 604750 - DNA, 114 bp, Homo sapiens
agacaccgctatcacagctgctgcaatcgcttgggagagctcctgggccacccctcctttcaggtcaagatgccagcctggcggtctcattcagccagccaatcatgtattgcc

SEQ ID NO: 604751 - DNA, 100 bp, Homo sapiens
agaaaggccagcacctgaagaattgatgctgccaaggggccaagggatgagctggggccctccttcccaatggcatctccccctggtctggaactgaaga

SEQ ID NO: 604752 - DNA, 151 bp, Homo sapiens
cagcagctgctggtatatttctgaataatgtgaagtttactcatgctttctccagtgatctcatgaggacaaagcaggtgggtgtttgtgtgggaaaagggctaccaggaaactgactccgtggtcagctccgttacgaccaaggtcaagg

SEQ ID NO: 604753 - DNA, 82 bp, Homo sapiens
cagattcgcagtggtcgcttcttctccttggagctctctgctcgtgatggggatcctacctttcatacacatcagctgcact

SEQ ID NO: 604754 - DNA, 50 bp, Homo sapiens
gaagccaccactttggcaaatggatggagtctcactctgtcgcccaggct

SEQ ID NO: 604755 - DNA, 83 bp, Homo sapiens
gccggcttctcccctacgcgctacacaagtggagctccttttcctccacctaccttcccgaaatcaagtttcttactgggaaa

SEQ ID NO: 604756 - DNA, 75 bp, Homo sapiens
gtccttcactcaagaacaagtagctgataacttctttgtggatgattatgctagatttactatcttggattccca

SEQ ID NO: 604757 - DNA, 75 bp, Homo sapiens
agttcttacaacatggcagacattgacaagttttgggtcctgctcctcggtggtgttccttcttagacaacttga

SEQ ID NO: 604758 - DNA, 100 bp, Homo sapiens
cgtgtcccggggccgacccggcccgtagtgtggaagcagcttcagtttcaccagtgatcattaaagaatgggcagcttacaaaggaaagtctcctcaaac

SEQ ID NO: 604759 - DNA, 75 bp, Homo sapiens
gccatgtcggtgggcgagctctacagccagattcccaacttcttctggagcctggggatcggtcacactggtgcg

SEQ ID NO: 604760 - DNA, 51 bp, Homo sapiens
atgactctactcttggttataactgattttgcagaatgagcaactagatga

SEQ ID NO: 604761 - DNA, 74 bp, Homo sapiens
tccggagcatggtcagccccgtcccctccccgacgggcaccatcaggtatgggcactaggaaaagacttcttcc

SEQ ID NO: 604762 - DNA, 136 bp, Homo sapiens
gaacgaaaacgtagggaccacatcaaagacagctttcacagtttgcgggactcagtcccatcactccaaggagagaagagatggggtggacttgctttgtcattcaggctggagcgcagtggtatgatcatagctc

SEQ ID NO: 604763 - DNA, 82 bp, Homo sapiens
cagaaagcaggcgaacccgcggcgcaataacgccttatgccagcctggaccatcttggaggcagtgtaggatcatggaagaa

SEQ ID NO: 604764 - DNA, 138 bp, Homo sapiens
ttggtctgctggtgggactcaatgttctcgatgccaatctctgcttgaaaggagaagacttggattctcaggtttttcgttggaatatacgttgcacatttatggcgattctgagtgtgagggcagacttctgccagg

SEQ ID NO: 604765 - DNA, 96 bp, Homo sapiens
taagaaggtgcccaagatcccactccatgtcagaataactgaagtgaagtgatggactccgatttggagagtagtaagacgtgaaaggaatacact

SEQ ID NO: 604766 - DNA, 75 bp, Homo sapiens
cagagaccaaggccgcttaacctggctggttgcactggtccctggagagatgatcacggaagccttggcccaagg

SEQ ID NO: 604767 - DNA, 100 bp, Homo sapiens
gaagtcgacggcgccggcggctcctgactggacgccgggcatggcagtgccacgggacattgcagccgcctacctgctccagggaagcttctatggccac

SEQ ID NO: 604768 - DNA, 98 bp, Homo sapiens
caggttcggctggaaggaaccgctctcgcttcgtcctacacttgcgcaaatgtctccgaaacttgaggagaggctggagttctggatggagaaatacg

SEQ ID NO: 604769 - DNA, 100 bp, Homo sapiens
gcacatctaccagccactgaacctgaccattggggtcacggtgtttgccgtggggaacctgagcccttacagccacgatggggacagcctgtctcgctcc

SEQ ID NO: 604770 - DNA, 83 bp, Homo sapiens
agccatagtacctacagcagcactccaggcacttcaggtggcaagacagctccttcttcagcagcaacagcagcagcaagtta

SEQ ID NO: 604771 - DNA, 100 bp, Homo sapiens
ggagctttactaactagccccagtggaccaggctatcatatcatgttgcctttcattactacgttcagatctgtgcagactctttttgatcagaacaatg

SEQ ID NO: 604772 - DNA, 83 bp, Homo sapiens
aagagatggatgaagctgctacggtggacccccaaaagtacaagggcatatttaacggattctcagttacacttaaagaggat

SEQ ID NO: 604773 - DNA, 75 bp, Homo sapiens
gacattgaacgggaaatcggcgccatccttcagaatgcagatactagagtaaaaggatggtttcttctggacaat

SEQ ID NO: 604774 - DNA, 98 bp, Homo sapiens
ctcagtggaatcctgtatcagaactttggctgaagtggctgactcttttggtgatcccttcttcccccggactacacagatactattagaatatcagc

SEQ ID NO: 604775 - DNA, 97 bp, Homo sapiens
ttccctgaccccgcggccggacgacccaagcccgctgagcaggatgaggcaaattgtggctactaatttgccccctgaagatcaagatggctctggg

SEQ ID NO: 604776 - DNA, 100 bp, Homo sapiens
gcagatgtatgggtgaagatccaagatgttctacagctggcagagatggaggaggagctacgttatgcacccctgtctttccgaaaccccatgatgtcta

SEQ ID NO: 604777 - DNA, 100 bp, Homo sapiens
gcagctgccaggccagctcgaagaaggcgagcagggtgcgggagagccccttgcagaagacgccgtacgagcatgtaaaagtcacatctgaggctctggg

SEQ ID NO: 604778 - DNA, 75 bp, Homo sapiens
cttcattgctgcttcttatgctccatggtgagacctggaaccccttcaaattacagtaccagctgagaaatgtac

SEQ ID NO: 604779 - DNA, 77 bp, Homo sapiens
tctcagccaagaacaaagactacatgagcatcattcgcatgtggctaggtatgctccagaatcactgacagagagca

SEQ ID NO: 604780 - DNA, 100 bp, Homo sapiens
agtaatattaaacacatgaggaaacagcttgatcgtctgggcctgtgtttcagctgggataggtttaatggctatgctgggagcctcttctcaagtggac

SEQ ID NO: 604781 - DNA, 82 bp, Homo sapiens
atgtctgcgagccaggattcccgaccatggtgaatccgggcagcagctcgcagccgcccccggtgacggccggctccctctc

SEQ ID NO: 604782 - DNA, 50 bp, Homo sapiens
ggttgaccaactggtggaacccctggggccatgctatgatagtggaagct

SEQ ID NO: 604783 - DNA, 50 bp, Homo sapiens
gaagaggcctgcagtgggagagcaggatggtcagtaggacagaaggtaac

SEQ ID NO: 604784 - DNA, 101 bp, Homo sapiens
cacgtggcatcagtccccactgcggtccacggccaggtgaacaatgaatttctagaaggaggagttggccatgttgaaatgttatttcgctgcaactattt

SEQ ID NO: 604785 - DNA, 97 bp, Homo sapiens
tggccctgtgatccctcaagactggtccacggagtgtatgaccacaaacagccatcaaggaccctggctctcaagctcccacatcctggattagtga

SEQ ID NO: 604786 - DNA, 74 bp, Homo sapiens
aatatcttaagcattcttgttgagctggtgtcagctggtatgatctcgtgaaatcttgagagaaactgaatgac

SEQ ID NO: 604787 - DNA, 75 bp, Homo sapiens
aaccccggaggccggaggaacgggcccgtcaagctgcgcctgacagaggtcctatacgttgcttgtggaggcgtg

SEQ ID NO: 604788 - DNA, 98 bp, Homo sapiens
caaaaatcacaagattctctgccacaaaaaaatataataaggctgagtgcggagccaagataattcagcattggcgtatttgcttgtcccaatacaag

SEQ ID NO: 604789 - DNA, 100 bp, Homo sapiens
agcccttcctgaccccgtacctgctggggccggacaagaacctgaccgagagggagatcatgacaagatgtttaagatgagtgaaaagatattactcctg

SEQ ID NO: 604790 - DNA, 78 bp, Homo sapiens
agggagctcacatttctcatattgctcaacaggacacagcattgttggttttgccatgtactattttacctatgaccc

SEQ ID NO: 604791 - DNA, 83 bp, Homo sapiens
ttcctcaacgacgcggacatggtcatgagctttgtgaacctggaccatggtgaatccgggcagcagctcgcagccgcccccgg

SEQ ID NO: 604792 - DNA, 90 bp, Homo sapiens
ggaagaaacccgacagagcaaattggccgcagcgaagaaaaaggacatgaacaagctgagtggaggcggcgggcgcaggactcgggtgga

SEQ ID NO: 604793 - DNA, 100 bp, Homo sapiens
gtgggaccggtgtctggcggatgcggtcgtgaagataggaaccaaagcggggagtgtgttcagtcagtacctgcctttctgagcctggcatcctggacca

SEQ ID NO: 604794 - DNA, 101 bp, Homo sapiens
agataccgaggaatgttgcacgcattagtgaggataggcagagaagaagggctgaaagcactctactcgggaacttaaagcagcagtattacacaggatac

SEQ ID NO: 604795 - DNA, 100 bp, Homo sapiens
gtgttggtgctcaccaagtctgtggtctcaaccccggtagacctggaggtgaagctgcggatcgcccaagtctgcaggagctgcctggtgaagtacctgg

SEQ ID NO: 604796 - DNA, 83 bp, Homo sapiens
cgtggaggagctgtgcagccgcgaggaggcgcgggaggtgttcgagaacgaccccgagacgtttccccctttctagggtgagg

SEQ ID NO: 604797 - DNA, 100 bp, Homo sapiens
ggagtgtaggtcatatcgccgcggaacctacaagcagcaattggcgcctattatgactttgagagcccaaacatcagtgtgccctctatgtcctttgttg

SEQ ID NO: 604798 - DNA, 72 bp, Homo sapiens
ggtcagtttcccgagtacccaccagagggcgccactaaactgggcttctctctgggctccacggtgcagtct

SEQ ID NO: 604799 - DNA, 100 bp, Homo sapiens
tgttcttgtagttttctgcatagataacagagagagatcatcattgcctgaatttagctttgtgactgcaagagcaagaccagttcctgtctggagacga

SEQ ID NO: 604800 - DNA, 100 bp, Homo sapiens
gcgtgtcacccacgcagacatcttcagccgctgccagggcaaaataacatggcagccagacgaattacacaggagacttttgatgctgtattacaagaaa

SEQ ID NO: 604801 - DNA, 100 bp, Homo sapiens
cacatcgtgggatgcactttctcaaaccaaggctgctttcacacaaaagatgttggacaatttctacaattttgcttcatcatttgctgtctctcaggcc

SEQ ID NO: 604802 - DNA, 100 bp, Homo sapiens
cagagaccggcttcaatatcttcacccagcatgaattctgaaggtggactctatgtatgcatgaatacatttttggcctttggaagggaacatgttgaaa

SEQ ID NO: 604803 - DNA, 85 bp, Homo sapiens
gattggaaaaggaggcaagaatattaaggctctccgtacagacgcttcagcaaccaggagggattgactgagatcttaacaacag

SEQ ID NO: 604804 - DNA, 90 bp, Homo sapiens
tatacttgggtaccatcaaaaagacgctcaagaatgcctggctgcagcactatgcagtgaacagcgcggaccccggcgtgtttgtgctcc

SEQ ID NO: 604805 - DNA, 75 bp, Homo sapiens
ccaaacccctttggccctgtatcaggagcacaggcacttcctggacctcactactacacatggggagaccacggc

SEQ ID NO: 604806 - DNA, 101 bp, Homo sapiens
gacactgctgtggacagtctcagtgctgcaactactactatgaactctggtgattactacagcatcccatttcccacacccactactccgctgactgggag

SEQ ID NO: 604807 - DNA, 90 bp, Homo sapiens
caagggcacccctgagaaagccaatgagactgctgagaaggaagaatttgaacatcaacagaaagagctggagaaagtttgcaaccccat

SEQ ID NO: 604808 - DNA, 83 bp, Homo sapiens
gccctctttgcaacatttcaggaaaacagagaaagaagtgataggagggctctgtagaccatggtgaatccgggcagcagctc

SEQ ID NO: 604809 - DNA, 101 bp, Homo sapiens
gcccggcccgcgcaggaggcgctcctccttcccaccggtgacttaagagattaaaattaatttggttgctgttggttctgaacaaataatgagttctttta

SEQ ID NO: 604810 - DNA, 88 bp, Homo sapiens
tgtatcagaagacaatatcatgcaagtgtggcaaatgacggtggagcatggcttcccgcaccagcccagcgccctcggctacagcccg

SEQ ID NO: 604811 - DNA, 90 bp, Homo sapiens
gggccggtggcggatggagcccgcgatggagccggagactctggaggcgcgaatcacagtcccagctatctgacttcatgtgaaagatgg

SEQ ID NO: 604812 - DNA, 100 bp, Homo sapiens
gccgctgcccatggagggagtggacatcagccccaaacaggacgaaggcgtgctgaagggtgctgtgggcccagaagcgcccatgcctgagagcgtccag

SEQ ID NO: 604813 - DNA, 100 bp, Homo sapiens
gatgctgtgaaaaatggggattatattactgtaaaagttgcacttaattcaaatgaagaatataacctggaccaagagtagagaccgggtttcaccatgt

SEQ ID NO: 604814 - DNA, 101 bp, Homo sapiens
aaaattctgaactcaggacttggcaagataccagaaggccctattgatcaggggccagctataggaagagtacgcgttttagaagagcagcttgttaaggc

SEQ ID NO: 604815 - DNA, 100 bp, Homo sapiens
agcacagaactgccaaaggccctgcaaggacaaggcattggctatgcctcccagatgatcgtcatcctcctcaacgtctactacatcattgtgttggcct

SEQ ID NO: 604816 - DNA, 97 bp, Homo sapiens
caaaaacttggttctggaaaaagactagttataagtgccatagagttcatttccatttgccgtatcgatggcaattcttggatagaggcaaatggga

SEQ ID NO: 604817 - DNA, 100 bp, Homo sapiens
tgaagccctcatgcggatgctcgataatctgttcctttatgtagctcgaaatgccaaagactgtatggtttcctactaccatttccaaaggatgaaccac

SEQ ID NO: 604818 - DNA, 75 bp, Homo sapiens
cttttgcttgtgatacaaaacttgaatgggtgtgccaaattccaaaagccttcacttaacttaagggaccttgga

SEQ ID NO: 604819 - DNA, 74 bp, Homo sapiens
taccaagtccgtgctgtttgtgtgtctggctgcgagcaagtcacaccagcctacaagccagatataatgaagcc

SEQ ID NO: 604820 - DNA, 75 bp, Homo sapiens
cgaggagctgcgctcacctcaggggcgggcccccgcctgcgttcgcggcgccaaaatcttacaggctggtgttaa

SEQ ID NO: 604821 - DNA, 118 bp, Homo sapiens
gccgggagaagcatgggaaggaggccgagccgggatctcaggtcctcgggggcggcggccacgccaaggacggctttcgaacctctgatttggagttcagtggaaatttaaccttttt

SEQ ID NO: 604822 - DNA, 74 bp, Homo sapiens
tcgcactgtgacatgtctgatcccttgctcccatccctgcagcatgaacaaggattgactcagtcagcattgac

SEQ ID NO: 604823 - DNA, 51 bp, Homo sapiens
cacgtgcatctgtgcacccgggtttacaggtctggaagctccgagtttatc

SEQ ID NO: 604824 - DNA, 100 bp, Homo sapiens
gccctttctcctcggcactgtattctttacctgcttcccaatcccactgatgaggatcagcccatgtgtttggtgtataaaacagaccaagctcaagatg

SEQ ID NO: 604825 - DNA, 83 bp, Homo sapiens
cgcggattcgccgaggcaccgaggcactcagaggagctacccgtacagtgaggacgcccgccagggtgagcagtacatgaaca

SEQ ID NO: 604826 - DNA, 83 bp, Homo sapiens
gtatgccctggaaaggaaaactttcggaaagctacttgtagaggtatttcatggaaacttggagagagaaaagtgatgaagtg

SEQ ID NO: 604827 - DNA, 100 bp, Homo sapiens
aatgtcaaataacctacggagggtcttcctgaaacccgcagaggaaaattcaggcaacgcctcgcgttggcaaacgaatgcacgtgcagttgtccaccag

SEQ ID NO: 604828 - DNA, 75 bp, Homo sapiens
gtcttgttccgaggcggccccagaggttacagattatgccattgccaggcgcatagtagatttgcattcaagaat

SEQ ID NO: 604829 - DNA, 82 bp, Homo sapiens
cgagaccgcggccgggaccgaggccgtgttgccgcccgctgtgctatgagcagtcagagcgccgtctccacaagagtttaca

SEQ ID NO: 604830 - DNA, 98 bp, Homo sapiens
cttgtcagccagggctgaacccccgcaggtgtcatggagaaactccagctgggcccagagattctgcagcgggaaaatccaaggcttatttatgccag

SEQ ID NO: 604831 - DNA, 75 bp, Homo sapiens
atgaagagctggtcattaagggatccatcctacagaattgcaggatgtgagtttgaatctatggaatgtctacag

SEQ ID NO: 604832 - DNA, 95 bp, Homo sapiens
tcaggtggcagctttgagtgagcgctatgacaaattgaaggagacttcttggcatcatcacaaaaaaggatgttctgagacatatggcccagatg

SEQ ID NO: 604833 - DNA, 100 bp, Homo sapiens
catcccatgaggatctgcccgcttcccaggaaaggtccgagaatgtactcaagactgatcttctaagttcactggaaatgattttatccccaactgtggt

SEQ ID NO: 604834 - DNA, 148 bp, Homo sapiens
gagaaactgagggaagagtggcaaagggccaaacaggaggcagagagagagaattccaagtacttggatgaggagatatctgaagagattataggatcacccatcccagaacctaggcaacgctcaagacttctaagatctcaatcag

SEQ ID NO: 604835 - DNA, 83 bp, Homo sapiens
aattctcctgccaccgcgtggtgcttgccgcagccagcaactatttcagaatatcctccgaatcctaaatctagagctccaag

SEQ ID NO: 604836 - DNA, 88 bp, Homo sapiens
ataagaataatgaaatccgaaaggtctgtgataatacattagatattatagcgaaactgccaagttttggaccttatctggaacagcg

SEQ ID NO: 604837 - DNA, 99 bp, Homo sapiens
tccggcggccgaagacactgcgactccggagacagcccaaatatcctcggaagagcgctcccaggagaaacaagtatggacctgtctgccaatcaggac

SEQ ID NO: 604838 - DNA, 50 bp, Homo sapiens
cagaactgggcagtacccacacagcaggagtcagagtcagaagcaaaggt

SEQ ID NO: 604839 - DNA, 50 bp, Homo sapiens
aaggacattgcggctcatatcaagaagattagtgatgatgaaccaggtta

SEQ ID NO: 604840 - DNA, 80 bp, Homo sapiens
cgagtcgcgcggaggcggaggcttgggagtgcttcatgttggcggaaccattgtattgttgcttagtgaagatcaccaca

SEQ ID NO: 604841 - DNA, 74 bp, Homo sapiens
gagaggagattgcagcagcgaaccaatcccaaggctcctcacttggcttacttgagaacaggagtaaagatagg

SEQ ID NO: 604842 - DNA, 75 bp, Homo sapiens
cccggatggtctttggagaaagaattgcttctcatgatgacaggaacggctggaggcgatgatgcgccggtccct

SEQ ID NO: 604843 - DNA, 95 bp, Homo sapiens
aagtaaaattggcaagacatatccttacaggcagagaggtcaccatggctgttattggctcccttgctgtccccagctgttccccaggtcacctc

SEQ ID NO: 604844 - DNA, 82 bp, Homo sapiens
gcacaatcgggcggaggtggcgctgccccttcagataacatccctgaggacctcagagaccctttctacgttgaccagtatg

SEQ ID NO: 604845 - DNA, 98 bp, Homo sapiens
tggacttcttcctgctcaagtgcgaagacgtttcttgaacaaaagttctgaagatgatgcggcctcagagagcttcctcccctcggaaggtgcgtcct

SEQ ID NO: 604846 - DNA, 75 bp, Homo sapiens
agagtgggatccttctatacgcatagaaccaccaaaaagtgtcccttctcagttttttgtagcatcagatccaac

SEQ ID NO: 604847 - DNA, 101 bp, Homo sapiens
tttgacttggaagcaatgtttgaacaaactcgaagaacagctgtggaaagaagttgcaaaacactggctctggacttattggacaaaatgttgacattcaa

SEQ ID NO: 604848 - DNA, 74 bp, Homo sapiens
ccaggcctccgcttctccggcctccctgctcttaccgggagacatccacgacagcgatggcagttccagcagca

SEQ ID NO: 604849 - DNA, 74 bp, Homo sapiens
catcttgtgaactgacaggttctggatcctggaacaacatgctgaaactgggggaaagctctggcaatttaaat

SEQ ID NO: 604850 - DNA, 75 bp, Homo sapiens
gcagcaaggaaataggatttaaccgctctctgcctcccagaggaagaaattgttgagcttccagatttggattac

SEQ ID NO: 604851 - DNA, 85 bp, Homo sapiens
caattgccttttcaaaaggaaaacccttcaggcaaccttgctacaaaaattagaagtatatcagagaattccctggtagcaatgg

SEQ ID NO: 604852 - DNA, 74 bp, Homo sapiens
gaaagcacatttggttatgtgcatggggtctcaggacctggtatgacagcagttatctgtacttaccctcttga

SEQ ID NO: 604853 - DNA, 75 bp, Homo sapiens
agtcaacagactgagcgcgtccaggcctgacagctctgcggctcgggccctgagggggatatgagactttctact

SEQ ID NO: 604854 - DNA, 90 bp, Homo sapiens
atcactctgtcagacttttaagcttcccttaacgccagtctttgaagggcttgccttcaagctaccacatactgttgattgtgatgaaat

SEQ ID NO: 604855 - DNA, 75 bp, Homo sapiens
tcagatgcaattggaccaagagaacaatgggaaccagtctttcaaaatcgccagcagccctgtggtggcgacgac

SEQ ID NO: 604856 - DNA, 100 bp, Homo sapiens
acttttttcaggcagaaaacaagtctcgtctggacgtaagactttgaccccgacgcaggcttcagtgattgccgcggatcagaagcctgagcactttggc

SEQ ID NO: 604857 - DNA, 51 bp, Homo sapiens
acgaaatccggaaggtgacgggcaaggacatcaacaatgcctggggctgcc

SEQ ID NO: 604858 - DNA, 80 bp, Homo sapiens
gttcggattcggcttccaccgcttcttagtggctggccctgcataactcccgtttcctgagtctctgctctgagctggat

SEQ ID NO: 604859 - DNA, 88 bp, Homo sapiens
tacaattaccaaacagaatggacaagcttaataaaataaccgtccccgccagtcagaagttgagatgttgaaatgcttcaggccagta

SEQ ID NO: 604860 - DNA, 75 bp, Homo sapiens
cctacaacacccccagcggccgccggctcccccacgaggacagagcgggatgccaccagcttgtccaaagggaag

SEQ ID NO: 604861 - DNA, 90 bp, Homo sapiens
cctgttggaacatgctttcttcaagatggaacaaagactgttgagtatgctccatgtagatcacatacagtggaaggtcttgatgcccag

SEQ ID NO: 604862 - DNA, 83 bp, Homo sapiens
tgctgtcgtttctaaaagatgtgtatgttgattccaaagatcctgtgtcttccttgcagatttccatggagaatgattatctg

SEQ ID NO: 604863 - DNA, 50 bp, Homo sapiens
gaggccaggggtgtcgccatggggtcgggccccggctcagtggtcccagg

SEQ ID NO: 604864 - DNA, 100 bp, Homo sapiens
tccccatcgcgttttgccagcgataatacgcctcaggtgctgcgacaagagactttggacaaaaattgacttgagtaggtgtaaggccattgtgccccag

SEQ ID NO: 604865 - DNA, 100 bp, Homo sapiens
ccgtgagttcgccgctggtggctccgggggagagaccattctaacacaggtaccgtccagacagtgcctctgagaaagggaacctaaaggcgtgtttccg

SEQ ID NO: 604866 - DNA, 82 bp, Homo sapiens
actttactcagagtgacagagctccacagaaaagagtccgatcaagagactgactttatggcctttcaccaagaacatgaag

SEQ ID NO: 604867 - DNA, 75 bp, Homo sapiens
aaattatttatccaacagctcctcccagaggaagctcaccagtgtgggaaggggcttctcatccactgccaggct

SEQ ID NO: 604868 - DNA, 100 bp, Homo sapiens
tctcattagtgagaatggtcatgctgccgacaccctgacggccacgaacttccgagtgggtatcacatcggtatcctcgaattcaaagtatcaaagtaca

SEQ ID NO: 604869 - DNA, 51 bp, Homo sapiens
ggtcctttatatagaagggagagtagaaaaacgtggagccatttaccagtg

SEQ ID NO: 604870 - DNA, 75 bp, Homo sapiens
tggtgctctacaggcctgtgggcgaccagtggcagccaaggagatccagctgatgcaccgggcgccggtggtggg

SEQ ID NO: 604871 - DNA, 80 bp, Homo sapiens
gaagatgatgatgttgatggaagagagaaaagcgtcattgatacttcaacagtatattacagctaatactgacacagaag

SEQ ID NO: 604872 - DNA, 99 bp, Homo sapiens
gcggagacccagtcgctacgggagcagccagagtatcgagaaccttccctgcgaacttcagaggaacttccagctgatgcgagagctggaccagaggac

SEQ ID NO: 604873 - DNA, 74 bp, Homo sapiens
cagagttcctgtacaaggttcctgacctgtggtgttatttggaagatggagcttcaaagggtgcctggctgaac

SEQ ID NO: 604874 - DNA, 75 bp, Homo sapiens
catcccacctcctgagtcctctcggcacccagcaaggctgatcttgatatcctggtctcaagtgatcctcccacc

SEQ ID NO: 604875 - DNA, 75 bp, Homo sapiens
ccggacttcgcaagcaccatgcagtggataaggggcggatcgggaatgggaggaaataatgctggccatacagtt

SEQ ID NO: 604876 - DNA, 75 bp, Homo sapiens
ctggccgagtccttgcaagaagtgaattacccgaccctggtgtggacactgccagcggctgcagccgacttggaa

SEQ ID NO: 604877 - DNA, 98 bp, Homo sapiens
ccaccacggagttccggtacaagctcctgcgggccggcgggttctgggaagtcatcagtgatgagcatggcatcgaccccagcggcaactacgtgggc

SEQ ID NO: 604878 - DNA, 51 bp, Homo sapiens
atttttgccctcaaaagaaatggcaggacagcctttcctgcctcagggaag

SEQ ID NO: 604879 - DNA, 100 bp, Homo sapiens
gcctaaggcactgggtgtacctgctttgcttctctgcagataccagcgggcaagcagaaaacaagaggctcaagaggggcagcccccgcatagaggagat

SEQ ID NO: 604880 - DNA, 75 bp, Homo sapiens
ctgcaccgacctcgacgtcttgcctgtgtcccacttgttcgcggcctatagatcttgagccagatgattgtgcat

SEQ ID NO: 604881 - DNA, 74 bp, Homo sapiens
attcttgaagtttgtggatgaaaattgggaaggttccctcaagtccaagatggaacaagaggctgagaggcgca

SEQ ID NO: 604882 - DNA, 83 bp, Homo sapiens
aggagcctgccccgccctggggacgaagagctgcagctcctcctgtgcggtgtaaggcaaacattggtgggcaccgatcttcc

SEQ ID NO: 604883 - DNA, 100 bp, Homo sapiens
cggcggcgcggctgccggctggatgggaagttaatgtttacggcgaagtctactcaacgtttccaagggttatatcagttcctagcttgaggttttccag

SEQ ID NO: 604884 - DNA, 98 bp, Homo sapiens
acagtgttggtgtggagtcacagcttgacttttgtcatggctccgatcttcatcttgaagaagagtgacattgggtgactgctgcttggaaaactgtc

SEQ ID NO: 604885 - DNA, 95 bp, Homo sapiens
aaacatacgaacagccaatttctctattttgcaccagacctagtctttaatgagaggtgcttgaactcgctttctccatcttgtatgactcaaac

SEQ ID NO: 604886 - DNA, 149 bp, Homo sapiens
cacacgatctctccagtttccatatgttgagattctacttattcatcagtttgttgtgcttgtcaagatcaggtttttcgttggaatatacgttgcacatttatggcgattctgagtgtgagggcagacttctgccaggctcagcacag

SEQ ID NO: 604887 - DNA, 100 bp, Homo sapiens
aaaacatgaccgctgagcccatgaggtcatcatcagatttgaaatatttaaagtggatacaaaactatttcagcaatgcagacaattaagtgtgttgttg

SEQ ID NO: 604888 - DNA, 74 bp, Homo sapiens
cctccggagaaaaagaatgtgaaattgactaaatacatgctctcttggcctcctagtttctacctaatcatgtc

SEQ ID NO: 604889 - DNA, 97 bp, Homo sapiens
ccttccggaacagcgccgaggccttcaagtgcatgatgtgcgatgtgcggaagggcacctccacccggtgtttaaaattatccaactgccatagagc

SEQ ID NO: 604890 - DNA, 100 bp, Homo sapiens
ggtgtattccaccatgctggtcttctttaagaatgcattccagtatgtcaacagcatacagccatctctcttccaaggaagaccaacactgtcatctgaa

SEQ ID NO: 604891 - DNA, 78 bp, Homo sapiens
cctcccatgggcaccctcttccacactgtccttgagttaccagacaacaagtcctgggaactccaacaagggagcaaa

SEQ ID NO: 604892 - DNA, 98 bp, Homo sapiens
acagaccgagatctccaaccggacctagcaactccttcctcgctaacatggggttatccttctcaaccagttgaacagaggccacttcagcagatgcc

SEQ ID NO: 604893 - DNA, 82 bp, Homo sapiens
tagtacctttggagaagttcttatggtgcaggatctgtgccagttcagaagcaggcgagcctcttccctgatgaaaaagaag

SEQ ID NO: 604894 - DNA, 75 bp, Homo sapiens
cacaaaactgaccgtagggatggccaccagggtccggacagcttctatttgggccaggagtggtggctcacacct

SEQ ID NO: 604895 - DNA, 73 bp, Homo sapiens
cttctcagaagacagagggttttcttttgaggataaggagcacaagtgtcctttgatttgtgggaggaaactc

SEQ ID NO: 604896 - DNA, 99 bp, Homo sapiens
ggagacaacagaaacagaaacgattgtggaaacaggcacatcttcacaatgaaatcttcacaagctcagaaccatcaacttgctacactgtgttcctcc

SEQ ID NO: 604897 - DNA, 75 bp, Homo sapiens
ttgagtacttggatagacttatacctcaggaatactgtatgtctgagtatttgagaatgagtggcatctattggg

SEQ ID NO: 604898 - DNA, 101 bp, Homo sapiens
cagaatatgaagttgccgatgatgaggaccgaagtgattgtggactgtcaatcttagatagattcttcaatgataagctctgaagagactgagggactcgg

SEQ ID NO: 604899 - DNA, 140 bp, Homo sapiens
gaaaatatggaaacaggaacaggactgactccagtgatgacgcaggccttaaggagaaagtttcagctgtcaccactgactaaagaagagaaaactgcggcagagcaattcaaatttcacatgccagatttatgaagaaa

SEQ ID NO: 604900 - DNA, 74 bp, Homo sapiens
ggaagattttgaagacaatcgtcacttatacagcttggattagaagaacaagaaagactccacctactatggag

SEQ ID NO: 604901 - DNA, 88 bp, Homo sapiens
gtgaccatcgaaaggagcaagagcaagatcaccgtgacatccgaggtgcctttctccaaaaggataagtgcccaagagtacaattgct

SEQ ID NO: 604902 - DNA, 75 bp, Homo sapiens
cgaggccagcaagacgctgcccgccatcgaggccctcagccacaagtacggtggacacagcagccatgtgacaaa

SEQ ID NO: 604903 - DNA, 100 bp, Homo sapiens
ctcactgcagccttgacctcctgggatcaaggggaacttatagaaatgctggcaatttcaagaaaccaaaagttgttacaggctggagaggaaaaccagg

SEQ ID NO: 604904 - DNA, 75 bp, Homo sapiens
agcctttatatcatgggaagcactctcacttattaaagatcttggtcacagggattatggacccagaacagatgc

SEQ ID NO: 604905 - DNA, 75 bp, Homo sapiens
ccaacgcctggtgctcaagactttctccgaggcgatcagtgggtgaccgcggctgcgagggactttgtcatccgt

SEQ ID NO: 604906 - DNA, 103 bp, Homo sapiens
ctggggcagtgattggaaaaggaggcaagaatattaaggctctccgtacagaccagaaaaatatggctcaggagactaaccagaccccggggcccatgctgtg

SEQ ID NO: 604907 - DNA, 82 bp, Homo sapiens
cagagctacccttcttggagcccacagggtgctcctcgtcttcctttgcctgggggtcttccttctatggaagaactggcgg

SEQ ID NO: 604908 - DNA, 100 bp, Homo sapiens
aatctttgcaagaagagattgcctttttgaagaaactccacgaagaggttgtttgcattcgctccacttggaatgctctctctccaaagctgagttgtga

SEQ ID NO: 604909 - DNA, 110 bp, Homo sapiens
ctgccgtccttctccactttcgccagcccgtgccgcgagcgcggcctgcaggagcaggttacgggcaggacttgagtggcttcggacagggcttctcagaccccagccag

SEQ ID NO: 604910 - DNA, 126 bp, Homo sapiens
caagtgaaaaaaatagactaatggattaacgtccctgtcgtgtgacattttctggactacaaagctgatgaagacccagcattattccagtcagtcaagaccaagagaggccctttgggacccaac

SEQ ID NO: 604911 - DNA, 50 bp, Homo sapiens
atcatgtctgcgagccaggattcccggccactgcagaacaaattagactt

SEQ ID NO: 604912 - DNA, 76 bp, Homo sapiens
gctcctatgcggtacttgaaggatggcgaagaggtcgcgcaggtttgttgataagccggggcccttcgtgggaccc

SEQ ID NO: 604913 - DNA, 100 bp, Homo sapiens
ggaggacctgctgatctaagtggagagctcagaaaaggagatcgtattatatcggttaatttggagtggcccctggagtcagtttcctacaccatccgag

SEQ ID NO: 604914 - DNA, 75 bp, Homo sapiens
ctgagcgactatattgagaaggaggtaaaggaaggttatagagatggaatagatgctggcaaagcagttactctt

SEQ ID NO: 604915 - DNA, 80 bp, Homo sapiens
tggaaaggagattgacagtcacaattttgtaataagcaaaacagaatgcatccatttagagatgacagacgaagtaaatc

SEQ ID NO: 604916 - DNA, 96 bp, Homo sapiens
gggggcgcgaggggaacggaggccagagctgcggtgaccattgtgaggtagatattttgttctaattttccagatgaggaagctgagaccctaaaa

SEQ ID NO: 604917 - DNA, 100 bp, Homo sapiens
ggctgctgcggagaattggagatggggaccgccctggacatcaagattaaaagagcgaataaagtttatcacgccgggatctctcaaaggccttggttct

SEQ ID NO: 604918 - DNA, 100 bp, Homo sapiens
tcctgcccaggcctggagactgacccgaccccggcactacctcgaggctccgcccccacctgctggaccccaggacggagtctcactctgttgcccaagc

SEQ ID NO: 604919 - DNA, 88 bp, Homo sapiens
gacactgcccgggcggggagggcatgttccgtggcctcgcccaggccgacgggactacgcccaagcaaggtttgatgcctatttccac

SEQ ID NO: 604920 - DNA, 124 bp, Homo sapiens
ccgactgggggcaacttggcacttagaaccgcagcagggacgtcggtttgctatcgggactcggcgaggacgctcagaggctgagaatggtgtggaggagaaaaagaaagcctgcaggtcgcca

SEQ ID NO: 604921 - DNA, 100 bp, Homo sapiens
gttcggcctgccatgtggaaaatgatgcttaatatcgatggccagtacagatgacggctttgtatataatttggatgcacgttcagataagccaattttt

SEQ ID NO: 604922 - DNA, 82 bp, Homo sapiens
atctaccacctacagccaagtggcagatttgttattggtgggcctcagtctgagcacttcaagacgacatcgcagaaggtgg

SEQ ID NO: 604923 - DNA, 100 bp, Homo sapiens
ttctgtgggcttagaggatgaggaagacctactggaagatctagatcaagctttgaaggcagcagaatctggaaaaccaggggctcatgtaactgtgaag

SEQ ID NO: 604924 - DNA, 100 bp, Homo sapiens
atggaggtgaaaaggccctcatcggcttcagcaccttttgaactaactggacacagtgtgtttgattttactcatccatgtgaccatgaggaaatgagag

SEQ ID NO: 604925 - DNA, 75 bp, Homo sapiens
ctgggagcagagattaaaagagttcggcgaggaactccagaatacaaggtggtgatctttgtgaagtctgtgcag

SEQ ID NO: 604926 - DNA, 74 bp, Homo sapiens
tcaaaaggagttcatgcttatgaatgctcgacttcagccccctaccttgtcaccaatacctcacattcctcgaa

SEQ ID NO: 604927 - DNA, 98 bp, Homo sapiens
caagcattggtcttggcaaacagggactgagctgtaaccaggcatttcatccttcatgaagccattcaggattttgaattgcatatgagtgcttggct

SEQ ID NO: 604928 - DNA, 50 bp, Homo sapiens
gctgcctcagttcttagcgcaggttaatggcctcctacatttccaaaact

SEQ ID NO: 604929 - DNA, 100 bp, Homo sapiens
cggctctcagagtatgccaaaatcgaaggtcactctgtgagactgctgggtcagaaaaaggataatggaaggcggcttgggggagcacgattggatttgc

SEQ ID NO: 604930 - DNA, 100 bp, Homo sapiens
ctccatcacctatcacagcagcatccgctctctggaggcttgggcctggaacaggacaggcaggggcccgaagaaagtgatgaatttcagagctgatgtg

SEQ ID NO: 604931 - DNA, 89 bp, Homo sapiens
attcaaacagcatgacataactgtccaatatcagatggaaatgatgcggagccttcgccatgtaaacattgatcatcttcacgtgggct

SEQ ID NO: 604932 - DNA, 100 bp, Homo sapiens
agcgcggcgccgtgttcgtggacaaggagaacctcaccatgccgggcctcaggttcgacaacatccaggaattcaaccttattgatagaagagaacttgc

SEQ ID NO: 604933 - DNA, 74 bp, Homo sapiens
cgcagtggtcgcttcttctccttgaaaccaaggatgacctagagcagctcacgactgagattaagaaaagggcc

SEQ ID NO: 604934 - DNA, 82 bp, Homo sapiens
ctgggaataaaatatgctttggcagtccgtcaggtaaactgtcttgagccccaccctcacctgcctgtgctggcaaccagtg

SEQ ID NO: 604935 - DNA, 90 bp, Homo sapiens
ctctgactgaaaaagaaggtgaaatctattgtaaaggtatgatctcgtgaaaccttgagagaaactgaatgacgaatgaaactattgttc

SEQ ID NO: 604936 - DNA, 75 bp, Homo sapiens
cggcagcagccgctctgagggcgcctgctcagttttaacttctagtcatggcgaatgatcgcaggagagcacaga

SEQ ID NO: 604937 - DNA, 100 bp, Homo sapiens
ctgagggagggtccgagccagccgctgttttgccggaggagcccctcaggccttccgagagaaatatggggacgtcttcacggtacacctgggaccgagg

SEQ ID NO: 604938 - DNA, 74 bp, Homo sapiens
gatatcaggggtcacagacatttcatggggctccactaacagataaagaaatgggggctccgagcagtcaagaa

SEQ ID NO: 604939 - DNA, 83 bp, Homo sapiens
gcctcgcgccggctatggccgtgccctggggctgagccctcagagctccacgcaggagatcggtgaggagctgatcaacggag

SEQ ID NO: 604940 - DNA, 90 bp, Homo sapiens
gatcaacggattgttgttgaaacaacatttagttcagaatccagtcagactctggcaacttttagctatcattcaggttgaagaccagaa

SEQ ID NO: 604941 - DNA, 82 bp, Homo sapiens
attcggaaccgaagattaaaaaactggagccagtccttttgccagagtgaagatagtccaagtcctaagagacagcgcctct

SEQ ID NO: 604942 - DNA, 100 bp, Homo sapiens
caccacatgaacctctgtttagaatacctacgtagtgggcagcagtcagtgacaggtgtaacctctgtggatgacagcaacagttactggaggatacggg

SEQ ID NO: 604943 - DNA, 100 bp, Homo sapiens
tttataccaacgttgagcaagatgcagaaaccaacagacaatgccaatttacgtgtcattatggaactacttatgagagaggacatgtactcccaggatt

SEQ ID NO: 604944 - DNA, 75 bp, Homo sapiens
gccatcatgattatctaccgggacctcatcagccgttgggggccgtcccgctcctaaggcaggaagatggtggcc

SEQ ID NO: 604945 - DNA, 100 bp, Homo sapiens
gggacccgaaatccttcctgtaccgcttatgccaggccgatcccgacctggactcagacaaggtatggacctgtctgccaatcaggacgaggagaccgac

SEQ ID NO: 604946 - DNA, 95 bp, Homo sapiens
acggccaacttcggcaagatccagatcgggatttacgtggagatcaagcgcagcgatgtctccagagaatacagagggcaaagatggatccaaag

SEQ ID NO: 604947 - DNA, 100 bp, Homo sapiens
ggcggcggggccggggtccgcaaggccggagaaggccgccgggcccgggcatggtggtctggggcaacgcggaaggacaaattattggattccagcacag

SEQ ID NO: 604948 - DNA, 50 bp, Homo sapiens
gccagaagaaagcatgctttctgatcattattgcagagggaatggcatac

SEQ ID NO: 604949 - DNA, 74 bp, Homo sapiens
ccgcggctgcctccagaggacctggtccagcaatgatcgtgcgcttcctgaccaagagattcattggagactat

SEQ ID NO: 604950 - DNA, 74 bp, Homo sapiens
cgaggtggcggacactcagctgatgcttggagtcgggctgatcgacatccacgacagcgatggcagttccagca

SEQ ID NO: 604951 - DNA, 100 bp, Homo sapiens
aaaagaagagatgaaggatgaggaccgtgggagtggggcctttagcctgaaatcttcccaaacatctggcacaaatgaacagtcttcagcaatagtttca

SEQ ID NO: 604952 - DNA, 95 bp, Homo sapiens
cccatggtggacgagaaggtcattgtgggctcgctctctgtgcagggtattaacgtgtcagggctgagtgttctgggatttctctagaggctggc

SEQ ID NO: 604953 - DNA, 75 bp, Homo sapiens
gtgcctcccgcctccgtgtgccctggttgtgagaagacgtctgtgtcgtgcggtaagaatgattgatgttggctg

SEQ ID NO: 604954 - DNA, 75 bp, Homo sapiens
tccggaccatgctgtatactccacaggaaatgaaacagcaaaagctggcaggctgacagaggcggcctcaggacg

SEQ ID NO: 604955 - DNA, 75 bp, Homo sapiens
gggacgtggagtgcgatacgtgcgccatctgcagggtccaggtgatggacatgcgaggattcatgacagcgcatg

SEQ ID NO: 604956 - DNA, 75 bp, Homo sapiens
ttcgaattcacaatgcagagctgcagcgttatatcctggcaaccttactaaaggactcagaattcatgattgaag

SEQ ID NO: 604957 - DNA, 100 bp, Homo sapiens
tctcagtcaaggcactcagctcaaatacacacacctgttgccattatagagctggaattaggcaaatatggacagcagcaagatgaagagcgacgtcggc

SEQ ID NO: 604958 - DNA, 100 bp, Homo sapiens
acaagacgcggctgccgtacgtggccctcgatgtgctctgcgtgttgctgggtagaaacctgtgggttcttgttgtggggcggtttccaaaggaacacag

SEQ ID NO: 604959 - DNA, 100 bp, Homo sapiens
acgacgacgacgaggaagaggaggtttctgagaatggctttactcctttatacatggctgcccaagagaatcacattgatgttgtaaaatatttgctgga

SEQ ID NO: 604960 - DNA, 75 bp, Homo sapiens
cagttttcatggatgcccctgtttctggtgataacaacgaacttgatgcaagtgataggtttgccaaggtcagac

SEQ ID NO: 604961 - DNA, 75 bp, Homo sapiens
gttttgtgcagattgccagtctaaaggccctccctatcctgaagacattagctgagagtctggcaccttttaaag

SEQ ID NO: 604962 - DNA, 82 bp, Homo sapiens
ccctgagaaccgtttacttccagaagattggtggagcttgatctgaagtttggtgccctggttgtcagatgttggaaagcag

SEQ ID NO: 604963 - DNA, 83 bp, Homo sapiens
gtcacagggaagaaagcgatttcctccgcctcttccaaagcgcggacaaggcaaaatctcagcaagttcggacctctagtaca

SEQ ID NO: 604964 - DNA, 98 bp, Homo sapiens
gcaccttcccctgccttggaaagctcctcccacggttcgtattgtgcactcaggcttggcctgtaacattgaagaggagcgctactccgaaagggtct

SEQ ID NO: 604965 - DNA, 100 bp, Homo sapiens
ctccacatcgccttttgccacctttccctttatttccggagggctccttcactgaagtggtttccatcagtaacttgggaatggcaaagaccggcccggt

SEQ ID NO: 604966 - DNA, 100 bp, Homo sapiens
gctcgaagggatactggttcgtccttactgcggaaagcttgtcctggtataaagatgatgagcaggtaattgctgccatggaaacacaactgtctaatgg

SEQ ID NO: 604967 - DNA, 80 bp, Homo sapiens
cgggagaaggcgctgcgcaagcacgctgaggagggagtgcatccgccccaacccttttccccctcgtctcctgtgagaat

SEQ ID NO: 604968 - DNA, 83 bp, Homo sapiens
caagtgtttccggaagtgtatagggaaacctgggggctccctggacaactccgagcagggactggtgattgcagctggaagtg

SEQ ID NO: 604969 - DNA, 148 bp, Homo sapiens
gtcgaagcgagggtctgaagttcacgactactagaaggggaggggagtggaaaggctctcagtgaaaaaggttggtcaaagaaaaagtgatgtatgaaaaagaggcaaaacaacaagaagaaaagattgaaaaaatgagagctgaaga

SEQ ID NO: 604970 - DNA, 100 bp, Homo sapiens
ctgaaattaatcaacgattcttgaagttgaagaaaaggtgccggagcaattcttattcctcgtttagacattgtgatttccttcgttggagctgtgagca

SEQ ID NO: 604971 - DNA, 71 bp, Homo sapiens
gctgccaccctcgttcccccgattggggccgcaggtcaacatatctcaagctgacatgcaggccattggca

SEQ ID NO: 604972 - DNA, 50 bp, Homo sapiens
gccaggaagttcctgaaggcccaggtgcgcgtggaattcatggacgacac

SEQ ID NO: 604973 - DNA, 75 bp, Homo sapiens
attttggaaagcagtttttaagacaatttcttaaacaattaggtctacatcctaactggcaattcgttgatgtat

SEQ ID NO: 604974 - DNA, 50 bp, Homo sapiens
caggcatcatccgctatgcaattgggcaccacaccccactctggccggag

SEQ ID NO: 604975 - DNA, 75 bp, Homo sapiens
aggcagacagcgagtggcgacgatggaaatcctcattgacgattcaatttgttgaaggccaatttgtggactcct

SEQ ID NO: 604976 - DNA, 85 bp, Homo sapiens
cacctcgcagtctccccaggtccgcccagcagccgcgcttcagccagacctgcctagagctggaacgttacctccagagcgagcc

SEQ ID NO: 604977 - DNA, 74 bp, Homo sapiens
gccggggctggcacactttttggagcacactgataccccaatgtccttctttgactttgtggttgatcctcatt

SEQ ID NO: 604978 - DNA, 101 bp, Homo sapiens
tggggctgcctcgccgcgtctcgccacgggaggttcccctgaaggatgctaaggaatacgctgaatccataggtgccatcgtggttgagacaagtgcaaaa

SEQ ID NO: 604979 - DNA, 98 bp, Homo sapiens
atgaaatcagggtagggacttctcccgcagcgacgcggctggcaagactgtttgtgttgcgggggccggacttcaagttggttcgactatgcaatgag

SEQ ID NO: 604980 - DNA, 95 bp, Homo sapiens
tttggagcatctccacccaggaacctcgccatccagaagaccaagaatcgccttcagccctgtctggtgcatccttggcagaaagtgaggaggaa

SEQ ID NO: 604981 - DNA, 50 bp, Homo sapiens
caggactactggctgatagatgtaagagtcttcagccaatgacttgcttg

SEQ ID NO: 604982 - DNA, 89 bp, Homo sapiens
aaggaatggaaaaattttgtgaagacattggtgttgaacctgaaaatacttaattcagtgcacaaatgagatgaatgtgaacatcccac

SEQ ID NO: 604983 - DNA, 101 bp, Homo sapiens
agcacgttccgtaaaaacaacaactactagtcggccgaactccaagcgtgaccagctttctgttgggaacactcaaagatgttttactgtgcctggctaac

SEQ ID NO: 604984 - DNA, 139 bp, Homo sapiens
ctcccacaatgtgactactttgactactggggccagggaaccctggtcaccgtctcctcagtgttctaagaacggaagcatctgggctggatggaatttagcatcaagcagagtcccctttctgttcagagtgttgtaa

SEQ ID NO: 604985 - DNA, 75 bp, Homo sapiens
gaaatatagaaatggacgtggagcatctcatagagctagaaagtattctctactgccgctgatggtcaaacgcaa

SEQ ID NO: 604986 - DNA, 80 bp, Homo sapiens
ggcaaacgagaattaaatgccgagaaggccagtacggtgaaaggtgtagcagtcactcggcctacacccacagcatcgac

SEQ ID NO: 604987 - DNA, 101 bp, Homo sapiens
gtccaatcgctatgaaacactgctgaagcagagacacgtccagaaaaatgtgatgagccacttgtctctggactcccccatgtggctttcagcagctcctc

SEQ ID NO: 604988 - DNA, 75 bp, Homo sapiens
cagaagacagagggttttcttttgagggatgttatcaagtggctggtcaaagcagtaactgaagatggattgact

SEQ ID NO: 604989 - DNA, 100 bp, Homo sapiens
tcagtttcctcacagaatgctatacagcctctctttgtatctccacctacacacggcaggccagaaaaggcgacggcggattgacagaagtatgattgga

SEQ ID NO: 604990 - DNA, 100 bp, Homo sapiens
ctggaatccaacaagggcaaatcaatgttggagttccagtgggctcgggatgagtttgaaggcctcttcaagcagccagcagaaaatgtcaaccagtacc

SEQ ID NO: 604991 - DNA, 100 bp, Homo sapiens
caacaagctgcgggctcggcatgcccaggatgctataaaatcaccacggtctttagccatgcacaaacggtagttttgtgtgttggctgctccactgtcc

SEQ ID NO: 604992 - DNA, 83 bp, Homo sapiens
agacgacgctgctgggtccgctgagcggggcgacccgaggtactgcttctccgagatggccccagtgtgtgcggtggttggag

SEQ ID NO: 604993 - DNA, 74 bp, Homo sapiens
aaccaaggatctggggatcttcgcactatcccaagattggagctggagggagcatcactgggctgaagtttaac

SEQ ID NO: 604994 - DNA, 83 bp, Homo sapiens
ctcagcctcaagccgctgctcttcgggtccccagccccaccccagccccaaaggaggctgttcgagagggacgtcctccggag

SEQ ID NO: 604995 - DNA, 74 bp, Homo sapiens
agaaccaacgaggtggccgaatcttccttcaggatatcaaggtgaacagtctacacgtggctgaccctgtggag

SEQ ID NO: 604996 - DNA, 75 bp, Homo sapiens
ccggagtttgacgaagaggtggtttttgagtcaggatggctaaaggtgaccccaagaaaccaaagggcaagatgt

SEQ ID NO: 604997 - DNA, 75 bp, Homo sapiens
ctccctgcagcagtcagcccaaaggaaggcccagacatgtccgtccttgtaagttaaaagcttccatgggagcct

SEQ ID NO: 604998 - DNA, 51 bp, Homo sapiens
cttgccccccggagccgcgagcacccaaggaaattaaggatgcagacactc

SEQ ID NO: 604999 - DNA, 75 bp, Homo sapiens
gagcctggccgtggttgctaacgcgaaaccaagaagctgtgctgaatggtttggtggccactgaggtgttgatgt

SEQ ID NO: 605000 - DNA, 83 bp, Homo sapiens
cacaacaggagctacgaggagttgaaattgcaggtgctgcagtgtctgaaatttccgggcctttctcaacagaggatgtagcc

SEQ ID NO: 605001 - DNA, 100 bp, Homo sapiens
cacccagtcctgcagcgccagcagctggactatggcatctatgttatcaaccaggtagacgaagttcctgatggagctgtaaagccacccacaaacaaac

SEQ ID NO: 605002 - DNA, 75 bp, Homo sapiens
atcttcatccctccggagaaaaagaatgtgaaattgactaaatacatggcaccgggagcctggccgctgcagtgg

SEQ ID NO: 605003 - DNA, 80 bp, Homo sapiens
caaggcgtccaggagtgacctggggctgtggagagcgacccgtggccttgtgtttcagaggtggggctggtgtccgagca

SEQ ID NO: 605004 - DNA, 113 bp, Homo sapiens
gcaaagagtattctttgtcagtatcctgcttcacttccagcaaaacaagctatcgatcagggaagatctccagttataatagataacactaatatacaagcttgggaaatgaa

SEQ ID NO: 605005 - DNA, 82 bp, Homo sapiens
tgtccctgctcatccattctcctgccacccccagacctcctcagctccagtctctgctttctatccgtcaagatgataaagt

SEQ ID NO: 605006 - DNA, 104 bp, Homo sapiens
cccgccgggagccccggagtccgcggcagcgccgagggcccctcccccaggcctctgggctctgaggcagttgcagtggtgcagaatggctgacctcagtcttg

SEQ ID NO: 605007 - DNA, 74 bp, Homo sapiens
gatgccccaccccaagggggctccagccttccagttgaaccgacaaactcaaccagaactcccagctgagccac

SEQ ID NO: 605008 - DNA, 50 bp, Homo sapiens
ctgctattgaaagagagtatgcacaggtttgtttgtaaaaacaatggtgt

SEQ ID NO: 605009 - DNA, 100 bp, Homo sapiens
agaaaacattcctgctctgaaagctcttcttgaaaaatgcaaagatgtagatgagagaaatgagcgcgttccttcacctcgggcagaataactttgcaga

SEQ ID NO: 605010 - DNA, 90 bp, Homo sapiens
ctggggtataccgttttagtcttgggggtagagtgactgcttgcgaaccagttcagcagtgcctcaggacggagaggagcaggaggagcc

SEQ ID NO: 605011 - DNA, 83 bp, Homo sapiens
caaggtcgcctacgtgcagctggcctccggtgtggctgtctctgatggtgtcatcaaggtgttcaacgacatgaaggtgcgta

SEQ ID NO: 605012 - DNA, 83 bp, Homo sapiens
aagaagatgaagaggacttctatcaaggttcctcatgccatgcacctgctgtcacccagcatgcaccctattttaagggtaca

SEQ ID NO: 605013 - DNA, 100 bp, Homo sapiens
cttcgatatcctggtggctggcagtatgcttggtgaaaggtgtagcagtcactcggcctacacccacagcatcgaccttgtgaacccagcgacctgactg

SEQ ID NO: 605014 - DNA, 82 bp, Homo sapiens
gtgactactttgactactggggccagggaaccctggtcaccgtctcctcaggctctccaggaggccggggggcccactccgc

SEQ ID NO: 605015 - DNA, 51 bp, Homo sapiens
ctgacatggccaccaacacacgtggtgcaccgggtataatttcttcaccat

SEQ ID NO: 605016 - DNA, 75 bp, Homo sapiens
cctgtctcaacgatacctattttctagtgctgagatcctgagacaatgatggatacacaactgatgacattgagt

SEQ ID NO: 605017 - DNA, 98 bp, Homo sapiens
gaaaggccgcgcgaccgcccgtcctccaactacagggaccgcacgagtgaaattcacatgtctgaagaagctatacaggacatattggaacagacaga

SEQ ID NO: 605018 - DNA, 98 bp, Homo sapiens
gcccaccggaaccccaagattggatactgccagttgcctttccccatcttcctggttctgctccttcgtggcctagtcttgtggacaccagcaagcag

SEQ ID NO: 605019 - DNA, 96 bp, Homo sapiens
gcaacagcaggactacgcttactgccagaacacaaagccaaggctctgctctttgagctccttgctcggattgaacgtatggaaaggcggatgcag

SEQ ID NO: 605020 - DNA, 83 bp, Homo sapiens
tctctgtagcctcctgctgtggccgacccgcctgcgacgctcaattctgtggtgttcttggtcacacatttatggagtttctg

SEQ ID NO: 605021 - DNA, 88 bp, Homo sapiens
ggccatggaggtctacatcccgtcctttcgctatgaagagagcgacctggagcggggatacacgctgggctcaaaatgcagagaactc

SEQ ID NO: 605022 - DNA, 100 bp, Homo sapiens
atcctacagatgtgctgtaaacatcaaaagaagacggtgggatcaggagatggaatgtgttccagaagatctagaactgaagaagaagatttttgctcag

SEQ ID NO: 605023 - DNA, 90 bp, Homo sapiens
aatcactgaccatcccaatatacaggtggaagatggatgcctgaagtgtagactgctgctagctgaataccatctgggagcataaaggtg

SEQ ID NO: 605024 - DNA, 96 bp, Homo sapiens
caaatatcctcggaagagcgctcccaggagaaacaagtcatcatcagatttgaaatatttaaagtggatacaaaactatttcagcaatgcagacaa

SEQ ID NO: 605025 - DNA, 75 bp, Homo sapiens
gacacggctttggaaacgacgtcatgtgttaggcatggaagaggagatggttcgtgttacgcagtggccgtttaa

SEQ ID NO: 605026 - DNA, 101 bp, Homo sapiens
caaggctgtcagcctcccggcccaggatggaaaggcagatgtaaagtccctcatggcgaaatataacacggggggcaacccgacagaggatgtctcagtca

SEQ ID NO: 605027 - DNA, 83 bp, Homo sapiens
cactgggaaacatcattaaatccttcttggacacttaatgattgttggcaagaaatgtgctgctgatctgggcctgaataagg

SEQ ID NO: 605028 - DNA, 101 bp, Homo sapiens
tgacatgattactgagagttcactggatgttgctgaagaagaaatcatagacgatgatgatgatgacatcacccttacagacggagtctcactctgtcacc

SEQ ID NO: 605029 - DNA, 73 bp, Homo sapiens
tcggggcagctgacctcgcccacgcccagcagcagcagcaacaggaatggaagttggatacactttgtgactt

SEQ ID NO: 605030 - DNA, 103 bp, Homo sapiens
tatgaggatgacaaactctggagtaattggagccaagaaatgagtataggtcgtggagggcccccaagacccaacagagggatgccgcaaatgaacactcagc

SEQ ID NO: 605031 - DNA, 50 bp, Homo sapiens
ctggataccaaatagcagtggaaaccgatacgtaggtaacctttccagag

SEQ ID NO: 605032 - DNA, 100 bp, Homo sapiens
atctggcccctggggggctttcaggactgagcagggggaggaacatttaagctgatggaagtggaagtggaagttgctgtacattggcagcaaggcctcc

SEQ ID NO: 605033 - DNA, 75 bp, Homo sapiens
ccggtgtctgccactgtgctgacgttcctcagagcagccctgggctgtcagcttcttggacacttaatgattgtt

SEQ ID NO: 605034 - DNA, 82 bp, Homo sapiens
tgctgaggctgcgaggaggaggaggaggaggagttacagaatgtctgaaggggacagtgtgggagaatccgtccatgggaaa

SEQ ID NO: 605035 - DNA, 75 bp, Homo sapiens
tgcgggcccggaactacgagtacctgatccgcctcttccaggagtgggagggtgctttcttctgcgacctggtac

SEQ ID NO: 605036 - DNA, 115 bp, Homo sapiens
gagttcagcttccaaagagatacagggcagaggaaaatgcaagaagactgatggagcaggcttgcaatattaaagttgcacagtgaattaaaagatgctgttgaaaaaaaattgg

SEQ ID NO: 605037 - DNA, 74 bp, Homo sapiens
agtggagccggagtgcgggcgcgccccaccaccgccctcaccatggtgtcgactgcaatggccgaggagatcag

SEQ ID NO: 605038 - DNA, 107 bp, Homo sapiens
ttgacgccatgtcgggttattcgagtgaccgagaccgcggccgggaccgagggggaacgcccttttgcttgtgactggcagggctgcgacaagaagttcgcccgctc

SEQ ID NO: 605039 - DNA, 98 bp, Homo sapiens
cgcccatcagcgcggcgctggccgagagccgcggctccgtgtttctggaaagtgacagcagggtcgcggcgagcgcgcctatgacatctactcgcggc

SEQ ID NO: 605040 - DNA, 80 bp, Homo sapiens
aaggtggacaaagaccggcagatggtggtgctggaggaagaatttcaggtgctggcccaggccctgactccctgaagaga

SEQ ID NO: 605041 - DNA, 100 bp, Homo sapiens
agccggtgatatgatctgtcctgaatgtggcttggttgtaggtgtatactcttgatgtaccagatgcattctattactgttatagtccagaccctggtaa

SEQ ID NO: 605042 - DNA, 75 bp, Homo sapiens
cagatctcacacaagtggtcagtttggttgtggaaaggaatctggtgaacagtaacaaactttggtgaaatttca

SEQ ID NO: 605043 - DNA, 87 bp, Homo sapiens
acgggccatacccaataaccaggtgcttggcaaaatcgagcgggccattgatggtggatgcttccaaaagcatcgaagctgtccatg

SEQ ID NO: 605044 - DNA, 100 bp, Homo sapiens
ctggggtctccagctgcgtactggaaacgagtgggacactctgcatgctcagcgtcctgcgggaaagaatgtaaaaagggcagctctctggcatgttcct

SEQ ID NO: 605045 - DNA, 83 bp, Homo sapiens
ctggcctccctcaccttggacacctcgcttggacagaatgttgctgcgggatgtaaaagctcttaccctccactatgaccgct

SEQ ID NO: 605046 - DNA, 50 bp, Homo sapiens
ggggagttctctgtgtctgtgaagcgagaaccactgtctctgatcaacgt

SEQ ID NO: 605047 - DNA, 83 bp, Homo sapiens
tgcgtatccgcactgtccagcccaagcctgactatggtaagtccatggcctacatgcgcggcatgtactttcgcatgaaggat

SEQ ID NO: 605048 - DNA, 50 bp, Homo sapiens
aaagcttgcgaggtggcgttaggcccatgtttgagaataaacaagtctgt

SEQ ID NO: 605049 - DNA, 95 bp, Homo sapiens
gcttttcccttacctcgacccttttgattccgcctcacagttgatggagccagttccctgtattgaacactgatatacaaggaatgaatagaagt

SEQ ID NO: 605050 - DNA, 110 bp, Homo sapiens
agcgacctggaacgtgcagaggagcgggctgagctctcagaagggacggaagccttcccagtcctgcagccacctgcagactctcacaagcacggtgctcccgggagaag

SEQ ID NO: 605051 - DNA, 100 bp, Homo sapiens
catccagagcggcaggcggagctggggtccggactgcgagatggaggaggggcggcgctgcggccacccggcagtattggtaaaggttttcaaggtgtca

SEQ ID NO: 605052 - DNA, 83 bp, Homo sapiens
ggatgagctatgacttgctaaacaatctgttgtccatctcaggttttgcgcacagctgcttccagtatgccatccagaagaaa

SEQ ID NO: 605053 - DNA, 100 bp, Homo sapiens
tttcaggatggccaagaatttgaactgagcatctcagtgctgccagataagtaccagtgctgtgctgtggctttcattgagaagctagacgcccagtctt

SEQ ID NO: 605054 - DNA, 80 bp, Homo sapiens
agtttctaggaaaggccggacaccagcgggtccatatggaatatttgctggtagggatgcctccagaggactggccacat

SEQ ID NO: 605055 - DNA, 100 bp, Homo sapiens
gcttcctgtattcccattgaagaaaaggccaaagttgttgagcccctggactatgagaatgttattgcccaaagaaaaacccagatttacagcgaccccc

SEQ ID NO: 605056 - DNA, 74 bp, Homo sapiens
cattctccaaagctgctgatgtctatgcatttgggtaatgtgaggctacaggagatgatggcaacaatgtgcca

SEQ ID NO: 605057 - DNA, 97 bp, Homo sapiens
taatcgaatagttgatgccctaaatgaattcagccggatcgagctgggagatgtgacaccacacaatattaaacagttgaaaagattgaatcaggtc

SEQ ID NO: 605058 - DNA, 82 bp, Homo sapiens
tgccacgcctgagaagattcaagacttcccaagtaagaagcggaagaggagccgctggaaccaagacacaatggaacagaag

SEQ ID NO: 605059 - DNA, 100 bp, Homo sapiens
gaccagttcccagaggtgtatgtgcccacagtgtttgagaactatgtggcagatatcgaggtggatggaaagcagattggtggaacgagaatgcctacac

SEQ ID NO: 605060 - DNA, 100 bp, Homo sapiens
ataaggagaaggataagtcgaaggggaaggcgcctgaagaggacgaaggtgagacgtggtcttgtaacacagtggttaagaatgtgactttggagccagc

SEQ ID NO: 605061 - DNA, 82 bp, Homo sapiens
tggtgtacttcgtggtcaggacggtcaggcatgaaagaattactgatgtccttgatcaaaaaaattatgtggaagaacttaa

SEQ ID NO: 605062 - DNA, 100 bp, Homo sapiens
cagagacaacgagatgaacttcctctttgatacgcaacctacggctctctgagtccttgaaaaagaaccaactctggaacgggattataagtataacttt

SEQ ID NO: 605063 - DNA, 100 bp, Homo sapiens
tcctgcaccgccaccggcccgacctcatggtggcccagttgaaatccttcccttcctctaccttggaagtgcctaccatgcatccaagtgcgagttcctc

SEQ ID NO: 605064 - DNA, 88 bp, Homo sapiens
tgctgcctctgtgtacgctgaggggggaggatgctttaatctggatcccaatagagttttggatgtcattttagaagtgtttgaatgc

SEQ ID NO: 605065 - DNA, 82 bp, Homo sapiens
ggaggaagctgatggtcatcttttccaaatgtggacgagtgctcactagcagaaaaaacctgtgtgaggaaaaacgaaaact

SEQ ID NO: 605066 - DNA, 50 bp, Homo sapiens
ctggtcttcactgacgcctctccccagggacagaaggcaattgcagctaa

SEQ ID NO: 605067 - DNA, 75 bp, Homo sapiens
gtcactaacaagctgcgtgatcttcgcatgaagaggaaccacctcagaatatgaaaccacaatcaggaaacgata

SEQ ID NO: 605068 - DNA, 100 bp, Homo sapiens
gattttgataccaggatacttgagggcggcgactggcggcgcgatggacctgaccgggctcctgctggacgaagaaggcaccttctccctcgccggcttc

SEQ ID NO: 605069 - DNA, 100 bp, Homo sapiens
tggaaagtgggaagatgataaagatgcagccaaggtcttagcagaagatggtgaccaagaatatggcccaggtgaccaaagccctggacaaggccctgag

SEQ ID NO: 605070 - DNA, 83 bp, Homo sapiens
agatgacccaccagacctcacagtcattgataagttggttgtgatttggggtggaaggcaggcatggtcaaacccatttcact

SEQ ID NO: 605071 - DNA, 100 bp, Homo sapiens
gaaaccccgcctcttacagtcacgaggaagctattttgccagccacttcattatgggaggagagaagtttgactcaactcatcctgaaggttacctgttt

SEQ ID NO: 605072 - DNA, 83 bp, Homo sapiens
ccgggcgccaccgctgccacctccgcgaggacatccggaacacggtgggcaacgtgcccttggagtggtacgatgacttcccc

SEQ ID NO: 605073 - DNA, 100 bp, Homo sapiens
ttgtcaccgaaggtcattacaagaagatgaagaaggattctcaaggaaagaaccggaggctgaagcaggccaaagaagaagctcaggctgaaattgaaca

SEQ ID NO: 605074 - DNA, 100 bp, Homo sapiens
ccagtcactcctactagtggagggggtccaatgtcaccccaggatgatgaagcagaagaggtgaagctgtggtctaccaatctagacaactcagtggcaa

SEQ ID NO: 605075 - DNA, 90 bp, Homo sapiens
tgaatactgagtggagtgagttggagaatctggtccttaaggatatgtcagatggacatctggaggacctgttgatgctagttcagagta

SEQ ID NO: 605076 - DNA, 82 bp, Homo sapiens
tcagaagccatgcccctcaggctggaacttgccctgtctcctcgcagatgagcctttctgagaaaagtctacagcattcttt

SEQ ID NO: 605077 - DNA, 74 bp, Homo sapiens
ccgccatccgggaggcccagggaagataacgaaggaggcccaacttcattcaataaggagcctgacggatttat

SEQ ID NO: 605078 - DNA, 100 bp, Homo sapiens
ccgcccagacgctgcccgcgggcccggccacggcggagccaaggaggctactcacagtcgaactacaactccccggggtccggccagaactacagtggcc

SEQ ID NO: 605079 - DNA, 85 bp, Homo sapiens
acgccgccttggacctcctgggaggcgaggacggtctctgccagtataaatgcagtgacggtggactgggtggttatggatcagg

SEQ ID NO: 605080 - DNA, 100 bp, Homo sapiens
atttcaagggtctacgcgcttttctatggcgaatgcaacccgacgagggagtgggtcaccaggagactaaagtccatcaaaaacatccagaaaattacca

SEQ ID NO: 605081 - DNA, 75 bp, Homo sapiens
cacaaccttgttgcatgccagataaatgatcagattctctcgggcctagccgtccttggaacccgatattcgggc

SEQ ID NO: 605082 - DNA, 83 bp, Homo sapiens
tcccgagcatggcaggctccctgcctccctgcgtggtggactgtggcaccggttgcagagtgggcaggatcttaagacccgat

SEQ ID NO: 605083 - DNA, 100 bp, Homo sapiens
cagcttccttgaaaaaaaagtgaagaagaaatttgattggacatttgaacagacagtggaagtactactacaaacgggagatcctggaacgggtggatgg

SEQ ID NO: 605084 - DNA, 100 bp, Homo sapiens
cttcgaaccatggaccaggccctcaagtccctgatggcctcagaggaggaggcgtggtgaccaagatgaagatgcagaggaccattgtcatccgccgaga

SEQ ID NO: 605085 - DNA, 102 bp, Homo sapiens
ccacgaggcgctggcccggaggctccagaaacgggtcctgctgctcaccaagaaaaatggctacaaacttcctagcacatgagaagatctggttcgacaagt

SEQ ID NO: 605086 - DNA, 101 bp, Homo sapiens
catgggcaccttctcatctctgcaaaccaaacaaaggcgaccctcgaaagagagaagaagaaggaggttcctgctgtgccagaaacccttaagaaaaagcg

SEQ ID NO: 605087 - DNA, 83 bp, Homo sapiens
ggcgctggcattgaggggaatatcccagctacctgatgtgacaggaagtccccatgggctgcaggggacaggaagatcctgat

SEQ ID NO: 605088 - DNA, 73 bp, Homo sapiens
tgggctttcgcccgcggctcctgagggatcggtctcagccgcgcggtgaagatagtgatccggggagacagga

SEQ ID NO: 605089 - DNA, 50 bp, Homo sapiens
ctgtaatcccagcgctttgggaggccaaggcaggtggatcacctgaggtc

SEQ ID NO: 605090 - DNA, 78 bp, Homo sapiens
taaacatgtggtacagagtgttgagaagtttattcagaaacatggagatatggaccaaaaggaacgagacgtgattat

SEQ ID NO: 605091 - DNA, 50 bp, Homo sapiens
gcaaagtgtccccggcaagaaggtactccaaagattcaggtttactcacg

SEQ ID NO: 605092 - DNA, 80 bp, Homo sapiens
agaagaacgtgaccggctgcaactgaaagctctagaggattttactggagcccagagaactcaaccaaccgagagcccca

SEQ ID NO: 605093 - DNA, 50 bp, Homo sapiens
tggccttcgtacccgtcttgattgaggctgaccccgcactacatctaccc

SEQ ID NO: 605094 - DNA, 99 bp, Homo sapiens
atcgactgtttgagcccggaagcgcagaagctgattctggatgaaattgaagaacataacatcaaaatctatcacttacctgatgcagaatcagatgaa

SEQ ID NO: 605095 - DNA, 74 bp, Homo sapiens
gacgatgaggtgacagtcacggtgacttaagagattaaaattaatttggttgctgttggttctgaacaaataat

SEQ ID NO: 605096 - DNA, 100 bp, Homo sapiens
cagccaccccagcagaggccttatggatatgaccagtctgtggctgtgccaaccagtgtcgtcacagttactcctggaaagccattgaatactgtaacta

SEQ ID NO: 605097 - DNA, 100 bp, Homo sapiens
attatcagaggtgccttggaaatgagagacaagagagacacctccaacttcgacaaagagttcaccagacagcctgtggaactgacccccactgataaac

SEQ ID NO: 605098 - DNA, 90 bp, Homo sapiens
aatggttctcgtgcctcagcctcccgagtagctggggttacagctgctgatgaagaagcatttgaagataattctgaggagtacataagg

SEQ ID NO: 605099 - DNA, 82 bp, Homo sapiens
ctggattatgggcctttcagagatgtgcctgcctatagtcagaatctaggtcaacctattaagatacgtttccaggaatctg

SEQ ID NO: 605100 - DNA, 75 bp, Homo sapiens
tttctgtgatggtgagaataatggacatggggaagggtgttcatttagaagaaagcaacactaatgattcaaaca

SEQ ID NO: 605101 - DNA, 100 bp, Homo sapiens
ctcggcaggctggcttgacagggcggcgggagctgcgggagctgcggcagctgcggcctctgggatatttggccttgacattaaaggcagagactgtggc

SEQ ID NO: 605102 - DNA, 90 bp, Homo sapiens
ttcataaacctgcttgcccctttgttcaatgagaaggccacattattactggaatccaggtctacttccccagcaggacagcatcattct

SEQ ID NO: 605103 - DNA, 75 bp, Homo sapiens
attgatgctaagaaacttttatctgagctttctaaccctgaaatttctgttcaccaggctggtttaacctgcgat

SEQ ID NO: 605104 - DNA, 100 bp, Homo sapiens
caagcaataacccaagcaaaacttcagatgcagggtttcttttgcgggacagaggatcagatgttgagagtttggacaaactcatgaaaaccaaaaatat

SEQ ID NO: 605105 - DNA, 50 bp, Homo sapiens
gaggcctactcaaatcctttctgagggtgttggagcgggccggagagaag

SEQ ID NO: 605106 - DNA, 98 bp, Homo sapiens
gaccgttggagtttaatgagaggaatatactcatcatcagtctatttagaagaggtaatggaactgctggtccatctgaataaacgtataaaaagccg

SEQ ID NO: 605107 - DNA, 100 bp, Homo sapiens
ttcaccacctacaaccacagagctgtcatggctgccatctctacttccatccctgtaatttcacagccccaggttgtctgcattcaaaagagcattctat

SEQ ID NO: 605108 - DNA, 100 bp, Homo sapiens
ccaagatctggcaccccaacatcacagagacaggggaaatatgtctgagaatttcacggtccctcatggtgtctcactccagcagacagaggattgtgtc

SEQ ID NO: 605109 - DNA, 83 bp, Homo sapiens
caccaaggcggtcaccaagtacaccagctcgaagtttggtgcacctcgatttggaggaagtagggcagggcccttatctggaa

SEQ ID NO: 605110 - DNA, 75 bp, Homo sapiens
gcaaatgctgaggactcagaccagtctctgcaagatccagttacaacacagggatcacaacaaacacaaccgcca

SEQ ID NO: 605111 - DNA, 75 bp, Homo sapiens
ttttagtacctttggagaagttcttatggtgcaggtgtggtttgaccgaagaaccaattatacccgttctttagc

SEQ ID NO: 605112 - DNA, 100 bp, Homo sapiens
ggcagtgccacctgccagctgtcagcaagtctgcgctcctcagaccaccggcaggtgaacagcctgatgcagaccgaggagtgcccacctatgctagacg

SEQ ID NO: 605113 - DNA, 104 bp, Homo sapiens
gagacacggccagatctgccctccaagtgcctggaagagctgggatgtctggttgagtcctatggcatgaatgtttgccaaccaaccccaggaaaagccttaaa

SEQ ID NO: 605114 - DNA, 83 bp, Homo sapiens
gtttgaaataataacaagctccaggaccttctacgtacaggatggtgatgtgattggcgtcaattcattgagggtgactgatg

SEQ ID NO: 605115 - DNA, 80 bp, Homo sapiens
gccgccgggacccccaggacgacgtgtacctggacatcaccggctggcgcccatgcggctctacacgctctccaagcgcc

SEQ ID NO: 605116 - DNA, 90 bp, Homo sapiens
ctttgtatgcccaagtcaagaagccgcggaattccaaaccctcacctgtagacaggagtgagctgttgccgcagaatgggctgctggctc

SEQ ID NO: 605117 - DNA, 75 bp, Homo sapiens
cggcgccgctcccaagatgtcgcagacggccatgtccgaaacctacggtgcagctgaacctggtgttttagagga

SEQ ID NO: 605118 - DNA, 100 bp, Homo sapiens
gtgcagatccgcaggcgcaaggcttcaggcgacccgtactgggcctactctggtaatcctcccacttcttaaaagtgatctttatgaagtgattcagtcc

SEQ ID NO: 605119 - DNA, 89 bp, Homo sapiens
ctcggctgtggaccgggcggcacgcacgcggtgcagggtaacatggcggatgcggaagacctcctgccccccgaggtctgcagtctcct

SEQ ID NO: 605120 - DNA, 90 bp, Homo sapiens
cgtgaccgtcgctagaactcagttgtgcgttgcggccagtcgccactgcttattggtaaaggttttcaaggtgtcatgaaaagatgggga

SEQ ID NO: 605121 - DNA, 99 bp, Homo sapiens
gggagcagaggggacagaggcaccaaggacctccaagacagacagtgagaccgtgcactaccactatggccctaaggacctggtcacaatcttgttcta

SEQ ID NO: 605122 - DNA, 75 bp, Homo sapiens
ggatctgcactgtaactgctggacccaaggacatggtggtcgggtaatagcctgcagctggtgttttgagaagcc

SEQ ID NO: 605123 - DNA, 75 bp, Homo sapiens
cattgacatttaattttagggtcctttatatagaagggagagtaggaagggaacctgattggattaccccttctg

SEQ ID NO: 605124 - DNA, 80 bp, Homo sapiens
ttgatgaaaaagtaccttcagtttgtggcagctctcacagatgtgaatacacgatatgggccctcacattttccaaacct

SEQ ID NO: 605125 - DNA, 100 bp, Homo sapiens
ccggcgcggcaggctgaggagaaagcggcgcgcggagaccaagctgtacaccctgcctgcaagccacgccacgcgtgtgtatgagatgctggtcagccac

SEQ ID NO: 605126 - DNA, 75 bp, Homo sapiens
tcgtctttgcagcgtagcccgagtcggtcagcgccggagcgatctagggcagccctgcagaggtacctgttctac

SEQ ID NO: 605127 - DNA, 101 bp, Homo sapiens
ggtcagcagtgatgatgaagagcctagcacctcttatactgatgtctgccatcatggatgttctcgcagaagcaaatggcacctttgccttaaaccttttg

SEQ ID NO: 605128 - DNA, 100 bp, Homo sapiens
aaaccagccttagactatttttcaaacaacaagttggatggcttgaggactggtactaaaaggaaacgtgactgggaggccattgccagcagaatggagg

SEQ ID NO: 605129 - DNA, 80 bp, Homo sapiens
cggagagcgagagaggggagcagaacttggtcctgatgtctgaccatggagatgtgagcctcccgcccgaagaccgggtg

SEQ ID NO: 605130 - DNA, 100 bp, Homo sapiens
gttggagtgcgttcggtgtgccgtgggtccgcgctgcttccacccaacttcctgttagacaccattcgcttttcacccaagatgatttgatgtcttataa

SEQ ID NO: 605131 - DNA, 83 bp, Homo sapiens
ttgggccaaaggacagttagaagacagtaggtcagcccaaggccaaccccactgtcactctgttcccgccctcctctgaggag

SEQ ID NO: 605132 - DNA, 51 bp, Homo sapiens
ttattgacctcttcctttatcagccacaggcgaactttctgaccaagtata

SEQ ID NO: 605133 - DNA, 95 bp, Homo sapiens
attctggagaacagcctcacttctttgattgaatacttacataatgcattggaacatgacatgagattaaggtgtgatgaatgcagactctgcta

SEQ ID NO: 605134 - DNA, 100 bp, Homo sapiens
ttcggcggcggcgcctcaggcacctcggcccggcacctgtgagaatatgaacttctcttggaggaatgaatgcaaccagtgtaaggcccctaaaccagat

SEQ ID NO: 605135 - DNA, 92 bp, Homo sapiens
cacagggatcctgagacgtctggatacctcgttaggatcagctcgcacagaggttgtctgcaagcagacagggtcttactctgtcacccagg

SEQ ID NO: 605136 - DNA, 100 bp, Homo sapiens
ggaccacttaatagtgagtcttccaaccagagcttgtgtagcgtcagatccttgagtgataaaggagtagagcgtctgagagaagaaatggaagaaatca

SEQ ID NO: 605137 - DNA, 83 bp, Homo sapiens
aagaatttgagcctctgctgaattggatgaaagataaagcccttaaggacaaggagcagcttgttgctatataccattgaaaa

SEQ ID NO: 605138 - DNA, 97 bp, Homo sapiens
tcaccactgtccaaattcagaagctcagaacgctggactctccctttgcagtttgcccgttcaccatatggaatgtattatgctacactggatcaag

SEQ ID NO: 605139 - DNA, 75 bp, Homo sapiens
aagaagaagaagaagagatgatggtgccagggatggaaggcaaagaggagatggattaccgggccttggtgcatg

SEQ ID NO: 605140 - DNA, 83 bp, Homo sapiens
agaagactcccccacatctggaactcccccactggaaaggattctgaaagaaatgaagtcagccctcagaaatgaagttgact

SEQ ID NO: 605141 - DNA, 74 bp, Homo sapiens
ttggatcaaattttcaacacatgatgatgtttgctgtttggaaattttagcattcaggtgccaggaatgcagat

SEQ ID NO: 605142 - DNA, 82 bp, Homo sapiens
ctaggaatgcagacctcctgaaaaccaagccgaggactgcggggtccggtgtccacgcagaacaatgcagatcttcgtgaag

SEQ ID NO: 605143 - DNA, 99 bp, Homo sapiens
cgcggaaatctggaaccgggatggcgacgtctacactgagtcggaggcgaaggttttgacacaagggcgcatatcttcaaagcacctagtacctcctac

SEQ ID NO: 605144 - DNA, 100 bp, Homo sapiens
ggcggaacccgtgggcctgtggactgcagcctcggcggtcagcaggttgaaatcacaaagattagacacctttttagataggtgttcttcagcaccactg

SEQ ID NO: 605145 - DNA, 99 bp, Homo sapiens
caaagggccctgggcctctaggtcctggcgccccgcccccactgctgtttctcaataagcaaaaaggttgctccttgagggcaggacagttcttatggc

SEQ ID NO: 605146 - DNA, 100 bp, Homo sapiens
ccctacgtcccagagccctattacccggaatctggatgggaccgcctccgggagctgtttggcaaagagacacagcaagaggcaacattttggaagcaga

SEQ ID NO: 605147 - DNA, 98 bp, Homo sapiens
gagcaccaagcagatcacttgcagttctcagcacagatattctacacctcacgccttcacctttaacacctccagtccctcatctgaaggttccctct

SEQ ID NO: 605148 - DNA, 83 bp, Homo sapiens
caggaacttcgtgcagtacgcctgcttcgggctctttggaatcatagctctgcaggcttctcacggcattcagcagcagcgtt

SEQ ID NO: 605149 - DNA, 98 bp, Homo sapiens
tacgacaaaggtcttttatattggcctgagaggagagtggactgaggttcaaaccttgtactactcagctgatcacaagctgcttgatgggaacctac

SEQ ID NO: 605150 - DNA, 100 bp, Homo sapiens
ttagcaagtgctcttatggacttggtacaaggagtatatcatgaaaattctacttcaaagcggaatagaagatgaactcaactgaattcaccgaagatgt

SEQ ID NO: 605151 - DNA, 106 bp, Homo sapiens
ctgtcatcttctaaacagagcagcagcagcagagatgataacatgtttcagggaactgctcgcagaaagaagaaggtggttcatagaacagccacagcagatgaca

SEQ ID NO: 605152 - DNA, 100 bp, Homo sapiens
ttcaagaggaagcccgctgccttgtggaggagttgagaaaaaccaaggggcggcgactggcggcgcgatggacctgaccgggctcctgctggacgaagaa

SEQ ID NO: 605153 - DNA, 100 bp, Homo sapiens
agctatggagatgtctatggaatttgcaccaaattgaaaacatctcccaatgaagcagcgatggattttgggtggggaagtcctccttgcggagttggcg

SEQ ID NO: 605154 - DNA, 73 bp, Homo sapiens
accgaatcgctgtcacgccggcaggcctatatgaacccaatagcaatggcgagatcaaggggtccaatccagt

SEQ ID NO: 605155 - DNA, 100 bp, Homo sapiens
gccctctggccgttgcctcaccgggacagagcgggatgccaccagcttgtccaaagggaagttccaggagctcctggtgggcatcgttgtggagaatgac

SEQ ID NO: 605156 - DNA, 51 bp, Homo sapiens
gtggcagtggcggtaccagaatgcgaggtccagatggctgtggaggccaag

SEQ ID NO: 605157 - DNA, 100 bp, Homo sapiens
accaaacctgtgataacctgtctcaaaaccctcctcatcatctactccttcgtcttctggcactgcaggagtttgtgaccaagaacttcaagagtcaaga

SEQ ID NO: 605158 - DNA, 75 bp, Homo sapiens
ttctgtggaagatgatgcttttatcaagcctaaacccccacaagaaacagaaaaaggacactcagcttgtgagcc

SEQ ID NO: 605159 - DNA, 106 bp, Homo sapiens
aagattcttacctctttgatctcgacaataaggttcgaccttgaaactacaagagtgaatctgaaagttagttcaaaaagtcaaacgggttcacagcagccaagag

SEQ ID NO: 605160 - DNA, 100 bp, Homo sapiens
cagtgtgacagtccatatgtaaccaaatattatggatcctatctgaagggccctccagaatttccacagcatacacctggacctgttcccaacagtttca

SEQ ID NO: 605161 - DNA, 83 bp, Homo sapiens
ccgcctgggcctggagctaggcaaggtggtgactaagaaattcagcaaccaggagacctgtactatactggcaattgctggag

SEQ ID NO: 605162 - DNA, 75 bp, Homo sapiens
cttgggacccaccgctgccctcagctccgagtccagggcgaggtctacgagccaggatgacagggacagcgagga

SEQ ID NO: 605163 - DNA, 100 bp, Homo sapiens
accaagaaaaccttatcagcactatttgaaacttttatctcatctggcttggcgcctgaggttctcccattaggtacttcctatttaacagacattgtgt

SEQ ID NO: 605164 - DNA, 80 bp, Homo sapiens
tggtcggtgggtgggatggaggcgaccttggagcagcacttggaagacactaagtaacttagcacttgtaaagcctgaaa

SEQ ID NO: 605165 - DNA, 98 bp, Homo sapiens
tcattactgtggtatcatttcagatttaacagaggctttggatgaagatgcagaccccacaaaatctgcactgtctgcagttgcatctttggcagctg

SEQ ID NO: 605166 - DNA, 100 bp, Homo sapiens
ttccctggggatggcgcatcacacaccaaaggtacagctggataacttgccaggaatgagtctcgtggctgggaaagcacttagctctgcccggatgtcg

SEQ ID NO: 605167 - DNA, 101 bp, Homo sapiens
tgccaacagcccccccaaacccctttccaaacctcgcacgcccaggaggagcaagtccgatggagaggctaagcggccctgttggaggaagccagaaagcg

SEQ ID NO: 605168 - DNA, 88 bp, Homo sapiens
accagaggactgggaggagcatgtcaacaggaaatctactttcttcaatgtgttaaccaatagtcaggcttcagcagaaaacttcccg

SEQ ID NO: 605169 - DNA, 96 bp, Homo sapiens
ctgacccccagaggacccatgtgatgtgggcaaccagcaaggaacttgacaagaggagtcggaagatttagagagcttctcagagcagttgaaaca

SEQ ID NO: 605170 - DNA, 75 bp, Homo sapiens
gtgacatcttctgggatttagtctgctaagaaacctttccagcttggacctacgtcatatcactgaactggataa

SEQ ID NO: 605171 - DNA, 82 bp, Homo sapiens
aagagaccccaagagtgttgagcagcccatcgtgcttaaagaagggtgagaagccctaccactgcaactgggacggctgcgg

SEQ ID NO: 605172 - DNA, 87 bp, Homo sapiens
cggcggcgggcggcagcatgtcggtggcggggctgaagaagcagttctacaaggcgagccagctccagctccagaaatcccagtacc

SEQ ID NO: 605173 - DNA, 75 bp, Homo sapiens
tccttactcccccggctgcccagaagggctatcggctagatcagtatacacacgaaaatcctgccttgcttcgtt

SEQ ID NO: 605174 - DNA, 87 bp, Homo sapiens
aacaggcgccgcgggctccgcgcccggccggacccgggcccgaggtttggtgcacctcgatttggaggaagtagggcagggccctta

SEQ ID NO: 605175 - DNA, 98 bp, Homo sapiens
ggagaaggacctggaggaagcccatcgagagaagagcaaaggagactgcaccatccgtcttattttgggagaggccagccgccatgtcatgaagacac

SEQ ID NO: 605176 - DNA, 100 bp, Homo sapiens
gacctacaccttctgatgtcttcaaacagtactcacaccttacagctaaacccacagttcagccctccccttctacaacttccaagacagttactacatc

SEQ ID NO: 605177 - DNA, 75 bp, Homo sapiens
gaccaggagaacctagctcatagcaggaggggcagcaaggcgaaccccatccctactcactggagctcagctttg

SEQ ID NO: 605178 - DNA, 100 bp, Homo sapiens
tgcttctggcgctgccgcccaccttgtggccctgggctttaccatctttgtggctgtgcttgccaggcctggctccaaatttcagaggcaggaaagtgtc

SEQ ID NO: 605179 - DNA, 90 bp, Homo sapiens
gttctgcaaggagcacggtttcgtaggatggtttgaaacatcagcaaaggaacaacatcaagcctttttgtatcagttaatgcaacatca

SEQ ID NO: 605180 - DNA, 100 bp, Homo sapiens
tgggttctggactttgggcgtcccattgccatgatatccttggaacagaagatcttattgtggaagtgacttccaatgatgctgtgagattttatccctg

SEQ ID NO: 605181 - DNA, 80 bp, Homo sapiens
aaggaggaattcgccgtgcccgagaatagctccgtccagcaggcaccgcatcagcctgctcaaccctttaaatttacaat

SEQ ID NO: 605182 - DNA, 82 bp, Homo sapiens
ccgatccagcctgcggagcctgtggggcaggtgtgcttcccgcacagctgcagccatggggtctgaggaccacggcgcccag

SEQ ID NO: 605183 - DNA, 100 bp, Homo sapiens
ttaattcaggagaactaccttctcaattctgtgcaagggctgaacaggaagcatggcgacagctgctcctggggaggtcacagggagcttttactcatgg

SEQ ID NO: 605184 - DNA, 90 bp, Homo sapiens
cgaggaggcggaggctgcggcggggcggacggtcgcgcggcggcaggcacaggtatgtgtaatcctcgaaattatagtgacacacctcca

SEQ ID NO: 605185 - DNA, 75 bp, Homo sapiens
tctgttcaggccagaccctctgggagcttctcagccattttccacagatcaggggagtacatcaagacctggcgg

SEQ ID NO: 605186 - DNA, 82 bp, Homo sapiens
tcccgacggcccgcccctcaaggacaacctcggcctgagacaccggaggaccgggtccggcctctttggcctacccccgttg

SEQ ID NO: 605187 - DNA, 100 bp, Homo sapiens
agaaaaaagaagtaaaagaagctattattacaagaataaaggcaggaatcaatccattcaatggattggccatttgatgatggagctccaccccctaatc

SEQ ID NO: 605188 - DNA, 101 bp, Homo sapiens
ccccaacgaagagtggagaacggcaacccatccagatcaccatgccgataactgttcccaggaaaaaaaggaggaaatcctggaaaatgaaaagcccagtg

SEQ ID NO: 605189 - DNA, 100 bp, Homo sapiens
ctggacaggatgcaggcagatgccaccctggagaaatgtgccacgtgctcccagcccatcctggaccggatcctgcgggctatggggaaggcctaccacc

SEQ ID NO: 605190 - DNA, 101 bp, Homo sapiens
ctggcagcagcccccggggcaagagcaggagcccggcaccccccgccgacaaggaggaagctccaccatgaggcgaggtggatggaggaagcgagctgaaa

SEQ ID NO: 605191 - DNA, 51 bp, Homo sapiens
cggcgctgctgctcgggctgctcttggagtttgcagagtggtgtctagatt

SEQ ID NO: 605192 - DNA, 100 bp, Homo sapiens
ctgaggatctttctaagcaaacagaaattgcttatggaacattagactctggctccactaaagagtttttcagggaaatttgatcaagcatcttgttaaa

SEQ ID NO: 605193 - DNA, 100 bp, Homo sapiens
tatcaaaccagatattgttgacaaagaggaggagatacaagatattattcttagatccggattcaccattgttcagagctctcagcatggcggctcctct

SEQ ID NO: 605194 - DNA, 102 bp, Homo sapiens
gaccagctctctcttcagaacagagccaatggcttggaatgagatcctgaaaggcatcttggagggtgcttcccacatcctgcctgcattccgggtcctgag

SEQ ID NO: 605195 - DNA, 75 bp, Homo sapiens
tgactattaagaccatgttggaagacaattgtggcaattaataaagacccagaagctccaattttccaagtggca

SEQ ID NO: 605196 - DNA, 100 bp, Homo sapiens
gttgacagccacctggcccagtgcttggccgaaagcacagaagacgtgacgtggttgactgcattcagccagtgccaaaagaggagcccagtcccgctac

SEQ ID NO: 605197 - DNA, 100 bp, Homo sapiens
gtcatccttgtacagcaatctcctcctccactgccactacagggaagtgcatcacatgtcagcatttaaatcaaacggtattgagatggattgggttatg

SEQ ID NO: 605198 - DNA, 82 bp, Homo sapiens
tcagccagtattctgaaattgctatccagatgatgatgcacatgctaatttgggcataggaatccctctcctggccagcaat

SEQ ID NO: 605199 - DNA, 76 bp, Homo sapiens
tggtcagtgtggcaaccagatcggtgccaaggattttatggaagaccttgggttatggaacagagaaaagaactct

SEQ ID NO: 605200 - DNA, 75 bp, Homo sapiens
gattgtcctgagaagatcctgtattcttggggagagttgctaggaaaatggttcaagtgctggattgtgtcatgt

SEQ ID NO: 605201 - DNA, 75 bp, Homo sapiens
cagaagtgggattgagacattctcacctcctcctccgcctccaaagtcgcggatcagaattcaggctataaatga

SEQ ID NO: 605202 - DNA, 78 bp, Homo sapiens
cgggactgaacaccgcacaggcaggaggcatggccaaggtggctttgtacaagtcagtgccaacgcgcttgctgtcac

SEQ ID NO: 605203 - DNA, 100 bp, Homo sapiens
cccgaggaggcagccaagctcgtagcctgccactccgtgcgaagcaggagctggccaacagctcggatgcgaccctcccagaccggccgctctcccctcc

SEQ ID NO: 605204 - DNA, 88 bp, Homo sapiens
tccaacaaagccctcccagcccccatcgagaaaaccatctccaaagccaaaggtcacgcatgaagggagcaccgtggagaagacagtg

SEQ ID NO: 605205 - DNA, 100 bp, Homo sapiens
cgctcctgcagccttgtgctggagcaccagccagacaacatcaaggctctcttccgcaagggcaaggcagcggaggaggagaaagagatggacctcccgg

SEQ ID NO: 605206 - DNA, 97 bp, Homo sapiens
ggccaagactccgtcctgcaaggttgtgtcaacgctgctcataaatataatcccagaggaccacatcccactgaacttatctggaaaggcgaaaatc

SEQ ID NO: 605207 - DNA, 100 bp, Homo sapiens
atcaagtctcgggagatctttctcagccagcctattcttttggaattggaagcaccgctgaaaatttgtgatagcatagaagccaatgtggaaaatgcag

SEQ ID NO: 605208 - DNA, 101 bp, Homo sapiens
ctgaggtcatcctggggatgggctacaaggagaacgctacaagagactgtgaaaaggaagttggaaggagctcgatcaccacttaatggagaccagcagaa

SEQ ID NO: 605209 - DNA, 100 bp, Homo sapiens
gatcctgctggcctccctggccaagattggtgaatcaggtctaggaaaatcgactctcataaacagcctattcctaactgatctgtacccagaaagagtc

SEQ ID NO: 605210 - DNA, 83 bp, Homo sapiens
ctcatcagactgaccgtgtcttacatcagttcagagaggacagattgattcactttggagctgtaagtactgatgtattaggg

SEQ ID NO: 605211 - DNA, 101 bp, Homo sapiens
gtgctggtgcgtaataagaaggtgggcgttatcttccgactgatccagctggtggtcctggtctacgtcatcgggctaatggaggttggcaggatgctact

SEQ ID NO: 605212 - DNA, 83 bp, Homo sapiens
cagagcccggggacggcgaggccctcatgtaccacacgccagatgaaaactcgctggatttttcctcctgtatgttacggcct

SEQ ID NO: 605213 - DNA, 90 bp, Homo sapiens
ctgatgctcaaaaccccatctttgaagggcttgatggaagctattgagtttgtgacgggcaccaaaaaaggcaccacgaccaacgccacg

SEQ ID NO: 605214 - DNA, 100 bp, Homo sapiens
ggtcatccttgcccttgtcctcccctttcatccctatgtggaaaacgggaggaagagatagtcgctctggatcacccatggctagacgctgaaaacccac

SEQ ID NO: 605215 - DNA, 100 bp, Homo sapiens
actgcataggactcaatgagacccagctgggcatcatcgcccctttctggttcctcatgggtgcctcctgtggcgggggcaacatgaaggtggacgattc

SEQ ID NO: 605216 - DNA, 101 bp, Homo sapiens
ttgggagatccacagctaagacaccgggacctcctggaagccaaaaatgcaggatgaagttaaaggaagtagatcgtacagccatgcaggcatggagccct

SEQ ID NO: 605217 - DNA, 74 bp, Homo sapiens
gtcacagggctactgttttccaatcctcaggtgtcctggaaccagtcccccatgagtatcgatgaatgactaca

SEQ ID NO: 605218 - DNA, 98 bp, Homo sapiens
gaggtgatgctggagaactacagcagcctggtctcactggccttatgtttgatcatcggccaaggtcctggcgagaactgcctctgcggctagctgat

SEQ ID NO: 605219 - DNA, 90 bp, Homo sapiens
tcattattctggctggagcaattgcactcatcattggctttggtatttcagatattaataaggcagcggaaagaagaaatatgaatacgg

SEQ ID NO: 605220 - DNA, 98 bp, Homo sapiens
ctgcaaccccaagatgtcggagacacggtggaaacgcttatgattcatgttacatgtaaagctgtcctcatttgtgactatggacctatggagttggg

SEQ ID NO: 605221 - DNA, 75 bp, Homo sapiens
ttttccaattgctgcggattgctgatgcccacttggacagagtgctctcaaaggtctatggccctgtgttcactc

SEQ ID NO: 605222 - DNA, 95 bp, Homo sapiens
gagaagaaggcatatgttcgactggctcctgattacgatgctttggatgttgccaacaaatgagggtcgctgtctgcccattgatagaggccaga

SEQ ID NO: 605223 - DNA, 100 bp, Homo sapiens
ctaaaaacaagactggggctgctcccatcattgatgtggtgcgatcggacagaactgtaccgctctctttttggccagctccaccctcccgacgaaggcc

SEQ ID NO: 605224 - DNA, 83 bp, Homo sapiens
cgatgccgaacgtgctgctgccgcccaaggagagcaacctcttcaaacgcatcttgacctagaggatcaagacataatgggag

SEQ ID NO: 605225 - DNA, 96 bp, Homo sapiens
agcacacattgaatgggccaaggaaaaatcgagcagaaagaatgtctttcagtttgtccacactagaaattgaaaatagagcccaagaccttcatc

SEQ ID NO: 605226 - DNA, 100 bp, Homo sapiens
tttggaagagggagtcaccactggacctccaaggaagccacgtgcagacatctacaaccttcgatctcctgacgaatgacaagagcacctcaaaggcagc

SEQ ID NO: 605227 - DNA, 75 bp, Homo sapiens
cttctcgtgggcagcctcccctcggaactcgggcatcatggcctcaggctgtaacagaggaggaaatgattttga

SEQ ID NO: 605228 - DNA, 75 bp, Homo sapiens
aaagtcctctttttctttgtaccacttactgaggaaactaaatatattttgccaactttggaaaaagaattattc

SEQ ID NO: 605229 - DNA, 100 bp, Homo sapiens
aagtgccgagtcaaaaaggctgacctccctttactcaccagcactttccttggcagccacatgttctcctgctgccacccgtgggacacggtcatccagg

SEQ ID NO: 605230 - DNA, 83 bp, Homo sapiens
ctaaggaaaccctattacctccaggtggctttctagaagatgaccatagaggaccttccagattttccattagaaggaaatcc

SEQ ID NO: 605231 - DNA, 75 bp, Homo sapiens
gtggagtctttagatgcactgttggcttgcgagacaaatatggggcaattccaaaagtcttcagatttccaaaag

SEQ ID NO: 605232 - DNA, 100 bp, Homo sapiens
ggagtttccagtgaagaacttggcttaacagaacaagctatgggcacctccagagaaagaagtgtgtttggaagtcaaaatgtggaggaactgtcttttc

SEQ ID NO: 605233 - DNA, 90 bp, Homo sapiens
cagattcgcagtggtcgcttcttctccttgagaagacggggtctccctatgttgcccaggctggtaacacagtgtaacctgatgtgcttc

SEQ ID NO: 605234 - DNA, 100 bp, Homo sapiens
ccgcctccctgccggcaagtgtgtgaagaagaagctgagcgttgtcgccgccgctatggggagagaaaattcatgaaccctttcaacatgcctaatctgt

SEQ ID NO: 605235 - DNA, 51 bp, Homo sapiens
tctgagactcctgctcagtgtagcattaagacagagtcttgctctgtcgcc

SEQ ID NO: 605236 - DNA, 100 bp, Homo sapiens
tggggagaggagacgctgccagatggaaggacgctcaaatactgggtttcagaggagcgtgctcgacctttctctccagtggagatttgccaacctgccc

SEQ ID NO: 605237 - DNA, 82 bp, Homo sapiens
caagaacgtgagcaagcccaggcacagccgacgccgcggggacgtggcccagtggaacatcgggagcctccggaccatcctg

SEQ ID NO: 605238 - DNA, 82 bp, Homo sapiens
cctttcttggcccttgttcccccaaatgtctgactctgactctcggactgagaaacgcaagttgcagagtgggcaggatctt

SEQ ID NO: 605239 - DNA, 76 bp, Homo sapiens
gccgcgctgcgcatctccaacagcgacctgagcgacttcccaagtaagaagcggaagaggagccgctggaaccaag

SEQ ID NO: 605240 - DNA, 100 bp, Homo sapiens
caacgttccgtttctaacttttattaacaaattggaccgaatgggctccaacccagccagggccctgcagcaaatgagttcatggggagatttccttttg

SEQ ID NO: 605241 - DNA, 74 bp, Homo sapiens
gccgggaagtcgacggcgccggcggctcctgttgggacccctgattttagcaggatggcccaatggaatcagct

SEQ ID NO: 605242 - DNA, 138 bp, Homo sapiens
cccatacctgcggaacctgtccagcgatgatgccaatgtcctggtgtggcacgctctcctcctacccccccaggggtaggagagtgaacggcggcggtgggtgctgatggtgatgtctgctcccaggattaggaggcc

SEQ ID NO: 605243 - DNA, 75 bp, Homo sapiens
ccgagagcgcgaatatcgtcatcgttagaagaggttgacggatatattcagacgttacgacacggatcaggacgg

SEQ ID NO: 605244 - DNA, 75 bp, Homo sapiens
gttgtgtggtcgcgtctcggaaaccggtagcgcttgcagcatgggaacccgagcgtcatgttagggtgaagcaga

SEQ ID NO: 605245 - DNA, 98 bp, Homo sapiens
gtctgagaagtgaggagaccctctgcctggcaaccaccccgtctgagaaattaataaagaactcttcagaattcctggtgtttcatcatatatacgac

SEQ ID NO: 605246 - DNA, 74 bp, Homo sapiens
ccgccgcagagtcccaccgccacaggatgcctaaatcaaaggaacttgtttcttcaagctcttctggcagtgat

SEQ ID NO: 605247 - DNA, 75 bp, Homo sapiens
ggaactgaaacatgaaaacatcgtggccctgtacgacttccagccattcaaactcctccccacgacactctgaag

SEQ ID NO: 605248 - DNA, 100 bp, Homo sapiens
atcagcgcctacccgagtgtgcgaagctagccaagataatcgcttatcagccgtatggaaaatctgtggactggtgggcctatggcgtcctgttgtatga

SEQ ID NO: 605249 - DNA, 122 bp, Homo sapiens
gtgatttcttctgacttgagcctgcagtgtgctgtgagagatctaccactagaatatcgataacttgatgaccccagaaggagttggccttaccactgccttacgtgttctctgtaatgttg

SEQ ID NO: 605250 - DNA, 100 bp, Homo sapiens
gatacccgggagactagcttggccacaggagacaacgttgaggtacagacagtgccctggttcccaagaaccattcaagagctggacagatttgccaatc

SEQ ID NO: 605251 - DNA, 88 bp, Homo sapiens
cgtgtgtcagaacaatcttgaatcatgaagctactaaccagagccggctctttctcgtgagaaagatcagtctaaagaaaaggagaag

SEQ ID NO: 605252 - DNA, 75 bp, Homo sapiens
cagccccagcccctggagaggatgcaggaagctgattaaaagaagctcctaaaccagaggtgcagacaaggtgat

SEQ ID NO: 605253 - DNA, 100 bp, Homo sapiens
agtgcgtgggggaccggctgttggcggctctcctatgtggacgccgagggcaaccctgtgggtgtggtacagatgaccttcctgcggctgctgagcgcct

SEQ ID NO: 605254 - DNA, 76 bp, Homo sapiens
gcaaagcccaacaccttcccccactggaggaatatcagggcgaggggatcacgtggcacaacatcggctacacaga

SEQ ID NO: 605255 - DNA, 75 bp, Homo sapiens
acttgggaccatggtgattcttcagcaggtcatcatcagatttgaaatatttaaagtggatacaaaactatttca

SEQ ID NO: 605256 - DNA, 75 bp, Homo sapiens
ttcagacccatttccagtcatgattttcggctttgtgagaaaccttaccatcaaacacgatggccagcaacgtta

SEQ ID NO: 605257 - DNA, 51 bp, Homo sapiens
caggattggcccactttccccattcacaggccgtgcaggcctgcccagctg

SEQ ID NO: 605258 - DNA, 50 bp, Homo sapiens
tcccaatgtgctattggcaaagagagagatacctttgtctggatatggag

SEQ ID NO: 605259 - DNA, 100 bp, Homo sapiens
tcgcgctactctctctttctggcctggaggctatccagcgcatgagccatgagcccaagtccccttcgctagggatgctttccaccgcgaccaggaccac

SEQ ID NO: 605260 - DNA, 100 bp, Homo sapiens
cggtggagcctttatatcatgggaagcactctcacttattaaagatcttggtcagaacaaaatctgcttcatcccaggcatggtaggacctatattagag

SEQ ID NO: 605261 - DNA, 87 bp, Homo sapiens
agcacgaattccagagcaagcagcaggcggtctcagctgagtctgctctgatcacccaacaagacctagctccccagcagagagcgg

SEQ ID NO: 605262 - DNA, 82 bp, Homo sapiens
acaccagcaccgcagatgttgtcaaggtggcctaccaggaggccaggggtgtcgccatgtctgaaccaatcagagtccttgt

SEQ ID NO: 605263 - DNA, 75 bp, Homo sapiens
aggcgaaggagcggccgggagcccgccgcgctggtagcgagtgggttcagatggctccaactctattttctaaat

SEQ ID NO: 605264 - DNA, 75 bp, Homo sapiens
gctgggtcagtccgccgctcaccccgcggccgcaccttcccgccttctcaggctttggatgaagagtatttaaaa

SEQ ID NO: 605265 - DNA, 97 bp, Homo sapiens
aatagaaaaacaagcaagaaaccttttagatcttcgcaaatactgtggacaatgcccgcatcgttctgcagattgacaatgcccgtcttgctgctga

SEQ ID NO: 605266 - DNA, 75 bp, Homo sapiens
agctgctcctggctacatagctccagaattcctggaaaactcaagcaattcgtatttgacttacattctggaaaa

SEQ ID NO: 605267 - DNA, 74 bp, Homo sapiens
cgaccccagtcggtgctccggggaggtcacctgacgaggaggagaagggagcactggctttgctttcatcaggc

SEQ ID NO: 605268 - DNA, 100 bp, Homo sapiens
tgctcagagagcaaaatcgcgacgactaaatacccgtgtctgaagtcttcaggcgagctcaccacatgctacagctctattaccaggttttaaacttcgc

SEQ ID NO: 605269 - DNA, 49 bp, Homo sapiens
caacaccacaataatccacagccaaggtatctcagatgaagacatcatc

SEQ ID NO: 605270 - DNA, 90 bp, Homo sapiens
aataatgcccagcggcccgccaggtcccggttattcagcttctcaaggctggaaaagcgaaggaagtttcctacaatgcactagcctcac

SEQ ID NO: 605271 - DNA, 75 bp, Homo sapiens
gccgcgccagctcctactcctccctcaactccctcatcggaatgttccggagaatcacagcagctgccactaggc

SEQ ID NO: 605272 - DNA, 101 bp, Homo sapiens
gtgatatttgcctttagtgcactcttctccttcacagtaaagtggctgggcgccaatgcttcggcattagagaaagagattggtccagaacagtttccggt

SEQ ID NO: 605273 - DNA, 80 bp, Homo sapiens
ttggcattgacatttaattttagggtcctttatatagaagggagagtagggaccttaccaggacacattagaatttttgt

SEQ ID NO: 605274 - DNA, 83 bp, Homo sapiens
caaaagccaagaggaggacagttcgctacacagcaatgcatcgaggagctgtggctaaaggaagtggaggggccgtgggatgc

SEQ ID NO: 605275 - DNA, 82 bp, Homo sapiens
gagcggcgagccggagcgcggagcccggctcccgcaccatggaggaggacgacagctacgtcgagtaatcctgcctgtgtct

SEQ ID NO: 605276 - DNA, 120 bp, Homo sapiens
taaatgatctcgtcactcctttctttgtggtcttcatttgtgaatacatagtgatcattcaggatatgttcgtccagtaccagtgccacgcagtttaaatagtgatatttcctattttgg

SEQ ID NO: 605277 - DNA, 100 bp, Homo sapiens
aaccatcgcagttggaagcccatggggcagttgttcccatgactttgccgactaaagttctaagtgcccaccgtaaatcactgaatcttgttgattctcc

SEQ ID NO: 605278 - DNA, 87 bp, Homo sapiens
gccgtccccggcccccgcccgccgcgcgccgcccacgccccgggaccggaccctcgcgccgcccgcggggttgtgtccactgtggtc

SEQ ID NO: 605279 - DNA, 100 bp, Homo sapiens
aagaggaagaccctcctgccaaaaggaaatgcatctttatgtcagaaacacaaagcagcccaaccaaagggcgaggctgtgagtgtggtgggctttggcg

SEQ ID NO: 605280 - DNA, 90 bp, Homo sapiens
ggaaaaacactagagacagacggctggcaggagaggagaggcagcagcatggcgagtgtcctgtcccgacgccttggaaagcggtccctc

SEQ ID NO: 605281 - DNA, 74 bp, Homo sapiens
ctgcgtgagtgtggtctacgagctgtttctcatctttatactcttccagtgtccactataggatttggctttgt

SEQ ID NO: 605282 - DNA, 100 bp, Homo sapiens
gccgtatccagcgcaggggcccgtgcatcatctataatgaggataatggtatcatcaaggccttcagaaacatccctggctggagtgcaatgacgcaatc

SEQ ID NO: 605283 - DNA, 82 bp, Homo sapiens
cgaagacatggaccagggctacggaggtgacagagttagtccttgataattgcctgtgtgtcaatggggaaattgaaggcct

SEQ ID NO: 605284 - DNA, 86 bp, Homo sapiens
ttcactcgagagatgaggacactgaaattcagagaggggaagtgatttgcctcagcttgtactaagtggtccaaaggcaaagttcg

SEQ ID NO: 605285 - DNA, 90 bp, Homo sapiens
gttcacataagaagttcttcgatgtatctaaacttggcaccaagtatgccaccagctctgcccacttggaagaccttgcttacctggatg

SEQ ID NO: 605286 - DNA, 51 bp, Homo sapiens
taaagatatcagcctgtctgactacaaagctgccactgcagagccccgcca

SEQ ID NO: 605287 - DNA, 83 bp, Homo sapiens
cacgacggcaggaattattggaggccaggtttactggagtaggtgttagtaaggttcaaggtgtttgcagactatgaagccta

SEQ ID NO: 605288 - DNA, 83 bp, Homo sapiens
gagttagcagtcacgacctccagcacagctgagctgcccctcctggacctgatgaagctgtacgaaggcgccttcctgccgag

SEQ ID NO: 605289 - DNA, 139 bp, Homo sapiens
cccagcctggcgggagaaggaggaggagcagcaggcctccgggcccggcgccgccgcccgcaggggctggggagaacaccaaaacaaacctggagagcatcctctcttaccccaaggacttcacctgtgtccaccaggc

SEQ ID NO: 605290 - DNA, 83 bp, Homo sapiens
ccgaagttggaagtgtctcttagcagcgcgcggagaagaacggggagccagagctagagccggtgcaggccacgcagaacaag

SEQ ID NO: 605291 - DNA, 102 bp, Homo sapiens
caccttttagcccgggactctttcacaggctggatgaagattgggacaatgcagatcttcgtgaagactctgactggtaagaccatcaccctcgaggttgag

SEQ ID NO: 605292 - DNA, 101 bp, Homo sapiens
cctgcaggtattgggagatccacagctaagacgccaggacccactggaagcctagaaatgacatccacgacagcgatggcagttccagcagcagccaccag

SEQ ID NO: 605293 - DNA, 100 bp, Homo sapiens
catccaaacattatcactctaaaggatgcgcagttgtgtagcagttgagtaatgctggttagctgttaaggtggcgtgttgcagtgcagagtgcttggct

SEQ ID NO: 605294 - DNA, 100 bp, Homo sapiens
ggatcctgtccttcatgcagtctctcattggcttctttgagactgaaatggcagatgaggacggggacttggttgccttttccagtgacgaggaattgac

SEQ ID NO: 605295 - DNA, 76 bp, Homo sapiens
cacaagacggccgaacattgagttgtgccgagacatggctcagctacggctgaactccagtgcacccagttagact

SEQ ID NO: 605296 - DNA, 95 bp, Homo sapiens
catcttcctgacccgcttcaagaagcctgctgagttcaccacagaggtctgcggggtttccgagaggctcgccgggatttctggcggggggctga

SEQ ID NO: 605297 - DNA, 100 bp, Homo sapiens
gaagaggcattgaggactttccttacctgtttttccagctcacccactgccagcagagaagaaaaagtcagcactttttgaagtgtctgaggttatacca

SEQ ID NO: 605298 - DNA, 98 bp, Homo sapiens
agcatagtgatcccattgggggttgatacagcagagacgtcatacttggaaatggctgcaggttcagaggaacagagttcagaggcagcagaaactgg

SEQ ID NO: 605299 - DNA, 75 bp, Homo sapiens
ccagcaagggtgatgagctgcgctttggccgcatggcagccctgctgagcctggccatggccacctttacccagg

SEQ ID NO: 605300 - DNA, 100 bp, Homo sapiens
tgccatgaatgcatagaacacatcaggaagcagaactggtttgaggcctttgaagaagatgagaatgtgcctactgctcctgatcctccaagtcaacatt

SEQ ID NO: 605301 - DNA, 75 bp, Homo sapiens
acaatgtagaggatgacttctctaatcagttacggccggagcctcaacagaaagctcctttagttcctcctcctc

SEQ ID NO: 605302 - DNA, 86 bp, Homo sapiens
cgcccgaccccgtcccgaccctggccgccccgagcggagcctggagtctgcgctcctcagaccaccggcaggtgaacagcctgatg

SEQ ID NO: 605303 - DNA, 100 bp, Homo sapiens
gcttccacagcttccaccaaagggaacgttggatagaagaaccttggcagctctgaacttcagtttttgcctccaatcctttgaaattgctgaaagctct

SEQ ID NO: 605304 - DNA, 100 bp, Homo sapiens
cacatccctctttaaaaattccgccgaaaaagagaagacgctttacccgactctttgggccgttatctcacggaggtatatcatacaaagagaatgcaac

SEQ ID NO: 605305 - DNA, 50 bp, Homo sapiens
ctatttcaccttcaaacaggaatgtgctggagaatctggtaaaagcacca

SEQ ID NO: 605306 - DNA, 83 bp, Homo sapiens
aaccattgaagaaaattcttttgggagccaaacccacgtatttgattttcatcaagcagctgatggtatccaggaacaacaga

SEQ ID NO: 605307 - DNA, 73 bp, Homo sapiens
ccgggagaagctggcctgggccaagggccccgagcacgacagccgcagtctccacccagaaccagagagtccc

SEQ ID NO: 605308 - DNA, 50 bp, Homo sapiens
ctgacaacgtggatcgttgttttgaaacggattggagaggtcaataagag

SEQ ID NO: 605309 - DNA, 82 bp, Homo sapiens
tcgctccctctgctcttcctcccttcgctcgcaccatgtgtccacaggatgaaatgtccgagtcaggccagtcctcggcggc

SEQ ID NO: 605310 - DNA, 75 bp, Homo sapiens
gacgctggctgcagggacccggtgacagcgtgagagggactttcagttaccttgatgatgtcccatttaagacag

SEQ ID NO: 605311 - DNA, 114 bp, Homo sapiens
gctatacggtctttagggttacgtgaagtcaagtaaaatcgcacactggataccatacttgcagagctccttcagatacataaagaacacattgtaggataccatgaacatgat

SEQ ID NO: 605312 - DNA, 100 bp, Homo sapiens
atatgacagtggacatagaggacaacgcagatatagaacatttcttttatcacaagcctgatccggggatggcctctgcctccaccacaatgcatactac

SEQ ID NO: 605313 - DNA, 98 bp, Homo sapiens
agaccgtgcagaatgttacattgtcgctcactctgcccatcacgtgccacatttgcttggggaaggtgtcacaacataatgaaagttgctcaagccaa

SEQ ID NO: 605314 - DNA, 50 bp, Homo sapiens
ggaacccggactccggcgtagcggaaagaaaccttgactggttccccagg

SEQ ID NO: 605315 - DNA, 80 bp, Homo sapiens
gaaatttatttgaacaatttcacagaacactgattccccatcctatccagagattagttttagttgcagcatggaacaat

SEQ ID NO: 605316 - DNA, 111 bp, Homo sapiens
gtgagtcttctggcaaacagtgtttgcctctggttcagctcatacaacagcttcttagatgatggtggtgctaccccagtacaggatgaacgggattcagggtcagacggt

SEQ ID NO: 605317 - DNA, 50 bp, Homo sapiens
aaatacttgtgcactgggagaggatgttgcttcagagtgtgaagtcaaat

SEQ ID NO: 605318 - DNA, 82 bp, Homo sapiens
aaccaacgcctggctcggagcagcagcctctgagattgccagcgtcctgacgtcacagaagccctctgtcctcctcactttg

SEQ ID NO: 605319 - DNA, 100 bp, Homo sapiens
ctggtgtttggggcacgtccagcctctttggagagcgcttcgaccatcactgcccctgggtggggaattgtgttggaaagaggaactaccgctacttcta

SEQ ID NO: 605320 - DNA, 75 bp, Homo sapiens
tcctgaagatgacccattatttccacctattgagggcccctgactgaaccttgggcagaagacagtcccccagac

SEQ ID NO: 605321 - DNA, 99 bp, Homo sapiens
aggagcacggacctcagtaccagtacaggatcatcttccggacccgcgagttttcggctttgtgagaaaccttaccatcaaacacgatggccagcaacg

SEQ ID NO: 605322 - DNA, 132 bp, Homo sapiens
gtcttcagtggttctcgtctcaaactctatttgccaaaggaaacttgccttatcaccttcttgcttgcagaatgggagctgactgatatggtggtgtgggtgactggagcctcgagtggaattggtgaggag

SEQ ID NO: 605323 - DNA, 100 bp, Homo sapiens
ccggcagtaactggctctccggggtgaatgtcgtgctggtgatggcctacgggagcctgatacctcttccaaatgcatgatgaagatgttctcatcaaca

SEQ ID NO: 605324 - DNA, 75 bp, Homo sapiens
gtcaacatggttgacgttgcaaaggcgcttaatcggcctccaacgtgctttgacacatcttcctcatcttcgaac

SEQ ID NO: 605325 - DNA, 90 bp, Homo sapiens
cccagataaaccaaaggaattttgaagtcaccactgaggaggaattcaccctgttcgtctatggctggactctgtgaagctgagcaggag

SEQ ID NO: 605326 - DNA, 100 bp, Homo sapiens
actcggagggcgagcggacctccctggagaaggtctagatgttgatggaatatatcgagttagtggcaatctggcaacaatacagaagttaagatttatt

SEQ ID NO: 605327 - DNA, 100 bp, Homo sapiens
ctgcttgtgaacctggcccgggacctgcagtgccccaagaagagggttctcgtggcaaccttttactacctttgccttaacctttggccactgttcttgg

SEQ ID NO: 605328 - DNA, 83 bp, Homo sapiens
ttctcacttggctgctcaaagtgcaagtgaaagtgtaggaaaacatatgcttgaagcgtgcaacaataatctggaaatggcag

SEQ ID NO: 605329 - DNA, 90 bp, Homo sapiens
gactctttctgttcaggccagaccctctgggagcttctcagccattttccacagatcagagctcaggccccggggcctccagcggcacca

SEQ ID NO: 605330 - DNA, 75 bp, Homo sapiens
gccatggataagaagaaagtgttggtcaaggtgccccacctcaaccagaatgcctggaacaacctggagaaatat

SEQ ID NO: 605331 - DNA, 100 bp, Homo sapiens
gataaaacgtgtcaattccttagcattggccgaagagttaaggaaaaccctttcctgtatgccatctgttttctgtggggccctgagtgatgaggagagg

SEQ ID NO: 605332 - DNA, 87 bp, Homo sapiens
gcagggtggtgtgatagcggcagcgaggggctcggagaggtgctcggattctcgtagctgtgccggtgcaatcgtgtacctgatgag

SEQ ID NO: 605333 - DNA, 51 bp, Homo sapiens
gactgagtcctccatgaagaggcgaactttctgaccaagtatacaactacc

SEQ ID NO: 605334 - DNA, 75 bp, Homo sapiens
cccatttgtgttcggacagcccctttccttccagcagcctcagcttcagagatgaaacgaggaggaagagatagt

SEQ ID NO: 605335 - DNA, 100 bp, Homo sapiens
tgtagaggcggcggacgggccggagggaggatgttaaagccccgcgagttcgttttctagccaaggaaaatgtaacccaggacgctgaggacaacacagt

SEQ ID NO: 605336 - DNA, 75 bp, Homo sapiens
ctgtggcccgagggaggcagatggctgtgatccaaaatcccttcagcaatggtggcagtccggcggccgaggctg

SEQ ID NO: 605337 - DNA, 75 bp, Homo sapiens
catccccgggcgattcctgtctaagaaaaggaggatttaaagtgaagtcactgcttttgctgtcttggatcaaga

SEQ ID NO: 605338 - DNA, 100 bp, Homo sapiens
tcacagaaatgtgtgtaaaaatgattcgcagagtcaatgatgaagagggcattaagttccgatgaagttaaattccgtcaagatttaatgaatattgcgg

SEQ ID NO: 605339 - DNA, 83 bp, Homo sapiens
aggaaatgcagctttaattggacagaaatttgcagccaactcagatttaaaggaactgtggctgcaccatctgtcttcatctt

SEQ ID NO: 605340 - DNA, 82 bp, Homo sapiens
accgcgcgcagggcctgcagcgggagctggacggcgagcgcgagcggcgcgagaaaactacgtctactttgagaactcctcc

SEQ ID NO: 605341 - DNA, 50 bp, Homo sapiens
tgtggggcggtcccggccccgcagggtgacatccagcagctgctctttgt

SEQ ID NO: 605342 - DNA, 73 bp, Homo sapiens
ctttactatgcgagggcctaacaatgccactctaaactggcgatggaatatgagaggagccctctggaaagaa

SEQ ID NO: 605343 - DNA, 100 bp, Homo sapiens
cgggcaggtgttcgacgtggggccgcgctacaccaacctctcgtacatcggcgagggcgcctacggcatggtgtgatgagcagcaccagcagtaagaggg

SEQ ID NO: 605344 - DNA, 80 bp, Homo sapiens
tctcggcgctgccgtctctggaggagtactggcaacaggtgtcgtgaaaactacccctaaaagccaaaatgggaaaggaa

SEQ ID NO: 605345 - DNA, 100 bp, Homo sapiens
ccctagcagcagccgccgccagagaggcccgcccaccagttcgcccgtccccctgccccgttcacaatgaattgaatgatctggcacgggaccctccagc

SEQ ID NO: 605346 - DNA, 100 bp, Homo sapiens
tggctgcagaccctgcgggagatgctggagaagctgatgtgtttcctgtaacaaatcgttcaagaaactctggtcccttcatgaacatatcaagatcgtc

SEQ ID NO: 605347 - DNA, 90 bp, Homo sapiens
cgcgagcacagagcctcgcctttgccgatccgccgcccgtccacacccgccgccaggagaactacgatgacccgcacaaaacccctgcct

SEQ ID NO: 605348 - DNA, 76 bp, Homo sapiens
atggcctcaaatgagagagatgctatatcgtggtaccaaaagaaggaattgaatgatctggcacgggaccctccag

SEQ ID NO: 605349 - DNA, 75 bp, Homo sapiens
tggagttttacaaaaaggatggaaaacctcggatcaattctcagctggtggcacaacaagtggcacaacagtatg

SEQ ID NO: 605350 - DNA, 100 bp, Homo sapiens
gctgagatgggcaccgcggatctggggccgtcctcagagatcctgaaggagctagacgagtgctacgagcgcttcagtcgcgagacagacggggcgcaga

SEQ ID NO: 605351 - DNA, 50 bp, Homo sapiens
acagaagtggggagaagcggaggtgaaatgacaatggatgctctgttggc

SEQ ID NO: 605352 - DNA, 74 bp, Homo sapiens
tctaccctggaggagattctggggcagtatcaacggagtctccggggaatgtatcctgtcaggtataatgtcag

SEQ ID NO: 605353 - DNA, 101 bp, Homo sapiens
tgatctctcactcatcccaaattctgcatgtggatgactgtcaagaacaagtatgccacatcgaagcatgctaagatcagcactctaccacagctgaattc

SEQ ID NO: 605354 - DNA, 100 bp, Homo sapiens
tccgccccccaggaggggcgagagggagccgcagctgatgtcaggccaatgagtgccaggagcgccctgttgagtgtaagttctgcaaactggacatgca

SEQ ID NO: 605355 - DNA, 83 bp, Homo sapiens
aaaagagatgtggggggattctcgacctgctaacagaactggaccttttcgttgtcgagatgtccacagaaggaggatttggt

SEQ ID NO: 605356 - DNA, 75 bp, Homo sapiens
aaggagaaattcgactatggcaacaagtacaagcggcgggtgccccgggagggtgtgaagacagagaatgaccac

SEQ ID NO: 605357 - DNA, 90 bp, Homo sapiens
tgctgcctctgctgaatgtggagcctgctggggccacactgatccgtgtgtcccggcatggatatccggaacaacctcactaggttgcat

SEQ ID NO: 605358 - DNA, 82 bp, Homo sapiens
gccttggccagagaagagaacaggaccaagaatcgccttcagccctgtctggtgcatccttggcagaaagtgaggaggaaaa

SEQ ID NO: 605359 - DNA, 75 bp, Homo sapiens
ttcaaggatatgctgtattcagctcaggaccaggcaccttctgtggaaggcttcaagcactttcctgaagcgggg

SEQ ID NO: 605360 - DNA, 75 bp, Homo sapiens
cccggcgccgaggcggccacccgagacgcggcgcgcacgctccggcctgcgccccaaggaggcccgcctgacgac

SEQ ID NO: 605361 - DNA, 75 bp, Homo sapiens
aatttccatgtcaacatagtcctgattccacctgctcctacgaagcccgactttgatggtcctcgagagaagatg

SEQ ID NO: 605362 - DNA, 80 bp, Homo sapiens
ggaggagaagaagggatggcagagaaggattcagtggcctttgaggatgtggctgtgaacttcaccctggaggagtgggc

SEQ ID NO: 605363 - DNA, 51 bp, Homo sapiens
gactgctaagaagataccaccaggggacggcaaaacagaacagaaaggcgg

SEQ ID NO: 605364 - DNA, 75 bp, Homo sapiens
ctgaatttaacacggagaccaccccagctacgaacagattcagcttagcagtgtctgcaaaaacgaatcttttcc

SEQ ID NO: 605365 - DNA, 98 bp, Homo sapiens
gccccgggccaggccgcggccggggcaggagcgcagcaggtggtccattatggctgacatgcaaaatctggtagaaagattggagagggcagtgggcc

SEQ ID NO: 605366 - DNA, 90 bp, Homo sapiens
gcggcctgcgggggcggcgcagttgcgaaactgatatggtttgaagtggtgaacatggatttttctcggcttcacatgtacagtcctccc

SEQ ID NO: 605367 - DNA, 98 bp, Homo sapiens
gggaaaggagaggatcccggagccgttagggcctagtcaaaattttgaagctgagtcaattcaagataatgcgcatatggcagagggcacaggtttct

SEQ ID NO: 605368 - DNA, 75 bp, Homo sapiens
tagtgacaggggcgaacgccgccgggagactccagccggcgggcgagcaggccatcccaggcctcaggacctgag

SEQ ID NO: 605369 - DNA, 100 bp, Homo sapiens
aagaatcctgagagcccatttatgttttccttacatctcaatgaagcaagggactatgaaggtgatgggcagaatctgtttacgaaagacgtgacagtga

SEQ ID NO: 605370 - DNA, 82 bp, Homo sapiens
gaggcattgaagctgctgctgagcccgggagtgtggaggtcatccgtctgggccacagctacttcatcaactgggataagaa

SEQ ID NO: 605371 - DNA, 100 bp, Homo sapiens
cggattttggaggcattgaagctgctgctgagcccgggaggtgctggagaatctggtaaaagcaccattgtgaagcagatgaggatcctgcatgttaatg

SEQ ID NO: 605372 - DNA, 100 bp, Homo sapiens
cctggagttaaatttatcatgtccacatggcatgggagaaagaggaatgggcctggcctgtgggcagtatgtccgtggttcagaccctgtattaaagctt

SEQ ID NO: 605373 - DNA, 100 bp, Homo sapiens
attcgcctccatctgtaccatggatgatcggctgaatgtaacagaggaactaacgtccaacgacaagacgaggattctcaacgtccagtccaggctcaca

SEQ ID NO: 605374 - DNA, 98 bp, Homo sapiens
acgacgagacctacggcgtgccctccctggaggagctggatatcaatgatgtcaaacggctgaaacctggctacttagaagctactgtggactggttt

SEQ ID NO: 605375 - DNA, 90 bp, Homo sapiens
gatcactctgggactcgtggggctgcagcaccgttggaagatgctggctcaagtagtttagataatctactaagtagatacatctcaggc

SEQ ID NO: 605376 - DNA, 75 bp, Homo sapiens
cttttttcaggcagaaaacaagtctcgtctggacggctgaaaggttccctgagtcgaggtgactggtacaagaca

SEQ ID NO: 605377 - DNA, 75 bp, Homo sapiens
tggaaactgtacattgaagcagagaacgagcgacgtgacacaagaggtcccaagggagcaaacctgaaagccaga

SEQ ID NO: 605378 - DNA, 74 bp, Homo sapiens
ctgtcactcacttacacagtattgggaaatctgtgaaaggtgtcatggagaaactccagctgggcccagagatt

SEQ ID NO: 605379 - DNA, 100 bp, Homo sapiens
atatgaacaccgtttctggctcccctaaagtgcatcctcctaatgggacccggttttacacttttcaagaagaagttgcctatgaagaaagggcctgtga

SEQ ID NO: 605380 - DNA, 100 bp, Homo sapiens
gtgggctccggagcctcagcgccgcgcaggtatgatcctgatattctgctaggatatgagattcagatgcattcctggggttacctcttacaaagggctg

SEQ ID NO: 605381 - DNA, 75 bp, Homo sapiens
gtcgcatttgtagacatgcttagaaactgtgggtcctttactcgggagaaaccagcagaaactgagaggagaaga

SEQ ID NO: 605382 - DNA, 84 bp, Homo sapiens
cgtggagtgacggtgccaccgcggcgcacaatgcagatcttcgtgaagactctgactggtaagaccatcaccctcgaggttgag

SEQ ID NO: 605383 - DNA, 90 bp, Homo sapiens
ctggagtgttggctgcatatttgcagaaatgtttcgtagaaaaatcttgtggaagaagaatgaagttgctgattatgaagctacaacatt

SEQ ID NO: 605384 - DNA, 74 bp, Homo sapiens
agcaccctccagctccctacccatccgccaggagccctcttccttcaggtcatcttccacgatgttgctgtgct

SEQ ID NO: 605385 - DNA, 50 bp, Homo sapiens
ccacagctcagcttcaggtacagaagacgccacaggtcatcatctggatc

SEQ ID NO: 605386 - DNA, 100 bp, Homo sapiens
aagcttgacattacagccaagatggtgctgtcccagagacaacgagatgaacttgaaggtggtgtttttaaggctcatcttactttcccaaaagattatc

SEQ ID NO: 605387 - DNA, 97 bp, Homo sapiens
tggaccaaaatgggcaggctattcaatatgaacttcagtcattgggggaatccaatgcacaaatggtcggatccgcacaagacggcaaagctctggg

SEQ ID NO: 605388 - DNA, 89 bp, Homo sapiens
ggcttttggtggggagataaaatccattgctgctaagtactccggttcccagcttctgcaaaagcatggcttctcgctgtttctgggat

SEQ ID NO: 605389 - DNA, 75 bp, Homo sapiens
actccctctcagcctccgcctggtctctgaccctcagtgcagacgcaagcgtgaacacccttcctgtagtggtct

SEQ ID NO: 605390 - DNA, 100 bp, Homo sapiens
acgtcaacaatgatgtgaaccttcgcattcagaatttgaccatcttggtgagaaacattaagacctactaccagggtaacaagatgctcaactatagtgc

SEQ ID NO: 605391 - DNA, 90 bp, Homo sapiens
aacctgataacactgcatgaaatgttagaggtgggtttggaggatttgggacaacatctacaactgcaggttctgcattcagcttttctg

SEQ ID NO: 605392 - DNA, 75 bp, Homo sapiens
cgccacgcagccggccaccgccgagacccagcacatcgccgaccaggaagtgcacggctgtctataacgtgctgc

SEQ ID NO: 605393 - DNA, 100 bp, Homo sapiens
ataaaactcctgcccctcttcaacacctggacaccttgttagatggaacctacaagcaggcttgcattgatgacaatgttgatatggtgaagtttctggt

SEQ ID NO: 605394 - DNA, 48 bp, Homo sapiens
aggtccattcctgatggctctgccttgataaatttgctgaagttcctt

SEQ ID NO: 605395 - DNA, 100 bp, Homo sapiens
ccggagtggggaagacctgcgtcctttttcgtttttcggatgatgccttcaatactacctttatttccaccataggtcaaaatgcagatcttcgtgaaaa

SEQ ID NO: 605396 - DNA, 90 bp, Homo sapiens
aggttacgcagcaaaccatccagaagggctgaagaagatgcagagcagcctgaagctggtggactgtatcatcgaggtccacgatgcccg

SEQ ID NO: 605397 - DNA, 82 bp, Homo sapiens
ggatgggatccagctgttagtcgggtaggcataggcttatggctatgggccatacggtggtgcgtacccgccaggaactcaa

SEQ ID NO: 605398 - DNA, 82 bp, Homo sapiens
agcctgtacacaacaagacagtttatcttgtccatgggtttggtgccctggttgtcagatgttggaaagcagtaggacggaa

SEQ ID NO: 605399 - DNA, 101 bp, Homo sapiens
cttctgcagatcgatgcggaaggcgagtgccaggagggagagatcctggccacaggcagtacggcatggtgctcggctggagcattggatttgctaaagga

SEQ ID NO: 605400 - DNA, 50 bp, Homo sapiens
ctgacctgtaaatcatcctttaggtgatgcagtttggacggattgatggc

SEQ ID NO: 605401 - DNA, 82 bp, Homo sapiens
gtcgtcgcccctgccgccgctgccaccgaaggaagcatcccagacaccgggaagaacactctgctccagccaaggtggtgag

SEQ ID NO: 605402 - DNA, 75 bp, Homo sapiens
tatcaagtaatggtgcaaagcctgaaagccaggactgtctccagtttggtcctcctgctgaaggggaagtggtcc

SEQ ID NO: 605403 - DNA, 88 bp, Homo sapiens
gatctctggtgcaggaaaaatgttcactgcagagcccacaggcggttttgtgagctgcttccccaggagcagcggagcgtggagtcgt

SEQ ID NO: 605404 - DNA, 74 bp, Homo sapiens
ccataagcagattgctgtcatgcggggccaggctaaaggaaagtcacctgcaagagatcccggcactgatctgg

SEQ ID NO: 605405 - DNA, 100 bp, Homo sapiens
ccaaccttattaagaggaacacagaactggagacccttttggctaaactcatccaaacctgtcaacatgttgaactggttttccaagaattgatataaag

SEQ ID NO: 605406 - DNA, 75 bp, Homo sapiens
cggcttgttgtcttcaattaaaaaatttattaaaggaagcacacctaaggattattggccaagggaaatccattt

SEQ ID NO: 605407 - DNA, 83 bp, Homo sapiens
ggcagaagtggaagcaacttctatttagtgatcatgatcttgcattacgatgtttggttgaaacctatgctgccagttttgag

SEQ ID NO: 605408 - DNA, 50 bp, Homo sapiens
tgaaagtggaggctgcgaaaataggttactataacaacagtaccaaggtg

SEQ ID NO: 605409 - DNA, 83 bp, Homo sapiens
gtgcgctcgatccagcaccatggggaagcgggacaatcgggtggctcttgtcaggatggtgaagctgttcatcggaaacctgc

SEQ ID NO: 605410 - DNA, 83 bp, Homo sapiens
tgctgggagagaatgggcgggtgctggccgggcagaccctgggatcagtgaatgcttgtgaaaagacctcatttatgtttctg

SEQ ID NO: 605411 - DNA, 50 bp, Homo sapiens
gctgagacccgcgtccccactatgagccttgtcctgccaagaagttactg

SEQ ID NO: 605412 - DNA, 146 bp, Homo sapiens
atcctctaacatcacctgcttcatccttgtttaatgactttggtgccctcaacatctctcagagacgaaagctcacatgcatggtttgtcctgatacgagcacacaaacactagctggatattgccctccgtgctgcacggcgggt

SEQ ID NO: 605413 - DNA, 80 bp, Homo sapiens
gatggctgtggagagcccgtccgacagcgctgaggtgaaagaacttgtcctggacaacagtcggtcgaatgaaggcaaac

SEQ ID NO: 605414 - DNA, 100 bp, Homo sapiens
gagaccgtgaagattccaagttcaggagaactcgaccggaatagccaggccagaagaaggaaggcctgtggtgagtgggacaggaaatgacatcaccacc

SEQ ID NO: 605415 - DNA, 100 bp, Homo sapiens
ccggctgccaccttctgggctcctggggccctgcccaccacaactaacaggcctcacctcttccattccggagatgatccttggacatcttttcagccag

SEQ ID NO: 605416 - DNA, 83 bp, Homo sapiens
caactgtgcagtgttcccactgcaaactacggatggggtgttggagcgggccggagagaagtagagtgggctgcgaggagaag

SEQ ID NO: 605417 - DNA, 75 bp, Homo sapiens
agtcacataaggatgaaatattccaggtgttcgaaatccgcaccactgatgacctcactgaggcctggctccaag

SEQ ID NO: 605418 - DNA, 111 bp, Homo sapiens
ggaagatttattttggataacttgaaacctcaccttgtggctgctttaaaggaagctgcccaaacccgagatcaggatcctcatgaccagccaaagagaagaagaattagg

SEQ ID NO: 605419 - DNA, 148 bp, Homo sapiens
agctcaccttctatgcaggccccaatggcagccagtttggattttcactggacttccacaaggacagccatgggagcatcctaatgtcctatgatcacgtggaactcacattcaatgacatgaagaacgtgccagaagccttcaaagg

SEQ ID NO: 605420 - DNA, 87 bp, Homo sapiens
atttgcaagtcatcagactgcataaaatcagactcacagatgaatgcttctcacccggaaacaaacttgccagttgggtatcctcct

SEQ ID NO: 605421 - DNA, 100 bp, Homo sapiens
cagtgggctaccgggctttggtgcagacagaggatcatctgctacttttcctgcagcagttgggcatcatgacggtgatgtcagctctgtcggtggcccc

SEQ ID NO: 605422 - DNA, 101 bp, Homo sapiens
ctctccaaagcagcccttctgcgcaggagctgaaagctccactgggaactttatattgctgttggaatatctggagccatccaacatttagctgggatgaa

SEQ ID NO: 605423 - DNA, 100 bp, Homo sapiens
cccaaattgaggcgcaatgatgagaggatgtggtggtctactctgatgtcaatcttgagggctaggttaatgttgaagaaggaaaatgcggaagtcgtca

SEQ ID NO: 605424 - DNA, 75 bp, Homo sapiens
gcaccaccatgctcgccctggaggctgcacagtgcacatccatcctgatgctggtcaccggaggacggctcagcg

SEQ ID NO: 605425 - DNA, 100 bp, Homo sapiens
tcaccaatgcaacttccatacaaatcactgctcctgcttctatgttgatagggtatgcataagatgactccaccaattaaagatctgctgcctagactca

SEQ ID NO: 605426 - DNA, 75 bp, Homo sapiens
tggggaaaagaaactacagtcatcacaatggtctggatgggcacagcctttgcagcgagcagggcagcagtgctg

SEQ ID NO: 605427 - DNA, 100 bp, Homo sapiens
gagctctgtgcacctccactgaaacgcaaggagcagacagaacctacaccatccgtgagaaggggaaactgaggcccaaggaaattgagtatctctgcaa

SEQ ID NO: 605428 - DNA, 49 bp, Homo sapiens
aactaagcagggcggtcggggaatcagtcggatttgtcagatgaagagc

SEQ ID NO: 605429 - DNA, 110 bp, Homo sapiens
tgcgagctgtgggaaacattgtcacaggggatgatattcagacacagcctacaattcagtggcatccctcaactgctgacatcgaggatctagcaacagaacctaaaaaa

SEQ ID NO: 605430 - DNA, 99 bp, Homo sapiens
cagccgctacgtgactcttttctccagtggtttgagtccagccaatgacactggagccaaaaagaagaaaaagaaacaaaaaaagaagaaagaaaaagg

SEQ ID NO: 605431 - DNA, 100 bp, Homo sapiens
agcaatatctctgggctttcacaggcgaaagttcaccaaaaaggccccaactagcagctcccagagaagtttcgtggagtttatcttggagcctctttat

SEQ ID NO: 605432 - DNA, 74 bp, Homo sapiens
ggaggggctccggctggtctgtggtgaggctgaagaactgaaactggccacccagctgaccggaccggtcatgc

SEQ ID NO: 605433 - DNA, 90 bp, Homo sapiens
caagccaaggcgaaagagacgctcaggtactacgacgtccccatcgccaccctggacttctcctcgctgtacccgtccatcatgatggcc

SEQ ID NO: 605434 - DNA, 110 bp, Homo sapiens
cccgccggccccatgaggagggacgtgaacggagtgaccaagagcaggtttgaggagccttcacgtaaatgggtccagtcatgcctcccagtaagaagccagaaagctca

SEQ ID NO: 605435 - DNA, 100 bp, Homo sapiens
ctgggacagaaggctcctccctctgaaaggcctaaagaatgtatttgacgaagcaatattggctgccctggagcctccagaaccgaagaagagccgcagg

SEQ ID NO: 605436 - DNA, 82 bp, Homo sapiens
gttttgggatttgagattgacgcggtgaactctgtccagttttcaaaccacacaggggctttgaccacgacctttgaagagc

SEQ ID NO: 605437 - DNA, 83 bp, Homo sapiens
ggcacggtgggagtgtctccggctggcttgcaggtgctggagaatctggtaaaagcaccattgtgaagcagatgaggatcctg

SEQ ID NO: 605438 - DNA, 75 bp, Homo sapiens
caaagttattgccagcttcctgtgatcttccattgtttgaagcactggacctttaatccactgtaggtatggaca

SEQ ID NO: 605439 - DNA, 131 bp, Homo sapiens
cggtgctgtcatggctggagtaaggcccctggctcccagaggtgcaccaaacggcaatgacatcattgcagcagccaagcgcatggctctgctgatggctgagatgtctcggctggtaagagggggcagtg

SEQ ID NO: 605440 - DNA, 90 bp, Homo sapiens
tgctgaagagagaagatggcgcttgacggaccagagcaggtctcgctctcgaagcagacattcccgtaagagcagaagccgaagtggcag

SEQ ID NO: 605441 - DNA, 98 bp, Homo sapiens
aggaagtgctgcttcaaacgggcagggctctaggaaacatatgttacgatagccctgttccatttcctccaagtcaccggcttacagcaaaagaagtg

SEQ ID NO: 605442 - DNA, 51 bp, Homo sapiens
ctggagcagcccagcaagcccagaggatgccttcaattaagttgcagagtt

SEQ ID NO: 605443 - DNA, 75 bp, Homo sapiens
agccaaggtgtttccaggaagttcagagagaacaggattctgaaaccttccttgtatccctcctgagacatcttt

SEQ ID NO: 605444 - DNA, 51 bp, Homo sapiens
agcaagaatgacttctccctctccctcaaatggagtctcgctctgtcaccc

SEQ ID NO: 605445 - DNA, 82 bp, Homo sapiens
ccccggctcgcggggcccggcgaagggcagtatcaaaggtgcagaatctgggacaagttgcatgaagagcatatcaatgcag

SEQ ID NO: 605446 - DNA, 82 bp, Homo sapiens
gccacctactattacccccagtatctgcaagccaagatgccatggacaatattaccaggcagaaccaattctacgataccca

SEQ ID NO: 605447 - DNA, 82 bp, Homo sapiens
gaaatggagaggctggtcgcccaatgtggacgaatgtggaacctcgctctgtggctgtgttcccttggcactccttagtccc

SEQ ID NO: 605448 - DNA, 103 bp, Homo sapiens
ccgccgccaacgcgcaggtgctagcggccccttcgccctgcagctgcaagctttcttcctggtggcagatgacatcatggattcatcccttacccgccgggga

SEQ ID NO: 605449 - DNA, 82 bp, Homo sapiens
gcgggacagggaaaatgaaagactttggaagtcgtcaggaatttgactctatataacacgtgggaaccggaggagaacatcc

SEQ ID NO: 605450 - DNA, 100 bp, Homo sapiens
gcagcacgtggacgctgactcggaagtgcagagcctggagacacaggccccatccttcccaatggggacacttcagggagcggctctcaggtcccgagaa

SEQ ID NO: 605451 - DNA, 82 bp, Homo sapiens
cgagctccagccgaaggagaaggggggcgccatcgggggtgcaggtgctgatgagtgccacccggagtgcatacatggagga

SEQ ID NO: 605452 - DNA, 74 bp, Homo sapiens
attctgaatatagggacaccacagaacgtcaaggtcgtgggaaataaaaggcagttctacacagactgcagcaa

SEQ ID NO: 605453 - DNA, 100 bp, Homo sapiens
ctgtgcttcttgtgcaagtaatcagtctttgacaagtgatgagaagctgtcggagcttcccaaggtagagtacagagagatggatgaaagcttggccaac

SEQ ID NO: 605454 - DNA, 139 bp, Homo sapiens
caacatcgccctgtggatgactgagtacctgaaccggcacctgcacacctggatccaggataacggaggctggattttagtccatggagaacagaatgaaatggccagattgaaagcagcactgattcgagaatatgaa

SEQ ID NO: 605455 - DNA, 83 bp, Homo sapiens
cagcagccgaagggagacctcgcttaaaccaacacaatcacttcttccatttcgatgggaccctgatgccccacaaccctgcg

SEQ ID NO: 605456 - DNA, 87 bp, Homo sapiens
ttagttgaaaggtgcgccctgctgtgacagcttcctccatacagtggaacagttctgtgtggcacacaggctgtggataaactacct

SEQ ID NO: 605457 - DNA, 82 bp, Homo sapiens
gaactgaagacagctgggcctaacaagtgcccaggtgactcaggtacaatgactcttcttgcttttcacctaagttgaataa

SEQ ID NO: 605458 - DNA, 83 bp, Homo sapiens
cgggtgcgctgctcaaggacacggtctacaccgacttcgacgtgtctttggtgcaacactaacaaggcttgtctggactaccc

SEQ ID NO: 605459 - DNA, 100 bp, Homo sapiens
ggaagacatggccactccagtcggtgttgagcacggcgagcagtctcaggcctttagtgatgatgaaatcatgagtggaggatctcaagtccacattttt

SEQ ID NO: 605460 - DNA, 80 bp, Homo sapiens
gagcggcgagtttccgatttaaagctgagctgcgaggaaaatggcggcgggaggtgaggaattttaaattggaacaagag

SEQ ID NO: 605461 - DNA, 75 bp, Homo sapiens
gatttgctctatgatcgtgataaagggtcatggaggacgctggcggcggcgaggagaccccggccccggaggccc

SEQ ID NO: 605462 - DNA, 88 bp, Homo sapiens
cggagcgcggtgctgccggtggagcttcaggtgcttttgaagatgatgatatcacgcacgttgaaggaagtgtagatcctattcgaga

SEQ ID NO: 605463 - DNA, 82 bp, Homo sapiens
gcacctcccgcgccgcacggtggacgagggggatatgagactttctactcggaatatcctgagtgttgcgtggatgtaaaac

SEQ ID NO: 605464 - DNA, 96 bp, Homo sapiens
gaaatgtcatccgatggcacaatcaggtgtcatggagaaactccagctgggcccagagattctgcagcgggaaaatccaaggcttatttatgccag

SEQ ID NO: 605465 - DNA, 100 bp, Homo sapiens
ttattttttgttatgtgacgttttaccagaagatagaattcttagagaagagcttcagaaacagagactggaagatgagaatgtgcctactgctcctgat

SEQ ID NO: 605466 - DNA, 83 bp, Homo sapiens
tcatgcacagaggcaacaaatggcaactttctgaatcatgtttgagaccttcaacaccccagccatgtacgttgctatccagg

SEQ ID NO: 605467 - DNA, 100 bp, Homo sapiens
cggcttgttcttactggccctgagtctttgggggcagcctgcagaggctgcgtgccggtggtggtgtgcacattgagccccggtatagacagttccccca

SEQ ID NO: 605468 - DNA, 87 bp, Homo sapiens
aggcccctgccgtgtggacccgtaaaataaaatggggttttgcacagagtctcctaaaaaagatgtctcatcgaagttctattcctg

SEQ ID NO: 605469 - DNA, 100 bp, Homo sapiens
cgccgccgccgctgccgctgccgctgccgcacctccgtagctgactcgttttcagggaaccctacaccgtccgggtggaggatcaaaggtcaatgcgtgg

SEQ ID NO: 605470 - DNA, 87 bp, Homo sapiens
cgcctagtccacggagctcaatggcggcagtcgcgctgagggactcggctcaggaagctcttcgtgggcggtcttgactggagcacg

SEQ ID NO: 605471 - DNA, 100 bp, Homo sapiens
ggacactatcctggccgagggccttcacttcaggaagaagattgtgagaaagcattcttcaaaatggacaatgtgcttatagatgacagaagaatacatg

SEQ ID NO: 605472 - DNA, 83 bp, Homo sapiens
tgaggacacttctctgtcgtcacagttagtgactccttcaccagccaagcatagagccaagatggatgatattgtggttgtag

SEQ ID NO: 605473 - DNA, 82 bp, Homo sapiens
tccgcgttcccagcccgggtccccgcgttcacagccccagcgcagctcaccatggatgatgatatcgccgcgctcgtcgtcg

SEQ ID NO: 605474 - DNA, 90 bp, Homo sapiens
gcttccttgacgccttagcttggagccccgttatgaggttaatatggctccaaaagggccccctcctttcccaggagtccctctcatgag

SEQ ID NO: 605475 - DNA, 100 bp, Homo sapiens
tgccaactctgcccttatggaattggacaaagctcattgctatggacagtgctatcaccctgtggcagttccttcttcagctcctgcagaagcctcagaa

SEQ ID NO: 605476 - DNA, 83 bp, Homo sapiens
gctggatattgagccggatagacctattggatatggagcctttggtgttgtctgagattccatcgtgcctggctcacataagc

SEQ ID NO: 605477 - DNA, 100 bp, Homo sapiens
gggtggtggttggctaaagttcggatgatgaaaggagaaaccggaacatgaacattttgcagtactgcccctcttccgacatgtggacgctctttgaaac

SEQ ID NO: 605478 - DNA, 75 bp, Homo sapiens
cctttgaccatgaagagaaatgagatgatagccaaaccctcagtaagagatgctaaaaaccttgtacctatggac

SEQ ID NO: 605479 - DNA, 87 bp, Homo sapiens
gggcctgaccaacccgaaaacattgctaggctcctggcgacctccctgctgcagggggccctcccagcggggccatgcccttctaca

SEQ ID NO: 605480 - DNA, 90 bp, Homo sapiens
acggcgcgggcgccggcgaggagagcccgcggctgcaggaacttgctactaccagcaccatgccctaccaatatccagcactgaccccgg

SEQ ID NO: 605481 - DNA, 75 bp, Homo sapiens
caccatgagcgtcccggccttcatcgacatcagtgaagaagatcaggttgtactcgtaaaacaaggatcatcgat

SEQ ID NO: 605482 - DNA, 51 bp, Homo sapiens
tacaccaggaaaaactcctgttgatgggttgccagacttagaagacttgat

SEQ ID NO: 605483 - DNA, 82 bp, Homo sapiens
cgccggaggaggcattaacgagaccgggtaaggtgtccctggccagtgtccttccacctgtccacaagcatggggaacatct

SEQ ID NO: 605484 - DNA, 75 bp, Homo sapiens
ccgcggctggccgcgtgagtagctgaagaaatcaggggagaaacccctgcttggtggaagcctgatggaatatgc

SEQ ID NO: 605485 - DNA, 86 bp, Homo sapiens
ctcggaggagcggctgctgctgctgctgctgctgctggtggcccctttgcaggaactgtggctgcaccatctgtcttcatcttccc

SEQ ID NO: 605486 - DNA, 50 bp, Homo sapiens
gaaaaataccacgacaaaaccaccctacatgtagagcgcatgaagtacag

SEQ ID NO: 605487 - DNA, 95 bp, Homo sapiens
ttcctgagacaacaaggacctcccagatgcaagagctgcacaagtctctccgggcgcagttgtgtagcagttgagtaatgctggttagctgttaa

SEQ ID NO: 605488 - DNA, 100 bp, Homo sapiens
gcatcacctcctccaagaccgtgctggtctttctcaacctcatcttctgggtgaaagaacttgtcctggacaacagtcggtcgaatgaaggcaaactcga

SEQ ID NO: 605489 - DNA, 82 bp, Homo sapiens
ccaggtgatgcctgaagctcaagggactgtgtccaccctcaggacgtggcccagtggaacatcgggagcctccggaccatcc

SEQ ID NO: 605490 - DNA, 100 bp, Homo sapiens
aacaacttcaaagtaaaatcagtttaatttcagaaaagtcatcttatcccatgcgtgtgaacagatgcaaggaaatcctcaataaagctattcatatgaa

SEQ ID NO: 605491 - DNA, 98 bp, Homo sapiens
cagggtgaagcatgtgaggagccgccccggagccaagcaggagggaagaggccagaagcggactcctagaagaggggagcagcaaggatggaatgaca

SEQ ID NO: 605492 - DNA, 83 bp, Homo sapiens
ttcctatctcgtacacttcttggcagtcatggacaagagctattgatagaagaacccagtgacttgattgtaaaaatttacag

SEQ ID NO: 605493 - DNA, 50 bp, Homo sapiens
aagacatcctgagaggacttggcagattgttctctggggccggactgaga

SEQ ID NO: 605494 - DNA, 97 bp, Homo sapiens
gggactcacggccgggacactcagggcagtgccaactacctcaggaaccgggagtgaaactactggggttgccatttttgactatgaacacttgaaa

SEQ ID NO: 605495 - DNA, 100 bp, Homo sapiens
gacaactaaagctgcgggatacaaagtcagcccaggcagacctccagattgatgagcaaattgaaagcatgtttaattcaaagaagagagtaaaggatat

SEQ ID NO: 605496 - DNA, 82 bp, Homo sapiens
ccagccagagccagcatgcagaacaggggatatgagactttctactcggaatatcctgagtgttgcgtggatgtaaaaccca

SEQ ID NO: 605497 - DNA, 99 bp, Homo sapiens
accctgctgcgctcgctcctggagaccaacgaaatcccctcgcttatcctgtgggggccgccgggctgcggcaagcaaatgaagaaacacccctgccgc

SEQ ID NO: 605498 - DNA, 90 bp, Homo sapiens
taacctcttagtggaggaaattcatcgtttgggttcaaaaactgtgttccagatcatctccctggtaatttaccccgtgaagtacaccca

SEQ ID NO: 605499 - DNA, 75 bp, Homo sapiens
ccgcctccttcccagccgcgcggcttcctccagacctctcggcgcgggtagaactttagacttcatagcactgaa

SEQ ID NO: 605500 - DNA, 90 bp, Homo sapiens
gcaagaacagatcactggcagattttgaaaaggctctgcatcaggctcagcttctactctggtgcacaacggcacctctgccagggctac

SEQ ID NO: 605501 - DNA, 74 bp, Homo sapiens
cggctgatcatctccatcttcctggggccactgtgcatgtgcgggtcaacgatgtgaacgagtttgccccagtg

SEQ ID NO: 605502 - DNA, 97 bp, Homo sapiens
atgcaggttttaaaggctatggaatacagatagagcaggtcagaatggcggcagtggagcatcgtcattcttcaggattgccctactggccctacct

SEQ ID NO: 605503 - DNA, 75 bp, Homo sapiens
gtgcaagatgccgctgccggttcaggtgtttaacttgcaggaatcagagatcattgatttcttcctgggggcctc

SEQ ID NO: 605504 - DNA, 101 bp, Homo sapiens
cggacatgctcagggctgcggccgcccgaagaggagagagcgcgggcctctaggaaggtgaaaggtgtagcagtcactcggcctacacccacagcatcgac

SEQ ID NO: 605505 - DNA, 100 bp, Homo sapiens
gccactgccgcaggaggcgtgaggccccagggagtggctcaaacctgtagaccagagaaggaagcatctagaactcctgggggccttgtccgccgcccac

SEQ ID NO: 605506 - DNA, 75 bp, Homo sapiens
gagcgacaagaagctcacccaggaacaagtatctgacagaaaaggagagggagtttttaaatctgacaacatttc

SEQ ID NO: 605507 - DNA, 75 bp, Homo sapiens
ttctgcagggcgtcgccacactgacccagccagtgtagggagctctgcggtgatgagcacggccattatggcaac

SEQ ID NO: 605508 - DNA, 90 bp, Homo sapiens
cggactccggaacagcaagaactgcaccgaaccaggctccctgactggcagtcctcacctttccgagctgtctgtgaactcgcagggggg

SEQ ID NO: 605509 - DNA, 90 bp, Homo sapiens
ctttgagaaattttgagtcctcgagtgaatgggcggatctcatatcttcacttggcaaactcaacaagttaaactccattgatgatgcac

SEQ ID NO: 605510 - DNA, 82 bp, Homo sapiens
cctggcctgggcgctccggtggcggcggaggacgtagacaagtttggcaacgagatcacccagctggcccggcccctgcctg

SEQ ID NO: 605511 - DNA, 82 bp, Homo sapiens
ctacacgccgccgcttgtgctgcagccatggcttttaaggataccggaaaaacacccgtggagccggaggtggcaattcacc

SEQ ID NO: 605512 - DNA, 101 bp, Homo sapiens
aagagaaacgcacttcatcttcatccctccggagaaaaagaatgtgaaattgactaaatacatggtggagccgccaccaaaatgcagattttcgtgaaaac

SEQ ID NO: 605513 - DNA, 75 bp, Homo sapiens
agatgaagcctcgagcctaaggcgctctcaggtccatgttgacatcatggacatatgtgagtccatcctggagag

SEQ ID NO: 605514 - DNA, 99 bp, Homo sapiens
gcaagttatggcaatgtgatcgtcatcacagtcaactatcgacttggagtactcgtccctcctcctatgtctccatcctccaaatctgtgagcactcca

SEQ ID NO: 605515 - DNA, 75 bp, Homo sapiens
gcctcggcagtcctgtttccctgtaaggtatattcaagagcaaatgaccaagagccatgtgggtggtggttggct

SEQ ID NO: 605516 - DNA, 50 bp, Homo sapiens
caaaaagccgagtagagaagttatcagaaaatgatgcatcctgttgccag

SEQ ID NO: 605517 - DNA, 101 bp, Homo sapiens
agccgctgccgctatggatgatcgagaggatctggtgtaccaggcgaagctggccgagcaggctgagcgatacgacggctgatcagctgaccgaagaacag

SEQ ID NO: 605518 - DNA, 82 bp, Homo sapiens
ctgtgggacttggtttgcctatgtcaagatcacagggcttccgttacaagatgaggtctgtgtatgctcacttccccatcaa

SEQ ID NO: 605519 - DNA, 75 bp, Homo sapiens
gatcggagcactcctgacgggggccttgtggtacatctattctcacacagtagactatgccagttactaccaggg

SEQ ID NO: 605520 - DNA, 87 bp, Homo sapiens
atcaaaggaaaataccagaaagatttttagtggccccaaacgggataaaagaatcagagtgtctcaacccttgacaagaggaccaag

SEQ ID NO: 605521 - DNA, 90 bp, Homo sapiens
cgctgctggcagttttgccaggtgtttgttaccttggctccataaaaatacagactcaccagttcctgctttgatgtgacatgtgactcc

SEQ ID NO: 605522 - DNA, 95 bp, Homo sapiens
tttggctcctaaagattttgcagaacagagatgacatgccagcccagactttcatagatttaccgcattgtttctcagaagcaaatgtcagacag

SEQ ID NO: 605523 - DNA, 100 bp, Homo sapiens
gggacggcaggagggaagtgagaagcccaactaaagccccacatttgcagctcattgaaggaaaggtatatgccctcattttgcttaagacctctggcca

SEQ ID NO: 605524 - DNA, 75 bp, Homo sapiens
cgggcggtggtgatctctggtgcaggaaaaatgttcactgcagaccttcacggcatggtgcaactcccacctgcg

SEQ ID NO: 605525 - DNA, 90 bp, Homo sapiens
gcctagttggcaagcgagcaatttccacctctgtgtgtgtacgagctcatgtttctccttggaccaagatgactgatggaaaactctcca

SEQ ID NO: 605526 - DNA, 75 bp, Homo sapiens
gtctggctgatgattcagttcggtctctaaagggaagtcgagataacatgagtattgtactagtttgcttttcaa

SEQ ID NO: 605527 - DNA, 75 bp, Homo sapiens
cgtgatacagttcgccgtcggggagcaccgagcccagtcactcagcctctgaagaagcttcgggttcagactcag

SEQ ID NO: 605528 - DNA, 78 bp, Homo sapiens
agattccccgtactccagaaaacttgagagagaaggatattcctggactgactgatactacagtgcctcgccgcctgg

SEQ ID NO: 605529 - DNA, 100 bp, Homo sapiens
gtcccgctcgtcatggcctacccgggatacggaggaggggtttgagaagatgatcagtgggatgtacatgggggagctggtgaggcttatcctggtgaag

SEQ ID NO: 605530 - DNA, 82 bp, Homo sapiens
cgcagcctcttcgagcgccgcggacgcgtcatcgagtgtgacgtggtgaaagctgtgagaaacgaccgaaacaagaagaaga

SEQ ID NO: 605531 - DNA, 100 bp, Homo sapiens
cccagaataagattaagggttgtacaggctctttgaatatgactctgcaaagttctttaggtgctgggaatgtagccgatcgtgttttggctcagctctt

SEQ ID NO: 605532 - DNA, 100 bp, Homo sapiens
cttcggtggactccttcggcagtccacccaccgccgccgcctcccagggattgtgggactttaccaaatcggtttgtaataacacctagaagacgctatc

SEQ ID NO: 605533 - DNA, 83 bp, Homo sapiens
tgaagcgtgaggccggcatcgtctttccgtcctctgaggcgacggccgcggctgcacagcttcatggcggctgaagagatgca

SEQ ID NO: 605534 - DNA, 83 bp, Homo sapiens
agatcatccaagtggaggttcctacagagattcatatgagagttatggggaggagccccagccccgcgacgaggaggaagcgg

SEQ ID NO: 605535 - DNA, 83 bp, Homo sapiens
ggacagtgatcctgatgtctgttgtgagctgcacactcaagggtgtgataagtcatcacaaagtcagaaatgattgaatacca

SEQ ID NO: 605536 - DNA, 74 bp, Homo sapiens
aaaaacagtgtaacatttgtggctgagcaggtttcccatcatccacccagcagcacgctggctcttctcctgaa

SEQ ID NO: 605537 - DNA, 75 bp, Homo sapiens
ggactaagattcaacaaactatttttgaatgaagatggccacttggatgttgtagcattgctcattaaccatggc

SEQ ID NO: 605538 - DNA, 82 bp, Homo sapiens
atgccacggatcaggaaagcctggagctgaagccaacctcccgagcaggtgtccagtgtcaggtgcagctggtggagtctgg

SEQ ID NO: 605539 - DNA, 74 bp, Homo sapiens
agaaattggatcttacacttgaaatacagactgttggggaacaagagtgttgtcatgactggatcttacaataa

SEQ ID NO: 605540 - DNA, 75 bp, Homo sapiens
cttcaacctgtcaaagccttcttaattatgtctgagaaaaggtttcagaaaagggatccctaacatcagaagagt

SEQ ID NO: 605541 - DNA, 127 bp, Homo sapiens
caccctgatatcagtggattatgaaatttttgggaaggtgcaaggggtgtttttccgtaagcatactcagaaatggtggagtcaatgaagaaagtagcagggatggatgtggagctgacagttgaag

SEQ ID NO: 605542 - DNA, 83 bp, Homo sapiens
gccgtcgccatgggccagaacgacctgatgggcacggccgaggacttcgccgaccaggtttggtgcacctcgatttggaggaa

SEQ ID NO: 605543 - DNA, 82 bp, Homo sapiens
aggattcagggaataggagctggggagcccttctgcgccacaggctcagctggaagctcagaaagccacgcaggacttccag

SEQ ID NO: 605544 - DNA, 88 bp, Homo sapiens
caaatgaattatgtcagcaacgtatccaaggaggaatgccagctcctgagcaggcctcattggtggaggaggggcaaccacagacccg

SEQ ID NO: 605545 - DNA, 75 bp, Homo sapiens
atgagcagctgtcctcatgtctctccagcagctgtttgaattgggtcctgatggaggagatcatgaaactgatgg

SEQ ID NO: 605546 - DNA, 101 bp, Homo sapiens
gggcgtctgcggctctccgccgtccccagccctgcctctccctgggctctgattgggtggatcacaagaactaatctttcatgatttggaaaccggaagga

SEQ ID NO: 605547 - DNA, 100 bp, Homo sapiens
aaatctagccaaagccaatccccaggagatcatgcacgccctgaagatgacctggcacgtgcactgctttacctgtgctgcctgcaagacgcccatccgg

SEQ ID NO: 605548 - DNA, 100 bp, Homo sapiens
tgggcttacctgtctttaatactgtgaaggaggctattgagggcacctacattgacaagaaatgccccttcactggtaatgtgtccattcgagggcggat

SEQ ID NO: 605549 - DNA, 99 bp, Homo sapiens
ggaaaatcttgacaacatcagaaaggggcaccaccacgaggcgatttgtgggccataccaaggatgtgctgagtgtggccttctcctctgacaaccggc

SEQ ID NO: 605550 - DNA, 100 bp, Homo sapiens
cgcgcttcaagcaggagggtgtcctgaacagcaagcgggtgcagcccagaactgtcttctgaggaagaggtgctctcctgggcccccactgtccccaggc

SEQ ID NO: 605551 - DNA, 100 bp, Homo sapiens
cttagataacagccatcctattgaaggttatgtggtccgaatcagtggtgggaacgacaaacaaggtttccccatgaagcagggtgtcttgacccatggc

SEQ ID NO: 605552 - DNA, 75 bp, Homo sapiens
gcagagagctattattccctgtattaaagcaaaagatacagatattgtggatgaagccatctattacttcaaggc

SEQ ID NO: 605553 - DNA, 80 bp, Homo sapiens
caggatcacaggcattggcctgggcggcagagccccacggcctcgctatggagtacgaccccagcaaagcgacctttgtg

SEQ ID NO: 605554 - DNA, 100 bp, Homo sapiens
gtggaaactaggcataaggaagaatgtctcatgttcgagtctggggctgtcgctgtgctctccagagactgctgctactttgaaacgtacgatagaggcc

SEQ ID NO: 605555 - DNA, 98 bp, Homo sapiens
cgccaactcttcgttcgattattagctttagtgaaatgggctaataatgctggcaaagtggaaaaatgtgcgtctcgctctgtcgtccaggctggagt

SEQ ID NO: 605556 - DNA, 75 bp, Homo sapiens
gtgacggaaacccagagctcctgtcaaccagccaggtctcacatgagtacttcacaatggggaaactgaactgga

SEQ ID NO: 605557 - DNA, 87 bp, Homo sapiens
agtgatccacgcgcagttcctcaaagaagtcgctccccaagtagggagaagaagagagctcgttgggaggaagaaaaagaccgttgg

SEQ ID NO: 605558 - DNA, 100 bp, Homo sapiens
tgagtttagatccccagcctggattcagttctgagtgcctcagttttcccttccacaaaatgagaccacagagtattcagccatggcctcgctggctggt

SEQ ID NO: 605559 - DNA, 129 bp, Homo sapiens
aaaaaaggtctgcaagagaagaacggaaacgaaggcggaaaggatccaaggaggattgaaaaggaagatcaggccaaccccaaagaagaagtgaccaaggaggagtttaaactgaatgaacaacctcgg

SEQ ID NO: 605560 - DNA, 50 bp, Homo sapiens
agaacggaaaactcccaacttcctggtgattttacaacgagatgctgctc

SEQ ID NO: 605561 - DNA, 75 bp, Homo sapiens
atatgtacagcctagaagaaaacagagagatgagcagcttctgacaagttggaattgacagaggtgatataccag

SEQ ID NO: 605562 - DNA, 100 bp, Homo sapiens
cagttccagtccgttgctttactttttgcttcaccgacatagtcattatgccgaagagaaagttggtgagtttgtaagtgatgcccttctcgttcctgac

SEQ ID NO: 605563 - DNA, 95 bp, Homo sapiens
gattgttggtgccagttggaaagaaccttttccagtgacttcaggtggaacattcattggcattggacggaaaacaccagattgccaagggaaca

SEQ ID NO: 605564 - DNA, 91 bp, Homo sapiens
cgcggattcgccgaggcaccgaggcactcagaggagataacgaaggaggcccaacttcattcaataaggagcctgacggatttatcccaga

SEQ ID NO: 605565 - DNA, 101 bp, Homo sapiens
gacaaaatgtggccacagcttttgaaataagcgggttttgaaaacaaaaaaaagaaggagtggaagagggggccaggatccaggcctccatccccacagaa

SEQ ID NO: 605566 - DNA, 97 bp, Homo sapiens
ggaagtgggaccggtgtctggcggatgcggtcgtgaagatagaacacaccacagccatcagcactggaatgcaaagaccagaacaaacagaaggaag

SEQ ID NO: 605567 - DNA, 100 bp, Homo sapiens
agatcccagagtcataaaagtcatcacagttcgatcctttggtacagaagacagaccgacagatcgtccaataccacctcgagatgaagtctttgaatac

SEQ ID NO: 605568 - DNA, 74 bp, Homo sapiens
caacattgaacgtcataagacttgttgagttggtggttccaggattttactcagaatgacgttaggaagagaag

SEQ ID NO: 605569 - DNA, 100 bp, Homo sapiens
gattggaagaagaggctggagttgaggaaggaagtagagggagatgatgtgcctgaatctataatgctggagatgaaagacagggccaagaggaccttgc

SEQ ID NO: 605570 - DNA, 98 bp, Homo sapiens
tccaaagttcttccagtcctcctaggcatcttattgatcctccagtcgaggataacaaagccattgacctttgccgattgtgttggggacgaacttcc

SEQ ID NO: 605571 - DNA, 100 bp, Homo sapiens
gcagccccgcagcccagcagccccgcagcggcgccgaggacagtgcagccgagttgcgtctccctcgcgcgagccgctgtacaaccagccctccgacacc

SEQ ID NO: 605572 - DNA, 75 bp, Homo sapiens
tcgggccgggcaatgcctcgcgggcgcaatgaatccgcggcaggtagaacgtcatgacatgaataccttaagcct

SEQ ID NO: 605573 - DNA, 83 bp, Homo sapiens
agctgaatttttgtgggacctcctgagagtaaagccaatcccagctgaaggaatcaagtcaaatccttccaagcggcatagag

SEQ ID NO: 605574 - DNA, 83 bp, Homo sapiens
tttgccctcagcatctcccttcatgtctgggtcatggtagttgatgtcacttggcgatattcctgcaaacatgaagaggtgat

SEQ ID NO: 605575 - DNA, 100 bp, Homo sapiens
tatcctgtccgagcaaagattacctattaccagaacacactgacaaagacttgcactatctgccagatgctgcttcctaaccagtgcagttatgcatcac

SEQ ID NO: 605576 - DNA, 80 bp, Homo sapiens
tttttggatgatgatggatccatttctcctattgaggagtcaacgatttacaaaaggtgcaggtatgagcaggtctgaag

SEQ ID NO: 605577 - DNA, 90 bp, Homo sapiens
gaggcagagctccagtgaacagtgcagctcaagactgcagtgcagatgacgacaacttccttgtgcccatagcggtgggagctgccttgg

SEQ ID NO: 605578 - DNA, 87 bp, Homo sapiens
aaaagacagtcctcgtcagcactgactttcagctatggaatcggttttagctaaagaagatactgaggcagctattcaatcaatatt

SEQ ID NO: 605579 - DNA, 100 bp, Homo sapiens
ggagttccgatcgacccggtaccaagaaggggagtgcccgcggcagggcttatttcaaaacctttgtccctcagttccaggaggcagcatttgccaatgg

SEQ ID NO: 605580 - DNA, 100 bp, Homo sapiens
cgttaagtcccccaaagatgagatttacctgtgagatgtttcatcccaacaatgtggaagatgtcaagtttgtgatcaactatgactatccaaacagctc

SEQ ID NO: 605581 - DNA, 85 bp, Homo sapiens
tggcttcaacattgtcttctgggtgcccagcagagtgccaccgtggccaacccagtgcctggtgccaacccggacctgcttcccc

SEQ ID NO: 605582 - DNA, 75 bp, Homo sapiens
ccatgtcgggttattcgagtgaccgagaccgcggccgggaccgagggttgtggcagcactgcctgaaggtatgag

SEQ ID NO: 605583 - DNA, 100 bp, Homo sapiens
gcaacatggatgaggatggcttttttgaaggtgctgggcgtcctcttctttgccatagcctgcttcttatacaagcccctgtcggagtcttcagatggcc

SEQ ID NO: 605584 - DNA, 75 bp, Homo sapiens
cggccacaggggcggcgacggcgcagtgcgaagcgaaacaggtgtatagtgttgattggagccaaaccagaggtg

SEQ ID NO: 605585 - DNA, 75 bp, Homo sapiens
gctgtttgccctgaacatcatgaattcccaagaaggagatgatcatgacgcagtcctgaggtttaatggggcacc

SEQ ID NO: 605586 - DNA, 83 bp, Homo sapiens
ccatcctgccgtccttctccactttcgccagcccgtgccgcgagcgcggcctgcaggaggctcagctgtcgcaggccctggag

SEQ ID NO: 605587 - DNA, 50 bp, Homo sapiens
agttatttgcctcagtaaaagagttgaccagtatctctaccacatgcgcc

SEQ ID NO: 605588 - DNA, 83 bp, Homo sapiens
ccgcatctggctggagccctgcattcgcggcgtgtgcagggagtggagcaactgctgtagtccaagcagcttattgtgcccct

SEQ ID NO: 605589 - DNA, 100 bp, Homo sapiens
gcttgaccatctcacaactgctcgcgtgacgaccgcattcgtggcaggccaccccagcagacatgtttgccaaggcctttcgggtcaagtccaacacggc

SEQ ID NO: 605590 - DNA, 100 bp, Homo sapiens
aggaaaaatgggcccacctcagcccttcggaattttcccaacttcagaaatatgctgagtgtatgatgatgtcaaacgtgatgctgatgctacagttaca

SEQ ID NO: 605591 - DNA, 101 bp, Homo sapiens
gccaacgtggtgggacccaaaatctgcctggaagataatgtggctgaaaacacagttaaatcactttcaaagttaaaagactattaagaacacaagatggg

SEQ ID NO: 605592 - DNA, 75 bp, Homo sapiens
cctggacacagcaatatctctgggctttcacaggctcagtagatgaaggcgtttctgagggcttgcctacacttc

SEQ ID NO: 605593 - DNA, 109 bp, Homo sapiens
gtgtctgccagcagggtttctcaatctctgcagatggccgtacgtgtgaagatttattgctaaacatgggtgcatttttggataaacccaaaactgaaaaacataatgc

SEQ ID NO: 605594 - DNA, 82 bp, Homo sapiens
tcaggaaactgaagactctctgcttttgccacagcagttcctgcagcttccttgaggccctgggaggagcggggacactgag

SEQ ID NO: 605595 - DNA, 109 bp, Homo sapiens
gctgaggaattgaatgctgtcattgtttccattgaactccaagaatgaaaaggctctgggccgcaaaataaactcctgggaatcatcaaggagtgggcattcattcctg

SEQ ID NO: 605596 - DNA, 83 bp, Homo sapiens
cgcagtggtcgcttcttctccttgaggaagttcggtgtggtcctggatgagatcaagccctcctcggcccctgagctccaggc

SEQ ID NO: 605597 - DNA, 100 bp, Homo sapiens
ctcagtgggactagttcgaactatgtggaggagatgtactgtgcttggctggaaaaccccaaaagtgtacataagcatgttacaccagacagctatattc

SEQ ID NO: 605598 - DNA, 75 bp, Homo sapiens
cgcgagctccgcgggccccggagctcagcaagctcagctcttgcagccaatgccggaacaggatttgctgttgct

SEQ ID NO: 605599 - DNA, 75 bp, Homo sapiens
aggtttttagttcaacaagtgtcacggcatacaagcagacctcggaatatacagaactggatgacagtaacttcg

SEQ ID NO: 605600 - DNA, 83 bp, Homo sapiens
gaaatggcggagtatctggcctccatcttcggcaccgagaaagacaaatcccagatgcagtgactggttactacctgaaccgt

SEQ ID NO: 605601 - DNA, 88 bp, Homo sapiens
cacagatgtccaagctgccaaaacaccttccaccatgaccacctcagcaagttcccacttaaataaaggcatcaagcaggtgtacatg

SEQ ID NO: 605602 - DNA, 103 bp, Homo sapiens
acaaggaagtgaagaaggcgcatcactcccagctgcgcaaagcttgcgaggtggcgttaggagttaaagttcctcgtaattttcgcttgttggaagaacttga

SEQ ID NO: 605603 - DNA, 83 bp, Homo sapiens
tgagccccccgctctgagggccccggcccctggatgcacagccccggcgctggtctcctctgagcctccggcctccataagac

SEQ ID NO: 605604 - DNA, 99 bp, Homo sapiens
ggtccgcaaggccggagaaggccgccgggcccgggcatggtggtctggggcaacgcggaaggtggagattctggacgcaaagacaagggagaagctgtg

SEQ ID NO: 605605 - DNA, 75 bp, Homo sapiens
cgattgtatagctcagaagaaagatctctccagcgaacactgaatgagttaaaagagtatcaaaagcagcatgac

SEQ ID NO: 605606 - DNA, 50 bp, Homo sapiens
ggcccgatggctcggcttccccaggcagagtggcatgattccgactggat

SEQ ID NO: 605607 - DNA, 83 bp, Homo sapiens
ctttacagaggaatagtctacaaaggaagacttgtaacctggagaagagatgatatcatcaagttgaatcgaaaggaagggaa

SEQ ID NO: 605608 - DNA, 100 bp, Homo sapiens
aagcagactcactaacttatgatgtagtaaacctattgatggcaattttgctgactgtggaagtgactcatccaaactccatgccagctgtcaacattca

SEQ ID NO: 605609 - DNA, 100 bp, Homo sapiens
gcgatgtgtgattaccatggcgaggagtctctgtccgggggcctggctaaggaaaccctattacctccagtaaaataaaacagggtctgttacctagctt

SEQ ID NO: 605610 - DNA, 74 bp, Homo sapiens
ttctgccgctgattgctatcacttctgcagaatccagtggcttggattagaagaacaagaaagactccacctac

SEQ ID NO: 605611 - DNA, 100 bp, Homo sapiens
tacccctccatgggtccggcagagggcagtgaccggcaccttctgtgcgtcctggactcctctgagaaacagagtgcctggtgaagaatgtgatgggatc

SEQ ID NO: 605612 - DNA, 98 bp, Homo sapiens
tggtagttccatgctgtctgttcagacttcagcttggttggtggtgtgatgatctactttgacagaattgaagtggtgaacttcctggtcccgaacgc

SEQ ID NO: 605613 - DNA, 74 bp, Homo sapiens
cagaggcctatttgatagaggaaatgtatgatgaagaattctgcttggtcagaatcgtgatggcattgtgttca

SEQ ID NO: 605614 - DNA, 98 bp, Homo sapiens
ctccaacacccgctgctgcccgcccgctgcctgcctgcctggcatctctctctcccgctgggagtgtccactcgccttccaccagcatggcaacgtct

SEQ ID NO: 605615 - DNA, 90 bp, Homo sapiens
cgagcacgagctgtgaggggattcacttgtgtgcggaactcctcggaaccatgggtcctgatgaagaagctgttgtggatcttggcaaaa

SEQ ID NO: 605616 - DNA, 74 bp, Homo sapiens
ttgctcagtctctgtcagaggaagatcccttggtccctgactatggctccccagagcctgccttcatctaggat

SEQ ID NO: 605617 - DNA, 74 bp, Homo sapiens
agatgaggggattgccccggaagagggaggcgtggacgcgcaatttctaaaccgggatgacattggcatcatcc

SEQ ID NO: 605618 - DNA, 100 bp, Homo sapiens
ctaagaccaagtcctcgctggactgctcagggtgccagacctcatcgtgctgtgacatgtatatggatgaatgaacagtgtagcagtatcatcacaggag

SEQ ID NO: 605619 - DNA, 100 bp, Homo sapiens
ggagcagccggaacgatgccggccgtgagcctcccgcccaaggagaatgcgctcttcaagcggatcttgattattcagagctgggagagcttcccccacg

SEQ ID NO: 605620 - DNA, 100 bp, Homo sapiens
tgaacatcaagcacttggttgaccccattgacgatctttttcttgctgcgaagaagattcctggaatctcatcaactgccagccccctgccctgagccag

SEQ ID NO: 605621 - DNA, 75 bp, Homo sapiens
atgattcgtcagcgatcagaaccgttcttccctaatattgaaggccaatgatgaggccaatcagagtgatacaag

SEQ ID NO: 605622 - DNA, 100 bp, Homo sapiens
gacgccgtggcagcctgaacggagtgtgcgacggattgggagtaaagatgacggcgccttgaggtaagctacaggcaacaccacttccgcgtttctcttg

SEQ ID NO: 605623 - DNA, 50 bp, Homo sapiens
ttccaagacagagatgatcttatcaggtgaggtttatacatggggcgaca

SEQ ID NO: 605624 - DNA, 83 bp, Homo sapiens
gcctgtttgacgtggacgggaccctcacgccggctcgccagcatactggagcatagtgaaagagtctattttgaagcttcaaa

SEQ ID NO: 605625 - DNA, 97 bp, Homo sapiens
cccgcgctgcgcatccccgcggacgccacagcgctgttgcttttaactttgacagaggaagaattttccaagacgccctataccatagaaaacagca

SEQ ID NO: 605626 - DNA, 90 bp, Homo sapiens
ggaagagtgcgccctgggacaggacctctgcaggaccacgatcgtgcgcttgtgggaagattagcctgaggcctgctcagtcgttcctaa

SEQ ID NO: 605627 - DNA, 82 bp, Homo sapiens
gcaggtctaccgggccacgcaccgcctgctgctgctggatggcagtggcagcaccatgatgcaaaccaagaccttctcctct

SEQ ID NO: 605628 - DNA, 100 bp, Homo sapiens
tccaaaatggcgtcagttggtgagtgtccggccccaggctggagtgtggtgacactaccttgactcactgcagcatctgcctcccgggttccagtgattc

SEQ ID NO: 605629 - DNA, 100 bp, Homo sapiens
cagcctgcagcttatgttagtgctcctgtcacccaccaactagcacaacctgttgtgaaaacgggccttactatacatcatatcccccatcaccagattt

SEQ ID NO: 605630 - DNA, 83 bp, Homo sapiens
aaagcaacaaaacgaccactgaaaacaatgccggcctccaggcccaaggtcagcatcccactgtcagccatcattgaggtccg

SEQ ID NO: 605631 - DNA, 50 bp, Homo sapiens
ccgcagggaaagccccaggaagacgtgtacagaagggccatgctgttatt

SEQ ID NO: 605632 - DNA, 75 bp, Homo sapiens
caagccctcaaggatgcccggtccccatcaccggcacacattgtcggaggacaagctctttggggctaccaaaca

SEQ ID NO: 605633 - DNA, 98 bp, Homo sapiens
gtgcccatcctgccttcaagtacctggcccgcattgaatgccccagaggagcccgaaacctcccaggcttggtgcaggaaggagagcccttcagcgag

SEQ ID NO: 605634 - DNA, 80 bp, Homo sapiens
agatctcgtacaagatccttctttgaactgtggctgcaccatctgtcttcatcttcccgccatctgatgagcagttgaaa

SEQ ID NO: 605635 - DNA, 75 bp, Homo sapiens
actctctgaggaagcccaactcctatgagctcctctctggcaggtatctttaggtggtgttgatcttacagtccg

SEQ ID NO: 605636 - DNA, 75 bp, Homo sapiens
ctagataacagtctgcactttcacccgtttcaggaagcagtcaattatagatttcttcaaaccagcttcaaaaca

SEQ ID NO: 605637 - DNA, 85 bp, Homo sapiens
tcccggagccaaggctggagtaaaactggaagtagccaacatggcagaaacggtggacacaagcgaaatggtcaacggcgctaca

SEQ ID NO: 605638 - DNA, 100 bp, Homo sapiens
gatgggctggagacaacagaaacagaaacgattgtggaaacaggtgtttaatgaacgctgccgaattcacttcaagcctccaaagaatgaataaagagag

SEQ ID NO: 605639 - DNA, 100 bp, Homo sapiens
atgacacctgtttggagaagctcctggactggtttaaaacggtcactgaaggagaaactggcgatggaatatgagaggagccctctggaaagaaaaggac

SEQ ID NO: 605640 - DNA, 75 bp, Homo sapiens
agttcccatcccgccttgagccagtcaccaatgccacaggaaagagttcgaaaagatataatccgcatcctcccc

SEQ ID NO: 605641 - DNA, 88 bp, Homo sapiens
tttccgtcagtacgcgaaggatatcggtttcattaagaatctacctgttactcgtattttggacaatcttatggagatgaagtcaaac

SEQ ID NO: 605642 - DNA, 88 bp, Homo sapiens
agtgactggaataaaaacagagtccgatgaaaggaatgggtctgggaccttaacagggagccatgagcttattggaaagtgatgttga

SEQ ID NO: 605643 - DNA, 100 bp, Homo sapiens
gaagagcgacaagccgctggcagccgcggatctcaccgccgctcaggtgcctccggagccagcgtggtggccatagacaacaagatcgaacaggccatgg

SEQ ID NO: 605644 - DNA, 82 bp, Homo sapiens
gtggattcaaaatccattaaaaatttggaaccgttccagagttctaaatctggaaagatctacctccatagagacgtacggc

SEQ ID NO: 605645 - DNA, 75 bp, Homo sapiens
aactgaatgtaacttcaccgagtaaagaggagtcatctactacaagccttagtgggtctgatagtgagaccgagg

SEQ ID NO: 605646 - DNA, 51 bp, Homo sapiens
gtacttcgtctatgtggcgcccggcataggcgtcgattagcaaggtaaaag

SEQ ID NO: 605647 - DNA, 82 bp, Homo sapiens
tgcgcgcccgccagctgctccggagatacgcaattctgtggtgttcttggtcacacatttatggagtttctgaagggcagtg

SEQ ID NO: 605648 - DNA, 100 bp, Homo sapiens
caaacagtggatttgaagaatcagattctggtgctactaagagtccactccacttagctattccaggagggcttcgtgtatggacctcaagcgttggagg

SEQ ID NO: 605649 - DNA, 90 bp, Homo sapiens
aaaggcttgagctgtctgttgaaaacatctaccaagactggcttgagagttccggaataccaaagagcttttctggaaaaagaagaaaag

SEQ ID NO: 605650 - DNA, 101 bp, Homo sapiens
ctactgcagccacgcgggcgagcggctgtgtggatgtcggcgaagccgcgggcgagaatgaagagcttcgaaacttgtctttgtctggccatgtgggattt

SEQ ID NO: 605651 - DNA, 75 bp, Homo sapiens
agctgcctcagttcttagcgcagacaatgattgaagctcacgttgatgtcaagactaccgatggttacttgcttc

SEQ ID NO: 605652 - DNA, 103 bp, Homo sapiens
ggcacctccgagcgcaaggacagcgcgaggtccgcgcagcccagcgcagccatgcggaaggtgctctaccagcgtgcacccaggaatatccaccgccatgtga

SEQ ID NO: 605653 - DNA, 75 bp, Homo sapiens
cggacgctcggtcccgcgctgcgcatccccgcggacgccacagcgctgtccgcgggagagctgtggggcttggtg

SEQ ID NO: 605654 - DNA, 90 bp, Homo sapiens
cgtccgccgattcctcctccttggtcgccgcgtccttggctggcgtggcaattgaaggaacagactaaaaatcgtgtcctggaaggaaac

SEQ ID NO: 605655 - DNA, 98 bp, Homo sapiens
acaagagaaagctcgggcgacggccatcttcatccgtcatacaggagtggcagaagagaggcggacagccctggcagctcatcgagcccgtggatgga

SEQ ID NO: 605656 - DNA, 88 bp, Homo sapiens
ggcaggggccgcgctctgctgcttcctcgtcctagtgatccacgcgcagttcctcaaagaaggtggttctgctgggcatggacatcct

SEQ ID NO: 605657 - DNA, 51 bp, Homo sapiens
ctgggacgtccggttgaccgcgactgacaatcacctgaaacattatttaca

SEQ ID NO: 605658 - DNA, 83 bp, Homo sapiens
gggctgcggcgcctgggactgcaccgcaccgagggcgagctccaggtgtgaacccacatccctgcccccagggccacctgcag

SEQ ID NO: 605659 - DNA, 130 bp, Homo sapiens
gggcaaaaccggagcggccgggggcggccacggtgatgagccgggcctggcggacgcggcgccatcgcagtcagacaatgcagatcttcgtgaagactctgactggtaagaccatcaccctcgaggttga

SEQ ID NO: 605660 - DNA, 100 bp, Homo sapiens
tgtggtaaccactgttccgaagccttcctcagtacaaccccttctactgaattagtttctggaggatctgataatcaagtgattcactgggaaatagagg

SEQ ID NO: 605661 - DNA, 100 bp, Homo sapiens
tgtggggggattctcgacctgctaacagaactggaccttttcgattggagcatatgatcaacaaatatgggaaaaatctgttgaacagagagaaatcaag

SEQ ID NO: 605662 - DNA, 98 bp, Homo sapiens
aatgaaggtgtattcccttaaaaagacggacagcccatcgtgtgaactatagagtttgtggacagatttatattggccaaacgtaccaagaaagtcgg

SEQ ID NO: 605663 - DNA, 75 bp, Homo sapiens
caggaaccataaggggtgacttcagcgtccacatcagcagatatggccgcgtggaaagtgtcaaaattcttccca

SEQ ID NO: 605664 - DNA, 75 bp, Homo sapiens
tattggaggccaggtttactggagtaggtgttagtaaggtcaaaatgcagatcttcgtgaaaacccttaccggca

SEQ ID NO: 605665 - DNA, 108 bp, Homo sapiens
gtgaagctgccgttctttaatatgctggatgagctgctgaagcccaccgaattaggtactccaaagattcaggtttactcacgtcatccagcagagaatggaaagtca

SEQ ID NO: 605666 - DNA, 82 bp, Homo sapiens
agtttagcagaacagcctccgcggctccggggagaagtgagacggtttaagcggaagcatcttactgccattgactgccagc

SEQ ID NO: 605667 - DNA, 99 bp, Homo sapiens
ctgaccattacacgcaaagatattcaaactctaaaccatctgaattggctcaatgatgaggattcatcaaacgtgaggaagcctttggaaaccgggcac

SEQ ID NO: 605668 - DNA, 100 bp, Homo sapiens
tctgacaacgtggatcgttgttttgaaacaatccagactccaaaatgatgcaaatcaacctgactggatttttgaatggaaaaaatgctcgagaatttat

SEQ ID NO: 605669 - DNA, 100 bp, Homo sapiens
aatcaagtgcccttggacaaagcctgaaaccagatcttagcaaagcaatgtctcaagatggtgcttctcagttccaagaagtcattcggcaagagctaga

SEQ ID NO: 605670 - DNA, 100 bp, Homo sapiens
caagaagaccattcagatgggatctttccggatcaatccagatggcagccagtcagtggtggagatggtggagccagggcaagatttactgcttgctgct

SEQ ID NO: 605671 - DNA, 51 bp, Homo sapiens
gtgaatatggccagcttcccagaggaatgtgaattggacccttgctgcgaa

SEQ ID NO: 605672 - DNA, 76 bp, Homo sapiens
gttcttggtctcactgagttctagaatgaagctgcagaccctcgcagttcgagaacttgtcttggacaattgcaaa

SEQ ID NO: 605673 - DNA, 100 bp, Homo sapiens
cagagttttcatcatggataactgtgaggagctaatccctgaatatctgagacttacacatattattgaaactcgaaaagtccttgatttaaggataaat

SEQ ID NO: 605674 - DNA, 75 bp, Homo sapiens
cgccgctggcccaacggtttccccagcagtagcctctgcgaccagggtgtcaaattgagaaccaggtagatcccc

SEQ ID NO: 605675 - DNA, 50 bp, Homo sapiens
gaaataactcagctgaagcatcaggtggaagtgaatcctcctgggataaa

SEQ ID NO: 605676 - DNA, 100 bp, Homo sapiens
cagtggattatagctctgttttcttctttccaaaactgtgcacccctggatgaaaggacatccaacgggctcatagagtggtagctgagcttcaggctgg

SEQ ID NO: 605677 - DNA, 96 bp, Homo sapiens
ggaaccgtttgtgatgaccaatgggatgatgccgatgcagaagtgatctgcaggcagctgggcctcaggagggtatacaaggaaaggttaggactt

SEQ ID NO: 605678 - DNA, 74 bp, Homo sapiens
gcgagcgggtgcgtctgccgcagagtcggcacctgaaggacatggagattgagaggatccagaatccagatctc

SEQ ID NO: 605679 - DNA, 50 bp, Homo sapiens
ggcctgggctcctgcctggggagacaggatccctccccgcggcggcgatg

SEQ ID NO: 605680 - DNA, 75 bp, Homo sapiens
ttttaagggaccaggaaaagtggtgatggttgcaatttgcatgaactgtggctgcaccatctgtcttcatcttcc

SEQ ID NO: 605681 - DNA, 83 bp, Homo sapiens
cctctcctccaaacaagctgtcaggtgaaagttacacaagaactgaaaaacattcaagttgagcagatgacaaaacttcaagc

SEQ ID NO: 605682 - DNA, 100 bp, Homo sapiens
gccatgttcttctccgcggcgctccgggcccgggcggctggcctcaccgcccactggaatgatatggaacctagcaaagctgttccactgaatgcatcta

SEQ ID NO: 605683 - DNA, 97 bp, Homo sapiens
accctgcagccaggactcgatggaggtcctgctcaggttccaatgatgtccccaaatggttctgtgcctcctatctatgtgcctcctggatatgccc

SEQ ID NO: 605684 - DNA, 75 bp, Homo sapiens
ctgttgccgctgttgctgatgtggctttatgaaagtacacggagtatgggaggaatggtcaccatggagtttatg

SEQ ID NO: 605685 - DNA, 100 bp, Homo sapiens
cccagtctttacttgaagacaaaaaggaaccattttctcagctgttgcagctaattgcaaaatcccagttaacttcattgagtggcgtggcacagaagaa

SEQ ID NO: 605686 - DNA, 98 bp, Homo sapiens
gataatgcaatagaagctgtggatgaatttgcttttctggaaggtgacccagggcctggtcatcgggcagctgagcagccacttctcggaggaggtgc

SEQ ID NO: 605687 - DNA, 80 bp, Homo sapiens
tccctggctgcagccctcactcttcatggtcactgggataccaataactagtgcctcgtactacgcgacagtgaccctgg

SEQ ID NO: 605688 - DNA, 102 bp, Homo sapiens
ttccccggcccacagtgggggtgtgcaaacccgagagaactggatgaataatacggcagctagtccaatgtctactgcaacttcaagtagtggaaggagtac

SEQ ID NO: 605689 - DNA, 87 bp, Homo sapiens
tattagacggccaagtcgacagcttgccccaaacaaacctaggctgcctgctgtttcccggggagatcatgaaacgaggtcgccttc

SEQ ID NO: 605690 - DNA, 74 bp, Homo sapiens
aacatcttaggaccccgggtacccctgacagcacctaacggcatgtgtatcgagaaccttccctgcgaacttca

SEQ ID NO: 605691 - DNA, 100 bp, Homo sapiens
aattgctgcacatggcctttgcagaaaagagagagcttactcacatagcatattggtatatcaaaatgaaatgcaaggaaccaaaaataacataattgaa

SEQ ID NO: 605692 - DNA, 75 bp, Homo sapiens
atttcccaagagcagcggaaaatgatccagtcacaggtagaagatgacagattattgaggttgtcccaaaagaag

SEQ ID NO: 605693 - DNA, 101 bp, Homo sapiens
aaagaagatggaattgtcaaagcttgactgcaaaattcaaaatggggctcaaggtattcgtttcatctacaccagagaaggcagaccaagtggcgaggctt

SEQ ID NO: 605694 - DNA, 49 bp, Homo sapiens
tttacatccattattgggaaatgtcaagaactctaagaaggagctgatg

SEQ ID NO: 605695 - DNA, 75 bp, Homo sapiens
gaacaaagcaacggaaagatgaacggtagcaccttaaataaagatgcacaagtctggcgttctgaggaaggccat

SEQ ID NO: 605696 - DNA, 100 bp, Homo sapiens
tctgatcaccactttagcacagaagaacccagaagagtttaaaacctccgtgtctctggctgtctctaggctaagcagacaatccctctgtgagagcgag

SEQ ID NO: 605697 - DNA, 137 bp, Homo sapiens
gtaaaaacaagctcctaagaacatcagcgccaggtgactgggagagcggaagcaacagcattgtcacaaacagatcctgctcacactaaaatatgaaccacaaacacacagagaaacaacctgttcaccactcctgg

SEQ ID NO: 605698 - DNA, 87 bp, Homo sapiens
aaactttatgaatataatcagtctgatacatgcaggttcttgggtgtctctggggagtccctgggccagaccttcctccagactcca

SEQ ID NO: 605699 - DNA, 75 bp, Homo sapiens
ggcgtggcgctcatcgagggacgcccggcccaagtggttctggctccttggcagcaatggctgtatttgaagata

SEQ ID NO: 605700 - DNA, 102 bp, Homo sapiens
gcaaatattacacttctctccttctgtgatgcagatccatccgccctagcaaaatatgttctggctttggtaaagaaagacaaaagtgaaaaagagttaaag

SEQ ID NO: 605701 - DNA, 100 bp, Homo sapiens
cgcagccatggcggcaggggagagcatggctcagcggatggtctgggtggacctggagcctcctctattggcccaggaagcccacccagccccgccacgc

SEQ ID NO: 605702 - DNA, 98 bp, Homo sapiens
ctccaaggcagctaagaatagactgcatatatattgggattttaaaccggctgcagatcaaattacgaagctgtataatctcttcctgaaaattgatg

SEQ ID NO: 605703 - DNA, 100 bp, Homo sapiens
gacgttattctgatctcaccaccctggtggcctttccctccagctctgtctatcctaccaagctatcagttgagggatttgcagttgataaaatggctgg

SEQ ID NO: 605704 - DNA, 50 bp, Homo sapiens
attttggaaagcagtttttaagacaagctggaactcagatcagcctggca

SEQ ID NO: 605705 - DNA, 100 bp, Homo sapiens
ctgggagagaggtacctctccttttccctctccctttccctaagggtcgataaagacaggagtggagtgatatcagacaccgagcttcagcaagctctct

SEQ ID NO: 605706 - DNA, 75 bp, Homo sapiens
cagaaacttcataaatatatgcaggaacttgcatcagcactgaagtcagccttatctggccacctggagacggtg

SEQ ID NO: 605707 - DNA, 74 bp, Homo sapiens
caatatttaatccagaagtatttcaaccacagatggcactgccaacagagttattaagcctacgctcagatcaa

SEQ ID NO: 605708 - DNA, 87 bp, Homo sapiens
gcaaacctctgacttccggcggcattttgaggcggtcctcctagcggcctgacttatctaaaaacagactggttgaagttccaatgg

SEQ ID NO: 605709 - DNA, 100 bp, Homo sapiens
tggagcctcaggcggcagcgcttctagacacagggaatatggaggttctgcacctgtatggaagtgaggaacagaagaaacagtggcttgagcctcttct

SEQ ID NO: 605710 - DNA, 120 bp, Homo sapiens
gactggattcacgggtagagattggcttcgggctgagctagcagtgagcaccttttggcccaatgaatatcagaaacatgccaagggacaagtgttatttgacaaagtgtgtgaacacct

SEQ ID NO: 605711 - DNA, 100 bp, Homo sapiens
caaagcctggaagcaagccgccgtggagaaggaagaactgtgctgagtcttaggaaaagtcctcagtgctgtgggcagtgcccagctactgatgtcccag

SEQ ID NO: 605712 - DNA, 82 bp, Homo sapiens
gaacttcatcatcatctacttcacaggaattgccatttggagtgcatccgccccaacccttttccccctcgtctcctgtgag

SEQ ID NO: 605713 - DNA, 100 bp, Homo sapiens
ggaagactctgaacaattcagagatgcttctaagatccttgttgacgctctgcaaaagcttctgcagctactctgatcaacatccgcaatgccaggaaac

SEQ ID NO: 605714 - DNA, 89 bp, Homo sapiens
aaaagatccgatggcagcaccacttcgaccagcttcatcctcagacaggttggtcaaagaaaaagtgatgtatgaaaaagaggcaaaac

SEQ ID NO: 605715 - DNA, 90 bp, Homo sapiens
gaaacactggcttctctccttcagctccaggctaggttccttgcattgactccatggagagtatatcacctgatttccgtcatgatactt

SEQ ID NO: 605716 - DNA, 51 bp, Homo sapiens
caggggtgcagtgtgtctggtcttatgaggagtggagtcaacatatcaatg

SEQ ID NO: 605717 - DNA, 100 bp, Homo sapiens
ggcaaaaattgtctgactcacagaaaatgcccacttcatggttagcagagatcaagtcactctttgtgcatcccttcctggctgagcgcatcatctccat

SEQ ID NO: 605718 - DNA, 75 bp, Homo sapiens
cctgcgctgccgccgctctgaggagttaaagttactgcaacaaggaggtatacaataaggagaatcttttcaaca

SEQ ID NO: 605719 - DNA, 100 bp, Homo sapiens
tgcagagccgaaacaagaagtgggctcagacaagcatttcgtggtggctctgtatgactacaccgctatgaatgatcgggacctgcagatgctgaagggg

SEQ ID NO: 605720 - DNA, 82 bp, Homo sapiens
ccagggaccaggcggaggcgtcgcgggagcctttggggcaccacagagatgcggacttcccaagtaagaagcggaagaggag

SEQ ID NO: 605721 - DNA, 83 bp, Homo sapiens
ccgtcctgtatgttggagaaggccagacattgtgttggaggacacccagccgttctctcagcccatggttggctcccccaacg

SEQ ID NO: 605722 - DNA, 100 bp, Homo sapiens
aatcagaagaagaaacggaaagtggagccccccacaccacagcagaacaagactcggagctgacatcagaggaagagcaagaaagacttaaaggatgcga

SEQ ID NO: 605723 - DNA, 75 bp, Homo sapiens
cagacactgggtctgactatttctgaacaacaagcagagttgattcttcaaaggacctggcgtattgtagtacca

SEQ ID NO: 605724 - DNA, 50 bp, Homo sapiens
cacagctttgagtgagaaacagagtgcctggtgaagaatgtgatgggatc

SEQ ID NO: 605725 - DNA, 95 bp, Homo sapiens
aggcacgccagacttacctgtcctactcaccgatttgaagattcaatatactaaggctcaggaagaattatctgccctaagaaaggaatccaccc

SEQ ID NO: 605726 - DNA, 100 bp, Homo sapiens
ctttgggaagcatgtcaccaacccggccttcaccaaactccctaattttctttctaagcaatggtatggagagatttcccgagacaccaagaactggaag

SEQ ID NO: 605727 - DNA, 117 bp, Homo sapiens
ataatcttgctgctatgcttcgaagctgtagtctgaatcaacctaagttttaaacagaaggtgaacctctgaggtacaaacacaagtgcgccttgcaaaaaaaaactttgacaaatt

SEQ ID NO: 605728 - DNA, 100 bp, Homo sapiens
ttctccttcgcatccgacgcaaccggcagcagcgctgccgccgcgtcctcagccaccgctccctcttcccacggtttttcgttggaatatacgttgcaca

SEQ ID NO: 605729 - DNA, 83 bp, Homo sapiens
gcctgaagcacccaccgaagacgaccatgacgagctctagctggatgggcgcagaggctccttctcctgaaaaagccgaggag

SEQ ID NO: 605730 - DNA, 75 bp, Homo sapiens
gcacacagggcccgctacttctggggtaaccttcccggtatgaacaggtcagcaatctgaagatggtcttacgga

SEQ ID NO: 605731 - DNA, 100 bp, Homo sapiens
aggaagagtggtaggagtgacccagcctcgaagagtggctgctgttacagtggcagagagcctccagctggtgacagtacaccagagtgagactgaagat

SEQ ID NO: 605732 - DNA, 75 bp, Homo sapiens
gaatcgctgtcaaccccgcgtccctcggggagcggagaaaggacagggagcatttcctgaagacgtagtcatgca

SEQ ID NO: 605733 - DNA, 90 bp, Homo sapiens
agaaatggctaccatctctgaggatgtgataattgtcacaagcaggatttcaaatatgcgtgcattagagaatgattttttcaattctcc

SEQ ID NO: 605734 - DNA, 101 bp, Homo sapiens
cctggcctcaagcaatccttctgctttggccttccagagtgctgaaattacaggcatagaatgtcaagctaaccaggcgtccgctacttcagaagagtgta

SEQ ID NO: 605735 - DNA, 100 bp, Homo sapiens
gatgaaacgaaaaaagctgtgaaataccagagtcaggcccggaaggaaatggaagttccagtattaccgaaaatctctctaccgatcaccagttcttcac

SEQ ID NO: 605736 - DNA, 75 bp, Homo sapiens
aggacttcggaatgcactacaacaggaaaatcatattatagatggagtaaaggctgaaagtttagaagagaagaa

SEQ ID NO: 605737 - DNA, 97 bp, Homo sapiens
gatgccccccggagctctgtgcacctccactgaaacgcaaggagcagacagaacctacaccatccgtgagaaagacgagaatccaggacttgaatcg

SEQ ID NO: 605738 - DNA, 75 bp, Homo sapiens
atacagtatgcattggaccagggcgtgaacgtcacccaggtgaccaaccgcggggaggctcacctcgagctgaac

SEQ ID NO: 605739 - DNA, 83 bp, Homo sapiens
gtagcactctctcagaagatcagatgagccgtcttgccaaggaatcttgtcgattggcctggctgctgcctactacagcggag

SEQ ID NO: 605740 - DNA, 100 bp, Homo sapiens
ggagtgatgtcttccagactcggtgctgtacccgccgtgaagatgcaatgaccggggacacagacaaatatcttgggccacaggaccttaaggaattggg

SEQ ID NO: 605741 - DNA, 97 bp, Homo sapiens
ataatacagagaaaaatgaaaaactgaaattcagtatcattgtgcggcttcctccgggatatctgtgtttgccttacatggcattgcagcagcatca

SEQ ID NO: 605742 - DNA, 111 bp, Homo sapiens
ccggctcccaggtttattctcccatagcatgtggtgtcatggagaaactccagctgggcccagagattctgcagcgggaaaatccaaggcttatttatgccaggctgagtg

SEQ ID NO: 605743 - DNA, 104 bp, Homo sapiens
gccaaatagcagaagaataccatgaggtcaaaaaggaaatcaccctgcttgagcaaaggaattaccttatcccatatcacacaactggtcctcagccataacaa

SEQ ID NO: 605744 - DNA, 90 bp, Homo sapiens
ctgtctctagactttttggacgatgtgcggcggatgaacaagcggcaggtgaaaggtgtagcagtcactcggcctacacccacagcatcg

SEQ ID NO: 605745 - DNA, 60 bp, Homo sapiens
gctccctttgggccccgaaatggaaccgcgtgtgttctactccctcttctgggaatgaag

SEQ ID NO: 605746 - DNA, 75 bp, Homo sapiens
cggagcccccaagatgcgccccagagcccgcggagccgccgcccgcggggaggaggatggactcagacaagttct

SEQ ID NO: 605747 - DNA, 100 bp, Homo sapiens
tggttactatcaaaaggagcggggtcgacggtccccactttcccctgagcctcagcacctgcttgtttggaagacacttggagaccagaaagcttctttg

SEQ ID NO: 605748 - DNA, 90 bp, Homo sapiens
tccatgcggaagatcgtcgccacctggatgctggaggttctgggccggagaaggggcgacgttcgggcaccccccgaatggacaatcttt

SEQ ID NO: 605749 - DNA, 100 bp, Homo sapiens
acggagaccagacctactgcagccacgcgggcgagcggctgtgtggatgtcggcgaagccgcgggcgaggggcagtggaagccgttggagggcctcaggc

SEQ ID NO: 605750 - DNA, 83 bp, Homo sapiens
ccaggaagtgctcttggggagcccaggccaagccatccattcttgggtcctttggagaaccttaagcgggtggccgaagtgtg

SEQ ID NO: 605751 - DNA, 98 bp, Homo sapiens
aactaaagcttgacggcttggacgaagatggggagaaggaagcgagactcatacgcaacctcaatgaatagcctaacatggcagaccagagacagcgc

SEQ ID NO: 605752 - DNA, 50 bp, Homo sapiens
ccgggagctactatgagcacgtgaagggctaccgacagaaggactatttc

SEQ ID NO: 605753 - DNA, 75 bp, Homo sapiens
agcagttggaccaagaggaaatctggccttcaaaagtatgttcgggaacagattctactagcagtagcagtaatt

SEQ ID NO: 605754 - DNA, 80 bp, Homo sapiens
agatgacagacttggacaacatgtcccaacattacatcccataactctgggtggattttaactacaactcttgtcctctc

SEQ ID NO: 605755 - DNA, 100 bp, Homo sapiens
tatccaatcaagtgcccttggacaaagcctgaaaccagggttgaagctttgagagaagcagcaactgctgttgagcaagagaaagaaatccttctggaaa

SEQ ID NO: 605756 - DNA, 75 bp, Homo sapiens
ggtggagcaccctttgctgagtggcctcttataccccggactgcaggaaatggagttgttttttccttcaagtgg

SEQ ID NO: 605757 - DNA, 82 bp, Homo sapiens
ggcatcgttgattgcatggtcaagatttaccgccatgagtccgttttaaaatcaaagatgggaaaatcggagaaaattgccc

SEQ ID NO: 605758 - DNA, 131 bp, Homo sapiens
tccttgcggaaaggatgttggcggtccctgtgacctgtggagacacggccagatctgccctccagttatctggaatgaatataccaccaccaattatcagcaacaaaaactggctcagactgcattttgtt

SEQ ID NO: 605759 - DNA, 96 bp, Homo sapiens
gccggcgtttctggcccgcttcaaggaacgggtcggctacagggagggacccaccgtagagactaagcatgcttttcacttccactgcatctctcg

SEQ ID NO: 605760 - DNA, 94 bp, Homo sapiens
catgctgcgggtcaaggagatggcatcctgcagtgccgtgattgggaaaatgaggtacgttagtgttcgcgattttaaaggcaaagtgctaatt

SEQ ID NO: 605761 - DNA, 96 bp, Homo sapiens
agatctatgactgtacacaatgtccacagaagtttttcttccaaacagagctgcagagccaaggagcaataactgaacgtttaagaagcttcagta

SEQ ID NO: 605762 - DNA, 88 bp, Homo sapiens
ggaaaccagatgaagaagatgagatttcggaagctgaatatggtgggcatgatcagatagatttgtatgacgatgtcatatctccatc

SEQ ID NO: 605763 - DNA, 75 bp, Homo sapiens
tgggatccggccagatgattacttgactgcctctgtcaccgggtccctccacccttgtctcctgtgcggccagcg

SEQ ID NO: 605764 - DNA, 100 bp, Homo sapiens
cgctgctgtcgctatggagacaggaccttctaccgctttgaggctgtgtgggatagctctctgcataactcccttcttctgaaccgagtgacaccctatg

SEQ ID NO: 605765 - DNA, 82 bp, Homo sapiens
cgctctttgcatcttaactgcagacaacacaggcagttctacataccggccaccccctcggacccgggaggtgctgatcaac

SEQ ID NO: 605766 - DNA, 83 bp, Homo sapiens
ctcggcgtgctactgtgcgctcgatccagcaccatggggaagcgggacaatcgggtgacatgggaaagcggaaccaccaaaag

SEQ ID NO: 605767 - DNA, 103 bp, Homo sapiens
cgcgaagctggccaaagcctgcccagacggctcacctgtgcgggatggaacaaaaggaatgtatcctgtcaggtataatgtcagtgaatggcaagaaagttct

SEQ ID NO: 605768 - DNA, 75 bp, Homo sapiens
gtccacagctggcaaattcagtgcagatcaggaagccttggaagatcgtttggaaaggattaatcgagaactggg

SEQ ID NO: 605769 - DNA, 100 bp, Homo sapiens
cccgtgcccacatcaaggagtatttctacaccagtggcaagtgctccaacccagcagtcgtgatcatccagcagctcgtcaacggcatcatcacgcccgc

SEQ ID NO: 605770 - DNA, 100 bp, Homo sapiens
agacaggtgtagacccaacctcgagatttaaacaagccggagccctcatgacttcagtgacctgcttctgcccctctaggtctatcagccacagtctctg

SEQ ID NO: 605771 - DNA, 95 bp, Homo sapiens
gccggccgagggtggccctaggggcagcgagcaagacagcaagcaggagggtgaggacaaaatcttcttaatcaacaagcttcactccatctacg

SEQ ID NO: 605772 - DNA, 100 bp, Homo sapiens
atgttggagaactatagcagcctagtgtcactggggtgctgccccacgtcccccaccaaagcccatgtaaggagctgagttcttaaagactgaagacagg

SEQ ID NO: 605773 - DNA, 50 bp, Homo sapiens
cagtcggacgcgtctccccaagaaagactttgtgcccattgacctagacg

SEQ ID NO: 605774 - DNA, 75 bp, Homo sapiens
gctaaactcagttccattgttaagcaagcagatactgggggccatggagtctcaggtgggggggggcccggccgg

SEQ ID NO: 605775 - DNA, 50 bp, Homo sapiens
aaagcaggcgcccgagctcctcaagaggcatcccaacacgctgtcttttc

SEQ ID NO: 605776 - DNA, 90 bp, Homo sapiens
cccgcgcagtcccagcgccaccgggcagcagcggcgccgtgctcgctccaggtaacacaagtggcaagacagccgggaacccctacccca

SEQ ID NO: 605777 - DNA, 100 bp, Homo sapiens
cagccaaaacagttcattcatattcagcgaattacatgaacgacagccttcgcaccgacgtcttcgtgcggttccagccagagagcatcgcctgtgcctg

SEQ ID NO: 605778 - DNA, 75 bp, Homo sapiens
accattggaggacaaataatgaccttgcctcatagtattcgatcagattcagaagatatctgtttatttacgaag

SEQ ID NO: 605779 - DNA, 100 bp, Homo sapiens
atcatggtggccaaacccacagaactgataaatttcaaacggaagagagtggcagcatttagaaagaatctaattgaaatgtctgaactggaaataaaac

SEQ ID NO: 605780 - DNA, 90 bp, Homo sapiens
tgataagaaaaaaagatctcaggttaagaataatgtatacatgtgggagcatttttgaaacgttggggttgttggagtggttggattttc

SEQ ID NO: 605781 - DNA, 75 bp, Homo sapiens
gagcccacggacaccacctcaacggcttctaaccctcctttatgtgactcagagaaaggagacctcattccaagt

SEQ ID NO: 605782 - DNA, 96 bp, Homo sapiens
gtgaccgagaccgtgaccgagagcgtgaccgagagcgcgaatatcgtcatcgttagaagacagaggctccgtggtgaaggcgcgcgtgctgacctg

SEQ ID NO: 605783 - DNA, 100 bp, Homo sapiens
cagagcagtttgtcctcctcaatctggttacagccctgcacctggcagccatcctgggggagacatccacggtggagaagctgtacgcagcaggcgccgg

SEQ ID NO: 605784 - DNA, 75 bp, Homo sapiens
tcacattaatcgcaaatatgcttttaaggatacctacctggtttatattctaaatgaattggctggaaactcctt

SEQ ID NO: 605785 - DNA, 75 bp, Homo sapiens
gacagtgtctttccacctttggatccgcagaaatcgaggctgtatcagctctccaaagctgggaagctctgtgtt

SEQ ID NO: 605786 - DNA, 90 bp, Homo sapiens
ggacacccgcaggaactcggcagaggagaaattcagacggctcccgaggttgcctgtgtccctggagtgttacacagtgcctcctgaaga

SEQ ID NO: 605787 - DNA, 100 bp, Homo sapiens
ccgaaacgctctgaaaatcgagccggaatatcagaagctctttcctgacattcccatagggtattctgggcatgaaacaggcatagcgatatctgtggcc

SEQ ID NO: 605788 - DNA, 131 bp, Homo sapiens
tgccgctgccgccctgagtcactgcctgcgcagctccggccgcctggctccccatactagtcgccggatcacagaagaactgcagcttcctggggagcagtttcacctccacaggcatcgcttcatactcc

SEQ ID NO: 605789 - DNA, 100 bp, Homo sapiens
caccaaggagactgctatttcatgcttgacctgatggccaaaagaaaggaagaaaatttttcctctcctaaaaatgccaaaaggccaagacaagaagaat

SEQ ID NO: 605790 - DNA, 75 bp, Homo sapiens
aagaactcgtcatgctctttgtagcgtggtgcttctgttgctcacagggagtgcatccgccccaacccttttccc

SEQ ID NO: 605791 - DNA, 100 bp, Homo sapiens
atgtggtgatgacagaatcagcttttcaggtgagctcaggagataagatggaagatgcaacagccaatggtcaagaagactccaaggccccagatgggtc

SEQ ID NO: 605792 - DNA, 101 bp, Homo sapiens
aaatgaaaactgaagatggcaaagtagaaaaacactatctcttctatgacggagaatccgtttcaggaaagacttgggaagacccagggcacaatgataaa

SEQ ID NO: 605793 - DNA, 85 bp, Homo sapiens
tccgaagtagctgggactacaggagcaccagaaggtggagctgctgcggaaggccgtgcaggcccaccgaggctacaccgaccgg

SEQ ID NO: 605794 - DNA, 100 bp, Homo sapiens
gagtcctgaagccggcggacggttttcgtacgggcggccgtgcgcgaggcgagagtatggtgtttgcgaaaacttgcggaagctggagatcacaggcgtg

SEQ ID NO: 605795 - DNA, 100 bp, Homo sapiens
gaatcttcaagaacttcctcgcactgtgacatgtctgatcccttgctcccatccctgcagcatgaacaagattcagtaagctgtgaggtccgtaatgtca

SEQ ID NO: 605796 - DNA, 74 bp, Homo sapiens
ggaggctggagctggaggcgcggcgccggtgagctgagatgtgtcttgctgaatcagggctctcttatccctgc

SEQ ID NO: 605797 - DNA, 50 bp, Homo sapiens
ggcctcccgcgtgctggccatgaaggctatcttagcggcacagagacgag

SEQ ID NO: 605798 - DNA, 80 bp, Homo sapiens
tctctggggactctgaacttccctggtcgaacagttttttctaatggctattcaaggagtctcgctctcagtcaaaatct

SEQ ID NO: 605799 - DNA, 75 bp, Homo sapiens
agacttgtacacaaacttggaggatttgataatgttacagagaagatcccagtaaggcatttatatacaaaagat

SEQ ID NO: 605800 - DNA, 83 bp, Homo sapiens
atttttggacctgaaacagaaattctggaacacctatatggtgagaagccctaccactgcaactgggacggctgcggctggaa

SEQ ID NO: 605801 - DNA, 82 bp, Homo sapiens
ggcgctagggaagatcgcaccgcggacgcccgctgagcttggcgcacgggccgaccagcccgagcgggaagaagttccgcag

SEQ ID NO: 605802 - DNA, 83 bp, Homo sapiens
tggagcccgagctgcgccgccgccgctacgaatacgatcactgggacgcgagaggtggagaagagcgagtacttgagaaagaa

SEQ ID NO: 605803 - DNA, 95 bp, Homo sapiens
ccgtattctggagcagtatttcatgaagctgggacaagcgttactgtgaagcgggcttcagctccgtggtcactcaggcgagtagggagcaaaag

SEQ ID NO: 605804 - DNA, 98 bp, Homo sapiens
cttcgatgatcgtgtgtcggatgaggagaaggtatccgttacagcactgatgtgagtgtagatgaagtaaaagctttggcttctctgatgacatacaa

SEQ ID NO: 605805 - DNA, 75 bp, Homo sapiens
tttctgaagaagctggggctgattagccggtgttatgaagcggagattgaggagatagatgaagaaaatggcacc

SEQ ID NO: 605806 - DNA, 90 bp, Homo sapiens
cgctggctcagccgcaagtacccgtccatcatagtcaactgcgtggaagagaagatggcccgtccttaaaagaaacaacaggacccagca

SEQ ID NO: 605807 - DNA, 100 bp, Homo sapiens
aagattatgtgcattcacggaaagatgaaatataaacgcaataagatcttcatggagttccgcaaattgcaaagggagaaagagagagcgcgaaagagag

SEQ ID NO: 605808 - DNA, 83 bp, Homo sapiens
gggcgttagccccgcgcagccgccggcgtcgccgccatggacctagagtgaaggctgcacagactgagttaggacagcaaatc

SEQ ID NO: 605809 - DNA, 75 bp, Homo sapiens
attgctcaacagcatcttggaagtccttagctaccaggatgcgaaaaggcgacggcggattgacagaagtatgat

SEQ ID NO: 605810 - DNA, 82 bp, Homo sapiens
tcaagttccagcgggaggagcggcccctcttcccccagagtgagtgtcgtggttggggtgctggacccagagtgcctaccct

SEQ ID NO: 605811 - DNA, 75 bp, Homo sapiens
gaggagcaggccacacaggcacaggccggtgagggacctgcccagacctggaggcatgagccatgagcccaagtc

SEQ ID NO: 605812 - DNA, 74 bp, Homo sapiens
acgatccagcactgtggccagcctcgacacagattccaccaaaagctcaggaattcctcctgatcagcagagac

SEQ ID NO: 605813 - DNA, 83 bp, Homo sapiens
aacatacagtcgcctctgacaagccagtgtaaacaggaacatcgataagtagtgtaaaaacttgcacaatgaaatccgaagcc

SEQ ID NO: 605814 - DNA, 75 bp, Homo sapiens
aaccccgggaacgagctgccttccagaaggccggggtcagaaagaaaaaagagggtcccggggccgaggcaggag

SEQ ID NO: 605815 - DNA, 83 bp, Homo sapiens
ggaaatgtccatccagttgggagctatgagtcctctgaaatgaacagcatagtaaagaggatgaatatccaaagaagcccttg

SEQ ID NO: 605816 - DNA, 135 bp, Homo sapiens
ctggcggccgcggagtcttcggcgagacctaccgggccctgtctgtgccggccgtgagctgcggcaggacggctggaggtgctggagaatctggtaaaagcaccattgtgaagcagatgaggatcctgcatgtta

SEQ ID NO: 605817 - DNA, 100 bp, Homo sapiens
ctgcaagccggtgcagcagccttcagcttttggcagcatgaaagttagcaagcctgtcatagggaactgcatggatagaagttctccaggacaagcagtg

SEQ ID NO: 605818 - DNA, 90 bp, Homo sapiens
ggaaaattaagcagatgctccagtttgagaaacctggatctgcgatctgtttgtggagagcacagaatggggattcaacacctcggcaat

SEQ ID NO: 605819 - DNA, 75 bp, Homo sapiens
acagatgctatagtctggtatcaaaagaagagctcagagttctacagagtcaccactgaacaatatcagaaagct

SEQ ID NO: 605820 - DNA, 82 bp, Homo sapiens
ggcaaccctggcctggcttaccttgaggaccggggtcaggattttttatcaagcagaaatgcatcgaacaacgagaatcaag

SEQ ID NO: 605821 - DNA, 99 bp, Homo sapiens
gcaatttcttgaaaagagattacaggtcttaaccatgaacttctctggaggagggaggcaggaagcagcagggtccaggggtagaagggctcccagacc

SEQ ID NO: 605822 - DNA, 76 bp, Homo sapiens
aatgtctttcctaccatctaaaatacgaaggtttctggctggatggtgtcctcagaccgaagccaactttcctttc

SEQ ID NO: 605823 - DNA, 101 bp, Homo sapiens
tttgactaaggaaccctttacctttcctgtaaaaggatctctctttcctcatcatggtacatttgaagtaataaagaatacagatctcgatctggataaaa

SEQ ID NO: 605824 - DNA, 100 bp, Homo sapiens
gagacatgaaaaagatgagcaggaatgttttgctacaaatggaggaggaggaggacgacgacgatggggatatcgccaccattggttcaggcaatcttca

SEQ ID NO: 605825 - DNA, 127 bp, Homo sapiens
gaaagccctgaggctgctggtggagctgaacaagatccctaccgtgcgcgccttccttttgatccccataccgagtgtgcctacgttccagccgtctacacctgtccctgagcgcctggaagctgtg

SEQ ID NO: 605826 - DNA, 82 bp, Homo sapiens
cagtaaaatatggtgaactcattgtcttagggaaaagcccgatggctccccagtatttattgccttcagatcctctacaaag

SEQ ID NO: 605827 - DNA, 100 bp, Homo sapiens
caggctgtcctggccaacctgctgctggaggaggataacaagttttgtgcagattgccagtctaaagaccccctggttgtggaatacgaggcattgctgg

SEQ ID NO: 605828 - DNA, 120 bp, Homo sapiens
cagtgtaacacacatgcttgtccacacgacgctgcatggagtactggcccttggagctcgatcagtcgcatcgaatacattcattcaaagaacttcatccaccgggatgtgaagccagac

SEQ ID NO: 605829 - DNA, 51 bp, Homo sapiens
gcgacaagcaacaacaatcatagctgttggcgagctttagcccctctcctc

SEQ ID NO: 605830 - DNA, 89 bp, Homo sapiens
ctaacggggacttcacctttgtctcctcagcagacgcggaaggagaaccaggtgcatcagcgcattgcggagctgaggaaagcaggtct

SEQ ID NO: 605831 - DNA, 100 bp, Homo sapiens
ttcatcatccctgtggagattgatggggtggtccaccaggaggttgtcgggacatttcactctccagtaaatgtggcccttggcgttactgagtcctaag

SEQ ID NO: 605832 - DNA, 75 bp, Homo sapiens
gaaaatgggttccatgagaagtgacatcctcctcgaatcaaaaggcaaaagtcaacaactctagcttaattggag

SEQ ID NO: 605833 - DNA, 75 bp, Homo sapiens
gtgacccatttaacacaagtgttcccgaagagggccgttgctccagggagaactgcaaatatcttcatccacccc

SEQ ID NO: 605834 - DNA, 82 bp, Homo sapiens
gcagattttggtttaatatctgattgggacaacattcagacccatttccagtcatgatgctgggcctaaaggagataacatt

SEQ ID NO: 605835 - DNA, 100 bp, Homo sapiens
actctacatgattgacccatcaggtgtttcatacgttcatcagacttaacttctgctagaaattgttaccagcctctattagaaaatcccatggtgtcag

SEQ ID NO: 605836 - DNA, 98 bp, Homo sapiens
agcggcggcgggagcggcgccgagaggccgtgcgggacgcgggcgccaggaccggccgaacgcagaggctggcagtgatggtgaaagcataggaaact

SEQ ID NO: 605837 - DNA, 90 bp, Homo sapiens
agttgagttgcctctgattggaaaagcaggaagaaggtagataatgactataatgcccttcgagaaagactcagcaccttgcctgataaa

SEQ ID NO: 605838 - DNA, 97 bp, Homo sapiens
ccgtaccaggagccccggcctcgtgggaatccgccccactccgctccctgtgtccccaatggctctgacccatggggaaatgagaaagaaccaccgg

SEQ ID NO: 605839 - DNA, 98 bp, Homo sapiens
tacacggcagagatgatagcaaaaatgcacatccggggcattgtcaagaaaatatttacaccagcagctccagttcataccaataaagaagatcctgc

SEQ ID NO: 605840 - DNA, 96 bp, Homo sapiens
gtttctggaattgatctcgccaaaaaggacatctttggagccagggtaaaccagacttgaatacaacattgccaattagacaaacagcatcaattt

SEQ ID NO: 605841 - DNA, 75 bp, Homo sapiens
taaagaactacattactattaagccgatgcagcctcagtgttcctttgccttgggggtttctgagtggtggggtt

SEQ ID NO: 605842 - DNA, 73 bp, Homo sapiens
cgggagggggccaagtatgtgtcccacggcgccacaggaaaggttgaaccatgattccggtgacagagctccg

SEQ ID NO: 605843 - DNA, 100 bp, Homo sapiens
ctgtcttctccccagacggacacctttttcaagttgaatatgcccaggaagcggtgaagaaaggatccaccgcgccacccacacagaatatgcctatggg

SEQ ID NO: 605844 - DNA, 100 bp, Homo sapiens
gcgttggagaggtgttaccggaacggcggcgacaagggtgttcccgaactagagtgggtggcatccttagctgggcctggagggcaagtggaaatagaac

SEQ ID NO: 605845 - DNA, 96 bp, Homo sapiens
tcggctactgcgacgccaaatacgtctgggcagccacggccgggggcgtctttcagagcattacgccaaaactggacaagccaaggcatctgtagc

SEQ ID NO: 605846 - DNA, 51 bp, Homo sapiens
caccgagctgcccttcttcaccctgggtgctggagaatctggtaaaagcac

SEQ ID NO: 605847 - DNA, 75 bp, Homo sapiens
gccgccgccaccatgcccaagagaaaggctaatctagacgaaatccagatgagttcacctacattccttagagct

SEQ ID NO: 605848 - DNA, 100 bp, Homo sapiens
ctgctactatgacaaatccaagtcgttcttcgacaacatctcttctgaactcaagaccagggtgagtcagatgattccattctccgattggccaaggccg

SEQ ID NO: 605849 - DNA, 95 bp, Homo sapiens
ctcccaaggtgctgggattacaggtggcctcactccaggaaaaagtgacatcccagagccaggagcaggccatcctgcagcgatccctgcaggac

SEQ ID NO: 605850 - DNA, 83 bp, Homo sapiens
ccaccatgtcagacgcagccgtagacaccagctccgaaatcaccaccaagggcgtctctggccgagcctctttttgtggaaaa

SEQ ID NO: 605851 - DNA, 75 bp, Homo sapiens
aggttcacctgcatcatcggccccaacggctctgggagagctggtgacggcctccaaggccatcattgaaaagga

SEQ ID NO: 605852 - DNA, 97 bp, Homo sapiens
tgctcgataaatcagacagaacagttaatcctcaatttaagcctgatctaacccctagaaacagatatggctgcaaattgcacatcctcatggagtc

SEQ ID NO: 605853 - DNA, 100 bp, Homo sapiens
gatggttctgtgtacgtctggcaaatggatactggctttgatgacagtagggaaagaaccatttcctaccatttacgtagattcacaaaaagaaaatgag

SEQ ID NO: 605854 - DNA, 75 bp, Homo sapiens
cagaaccagatccgggagcacgtcatcgccatcgaaggtgtggtcactcacctgtctaccactcccgtgaaatgg

SEQ ID NO: 605855 - DNA, 98 bp, Homo sapiens
gcgagtccccagcagggcccctgggctcccggaagcctgatcgacagaagagggtacatccagcccgacacgccgcagccagcagcaccctccaatgg

SEQ ID NO: 605856 - DNA, 96 bp, Homo sapiens
cgggagatgtcgaaccccgggacacgcaggaacggctccagcatcaagatccgtctgacagatggtggaagagagtgaagagcggctcacggagga

SEQ ID NO: 605857 - DNA, 95 bp, Homo sapiens
cctcctccacaccccccgccgcagcagcaccggcgacagagaagtcattcagaattcaaaagaagttctaagtttattgcaagaaaaaaaccctg

SEQ ID NO: 605858 - DNA, 71 bp, Homo sapiens
gccatgagcgagcgcctccgtcccagtgttctcaggcgctgtggtctcaccttccactggggcaacaatgg

SEQ ID NO: 605859 - DNA, 78 bp, Homo sapiens
gtgatgttggagaactacagaaacctggtctccctagtctctgctggatgaaccgaatcctaacagtccagccaatag

SEQ ID NO: 605860 - DNA, 100 bp, Homo sapiens
ggacagcacctcatcccctggatgggggaccacaagatcctcatcgacaggtgaggaagaggatggagatgaagatgaggaagctgagtcagctacgggc

SEQ ID NO: 605861 - DNA, 100 bp, Homo sapiens
ggcagctggacgagctggagaaggccatcaccacgcagaacgtcaacaccaagtgcatcaccatccccagttgttgaaatggatgaaaacaacggacttt

SEQ ID NO: 605862 - DNA, 80 bp, Homo sapiens
cttgcagaaaaattggtgtacctcagggccacccagtgctcctgcagaagatcgttcaggaacacccgacagcattgctt

SEQ ID NO: 605863 - DNA, 90 bp, Homo sapiens
aggaaattgaaggaacttggagttaatggtctaatttatgataggtaaatatctaagtgtggaattgctggattatgaggtaggtatatt

SEQ ID NO: 605864 - DNA, 73 bp, Homo sapiens
tctcaacatttctgcagactgcctcaacagagtgataggaaaactcctccttaacttggtagatcatactgaa

SEQ ID NO: 605865 - DNA, 100 bp, Homo sapiens
ttcacctctagtcactgtcgcagggacaggagtactccacagaggataaatttcaacctccggggccacaatagcgagtttttcagaagaagtgaagtca

SEQ ID NO: 605866 - DNA, 75 bp, Homo sapiens
tcgcagtggtcgcttcttctccttgtgctcaagtaaagctctttgtgacagggcttttcagcttaaatcaagata

SEQ ID NO: 605867 - DNA, 75 bp, Homo sapiens
tacgtggagctggtgcagcggaagcgagtccgacaactgccccttcaaactcttccagcctcaccctgtcaggta

SEQ ID NO: 605868 - DNA, 83 bp, Homo sapiens
cccgtgggcgagccgcccgcccgccgagcagccatgaggccctcgtgaccttctggacttcccccgcctgcccgacccccagg

SEQ ID NO: 605869 - DNA, 98 bp, Homo sapiens
cgggacccagagtcagcgccctgaatgtgctccgggacttgggaatttttggtctgtataaggaagctcttcgtgggcggtcttgactggagcacgac

SEQ ID NO: 605870 - DNA, 144 bp, Homo sapiens
tgccgagggggtcagcagcccagcccctacccaagacacccacatggaaacggacctgctcagcagcctctgtgctgtcgtcatgcctcaaacccgatcccaggcacaggctacaatcagttttccaaaaaggaagctgtctcg

SEQ ID NO: 605871 - DNA, 82 bp, Homo sapiens
caaggactaatctgatcgggtcttccttcatctttagcgtcacctccctcactgggcagcatgggggagaagtcagagaact

SEQ ID NO: 605872 - DNA, 101 bp, Homo sapiens
ccgggatctcaggtcctcgggggcggcggccacgccaaggacggtgttctaagaacggaagcatctgggctggatggaatttagcatcaagcagagtcccc

SEQ ID NO: 605873 - DNA, 82 bp, Homo sapiens
tagctgccctttccgtttccagggttccgaccagatgatgaagaacgagagcttcaaatggatcctgcagactatggaaagc

SEQ ID NO: 605874 - DNA, 100 bp, Homo sapiens
tctcgctctgggtctccaggcccgcgaccgtccgccagtcgtcccgagctggctggaggcgtgatcctgggtgtggccctgtggctccgccatgacccgc

SEQ ID NO: 605875 - DNA, 100 bp, Homo sapiens
gtggacgagcaggaagcggctgtcaagtcggcctcaggagtgcaagtagctgatgaagtatgtcgcattttttatgacatgaaagttcgtaaatgctcca

SEQ ID NO: 605876 - DNA, 100 bp, Homo sapiens
cggacagccgcgcgctgagggtctcggggcgggcgccgcgggacctctccgggccatgggtatcagaagcatgtgcacacgtatcgcattctgcctgatg

SEQ ID NO: 605877 - DNA, 100 bp, Homo sapiens
gtaccaaacgtggttgtacgagacgtggcctgtggcgctaaccacacgacaacagtgcaggaggaaagcacagtagactcccagccagtgccaaacatag

SEQ ID NO: 605878 - DNA, 75 bp, Homo sapiens
ctcactgcagaggtgctggagctggcaggtcaaaatgcagatcttcgtgaaaacccttaccggcaagaccatcac

SEQ ID NO: 605879 - DNA, 100 bp, Homo sapiens
ggccgccgctgcaccttcaccgcgtacccgggacccgcccgcccgcgggaggctatcaatatgacggctgaagaaacagtgaatgtaaaagaggttgaaa

SEQ ID NO: 605880 - DNA, 100 bp, Homo sapiens
ccgcacgcggggctgctgcccaaggtgcttttgaagatgatgatatcacgcacgttgaaggaagtgtagatcctattcgagatatagaaataatacatga

SEQ ID NO: 605881 - DNA, 75 bp, Homo sapiens
gaagatcttcgagttcaaagagaccctcggaacgcaccagaatttcctgagtttgccactaaagtccaggaagct

SEQ ID NO: 605882 - DNA, 89 bp, Homo sapiens
ctttgcgaccctctaccagggatggggtgtcagcggccctgggttggagcacagagctgccaaggggccaagggatgagctggggccct

SEQ ID NO: 605883 - DNA, 97 bp, Homo sapiens
ccctccagtccatgaaagcccagccaaagtatgaatctccagaacttgaatcccaacaggagcaagaatggagatttacagacagtcatctgggtgg

SEQ ID NO: 605884 - DNA, 100 bp, Homo sapiens
ctgcaggcctccgcgctcagtgggaaacagtgcttcttagtcctacgtcagcagcagtttaatgtccaggctcttgtggcggtgggagaccatgcaagca

SEQ ID NO: 605885 - DNA, 100 bp, Homo sapiens
gccaatcacaggagacccaaatctgcttgttatctacagaactcaaagttgtcaatacgtagaggtccaccgggccccaggggtccaagaggtgacagag

SEQ ID NO: 605886 - DNA, 101 bp, Homo sapiens
cgacatactacctctggccccgagatcagaatgccggggtgagcttatggaaccaaggaagagctgatgaagttgtcagtgcctctgttgggagtggggac

SEQ ID NO: 605887 - DNA, 82 bp, Homo sapiens
gcggtcccgccggatcccgaagacgagggcctggaggaaacagcatttaaatcaaacggtattgagatggattgggttatga

SEQ ID NO: 605888 - DNA, 83 bp, Homo sapiens
gttgacgttagtcgcagtcttcgctgctaacggaactgtggctgcaccatctgtcttcatcttcccgccatctgatgagcagt

SEQ ID NO: 605889 - DNA, 100 bp, Homo sapiens
catcagtcggatacacacatattcatcatcatgggtgcatcggacttcagggccacaggtgctgccaagatgctccagggcacctgctccgtgctcctgc

SEQ ID NO: 605890 - DNA, 82 bp, Homo sapiens
ctacgccaaggaggtttacaaaatagacatgccgcccttcttcccctccgaaagtgattctggacaaggattaagaatgtgg

SEQ ID NO: 605891 - DNA, 100 bp, Homo sapiens
tattgaaaaagaggtcaataatgaaagtggagagtcacagaggggaacagatttcagtgtcctccttagctctgcagcgagtaaccagctcataaatcac

SEQ ID NO: 605892 - DNA, 98 bp, Homo sapiens
cttccatgagccggaggccattgagctgtgcacgaccacaccgctgatgaagacaaggactcacagtggctgcaagttccagctcaaccaagataaaa

SEQ ID NO: 605893 - DNA, 82 bp, Homo sapiens
ggaatttttgaaatgggctgggaaaagccatctcctattcaggttgattgtacacagcactatgaactctgctccggaaacc

SEQ ID NO: 605894 - DNA, 75 bp, Homo sapiens
gaagcagccgatccagcctgcggagcctgtggggcagcttaatgcagataccgaaagagaagaaggcgaagagtt

SEQ ID NO: 605895 - DNA, 100 bp, Homo sapiens
cacttccaacagtgacgtgttctccaaataccagctcgacaaagatggggttgtcctctttaagaaggttttggctacgggcctccacctccaccgccag

SEQ ID NO: 605896 - DNA, 97 bp, Homo sapiens
cgagcgctgcactaacgcaggatccggctgccgaaggtcctcgccaggactgatcctttgaaatactccagccatgactaaaagagaagcagaggag

SEQ ID NO: 605897 - DNA, 100 bp, Homo sapiens
gctttgacttcatggtcgatgaggagctgaaggtgtggctcattgaggtcaacggtgcccctgcatgtgctcacaatattggtacaagttgttctccatt

SEQ ID NO: 605898 - DNA, 96 bp, Homo sapiens
ctggtattgctgtggagacggtgacagattctagccgctactttgtaatccggatccaggatggtactgctaggccatgtctggtccaactgatga

SEQ ID NO: 605899 - DNA, 75 bp, Homo sapiens
agctgtcctgagtgaaacttttaggcatggcctgtatgagaagaaaaagacctcaagaaagcaacgaaaggaacg

SEQ ID NO: 605900 - DNA, 51 bp, Homo sapiens
agcagagtacgatactcaggtcaaaggacagagcgggatgccaccagcttg

SEQ ID NO: 605901 - DNA, 75 bp, Homo sapiens
cacttctagacgacaaaatgcaaaaaaggaggccaaagactttgtatctagaagagcagaagacagagaatggaa

SEQ ID NO: 605902 - DNA, 100 bp, Homo sapiens
cccaaatcgtggccccttcgacctgcgctccgcgctctggcgctacggtctggccgtcggctgcggcgccatcggtgctgttccagaattcaaagaagag

SEQ ID NO: 605903 - DNA, 75 bp, Homo sapiens
cctgaacggcagccccaagaacggaaagcctggagcattggtaagcgtcacactgccaaagtgagagctgctgga

SEQ ID NO: 605904 - DNA, 74 bp, Homo sapiens
gtggatattgggcttgacagctgcaaggagttactgaagacatgaagagtatttctggagaagaatcatcccat

SEQ ID NO: 605905 - DNA, 102 bp, Homo sapiens
cagcatcatcccagtaagctccaaccaggaattgattatggattaagtttaccacttggagaagactatgaacggaagaaacataaattaaaagaagaattg

SEQ ID NO: 605906 - DNA, 82 bp, Homo sapiens
accaatttttacgtctagatttccatgcccatggaaggaatctgtcttgaactatcgtttcgatcctctcggcattgttgat

SEQ ID NO: 605907 - DNA, 82 bp, Homo sapiens
ctgccggcacgcgactccccccgggcccaaagcctccggtgtggctgtctctgatggtgtcatcaaggtgttcaacgacatg

SEQ ID NO: 605908 - DNA, 100 bp, Homo sapiens
acaagtgtgtgcatctggctgttagaagaattcatgctcatccggactatcggtggtccatgtcaagtgatagttcacaagtgggagactcatctacaac

SEQ ID NO: 605909 - DNA, 73 bp, Homo sapiens
acccaatcaaaaaagaaactagcaaactttttaatgaggaacgttacagtgtttctgccacctctgtacaaaa

SEQ ID NO: 605910 - DNA, 82 bp, Homo sapiens
gcccgcaatccacgccacggaatccccgaggtgagaagccctaccactgcaactgggacggctgcggctggaagtttgcgcg

SEQ ID NO: 605911 - DNA, 100 bp, Homo sapiens
aactatagaaacctggtatcactggatgctgggctcttgcactgtttggtggaaatggtgagacaggatttgagcaaaattctacttattcagtgttcag

SEQ ID NO: 605912 - DNA, 100 bp, Homo sapiens
gatgctggatgttcatggagtgaggtgggcaaacgcagaggcgggaacaaactagccctcaagacgggaatagtagccaagaagcagaagacggaggatg

SEQ ID NO: 605913 - DNA, 50 bp, Homo sapiens
ccaggatccacatataacctccaggtagtcaaaccacacactccattaat

SEQ ID NO: 605914 - DNA, 75 bp, Homo sapiens
acagaccttaaggtgtttgttgacctcttacctgctacacagtgtacaaaaacttggattctcacttgcatttat

SEQ ID NO: 605915 - DNA, 100 bp, Homo sapiens
ccgcgctgggttcctagctggggaaacgtgatccaggcgaagcgccccaggaaggattggggtgctgactccagcacagatcaagtcaatttgtcaggca

SEQ ID NO: 605916 - DNA, 83 bp, Homo sapiens
ctcaatctcagatgtcatagctcagatccaggatgagaagactgataaaagaagaagctagctgaacagctgtaaaatgccca

SEQ ID NO: 605917 - DNA, 105 bp, Homo sapiens
ctgtcatagaaactcacatgagacaaatgcgctcagcttcaattggtgctgctgttttttcaaacgaaggaaaaggaaaaccatacagcgccacaaatgactctg

SEQ ID NO: 605918 - DNA, 100 bp, Homo sapiens
ctgtgttaaattcagcccctcttccagataccatttggctttcggctgtgcaggaacttgtaatagctggcatcgttgagaatgaatggaaaagaacgtg

SEQ ID NO: 605919 - DNA, 83 bp, Homo sapiens
agctcctgtttgacggtattaagaaacatcgagtcactttgcctggacaggaggaaccctgatgaaactgattccaagacagc

SEQ ID NO: 605920 - DNA, 75 bp, Homo sapiens
cgctctggctgtgctgcgcggcccccgcgcatggtgtaaacatcctactttggggcaacttgccagagatagaag

SEQ ID NO: 605921 - DNA, 108 bp, Homo sapiens
agagatttctgcagtgaagattgctgtaaaaaatttcaggattggtactacaagcaataggagtgaaacatccacatctgataacacagaaacttaccaagagaatac

SEQ ID NO: 605922 - DNA, 75 bp, Homo sapiens
aaagttcgtgaatctcaacttttcgccgcaggttgctggtgtccctagattccggtttgggccacctgaagatat

SEQ ID NO: 605923 - DNA, 83 bp, Homo sapiens
ctgccctctcgctttccctctcgcgtctctggctgcaggtcgcgtggggcaggcagtggcgctgcgggccaaggccttcggct

SEQ ID NO: 605924 - DNA, 82 bp, Homo sapiens
cagatcatccatgtgagtgaccatgcagcaaaagaaggagggtcctctcagtgattaagacgccatttggaatgaacaggaa

SEQ ID NO: 605925 - DNA, 82 bp, Homo sapiens
aactgggtggcgaacggggcgagcctggaggattgtcactccaacctcttttcgctggtgaaaggaaagcaagccaggatgg

SEQ ID NO: 605926 - DNA, 100 bp, Homo sapiens
acgaaggtgtgaaggggaagaagctgaccttcgagtacagagtctccgaggtggttatcactaggctaaaactggacaaagaccgcaaaaagatcctcga

SEQ ID NO: 605927 - DNA, 100 bp, Homo sapiens
gccaagtacccgcgtgcatacggctgccggcatggcacattacaacttcaagaaaattacggtggtgccgtccgccaagtggtggacttgctttgtgaag

SEQ ID NO: 605928 - DNA, 88 bp, Homo sapiens
gcgcgcgcctgcccagctttgcagcccccgaacgcggcctcgcacaggaattgcattttgtgaaaaaagaacaagaattttctgcaag

SEQ ID NO: 605929 - DNA, 98 bp, Homo sapiens
ggacagatgaagagtgacttgtttctggatgattctaagagatcaaagatccagctaacaggcgctacgaggtgcccttggagaccccgcatgtccac

SEQ ID NO: 605930 - DNA, 75 bp, Homo sapiens
tcttcttagttgatgatttagttgattctctgaagcaatgtggacctgcaagctgttgtgattttcgaacttgtg

SEQ ID NO: 605931 - DNA, 74 bp, Homo sapiens
ggactatatggaagtacatgaaggactatttccccatctcgataaaataccatgaggagtttgagaagagccgc

SEQ ID NO: 605932 - DNA, 98 bp, Homo sapiens
accgcctacaggagtatgatgcaagacgttccatcctcagagcagcctgaactgttcctaaagaaacttcagcagtgctgtgtcatttttgacttcat

SEQ ID NO: 605933 - DNA, 82 bp, Homo sapiens
ggcaactttagagtacacacagtcatgaccctagaacagcagccaaatggagcggagtccctgaaagatttttgccaggaag

SEQ ID NO: 605934 - DNA, 82 bp, Homo sapiens
gagccctgaagaacaacagtaatgatattgtaaatgcgattatggcctcacctgcagatgccccccagcctgggccagatga

SEQ ID NO: 605935 - DNA, 100 bp, Homo sapiens
acaaactcgaagaacagctgtggaaagaagttgcaaaacactggacgcaaacatgcagatctttgtgaagaccctcactggcaaaaccatcacccttgag

SEQ ID NO: 605936 - DNA, 100 bp, Homo sapiens
actccgcacctcggggacattattgcgcgtggaacggctgcttttggaaggaggcaacgcacgggccacaggcatgttcctgcagtatacagtgccgggg

SEQ ID NO: 605937 - DNA, 89 bp, Homo sapiens
ctccaggatacctacaatttggatacagataccatctcaaagggtaatcttccaggaaaggcaccaatgcccagacctggctacaagcc

SEQ ID NO: 605938 - DNA, 83 bp, Homo sapiens
gcgcgctggcgctgagcctgcagccggccctgccgttccagggtctccctccactgctgtagtaacccgggtccggggcctcg

SEQ ID NO: 605939 - DNA, 112 bp, Homo sapiens
cggcagccggcagccagcggcagtggatcgaccccgttctgcggccgttgacctggtccgacccccagtggcactaacgtgggatcctcagggcgctctcccagcaaagcag

SEQ ID NO: 605940 - DNA, 83 bp, Homo sapiens
acccgccggcccgcgggtctacttcctcaaagatcggatcaacatcaagaggaagggagcgtggccctccaccctcctgtccg

SEQ ID NO: 605941 - DNA, 50 bp, Homo sapiens
catcgttgagaatccacagacacacgaggctggagggcagtggcatgatc

SEQ ID NO: 605942 - DNA, 82 bp, Homo sapiens
attccaatgtgactgtccactacatttcactggccgcttctgtgaaaaaggcgatatgaaaggtgaggtctatccatttggc

SEQ ID NO: 605943 - DNA, 100 bp, Homo sapiens
tcctgcgagagaagggggttcatcatggcggatgttggatggcaagcatgtggtgtttggcaaagtgaaagaaggcatgaatattgtggaggccatggag

SEQ ID NO: 605944 - DNA, 98 bp, Homo sapiens
catgaggccgcgaccggcgggacgggccgaggcccggcggaggaggcggctccgggggaacccgccgccggagtcattcttatagaagagcatcagag

SEQ ID NO: 605945 - DNA, 100 bp, Homo sapiens
gaagaactgaagaagctggagttgctcagacaggcacagcagtgaccaccacctcagcggctgtagtgtcccagagtcctcagctgtataatcaaacctc

SEQ ID NO: 605946 - DNA, 100 bp, Homo sapiens
gaacagcaacgatattgccctggtccacctctccagtcccctgcccctcacaggcagcaattccatttccgtgagggcgtttctagatgaagatgacatg

SEQ ID NO: 605947 - DNA, 112 bp, Homo sapiens
ggacggtctgcatactcgctgcccgccggctccctcccccgcgtccctgcgaccgccgcggcgaagatgatatgaggccccaggattcctggcgaggtcctcctcccctttt

SEQ ID NO: 605948 - DNA, 89 bp, Homo sapiens
tgggaaggtggtgcttgtcctggctggacgctactccggacgcaaagctgtcatcgtgaagaacctttcagctcttggggcattggtga

SEQ ID NO: 605949 - DNA, 75 bp, Homo sapiens
ggctggttccggctgcagcccgaccagtccaagagccggcggcatgacgaaggggccgtatggggtctttgctgg

SEQ ID NO: 605950 - DNA, 50 bp, Homo sapiens
acctgagcaggaacctggagttttcagctcctgcccctcctaaagctgaa

SEQ ID NO: 605951 - DNA, 75 bp, Homo sapiens
ggtctggttctcaggccttactgggctcctcaaggatcgcaggtatgcagacctcacagaagatcagctaccctc

SEQ ID NO: 605952 - DNA, 74 bp, Homo sapiens
ggaaatgtccaccactgtttctcatcatcaccaaacgccttgaaaagatcttttgaggtcgaggaggtcgagac

SEQ ID NO: 605953 - DNA, 100 bp, Homo sapiens
tcatggatcaaggaaggagagctgtcactttgggagcggttctgtgccaacatcataaagggacgtgtcatcagtggaggtgctcatgaactaccaccag

SEQ ID NO: 605954 - DNA, 99 bp, Homo sapiens
taccacgcagaagaggtgcagtgtgatggcaggagcttccaccgctgctgctttctctgcagtgtggtgcttatttccctggcactatgtgcagatgcc

SEQ ID NO: 605955 - DNA, 83 bp, Homo sapiens
cgcgctgacaggggggcctggccgcgcagccgggggggccctcagcctcttggccttgaacgggctgttcatcttgattcaca

SEQ ID NO: 605956 - DNA, 104 bp, Homo sapiens
gggggcagctggacctagctcagcggaccctgtaccaggaggtgatgctggaaaactgtgggctcctggtgtctctggatagtgtcttgcaatgtcgcccaggc

SEQ ID NO: 605957 - DNA, 113 bp, Homo sapiens
ggaggatagcagcagaagagaagaagaagcaggatgaactgaaacggattgccagagaattggcagaagaaaccagcctggacaccaagtctgtgtcagaaggccacctcaag

SEQ ID NO: 605958 - DNA, 90 bp, Homo sapiens
gcttcgagcttgtgccaaataccacatggaaatgaattctaagactctttttgatcagaacaatgctgcaaaaaaagaagagtcagaaac

SEQ ID NO: 605959 - DNA, 88 bp, Homo sapiens
gaagaaaagaaagatgcagaggaagaggaaagcgaactggtttcagatcgggtggagcggcggcttcaggaactggagagagagatgc

SEQ ID NO: 605960 - DNA, 100 bp, Homo sapiens
tgctcgctgctcttcgccattcttctcgccttcctcctcgccatcgcctacttgatcgttaaaggctatgactttgcagccgtcctggagtggttcgcgg

SEQ ID NO: 605961 - DNA, 100 bp, Homo sapiens
gaccgagcctgggaggccggccggtgccagcacctttcggcttctgagacggcggcagcagcggcattcaggttcaggaacaagtgcatcccactctctc

SEQ ID NO: 605962 - DNA, 100 bp, Homo sapiens
tctttggaaaaagaggacaaagaaaacttcattataaagaatttcgaaggttataaacaacttgtgaaatgagtgatttggaagatgatgagacacccca

SEQ ID NO: 605963 - DNA, 90 bp, Homo sapiens
gccgcaactgcgagggctggaggttccgctttgattataccaatgagagggccctgcggcgcactctgcaggaggacctggtgaaggacg

SEQ ID NO: 605964 - DNA, 82 bp, Homo sapiens
gggcgcggattcgccgaggcaccgaggcactcagaggagccaggcgggcaccacggcaggggctgagctaccctcatggaag

SEQ ID NO: 605965 - DNA, 100 bp, Homo sapiens
taatcgtagaggacataatgatggtgaagattctttgactcttcatccaattctgtgacaacatatgaaacctgccagacctacgaacgccccatcgcct

SEQ ID NO: 605966 - DNA, 121 bp, Homo sapiens
agcccttccttataggcgtcagcgggggaacagctagcggcaaggtttgctgtaatggcacaagagtatttgtgcagaaagaaattcttgataaatttacagaggaagtggtgaaacagac

SEQ ID NO: 605967 - DNA, 83 bp, Homo sapiens
ctgaagtcggtgtctgctgcgttcacggcaggattcggttagggaagtgcggctccttcgaagacaaacaaaaacatctttgg

SEQ ID NO: 605968 - DNA, 100 bp, Homo sapiens
ttcaaagtactcaagatgaatttgagtaggagagaagtttgctgaggaatgccttcaagcacaaagtgatgaatgactgccttcaagtctcaagaaaaca

SEQ ID NO: 605969 - DNA, 74 bp, Homo sapiens
ccggactccatcgactcccccggctcttagactaatgggacaccaggtccaataccacctccaagccgagtcac

SEQ ID NO: 605970 - DNA, 100 bp, Homo sapiens
catgattccagctcccaagagagtgtgtctcatccaggagccaaaagaatctccaatgaacactcacccaaactccagatccggagtcatagttacctga

SEQ ID NO: 605971 - DNA, 75 bp, Homo sapiens
cagcttcccagcctaccactggaccctctgctgcctctccagcacgagtacacgagacaggattgagaaaggaga

SEQ ID NO: 605972 - DNA, 83 bp, Homo sapiens
aaagactgggcttgtccttgctggtgcatgcgtcgtcggcctctgggcagcagcctcccgcgacgatgcccctcaacgttagc

SEQ ID NO: 605973 - DNA, 50 bp, Homo sapiens
ctggtgatattgtagaaattgctgggtggaagaccaacacacacctcccc

SEQ ID NO: 605974 - DNA, 95 bp, Homo sapiens
ggtgagtaggttggtccgaagtttgaaccggacagaagcgctggtcggcgtctggcgaatataaaaaggcttctgcagaaccccaaagtgacaga

SEQ ID NO: 605975 - DNA, 123 bp, Homo sapiens
gaagattattgaagaagcacctgctactattgctactccagcagtatttgaacacatggaacaggtctcgtctacagaggactggtctttcaatagcaagttttcacttcatcgacaacatca

SEQ ID NO: 605976 - DNA, 75 bp, Homo sapiens
ttgacgttgacatttatgttaacagcattggtcctgtgtcatcaataaacatggaggaagattatccaggagcta

SEQ ID NO: 605977 - DNA, 75 bp, Homo sapiens
atgctaccctgctttttctggtgtcctgaacctggaagttgtgctttttaagacgcatcttctctccagactgcc

SEQ ID NO: 605978 - DNA, 50 bp, Homo sapiens
cctcgcgcgtgaggatctatctcagccctggactttgtctcacaagatga

SEQ ID NO: 605979 - DNA, 50 bp, Homo sapiens
ggagaacctggcacttatgtcctccctggttcacttcttcaactgagatg

SEQ ID NO: 605980 - DNA, 100 bp, Homo sapiens
ccttacagtgtctgacagaccactgtggattcagactgggagcattgaagttaacagtgaaacgggcaggaagcagttcaggtacttttgaagcattctg

SEQ ID NO: 605981 - DNA, 87 bp, Homo sapiens
aggccagccgatgaggacatgtgggatgagacggaattggggctgtacaaggaacctgaagggccgagaagtcctgctgtgtttggt

SEQ ID NO: 605982 - DNA, 95 bp, Homo sapiens
gagttggtcggtcccggggtcacccgctacgggaagcaggcctcgccacagagagagtctacaaggagattgaacaggtggttggcccacatcgc

SEQ ID NO: 605983 - DNA, 90 bp, Homo sapiens
ggtggtggcggcagtcggatagacaataccacaacaacacattttgcagagattgggaaaatgaggtacgttagtgttcgcgattttaaa

SEQ ID NO: 605984 - DNA, 90 bp, Homo sapiens
tgtcgctcttgtgccctagcaccccgagaaccgtcagtttgagccagatggatgagttccacccgttcatcgaggccctgctgcctcacg

SEQ ID NO: 605985 - DNA, 75 bp, Homo sapiens
gacgaagatcttatctgccctatttgcagtggagtcttggaggagccagtacagatgttacaagaacgattccgg

SEQ ID NO: 605986 - DNA, 50 bp, Homo sapiens
ccccgccagctccagagccacgtacggacagcccagaaacttgcaggacc

SEQ ID NO: 605987 - DNA, 75 bp, Homo sapiens
tttgctgcagtggtggaacagattcacaagtttgcccagttggctggggaacagaccagggaattggtggatttg

SEQ ID NO: 605988 - DNA, 100 bp, Homo sapiens
acaacctactacgcacagtgctaccgccacatgctggacttgcagaagcagctgggcagtgggcaccgtgactgtgatcagccccctggagcttatgcgg

SEQ ID NO: 605989 - DNA, 74 bp, Homo sapiens
cggaccccagtaccaggcggtggtgcccgacttcgaccccgtgaaaatgcctcgtgtaaaagcagctcaagctg

SEQ ID NO: 605990 - DNA, 75 bp, Homo sapiens
gaagaggcccaccctggagtaaccctcactggagaatccagaggcgggagcatccaatcaacttcgagagcgtag

SEQ ID NO: 605991 - DNA, 100 bp, Homo sapiens
gcaaggcttgctgaggctcacagaagatagccccaggtcagaaatgtgaattccaggatgcctatgttctgttgagtgaaaagaaaatttctagtatcca

SEQ ID NO: 605992 - DNA, 74 bp, Homo sapiens
cctccccagccatgctgaactgtggtttgtgatgaaaatggttccaagggctatggatttgtacactttgagac

SEQ ID NO: 605993 - DNA, 129 bp, Homo sapiens
tatgaacacagtcacttggaagggacagaaaatcacagcatggcaggagatagtggaatagattctccacgagtgacagaaggaagtcaaggcaccattatgactcggatgagaaatcagaaacaagag

SEQ ID NO: 605994 - DNA, 100 bp, Homo sapiens
ggctcagaagataaacgaggggctggaacacctcgccaaagcagagaaatagtacacggctgccccacaccccctgctatctcttgatccccacttcagc

SEQ ID NO: 605995 - DNA, 128 bp, Homo sapiens
gtctcgtctgcagagggagcactatgtctgcggaagtccccgaggcagcctccgcggaggagcagaagtttgccagggtttggatacctgatccagaggaagtctggaagtcagcagagctgctcaaa

SEQ ID NO: 605996 - DNA, 100 bp, Homo sapiens
cgaggagggcccatactacagcgcactgtcagatactggcatcgatcactaaaccccagaaaattggtagaagtgaaattttctcacttgagtagaaata

SEQ ID NO: 605997 - DNA, 101 bp, Homo sapiens
cagctggcctctgtctctagcatgaaatccctggagagtgattttgcagcccctcttccagaacacagatccttggtgtttggctagcaatgagatttcgg

SEQ ID NO: 605998 - DNA, 99 bp, Homo sapiens
ctttgatcaccagattcatgtatgacagttttgacaacacctatcagggagagacaaaggcagcgctgccctcgggggagtattggccctggcggaacg

SEQ ID NO: 605999 - DNA, 82 bp, Homo sapiens
atccgccgcccgtccacacccgccgccaggaaatctggcattttttaaagtttgcgccccacaaagaggaaatattccaaag

SEQ ID NO: 606000 - DNA, 83 bp, Homo sapiens
ctcagcccgtcgcacccgccactgatcacctgcacgggcagtgatggagtggacatccgccataacaaggaccgaaaggttcg

SEQ ID NO: 606001 - DNA, 98 bp, Homo sapiens
ggggaaaatgcccaggaggaagcaggagcagcccaagcgccttccctcacgctgcctgctgtttcccggggagatcatgaaacgaggtcgccttccca

SEQ ID NO: 606002 - DNA, 50 bp, Homo sapiens
caatctcccataggcactcagtcaaggttggtggttctgtcagatgaaag

SEQ ID NO: 606003 - DNA, 149 bp, Homo sapiens
aacaattggaatacatgcgaaatatgataaagcatgccgaaatggagaggacatctgtcttagagaaacaagatcaggagcgtctgggcaagcagctcaagttacgtgcagaaagggaagaaaaggagaagctgaaagaggaggccaag

SEQ ID NO: 606004 - DNA, 50 bp, Homo sapiens
aaaacatcaaagaggtctagcaaaggactgaagatggaggaggaaggcac

SEQ ID NO: 606005 - DNA, 101 bp, Homo sapiens
atttcaatccctccgtatgcacatgtgggtagaggacgtgttagacaagttcatgagatacactgcctctaggactgggacagatagccactgagtacctg

SEQ ID NO: 606006 - DNA, 51 bp, Homo sapiens
cgtacccgccgccgccgttggctggagctcaaagttatgaagtttcaggat

SEQ ID NO: 606007 - DNA, 96 bp, Homo sapiens
gtggaatgctggcacaaaggacaagaaagaccacagcaagattctttcattcgtctcctcctagcctgggggaccaggctcgaactgaccctggac

SEQ ID NO: 606008 - DNA, 100 bp, Homo sapiens
agaggagcgccagatggtggaggaatacacttatttatgaacgcccgggggctggagaaggccaggcagcagctgcaggaggagctccggcaggtcagcg

SEQ ID NO: 606009 - DNA, 82 bp, Homo sapiens
gcgctactctctctttctggcctggaggctatccagcgagggccctcctggacccgggagcggaccctggtggcggtgaagc

SEQ ID NO: 606010 - DNA, 75 bp, Homo sapiens
acagcagccggcccttgttaactacaacagaccatctggcaagataacccctgtgacagaaggctactgttgctg

SEQ ID NO: 606011 - DNA, 75 bp, Homo sapiens
gatgattggacggtgcaaccgagctgggaagcctgtcatctgtgctactcaggctaaatttattgtgaagaaatc

SEQ ID NO: 606012 - DNA, 76 bp, Homo sapiens
aggatatgatcaatgaagtggatgctgatgggaagaaggagaaagggccaacccctgaagaagcaatacagaaact

SEQ ID NO: 606013 - DNA, 49 bp, Homo sapiens
caggcatcatggactgtgcgcccaaggtccaagacaagctgctgctatc

SEQ ID NO: 606014 - DNA, 78 bp, Homo sapiens
gacaatgactttgagccctaccttactggacagtcaaatcagctgagatctgtatctgtggacctgaatgttgatccc

SEQ ID NO: 606015 - DNA, 82 bp, Homo sapiens
tggaaccctggggactacgacgtccctcaaaccttgcttctaggagataaaaaggagaagaaactgaggcctggaatttgat

SEQ ID NO: 606016 - DNA, 75 bp, Homo sapiens
gccagggtccctgaagagggaagacacgcggaaacagccgcagcaatggcgctgagttcctctgctggagttcat

SEQ ID NO: 606017 - DNA, 75 bp, Homo sapiens
ggagcgctgaggcgggcgttttcttggatgaattgcttgctttggagaaccttctgataacttaagagagattct

SEQ ID NO: 606018 - DNA, 76 bp, Homo sapiens
ctgataggatttggctacccagcctacatctcgtggatttgccgctgcagtcaccacccctctagacgtggcaaag

SEQ ID NO: 606019 - DNA, 101 bp, Homo sapiens
gcatggtcgtttgccggtttttagagatgaggacttaccactgggcaagcttcaagtagttggcaaaaaaggagaaagccactaaggtacaaaagacactg

SEQ ID NO: 606020 - DNA, 98 bp, Homo sapiens
gattcttacggaagacgtagccgcacagacgatctcaagtggagtcgcttacctttggcctttgcgatgccctcctagctagccgtcacgggatggag

SEQ ID NO: 606021 - DNA, 100 bp, Homo sapiens
catgtctgtggctttcgcggccccgaggcagcgaggcaagggggagatcactcccgctgcgattcagaaggcgatcagtgggtgaccgcggctgcgaggg

SEQ ID NO: 606022 - DNA, 51 bp, Homo sapiens
gccgtcccactgctggagttcctgtccatcaccaggagactaaagtccatc

SEQ ID NO: 606023 - DNA, 75 bp, Homo sapiens
gagcaaggcgcgcggcgactccgataaatttgcgcctcattttggtaagcggaaaaacaaaagagttcctgtttt

SEQ ID NO: 606024 - DNA, 95 bp, Homo sapiens
tcattggacccaatggctctggtcacaaggcacttaaagcattgttgaggtcattggtaggtcttcaggaagagttgcttttccagtacccagac

SEQ ID NO: 606025 - DNA, 97 bp, Homo sapiens
accgcctcctcctcctcagtaacgcgggtccttgaatgggcaagagggcacatgaagtacggcgtcctccacattcacggcctctacacggacccct

SEQ ID NO: 606026 - DNA, 50 bp, Homo sapiens
gttggctgcctctgctggagaagtggacccagatgatgtggtaccagttg

SEQ ID NO: 606027 - DNA, 98 bp, Homo sapiens
gggacgggcagctagcgcgaccctgagccggcgcccgtggtccggccatggacgacctcgggatttgatgtagaaagagctgcagaaggcatctcatc

SEQ ID NO: 606028 - DNA, 82 bp, Homo sapiens
agaaaagctgctcatcagtgcctggtataatatgggagtgcatccgccccaacccttttccccctcgtctcctgtgagaatt

SEQ ID NO: 606029 - DNA, 90 bp, Homo sapiens
agtgtgccatattccaatggctgagccgttttgccccaaaacgagagaggcagaaacggaattacagagagctgcaatggatgctagccg

SEQ ID NO: 606030 - DNA, 83 bp, Homo sapiens
cgaaggaggaagggaaccaacccactttctcggcgccgcggctcttttctaaaagtaaaggcctaaagaatgtatttgacgaa

SEQ ID NO: 606031 - DNA, 100 bp, Homo sapiens
tctccatggagcctgcccagagcggtcccttctcgcaggattcgccccaagtcctgtgcggtgtgatgaatgcagactctgctaccattttggctgtttg

SEQ ID NO: 606032 - DNA, 95 bp, Homo sapiens
acccgaagaaggacgtgctgacccgcctgaagcacctgcgggcgctgctggacggtgtgaagggagacctgctgattgacatcggctctggcccc

SEQ ID NO: 606033 - DNA, 98 bp, Homo sapiens
ggagatactacggctgtgtccgtacagaccacagaccagagcttgcaggctggaggagttctacacggagagatttggcgacgacgtcgttgagatta

SEQ ID NO: 606034 - DNA, 80 bp, Homo sapiens
cccaggagctacagtatgccacccccgtgttccaggaggtggcaccaagagagcaagatggagcctcactctgttgccca

SEQ ID NO: 606035 - DNA, 100 bp, Homo sapiens
aatgacctgtcgcctgccagctctgcccagcttcaaaaaatgtttatctgctggagttccacccttccctcagcctggcagcacttatccccaaagccct

SEQ ID NO: 606036 - DNA, 50 bp, Homo sapiens
tatggagtggcgtttactaccagtgccaatgggtcatgtttggttagaag

SEQ ID NO: 606037 - DNA, 76 bp, Homo sapiens
agaatacgaggaggaagaggtggccataccgttgaccgctcctccaactaaccactggaatagtcaaatgatttca

SEQ ID NO: 606038 - DNA, 100 bp, Homo sapiens
tccagaacttgcagcaacaataggaactgtttgtggagaccattgcaaaagatgcctactgttgcgctcagcagggaaaaaggaaaacccttcagaggag

SEQ ID NO: 606039 - DNA, 82 bp, Homo sapiens
gtgcagaaggaggtcctgccgtccatgcggaagatcgtcgccacctggatgctggagactccattcagaagagagaagaggg

SEQ ID NO: 606040 - DNA, 101 bp, Homo sapiens
ctttgcccctattatggagaaaggtgttccctagccaccagctaagtaccttcttccagaggtgacggtgcttgactatggaaagaaatgtgtggtcattg

SEQ ID NO: 606041 - DNA, 50 bp, Homo sapiens
ggaacaaagcccacagcaccgggttccgagtctgaggaagacataacctt

SEQ ID NO: 606042 - DNA, 100 bp, Homo sapiens
ccagagcagaatgaaaagctaaagacaccgagtactcctgtggcttgcagcactcctggtttttccacttcgttcggaccttctcataactatgtccacc

SEQ ID NO: 606043 - DNA, 87 bp, Homo sapiens
ctgcttgagagcttttcttaattgggaaaaggtgttctactttctaaaggaccaggatttatctattttatcaacttcttatcagtt

SEQ ID NO: 606044 - DNA, 100 bp, Homo sapiens
cggatcgccgcgctcagcgacaaacaattacagaatgtctgaaggggacagtgtgggagaatccgtccatgggaaaccttcggtggtgtacagatttttc

SEQ ID NO: 606045 - DNA, 98 bp, Homo sapiens
cgaagagggggtcgaggagagccggagtcggggacccaggagtttcctgtgtccagcgctgccggagccgcctgagactgcttttggcttctggatgc

SEQ ID NO: 606046 - DNA, 100 bp, Homo sapiens
aaatttgctgttgaagttcatgatccacgaagaggcaaatttctggagatgtgcaatgatctcttagctagagtggagccaccacttcgtagtgttttgg

SEQ ID NO: 606047 - DNA, 100 bp, Homo sapiens
tgtccacccaagatggagttcctcctggggaacccgttcagcacaccagtggggcagtgcctcgccagcgtcccatgctcggtggccccagaaaagtcag

SEQ ID NO: 606048 - DNA, 75 bp, Homo sapiens
aggaaaatgagcagtctctgcccccgccggccggcctcaacatctttcccagggaactccgatgaagtgttccaa

SEQ ID NO: 606049 - DNA, 100 bp, Homo sapiens
ggaacatttacggatgagaagtcaaaagcttcccaccacatttacccatattcttcctcacaagacgatggcatttatgtttgaatcatctttaagtctg

SEQ ID NO: 606050 - DNA, 95 bp, Homo sapiens
gacggattcgattcaacggggttccggaccgcgctgcgctatggagcaggtggacccccaaaagtacaagggcatatttaacggattctcagtta

SEQ ID NO: 606051 - DNA, 82 bp, Homo sapiens
cagtgccacccaatcttcgaaaactggatccagaactccattgagccaggtgagaatttcaaggattatcgacttcatattg

SEQ ID NO: 606052 - DNA, 100 bp, Homo sapiens
tttctaccaagtcttgcagagtttcaggaggcaggtttcctatcctgggagcaggagagtgtgcctatttgaatgacaaaggtgccagtagtgccaggca

SEQ ID NO: 606053 - DNA, 75 bp, Homo sapiens
gctccctctgctcttcctcccttcgctcgcaccatgctgagcgggctttggacaccatgaactttgatgtgatta

SEQ ID NO: 606054 - DNA, 100 bp, Homo sapiens
caggaaaatcatattatagatggagtaaaggctaccaagcagtttctcgaagagattaacaagtggacagttcagtacaatgtttccccgctgtcttgga

SEQ ID NO: 606055 - DNA, 75 bp, Homo sapiens
attgtccttttggagcagggcagtgactgtgaagtgctgaccacactcaccccagacactggccgtatcctgtcc

SEQ ID NO: 606056 - DNA, 100 bp, Homo sapiens
ctatttcttgtggatattatggctaataacacaacaagtttagggagtccatggccagaaaacttttgggaaagagctatctggtcacaaaaatattgtg

SEQ ID NO: 606057 - DNA, 75 bp, Homo sapiens
gccgagtcctagcgcctggcctgcgcgccgctgcccgcgccacagttcaaatctgaacatcaatgatgtactagg

SEQ ID NO: 606058 - DNA, 74 bp, Homo sapiens
tcggcaacccgaagccacaggatggaggagggggatcccagcaaagtgcagagcagagcgggcggaggaccccg

SEQ ID NO: 606059 - DNA, 100 bp, Homo sapiens
tgagaacaccagccttgcacctgaagaccccacctttcctgcagcagtgttgtactgctacttctataaacggacagccgtaagactaggcgatcctcac

SEQ ID NO: 606060 - DNA, 82 bp, Homo sapiens
gcgccggcctcctcagtgcgaagaagctgcagccgcacctggccaaggtttgatgaaggccggaacaactttgaaggggagg

SEQ ID NO: 606061 - DNA, 83 bp, Homo sapiens
gcacagaggggcagccggagagcctgggaaaggcataagatgcacatttttctgctctggagccgggaatgaaatattcttga

SEQ ID NO: 606062 - DNA, 74 bp, Homo sapiens
gattgagccgcgcacgctacagtacaaggacactgcccatctctaagataagaacctggaaaggggactctgtt

SEQ ID NO: 606063 - DNA, 100 bp, Homo sapiens
aggggggcggggggaaagagccccagcaccgcccctcctggaagaaggaagaggttaaaaagatcaagtggcatgagcagccttttggggaaaattggtg

SEQ ID NO: 606064 - DNA, 100 bp, Homo sapiens
gttgtcctgtgctggggctgacagcgggcgatgatgagatctcatttgaccctgatgacatcatcaccaacatcgagatgattgacgacggctggtggcg

SEQ ID NO: 606065 - DNA, 82 bp, Homo sapiens
cggctgaggaaagcaggaggaggtggcggcggcgggaagatatagcctgggctggaagctcttctacgtcacaggctgcctg

SEQ ID NO: 606066 - DNA, 76 bp, Homo sapiens
caagtcgtgttctgatcactactgacttgttggtacactggagaacctagaagaactgtatttgaatgacaacccc

SEQ ID NO: 606067 - DNA, 90 bp, Homo sapiens
cctcatgctggcggctctgcgtacgctggttggcatttgctctgagcatcagtcacgggagccccaccctggtgaagaacatgatctctg

SEQ ID NO: 606068 - DNA, 101 bp, Homo sapiens
tttccgagttggctgcagatttgtggtgcgttctgagccgtctgtcctgcgccaagcactattcctgatcagagaactccagttgcttcaacacacagtat

SEQ ID NO: 606069 - DNA, 90 bp, Homo sapiens
gtcgtcttccacttgcacgaaagctttcctaggccaaaaagagcccaaagcagtgtccacaccagcaccagctacaactcagcagtcagc

SEQ ID NO: 606070 - DNA, 90 bp, Homo sapiens
gtctttggcgaggacggggcgccggcgccgccgcccccgggctcgcggcctgcaggcgagagcccagagagctgaacctgcatcccggac

SEQ ID NO: 606071 - DNA, 50 bp, Homo sapiens
agctggcagagaaaaaggccaccgatatgaagactggcccatttgcagag

SEQ ID NO: 606072 - DNA, 80 bp, Homo sapiens
aattcaacagttcaccaccattaccgctgcatccagatctcattatgcatcagaaaaatgaaaaaacagaggaaaattct

SEQ ID NO: 606073 - DNA, 83 bp, Homo sapiens
cggccagttttgaaatcgacacacaaagaatagagttgagcctgtgggacacttcggattgtcactgctgttccaagggcaca

SEQ ID NO: 606074 - DNA, 90 bp, Homo sapiens
tactgcggtcaacgtgaccagtgcatcccatgctgtggctccccttcaggaaataaagcaggccgcctgatcttcgacaacctaaagaag

SEQ ID NO: 606075 - DNA, 101 bp, Homo sapiens
gcggcatggcgcgcgcctgcctccaggccgtcaagtacctcatgttcgccttcaacctgctcttctgggccacccagaggagaaggccaccccgcctggag

SEQ ID NO: 606076 - DNA, 100 bp, Homo sapiens
gaggacctggagcccacctgctttgagagaagtgatgacattgggggattatggaagtttactgcagtcgatgatgtgaagaaaggttacatcaaagcag

SEQ ID NO: 606077 - DNA, 75 bp, Homo sapiens
cgctttgatttacagcagctgcaggcctccggtgtggctgtctctgatggtgtcatcaaggtgttcaacgacatg

SEQ ID NO: 606078 - DNA, 95 bp, Homo sapiens
tttgagcaggagtccgggccctcgtgtcaccgctctgaagtcaaggaggtgaccctggcaaagatgagagtgcacatttcgtcctgcctgaaggt

SEQ ID NO: 606079 - DNA, 97 bp, Homo sapiens
cgtggcgcctagagtagcgacccggggggagcgcggggcgacgctggctgcagggacccggtgacagcgtgagaggaattccagagacgctgtaaca

SEQ ID NO: 606080 - DNA, 75 bp, Homo sapiens
gtctatcccggccctgtcattactccactgggttctggtttgtaaccccagatcagaagtactccatggacaaca

SEQ ID NO: 606081 - DNA, 110 bp, Homo sapiens
ctgaacctctctttcgcttttgtggaactactctacggcatctggagcaactgtctgaacaggaattaagaataactcaaagtgaatttgatcgtcaagcagagattacc

SEQ ID NO: 606082 - DNA, 82 bp, Homo sapiens
acgctctctggccgctatcatcccagcagtggagttcagcccactactctgaaccaggttcgagaacttgtcttggacaatt

SEQ ID NO: 606083 - DNA, 100 bp, Homo sapiens
gtgaagtgctccgtcgcccttgcctccagagttgccatggagaaaattccagtgtcagcattcttgctccttgtggccctctcctacactctggccagag

SEQ ID NO: 606084 - DNA, 100 bp, Homo sapiens
tactggcccctgatccggttcttggtgcccctgggcatcaccaacatagccatcgacttcggggagcagcttgtacctccccaagtcatggaccatccag

SEQ ID NO: 606085 - DNA, 90 bp, Homo sapiens
aatcggggagcgtccggagctagctggatcctctaggcagctgtgcaaattattccagcatcagtgcaatctgctacacctactaccatt

SEQ ID NO: 606086 - DNA, 100 bp, Homo sapiens
gggaagtggcgtggccaagattcgcattgaagatgacgggagctacttccaaattaaccaaaccaagctgtacaccctgcctgcaagccacgccacgcgt

SEQ ID NO: 606087 - DNA, 97 bp, Homo sapiens
gaacagcagctgatttcaggatctttagataacattgttaagctgtgggatacaagaagattggccctgtgtactcctctgtctcgtctgaagcaag

SEQ ID NO: 606088 - DNA, 51 bp, Homo sapiens
tgaagaccccgacagtgaacagactaagctgagtcagtgctgattctctca

SEQ ID NO: 606089 - DNA, 100 bp, Homo sapiens
cggacctgagtcttcaatgaaagcattccaaaatatgcccggtgctatccgcccagctgctcctagaccaccatttagtactatgagaccagcttcttca

SEQ ID NO: 606090 - DNA, 100 bp, Homo sapiens
gtcttcttcaaaggagaggagcaaaggtgctggagaatctggtaaaagcaccattgtgaagcagatgaggatcctgcatgttaatgggtttaatggagag

SEQ ID NO: 606091 - DNA, 83 bp, Homo sapiens
cttggagttcgcctcagacgcggtggagccgccggagtctgagaagaaagtcattgggtggtacagattccggcgcaatacgc

SEQ ID NO: 606092 - DNA, 82 bp, Homo sapiens
ctgaccaaaaagcagctggacagcacaattggaatccaccctgtctgtgcagagttacatggacacagaacagtatgaagaa

SEQ ID NO: 606093 - DNA, 90 bp, Homo sapiens
gctgaatccgcccgggctacgctcctccatcacgtggtgcaaatagtctacaaaccagttgacctgagcaaggtgacctccaagtgtggc

SEQ ID NO: 606094 - DNA, 75 bp, Homo sapiens
agggaaagaaaacaatttctcctgctctgcagcttctgttcagataagctccgaagaagtatgcctaacctagcc

SEQ ID NO: 606095 - DNA, 82 bp, Homo sapiens
gcggattcgccgaggcaccgaggcactcagaggaggtgtccccaggtgtcattgccaacccctttgcggcaggcatcggcca

SEQ ID NO: 606096 - DNA, 75 bp, Homo sapiens
gggaaataaatcggctggccctactgcaatctactgcactcgaggctaaagtcatcattggactggcctttgact

SEQ ID NO: 606097 - DNA, 98 bp, Homo sapiens
ggtttcatagagactgtttacagagtgaccgtctccttatcaagggaggcagaatcgtcaatgatgatcagtccttttatgctgatatttacatggaa

SEQ ID NO: 606098 - DNA, 100 bp, Homo sapiens
ttctccgtaaccagaaacaggttcattcattggttccagaatatcttaaccatgtaagtaaacgcttagaggaagagggagacagagtaatcacttactt

SEQ ID NO: 606099 - DNA, 100 bp, Homo sapiens
cgcgccttcggaagcccgttcggcctggaggagccgcagtgggtcccggacaaggaggttcgtgctggccgtgggcagcgccgtctttgatgccatgttc

SEQ ID NO: 606100 - DNA, 144 bp, Homo sapiens
cgtcaacaaaaacaatgtgagatgtctccagcatttttacggacccaatcatgagcactgctttaataggcaccagtggcagttcgcagcctccaggacttggctcgcatcgccatccggggcaccattaaaaagattattcat

SEQ ID NO: 606101 - DNA, 96 bp, Homo sapiens
cacgggatccagagcgccgcgcacttcgtcatgttcttcgcgccctgacctgcctagagctggaacgttacctccagagcgagccctgctatgttt

SEQ ID NO: 606102 - DNA, 100 bp, Homo sapiens
ttcagtatctaatgcccaggtcaaagcagatggacacaaagtctatggagccattctgctggtgggccagccggccgtacacttgaagcgtgacttcttc

SEQ ID NO: 606103 - DNA, 75 bp, Homo sapiens
tgtgaggcggctctgcccaagttttctttctgtggaagaaggaaaggagcgcacaactacgggattggcgccgcc

SEQ ID NO: 606104 - DNA, 75 bp, Homo sapiens
agccggagccggtgccgcagctgcgatggccgtggccgtggggagaccgtctgtttccacgctttgagaaggact

SEQ ID NO: 606105 - DNA, 90 bp, Homo sapiens
aagaacggcagtttgaatcggtgctgaacaggcatgtactggcattgaaaacattgacgaagctattacattgcttgaacaaaataattg

SEQ ID NO: 606106 - DNA, 83 bp, Homo sapiens
acctgagacgtggcgctccctctctgccggcctcggcttcaggtgctcttacagcctgttccaagtgtggcttaatccgtctc

SEQ ID NO: 606107 - DNA, 75 bp, Homo sapiens
gccagaaggaagatggcggatctggaggagcagttgtctgatgaagagaagaaaaggtggacaagtcctattttc

SEQ ID NO: 606108 - DNA, 90 bp, Homo sapiens
cagtccccagacatacgatgggagagttgcatttgaaagatgatgacagtggggaccatgatcagaatgaagaaaacagcacacagaaag

SEQ ID NO: 606109 - DNA, 100 bp, Homo sapiens
cggcagcgaactgggtggcgaacggggcgagcctggaggattgtcactccaacctcttttcgctgttacatgggaataggactctcggctcaaggcgtca

SEQ ID NO: 606110 - DNA, 87 bp, Homo sapiens
gacaacctcagaggacaacgaagtgttcggtcgcctgcgaggccgctggccaggcctgagcctctgccaccatggccattgtgcaga

SEQ ID NO: 606111 - DNA, 101 bp, Homo sapiens
aaggaactgccgtttgcggactgcagcgattgattagttggtagctggcagtgttgtgatggcttttgaagaagtatgcccggacagaatagatctgattc

SEQ ID NO: 606112 - DNA, 100 bp, Homo sapiens
tcatggggggcctgtcccccaccctctactggcttggcaactttctctgggacatggctgtagaagccgcccagctggccgaggacctgaaggtgcagct

SEQ ID NO: 606113 - DNA, 75 bp, Homo sapiens
tgtttgtggatcgctgtgatcgtcacttggtgatcccattaagatactaatgccatcactgtctcctacaatgga

SEQ ID NO: 606114 - DNA, 90 bp, Homo sapiens
atgcccgacccctgggctgagttccacctggaagatattgccaccgaacgtgctactcgacacaggtgaaagaactcttttcttctttgg

SEQ ID NO: 606115 - DNA, 100 bp, Homo sapiens
gcgggtggcggtggtgtgctcgagcaaccagaaccggagcatggaggcgcacaacatcctcagaagtgtatgctgacttgtaaagtgaagaagccagtgg

SEQ ID NO: 606116 - DNA, 100 bp, Homo sapiens
aggatgggttttaactacagacccagtctctgccaaggcttagctgaaaacaaaagtactttaggacctgaggaagttcgtaaatctgccctgacactgg

SEQ ID NO: 606117 - DNA, 100 bp, Homo sapiens
atcgtgctattcctggtctacatcctgcgggtgcctttgaaaatcaacgacaacttgagcacaggctctccaggcagcaagacaacttcttttacagcag

SEQ ID NO: 606118 - DNA, 83 bp, Homo sapiens
tcaatatgcgtggtggaaatttcagaggaggagcaattctgtggtgttcttggtcacacatttatggagtttctgaagggcag

SEQ ID NO: 606119 - DNA, 122 bp, Homo sapiens
ctgggctggggctccctgttgatcattctgaagaacgagggcttctattccagcacgtgcccaggtagcacagagctgacaggcagcacgaatctgatcacacactacaacttggaacaagc

SEQ ID NO: 606120 - DNA, 100 bp, Homo sapiens
gccaggagctgctcaccttcattgatgctgaactcaaggccccagacttcacagagaatgcagttgtcttgacttcaggtctgtctgttctgttggcaag

SEQ ID NO: 606121 - DNA, 75 bp, Homo sapiens
gtctggaaggaggccttcccggtttaggatgggaagagcccacaggcggttttgtgagctgcttccccaggagca

SEQ ID NO: 606122 - DNA, 98 bp, Homo sapiens
cgtgacctgaaggctgtcaagtatgtggagtgttctgcacttacacagctcaccatctgctacctggatatgctgatgaccagtgaggagcgccggaa

SEQ ID NO: 606123 - DNA, 107 bp, Homo sapiens
cagcgagatgaatactgctgaggactggggcctcattttggatatctgtgataaagttggtcagtctcgcactgggccagaaatgtacacacaggagagctggctgc

SEQ ID NO: 606124 - DNA, 74 bp, Homo sapiens
gccggaatatttcaagacaccgaaagcccaagaagatgaaaggattgttcttgttgacaacaaatgtaagtgtg

SEQ ID NO: 606125 - DNA, 75 bp, Homo sapiens
gtggacaagatcatgggcaaaggacagatccagaacaccttccaccatgaccacctcagcaagttcccacttaaa

SEQ ID NO: 606126 - DNA, 90 bp, Homo sapiens
gtctgcagggcctgggccgccgctgctacctgcagcgccgtgtggcacgacacaaaaatcaggaaaccactgttgctgcgattgccccgg

SEQ ID NO: 606127 - DNA, 89 bp, Homo sapiens
ggggattctcgacctgctaacagaactggaccttttcggcatttatgtttgaatcatctttaagtctggcggtcacaaagtggggactc

SEQ ID NO: 606128 - DNA, 100 bp, Homo sapiens
atgaacggaagaaacataaattaaaagaagaattgcggcaagattacagacgttatcttactcagggaggaatgatcaattggaatcgtctttttcctcc

SEQ ID NO: 606129 - DNA, 90 bp, Homo sapiens
aaccgtggctcacaagatgaaagagcacgttcatgtgtgcccagctgcccaaccccgtcctggacagcatcagcatcatcgacacccccg

SEQ ID NO: 606130 - DNA, 100 bp, Homo sapiens
ctgcaaggtggtgttccagtggcaaacagctgtataaactcttgtaaacagcaaatccagtttgctgatgacatgcaggagttcaccaaattccccacca

SEQ ID NO: 606131 - DNA, 75 bp, Homo sapiens
gcgtcgtcggcctctgggcagcaggtatgccttacactttcttgtacaaagtggaatttcctactgtatcatgat

SEQ ID NO: 606132 - DNA, 100 bp, Homo sapiens
ccagatgtttccagagcgacacctggagatggcagaaatactgggagaggcgggagatttttgagcagcacctgaagagcctgaagctgacccagtccag

SEQ ID NO: 606133 - DNA, 96 bp, Homo sapiens
cgagaaggtggaggatgcctgccagggaactcctgcttctccctgcctctaaatggaccccaactgctcctgctcgcctgatggttcctgcgcctg

SEQ ID NO: 606134 - DNA, 50 bp, Homo sapiens
aaggaagaaattgttcagttcttctcagaccttatcagaagcttttagag

SEQ ID NO: 606135 - DNA, 100 bp, Homo sapiens
caccagttaactatggtagcccacccagcattgaatgatatggaacctagcaaagctgttccactgaatgcatctaagcaagatggacctatgccaaaac

SEQ ID NO: 606136 - DNA, 97 bp, Homo sapiens
ccgggagcgcgatgtggagcgcttctttaagggctacgggaagatcctggaggtggatctgaagaacgggggatcccaacaagccctcaggattcag

SEQ ID NO: 606137 - DNA, 73 bp, Homo sapiens
cgggggctgtggctccgggactgcgttttcggctttgtgagaaaccttaccatcaaacacgatggccagcaac

SEQ ID NO: 606138 - DNA, 80 bp, Homo sapiens
tagagaatgagatagccgtcctgagaaagtcactggaaggactgagcgcattcaggagcctggaggaactcatcttggac

SEQ ID NO: 606139 - DNA, 74 bp, Homo sapiens
ccaagctgcagaaaagcatttcatctttttggagacatcgctattgcggttccgaggcagtgggaagagatgcg

SEQ ID NO: 606140 - DNA, 83 bp, Homo sapiens
cccttctgcccggcgcttcggcccgggccgctcaggtgcagctagtatgttcaacacaccaggaatgcagagcttgttgcaac

SEQ ID NO: 606141 - DNA, 82 bp, Homo sapiens
gaaaatttcaggctgaaggtttagcgggtgccggaactgtggctgcaccatctgtcttcatcttcccgccatctgatgagca

SEQ ID NO: 606142 - DNA, 101 bp, Homo sapiens
cgaactgggtggcgaacggggcgagcctggaggattgtcactccaacctcttttcgctggtgagcaagacgtggaaggtgattgcagaggatgaggtgctg

SEQ ID NO: 606143 - DNA, 100 bp, Homo sapiens
aaactcttggcatttggctttgcctttctggacacagaagtatttgtgacagatcagtgtactgttacccggacatacctattccttcacaagttctggt

SEQ ID NO: 606144 - DNA, 83 bp, Homo sapiens
agtcttcatcaaccgggaccgtggcttcggcttcatccgcttgcttttcaggatgtccagcaaagaatcctgtgggaaaaaag

SEQ ID NO: 606145 - DNA, 88 bp, Homo sapiens
cagataaaaggggtctctgcgtctgtagttcatttgaccaaacggagataattttatggagaaaagctcctgaaaaactgaggaaaca

SEQ ID NO: 606146 - DNA, 100 bp, Homo sapiens
ctgtgggaagtctccatggtgaagtataggctgaggctacctgtgaacagtacgcagtgaatgttaacttggtcctgatgtctgaccatggagatgtgag

SEQ ID NO: 606147 - DNA, 75 bp, Homo sapiens
gtactctttcctcgtggaatttgaagattctacagataaatcagcggaatggccaaagactatgacgggtcttcc

SEQ ID NO: 606148 - DNA, 100 bp, Homo sapiens
gcgggaaggaagatccggcgcggggcacaggatccggagctggagcccccagctggacccacaaaccgtggagaccaagaactggcacacggacgtgatt

SEQ ID NO: 606149 - DNA, 90 bp, Homo sapiens
cgtacgcggtgctgcgagggcagaacctggagctcccagctcctccagcagccgacaggaggcccgtcaagatgcaggcaggcattgcca

SEQ ID NO: 606150 - DNA, 50 bp, Homo sapiens
caggtttactggagtaggtgttagtaagaacagcttggttattgacactc

SEQ ID NO: 606151 - DNA, 97 bp, Homo sapiens
ggacgcactggccaggctggagaacagcagtgagctgcaccgggccggcggcgacctgcactttcccgcagacaggcagcctgcttctgcaaagtgg

SEQ ID NO: 606152 - DNA, 98 bp, Homo sapiens
tggccggtcatcaactgatccgcggcctggggcaggaatgcgtcctgagcagcagccccgcggtgctgggattggatttatagacagctgtgtgaaac

SEQ ID NO: 606153 - DNA, 90 bp, Homo sapiens
ccctgttgcagggttttgtttatataactcaagttgtttggctaaattcttcaggttcattttccagacactgaaagagcagaatggcta

SEQ ID NO: 606154 - DNA, 121 bp, Homo sapiens
tggtgcgctgctcacggccattcactgcccatgctgagcgcctctcacacaggtggagcatgactttatcctgcaggccgagcgggaaacgttcatcgagcagatgaaggatgtcatggac

SEQ ID NO: 606155 - DNA, 74 bp, Homo sapiens
agtgtttagcagcagctttgatagttctgacggagtctggcaggatggcacatttcctagaggcagaatcctac

SEQ ID NO: 606156 - DNA, 98 bp, Homo sapiens
taagtgttgcgctggttcaaggttgggcattgggtggaggagcagaatttactacagcatgtgatttcaggaaacaaagcttagcaggagaggagagc

SEQ ID NO: 606157 - DNA, 95 bp, Homo sapiens
ggcgaagaagcggtgacccttgtggaggatatgcagagagagcttgggagactgagacaacaggtcactgggctgtggtgagagaaggcctcacg

SEQ ID NO: 606158 - DNA, 73 bp, Homo sapiens
gcccaagtccctctactcgcgaggacaggcccggcccctcgagttcctgaggacgtgctacgggggcagcttc

SEQ ID NO: 606159 - DNA, 75 bp, Homo sapiens
ctgtttggaaagacccaggagaagccgcccaaagaactgatatttggagttcttacaacatggcagacattgaca

SEQ ID NO: 606160 - DNA, 83 bp, Homo sapiens
gttgtatgtgtagaaagtgaaatcagaggagatgtaactatcggcatccttctttaaaagagaaatccacgttagctctcctt

SEQ ID NO: 606161 - DNA, 101 bp, Homo sapiens
tggaggaaatagagcacacatgcccacagcctcgactgggccaagaccagcttcaagtctccatggtaccagaaaacaacaacctcacagcacctgaacct

SEQ ID NO: 606162 - DNA, 100 bp, Homo sapiens
tatcggaaaggtctgccttacaagggacaccatagcctctcaccctaagggttctgcgttagacctgcatcttagcaatgtgaatattgcatccctagag

SEQ ID NO: 606163 - DNA, 100 bp, Homo sapiens
gatttatgccagctccaaggacgccatcaagaagaagctgacagctgtgtgagccgctcccatccctggcagagtctagagccttggcccagctgtccct

SEQ ID NO: 606164 - DNA, 83 bp, Homo sapiens
ccgcagtatcatgctggccaagaagatcatcattaaggacggaggcacggatctaacttggcaagatgagcactctgcccctt

SEQ ID NO: 606165 - DNA, 100 bp, Homo sapiens
ttctgggccacatcttctatgtgctgggaaaccacaggatccaggatgggggccccgtttgtctgggccttgggccttttgatgctgcagatgctgctct

SEQ ID NO: 606166 - DNA, 100 bp, Homo sapiens
ctgggacagccatggtttcagacggatgaaaactttcggaagagaaagttgcctgtggtaagttcagttgttaaagtaaaaaaattcaatcatgatggag

SEQ ID NO: 606167 - DNA, 99 bp, Homo sapiens
ggccacagttcagcagctggaaggaagatggcgcctggtggacagcaaaggctttgatgaatacatgaaggagctagtgcggaaacaggaaattataaa

SEQ ID NO: 606168 - DNA, 100 bp, Homo sapiens
cattgagattgccacctacaggaagctgctggaaggcgaggagagcaggctgttcagaccgacgttgccatcaaaacacatacacccagaaagaaacaac

SEQ ID NO: 606169 - DNA, 117 bp, Homo sapiens
aagcaacttggaagaggaaagaaaagaagtcaggaatggcccttactcagagagcagctctaaattgggaagcaatgccggaaacaagtctcttaaaaatcaacttggattaacctt

SEQ ID NO: 606170 - DNA, 98 bp, Homo sapiens
agagcccccgaagctgctcccccagattgatattgtgaacatcagcgacagctttgagatgacctatagatatcgctactgaagcaatagaaaacttc

SEQ ID NO: 606171 - DNA, 90 bp, Homo sapiens
gcagtaattccaggaatgggaataccagaacaactaaaattagctatggaacaagaacagatgggcattgatcaatatgacagagatagc

SEQ ID NO: 606172 - DNA, 100 bp, Homo sapiens
cggagtgtaggaagaggcactgctgagggggcgcgaggggaacggaggccagagctgcggtgaagtcccgcttggcttttgggaagcccctggtggagca

SEQ ID NO: 606173 - DNA, 83 bp, Homo sapiens
gctgctgtaagacagtctaaactacgaaatacaccttatcaggttcctttgcccaaagactcaacaggtgcagcagatccccc

SEQ ID NO: 606174 - DNA, 75 bp, Homo sapiens
gaatgcataggtcctttctacaagtgagaaagatcagtctaaagaaaaggagaagaaagtgaaaaaaacaattcc

SEQ ID NO: 606175 - DNA, 100 bp, Homo sapiens
acctctcagcaggcctttgctggacagatgaagagtgacttgtttctggatgattctaagaggaagatgacgattcagagactgaaaaacctgaggctga

SEQ ID NO: 606176 - DNA, 50 bp, Homo sapiens
ggctagaatcttgcctgctccacagtttgtgcacgatctgattttctgga

SEQ ID NO: 606177 - DNA, 51 bp, Homo sapiens
ccagccctgcctctccctgggctctggcacacaagaattgtgggcagatga

SEQ ID NO: 606178 - DNA, 100 bp, Homo sapiens
gctctcggtgccctctccttttcgtttccggaaacatggaccagttgctcttctgtgatgactgcgatcgtggctaccacatgtactgtctcaccccgtc

SEQ ID NO: 606179 - DNA, 75 bp, Homo sapiens
cttcctcggccgagccgggccgcgccgccgctgccgccgccgcgcgcggccttgttgtcctcctggtgcgaagag

SEQ ID NO: 606180 - DNA, 50 bp, Homo sapiens
tccgctgccagcgacatgttcaagtccaagtggtaagaagttcagaagca

SEQ ID NO: 606181 - DNA, 108 bp, Homo sapiens
cctgctgctttgccccaggaattcagcgccttcttccaagatttgtgacacagactatatccagtacccaaactactgttccttcaaaagccagcagtgtctgatgag

SEQ ID NO: 606182 - DNA, 74 bp, Homo sapiens
gggaaggagcatcccaggacctaccagaatctgggttttctagtcttgaactactggctacgtggctaccaaat

SEQ ID NO: 606183 - DNA, 98 bp, Homo sapiens
ctgggacttcccgtccgcggcgtggaggccacaatggtgcgcatgaatgtcctggcagatgctctcaagagtatcaacaatgccgaaaagagaggcaa

SEQ ID NO: 606184 - DNA, 103 bp, Homo sapiens
caacaagcaagcatgcagcttactgcttgaaagtgtgttaacagggcacaaccattatgtgatgtgtgctcagttccaccccacagaagacttggtagtatca

SEQ ID NO: 606185 - DNA, 82 bp, Homo sapiens
cggcatctgcaaaattcggccgcccaaggatagtgaagtttttattactgataaaaagactgataattcagaggttttctgg

SEQ ID NO: 606186 - DNA, 100 bp, Homo sapiens
atgggggctgaatgtgcgagtccatagctgaagaggagcgccagatggtggaggaatacacttatttatgaagtattgttgcagcatctggcagtgagac

SEQ ID NO: 606187 - DNA, 90 bp, Homo sapiens
caccgccatcacccacgctctgacctctggtgcagcctgacttctgagcaggtgaggaagcactacctgagtgggggacccgaggcccac

SEQ ID NO: 606188 - DNA, 100 bp, Homo sapiens
caaagaagaactcgaagtagaagttcttcatggggaagaaataggaggcggtcagacagccttaaagagtgtaaatgcagacaaagttggaattgaagct

SEQ ID NO: 606189 - DNA, 75 bp, Homo sapiens
ccgctgtctttgaggtctgaggagagaacagactttgctaccaggacttgctggcccctctggggagatggttaa

SEQ ID NO: 606190 - DNA, 88 bp, Homo sapiens
cgcagtccacgcaggagatccatgagaaggtggatccataaagaacccagccaacccgcagagggaggggaggggctgagctgtgagg

SEQ ID NO: 606191 - DNA, 80 bp, Homo sapiens
gcggacgcagtgatttgctccccctcgtgcagcaacccccacacccagcaccaggctgctggtcagcgcctcccaggatg

SEQ ID NO: 606192 - DNA, 98 bp, Homo sapiens
ttctttcgatcagagatcggcggagaccctcgaagtgcgcaaacttgacactcaccctgaccgcaactggaacagatccagaaggagctaagtgtttt

SEQ ID NO: 606193 - DNA, 100 bp, Homo sapiens
gcccactccagaagtagcatggaaatggagggcatcttcaaccacaaaggagaagctaaaacttacttatgaggaaaagtgtgaaattgaggaatcccaa

SEQ ID NO: 606194 - DNA, 90 bp, Homo sapiens
tctgtggacttcgtcttctacaactgcagcgtccaccagtcttgtgtgaattacgtgcctgagcctgagaactcagccctactgcgttgt

SEQ ID NO: 606195 - DNA, 90 bp, Homo sapiens
gcacttgtgttctgattagtggccaaataaatgacagtcagaacttcagctaaggtacaataagaatgaagtgtctatgttgaaaaatga

SEQ ID NO: 606196 - DNA, 75 bp, Homo sapiens
cagaactggatgaagatgatttagaagcagtgagaaagatcagtctaaagaaaaggagaagaaagtgaaaaaaac

SEQ ID NO: 606197 - DNA, 75 bp, Homo sapiens
cagaagtgaagtcaatgttccgggaagttcttccaaagcaaggtgggcagtgtcaaaccgggaaatgcttatagc

SEQ ID NO: 606198 - DNA, 75 bp, Homo sapiens
cgaggagatgctgtgggtggggagccacggggttcgtaagaagaactcgctgaaggactgcgtggcagtggctgg

SEQ ID NO: 606199 - DNA, 75 bp, Homo sapiens
agcgactgagtccgcgatggagccgattcgaagacagtctcttacacctcctcctcagaacactattacatggga

SEQ ID NO: 606200 - DNA, 100 bp, Homo sapiens
cttctggagccagctggacgtgccggtttgcccagtgcggcgcggctgcacgcaccgtccacaagaattctccactttaccaatacttacaggatctggg

SEQ ID NO: 606201 - DNA, 100 bp, Homo sapiens
acagtctcaagaagaatttaaactggaggacctgaagaagctagaaccaaaaccctcggcctcaggaaagtcggacagtattcagtggctcagtcagtat

SEQ ID NO: 606202 - DNA, 74 bp, Homo sapiens
gcagccaggagtcgcctgggtccctgctggagtatgctggaacatacatatgatagttgagaaagacacatatt

SEQ ID NO: 606203 - DNA, 50 bp, Homo sapiens
ccttcctcggcgggccggactggatgaaaactttcggaagagaaagttgc

SEQ ID NO: 606204 - DNA, 74 bp, Homo sapiens
tggtcagtgccatttcgcctttatcgtggtggagtccaccctggctgtggaaggatttgatgccctggatccct

SEQ ID NO: 606205 - DNA, 74 bp, Homo sapiens
ggcatgtgattggagatcacttcaataaggaggaagattatccaggagctattcagttgtgccttgaatgtcaa

SEQ ID NO: 606206 - DNA, 73 bp, Homo sapiens
tgcagaaaggaatcaaaagaatatttagaatgcaggatggagagacccgaccgcatgtctgtcatggacctcg

SEQ ID NO: 606207 - DNA, 75 bp, Homo sapiens
tgaagactttgaacgcactcctcagagtccgactctcccacctgctaagaaatgcactcggtgatggaaagagag

SEQ ID NO: 606208 - DNA, 101 bp, Homo sapiens
ctgcagagcctgtccgtcagtccctaggtatccgcactgctcaggggcaacagcccccaggggagcaaccagggagtcaaaatcacaccggaccagcagaa

SEQ ID NO: 606209 - DNA, 88 bp, Homo sapiens
ataaaaaatggcctccaacaaaactacattgttctcctgtgcctcctgttggctctctttgcatctggcctcatccaccgagtctgtg

SEQ ID NO: 606210 - DNA, 82 bp, Homo sapiens
gcggatgccctgcagtacctgcagaaggtctctggagacatcttcagcaggtcacagaagatgtgaattcaagtatcaagac

SEQ ID NO: 606211 - DNA, 73 bp, Homo sapiens
tcaacttgatgtctttttacaaaaaggtgcagcagttcctgcggcaagcccagcgggggacagaggaaaagga

SEQ ID NO: 606212 - DNA, 75 bp, Homo sapiens
gagatggctctgttccacttccagcagaagttcttgctggaggctgtgagcttcagtttcagcgactcacccgag

SEQ ID NO: 606213 - DNA, 75 bp, Homo sapiens
ctcaaattgatgctaactggaacttcctgaacaacgactatcgtctattccacaagatgagtaacagccaccctc

SEQ ID NO: 606214 - DNA, 101 bp, Homo sapiens
cctccacaacacgcgctacggatctcaagaaccttttcagcaagtatgggaaggtcccttatttcgcgtgagtctttggcgtccacgaccttgagtctgac

SEQ ID NO: 606215 - DNA, 100 bp, Homo sapiens
cagacctactgcagccacgcgggcgagcggctgtgtggatgtcggcgaagccgcgggcgaggtgaaattttgggattgctaggacccaatggtgctggaa

SEQ ID NO: 606216 - DNA, 74 bp, Homo sapiens
atagaccaaatgttcagcactttgctgggagagatggatcttctgactcagagaacacctgtcttcgcaaccag

SEQ ID NO: 606217 - DNA, 90 bp, Homo sapiens
cgcgggtctggctagtcaggcgaagtttgcagcacatacccccggcctcatgagtacctgtccccagcggatctgcccaagagctgggac

SEQ ID NO: 606218 - DNA, 96 bp, Homo sapiens
cggagaagagagctctggggtcgacacgatgtgactacccctgaatctacaaagaatcttgtggagtcatctatggtgaatggaggtttgacatca

SEQ ID NO: 606219 - DNA, 50 bp, Homo sapiens
ggaaaatcatattatagatggagtaaagatgacaacggcaacacgacaag

SEQ ID NO: 606220 - DNA, 83 bp, Homo sapiens
ctggagacggtcgtagctgcggtcgcgccgagaaaggcaattaagttggaatatgcaaggttggttaagttggcccaagaaga

SEQ ID NO: 606221 - DNA, 89 bp, Homo sapiens
cgggattatgaaaagaataaagtctgcaaggaattctcccatctgggaaaggaggacttcacatctctactgagggagctggccgtgcg

SEQ ID NO: 606222 - DNA, 100 bp, Homo sapiens
gactggctgttgtggcaggttccggaattcagtactgtgatacagtttatgtaacttgatggaagaaaatggaattactccaaaaagacaagtgctcaag

SEQ ID NO: 606223 - DNA, 75 bp, Homo sapiens
gaagctaatggacatatccattttgataatgtcagtgtggtatctctacagacagagctcggatagagagtccag

SEQ ID NO: 606224 - DNA, 74 bp, Homo sapiens
agaaacaaaatgtcaacaaattgatgggtaaagtaatctcacaagctgccaaagaacacatcccaagcagtaat

SEQ ID NO: 606225 - DNA, 90 bp, Homo sapiens
ctttgttcaccgccaaccccttcgagcaagacgtggcccccacagaacctttattgtgtaagtttgctgatggaggacagaaaaagagac

SEQ ID NO: 606226 - DNA, 97 bp, Homo sapiens
gtcatcgggaagatggaggcacggctgaatgagcagagccggctgctggagcaggtatcttggagatggccgcttccatctggagtctgtcatgatt

SEQ ID NO: 606227 - DNA, 75 bp, Homo sapiens
cttccctgattacagaatcttggaacttgatggagagtttggattcattgctttgtgcagaaggttctgaaagtc

SEQ ID NO: 606228 - DNA, 50 bp, Homo sapiens
ctcggccaagggcgacagccaactgctgacggggctcttcacccccgaca

SEQ ID NO: 606229 - DNA, 74 bp, Homo sapiens
taaagcttcggcacaagggcccaactggaattccacttacgggtcagtttgctgagaacgaaaccaatgaggtc

SEQ ID NO: 606230 - DNA, 75 bp, Homo sapiens
tatttatgttgcacaagattgtacaggctgtgtgccgagcttggaagaaagtgtgacccgttcgacggaacaaag

SEQ ID NO: 606231 - DNA, 75 bp, Homo sapiens
ccgcgagttcctgcgcggctgcggggcttccctgcggctggagatcaggatcctcatgaccagccaaagagaaga

SEQ ID NO: 606232 - DNA, 82 bp, Homo sapiens
ccttctcaaccttgtgggatgtgaaaactctgttactgaagttcaaatctgaacatcaatgatgtactagggaactactcat

SEQ ID NO: 606233 - DNA, 100 bp, Homo sapiens
tactgagatagaaggggaggggttacagactgtggtgcctacccccatcactgcttccctcagccataacaggccactccccacctgtcctgcctttgtg

SEQ ID NO: 606234 - DNA, 100 bp, Homo sapiens
agcgtttccccgcggccttcgcgccccaggcttcgcggggctacatgacatcagttgtaggacagtcccatctggacagcaacattgagaatcaagagat

SEQ ID NO: 606235 - DNA, 90 bp, Homo sapiens
tgagggtgaggctctctgcacactccagaggaaatcctcattgacgattcaatttgttgaaggccaatttgtggactcctacgatccaac

SEQ ID NO: 606236 - DNA, 90 bp, Homo sapiens
tgacaatgctccctctccttatatgtcaccaggagactaaagtccatcaaaaacatccagaaaattaccaagtctatgaaaatggtagcg

SEQ ID NO: 606237 - DNA, 76 bp, Homo sapiens
agaccaagatcactgataagaaatgttctcgacagcaaggtccatggggtatacaaaaagagtatctttgttttca

SEQ ID NO: 606238 - DNA, 97 bp, Homo sapiens
ccatgtgaagaaggtcgttgcttccccttcaccttccaccaccatgatttccaatggatgggaccccaatgaaatgttcaagttcaatgaggagaac

SEQ ID NO: 606239 - DNA, 83 bp, Homo sapiens
cggaactttcggcgcagccgcctgctccatcggcttcgcgggctttcttctagtcaagatgagtgataaaccagacttgtcgg

SEQ ID NO: 606240 - DNA, 133 bp, Homo sapiens
gcttcctccatcctggtattttttggagcttccatcctggttcttccaaagtgcccggacccaaaacaggaatgtatttgaatgaagcagggttcaactttgtgagaaaatgcattcaagctgtggaaacaag

SEQ ID NO: 606241 - DNA, 75 bp, Homo sapiens
aggttactgtgcataatgatagtgatgatactctttatgatgtgttcagagcaacattgttttgttgacacaagc

SEQ ID NO: 606242 - DNA, 88 bp, Homo sapiens
acaccattcttcgccaggccaggaatcaaacttcaaggcttttgagattcttaaagatcatctgaagaaaattcatcagttttctgct

SEQ ID NO: 606243 - DNA, 98 bp, Homo sapiens
ttgaatatcagaatcttgttgactacataaagatttggagcaagaggtggtggtggccttcccccgaagaaatttggtaatcctggggagcgtttgcg

SEQ ID NO: 606244 - DNA, 75 bp, Homo sapiens
caaggtccagagaaggtggaggaatcctgatactgagcggaagctcttcgtgggcggtcttgactggagcacgac

SEQ ID NO: 606245 - DNA, 96 bp, Homo sapiens
ctgaagatagatcgccatcatgtcatttacccttcgtggtgaccacagatccccagcctctgcccagaagttttctagcaggtcaacagtcccaac

SEQ ID NO: 606246 - DNA, 83 bp, Homo sapiens
caaaaatcccatctaccgcaactctcagttcgagagtaaagtgagtgacctgcaggaagaaggcaagaatgccatcaactcac

SEQ ID NO: 606247 - DNA, 89 bp, Homo sapiens
cccaagatggctgcgctgttgctgaggattttctgccgtctcttggcaaaaatggcaaataatgatgctgttctgaagagactggagca

SEQ ID NO: 606248 - DNA, 74 bp, Homo sapiens
ccggtaggagctgtaatcaattgtgctgacaacacagtaagactttgaccccgacgcaggcttcagtgattgcc

SEQ ID NO: 606249 - DNA, 90 bp, Homo sapiens
gctttacagaaattccatgctgccttcagcttcctttgccgctctgcatcatgttggtctcgcatgaatttgccttgaatttcaacccca

SEQ ID NO: 606250 - DNA, 75 bp, Homo sapiens
gtttgaaagtgcgattgtggaagctgctcggtggaagatagatgataagcctgtaaaaattgacaagtgggatgg

SEQ ID NO: 606251 - DNA, 51 bp, Homo sapiens
cctgctgtatccccagacccaaagcaaaccagtccagctacgggggcccag

SEQ ID NO: 606252 - DNA, 51 bp, Homo sapiens
tggccaccctcctcctcctcctccttgaccattgacttcctgaacgacaac

SEQ ID NO: 606253 - DNA, 75 bp, Homo sapiens
ggccggagctgtgggagtcctcagccccaagacccagcaggcgtctgaggggtgaaatccgagctacagctttca

SEQ ID NO: 606254 - DNA, 82 bp, Homo sapiens
aggaaacttgccttatcaccttcttgcttgcaggttaaacccatccagagtaatggctgcggccttacccaggaccctgggg

SEQ ID NO: 606255 - DNA, 85 bp, Homo sapiens
aagagtctttggaggatgcggctttgatgggttgctccttgagggcaggacagttcttatggctttatccgttgcgtaagcacag

SEQ ID NO: 606256 - DNA, 96 bp, Homo sapiens
aagggaaatggcaagggagcattccaggagagaaaggagaagaaggaagttgtggaagaggcagaaaatggaagagacgcccctgctaacgggaat

SEQ ID NO: 606257 - DNA, 75 bp, Homo sapiens
ctgaaatatgctgaacaacttcctgtagctcagataatacaccagaagaatcctgcaaaaatgtctctctatcca

SEQ ID NO: 606258 - DNA, 100 bp, Homo sapiens
tgattggacacagcaactttggcaccatccgctctaccacatgcgtgtacaaaggtactgctataaccagaatttggtagaaaaaggatttacttgttgg

SEQ ID NO: 606259 - DNA, 100 bp, Homo sapiens
tgagatttcatgaagatggcgccaggacgaaggccctactgggcaaggtgtccctggccagtgtccttccacctgtccacaagcatggggaacatcttcg

SEQ ID NO: 606260 - DNA, 74 bp, Homo sapiens
ggctgatgccccaaaaggcactgctaggcagctggaagagaaagaccgagtgctaaagaagcaggatgcattct

SEQ ID NO: 606261 - DNA, 74 bp, Homo sapiens
ggggccaggaagcaattctggaagcgcagcaacagcaagctcccgggcagattatttgctctcaaataactacg

SEQ ID NO: 606262 - DNA, 75 bp, Homo sapiens
tcttctgaattgtgctgccttggccaaaagagataaacattgacgatcttgaggatgaccctgtggtgaacgggg

SEQ ID NO: 606263 - DNA, 76 bp, Homo sapiens
gaaaacatgaccgctgagcccatgagggccaattcctgtccccccagcagcatggcatcgtgtgctgaaccctctg

SEQ ID NO: 606264 - DNA, 75 bp, Homo sapiens
tttggattcagaaaaggtggaccagatgacagaggtgccgtgagcgatgtggagatgcaggaacactatgatgag

SEQ ID NO: 606265 - DNA, 75 bp, Homo sapiens
cagtggctcaacaggctgaagggagtgtgaccgcaacaagggaaaacatggcttatactgtggaatgcctgcggg

SEQ ID NO: 606266 - DNA, 90 bp, Homo sapiens
accactttgaaggaggatgctccagcagctgcctgtggaggaaccgattgtgtccacagatgaggtcatcttcccactcaccgtttcact

SEQ ID NO: 606267 - DNA, 97 bp, Homo sapiens
tgctttcttgagcccctccaaggttctcctatttggactctgctgcagatcccttgccctgcaatctgaagaggatgtaagtcagtttgattccaag

SEQ ID NO: 606268 - DNA, 83 bp, Homo sapiens
ccacgcccctcaccccccgagagccgacaatgcagatcttcgtgaagactctgactggtaagaccatcaccctcgaggttgag

SEQ ID NO: 606269 - DNA, 75 bp, Homo sapiens
ctacagccaagtggcagatttgttattggtgggcctcagattctgagacgcccatccctgcaacgtcgagctggc

SEQ ID NO: 606270 - DNA, 74 bp, Homo sapiens
cgatcctctcatctcagcctccaaaagtgctggcattacaggtcttgaggaccggcccagctcaggctcctggg

SEQ ID NO: 606271 - DNA, 87 bp, Homo sapiens
catttccttcgtacccacagtgcttcatgagagtgttttacgacgacgacttgactgatgctgtgtttaaaacgctctcccgactcg

SEQ ID NO: 606272 - DNA, 101 bp, Homo sapiens
gcaggagatctacagcagcgagtgggacggtcatgaggagctgaaggccatcgtatggcatgcttttcacttccactgcatctctcgctggctcaaaacac

SEQ ID NO: 606273 - DNA, 100 bp, Homo sapiens
tggtaggctatgaccacgagaagccagttttagaaagagcgttttcgctacgtaaagcacattcgataaaggatatggaaaatactttgcagctggtgag

SEQ ID NO: 606274 - DNA, 83 bp, Homo sapiens
atttcggagaggccgcaggagtcatttcacacgatgaggcgagtggtacgacagagcaagtttcggcatgtatttgggcaagc

SEQ ID NO: 606275 - DNA, 51 bp, Homo sapiens
tgacactcaacaggattcccggacttgattattcttagaaatgcacttgac

SEQ ID NO: 606276 - DNA, 90 bp, Homo sapiens
gggggccgcgccggcgcccttccagattataagcacaccacagagactaaccagttcaggaagtgttctgattgggagtccatatacccc

SEQ ID NO: 606277 - DNA, 100 bp, Homo sapiens
actaatctgatcgggtcttccttcataacattgacatcaccaatttcagcagcagctggagcgatggcctggccttctgtgctctgctccacacctacct

SEQ ID NO: 606278 - DNA, 75 bp, Homo sapiens
cataacggggttcgggtgtctcgtgtgtgaacatcacagagaatggatcttggagaatgtctgaaagtccatgac

SEQ ID NO: 606279 - DNA, 100 bp, Homo sapiens
cggcgagaggcggcgccgctcccaagatgtcgcagacggccatgtccgaaacctacgcactgccagtgaaagatgtagaagataaacctgaacaacaaac

SEQ ID NO: 606280 - DNA, 100 bp, Homo sapiens
cgatggcgcagaaaccccgttgacaaggcactgctttttcatgacgatgttggatgacaataaccatcttattcagtgtataatggactctcagaataaa

SEQ ID NO: 606281 - DNA, 100 bp, Homo sapiens
caggatctgatctgaatgctgtgaaatcactaggaactccagagcacccgacagctacaaagtgcaagataagaaaaatgcctccagccgccctgcctct

SEQ ID NO: 606282 - DNA, 83 bp, Homo sapiens
aaggcacctacgggaaggtgaagaaggcgcgggagagctcggggcgcctgattcccaacttcttctggagcctggggatcggt

SEQ ID NO: 606283 - DNA, 108 bp, Homo sapiens
ccgctcaaagccgggagatcgactgtttgagcccggaagcgcagaagctgacaatgcagatcttcgtgaagactctgactggtaagaccatcaccctcgaggttgagc

SEQ ID NO: 606284 - DNA, 80 bp, Homo sapiens
gcttggcctcccaaagcgctgggattataggtactccaaagattcaggtttactcacgtcatccagcagagaatggaaag

SEQ ID NO: 606285 - DNA, 76 bp, Homo sapiens
agggcaacccgcagcacttgtcccagagggagctcatcacccgtgctggagaatctggtaaaagcaccattgtgaa

SEQ ID NO: 606286 - DNA, 82 bp, Homo sapiens
tacaaggacatcctgcgcaaggccgtgcagaagaacatccagtcatggataaaaatgagctggttcagaaggccaaactggc

SEQ ID NO: 606287 - DNA, 75 bp, Homo sapiens
taccatgtcagccttcccagtagctggaactacagtccctaaaagataagttagtacaagagaaaaagctgtcca

SEQ ID NO: 606288 - DNA, 75 bp, Homo sapiens
ccgtgtccttcattgccacgtacaggtttcctatcctgggagcaggagagtgtgcctatttgaatgacaaaggtg

SEQ ID NO: 606289 - DNA, 100 bp, Homo sapiens
ctccagcgggcctggactgtgggctggtgtgtggaactgtttgaggagcagcaggcttttgagaagagccgcaagttccttcggcagctggagatttgct

SEQ ID NO: 606290 - DNA, 120 bp, Homo sapiens
gcactggcactacatcagcttcggcctgagtgatctctatggtgacaacagagtccatgagataaggaagcctgtgtgggtaccaacaatcaaagctacatctgtgacacaggacactgc

SEQ ID NO: 606291 - DNA, 82 bp, Homo sapiens
tgggccgccgagctggacccggaccggttttggcgacctggccctgcgcaactgcctgctgacctctgacctgaccgtgcgc

SEQ ID NO: 606292 - DNA, 101 bp, Homo sapiens
gatttctgtgcctggaaaatatctgttaacagactgcttttacacctacattattcactgaccagcgctgacctgtcagcccttcaaggcttcaactcgcc

SEQ ID NO: 606293 - DNA, 83 bp, Homo sapiens
gagggagcgaatcgccaacacgaggaagcggggagaggtggtgagagatgacccctgttgaggatttcattggtgtctgccac

SEQ ID NO: 606294 - DNA, 101 bp, Homo sapiens
ctcgagggcgcgaggccagcccgcctgcccagcccgggaccagcctccccgcgcagcctggcagtaagagatgctaaaaaccttgtacctatggaccccaa

SEQ ID NO: 606295 - DNA, 90 bp, Homo sapiens
gaagtggtgatgcaagaagtttctaggaaaggccggacaccagatggagttttaacattgaatgcggagaacactaattatgcctatcaa

SEQ ID NO: 606296 - DNA, 75 bp, Homo sapiens
tggacatatcctggaccaggcttttctgtggaagatagatgataagcctgtaaaaattgacaagtgggatggatc

SEQ ID NO: 606297 - DNA, 90 bp, Homo sapiens
gccttattttttctcatggatgttcttcttcgagtatttgtagaaggagacatagtcttgctctgttacccatgctggagtacggtggcg

SEQ ID NO: 606298 - DNA, 75 bp, Homo sapiens
cttcggccgcatccccatgcgcttctcggtgctgctacgagttccagggagctctgtcctggtgaccgtgcccgg

SEQ ID NO: 606299 - DNA, 96 bp, Homo sapiens
gattattatttagaagaggaagaagaaggagatgaggaacaaagtcttgaaacggttctgctgatggaacagccagccatgaacaaggtgaggaag

SEQ ID NO: 606300 - DNA, 83 bp, Homo sapiens
gtgcctacccccatcactgcttccctcagccataacagggccaaaagagaaacattggctactttgacaaccttaaagcggac

SEQ ID NO: 606301 - DNA, 82 bp, Homo sapiens
ctccactccgtcccccgcgggtctgctctgtgtgccatggacgggcgtccgagctgggccacagcctgaacgagaacgtcct

SEQ ID NO: 606302 - DNA, 100 bp, Homo sapiens
taccgtacccgctggagtggcatcactcggcagcacatgcgcaaggctgtccccttccaggtggcccagaaagaggcctgtccatcgtcatgggggctgt

SEQ ID NO: 606303 - DNA, 95 bp, Homo sapiens
ctcaaaacctggctgttttccttcagagcactggcctccaattccacacctgcatgctgtggcgggcgctggcggtggagcctcgcctagctgcc

SEQ ID NO: 606304 - DNA, 90 bp, Homo sapiens
catcctataatgcctttgtcaaagaatcgaaacaaaagatgaatgcaaggaaaaggaggatttggagcaagaggtggtggtggccttccc

SEQ ID NO: 606305 - DNA, 82 bp, Homo sapiens
cgggtggagctgagccggagacaggtacatggtggatgctgctgaccaggagaagattgaggcctctaagaacgagctccac

SEQ ID NO: 606306 - DNA, 98 bp, Homo sapiens
caccttatttctctgctgagtgtccagatcctccaaagacagatctggtttttggcccagcaactacacagaaggaattctttcagggttgcattatg

SEQ ID NO: 606307 - DNA, 51 bp, Homo sapiens
aggagacgctgcagcgcgcggaccccccaaagacacacgtgacccaccacc

SEQ ID NO: 606308 - DNA, 75 bp, Homo sapiens
cagatttgcccctcaaactggaggctctctccgtgaaggaagccactgaggcggctcccagctgcgttggcgaca

SEQ ID NO: 606309 - DNA, 100 bp, Homo sapiens
atggcggatgccctgcagtacctgcagaaggtctctggagacatcttcagcagaggttgacggatatattcagacgttacgacacggatcaggacggctg

SEQ ID NO: 606310 - DNA, 50 bp, Homo sapiens
tggctgtcaaaatatttccaatacagagacgaggtctcactatgttgccc

SEQ ID NO: 606311 - DNA, 90 bp, Homo sapiens
cggattggttgttttttcctgtatgaagcggttggcaccactgaagtgaccgaatgagttaaagctgatacattcctgtgggtcaactat

SEQ ID NO: 606312 - DNA, 93 bp, Homo sapiens
ctgcaccatgagcgtcccggccttcatcgacatcagtgaagaagatcaggtttggtgcacctcgatttggaggaagtagggcagggcccttat

SEQ ID NO: 606313 - DNA, 100 bp, Homo sapiens
cgaacactgctatcattgaaagattgttaaaggaaatgggctggcaggaagacagtgaaaatgatgaaacatgtgctcccttaactgaggatgaaatgag

SEQ ID NO: 606314 - DNA, 90 bp, Homo sapiens
tcagcctctccagcagctgggattacagattagcctgaggcctgctcagtcgttcctaatgaataaaaatcaagtgccaaagcttcagcc

SEQ ID NO: 606315 - DNA, 75 bp, Homo sapiens
tcggcggcggcgcctcaggcacctcggcccggaataccctctaccatctgctttggtcagggtgccgctcgagga

SEQ ID NO: 606316 - DNA, 98 bp, Homo sapiens
gccacctctgtattcagcatagctattcctgttgatggtgatgaagacagctctcaggagaagtgattttgcaaattgccaacgaacctgttctgccc

SEQ ID NO: 606317 - DNA, 100 bp, Homo sapiens
gagtggaatggcctctcaatattgcctggacgattgcttagaggagtatttcctgaactgtgtgggtaggcagaagaaattagaagtggccatggaagaa

SEQ ID NO: 606318 - DNA, 82 bp, Homo sapiens
gtggatgtcaactctgctggggagagaagcaggaataatgtatttgtggccttggacatgaggcagtcagtcctctgttgct

SEQ ID NO: 606319 - DNA, 83 bp, Homo sapiens
cccatgatgatcctgccatgcaggcaggccctgagcacgctgctgtgtgagcagcaggacgagcctgtggagtgggagacacc

SEQ ID NO: 606320 - DNA, 102 bp, Homo sapiens
agttccacagccccttcatcttccgtgaggaggatcccagccgccaggtttcccggtcctctggcgaggatcctccaaggcgtctcacatgaaccggctcag

SEQ ID NO: 606321 - DNA, 83 bp, Homo sapiens
gtaggagcctccgtgcggagaccactgttcaaggccacaggttgtgaccgagattcccgacgagagagactgaggggaagaga

SEQ ID NO: 606322 - DNA, 100 bp, Homo sapiens
ggcggccaatgtgggatcgatgtttcaatattggaagcgctttgatttacagcagctgcaggttaaataggattgcgaatcaggtggccattcagcggaa

SEQ ID NO: 606323 - DNA, 95 bp, Homo sapiens
ggggctgcaaggacctcagcagcggtttcccaagtttcctgacttcttccatcctctggaaatcagctgtgcttgaggcagccctaggtgaggcc

SEQ ID NO: 606324 - DNA, 75 bp, Homo sapiens
gcttgcaacaattgttatgcttttggataacagggcaagattcagaggaagaaaaggatattgatgcattatgtt

SEQ ID NO: 606325 - DNA, 97 bp, Homo sapiens
actacaagctatacgagtttatgttctactctgccagggaagaaattgtgataggaactgaggccagtacagtggtagcagttggactgaccattgc

SEQ ID NO: 606326 - DNA, 48 bp, Homo sapiens
accctgaacctctacgacacggccgaagcccctgaatgtgacagtgat

SEQ ID NO: 606327 - DNA, 81 bp, Homo sapiens
aggctggtttcggaaatgcccttacagcagcaggaacaatccctttgtgaaggctgctggtatgtgaatgtgtgccggttc

SEQ ID NO: 606328 - DNA, 80 bp, Homo sapiens
gaaagagccatccctacggaatccattaccgttggtgcttcccgtgctgctgttgatgctggctttgttcccaatgacat

SEQ ID NO: 606329 - DNA, 90 bp, Homo sapiens
agctgaggctggccatccaggagatcatgtcgctgaccagcccgtctgccccgcccacatctagaacggatatcaatgcttacaattgtg

SEQ ID NO: 606330 - DNA, 85 bp, Homo sapiens
caactacctgcactttggggagcctaagtcctgttaccggtattgtaagaacaagccgtacccaaagtctcgcttctgccgaggt

SEQ ID NO: 606331 - DNA, 80 bp, Homo sapiens
caagaaaccaacattcccaacagccaccaccaccaccagatgcaaacggggattcagcgtccgatcctttggaacaggga

SEQ ID NO: 606332 - DNA, 75 bp, Homo sapiens
atccacctgctggctgcactcatcacctttttggtctatgcagacttaattcagtgcacaaatgagatgaatgtg

SEQ ID NO: 606333 - DNA, 100 bp, Homo sapiens
taacattcttggcacaaatactattatggataagatgatggtgaggaagaggatggagatgaagatgaggaagctgagtcagctacgggcaagcgggcag

SEQ ID NO: 606334 - DNA, 90 bp, Homo sapiens
aacgttgccgttgccaaactgcaggaaagccagccaggaaacgcatatgatcttagctttgataaatgactgaagctggagaagccgtgg

SEQ ID NO: 606335 - DNA, 76 bp, Homo sapiens
cagcctgcggagcctgtggggcagtgaagctgtggtctaccaatctagacaactcagtggcaagcattgaggcaaa

SEQ ID NO: 606336 - DNA, 129 bp, Homo sapiens
tggcccatgtggacgccgtcatccgccactgcgcagggcggctgggcagctatgtcatcaacgggcgcaccaagctcactccatcactcgatgagataatatgagatttctacttcggagaggccaagt

SEQ ID NO: 606337 - DNA, 82 bp, Homo sapiens
cttggactgagtcctgcaggacacaggctatggtgaactaaacggtaatgctggagaaagagaaatatctttaaagaacctg

SEQ ID NO: 606338 - DNA, 90 bp, Homo sapiens
cagtacctgcagaaggtctctggagacatcttcagcagtatggtttgaagtggtgaacatggatttttctcggcttcacatgtacagtcc

SEQ ID NO: 606339 - DNA, 85 bp, Homo sapiens
ttcttacccggtctgagtacgacaggatattatggggatggattaaatgccattgttgtgtttgctgtctgtttcatgcctgaaa

SEQ ID NO: 606340 - DNA, 97 bp, Homo sapiens
cggccagacgccgacgtcgaccagcagagactggagtgatttggagaacaatgcatgtaagtctgacatcatgatgtccatccggcaaagaagagaa

SEQ ID NO: 606341 - DNA, 100 bp, Homo sapiens
ctatcatttgaagacgttccttgaggaggtttgaaaaaaatgttctgaaggatctggaaaagagaaaagctgatttaaataccatcacagagagtagtgc

SEQ ID NO: 606342 - DNA, 101 bp, Homo sapiens
tcttcactgatgtctatggaagtaatattgcactaagctcaaatgggaaaaatgttaggattttgagttttactaaagggaggaaaaagagaggaagagaa

SEQ ID NO: 606343 - DNA, 75 bp, Homo sapiens
gcgcggccctgctcctgtcttccattgaggcagaaggtgagactgctgctcctcgggccattttgaccggccatg

SEQ ID NO: 606344 - DNA, 82 bp, Homo sapiens
ctgggtcagtccgccgctcaccccgcggccgcaccttcccgccttctcagtagcctgtttcctggaagtctttagcaatcac

SEQ ID NO: 606345 - DNA, 51 bp, Homo sapiens
agccagctggactgcaatttcttaaagcaaaatgatgcttcaacacccagg

SEQ ID NO: 606346 - DNA, 75 bp, Homo sapiens
cgggagccatgagcgtggacaaagctgagctatgcgggtctctgctcacctggaatggtgaggttctggagaatt

SEQ ID NO: 606347 - DNA, 74 bp, Homo sapiens
aagctatagactacttctactccaccaggaaggttttgggatttgagattgacgcggtgaactctgtccagttt

SEQ ID NO: 606348 - DNA, 75 bp, Homo sapiens
gcgaagaaaagaggccttcctcaggtgacagagctgaatgaacctctctccaatgaagatcgaaatctcctctct

SEQ ID NO: 606349 - DNA, 90 bp, Homo sapiens
gttctaacgctgcctttgctttaaaacagtattacttgcgattgaatacctgcttaagaagcttacagaagctatgggaggaggttggca

SEQ ID NO: 606350 - DNA, 75 bp, Homo sapiens
aggagaaagaagacagccatcatttgaaaggaaacttggatttaactggccagaagcaggtattcaaagcagaga

SEQ ID NO: 606351 - DNA, 75 bp, Homo sapiens
cccagccctgcacactttggaaactaaatcaagtctgccaatggtgcatgaatatcctccgaatcctaaatctag

SEQ ID NO: 606352 - DNA, 97 bp, Homo sapiens
gctgtaacaaagcactctgtgctagtgatgtgagcaaatgcctcattcagcttccagtggtgtctgtagtgagagaaacagagtcccagttactgcc

SEQ ID NO: 606353 - DNA, 107 bp, Homo sapiens
ggcttgggccgccgagctggacccggaccggttttggtctcacagaaagttctccgctcccagacatgggtccctcggcttcctgcctcggaagcgcagcagcaggc

SEQ ID NO: 606354 - DNA, 75 bp, Homo sapiens
gagaacgaacatcttctggacctttgtccagtcaccgagaaccacggagaggtagagatccgaaggcacctcaac

SEQ ID NO: 606355 - DNA, 90 bp, Homo sapiens
taaaaatcgccaaaaattacttggagcaaagggcagtcggcggagcttcgccaaggctggcgcagtcggatagcactataatatgcagaa

SEQ ID NO: 606356 - DNA, 50 bp, Homo sapiens
gagcccctcatcgagctcttcgtcaagaaggaggccccaaccctgagcac

SEQ ID NO: 606357 - DNA, 100 bp, Homo sapiens
gagagagcgagctgagtggttgtgtggtcgcgtctcggaaaccggtagcgcttgcagcatggccagcgttaatgactgccattgatggaagacatgatgt

SEQ ID NO: 606358 - DNA, 90 bp, Homo sapiens
ggccgaggcctgggttacaagcagcaagtgcgcggttggggccactgcgaggccgttttagaggagaaggcagagcccccccaggctatg

SEQ ID NO: 606359 - DNA, 97 bp, Homo sapiens
accgtctctcactggattggtgccacctaaaacattgttatgctggaaatgctagaatataatcactatcagaaccttttgcccagagtagcagcca

SEQ ID NO: 606360 - DNA, 51 bp, Homo sapiens
tgctgaacttggcttttgcgcagtgaatcagacgtcccaatagatgtggag

SEQ ID NO: 606361 - DNA, 76 bp, Homo sapiens
gaggaggctttcctgctggtggcaaccgcctacgagacactcaaggctgaactcacgggaatcaaatggcgtaggt

SEQ ID NO: 606362 - DNA, 90 bp, Homo sapiens
cccgcgtccgccgattcctcctccttggtcgccgcgtccttggctggcgtgcttctgggaacttggcagacgcagcttagagagactcac

SEQ ID NO: 606363 - DNA, 101 bp, Homo sapiens
caaacttgccagttgggtatcctcctcagtatccaccgacagcattccaaggtctgccatcatggatgttctcgcagaagcaaatggcacctttgccttaa

SEQ ID NO: 606364 - DNA, 98 bp, Homo sapiens
ccggccatggcccctcggccccgcgcccgcccaggggtcgctgtcgcctgctgctggctcctcactggacattcatcttcaaagaaatctgaagattc

SEQ ID NO: 606365 - DNA, 75 bp, Homo sapiens
ggatgacaccggagtttgacgaagaggtggtttttgaggatttttcaagccacattcaattgataggatgaaaaa

SEQ ID NO: 606366 - DNA, 100 bp, Homo sapiens
gggatgacagaagactgggggagttagtggttggaccctatgacaacacagttgttttggaggaacttagggctgtgtggagaagattgggggctggctg

SEQ ID NO: 606367 - DNA, 98 bp, Homo sapiens
ctcgaaccttcctggtgtcaggaaagcagcgctccctcgagctccaggccagacagtacaatgtagattataaactggagacttacttgaagattgct

SEQ ID NO: 606368 - DNA, 107 bp, Homo sapiens
taccggatctcagctccgacgcccgaggagaaggaggagtggattaagtgcattaaggagtgcatccgccccaacccttttccccctcgtctcctgtgagaattccc

SEQ ID NO: 606369 - DNA, 75 bp, Homo sapiens
cttgtacaaacaggacctgcctaattaccttcaaacctgtgccggtggtggtgtgcacattgagccccggtatag

SEQ ID NO: 606370 - DNA, 100 bp, Homo sapiens
agcctcccgagtagctgtgattacagctttttagttggagaaggagcctacagatgggcagtagatcatggaataccctcttgccctcctaacatcatga

SEQ ID NO: 606371 - DNA, 98 bp, Homo sapiens
ccggcgggccgcgcctggtgatcggctccttaccagctcacctctcaccgcgcatgtttggagttgacgaaggatcagagattggtgtattcgggcag

SEQ ID NO: 606372 - DNA, 112 bp, Homo sapiens
caggaatggagacgccattggatgttttgtccagggcagcatctctggtgcatgctgatgacgaaaaacgtaatggtttttacaaaggaccaaacagaaaaggaaatagatg

SEQ ID NO: 606373 - DNA, 76 bp, Homo sapiens
cgcggtgaactctgtccagttttcaaaccacacagagtgtgtggcaggccccaacatcgccgccatcgtcgggggc

SEQ ID NO: 606374 - DNA, 83 bp, Homo sapiens
tgagcaaaaactccaaactcctctccaccagcgccaagagattcgccaaagtgaggacaaaaggaaccatgctgagaagccag

SEQ ID NO: 606375 - DNA, 100 bp, Homo sapiens
cctgaaggctcaccggaggacacatacagcttgacagagccaattcgctattaaaccagactcaacagccttacaggtatctcattgaatcagtgcgtca

SEQ ID NO: 606376 - DNA, 101 bp, Homo sapiens
tgacttcacttttgagtgcaactgccttccagaaatcttacaggctggtgttaaaggaacttcggaatcccttaaaggtgtgaaacgcaaaaagatcgtag

SEQ ID NO: 606377 - DNA, 98 bp, Homo sapiens
ggaaagaaacttcctcctggaggaatacctggcattgacctctcagatcccaaacaactggcagaatttgctaggatttgttaaggattccaagtaac

SEQ ID NO: 606378 - DNA, 50 bp, Homo sapiens
ccctgggaagcccttttggaaaggtcacagggattatggacccagaacag

SEQ ID NO: 606379 - DNA, 83 bp, Homo sapiens
cgcgggcgcgcaggccgcggggagcacctggagtgctcaagctggtattactatgtaactatgccaatgccagcctccacctt

SEQ ID NO: 606380 - DNA, 101 bp, Homo sapiens
tgttgtgaggattaaatgaattaatccacgagaagctcctagaatggtgcctggtactgtgaaagactaatatctcttgtatttggacttttaaaacaaag

SEQ ID NO: 606381 - DNA, 82 bp, Homo sapiens
cctcacaacattactacgaaggaggtgctggagaatctggtaaaagcaccattgtgaagcagatgaggatcctgcatgttaa

SEQ ID NO: 606382 - DNA, 73 bp, Homo sapiens
ttgagggctgtcaaaaatgctattgatgatggctgtgtggtttggctgtgatgttggaaaacacttcaatagc

SEQ ID NO: 606383 - DNA, 82 bp, Homo sapiens
gtgagtcttctggcaaacagtgtttgcctctggttcagctcatacaacagcttcttagggtatgttagagcccaccaaggaa

SEQ ID NO: 606384 - DNA, 83 bp, Homo sapiens
cttcgacccggaagtttacctagacaaggttttgaacgaagaatgtgatcagaactggtacaaggcagagcttaatggaaaag

SEQ ID NO: 606385 - DNA, 83 bp, Homo sapiens
atatttgcagtagaagtgggacccaaatctacaatgtctccacaaaccggaggactacccccagactgcagtaagtgttgtca

SEQ ID NO: 606386 - DNA, 100 bp, Homo sapiens
aaagcacaaggattctcgctgtgacagagacaacaccgagtatgagaagttttgctgatttgggaaaataaagactatggatcaactaggagtattgttc

SEQ ID NO: 606387 - DNA, 50 bp, Homo sapiens
aaaacttgtaccacaacaagaggtgaatggaagagaatccgaagaagaaa

SEQ ID NO: 606388 - DNA, 127 bp, Homo sapiens
aaaaaagaggaggaagtctatgaacccaaccctttcagtaaatacttggaagataacagcgacctcttttctgaacagaaatctggatggagaagcagtatttatctcaaagagaagtggacctaga

SEQ ID NO: 606389 - DNA, 75 bp, Homo sapiens
accagtacaagagactagaagagtgtctacccacagggtgtggacactgcaagagacttgcacctgagtatgaag

SEQ ID NO: 606390 - DNA, 98 bp, Homo sapiens
ggcaggatgaggcgtgcaggcctggatgtcccaggagagaggagtacagccagcacctttcctacagacccagtttccccattgacaaccaccctcag

SEQ ID NO: 606391 - DNA, 75 bp, Homo sapiens
gcagtgtcaatattgcagctactgcttctgaggaaattatgatgtgatgaccccaatggttgatatacttatgaa

SEQ ID NO: 606392 - DNA, 101 bp, Homo sapiens
accagaggtactacagtttacagtctgactactggaaggagcatttcatactactgaagctgaagctagttctcagagtttgactcagatatatgccttac

SEQ ID NO: 606393 - DNA, 75 bp, Homo sapiens
ttttccttgagctgaacgtcttgcaacagtggccgcacgcataggttcacctttccttgccagtgaagatggcgt

SEQ ID NO: 606394 - DNA, 80 bp, Homo sapiens
ccaagcagtgcttggagattgggagggggcattgtgacagctgaggacctgaacaactaccgtgctgagctgatcgagca

SEQ ID NO: 606395 - DNA, 134 bp, Homo sapiens
ttgggcttagcggcagcccgtatcacatcctagactttttacttcgaggagaagagtctcacgagttgtcctggaagtgctggagaatctggtaaaagcaccattgtgaagcagatgaggatcctgcatgttaa

SEQ ID NO: 606396 - DNA, 82 bp, Homo sapiens
cggtcctgaccaccgtgaacggacagtcccccccaggctccccacaggtgcaggaagccgccgcccagccatggacggggag

SEQ ID NO: 606397 - DNA, 107 bp, Homo sapiens
tcttactcctatggaaccaatgatagaaatgaagaaaagagaagaaccagaatttcctgagccttccaaacagaacacatgattctgtgcagatttgcagaccagac

SEQ ID NO: 606398 - DNA, 100 bp, Homo sapiens
gtttggggcaagtttatacgggcaacaaaacccttacttttggtgatgtggttgctgttcgccactatgagaaggcataaaaatgttcctggtcggggct

SEQ ID NO: 606399 - DNA, 98 bp, Homo sapiens
gatgagcggcggcctcggcctccggcgcagcccggaaatgtccggcaagatcgagaaagcagatgggaatttcttagccataggctcacatgacaact

SEQ ID NO: 606400 - DNA, 90 bp, Homo sapiens
gggcaaggcggcggacggctgcgtcgcccgaggcgaggaggagcgctggcggtgtaggagctgcacgatctgggaacctcacgtttatgg

SEQ ID NO: 606401 - DNA, 100 bp, Homo sapiens
aactgcagggaaacagccatcatgagccaagacaatgcaaactccagtgaacattcccgtgcctgtgctccggctgccccggggccctgatggcttcagc

SEQ ID NO: 606402 - DNA, 100 bp, Homo sapiens
gcccttgcgcctgcctctccaggatgtctacaaaattggtgagctcacaatgtctctctgcaccaagctccatgactcaggatttgcctggagttcctgg

SEQ ID NO: 606403 - DNA, 100 bp, Homo sapiens
tggaacagtaaccgggcttgtgagagggctctgcagtataaactaggagacaagatccatggattcaccgtaaaccaggcttccgaagatcttctcaagg

SEQ ID NO: 606404 - DNA, 98 bp, Homo sapiens
taaggaactagtcacagtgttgctgcaacatagagctgacattaactgtcaggtcaatgagtggtcattgaagataagaaaggaaatgagagttgttg

SEQ ID NO: 606405 - DNA, 82 bp, Homo sapiens
ggaactaaggcggaggaactgagacgtttcgaattccagagtcgccaacatccagcagcagctggcccggcttgacaatgag

SEQ ID NO: 606406 - DNA, 90 bp, Homo sapiens
gagacccctctgctgcaccacttcatgggaggtggctgccgcttcctgcgctacgactgtgtgatctcctccccgaggaagggctgggca

SEQ ID NO: 606407 - DNA, 100 bp, Homo sapiens
ccttctgcagtccctcgtccagccacccccaggtgagctacccctctctttggccgcttgcaccaagcagtgggatgtggtaagctacctcctggagaac

SEQ ID NO: 606408 - DNA, 98 bp, Homo sapiens
catggcccaggcagaccttgcagtcaaatatgaatctaagaaaagggtttcagctgaagaggccatgaaacatgtgtactttcgaagtctgggaccaa

SEQ ID NO: 606409 - DNA, 82 bp, Homo sapiens
tccagcaccctcatcgccctggccgacaagcacgcaatgcagggctcgcggcctggcaagaatgtacagctgacagagaacg

SEQ ID NO: 606410 - DNA, 50 bp, Homo sapiens
caaatacccctttgaattaattatggcttggctccggaagcctggttggc

SEQ ID NO: 606411 - DNA, 100 bp, Homo sapiens
tctgctgttcagcaggagaaaatttcagagctgcaaaattatcagtttcctgttttccagcacccaacataacttgtaaggattccagtggcaatgaaac

SEQ ID NO: 606412 - DNA, 51 bp, Homo sapiens
accagctcatgggcacggctcgggacgaggccacaagaggaagctgaatga

SEQ ID NO: 606413 - DNA, 98 bp, Homo sapiens
ggccgggtctgtccacactgcgcttgttttcctgggattgaatgctggtgggaagaaggatatggccctgaagccacatgagcggaaggagaagtggg

SEQ ID NO: 606414 - DNA, 100 bp, Homo sapiens
tggatgcactgagaacccagcaggctatgaccagggccagagcactcagatctcagtcagaggagtctgcttctgcctttagtgctgatgaccttatgag

SEQ ID NO: 606415 - DNA, 100 bp, Homo sapiens
ctcaagaatgcctgggacaaggagccagtgctggtcgtgtccttcgtcgtcgggggcctcgctcgttagaactgtggtgcgccatcacgaggagaagcag

SEQ ID NO: 606416 - DNA, 128 bp, Homo sapiens
caagacctgcttctcattatggaacttcttactaacctgctgtcaaaagaattcatagatttcagtgatacagaatcgcatgtgtgagtgcccctagtgtttaccagaaactcagagagctgtgcaga

SEQ ID NO: 606417 - DNA, 103 bp, Homo sapiens
ggaggctgcctcggcggagcagaggaaccacacgctgatcatgggcacctggacgatgacggattaccgcacgggttctgcacagtcacctactcctccacag

SEQ ID NO: 606418 - DNA, 89 bp, Homo sapiens
gcagcagccccagcctcaaggccaggaccatggccaacctggagcgcaccttcatcgccatcaagccggacggcgtgcagcgcggcctg

SEQ ID NO: 606419 - DNA, 75 bp, Homo sapiens
agaacggagactacttgtgtgtgaaagtagataggactccgaaaggcacccagatgttacatcctgtccactgca

SEQ ID NO: 606420 - DNA, 74 bp, Homo sapiens
cagttttggaagaggagcgctaagctgccggggaggcaagaaactatattcagtctttgactcagatgccgaag

SEQ ID NO: 606421 - DNA, 83 bp, Homo sapiens
tcataagccacgaaccgggaactccactttgtggcaccgtgagattctccagacctaatctgggagcctgcaagtgacaacag

SEQ ID NO: 606422 - DNA, 100 bp, Homo sapiens
cagcagaaagcatttaaccagcatggctacttcatattttggaaagcagtttttaagacaagaggcaggtggaagtcatcataaagtttctgtttcaccc

SEQ ID NO: 606423 - DNA, 75 bp, Homo sapiens
tcatggattcagaataaacgtgaacaggtccttatgtcgtcagaagatcgagaagctcaggaggatgaattgctg

SEQ ID NO: 606424 - DNA, 74 bp, Homo sapiens
ggagattatagctctgtatgagaaggacaacacctacttaggctgcaataggatctgtggctttggacacagca

SEQ ID NO: 606425 - DNA, 57 bp, Homo sapiens
agtggcacacagtctactatcaccgacagtgaagatgatacctgcaaaagacatggc

SEQ ID NO: 606426 - DNA, 145 bp, Homo sapiens
acccgccctgcgccccgctctgctgtgggcgctgctggcgctctggctgtgctgcgcgacccccgcgcatggtgtcatggagaaactccagctgggcccagagattctgcagcgggaaaatccaaggcttatttatgccaggctg

SEQ ID NO: 606427 - DNA, 73 bp, Homo sapiens
gccatggataagaagaaagtgttggtcaaggtgacgtgcagctgtttgatctccagaaaagctcccagaaacc

SEQ ID NO: 606428 - DNA, 82 bp, Homo sapiens
cggagcctggcgggcgtgggaacccaggccccgccgaggcggccagacggccgaagccctgcagcccacgctacagccggag

SEQ ID NO: 606429 - DNA, 50 bp, Homo sapiens
ccagcaggcgctggctcctgctcagattatttgcaggtgtcttccctcga

SEQ ID NO: 606430 - DNA, 82 bp, Homo sapiens
ccagcgcctcggccgaacccctccgcagcagttccaaagaactactggttcagattttagctcttcccaagttgtgaaaata

SEQ ID NO: 606431 - DNA, 118 bp, Homo sapiens
cttccttcgacgcaaaacagactttttcattggaggagaagaagggatggcagagaaggttgtttttcaccattcagaacattgcctgaagcaggtccaccatgccgttagtaacgag

SEQ ID NO: 606432 - DNA, 83 bp, Homo sapiens
ggcgcggattcgccgaggcaccgaggcactcagaggaggacgcagagggctctacgtgtttgcacctggctgccaagaaaggc

SEQ ID NO: 606433 - DNA, 74 bp, Homo sapiens
gccaactccaatgggcctttccagcccgtggtccttctccatattcgaggaagtgggaaaactcttgcctttgc

SEQ ID NO: 606434 - DNA, 100 bp, Homo sapiens
ggtcagccgcgtccccaagtgagccaaaagttagtgaatcgccatctcctgtgactacaaacactccagcgcagataatgatttttccagaaggaacttg

SEQ ID NO: 606435 - DNA, 82 bp, Homo sapiens
cgttcccctctggcgcctttgctgctcctctctctgcacggacccagatgatgtggtaccagttggccaaagaagagcctgg

SEQ ID NO: 606436 - DNA, 96 bp, Homo sapiens
caatcttgtgtgggcactgaagggggactacaggttcgagaaaacagaagcctatcagttgctgaagaaggccacccttcaggataatacaaatca

SEQ ID NO: 606437 - DNA, 100 bp, Homo sapiens
gggggctagtggccacgctgcagagcctcgatgggaatttcttagccataggctcacatgacaactgcatctatatatatggcgttagtgacaacgggag

SEQ ID NO: 606438 - DNA, 96 bp, Homo sapiens
caacagatgaagacagatgcaccaacgaggtggcattggtagggtggtcaacggagccttcatggtgctgaaagggcatcgatctattgttaacca

SEQ ID NO: 606439 - DNA, 100 bp, Homo sapiens
aagaaatcaaaaatctggtgaaattgccggcaagagggagttaaggacattccaggcagaggcaagatgccttcaattaagttgcagagttctgatggag

SEQ ID NO: 606440 - DNA, 82 bp, Homo sapiens
gcaacatctgcaaggtccgcttcaccagaaacctctgtagaggagcaggatgcaaccgacaggctgtggccggacagctgct

SEQ ID NO: 606441 - DNA, 89 bp, Homo sapiens
gctttgtccccttgctggctgcccctcaggacccctgctacgtggagaaaacctcggataaggtgacggccacccacggactctgtcac

SEQ ID NO: 606442 - DNA, 96 bp, Homo sapiens
attgcctggacgctgcacagcggaatctatatagggatgtgatgttagagaactacagaaacctgatcttccttgcacgaaagcaagagattatca

SEQ ID NO: 606443 - DNA, 82 bp, Homo sapiens
cgcagttcttgtttgtggatcgctgtgatcgtcacttggttcgagaacttgtcttggacaattgcaaatcaaatgatggaaa

SEQ ID NO: 606444 - DNA, 83 bp, Homo sapiens
cgacaagccgctggcagccgcggatctcaccgccgctcagggagatgctgaaggacgaggtgcgcaccctcacttaccgcaac

SEQ ID NO: 606445 - DNA, 75 bp, Homo sapiens
acttgctttttctgctctgagccggacgccggaatggagtttgaggaagaggcacccaggagggtgtgcggatca

SEQ ID NO: 606446 - DNA, 98 bp, Homo sapiens
tggcaggtgacagtctgcatgtgcagttttcaggtggtttggctttgaatgacagcaagaactctgtctttaatggcttcattggtagcgtatgatga

SEQ ID NO: 606447 - DNA, 50 bp, Homo sapiens
cttttgccctagagcaattgaagggagatgcagttaaagacttgatgctt

SEQ ID NO: 606448 - DNA, 74 bp, Homo sapiens
gcagcggctccttcggagacatctatctcgatgacacctttgaggccctgtgcatcgagccgttttccagcccg

SEQ ID NO: 606449 - DNA, 75 bp, Homo sapiens
gttcgcggctctaacggggctttctacaaggtggactgcctggaaagtactctagaaaagtcactccaagcaaag

SEQ ID NO: 606450 - DNA, 75 bp, Homo sapiens
attcgtgtcggtcctagtcatcaggctcatccaaaatacttgagttgtattgcaatcagctgttttttcctagct

SEQ ID NO: 606451 - DNA, 90 bp, Homo sapiens
gagggtgagcggtcaagagacctccaggaagagcggctctcggctgtttgcatcgccgatagagctccagaacctgggtatcaacccagc

SEQ ID NO: 606452 - DNA, 100 bp, Homo sapiens
cattccagaaagatggcatcatttttgccctcaaaagaaatggcagtttccacctggatgtttgaggttgtgtagatgtggccggcacccttgagagtgg

SEQ ID NO: 606453 - DNA, 88 bp, Homo sapiens
gtttccctcggcgtgctactgtgcgctcgatccagcaccatggggaagcgggacaatcgggtggcttcagggatgacttcttaggggg

SEQ ID NO: 606454 - DNA, 50 bp, Homo sapiens
aagaaaatgccgaaggcactcagacagatatgtgtcacaaagatgtctac

SEQ ID NO: 606455 - DNA, 74 bp, Homo sapiens
gataatggaatgctttacctggaatggattggcagaaatctgaagctatcatggaacaattgaagtcttttcaa

SEQ ID NO: 606456 - DNA, 50 bp, Homo sapiens
acaccctggaagccaggaaatggtttcagtgttgactggtgggctcttgg

SEQ ID NO: 606457 - DNA, 100 bp, Homo sapiens
gaaccctccggcctcggtgctcgccgtcctgcggaaccgctggctgtcagacagcttcaaggagacggccatcctcttcctgcagcagcttttggacttc

SEQ ID NO: 606458 - DNA, 80 bp, Homo sapiens
tcaacgcgagcaagaatcagcaggatgacgggacgctaacaagtgctggtaaagacctacaagataattttctgacggcc

SEQ ID NO: 606459 - DNA, 100 bp, Homo sapiens
caaaaccatgtccaaaccaggaaatggacaggtctaccctgaactgcagatcaccaatgtggtagaagccaaccaaccagtgaccatccagaactggtgc

SEQ ID NO: 606460 - DNA, 83 bp, Homo sapiens
caggaccagctgcagctgctttggctaagtggaagacagctgaggaggtggccgccctgatccgatctctgcctgtggaggag

SEQ ID NO: 606461 - DNA, 98 bp, Homo sapiens
gcgcagcagcctggacgagaagcagaagcgagaggaggaggagaagaaagcggagttcgagcggcagcgaaaaatgttgcccgaagctcagcagagag

SEQ ID NO: 606462 - DNA, 78 bp, Homo sapiens
agcttggtttcgggatctcggtgctgcagacggcgagacctcctgcacaggcacgggcgagagcgggaagagcacgtt

SEQ ID NO: 606463 - DNA, 100 bp, Homo sapiens
ggaagatggcggatctggaggagcagttgtctgatgaagagaaggacacgcaccaggctagcgccttcgatgccttccggcccgagccgaccgccggcgc

SEQ ID NO: 606464 - DNA, 82 bp, Homo sapiens
cagcttcttgacagcagtaactggaaagaaaggctggcttgtatggaagagttccagaagtggagcggaggcggagggacaa

SEQ ID NO: 606465 - DNA, 100 bp, Homo sapiens
agaggactgaagcagatggcaactctgatcccaactctgttgttttccaatttcaccggctccgtggatgaccgtgggacctgccagtgctctgtttccc

SEQ ID NO: 606466 - DNA, 75 bp, Homo sapiens
ccgtcttatgggacttgaggccctcaagggctcaccagcatttcagcttcaggatggttgtgagtacgtgtttat

SEQ ID NO: 606467 - DNA, 80 bp, Homo sapiens
cagttgcactgtaaaaaacccagctgaagaccactttagaaactcaattaagatattgtacctgtggatgcatcttatga

SEQ ID NO: 606468 - DNA, 51 bp, Homo sapiens
gacactctctgctgcatttaagtattatggtcgaaagatgctgttcttcat

SEQ ID NO: 606469 - DNA, 75 bp, Homo sapiens
gtcaagaagatccacattgaggtagtggacaaagatccaagagttgaagattggctcctcatgtcctcgcctctg

SEQ ID NO: 606470 - DNA, 80 bp, Homo sapiens
atattcaggatgactgtggaagtaaactacgaactgggagttctgaagaatgggtaaagactttcgttactatttccagc

SEQ ID NO: 606471 - DNA, 74 bp, Homo sapiens
tatgacattgaacttactcatcacgtctctatagtgtcttctggtgttctggaggtctattacacaagcttgag

SEQ ID NO: 606472 - DNA, 100 bp, Homo sapiens
ctgagaacttacgcagatcagccgattccaaagcccaagaggagaaatggggtgaacttctccctagctgtggtggtcatctacctgatcctgctcaccg

SEQ ID NO: 606473 - DNA, 82 bp, Homo sapiens
atgggattgctgccacagtgccagcagctccagatgttcttcctcttgcttgccagagccattttgcagactctgatcacag

SEQ ID NO: 606474 - DNA, 74 bp, Homo sapiens
tggggttccgtggactcccacttccaagaggtggctcagaaattccaagactgccactctccgcccctacctga

SEQ ID NO: 606475 - DNA, 111 bp, Homo sapiens
caggaaacaagctcctacttccagaaaaagtgctcctgggactccaggataccagacaatgcagatcttcgtgaagactctgactggtaagaccatcaccctcgaggttga

SEQ ID NO: 606476 - DNA, 98 bp, Homo sapiens
ataatgaatgtcgaatgtgactgactagcagcttcattttgaagattatatctgtccaagatgcgagtctggttttatcgaggagcttccggaagaga

SEQ ID NO: 606477 - DNA, 83 bp, Homo sapiens
aatttggagtgtgcgtgcgcgccgagcgaataccgtagcagtaggcaggacagttccaattcaacaaaaacctctttaccctg

SEQ ID NO: 606478 - DNA, 100 bp, Homo sapiens
ggctggtatctggagcacgcagacccgcttttaaaggacgtggtgggtcctctggtgcgaaattccggatttccttgggtcttccggtaggagctgtaat

SEQ ID NO: 606479 - DNA, 90 bp, Homo sapiens
ggccggcggtccacggccggaatggcagcaagctcagatgaagttggagcccttgtttttgacattggatcctatactgtgagagctggt

SEQ ID NO: 606480 - DNA, 97 bp, Homo sapiens
gcagccttgggcctcgcgccggctatggccgtgccctggggctgagccctcagttccagggtctccctccactgctgtagtaacccgggtccggggc

SEQ ID NO: 606481 - DNA, 90 bp, Homo sapiens
tgcagtcactaagccagaatcctgaccttgctgcacaggtgaccaagaatatggcccaggtgaccaaagccctggacaaggccctgagca

SEQ ID NO: 606482 - DNA, 100 bp, Homo sapiens
gctaaagatgcagctatttacagtggacagaaactgaaggggtgaaagaaaacccaagcaactacatgcgattatagcagcatctgtctctataaagtcg

SEQ ID NO: 606483 - DNA, 131 bp, Homo sapiens
cggtagtggtgttacgtgccaccaaagtgacaaagggggcctttggtgacatgcgtttgcctgcaatgagatttcattctctacatttaaaggacatcctttctgagctgctgtgaataaatttggaatgg

SEQ ID NO: 606484 - DNA, 116 bp, Homo sapiens
ttctaaacctggtaaaatttcacggcaggatcctgttacatacatttcagaaacagaatttggactcatatcaagatgctctgaagaagaacaaccctttaggatagccactgcaa

SEQ ID NO: 606485 - DNA, 100 bp, Homo sapiens
ctttgttggaccctcgtcaatctctttcgaagccattcagtcctcaatctccttttccttggctacccgcataaacttggaggaggcagtggagagagca

SEQ ID NO: 606486 - DNA, 82 bp, Homo sapiens
ctttcaggagactagacctcgtaattacattctctcggccagcgcctccgcgacccctttgctgatgcaagtaagggtgatg

SEQ ID NO: 606487 - DNA, 100 bp, Homo sapiens
gaactcctgacactatttagtattcttgaaggagagcttgaagcaagggaccttgttatagaagccttaaaggttatctgggatacactaggaaacaagc

SEQ ID NO: 606488 - DNA, 74 bp, Homo sapiens
gatatgttccagttgcacatttcctgcaaggactccaaagtggtgagttttaaccgtgattggagataccacaa

SEQ ID NO: 606489 - DNA, 100 bp, Homo sapiens
gctcaggcagctccgtagcatgaggaagagtcaggggcacagagagatggagagagacctagttagatgttaaaaagtgctctgggtgatcggattaaag

SEQ ID NO: 606490 - DNA, 96 bp, Homo sapiens
gaccgctggggaaatttcccacttcctctcctgagaccaggaactcagcagagaaactttgtggcatggaagaggagatggttcgtgttacgcagt

SEQ ID NO: 606491 - DNA, 100 bp, Homo sapiens
caagggattgctggctacagcttcagaagaccgaagcgttcgtatctggaagctgcatcttcctcccgtgaggctggccgagctccacgctgatctgaag

SEQ ID NO: 606492 - DNA, 75 bp, Homo sapiens
tggttctggaatcctcagttcaagacatatgaagatccatgagaaggaccctaacagtgccacagccacagcccc

SEQ ID NO: 606493 - DNA, 98 bp, Homo sapiens
cgcagagttagagctttccagcgcggggatcacacctcagaagccgggctgcccctgatggggcctggcaatgactgagcaggcccagccccagagga

SEQ ID NO: 606494 - DNA, 100 bp, Homo sapiens
ctgctcctcacggacgaccaggacgaagtgctcggcggcatgatggtgactcgaacgaagaagatctttgtgggggggctgtcggtgaacaccacggtgg

SEQ ID NO: 606495 - DNA, 100 bp, Homo sapiens
tgggaaccttggtggaggggtggtgaccatcgaaaggagcaagagcaagatcaccgtgacatccgaggtgccacgctgatcaatgaacaatggctgctga

SEQ ID NO: 606496 - DNA, 82 bp, Homo sapiens
cgagagcgtgaccgagagcgcgaatatcgtcatcgttagaaggttctctcaagtagtgctgccagtagtaccatcacagcac

SEQ ID NO: 606497 - DNA, 51 bp, Homo sapiens
gtctgggcccttggcactccgctgacatcggcgacctccgggagcagttag

SEQ ID NO: 606498 - DNA, 90 bp, Homo sapiens
ctttgaaatgctaagattcttggataccacagtatcataaaattcctctaaatgcatgtttgccagctctgagcctgtgccaggattcca

SEQ ID NO: 606499 - DNA, 75 bp, Homo sapiens
gaacattgtattgagaacaatatagatttgcaggactgatcctttgaaatactccagccatgactaaaagagaag

SEQ ID NO: 606500 - DNA, 100 bp, Homo sapiens
aaagggccttcttcctcttcgacaaccttctcgtctactgcaagcggaaatccagtgagaaagatcagtctaaagaaaaggagaagaaagtgaaaaaaac

SEQ ID NO: 606501 - DNA, 75 bp, Homo sapiens
cgcattcaggagaagaaggatgaggcacattgcaagcaacccgtgccttgatggtggttggcatcctcctgggag

SEQ ID NO: 606502 - DNA, 75 bp, Homo sapiens
aagggccaagggacttgcttttatttcgcttcttggacacttaatgattgttggcaagaaatgtgctgctgatct

SEQ ID NO: 606503 - DNA, 74 bp, Homo sapiens
tacccaagtacatatgatttcagctgcaatggcagaaatggaatctagttcatcagactactataataaagaca

SEQ ID NO: 606504 - DNA, 82 bp, Homo sapiens
tgctggcagttttgccaggtgtttgttaccttggagttcatgatcaagtgttgcccacaccaaatgcttcatccagagtcat

SEQ ID NO: 606505 - DNA, 50 bp, Homo sapiens
gcaaacatgtatcaatggatcagacaatgattgaagctcacgttgatgtc

SEQ ID NO: 606506 - DNA, 90 bp, Homo sapiens
tcgggggtccagaaggggatgcagcctctgggaccatcagcaagaaggacattatcaacccggacaagaaggtgcctaccagtaacacag

SEQ ID NO: 606507 - DNA, 97 bp, Homo sapiens
tccagggaaaggatgacatatttttggacctgaaacagaaattctggaacacctatatgatatgagccccagactgacatcccgcctgacgtggata

SEQ ID NO: 606508 - DNA, 74 bp, Homo sapiens
gcagtaatagcgtgtttatctgacacggacgtggtgatggcacttctcaaatactggccaaagactcacagtcc

SEQ ID NO: 606509 - DNA, 100 bp, Homo sapiens
cagaacagttggatcttgctcagtctctgtcagaggaagatcccttgcactgtaatggcgttgactggcgtcagaagctggactctcagcgaggggctgt

SEQ ID NO: 606510 - DNA, 115 bp, Homo sapiens
ggaattaccttcactctgggaaaaggcactgaagttgcaatggctgccatccggaagaaactggtgattgttggtgatggagcctgtggaaagacatgcttgctcatagtcttca

SEQ ID NO: 606511 - DNA, 75 bp, Homo sapiens
ctacatcccatctcaatcagaattactagattttctctcaaactacgaggctcaaactgtccaggttgctgaagt

SEQ ID NO: 606512 - DNA, 98 bp, Homo sapiens
taatatgcgtgtggaagactacgaaccttacccggatgatggcatgggattttaccaaatgttgcaagaactctggagttcttatggtagtaaaatgc

SEQ ID NO: 606513 - DNA, 100 bp, Homo sapiens
agccctttctcctcggcactgtattctttacctgcttcccaatcccactgatgaggatcagcccatgtgatgtaaattggagtcaaccaggtgaaaagaa

SEQ ID NO: 606514 - DNA, 100 bp, Homo sapiens
tattatgagggcagtgcagaccaggccagttttacaaatggcaggatggtggctggcaaagtgttgatggcaaagcaagaaattgttgaatgtgtagcct

SEQ ID NO: 606515 - DNA, 80 bp, Homo sapiens
ctggggctgcgacgagcaagcagcgggtcctggacgaggaagagtatatcgagatcaggatcctcatgaccagccaaaga

SEQ ID NO: 606516 - DNA, 75 bp, Homo sapiens
aagcctattgagttaacacctctgccgctgctaaaagttggggaatggcggtcaatgtgtattctacctcgataa

SEQ ID NO: 606517 - DNA, 100 bp, Homo sapiens
ctagtagccacggtgtggcagctgctctgaaccaggacctggacccggacccaaagtgccatgtctttaatgggcaccaccacgaggcgatttgtgggcc

SEQ ID NO: 606518 - DNA, 90 bp, Homo sapiens
ggggggaccccggtacggacctgtgcaggtgaggacaggccagctgataccccaatgtccttctttgactttgtggttgatcctcattct

SEQ ID NO: 606519 - DNA, 92 bp, Homo sapiens
ggctgcgggaaatcgggctgaagcgactgagtccgcgatggagttggaatcgaagcctcttaaaatggcagatgacttggacttcgagacag

SEQ ID NO: 606520 - DNA, 82 bp, Homo sapiens
cgcgagtgggagcaccaggatctcgggctcggaacgagactgcacggacatggatttgattgacatactttggaggcaagat

SEQ ID NO: 606521 - DNA, 90 bp, Homo sapiens
gatttcttcagccagaggtctcaggtagagttggctttgtgggacacagctgggcaggaagattatgatcgcctgaggcccctctcctac

SEQ ID NO: 606522 - DNA, 100 bp, Homo sapiens
agaatatatcacccataatcggaatgtgatcacagagcctatttacccagaagtagtccatatggcagtcatggatcaggtaatgcagtttgttgagcca

SEQ ID NO: 606523 - DNA, 100 bp, Homo sapiens
cttcggagggtagcttgcacctgtcccaactgtaaagaaggtggtggaaggaaatctactttcttcaatgtgttaaccaatagtcaggcttcagcagaaa

SEQ ID NO: 606524 - DNA, 51 bp, Homo sapiens
gaacttgccgcgtcgaggactgtcggcgccgcgcggtgaggttctctagtc

SEQ ID NO: 606525 - DNA, 75 bp, Homo sapiens
cagcatctttgtctagccccagtgcaggatgccctgcacagcgtaaagaagagacttttaagaaatacagagcgg

SEQ ID NO: 606526 - DNA, 98 bp, Homo sapiens
gccagcaccacctgaggatccagaaaccgccccagcgatggaagaggatcaggagctggagaggcaaggcctttggctgtgtgggcggctacattgcc

SEQ ID NO: 606527 - DNA, 50 bp, Homo sapiens
tccattcgaagtgttggcagtcacaggcttgttacagcttatcagatgct

SEQ ID NO: 606528 - DNA, 97 bp, Homo sapiens
ccccactcacaatctccttgttcttcgtgggtgtgctgttgggctccttcatttcagggcagctgtcagacaggtggcagcacaccctgggcccccc

SEQ ID NO: 606529 - DNA, 101 bp, Homo sapiens
gatatgccaccagcatttattaagttgcaaaagcttctcatttcagagagatgccaggatcctaagtgcctgccaaacttaccaattctaaggaataagtg

SEQ ID NO: 606530 - DNA, 83 bp, Homo sapiens
cgccacggccgtctctggagagcagcagggacctcaggatggaaaccagcagcctgcaccgcccgagaaggtcggctgggtcc

SEQ ID NO: 606531 - DNA, 100 bp, Homo sapiens
ttcaatgagtaaacatattcctttgatcatggccttgccaggttggtgacagtatattgtgagcatggtcataaagctgccaaaatcaaccccctcttca

SEQ ID NO: 606532 - DNA, 99 bp, Homo sapiens
ggagctgcggtcgcagaggccgacggagccggagtcgcggacgccgcggggtctccgggacaggtggtggtgaagtttattaagaaggagaaggtcttg

SEQ ID NO: 606533 - DNA, 83 bp, Homo sapiens
gaaattaaagatgcatgctgatggcgataagtcattaccacaggttcgagaacttgtcttggacaattgcaaatcaaatgatg

SEQ ID NO: 606534 - DNA, 74 bp, Homo sapiens
agaaattcatggaagatatgatgccaaaggtacctactaaagatgatgatgaattctgcaacatttggcagtcc

SEQ ID NO: 606535 - DNA, 100 bp, Homo sapiens
agtcctcgacgaggccttccagcgctatcgtgacctgcttttcggttccgggtcttggccccgtccttacctcacagggtgcaacaccggaggatttcag

SEQ ID NO: 606536 - DNA, 83 bp, Homo sapiens
gtttttcggatcatgtctggtggctccgcggattataacagagagaagaagaaggaggttcctgctgtgccagaaacccttaa

SEQ ID NO: 606537 - DNA, 100 bp, Homo sapiens
atgggagcagagaatctgtggaattattgctggaagactggcatgtgtgtcacggggtcccagccctgtcagccttggaaatcaggataccttacctgtg

SEQ ID NO: 606538 - DNA, 75 bp, Homo sapiens
tgtggcaaatgtaaaaagaagaattgcacttacacacagctgccactgcagagccccgccatggaagacacgccg

SEQ ID NO: 606539 - DNA, 75 bp, Homo sapiens
aatatttctccctgtcttactcagttacataggaggtaggaaaagtaattggaattgctattatgaaacactttg

SEQ ID NO: 606540 - DNA, 88 bp, Homo sapiens
ggagccctcgcgacgcgcccggcccggagcccccagcgcagcggccgcggaagaggatcacctagcccgggtagaagaggcaatcacc

SEQ ID NO: 606541 - DNA, 98 bp, Homo sapiens
gtggacgacgtgagcgaggaaggtattgatgaagatgaccctactgctgatgataccagtgctgctgtaactgaagaaatgccaccccttgaaggaga

SEQ ID NO: 606542 - DNA, 100 bp, Homo sapiens
aacaatcgcttcaatgatgggaaggtggatcccgccgggaggtactttgctggtggcgacagacaaagttgcagaaaagctgagctctactctctcatgg

SEQ ID NO: 606543 - DNA, 98 bp, Homo sapiens
gggagcgacgccgacagcgaagctgagcgtaaagctgagtcagtgctgattctctcaaatagagcttgaaggataaatcttcatttttgtttcaacaa

SEQ ID NO: 606544 - DNA, 103 bp, Homo sapiens
gcgtccccggcgcgaagaggctggactcggattcgttgcctgaggaactgtggctgcaccatctgtcttcatcttcccgccatctgatgagcagttgaaatct

SEQ ID NO: 606545 - DNA, 75 bp, Homo sapiens
tcagattgcaaacagtggttctgctggattgataaacccagctgctacagttgaacaaggccttccaggccgagg

SEQ ID NO: 606546 - DNA, 83 bp, Homo sapiens
ccaggccgggcacctccgagcgcaaggacagcgcgaggtccgcgcagcccagcgcagccatacctgcctagagctggaacgtt

SEQ ID NO: 606547 - DNA, 100 bp, Homo sapiens
cctcaccagccctcgcctcccgagtcactgcagccaacccttcagcaagattcttacctctgaagacaatgttaggaccaagatatgatagtcaagttgc

SEQ ID NO: 606548 - DNA, 101 bp, Homo sapiens
tccatattgatcgcctggactgtgcagtatttccagtctgtctcagctgttcgctgatgtggtcctgctctgtcccagtctagcagctttagtgtatggaa

SEQ ID NO: 606549 - DNA, 75 bp, Homo sapiens
gtggggggattctcgacctgctaacagaactggaccttttcgaatgccacccagaggatgtttgaaattgactat

SEQ ID NO: 606550 - DNA, 99 bp, Homo sapiens
ggggtgtagttagtgcacgttctgtgaagcttttggatcgtatccacaatcctggaggctaagaagtcccgcttgccaatcctaataaaaccatcccgg

SEQ ID NO: 606551 - DNA, 100 bp, Homo sapiens
aggcagctgatgatcctgaaaatggagaaagagaatctcatacacctgtctctattcaggaagagatagggtatatttcagaaatcgctgggtaaagact

SEQ ID NO: 606552 - DNA, 75 bp, Homo sapiens
ccgccttgttggtctgaaattcatgcaagttgtggggctagacaagaaggaaaaaaatcactgtcctcatggaag

SEQ ID NO: 606553 - DNA, 82 bp, Homo sapiens
gttttttcatattacatctacaagaggggacaagtacctttatgaaccagtgtatcccaaggagaaacttattcgtcttcag

SEQ ID NO: 606554 - DNA, 82 bp, Homo sapiens
agttttgcagatcttcaacaagaggacccaggagaaattcgccctcaaaatgaagatctccttcaacgacaaaagcctgcag

SEQ ID NO: 606555 - DNA, 100 bp, Homo sapiens
ccctcccctcaatggggcccggattgctgctgccattctgaacaccccagatttgcgaaaacaatgctgagctgcccctcctggacctgatgaagctgta

SEQ ID NO: 606556 - DNA, 83 bp, Homo sapiens
atccctccattcctggcctatggcgagaaaggctatgtgcttaaacagccttcccagcccacagcagcaggggtacagcagct

SEQ ID NO: 606557 - DNA, 100 bp, Homo sapiens
caggatcagtaaagaaggaaaaagcagtaaagccagaggaagtctgaaggaatggctcccgtgtcttcatctacggtcagttctgtaacgaaaacttctg

SEQ ID NO: 606558 - DNA, 100 bp, Homo sapiens
gcgagtgcctaggagcccctccccaccttttccggggaagccctggtcggagcgagccggttataggttgagtcctcaaacattaactactattgttaaa

SEQ ID NO: 606559 - DNA, 98 bp, Homo sapiens
ggccgccttttcagaagcggctgcgcacggactgctggagatggtggagtccgtcacatgtcagtgaaaaaaccagtgaatcgccttccaaaccagga

SEQ ID NO: 606560 - DNA, 51 bp, Homo sapiens
cgagaagaagcggatccgcaaggggctcaagccagaacggctcagtctggg

SEQ ID NO: 606561 - DNA, 106 bp, Homo sapiens
gcccgttgcgctgcagacccgcttggccaagagaggcatcctcaaacatctggagcctggtactgggcctaatcgctacgtgcctctttggctatgatgcctatgt

SEQ ID NO: 606562 - DNA, 85 bp, Homo sapiens
tggattacaggagatgagagtattgtaggccttatgaaggacattgtagaagagaagctgaatttggacgacagccagtgggagg

SEQ ID NO: 606563 - DNA, 100 bp, Homo sapiens
actcagtctctaaaaagctaagggttatatcctgtgttgtgacctcatggtttaagtgggaataaagatgagtataagcagtgatgaggtcaacttcttg

SEQ ID NO: 606564 - DNA, 100 bp, Homo sapiens
agatgtgggcaaagcgccgatgagctgttctggagcacggggcccagcacagggtgagaggtatcatccccatgatctatgccgttgatcttctttagag

SEQ ID NO: 606565 - DNA, 80 bp, Homo sapiens
agggtctttaggacacagattcttaaaagtgcaggagaaaatatggagaagtcttgtgcaagcaaggaagaagtcaaaga

SEQ ID NO: 606566 - DNA, 75 bp, Homo sapiens
gtcgatcaaaaattgtgcttctggtagatgcttcacagcaaactggtgttggtgaaaatttgactgacccatctg

SEQ ID NO: 606567 - DNA, 75 bp, Homo sapiens
agaagaaattagaagctgcagaagaaagacgcaagctgaagaaatcaggggagaaacccctgcttggtggaagcc

SEQ ID NO: 606568 - DNA, 83 bp, Homo sapiens
cgcgcgcagggcctgcagcgggagctggacggcgagcgcgagcggcgcgagaaaatgccgacaaaaggatcaaggtggcgaag

SEQ ID NO: 606569 - DNA, 74 bp, Homo sapiens
gataccgaagcgggctgtgtgccccttctccacccagagtcgtgccaagcggacctcgtgaaggacaacggcca

SEQ ID NO: 606570 - DNA, 80 bp, Homo sapiens
agatggagatgggcagacggattcatttagagctgcggaacaggacgccctctgatgccctgggaggagcggggacactg

SEQ ID NO: 606571 - DNA, 97 bp, Homo sapiens
acattacagaccggtggatcctgtccttcatgcagtctctcattggcttctttgagactgaaatggcagccttgatgacttacaagccctcaagggg

SEQ ID NO: 606572 - DNA, 90 bp, Homo sapiens
actgccaagtgggacaactttctggcttttgaaaggctccttcttcagcttacaagagcagtgattcccaggctttctcagcaatgtacc

SEQ ID NO: 606573 - DNA, 82 bp, Homo sapiens
cccgcgggtctacttcctcaaaggctccaggaacactcggaggtgtctggcttccttctggagtgtgacagctcggtgcagg

SEQ ID NO: 606574 - DNA, 75 bp, Homo sapiens
gtgaacccaatgatcaatggaattgtcaagtacagttgctgctgacacgccgaccgcctgctgcttcagctacac

SEQ ID NO: 606575 - DNA, 100 bp, Homo sapiens
cgtcactagccgcgggaccatcaaagtcatcgacggcacctcgggggccacactgcaggcctccgcgctcagtgttaccttagagcagttctccctagca

SEQ ID NO: 606576 - DNA, 89 bp, Homo sapiens
tcagtgaagagtctggagtttatctggagtgaggtggccggttcttggtgggatctgagcaggtatcgtacttgttgccattaatcctt

SEQ ID NO: 606577 - DNA, 75 bp, Homo sapiens
gccaggaggccgaacgcggactcgccacccgggggaagacaggaagacccccagcgaatcaaatagcccctcttc

SEQ ID NO: 606578 - DNA, 100 bp, Homo sapiens
agatgagcctcaggaacaagcggagggctccctgactgtgtacgtgatatctgaacactcctcacttcttccccagtactcgccaggtggtggcagctac

SEQ ID NO: 606579 - DNA, 50 bp, Homo sapiens
ctggacaagcgaggaagtttctttaagcctcgtcacgtgttcaatatgct

SEQ ID NO: 606580 - DNA, 75 bp, Homo sapiens
gcttcaggaggcccaagacaccacagaagccctccgagcccaggccgctacctgtctgaggaacccgagccctac

SEQ ID NO: 606581 - DNA, 74 bp, Homo sapiens
ggactgcatccgagccctgatgctagcagggtgtcaaattgagaaccaggtagatccccaccacctacagtaaa

SEQ ID NO: 606582 - DNA, 75 bp, Homo sapiens
gggctgggagccacatctcctccaatcgagcgtatgattttctgtacgctattgtggacgatgaaaggctctctg

SEQ ID NO: 606583 - DNA, 74 bp, Homo sapiens
cctgcattgtagcaaactactatgcttctgcaggtcttctaaaagtttctgagcataccataaagtctccaaag

SEQ ID NO: 606584 - DNA, 74 bp, Homo sapiens
gagcgtcccggccttcatcgacatcagtgaagaagatcagtcttactactttgaccgcgatgatgtggctttga

SEQ ID NO: 606585 - DNA, 89 bp, Homo sapiens
ccgcgtgcgccttgctcgcccgcagccccgagaccgcaggtcacggagctgctggacgtctccatggagctgggctgtttcctggctgg

SEQ ID NO: 606586 - DNA, 80 bp, Homo sapiens
tgcaggcgatcataaagaaaatcgacttggactcagatggctttctcactgaaaggaaatcctcattgacgattcaattt

SEQ ID NO: 606587 - DNA, 100 bp, Homo sapiens
actgtggagaacaaatccaagattagcacaggttcatctcagaagaagttgttggcacctgatatgtttacagaatctgatgatatgtttgctgcgtatt

SEQ ID NO: 606588 - DNA, 83 bp, Homo sapiens
taaagatgcgcctctgcgatttgcaggtttggtgcacctcgatttggaggaagtagggcagggcccttatctggaaagaagtt

SEQ ID NO: 606589 - DNA, 100 bp, Homo sapiens
ggaggcgggagcggagacctcgctgcgctcatggcgtcgcccggatctggcaccactccttctacaatgagctgcgtgtagcacctgaagagcaccccac

SEQ ID NO: 606590 - DNA, 75 bp, Homo sapiens
ctctgttagtgcgcctctaagatggcgacgcctttggcggtaaattcgggtgccgtgagcgatgtggagatgcag

SEQ ID NO: 606591 - DNA, 78 bp, Homo sapiens
aaaactacagccaccacacacaaggtttcctatcctgggagcaggagagtgtgcctatttgaatgacaaaggtgccag

SEQ ID NO: 606592 - DNA, 74 bp, Homo sapiens
ccgagagtttgaaagtgcgattgtggaagctgctcggacccgggaagccctaatcaagatcctggatgacctca

SEQ ID NO: 606593 - DNA, 48 bp, Homo sapiens
agaaaaacctgaaagatgtctcagaaagaccacagcaagattctttca

SEQ ID NO: 606594 - DNA, 100 bp, Homo sapiens
gtgctgctggagcggctgcggcaccccaacgtgctgcaggtgctgaaggtcgccatcctggctgagaagtacgcggtggactacacctggtatgtggata

SEQ ID NO: 606595 - DNA, 98 bp, Homo sapiens
ttcagtgccactcacataagaagtgcccgccttatttagtgtctctgacaaaaccggccttgtggaatttgcaagaaacctgaccgctcttggtttga

SEQ ID NO: 606596 - DNA, 100 bp, Homo sapiens
gagaggcttgcaggaccacagtgaccaggtgactccatgcacgggccaagtattgaatttgaccgggattgtgactattttgcgattgctggagttacaa

SEQ ID NO: 606597 - DNA, 50 bp, Homo sapiens
tgaccgtcttaacaaagaccggcacagttggtggatctgaaatctgaact

SEQ ID NO: 606598 - DNA, 100 bp, Homo sapiens
atggcaataatttgcttgatggcttagaactctccacagccatcactcatgtccataaggagatggagtcccctgtttccacaccagcagtgctgccaat

SEQ ID NO: 606599 - DNA, 75 bp, Homo sapiens
gggcttctgcagagcagagcttcagaatccttattgcaaaaatgtacaactttataaggagattgtctatttaca

SEQ ID NO: 606600 - DNA, 75 bp, Homo sapiens
atatacatacttcttttctgcctcagaagaagtggttcctgaggacacatgacggaagtgtgtatttttgggcca

SEQ ID NO: 606601 - DNA, 76 bp, Homo sapiens
gggatgatgaagaagacctgctggatggtttttcttcccccagtccctcagctgctgctgctgctcaggaggtcag

SEQ ID NO: 606602 - DNA, 73 bp, Homo sapiens
aactcttagataaaatgacgacgtccttctggaagaggcgaaactggtatggcccatctcctgtacgcttgga

SEQ ID NO: 606603 - DNA, 100 bp, Homo sapiens
tttgacgtgcggcccggcggcgtcgtgcattccttctcccataacgtgggcccggggttctttatagctccaagctctacagattcttcaaatatattga

SEQ ID NO: 606604 - DNA, 144 bp, Homo sapiens
tccggacgctgcttaggaaccggggactcaggagtgcccgcgccctgagcgctcagctccagaggcgagtgtgaacatggctacgcctcttcattcccgtccatgccgagcccccgactgcagcattcaaagcccccacggagg

SEQ ID NO: 606605 - DNA, 100 bp, Homo sapiens
atcagtgacagcaagtccattcagaagtcctggtgcttgatggtcgaggccatctcctgggccgcctggcggccatcgtggctaaacaggtactgctggg

SEQ ID NO: 606606 - DNA, 110 bp, Homo sapiens
gaatggacatggtggtggtcgaagtcagcagacactagacagccataggaaaaggatacagagtagagtttcatgaacctgaaacttggtggaaatttgatcctgaagaa

SEQ ID NO: 606607 - DNA, 83 bp, Homo sapiens
gcagttgggcacgggctgagtccgcctgccggcagttggttgaatctggcgatgtggaacccatggatatggagggctgacta

SEQ ID NO: 606608 - DNA, 98 bp, Homo sapiens
caggacctgtctgacgatagtccaaaaactgaagaagatggtggataagcccacccaggtctctctgaagaggctatcatggagctgaacctgccgac

SEQ ID NO: 606609 - DNA, 75 bp, Homo sapiens
tgttccaccaactagtcccgttgcaggtgaaatgcaaagactgtgaggagaggaatctatggatttcctgaaata

SEQ ID NO: 606610 - DNA, 121 bp, Homo sapiens
cgcttgaaaagactgggcttgtccttgctggtgcatgcgtcgtcggcctctgggcagcagacaatgcagatcttcgtgaagactctgactggtaagaccatcaccctcgaggttgagccca

SEQ ID NO: 606611 - DNA, 75 bp, Homo sapiens
agatggacgaggtcctgtacagcatcgccgagaaggtcgctctggtgcagtggacagagagtgtgggcctcacgc

SEQ ID NO: 606612 - DNA, 75 bp, Homo sapiens
cctgggctcaagcgatctacccaccttaccctcccaaagtggtgagattacagaaggtgcttcctggaggggcct

SEQ ID NO: 606613 - DNA, 83 bp, Homo sapiens
gcgcccgctggccgggctggctgcggccgccctgggccgggccccaccggacggtaatcattaccaaatgaggaggaaaggac

SEQ ID NO: 606614 - DNA, 90 bp, Homo sapiens
cccacaccttataaaaagcagcttaatgaggaactccagcggcgctcttcagcattagccattgatgcaccatccaacctgcgtttcctg

SEQ ID NO: 606615 - DNA, 100 bp, Homo sapiens
aagcacctgcgcatcgtcatcggtgacagagctgaatgaacctctctccaatgaagatcgaaatctcctctctgtggcctacaagaatgtggttggtgcc

SEQ ID NO: 606616 - DNA, 98 bp, Homo sapiens
ccagtcgctacgggagcagccagattggcccgccacaataaactgttgcagcagatgctcaaaccaggatcggatccagatgaaggagatgaagcctt

SEQ ID NO: 606617 - DNA, 83 bp, Homo sapiens
cagaatgcactggtcagttaatacaagaactgcggagagctgcatgcagtcgaaccagaatggaaattctgccaaaaccttgg

SEQ ID NO: 606618 - DNA, 98 bp, Homo sapiens
cgcttcgtgcaccggggcggtccgttgccaaagccagaagtgtcggaggaaggcttccagattccagctacaataacagaacgatataaagtcggaag

SEQ ID NO: 606619 - DNA, 75 bp, Homo sapiens
gtcacccaatggtgggcaagtggctggagaaacaagaacaggcttctccagggaaagtgaccgaggcagtgaaag

SEQ ID NO: 606620 - DNA, 86 bp, Homo sapiens
atttcggaccaggaccaggaagtaactttagaggaggatctgttggagtcattcgttgcccagtttgcagccaagaatgtgcagag

SEQ ID NO: 606621 - DNA, 100 bp, Homo sapiens
ctttcactatccaggcaattgagccacctgagctgaagattcccttgagaacaagtactgtcctgtggtttcatggcctttcttccatttgtggttcttg

SEQ ID NO: 606622 - DNA, 102 bp, Homo sapiens
gtctatggatctgctctaaaccttatagcctgcttatgggggaagacaggggcaagtgtccgagtggtgaatcagctacttacagagatggatggtctggaa

SEQ ID NO: 606623 - DNA, 96 bp, Homo sapiens
gcaacttcgcggaggcgctggcggcccacaagtacctgctggtggagttctctgggaacttctggggtaggacgttgtctgctatctccagttcca

SEQ ID NO: 606624 - DNA, 82 bp, Homo sapiens
catgcgtcgtcggcctctgggcagcaggactatcggacaaaacctttctgctgcagcgcttgtccattttcctcaaaattct

SEQ ID NO: 606625 - DNA, 50 bp, Homo sapiens
ccaggctgcaagaacagtgctggggtcacagagatgcggcggaccctgac

SEQ ID NO: 606626 - DNA, 97 bp, Homo sapiens
tgctgtcaatggtgttgtccaatcagtcgcatcgaatacattcattcaaagaacttcatccaccgggatgtgaagccagacaacttcctcatgggcc

SEQ ID NO: 606627 - DNA, 83 bp, Homo sapiens
ccagagctggacaccctcctggactcgctggaattgaatgatctggcacgggaccctccagcacagtgttcagcaggtcctgt

SEQ ID NO: 606628 - DNA, 95 bp, Homo sapiens
gaaagcaccatgacgtccatccatttcgtggttcacccgctgccgggcaccgaggaccagctcaatgacaggagttgtaagacgttcatcgccgt

SEQ ID NO: 606629 - DNA, 50 bp, Homo sapiens
gtcaaggacctcgagaatggccagcgccagggacaccaggaattcggggg

SEQ ID NO: 606630 - DNA, 97 bp, Homo sapiens
agacttcacagtttctgctctggtaaaataccatgaagattttgaaaaaacaaaggggagaggctttactcccgtcgtggacgatcctgtgacagag

SEQ ID NO: 606631 - DNA, 50 bp, Homo sapiens
cgcgcctctcccggaccctgcaggatcggacagctggcttttaaaggaat

SEQ ID NO: 606632 - DNA, 75 bp, Homo sapiens
gcccgggcgggtcccggggtgcgagcagcgcacttccgtctctgctttctatccgtcaagatgataaagtcgtgt

SEQ ID NO: 606633 - DNA, 49 bp, Homo sapiens
ccatggcctgctcagcctcagcggtgacttaagagattaaaattaattt

SEQ ID NO: 606634 - DNA, 100 bp, Homo sapiens
tatgcattaaagaattatgggttctacttattcatcttctagaccacagaagtaaatggtttgtctcggaagcttcaaccactcccagaagacgtccttc

SEQ ID NO: 606635 - DNA, 100 bp, Homo sapiens
aaaatgggaagttactatatcaaccgtacatttttctttgatgtgcacccgcccctgggaaaggaacagattatggcctttgcaagcaaatgagtactcc

SEQ ID NO: 606636 - DNA, 74 bp, Homo sapiens
ttcaaccaaacttggactgcaaacagtacataccgagcatcaaatattaaggcacccggagaacagacagtacc

SEQ ID NO: 606637 - DNA, 97 bp, Homo sapiens
aaagcaatgagtgggctaaagtgaaacattcagcatccctgtctggtatgccttctcggttttgctgttactgctcagtgtagtcacaccttgaata

SEQ ID NO: 606638 - DNA, 100 bp, Homo sapiens
gtggcatgggcatgtaaggtgcgcggagggactgcaccttctccatcaggtgcagaaggccgcagctatgatgagaaggtggatgtgttctcctttggga

SEQ ID NO: 606639 - DNA, 78 bp, Homo sapiens
tctcatctcgctcggctgcgggaaatcgggctgaagcgactgagtccgcgatggaggatgatcacggacgtgcagctc

SEQ ID NO: 606640 - DNA, 100 bp, Homo sapiens
gcaatggctgcgggcgcagcaacgagcggagttcctgcgagctagagagtatgtattcccgtgtgccagagtgccaggtcaccacatactattatgttgg

SEQ ID NO: 606641 - DNA, 100 bp, Homo sapiens
cctcagccgccgaggagccatcagcttcagctccagctccgctctcttcggctgccccaatccccggcagctctctcagtactatactggcaattgctgg

SEQ ID NO: 606642 - DNA, 97 bp, Homo sapiens
gaaagttatatatttgagtcaaagggtgatggaggaggaggggaacacccagccccagaaacagcatgcatatgcgctagaacttctatttgatcag

SEQ ID NO: 606643 - DNA, 92 bp, Homo sapiens
cgagtcggtgatcgagaagcactcccacagccgcatcgagtacatgatcaaggtgagaagccctaccactgcaactgggacggctgcggctg

SEQ ID NO: 606644 - DNA, 100 bp, Homo sapiens
tgaaggaaatggcacaagcgcagtggttactccacaggatccgctgaacataggatgttgccacaaaatctacctcgtgtatttttctctttcactcatg

SEQ ID NO: 606645 - DNA, 78 bp, Homo sapiens
agaagaccaagtagcatccaagattggttttcacagaattccatggactttaactgctgaaccaatgatgcactgatt

SEQ ID NO: 606646 - DNA, 75 bp, Homo sapiens
cgggatccgaggcaagcgttggttctgtgcgcctcaggtccgcgggagagctgtggggcttggtgagtgtttcgt

SEQ ID NO: 606647 - DNA, 51 bp, Homo sapiens
atttatcactcatcacagtaacttacggtatgatctcgtgaaaccttgaga

SEQ ID NO: 606648 - DNA, 96 bp, Homo sapiens
gaatattattagcacaagagcaccatactttgagggttttaaaatcaaagatgggaaaatcggagaaaattgcccttccccatggccagcttgttc

SEQ ID NO: 606649 - DNA, 100 bp, Homo sapiens
agaggcacaacatgaacgtgagctccagaagctagagcagagagtgtctctgcgcagagcacaccttgagcagaagaggaagaatacaagcgattgagtg

SEQ ID NO: 606650 - DNA, 108 bp, Homo sapiens
actgcactccatactgaggaggaaaattataatgtggttgcaccaggctgtctttcacaatccagttaccttatcccatatcacacaactggtcctcagccataacaa

SEQ ID NO: 606651 - DNA, 75 bp, Homo sapiens
cggcagccgagcccgcccgcgcgccggtaaagatgagccttccagctacatttgcacaacatgcaagcagccctt

SEQ ID NO: 606652 - DNA, 100 bp, Homo sapiens
ggaagtgcccgcgcagccggtttccggtgcaggtggggaaaatggcggtgtctacagtgttctcgacttcgtcgctggaatgaatctgaagtctgctgca

SEQ ID NO: 606653 - DNA, 100 bp, Homo sapiens
gagaaaatgatggggaaacaagagctttgggtctctcattcatcacttttatctgctatgtggcgtcctcagcatctgccttcctcacagcgcctctgct

SEQ ID NO: 606654 - DNA, 75 bp, Homo sapiens
aaatttccaaggtgtgccgaaggctatgcactatacgcccagatggagatcttataacaatttttgatagttctg

SEQ ID NO: 606655 - DNA, 83 bp, Homo sapiens
ccaagatcttggcaaagcttctccctcagtatttagaccagggccgcgatgggcctcttggaacattggtgtgttcatctgca

SEQ ID NO: 606656 - DNA, 73 bp, Homo sapiens
cgtaacctgcgggagaggtttggaattgatgatcaagatttccaggtatatttggcccgaaaggaaggatcat

SEQ ID NO: 606657 - DNA, 100 bp, Homo sapiens
caccatccctaaccggctggctgcagacccggatgtgcctagcaccaagctgaatgctgagagggatcctgaggaaagagtctgtccttgccctttggaa

SEQ ID NO: 606658 - DNA, 74 bp, Homo sapiens
ctgagaatagtggttcttaactctattgagaggatccagaatccagatctctggaatagctaccaggcaaagaa

SEQ ID NO: 606659 - DNA, 75 bp, Homo sapiens
gcgtcaacagcagcaccatggcttggtgatccagctatttttcctgccgtaattgtggaacatgttcctggtgct

SEQ ID NO: 606660 - DNA, 75 bp, Homo sapiens
ctgacagccctgtgtgacaccaagataagtaacacatcaaggagcacgtgaaacagctagagaaagcggtttcag

SEQ ID NO: 606661 - DNA, 89 bp, Homo sapiens
gcgggccgcactcgcctgcgccccgcacccctccgagcagcccggggatccagcacgcagcctccagggtcgtatagacctccccctcc

SEQ ID NO: 606662 - DNA, 98 bp, Homo sapiens
aggaaaggagcaagccaagcttccatgctcccgagcccaaagcccactacgagcctgctgaccgagcgcgagaggatagtaatgatgacactgaagat

SEQ ID NO: 606663 - DNA, 131 bp, Homo sapiens
agaaatccgacggaccaaattatcagcactttttattaatttgatcagtgatccttcacgttggtacatagtggaatgtcatgggatcacccttcttccccagttcttgggcatgtaccggcttaatgttg

SEQ ID NO: 606664 - DNA, 100 bp, Homo sapiens
caaatttgcttcagtttttgtgtataagagagaaaatgaagacaaggttaataaagctgccaagccccatctgctttgatatgattgaagaagcatacat

SEQ ID NO: 606665 - DNA, 75 bp, Homo sapiens
ttggccttggagcgaggctatcacaagctgcaccagcttctaaccgaaaaaagatgctatggacgtatggtgcaa

SEQ ID NO: 606666 - DNA, 100 bp, Homo sapiens
ttccacccgacatattgcctagcaagaaactatattcagtctttgactcagatgccgaagatgaactttgcgaatgtatttattggtgccaatcccctgg

SEQ ID NO: 606667 - DNA, 126 bp, Homo sapiens
ccggttcttgggggactatgtggtggacttggacacgtcccagctctctctgggcatctggaaaggctactgcagcactggggtgtcagttgttggtccgacccagaacgcttcagttctgctctg

SEQ ID NO: 606668 - DNA, 99 bp, Homo sapiens
acacctggaccagaccccaggaaaggtatgactcttatgagtcctgcgactcgagggccgtcctgagtgagcgcgacctgtaccggtcaggctatgact

SEQ ID NO: 606669 - DNA, 75 bp, Homo sapiens
cgggctgaagcgactgagtccgcgatggagccctgtatgatgagattcgtcagtttcgcaaggcctgtggggagg

SEQ ID NO: 606670 - DNA, 82 bp, Homo sapiens
tcaccatcacaccacctgaccaagagctccaggcccggattcgaacttacaatcagcattacaacaacctgctacggggtgc

SEQ ID NO: 606671 - DNA, 95 bp, Homo sapiens
tgccttgtgctcacagcttttgtcagaagtgtattgataaatgcaccaaggatgacattgatcttgatgccttggctgcagaaatagaaggagct

SEQ ID NO: 606672 - DNA, 80 bp, Homo sapiens
acaactgcgtgcaggaactgaagctcttagaaggtggatgcgtagactcgaccaaccaaagcctggcgctactactcatg

SEQ ID NO: 606673 - DNA, 100 bp, Homo sapiens
caggatgcctttgccgccgccaagctcctggccctggccctgatcatcctgctgggcttcgtccagatcgggaaggggtgtgatcctggtctatgacatt

SEQ ID NO: 606674 - DNA, 83 bp, Homo sapiens
ggcctgaccaacccgaaaacattgctagtttcactgttacatgccttgaagtgatgaggaggtttctgttactatatgctaca

SEQ ID NO: 606675 - DNA, 75 bp, Homo sapiens
ctttgctttaaaacagtattacttgcggtaaaacctgtttcccagcctggtggcatcctgtggaaagttggtcag

SEQ ID NO: 606676 - DNA, 75 bp, Homo sapiens
gtcttccatgaggactgccacatcccacctgtggaaagtgagaagattatcctgatgcccttatcaccaactact

SEQ ID NO: 606677 - DNA, 110 bp, Homo sapiens
aaatatcaacagactgaaaatatgttttcagaggcatagaatcttcaggaaaatactggagttcctgagatctcaagaagctaaatgcaactagttcatctgaaggcagc

SEQ ID NO: 606678 - DNA, 82 bp, Homo sapiens
gtggtcacagaagtctctaccaatggtgcttcagaagtttcatactttcaggagaaagaccatttatctgcgaattatgtgg

SEQ ID NO: 606679 - DNA, 75 bp, Homo sapiens
gactgtaagcaatctacgaagaccgaggaaaagctgcggctccgacagttagttaatatgtgcatcaacccagat

SEQ ID NO: 606680 - DNA, 75 bp, Homo sapiens
ttcaatactacctttatttccaccatagcaaagaatggctcaagaagtactgacacatttaaaggagcatcctga

SEQ ID NO: 606681 - DNA, 85 bp, Homo sapiens
gaagagattcagccagcacactcctcgcgagcaagtgcctccggagccagcgtggtggccatagacaacaagatcgaacaggcca

SEQ ID NO: 606682 - DNA, 51 bp, Homo sapiens
cgagatctcgtgggtcgaaatcaagtcgctccccaagtagggagaagaaga

SEQ ID NO: 606683 - DNA, 96 bp, Homo sapiens
gccaacgagctcaacgccaggcgccgctcctttacagctggagtcacatcagaagccgcgcagactatcaccacggctcctgatgcctcagggcct

SEQ ID NO: 606684 - DNA, 98 bp, Homo sapiens
cagaaacgctccttctcgattattggaatgggtaccacagaccatgtcatcgtcctggcgtccacgaaccgagctgacattttggacggtgctctgat

SEQ ID NO: 606685 - DNA, 99 bp, Homo sapiens
gctgaatgtgcggaatctgtttgagcagcttgtgcgccgggtggagattctcagtgaaggaaatgaagtccagctgccaaacggaggcccgaagaaaaa

SEQ ID NO: 606686 - DNA, 98 bp, Homo sapiens
gactgagcactttcccccagcaccaccatcccggaatacctggagttgcacacagtggcagcataattcgttgtatgaggcgcctggaagaattgctt

SEQ ID NO: 606687 - DNA, 51 bp, Homo sapiens
gaggcaggcaggggatcccggaccttggttctacagccattgggatccaga

SEQ ID NO: 606688 - DNA, 101 bp, Homo sapiens
cccggctgctgcagcccgcgcacagctgctcccttcgccttcgccctttccacctcgcggcagttcgaacctgtctgagaaactctctgaacaagaattac

SEQ ID NO: 606689 - DNA, 96 bp, Homo sapiens
tgaccccaacccggtgttcaacgaagccatgatcttctcggtgccagccattgtgctccagggccaggagatggcgaggtccgtgggcgcggtggc

SEQ ID NO: 606690 - DNA, 82 bp, Homo sapiens
ctggccgcctctgccgcagctggagtcccagctatctgacttcatgtgaaagatggctaatgcagaagtgagtgtcccagtg

SEQ ID NO: 606691 - DNA, 90 bp, Homo sapiens
caacacacttataatgctcgcagataagcatgctaggaggagatatcaccaaacatgatggaacaggcggacagtccatttatggagaca

SEQ ID NO: 606692 - DNA, 100 bp, Homo sapiens
aaggaagcaaagcaaatggagaatggcatgctggtgacggacagtgcagggaagcaactgcagaggtcctgcacctcagctgcggagagggatggcagtg

SEQ ID NO: 606693 - DNA, 100 bp, Homo sapiens
cactgtttccgcctgactcaggaattcaggcatctctctaacactcatacaaatcatgaggataaactgcaggtgggcaaacgcagaggcgggaacaaac

SEQ ID NO: 606694 - DNA, 75 bp, Homo sapiens
gggggacgtgtaccctgtctaccagcctgtgattgccaaggacatggaacgctgggcccgcagtctcaacaaaca

SEQ ID NO: 606695 - DNA, 82 bp, Homo sapiens
caaacaggacctgcctaattaccttcaaacctggtgagaagccctaccactgcaactgggacggctgcggctggaagtttgc

SEQ ID NO: 606696 - DNA, 97 bp, Homo sapiens
ggccgcggggaggacatggccgcgcacaggccggtggaatgggtccaggccgtggtcagccgcttcgacgagcaggagctgatgcagcagaatggga

SEQ ID NO: 606697 - DNA, 101 bp, Homo sapiens
atgtgagcgctgagcccttggcaggtcctctggatgtcagcatggcagccacaaacctggagaaccagctgcacagcgcacagaagaacctcctgttcctt

SEQ ID NO: 606698 - DNA, 100 bp, Homo sapiens
ctcaggtggaccatgtcatctggccagatggcaaacgagttgtcctcctggcagaggtggcttgctttggtgaaggtattcatacagccttcctaaaggc

SEQ ID NO: 606699 - DNA, 75 bp, Homo sapiens
gcagagtgtgcaccaggcgggccagcccagccagaagccaggagcctcgggaagagaggatggtgatgcaccggt

SEQ ID NO: 606700 - DNA, 100 bp, Homo sapiens
ctaaccctgcccacacaacctcgggatataggtttacaaccaggcactgactacaagatctacctgtacaccttgaatgacaatgctcggagctcccctg

SEQ ID NO: 606701 - DNA, 98 bp, Homo sapiens
cattggggtgacagcggccatgaggtaatagcctgcagctggtgttttgagaagccctactgctgaaaacttaacaattttgtgtaataaaaatggag

SEQ ID NO: 606702 - DNA, 82 bp, Homo sapiens
tacttaataatgacaatctcctcagggaaggggcagcacagtcacagtcgaactgttattggaattgaagagaaaaaaaacc

SEQ ID NO: 606703 - DNA, 100 bp, Homo sapiens
tccacttctttcagatttgacccatcagatctcaaaggactatggtgtatacctagaggactcaggccacactcttagcaacacagtcactcctggcggc

SEQ ID NO: 606704 - DNA, 97 bp, Homo sapiens
gcaggcgctgagaaggacgcgcagtccatctctctcaggaaagtgatgaagcattgggcccaacaatgatgagttggaatgcagttgaaaagttatg

SEQ ID NO: 606705 - DNA, 100 bp, Homo sapiens
cgttaagggaacgctgaggtcccgcgctccccgaccgaggtggcagtagagaagagcatcacagaagttgctcaggagctgacagagctggtggaacatc

SEQ ID NO: 606706 - DNA, 89 bp, Homo sapiens
agaagactcccccacatctggcaacgtagagcttgctctgacttctgatggcaggacaatagtatgctaccacccttctgtggacattc

SEQ ID NO: 606707 - DNA, 100 bp, Homo sapiens
ttgatgacaccccagttcaccccttattatgtagcaccccagattatcttgacaatggtaataataaaatggcaattcagcaagcagataaactgttgaa

SEQ ID NO: 606708 - DNA, 74 bp, Homo sapiens
gagtcttccaggccatcaagggtttccgcaatgcccctgttaattcagattttggccgtttttggtgatcatcg

SEQ ID NO: 606709 - DNA, 82 bp, Homo sapiens
gcagaagtcgcgtgtctaggtgagtcgcggtgggtcctcgcttgcagttcagcgaccacggcccactgctcagtggagcgtg

SEQ ID NO: 606710 - DNA, 100 bp, Homo sapiens
attaccaccaccacctgatataaaaaaagaaattagtgaaggagatgaagtagagaatgtatgacaacatgtccacaatggtgtacataaaggaagacaa

SEQ ID NO: 606711 - DNA, 75 bp, Homo sapiens
ctccaatgcaatgctgtttgccctgaacatcatgaattcccaagaaggagaggcagaggaggtggacacggtgga

SEQ ID NO: 606712 - DNA, 101 bp, Homo sapiens
tgaagatgaaactgctgaaaatggtgtaccaaaaccgggcttccgttacaagatgaggtctgtgtatgctcacttccccatcaacgttgttatccaggaga

SEQ ID NO: 606713 - DNA, 75 bp, Homo sapiens
gagtttgtggaagatggcgcctgttgtgacaggttcatcagagaagatatgaaatataaagatgctactaataaa

SEQ ID NO: 606714 - DNA, 75 bp, Homo sapiens
aagctgcctttgctgaattacacaactgatggagtgaaggtacctgagcgcaggaaccatggtcttcattgctgc

SEQ ID NO: 606715 - DNA, 90 bp, Homo sapiens
agaaaggcctggagagtcgtgcggacagcattgggagcggccgagccatcccaattaaacagggagatgcagttaaagacttgatgcttc

SEQ ID NO: 606716 - DNA, 50 bp, Homo sapiens
ttaagggactgagtatcattgggtttcagagtcaagtggtgagatcaaag

SEQ ID NO: 606717 - DNA, 75 bp, Homo sapiens
ctagactcagatgagagtgaggatgaagaagatgactaccagggtgtcgtagtcattcttcagcacaattcttaa

SEQ ID NO: 606718 - DNA, 76 bp, Homo sapiens
gagctcacttggccaatcatgatgaactaatttccaagggcaacacacaagtttgctgattgcaaagcaaaacgtg

SEQ ID NO: 606719 - DNA, 75 bp, Homo sapiens
ctcggccgcgcaatgggcacccgcgacgacgagtacgactacctctttaaagctatgctaagaaggaatctgatc

SEQ ID NO: 606720 - DNA, 100 bp, Homo sapiens
ccggaggcctgcgtggaggaggcgccccgcgcagctggctggcggagcatgagcgccccagcatgtaaaagtcacatctgaggctctgggtcatgctggc

SEQ ID NO: 606721 - DNA, 89 bp, Homo sapiens
ggaaaatcatattatagatggagtaaaggtgcttgaggaatccaaagccctcgtgcgctgcaacatgaagatggagctggagcaggcca

SEQ ID NO: 606722 - DNA, 75 bp, Homo sapiens
atcctcagcagcaccggcttctttttgaagtgtttgacgaaaaccgattgcaccagtatgcatgagcgggtgaac

SEQ ID NO: 606723 - DNA, 98 bp, Homo sapiens
cctgtgtaattatgcagaagaatggagctggattacacacagcaagttcctgcttctgggacagctctactgacggtcctgggaactccaacaaggga

SEQ ID NO: 606724 - DNA, 83 bp, Homo sapiens
gtgaagagttgtcccagctcggcccgcgggggagccccgggagccgcacggtgatgtgtccaatctagatcccaacttctcat

SEQ ID NO: 606725 - DNA, 97 bp, Homo sapiens
atttccaaaatggaatagaatgtggtggtgcctatgtgaaactgctttctaaaacaccagaactcaacctgtcttttcgtctgcagatgactataga

SEQ ID NO: 606726 - DNA, 114 bp, Homo sapiens
accatgtttgacaagacgcggctgccgtacgtggccctcgatgtgctctgcgtgttgctgggtgtcatggagaaactccagctgggcccagagattctgcagcgggaaaatcca

SEQ ID NO: 606727 - DNA, 83 bp, Homo sapiens
gatccagcctgcggagcctgtggggcagtactcgcttcccactcccaaagggggcaaatacgccatcaacccccatctcaccg

SEQ ID NO: 606728 - DNA, 83 bp, Homo sapiens
ttggcatttacatcactggcgtggacccaggctctgaagcagaaggcagcgggctcaagggcacacgtgtttcacgttgacag

SEQ ID NO: 606729 - DNA, 90 bp, Homo sapiens
attgaattccaggagcctgttcctgcttcgaatcaggaaacccaggcccaacggcaggtggatgcaagaagaaatgttccccaaaacgac

SEQ ID NO: 606730 - DNA, 100 bp, Homo sapiens
cggcctcgtgcgccgcgctttgaggcaggatgacgcaaaacacggtgattgtgaatggagttgctatggcctctaggccatcccagcccacccacgtcaa

SEQ ID NO: 606731 - DNA, 83 bp, Homo sapiens
tcagtctcctggagcttccagccagagggggccgacactactgtgtcgtttgttcatatcaacaacttaaaactcatctgcag

SEQ ID NO: 606732 - DNA, 83 bp, Homo sapiens
gtcctttactacactggcagaattgcaaagatgcatgaggttcttggtgagattcaggaaattgtgaaaacagggctttgggt

SEQ ID NO: 606733 - DNA, 100 bp, Homo sapiens
agacgatctgcacttcgcattttggcattgacatttaattttagggtcctttatatagaagggagagtaggccgcctgatcttcgacaacctaaagaagt

SEQ ID NO: 606734 - DNA, 83 bp, Homo sapiens
tgggtctccaggcccgcgaccgtccgccagtcgtcccgagtggttcctctggagattaaatgtacttcacagaacctcagcga

SEQ ID NO: 606735 - DNA, 82 bp, Homo sapiens
cgcagcatgactttgctccagcctggcttaatttccctactccaccatcatcaacaaaggatgaatctggttatagatggac

SEQ ID NO: 606736 - DNA, 100 bp, Homo sapiens
gcaggtattgggagatccacagctaagacgccaggactccctggaagcctagaaatgcggcttcatatacagatagctctgatgatgagacatcgcccag

SEQ ID NO: 606737 - DNA, 111 bp, Homo sapiens
caaaactcctctctatagtcaactccttcaagcatataagtggtcaaacaagaaccaagcgcctccaggtctctacacgaagacccaggacccagccaaagcccccaacac

SEQ ID NO: 606738 - DNA, 80 bp, Homo sapiens
cgcgcgctgagggtctcggggcgggcgccgcgggacctctccgggccatggatgaaggatttgggggcagagcacttggc

SEQ ID NO: 606739 - DNA, 75 bp, Homo sapiens
cagaaataagccgttttttgacatctgtacttcaagaaagaaagccatcactgcccaggtagaagagaagcgcag

SEQ ID NO: 606740 - DNA, 101 bp, Homo sapiens
gtacctggagaaagctttaaacaagtgaggaaaatagcagctgaatactatgacaacctccctcactacaattcctggataaaagtactgtatgattttgt

SEQ ID NO: 606741 - DNA, 97 bp, Homo sapiens
cgtgaacgcgcccctcggggctccagtggagagttcttacgggattgtcaatgaggcagatcagattccgatttgacgggcaaccaatcaatgaaac

SEQ ID NO: 606742 - DNA, 89 bp, Homo sapiens
gtcactgaggttgcagttggcgtgaaggaccctatgtactcggaactgggcttatcttgtacgctttatccaaagaaatatatgtgatt

SEQ ID NO: 606743 - DNA, 75 bp, Homo sapiens
acagcacctagtcgtggccggaggagtctcagagctgtcagaaagtgtggacgaatgtggaacctcgctctgtgg

SEQ ID NO: 606744 - DNA, 88 bp, Homo sapiens
aatgtgggtggccggctccatttgagggccaattcctgtccccccagcagcatggcatcgtgtgctgaaccctctgagccctctgccc

SEQ ID NO: 606745 - DNA, 100 bp, Homo sapiens
caacgggccaggtaggatttccgggagaggctgctgtggaggctgaggaggcggcggcggagatctggattggatttgaggctcctcccctccagggaca

SEQ ID NO: 606746 - DNA, 75 bp, Homo sapiens
acatccagagctgcatcattccttggggcaaaatgtggacaaggggcatgagccagaaggagagctctaagtctg

SEQ ID NO: 606747 - DNA, 100 bp, Homo sapiens
attacagcctaaggcaggtgacaggaaaggagagatccagcctctcaaacatccagcagagagaccataggtaactgcatcctgcccagcatgacggccc

SEQ ID NO: 606748 - DNA, 50 bp, Homo sapiens
cgccatgctccaaacaacttggcctcagcttcaaggttactgacttttta

SEQ ID NO: 606749 - DNA, 98 bp, Homo sapiens
ccctcccagaccggccgctctcccctcctctcacggcacctcccaccatgaagactttgttgtcgctgcccggaggagtcgagactggtacccggagg

SEQ ID NO: 606750 - DNA, 100 bp, Homo sapiens
ttcccgttgaaggtgctaccgctgacgacacccctggtggatggcgaggatgagaggggctatcaacagcaggacgcccatgaattcatgcgctaccttt

SEQ ID NO: 606751 - DNA, 48 bp, Homo sapiens
agtcttggggacagtgtcagcaaaccagcaaatatcctagtaatggga

SEQ ID NO: 606752 - DNA, 75 bp, Homo sapiens
agattcgatggacatggacatgagccccctgaggccccagaactatcttttcgtcttcccaagggattgttgaag

SEQ ID NO: 606753 - DNA, 75 bp, Homo sapiens
tcgctggggctttatccctcttgtgatttacctgggatgtggctttgtttgagatgaatcagtcggattcaaaag

SEQ ID NO: 606754 - DNA, 100 bp, Homo sapiens
aatcctccgctgaggtgatttggatatccctagaacgttgagggcacgagtcgggtcctgagaccaggtgccctcgctaaaatttcacctctttcatcgc

SEQ ID NO: 606755 - DNA, 97 bp, Homo sapiens
gtggacaagagccccctgccgctgggcttctcccccgtctgcgaccccatggattccaaatgagctgaaagccagtggtggcgaaatcaaaattcat

SEQ ID NO: 606756 - DNA, 100 bp, Homo sapiens
agagaggagattgcagcagcgaaccaatcccaaggagcagtttttgcaagaaaggatcaaagtgaacggaaaagctgggaaccttggtggaggggtggtg

SEQ ID NO: 606757 - DNA, 90 bp, Homo sapiens
gggacacagctgaaagccttactgatacttgaaggaggccagaaagttgttttcaaacctaagcgagtttcactcttgttgcccaggctg

SEQ ID NO: 606758 - DNA, 74 bp, Homo sapiens
aagatgtggtgatggggcattcttgctaacaacgtgattatcctgaaccatccaggccaaataagcgccggcta

SEQ ID NO: 606759 - DNA, 100 bp, Homo sapiens
aatgaaggtgtattcccttaaaaagacggacagcccatcgtgtgaactatagagtttgtggacagatttatattgatggcagaagattttcaagtcccgg

SEQ ID NO: 606760 - DNA, 90 bp, Homo sapiens
ccaatggattcaccaagaggaaggagaattcaaccttttttgataagaagaaaatagttctgcttgcaggatgggcattgttcttattcc

SEQ ID NO: 606761 - DNA, 132 bp, Homo sapiens
ccgcgcagggtcgcgatgctgcccggtttggcactgctcctgctggccgcctggacggctcgggcgctggaggtgctggatattagaccttcgtcagacacatagaccagtggaacagaatagagaacccag

SEQ ID NO: 606762 - DNA, 98 bp, Homo sapiens
aaaagtgatgaggaactggcaagaaagctaagcattgatattagaagaagttcgtgccccaattcctcaaaagcaggaaatactggtggaaccagaac

SEQ ID NO: 606763 - DNA, 100 bp, Homo sapiens
gctgagtttcctggtagagccggccgagctgaggcggtcgcggccatgaaggctcttgcagccaatgccggaacaggatttgctgttgctgagcctcaaa

SEQ ID NO: 606764 - DNA, 90 bp, Homo sapiens
tgaaattatctctggtgctgcagctctatatttgatcaagttccttgcaaagcttgctcagaccagcgatgtgaataaaatgactcccag

SEQ ID NO: 606765 - DNA, 98 bp, Homo sapiens
tgaatttccatgtcaacatagtcctgatcctacatggctttccaccaacctgggcatcctgacctgcatcgagtgttccggaatccaccgagagctgg

SEQ ID NO: 606766 - DNA, 75 bp, Homo sapiens
agcgactgagtccgcgatggagatgagcagcaccagcagtaagagggctccgaccacggcaacccagaggctgaa

SEQ ID NO: 606767 - DNA, 75 bp, Homo sapiens
atgacaacgattccacttcttgtgctcctgggcttagaaaatgtgaaagtctggttccaaaacaggcggatgaag

SEQ ID NO: 606768 - DNA, 75 bp, Homo sapiens
cctatggctcaaagaaagatgattatgctctgtccagcagtgtaagctccagcaagctgttctccagcagcactg

SEQ ID NO: 606769 - DNA, 75 bp, Homo sapiens
actctaccgttccatcttggatgcctacatcatcatgtctttggtggacttgggaaagaggttgctagaagcagc

SEQ ID NO: 606770 - DNA, 103 bp, Homo sapiens
ggagctgcggcagaagtacaatgtccgctccatgcccatccgcaaggacgacgaggtccaggaaaatatgcccaggttaccaacaatcctgaaaatgatggat

SEQ ID NO: 606771 - DNA, 97 bp, Homo sapiens
gcggcggcgggtgttgtgagcgggaagcctgcctagggtagttaaaagacgagtgaatgctctcaaaaacctgcaagttaaatgtgcacagatagaa

SEQ ID NO: 606772 - DNA, 87 bp, Homo sapiens
ctgttcggcgaggacaacgtgcgcgccgctcagaagaaaaagcttgtggtgaaggggggcaaaaaaaagaagcaagttctgaagttc

SEQ ID NO: 606773 - DNA, 75 bp, Homo sapiens
cctagggctcacgttgttattctgcattgcacttgcagccagtctggctcttgctgattgaattcctttggtgca

SEQ ID NO: 606774 - DNA, 111 bp, Homo sapiens
gtctcaatatctgtcttcggtggactccttcggcagtccacccaccgccgccgcctcccagtgcctccggagccagcgtggtggccatagacaacaagatcgaacaggcca

SEQ ID NO: 606775 - DNA, 98 bp, Homo sapiens
gaagagggtctggaggagccttctcaagaacagagtactatactggcaattgctggagaagattttgcaattgttgcttctgatactcgattgagtga

SEQ ID NO: 606776 - DNA, 100 bp, Homo sapiens
ctggagcctgggagtcatcctgtacaccctcgtcagcggctccctgcccttcgacgggcacaacctcaagattgcttccaagtatgatcatcaggcagaa

SEQ ID NO: 606777 - DNA, 76 bp, Homo sapiens
cttcggagaggaagatctactgtgaccaagagtattgtggagtgcccagcagaggagcacgcagctgaacaagaag

SEQ ID NO: 606778 - DNA, 75 bp, Homo sapiens
caagatgtccgccagagctgcggccgccaagcctgatcctgcctgaagatggtgccactggtggctgtggtatca

SEQ ID NO: 606779 - DNA, 75 bp, Homo sapiens
ctagcagcaagggcgggctccacatggctgaagcaggcaaccaggaggtgctttgcaagatatcaccttgtcaca

SEQ ID NO: 606780 - DNA, 75 bp, Homo sapiens
cccgtcgctggtcgtgcgacccaagcccctgcattcctgtacgggtctcctttacagaaaggggcttggataagg

SEQ ID NO: 606781 - DNA, 75 bp, Homo sapiens
aacgcatcatgccagggagccaagcgtcctgcccggccgtctctaattaacagaagatggcaaagcccagccaca

SEQ ID NO: 606782 - DNA, 100 bp, Homo sapiens
aggagaccggcacccagacaggtggcgacggcagaggagtctaccctgaactgcagatcaccaatgtggtagaagccaaccaaccagtgaccatccagaa

SEQ ID NO: 606783 - DNA, 75 bp, Homo sapiens
cctgcattaagtcaggactgaggatgataatgaagataattcaaatgatgggacccagccatccaaaaggaggcg

SEQ ID NO: 606784 - DNA, 100 bp, Homo sapiens
gaatatcttgctgggagtggacttttccagtaaggaaagggaaggggaagactggcagcgggtccggagtgcctttcaaaagaaactaatgaaaccaggg

SEQ ID NO: 606785 - DNA, 100 bp, Homo sapiens
tacaacttattcctgtccggagacagcctaaggtctccacaaaccggaggactacccccagactgcagtaagtgttgtcatggagactacagctttcgag

SEQ ID NO: 606786 - DNA, 89 bp, Homo sapiens
cagcgggtcctacgaggagggctgtcagagcctcatggagtacggaggagcatattatttaatatctagaagtctagggccagaatttg

SEQ ID NO: 606787 - DNA, 100 bp, Homo sapiens
cacagctgcagtctgacgagagggccaagaagccctccatgagcagagcagctacatcctctccagtgcagagacgcctgcccggccccgagccccggaa

SEQ ID NO: 606788 - DNA, 75 bp, Homo sapiens
cgcgggcgcagccctttgcgcagccgccgggaccctggcccctgtcgagatgcacttgctcgagggctcggtggg

SEQ ID NO: 606789 - DNA, 100 bp, Homo sapiens
tgcagaatgggacttgagagacattgattttgttgaagatgactcggacattttacatggtacttgatgaagaagcagaagtttttatagtcaaaatgtg

SEQ ID NO: 606790 - DNA, 75 bp, Homo sapiens
gaaatttttaagacacgctgcaacaaagcagcaattctgtggtgttcttggtcacacatttatggagtttctgaa

SEQ ID NO: 606791 - DNA, 96 bp, Homo sapiens
tcaccggtttctcccacatcgacctggataagcatgcactactggatgtgactccgaaagctgtggacctgttgaattacacccagtggttcccaa

SEQ ID NO: 606792 - DNA, 76 bp, Homo sapiens
aatgacaagttcgataaaagtgtgcagaccaagcttcttccagaccagctggtcttgcttctggagcatctcttgg

SEQ ID NO: 606793 - DNA, 100 bp, Homo sapiens
cagatgccagccagagctctcctgtatcaggtgtctgtcggtccaagctagaagtgttccaagagctgccagggtggctttcgggtccgggaagtgcggt

SEQ ID NO: 606794 - DNA, 74 bp, Homo sapiens
gccgaggcaccgaggcactcagaggagaggaagaaaagtatgcctttgtcaactggataaacaaagccctggaa

SEQ ID NO: 606795 - DNA, 100 bp, Homo sapiens
tactgcgtctaccagagcatggtgctcttcttcttcgagaattacaccggggtccaggtccggacactgtttgtcagcggcctccctgtggacattaaac

SEQ ID NO: 606796 - DNA, 90 bp, Homo sapiens
agaagctacaattttctttactaggtaaaatcccagaggaatccaaagccctctctttattggctcctgctccaaccatgacaagtctga

SEQ ID NO: 606797 - DNA, 50 bp, Homo sapiens
actctgaggggcttagaaattaacaggggtgtgctgatctgcaaaccctg

SEQ ID NO: 606798 - DNA, 98 bp, Homo sapiens
cgggcggcaccgcggtgcgcaagcgcaaccgtcggtgggtcggggatcggtcgcctgagagatgtccagctcgccgctgtccaagaaacgtcgcgtgt

SEQ ID NO: 606799 - DNA, 80 bp, Homo sapiens
cttttcctgcccccagcgctctgtgacatgacagggaccagcctcatgtatgtggtttcttctcggtacaactcaatagc

SEQ ID NO: 606800 - DNA, 82 bp, Homo sapiens
ttccactgttcctgccacagcggcttcgagctctcctctgatggcaggacctgccaaggtcttgaggaccggcccagctcag

SEQ ID NO: 606801 - DNA, 83 bp, Homo sapiens
gtgcttcctgtacagctgcggaaccagtacaggggctcaggtccaggtggcaggggatatgctacccaactcaactgagcggg

SEQ ID NO: 606802 - DNA, 82 bp, Homo sapiens
tccttggcccgcggaggggtctgcgcagtgcaggcagataccgtttgacaccaccagtaatagcctgcagctggtgttttga

SEQ ID NO: 606803 - DNA, 51 bp, Homo sapiens
tttccatgtcaacatagtcctggccaaatagttgcatcacatgtatctaat

SEQ ID NO: 606804 - DNA, 101 bp, Homo sapiens
actgaagaaggaagcattgaaagttccttatttattaatacctcttcgtatggagtcctttcctatcatgcaaatctaagtaggtctttgagagacacagc

SEQ ID NO: 606805 - DNA, 75 bp, Homo sapiens
agcgccgtgtggcacgacacaaaaatcagaaatacactttcgggaaatggcctctaaatcctggctgaatttttt

SEQ ID NO: 606806 - DNA, 100 bp, Homo sapiens
gctaccccagacctcaagtgacttggtttagagaagggcacaagattattccaagcaacagaatcatcaagcttctagctgtgcaagaactgcttgacag

SEQ ID NO: 606807 - DNA, 50 bp, Homo sapiens
agcgcgaatatcgtcatcgttagaagattcctgtgttatcagtgaccatc

SEQ ID NO: 606808 - DNA, 75 bp, Homo sapiens
ctcccactgattctacattacgatatgattctataacagactcttccagaaatgatatgaagaggaaatttgccc

SEQ ID NO: 606809 - DNA, 89 bp, Homo sapiens
ttctacaacctggtgcgcttccggatcgggggcaagcggaaggtgatgcccaagatggaccaggttatgaagacagtatggagtttcca

SEQ ID NO: 606810 - DNA, 116 bp, Homo sapiens
tctgcagaggcgctggagctgggtcagtccgccgctcaccccgcggccgcaccttcccgccttctcagttatgcaaagggtgacctggacatatcttacatcacatccagaattgc

SEQ ID NO: 606811 - DNA, 98 bp, Homo sapiens
atttgacttgcaaagactgcaaagttatcagccataccttcagagtgttattttcctttttgtcataaggtgtctggaaatgaagtatggaaatgaaa

SEQ ID NO: 606812 - DNA, 110 bp, Homo sapiens
atctgtcttcggtggactccttcggcagtccacccaccgccgccgcctcccagtaaaatgtttattggaggcttgagctgggatacaagcaaaaaagatctgacagagta

SEQ ID NO: 606813 - DNA, 76 bp, Homo sapiens
gtgggatagaagcacacccagtgcaaagtatatcctttcgggctctgatgacttcaacctgtacatgtggagaatt

SEQ ID NO: 606814 - DNA, 50 bp, Homo sapiens
caactcctgttctcctcagagcctgctggactgtgctgctgccatctcgg

SEQ ID NO: 606815 - DNA, 74 bp, Homo sapiens
tacaaggagatcgaggtggaagagaaatacaaacctggtcgatgtgatgatattttgaaatggaagcctcccag

SEQ ID NO: 606816 - DNA, 93 bp, Homo sapiens
tgcaaagtgctcagcaaagcaggctgtaggtttagttgagcaccggaaagaaccctgccgagtgcctgcgattgcaggcgcgcgccgccacgc

SEQ ID NO: 606817 - DNA, 88 bp, Homo sapiens
ttaatattgccgtgttatggatcaatgacaacagagcacgaacttccaggagccggtgcagccgctgacacagcagcaggtggcgcag

SEQ ID NO: 606818 - DNA, 89 bp, Homo sapiens
ctaagctaccagagaatcaagctatccaaatgcgattagttgatgtggcctgcaaggacagtcattttgtttactcattcagccctgtt

SEQ ID NO: 606819 - DNA, 101 bp, Homo sapiens
aatggcacctatggacaagtctataagtgctgggcctaaaggagataacatttatgaatggagatcaactatacttggtccaccgggttctgtatatgaag

SEQ ID NO: 606820 - DNA, 90 bp, Homo sapiens
caggggttggaaagtcttgccttcttcttaggtttgcaatgttctcaaatagtgatgaagctgtaatcaataaaaaacttcccaaagaac

SEQ ID NO: 606821 - DNA, 83 bp, Homo sapiens
catctgcggccatggcggcgactactgccaaccccggtcatcatcagatttgaaatatttaaagtggatacaaaactatttca

SEQ ID NO: 606822 - DNA, 100 bp, Homo sapiens
ccacgcgctgctgatgaagccggacgggcgagcagacataaacgtgacccaaaaaagcttcaattttgccaagaagttctccctgcccctgtatttcgtc

SEQ ID NO: 606823 - DNA, 75 bp, Homo sapiens
gtgtgctgaatgactcaaggattttttgggtttgctggggctttcactctgcggcagcgaatgctcaacttcgtc

SEQ ID NO: 606824 - DNA, 100 bp, Homo sapiens
tctggggcagccaatattgtaccacctgccaaagcttggcacaaacaatctggaagccaaaaattgcacatactgtgctgccaagagcccgtcggcccaa

SEQ ID NO: 606825 - DNA, 80 bp, Homo sapiens
aacaccgttcccccagccgggctgatcttcgtgaagactctgactggtaagaccatcaccctcgaggttgagcccagtga

SEQ ID NO: 606826 - DNA, 87 bp, Homo sapiens
tgaaccatcttcctgcacacagccacgatttgcaaaggctcgggttatgtatgattttgctgctgaacctggaaataatgaactgac

SEQ ID NO: 606827 - DNA, 74 bp, Homo sapiens
ctggctccccatactagtcgccgaaggccaatgatgaggccaatcagagtgatacaagtgtctccttgtcagaa

SEQ ID NO: 606828 - DNA, 75 bp, Homo sapiens
taccatctaaaatacgaaggtttctggctgggtgaacacacagtgttcatcccctcaggaggacacagcttttga

SEQ ID NO: 606829 - DNA, 98 bp, Homo sapiens
tgagtcgggatggagctgcctgctgtgaacctgaaggtctgtgcagacttttgcagacaaatcaaaacaagaagctctgaagaatgacctggtggagg

SEQ ID NO: 606830 - DNA, 87 bp, Homo sapiens
cctgagctccatggagaagccacccagcctcggtgaccaggagactcggcgcaaggcccgagctagtatgttcaacacaccaggaat

SEQ ID NO: 606831 - DNA, 90 bp, Homo sapiens
tgcagcggaggagggcaaggactacccctttgccaggttcaataagtttcagagactcctccactctctgggaatgacacggactccctc

SEQ ID NO: 606832 - DNA, 90 bp, Homo sapiens
actttgcacatttcaacagtcatgcaggtgagtgtggtccaagattcagtaaacatatcaggacatactaatacaaatactttgaaggtg

SEQ ID NO: 606833 - DNA, 100 bp, Homo sapiens
cagcaccgcagatgttgtcaaggtggcctaccaggaggccaggggtgtcgccatgaatgagatgctggaggaaggacatgagtatgcggtcatgctgtac

SEQ ID NO: 606834 - DNA, 83 bp, Homo sapiens
tcctatgccttaacctgactcagccaccatatggggcgttccacatacgttgtcccgacacagcagtaccctgtgcagccagg

SEQ ID NO: 606835 - DNA, 96 bp, Homo sapiens
aaaccaacagacaatgccaatttacgtgtcattatggaactacttatgaggatgagaacaagttgagcagtgccaacggccatgaagaacgtagca

SEQ ID NO: 606836 - DNA, 82 bp, Homo sapiens
ccggacccactggctgctggagcttgtcaccaccagctggtcagtgagaaggtcggaggggccgaggggaccaagctggatg

SEQ ID NO: 606837 - DNA, 100 bp, Homo sapiens
cgctgatctagtgcttctcgaaaaaaaccttcaggcggcccatggcatgacccaggagtccttccaggagagctctgtgaaggagctgaggcggctggag

SEQ ID NO: 606838 - DNA, 83 bp, Homo sapiens
cagagaagggccaggagaggagcactttgaggacatggcctccgacgaggacatggcctgggtcccttgtgagggtcgctgat

SEQ ID NO: 606839 - DNA, 90 bp, Homo sapiens
ctagaaggaaaatcacagaggtaaagcatcatttcatcacatcctgtcaagggtttgatgaacttgtgaaaaaattcaaagtcgaatatc

SEQ ID NO: 606840 - DNA, 75 bp, Homo sapiens
gttcggccgtgccctccgacagccaggcccgcgagaaaacgtggaatcttgtagaaggaagatcagcattcataa

SEQ ID NO: 606841 - DNA, 85 bp, Homo sapiens
agagtattttgaaaaagcattacaaatatgaagaggcattatttatgaccttttctatggaaagattttgtatcagattgtacca

SEQ ID NO: 606842 - DNA, 75 bp, Homo sapiens
gagaccatcctggctaacacgaccgagtgacggttctctacaggagcaaagccattcgctatacctggccttgtc

SEQ ID NO: 606843 - DNA, 98 bp, Homo sapiens
caaaacctaggaagtcaactgttggtacattatttgcagttgggggaatggattcaacaaaagtacgaattggagcaatgttggcttatacacctctg

SEQ ID NO: 606844 - DNA, 98 bp, Homo sapiens
aatccgtaaagacccatttctctatgagaacaagttgaaatcatcgcagaaggataaagttcgtcagtttatgatcttcacacaatctagtgaaaaaa

SEQ ID NO: 606845 - DNA, 75 bp, Homo sapiens
ttttggagggcatagatccggccaagcatcagattagtgacaagagctggggttaggatccggttggactctgac

SEQ ID NO: 606846 - DNA, 98 bp, Homo sapiens
ttgttcaatgagaaggccacattattactggaatccaggtatttcaggacagccaggagggggcgcacatccgccgcgaaactgtgagcaagagcgtc

SEQ ID NO: 606847 - DNA, 82 bp, Homo sapiens
tgcccacttatatgaaacccagcaacagccaactcagtttataaatccagaaacacctggctatgttggatttgcaaacctc

SEQ ID NO: 606848 - DNA, 121 bp, Homo sapiens
tgctaaatgttctctgtgttctcagaagacgttctgtatttcagcttcctgctatgtgccctctttgttcctaaagttctcagaagcagagtttagagcttaccagtgatctcagcatcct

SEQ ID NO: 606849 - DNA, 75 bp, Homo sapiens
tgcataatggagaacctctctacattccagtaacccaggctgtagagggcttactagatgccacaagtggtgctg

SEQ ID NO: 606850 - DNA, 50 bp, Homo sapiens
ggagttcacccctgaatacaaaggaaatactcctttacaccttgctgtga

SEQ ID NO: 606851 - DNA, 88 bp, Homo sapiens
aaaatgcaagaagactgatggagcaggcttgcaatattaaagaatcacatgcagcccaactacagattcttatggaattcctcaaggt

SEQ ID NO: 606852 - DNA, 83 bp, Homo sapiens
ctcctggtcctgctcggggctctgttcccagccaacaagtcccaaatttggaaaagctgactcatatgaaaagctggaaaaac

SEQ ID NO: 606853 - DNA, 100 bp, Homo sapiens
acacccggctccccggacgcctcgagagaagaagaaggaggttcctgctgtgccagaaacccttaagaaaaagcgaaggaatttcgcagagctgaagatc

SEQ ID NO: 606854 - DNA, 75 bp, Homo sapiens
atttaatggaaaatcgcttggttaaaacctgacacttttaacaggtcacaaagcctactgcctgctaatcggcaa

SEQ ID NO: 606855 - DNA, 74 bp, Homo sapiens
agaaaacgaatatttaaagattttatgcatgtgcttgagggtgcggaggcagcaaatgttacaggtcctggtgg

SEQ ID NO: 606856 - DNA, 75 bp, Homo sapiens
tccctgagccgcccctacacccacaggtttggtgcacctcgatttggaggaagtagggcagggcccttatctgga

SEQ ID NO: 606857 - DNA, 100 bp, Homo sapiens
accaggagcatgtggccttacacgcccccatcagcaatctgaaagcaaatcctgtttagatgcaggcgaaggttcctggtgacccaggctctcaccttac

SEQ ID NO: 606858 - DNA, 75 bp, Homo sapiens
aatgaccgtggttcccactgagggtttggtgcaattctccattaatgaagataacatttgaattccccaaagcag

SEQ ID NO: 606859 - DNA, 119 bp, Homo sapiens
ctgacttcttttgccaattaggtcacttcaacctcttgttggaagattattcaaaagggatcatagacggtatttctatgtaaacgaacagtcgggcgagtctcagtgggagtttccag

SEQ ID NO: 606860 - DNA, 75 bp, Homo sapiens
agattagcaaaggtgctaatccagtggaaatcaggagaggagaagatttacaaatctctgcctggatgctgtttg

SEQ ID NO: 606861 - DNA, 100 bp, Homo sapiens
tcctcaatttaagcctgatctaacccctagaaacaggagccaccagaaatggaactattgaaatttttcaggccagaaaacattacagtttcctcaaggc

SEQ ID NO: 606862 - DNA, 75 bp, Homo sapiens
gcaggcagagagcagaagatattcacagacatgcggaatttgagatgagcaccatgccaggactgcccacccggc

SEQ ID NO: 606863 - DNA, 50 bp, Homo sapiens
gccgccgggaccctggcccctgtcgagctattactataacaagcgcattc

SEQ ID NO: 606864 - DNA, 100 bp, Homo sapiens
ccgaaaggttcggcgcaaggagcccaagagccaggatatctacctgaggctgttggtcaaggtggttgtggcaacgaacattgctgagacatcactcacc

SEQ ID NO: 606865 - DNA, 100 bp, Homo sapiens
cacgcctcctcccgcctgccccctcagccctgtggctgggggcagagctcaggactcagcccaaaaccatgtttgcccaagttgaatctgatgatgagga

SEQ ID NO: 606866 - DNA, 75 bp, Homo sapiens
ctgcaattgagaaacaggcacacaagtgtgaggagttgctaaatgctcaggaaattcagtgaacattatcactcc

SEQ ID NO: 606867 - DNA, 100 bp, Homo sapiens
cctgaagaagactacacttgccctccatcacctctccagtgggcacctcaagtgggtggaacatctcccagaaagtgagaaagatcagtctaaagaaaag

SEQ ID NO: 606868 - DNA, 83 bp, Homo sapiens
cgaaataatgaatccaaaatccttcatttacagacaatgcagatcttcgtgaagactctgactggtaagaccatcaccctcga

SEQ ID NO: 606869 - DNA, 75 bp, Homo sapiens
cctcccaaagcattgggattacagttgttgacctcctgtactggagagacattaagaagactggagtggtgtttg

SEQ ID NO: 606870 - DNA, 97 bp, Homo sapiens
tgctcaagtccaaacatggaggcaactacctgattatgtttgagaccttcaacaccccggccatgtacgtggccatccaggccgtgctgtccctcta

SEQ ID NO: 606871 - DNA, 100 bp, Homo sapiens
ctggtgcgtaataagaaggtgggcgttatcttccgactgatccagctggtggtcctggtctacgtcatcggaaactagatgatggccatttaaacaactc

SEQ ID NO: 606872 - DNA, 100 bp, Homo sapiens
agatgaaagagaagtttctggtcactccccaggattatgcgcgtgtgaagcctcagtttaggtcatctggtggttcagaacactcaacagagggctctgt

SEQ ID NO: 606873 - DNA, 107 bp, Homo sapiens
aggcagcctggaggaggtggccatggaggatagccttcgttatcgtcagcctctggatcactactcttggaatcaaagataaatccaaatactgcatatcagaaaca

SEQ ID NO: 606874 - DNA, 74 bp, Homo sapiens
cagtcttgcagccactcgagacatcacttctgttcattgtggtggtctgggtgggcaccaacaaccacggacac

SEQ ID NO: 606875 - DNA, 74 bp, Homo sapiens
accttgatcccaacaatgttatcattgagtgatgtaaaattctcaaacaatgagatagataaaaagtacgcagc

SEQ ID NO: 606876 - DNA, 146 bp, Homo sapiens
ctcagcctgccaagctgtgttctacacctttgtttttagacacaagcagcttttgagcggaaacctgaaagaagcaattctgtggtgttcttggtcacacatttatggagtttctgaagggcagtggagattactgccaggcacag

SEQ ID NO: 606877 - DNA, 83 bp, Homo sapiens
ctgatcgccccagggatcaggaggtttacaaaggaggaaaacgacttcttctagatttttttttcagtttcttctataaatca

SEQ ID NO: 606878 - DNA, 100 bp, Homo sapiens
gcatcttgcaactggaaactatttagctgcagagcatcagaggctccttgaaatgctagatacagagaaggaactgttaaaagaaaaaataaaggaagct

SEQ ID NO: 606879 - DNA, 75 bp, Homo sapiens
caccgttcccccagccgggctgggcgaccattgacgaggtggagacggacgtggtggagattgaggccaaactgg

SEQ ID NO: 606880 - DNA, 82 bp, Homo sapiens
gaccccgaaggaaaaggaggaattcgccgtgcccgagaatagctccgtccagcagaacatccagtcatggataaaaatgagc

SEQ ID NO: 606881 - DNA, 75 bp, Homo sapiens
gaaaaataaaagccaaattcacatgccaggatattaatgcacacgcctgtgttactggtaaacccatcagccaag

SEQ ID NO: 606882 - DNA, 97 bp, Homo sapiens
cccaatgctgaccaaggaggagcctgttccagaactgctggaagctgaggctcctcctcagccatcctggccgtgctcagtcatctgaccagctgac

SEQ ID NO: 606883 - DNA, 100 bp, Homo sapiens
gacaacaacaccaggaaactgacctcggggttgcggcgaccttttggagtggctggtggaatgcaagctttaggacttcacctgacagatccaagtcaac

SEQ ID NO: 606884 - DNA, 75 bp, Homo sapiens
ttccagtctgatccttttgttggcagtgaggtttatacatggggcgacaatgatgagggacaactgggagacgga

SEQ ID NO: 606885 - DNA, 75 bp, Homo sapiens
cacatttgctgccatgagcaaagaggaggtcgacagaaatcaagatgactaccagctggttcgaaaattaggccg

SEQ ID NO: 606886 - DNA, 75 bp, Homo sapiens
tggaaactctttgggaaagccactcgaaaagtctcagaccagtatccttcaggggttctcttactctgatttgcg

SEQ ID NO: 606887 - DNA, 88 bp, Homo sapiens
ctcctaaggcaggaagatggtggccgcaaagaagacggcagtgtcatcattaggctgtctttgtgccttaacagtattgatcaggtat

SEQ ID NO: 606888 - DNA, 83 bp, Homo sapiens
ttcgccaaagcgacaggagctaatgctgtcagaagggtatctcagtggacttgagtactggaatgacatccactggagttgtg

SEQ ID NO: 606889 - DNA, 74 bp, Homo sapiens
ggcggttgtggactctctccaaggtatcgagaaccttccctgcgaacttcagaggaacttccagctgatgcgag

SEQ ID NO: 606890 - DNA, 100 bp, Homo sapiens
gccgcgccgccgcgcagcgccccagccacacgccggcgggcagaagccgcccgctctccgggccctaaaggacagcaaggtggtggagatcgttgatgag

SEQ ID NO: 606891 - DNA, 99 bp, Homo sapiens
cgcgaccgcgggtgcatccagtttctgcgcccaggatcttcagcctgttaaacaagaaaacgaaaaaccccttccagaaaacatggatgcatttgaaaa

SEQ ID NO: 606892 - DNA, 98 bp, Homo sapiens
gggccagcatattcagacacttattcctcagctggtgactccgtgtatacttacttcagtgctgttgctggacagctgcagaaccttggcctgaaaat

SEQ ID NO: 606893 - DNA, 100 bp, Homo sapiens
tgagaaattttgagtcctcgagtgaatgggcggatctcatatcttcacttggcaaactcaacaagtacaaggtgaatatcttaaccagacttgccgcaga

SEQ ID NO: 606894 - DNA, 83 bp, Homo sapiens
agggcaacctccagatccatcacgtggggcaggacggtcagggcgtgatggtgggcatgggtcagaaggattcctatgtgggc

SEQ ID NO: 606895 - DNA, 101 bp, Homo sapiens
gcagcaggtcctgagcctctgggcccacgggacggtgctgaggaacctcacggaacctcaagaaggcatgaagccagcccctgcagtgccgtccacccgcc

SEQ ID NO: 606896 - DNA, 75 bp, Homo sapiens
gaaaaacggccaagaggcagacctaggaaatggaccaactgccagagttttctctgggtgttaacagcggttgga

SEQ ID NO: 606897 - DNA, 102 bp, Homo sapiens
gatgatagctgttggagtaaagttgcagtggaagctatggctgcaaaatcgttaaaatcttcaagcccaaagagtcgattgatccaattaaagaaagagaag

SEQ ID NO: 606898 - DNA, 87 bp, Homo sapiens
tgtaccaggcgaagctggccgagcaggctgagcgatacgacggtatctccagtatacattcccctagtctaagggaaaggagtttcc

SEQ ID NO: 606899 - DNA, 74 bp, Homo sapiens
cttggtttcgggatctcggtgctgcagacggcgagacctcctgcacaggtacacggctgccccacaccccctgc

SEQ ID NO: 606900 - DNA, 89 bp, Homo sapiens
ctcgagcttccctcgtggccgacggaacaatgaagattagcctgaggcctgctcagtcgttcctaatgaataaaaatcaagtgccaaag

SEQ ID NO: 606901 - DNA, 75 bp, Homo sapiens
tttggagaagctcctggactggtttaaaacggtcactgaaggagttcatggcctcccacgggaacgacgccgcga

SEQ ID NO: 606902 - DNA, 101 bp, Homo sapiens
ctcagccactgggacgcttgtgaagagccatctcatcgctaatgctgacgtgcagtccattgctgtagctgacgattggtcttgatttgagcaatggtaaa

SEQ ID NO: 606903 - DNA, 80 bp, Homo sapiens
atccgccgcccgtccacacccgccgccaggttattcagcttctcaaggctggaaaagcgaaggaagtttcctacaatgca

SEQ ID NO: 606904 - DNA, 90 bp, Homo sapiens
tggagctctacgcctcctacgtttacctgtccatgtttggagtttgagaatcagaagactcgcttgggcattcagttggattttgaaaag

SEQ ID NO: 606905 - DNA, 101 bp, Homo sapiens
gtcactaatgtacaggcagaaaacgagaggctcaccgcagtcgtgcaggatctgaaggagttgacaggatcagttttggaagatgcttggaaggaaaaagg

SEQ ID NO: 606906 - DNA, 100 bp, Homo sapiens
ccatggtatgacactgaaatctgtaacggctgaaggtgatgtggccgccctcaaccgacgcatccagctcgttgaggaggagttggacagggctcaggaa

SEQ ID NO: 606907 - DNA, 100 bp, Homo sapiens
tcatccccggctccttctcggccactgtgggcatcggattcacggcagaggtggaggagacactgaagcgactgcagagccagaagggagtgcagggaat

SEQ ID NO: 606908 - DNA, 98 bp, Homo sapiens
cggggccgaggccgcctccgagcgccaggtgtgggcagaagaaaaagctagtgatcaacagtggcaatggagctgtggaggacagaaagccaagtgga

SEQ ID NO: 606909 - DNA, 83 bp, Homo sapiens
cccgccggtcacctccgcgcggacaccaggacctccggctagcctgtttcagccacctcgtcgtcctggccttggaactgttg

SEQ ID NO: 606910 - DNA, 100 bp, Homo sapiens
gctgtcagcgatagcccagtggatggccattccagagcctggaaacctggccggcgtcaggcacatcatcctggtcctctcaggaaaggggggcgttggg

SEQ ID NO: 606911 - DNA, 75 bp, Homo sapiens
gtgtccccaggaaccacagctgctcagaaggccaggctatgtggttgatgttgcagaatgatgagccggaggact

SEQ ID NO: 606912 - DNA, 137 bp, Homo sapiens
tcttctgtgggtcctctggtgttgagtggtcggcttggtgtggtgtgcggaggagctccaggcccgtcggcgcggagatttgggaatggatgatgaaggagatgatgacccagttcctctaccaaatgtgaatgcag

SEQ ID NO: 606913 - DNA, 75 bp, Homo sapiens
cgagcaggacaaggagacggtcagagtccaaggtccgggtatcttaccaggtcaagaacccagtatggaagggag

SEQ ID NO: 606914 - DNA, 75 bp, Homo sapiens
ccgccggccgtctccttaacaccgaacaccgccaagattgacagacacctaatattcatgacttgagaatattct

SEQ ID NO: 606915 - DNA, 100 bp, Homo sapiens
gaatgccacagcatcctccagcacctcaggagcagtttgagttcgcgctgacagccgtggctgaggaggtgaacgccatcctcaaggcccttccccagtg

SEQ ID NO: 606916 - DNA, 100 bp, Homo sapiens
ggctgttgaacatccacaaggcacctgcaagctctgctttcccagcacgctgcctcaccaagaaagaatccagagaaggactggtggacttggaatgtta

SEQ ID NO: 606917 - DNA, 76 bp, Homo sapiens
gcaacatctgcttctcctcctcagaggtacctgaaagaattccgcacagagcagtgcccactctttgtgcaacaca

SEQ ID NO: 606918 - DNA, 100 bp, Homo sapiens
caatgtcacttacaacattaatcagatactgcatttaagcacttttcaggattagaagaggctgtgtatagaaacatacaagcttgcaaggagcttgccc

SEQ ID NO: 606919 - DNA, 100 bp, Homo sapiens
caggccctggagtgcatgcgcaggtactccaaagattcaggtttactcacgtcatccagcagagaatggaaagtcaaatttcctgaattgctatgtgtct

SEQ ID NO: 606920 - DNA, 83 bp, Homo sapiens
cagagacagcagctaatgtgaaagagctcgtgcagaatttactgccgcttacaaacacgcagatggcaagaagattgatggca

SEQ ID NO: 606921 - DNA, 80 bp, Homo sapiens
gcggccatcgccctgccggaccgcgcctcaggctcccccaggcattgaatgccccagaggagcccgaaacctcccaggct

SEQ ID NO: 606922 - DNA, 75 bp, Homo sapiens
atccgaaatttcttgggtgaaaaatatatccgcagggttcggatgagaccaggcctccccatggccacccatgga

SEQ ID NO: 606923 - DNA, 100 bp, Homo sapiens
cgcttctgcccaagatgaggagcccctggcctgcccggacgagttcgatgacttcgtcacctatgagcccaggatggcggcccaggtgactctggaggac

SEQ ID NO: 606924 - DNA, 89 bp, Homo sapiens
gatgaagtgaaaagacagtggagagaagaagttgcttcacttcaggctgttatgaaagctggaacagatggtgatcaaaatggacttga

SEQ ID NO: 606925 - DNA, 83 bp, Homo sapiens
ggccctgatcatcctgctgggcttcgtccagatcgggaaggggtggtgaaggaggagatctttgatgacaatgccaagcttcc

SEQ ID NO: 606926 - DNA, 98 bp, Homo sapiens
ccggagcaagatggctgagggcgagcggcagccgccgccagtgggtaattccagaattgattggccataccattgtcactgtattactgctcatgtca

SEQ ID NO: 606927 - DNA, 100 bp, Homo sapiens
gaggaactgagacgtttcgaattccagatggacttcagcagaaatctttatgatattggggaacaactggacagtgaagatctggcctccctcaagttcc

SEQ ID NO: 606928 - DNA, 100 bp, Homo sapiens
ccgcgggagtaggcgacgggcgtgagggcgaggcggcggcggcggcggccagagagcagcagccgcctgccacgagactcaaacaacttgctgggaccat

SEQ ID NO: 606929 - DNA, 87 bp, Homo sapiens
acagggaagtctataagctttgcaacagaattacagagtatgatcatgctacaagtgaaaactgatgagaaactgaatgtgtctgat

SEQ ID NO: 606930 - DNA, 100 bp, Homo sapiens
gccaggacgacgaggagcagggcctgactgcgcaggaagatttcgatgtcgatcattttgtgtctgactgtaggaagcgggtccagctggaagaactgag

SEQ ID NO: 606931 - DNA, 56 bp, Homo sapiens
agtgcgtcaatcagagcgtcctgtgcggctgaccccgcactacatctacccaccag

SEQ ID NO: 606932 - DNA, 50 bp, Homo sapiens
gtcgccgcgtccttggctggcgtctggacccacaaaccgtggagaccaag

SEQ ID NO: 606933 - DNA, 100 bp, Homo sapiens
cagacaactgtcctgacatgctcgacctggccctgcgcaactgcctgctgacctctgacctgaccgtgcgcatcggagactacgggctggcccacagcaa

SEQ ID NO: 606934 - DNA, 89 bp, Homo sapiens
taacagaagaatacaacaaactcttggtacttcaaacacgactaagcaaggacctgcgcgaagtctggctcaattatcctctccaccca

SEQ ID NO: 606935 - DNA, 100 bp, Homo sapiens
cgcagatgttgtcaaggtggcctaccaggaggccaggggtgtcgccatgtgtgtgctgtatttatggagtttaaagattaatcatcccaaaacattgttt

SEQ ID NO: 606936 - DNA, 74 bp, Homo sapiens
ctacacaatgtatttgacatggtcagctatgaccaatgaaccagctcttttggtacaccagaaggccagaatgg

SEQ ID NO: 606937 - DNA, 82 bp, Homo sapiens
tgaatctgacccgactggattcctccatgactcaaggcacagactctccaggtctctaattaacagaagatggcaaagccca

SEQ ID NO: 606938 - DNA, 80 bp, Homo sapiens
agccccacatttgcagctcattgaaggaaagggctcgtgcaatccgcttcagacaggatggtaacgaagccgtcggagga

SEQ ID NO: 606939 - DNA, 76 bp, Homo sapiens
tgttgctggacccctggcagggtctggagcccggcactgtggtcataacagagcaggcagtggatacctgcttcaa

SEQ ID NO: 606940 - DNA, 75 bp, Homo sapiens
acagctgcttccattggccagtatgaagtggtgaaggagtgtgtgcagcgatggggtcgaggatttggtcttttg

SEQ ID NO: 606941 - DNA, 90 bp, Homo sapiens
ggagccgcctctgcggctccaggagggcgcaggagcgggactgagagcgcctggaggctcgagcggaggactggtcgaattgacaaatct

SEQ ID NO: 606942 - DNA, 75 bp, Homo sapiens
gtgacaccatgaaagtcctctttggacatctaactaagtcttcatcctccaggtccacctttagcaagacctatt

SEQ ID NO: 606943 - DNA, 75 bp, Homo sapiens
tggcattgacatttaattttagggtcctttatatagaagggagagtaggaaatggtgttcacactggccctgaat

SEQ ID NO: 606944 - DNA, 100 bp, Homo sapiens
ccaagtccgaccccagcgtggcgttgctgcagcaggcgcagggccagtgggtgcagctcctctggtgcaagtgtggtagctattgacaacaaaatcgagc

SEQ ID NO: 606945 - DNA, 100 bp, Homo sapiens
ttggaaaaataccatcttcaactgtacaagaagctttacacaatttccttaaggagcccaggatgtgcgagttcaagtgctacccgaggtgcgaggccag

SEQ ID NO: 606946 - DNA, 75 bp, Homo sapiens
agacgatggagggcagcgaagagagtcaccgaccatgacggatgcaggacagctggagcacacattgatgaatca

SEQ ID NO: 606947 - DNA, 100 bp, Homo sapiens
gttagttccaaatgtgtgtctcccgctgaacagaagaaacaggcctcagctgttgaagaacgctctgcagagagcagtagagaggggccagttagaacag

SEQ ID NO: 606948 - DNA, 75 bp, Homo sapiens
catcctgaagaagtgtgttggcctggggtcgggccccggctcagtggtcccaggcagctcgggtgtcggaacccc

SEQ ID NO: 606949 - DNA, 98 bp, Homo sapiens
aagagaatctaacaaattaataaaccttccagaggattacagcagcctcattaatcaagcatccaatttctcgtctaacataagaccagactatgcag

SEQ ID NO: 606950 - DNA, 100 bp, Homo sapiens
gggagaacttccgctttggaaaccctctgcacattgcccagaagcttttccgaggtaattctgttccacaggatatctgctgtatggcagctgatggcag

SEQ ID NO: 606951 - DNA, 90 bp, Homo sapiens
ttaattttagggtcctttatatagaagggagagtagcatgccaatgaagatgtggaaagaatgttactaggaaacaagtgtgatatggac

SEQ ID NO: 606952 - DNA, 100 bp, Homo sapiens
taatatggaggtggatttaaaagatttcttaatgaaaatgaaagaaagtccacatttccaaaagtccaaggaatccacctcattgcctggagatcacgcc

SEQ ID NO: 606953 - DNA, 100 bp, Homo sapiens
tggaacccctgctctggcctacctggcgggctgtgtggtctttgaggatgtgtttgtatacttctctcgggaagaatgggagcttcttgatgatgctcag

SEQ ID NO: 606954 - DNA, 101 bp, Homo sapiens
ctttactggaaagacccagaatatgccaagtatctaaagtctacttccccagcaggacagcatcattctcctatatcttctagacatcactcatcttcctc

SEQ ID NO: 606955 - DNA, 73 bp, Homo sapiens
cgccgaccggcgccgggagatcctgggagccatgtggctagaaatcctcctcacttcagtgctgggctttgcc

SEQ ID NO: 606956 - DNA, 76 bp, Homo sapiens
cgaggagccgccgccccccctcgcaggtccctctggcctgcatgccaggagtcggtcaccgccctgtgcttcctcc

SEQ ID NO: 606957 - DNA, 100 bp, Homo sapiens
gagcctggctgagctggagctggagctgtcggaaggcaattaagttggaatatgcaaggttggttaagttggcccaagaagacaccccaccagaaaccga

SEQ ID NO: 606958 - DNA, 82 bp, Homo sapiens
ccgggtcatgcaggacatcgtgtataagctggtgcctggcttgcaagacagggctgagcgggtgatcacgctgaagatggag

SEQ ID NO: 606959 - DNA, 90 bp, Homo sapiens
gccttagctgtgctcgcgctactctctctttctggcctggaggctatccagcggaacggcaggagcagctgatgggatatcggaagagag

SEQ ID NO: 606960 - DNA, 100 bp, Homo sapiens
cctgccaacggtcggatggcggagacgaaggacgcagcgcagtttgttggcatgggatggaggatgaagagacacctgagcaaagtgtttctgtagaagg

SEQ ID NO: 606961 - DNA, 74 bp, Homo sapiens
ctcgcctcgggacccgcggtccccgctcttgctggtaaatgcgaatgtaaggaacagacattaggaaatgccaa

SEQ ID NO: 606962 - DNA, 82 bp, Homo sapiens
gcttatggcggcgctggagagggggcgctgagctgttggggtgaatgactggcaggaggactgggtcgtgttctatgcccgg

SEQ ID NO: 606963 - DNA, 51 bp, Homo sapiens
ccaacttctgctacagacgactcatttttcagaagaagtgaagtcaagatg

SEQ ID NO: 606964 - DNA, 96 bp, Homo sapiens
ctgactaaggagctgcagcagcatgtaaagtcagtgacagccccatgagacactttgagactccgaacaattctggaagcaatacagaagcacatt

SEQ ID NO: 606965 - DNA, 100 bp, Homo sapiens
ggcagcgcgcgaacgtgggcgtggggatggccaccagtttccggacagcttcgtgctggccctttgaggtggacctttctcacgtgtatcttgcctatac

SEQ ID NO: 606966 - DNA, 76 bp, Homo sapiens
agcagaggtgggcggggaggaggacgcggtggaatgggtatccctctgaagaagatatgatcgaatgggccaagag

SEQ ID NO: 606967 - DNA, 87 bp, Homo sapiens
acgatgccggccgtgagcctcccgcccaaggagaatgcgctcttcaagcggatcttgggacacttgacattcagggacgtggccata

SEQ ID NO: 606968 - DNA, 100 bp, Homo sapiens
agcacgggcaaggcggagagtgacggagtcggcgagcccccgcggcgacaggtttgtttgtaaaaacaatggtgtgttgtttgaaaaccagctgcttcaa

SEQ ID NO: 606969 - DNA, 99 bp, Homo sapiens
gaagatctgtccagcatcatcctcctatcagaggaggacctccagtgggctcgggatgagtttgaaggcctcttcaagcagccagcagaaaatgtcaac

SEQ ID NO: 606970 - DNA, 74 bp, Homo sapiens
agatataacagttttaagaactgctataaaaggatttatgattggctacttgggctattgtaaaggggtagaac

SEQ ID NO: 606971 - DNA, 82 bp, Homo sapiens
gatcatgtctgcgagccaggattcccggtctcggcgcggaagatggccggcggcgtggacggccccatcgggatcccgttcc

SEQ ID NO: 606972 - DNA, 99 bp, Homo sapiens
tggatcctggccgaggtggtcagttacagccatgccaccaacaaggtgagcgagccacaggcttcggtgtggccctcctgctggcgctcttcggccgtg

SEQ ID NO: 606973 - DNA, 83 bp, Homo sapiens
aaatggcggagtatctggcctccatcttcggcaccgagaaagacaagaggtgtgattgcctatatcagttcttccagctcagc

SEQ ID NO: 606974 - DNA, 90 bp, Homo sapiens
gagaaatgcgagagctgcctgcagggctacttcctcctggacgggaagtgcaccaaggcggcgactggcggcgcgatggacctgaccggg

SEQ ID NO: 606975 - DNA, 73 bp, Homo sapiens
tgttcgacgtgcggcccgaatgccagcgcctcttctaccggggcaagcagattcctcgaggtctgaacaagaa

SEQ ID NO: 606976 - DNA, 97 bp, Homo sapiens
gtaggagcagaaacaaatggaagtaaggatgcgttgaataagttttcagaattatatccagatcgagagacagaagattctgaaagggttcaatgaa

SEQ ID NO: 606977 - DNA, 99 bp, Homo sapiens
tcggggacatctatttggcgatcaacatcaccaacggcgaggttttcctttggaatatggataaatacaccatgatacggaaactagaaggacatcacc

SEQ ID NO: 606978 - DNA, 98 bp, Homo sapiens
aaagatcactgaagttggatggtctgttagaagaaaatgtaatcttcagcaagtactgcaactccagcgacatcatggacctgttctgcatcgccacc

SEQ ID NO: 606979 - DNA, 82 bp, Homo sapiens
gcggtggcggcgggctcctgcgagaagcaagcggaacttcctgagcacatgattaagtaccggtacatcccgttcacacatg

SEQ ID NO: 606980 - DNA, 75 bp, Homo sapiens
tactggctcatgatttccagatgcagtttcgaaaatgctatacagaaatggatcctgtcatcattgcttctgaag

SEQ ID NO: 606981 - DNA, 80 bp, Homo sapiens
cagctcagctcttactgcgggccgctccgacggcggtccatcctgggaatgacgttggccggagctcctatggcgccatg

SEQ ID NO: 606982 - DNA, 122 bp, Homo sapiens
gtgcaatcctcacattcaagctgataggctgcgctaccggaatgtcatccagcgagtgattaggtaacgtgaagcacctggttctcttcctccatgaggctgtcctggtgcagtatgtggac

SEQ ID NO: 606983 - DNA, 100 bp, Homo sapiens
ctcccttcgcctccaggatgcgctgagccctacaacacccccagcggccgccggctcccccacgagtctgttctctggggaggcagtaaggggccgtgga

SEQ ID NO: 606984 - DNA, 100 bp, Homo sapiens
ttctaatccaagcaataacccaagcaaaacttcagatgcagaaacccgaaccctagcggagattgccaaagtggagctggacaatatgccactccgtgga

SEQ ID NO: 606985 - DNA, 98 bp, Homo sapiens
taggtcatccttcagcagctcctcagagctgtccagcagccacggcccggggttttcaaggcttaatcgaagagatgctgggcgccgtgtacacagaa

SEQ ID NO: 606986 - DNA, 75 bp, Homo sapiens
tggagctggtgcagcaggaattgggatcgtgtcgctgcgggcgtggactccctggtgctagaaagcgtgatgttc

SEQ ID NO: 606987 - DNA, 95 bp, Homo sapiens
cacctcagcctcatcccggagctcgtcaccaacgaccatgagaaggtggagctcacggcactcaggctggacatactgcaccaggttgctatgtg

SEQ ID NO: 606988 - DNA, 100 bp, Homo sapiens
ggattcatttagagctgcggaacaggacgccctctgatgaagggaaaaggccgaggcatcagcgtgtgaagaccgcaaagacgatcccgagtacagttgt

SEQ ID NO: 606989 - DNA, 75 bp, Homo sapiens
ggagttgcaccagcgtgcccgggagtacatctacatgcattttggggagagttgaagtattgataacaccaagga

SEQ ID NO: 606990 - DNA, 75 bp, Homo sapiens
aaaggaaagacctcagagtgttctcagggtaaaagcatgtctacgaagaaaagtatgtgaacaggaagaaaagta

SEQ ID NO: 606991 - DNA, 80 bp, Homo sapiens
gaaagttccgccatgagctggggcacggagctgtggatcggcttcaccaccgaccctcggatggcccgctcctcccccta

SEQ ID NO: 606992 - DNA, 50 bp, Homo sapiens
tgtcggagacacggtggaaacgcttatgccgcggcccatggagcccgccg

SEQ ID NO: 606993 - DNA, 82 bp, Homo sapiens
tctcttcgagttcttcgtgctgctcaagagatgccctgtatccaagcccaatatgggacaccagcaccgagtccgggacccc

SEQ ID NO: 606994 - DNA, 83 bp, Homo sapiens
caacacggctgtcaagctggcgcgccagagcggcatcgagatgaaggatttgggggcagagcacttggcaggtcatgaagggg

SEQ ID NO: 606995 - DNA, 75 bp, Homo sapiens
aggaatccattatggtgtcattacatgtgaaggctgcaaggaatagccaggccagaagaaggaaggcctgtggtg

SEQ ID NO: 606996 - DNA, 90 bp, Homo sapiens
ctggagggttttcacgatgaaagcacccaggaagagagaagggcacagttacctaagtatcaacgtaatcttcctcggccaggacaggcc

SEQ ID NO: 606997 - DNA, 89 bp, Homo sapiens
ctctcctgctgctgaccaaagaggactttcgctatcgatctcctcattcagtaagtcttcagtccagagaccgaataggcacaggagga

SEQ ID NO: 606998 - DNA, 80 bp, Homo sapiens
gctgtgctcagggctcgcgggtgaccgaaaggatcatgaactagtgacctggaaagaatcaggagtcagctctgacaatg

SEQ ID NO: 606999 - DNA, 98 bp, Homo sapiens
gaatgtctttcctaccatctaaaatacgaaggtttctggctggattgagaaaccaagatgtcagaagatgaaggattggtccaaaataagaaagctag

SEQ ID NO: 607000 - DNA, 50 bp, Homo sapiens
gaagccctgcggatggccaacgtggcagcaaccatgtccaagggacctgc

SEQ ID NO: 607001 - DNA, 100 bp, Homo sapiens
cttaccttaaaccttttaagcaaggaaattgaactaagaaatggagaggatcgaaaggactctgaagagtaaagtgatggaatggcgacctaaacaccca

SEQ ID NO: 607002 - DNA, 75 bp, Homo sapiens
gaactatagcaatctggttttcttggcttcagcaagtgtcaacattggtcagttagagcatcaacttatattgtc

SEQ ID NO: 607003 - DNA, 100 bp, Homo sapiens
aaaaggaaaaacatcttgatctggagaaaaactggatgttggtagaaaaagcaagagtttgttatatagcaaaaaagcttgtggtgaaggggggcaaaaa

SEQ ID NO: 607004 - DNA, 96 bp, Homo sapiens
ggtttggattttacagaagtggccaagccaaggaaaccattcccttacaggagacctccctgtacacacaggcaatgttgtttaatgtagaaaatg

SEQ ID NO: 607005 - DNA, 74 bp, Homo sapiens
cagcaggcgctggctcctgctcagaaggcatcacaggaggcctctgcatgatgtggcttccaaagactcaagga

SEQ ID NO: 607006 - DNA, 50 bp, Homo sapiens
ggccgagtgtgtcgccgcggccatcaggggaggtggggaagacagggctc

SEQ ID NO: 607007 - DNA, 100 bp, Homo sapiens
gccaaaaggacgtcctcctagtgctagcagcttagatgccatttctcctgttcagccatcagtagccaatcgggccatgagaagagttagttcagttcca

SEQ ID NO: 607008 - DNA, 100 bp, Homo sapiens
ggagccgaataccaagctcggatccctgaatttgatccaggttgcatcataaatacaaaggactgaagttataaaagagaaaagagaagtttgctgctaa

SEQ ID NO: 607009 - DNA, 100 bp, Homo sapiens
tccgagagtttgcagcaaagatcattgaaggttaatcatgttatcagccctctgttggatatctactttcctgaaggatctggtgttaagataatttcag

SEQ ID NO: 607010 - DNA, 100 bp, Homo sapiens
gtctccgagggtctcccgggcttccagccctgagggtcgccacctcccttccccacagctaggaaccaaggttccatctgtcttgcttgctccaagtcat

SEQ ID NO: 607011 - DNA, 100 bp, Homo sapiens
atcctgccaatacccgcagcatttccaacatgataagcgtgtggaaaattggcctctgatgcagtctccttggcctacactaagtataagcactctttat

SEQ ID NO: 607012 - DNA, 75 bp, Homo sapiens
ataggacggaaacgccgaggaacccggctgaggcggcaggacttcgccgtctccactgtgccagtctcgggtccc

SEQ ID NO: 607013 - DNA, 100 bp, Homo sapiens
gagcgtgccctacttcaaggataagggtgacagcaacagctcggcgggctggaagctcttcagtaggttacctgcaacatccaggatcagaacaagtaca

SEQ ID NO: 607014 - DNA, 83 bp, Homo sapiens
gaccttggacttctcagcctccagaatgttttcggctttgtgagaaaccttaccatcaaacacgatggccagcaacgttacca

SEQ ID NO: 607015 - DNA, 100 bp, Homo sapiens
gagcagcccctcccgcagccggtgtgacctgtcccttcagggttgtgagtcccggcccagcccctccacccccctgcccccccgatgcgaccatgggctc

SEQ ID NO: 607016 - DNA, 71 bp, Homo sapiens
gcatcatagttgtgtatgatgtgacagatcagcatgctacaagtgaaaactgatgagaaactgaatgtgtc

SEQ ID NO: 607017 - DNA, 100 bp, Homo sapiens
acagcccgcagagagttaacttctgtttacatggaactcagacatctgcaaatcatggtcttctttgatgtgaggattggagacaaagatgttggcagaa

SEQ ID NO: 607018 - DNA, 88 bp, Homo sapiens
ggcagccttgcgctgctctaatggtccggacttccgtgtatgtggacgagtgctcactagcagaaaaaacctgtgtgaggaaaaacga

SEQ ID NO: 607019 - DNA, 74 bp, Homo sapiens
aggtggtggtggccaagtatgcgcccagcggattctacattgcctccggagctgcatcttcctcccgtgaggct

SEQ ID NO: 607020 - DNA, 75 bp, Homo sapiens
ctgtagttcagaagaggtttggctttccagagggcagtgtagaggccaagttcccacctggtgggaagcactgtg

SEQ ID NO: 607021 - DNA, 96 bp, Homo sapiens
ccatcctggctgtgggtaactgtaccctcaacttgctatcaaaagtggatctgattggtggctacaacattggcaccgtcagccatgagagccgtg

SEQ ID NO: 607022 - DNA, 83 bp, Homo sapiens
cccaggccccgccgaggcggccaggtgagaagccctaccactgcaactgggacggctgcggctggaagtttgcgcgctcagac

SEQ ID NO: 607023 - DNA, 100 bp, Homo sapiens
cgggagtattatgaaaagatcgttcacgcttacatcatcagctacctgaagaaggagatgccctctgtgtttgggaaggagaacaagaagaagcagctga

SEQ ID NO: 607024 - DNA, 51 bp, Homo sapiens
aaggattccaagtaactcttatttgatatctgagaaatatgggctgcccgt

SEQ ID NO: 607025 - DNA, 76 bp, Homo sapiens
aggccaacttactgcttcctgaactgggcagtgccttctatgacatggccagaaccccatgcatcccagctcaagg

SEQ ID NO: 607026 - DNA, 83 bp, Homo sapiens
tggagcttgacgcgctggagcttgagagtggagtacgacaaggagttctcccctcgtcagcgacaccacaaagagttcaagtt

SEQ ID NO: 607027 - DNA, 110 bp, Homo sapiens
aaggagatgcagaaaatgaatccatacaagattgatataggcgcagtatattctcacagagctatgtccaaactgggtcttcggcaggttacaggagttactagagtcac

SEQ ID NO: 607028 - DNA, 100 bp, Homo sapiens
ggacttgctgaaccgcttcctgggggactatgtggagaacctgaacaagtcccagctgaagctgggcatctggggcgctgccacgtgccgtgggtaccca

SEQ ID NO: 607029 - DNA, 98 bp, Homo sapiens
aaatgaagaacactttcaagaaccaggaagaggggatggagcgccagctggtggccctcctggaggagctgtcggctgagcactacctgcccatcttt

SEQ ID NO: 607030 - DNA, 85 bp, Homo sapiens
ttctctggcatggaaggggtcctcagagttactggggtctgggataaaagtgaaagtggtgattggcattgtactgctagctgga

SEQ ID NO: 607031 - DNA, 100 bp, Homo sapiens
acctcggcaacaattacttacctggcccaggaggatgggcccgttgtggtacacactggcagctcaggacctggtgatgcgtgcccggggtgtgctgaag

SEQ ID NO: 607032 - DNA, 110 bp, Homo sapiens
tgtgacagaacatttacttaacacatcatgaaggctagtttggatgtggaggggaatagactccatctatccatatgaggtccacgctgcttttatgagctgtaacactc

SEQ ID NO: 607033 - DNA, 76 bp, Homo sapiens
atttgttaaggattccaagtaactcttatttggcatctggccatctgaagaggttttggcttactactgcctcaag

SEQ ID NO: 607034 - DNA, 101 bp, Homo sapiens
ctgttgcccgcggccccccagccgctggagaaggagaacgacggctactttcggaagatcatggaagggaagtggttgctgtgtatgttactggtgcttgg

SEQ ID NO: 607035 - DNA, 100 bp, Homo sapiens
gacggccaagcagcaccagcgtgcctttgggtgataaggggtgacccatgggctgagggcatacgatggcttgtctctgcctgaggacatagagaccgtc

SEQ ID NO: 607036 - DNA, 83 bp, Homo sapiens
atgcagccagtagcttggatccttgtgggcatgatccataatcggtttcaagctccagaagctgctgcagcgaagacgcaagg

SEQ ID NO: 607037 - DNA, 75 bp, Homo sapiens
ctcaccttgggcttggtggcctgcgtgtcggcggagtcggagcaccagcgaaagcagccagtctgagatattgac

SEQ ID NO: 607038 - DNA, 89 bp, Homo sapiens
gggcgccgcccggggtccggtgggcaaaaggtcctgttgttggagagttcccatgtcaaaatgacataaatttgtcacaagcaccagcc

SEQ ID NO: 607039 - DNA, 82 bp, Homo sapiens
tactgatggtgctgtaaccacctcacagattccagcttcggaacaagagaccctggttcaaggtgtttgcagactatgaagc

SEQ ID NO: 607040 - DNA, 83 bp, Homo sapiens
gattcacttgtgtgcggaactcctcggaaccatgtttggtgccctggttgtcagatgttggaaagcagtaggacggaacatac

SEQ ID NO: 607041 - DNA, 83 bp, Homo sapiens
gcaccagcgccttgatcgagtacttgagcaaacggggattcagcgtccgatcctttggaacagggactcacgtgaagcttcca

SEQ ID NO: 607042 - DNA, 98 bp, Homo sapiens
tcctcgatccgcccacagacctcaaattcaaagggctgggagagggttctgccctccttcatccagacagcaggtctcatcctaggtccttagagaaa

SEQ ID NO: 607043 - DNA, 74 bp, Homo sapiens
attaatgtggatgatcctgatgcagccaattataatgatacactgaagagatggtgccttggcacccttgcctg

SEQ ID NO: 607044 - DNA, 75 bp, Homo sapiens
ccctggatcaccgacagcacagacagaatccctgctaccagttccttcaatggtgccttagctgctgttcctgtc

SEQ ID NO: 607045 - DNA, 100 bp, Homo sapiens
ctttctcccttgatccgggagtctttccactgggttttcgtaacaccccagggcctgtaaggtttggtgtttccctttcaagatgccactttcagacttt

SEQ ID NO: 607046 - DNA, 96 bp, Homo sapiens
ccaagtgtgacaccagctggactcattgtgtccattgctctcttgcagcacctggggctcatgggtacgtttgcgggagcacatgggtgaaaagta

SEQ ID NO: 607047 - DNA, 100 bp, Homo sapiens
cttccagtgccaaaccaaactggagctggtgcagcaggaattgggatcgtgtcgctgcgtgaaaatgcctcgtgtaaaagcagctcaagctggaagacag

SEQ ID NO: 607048 - DNA, 95 bp, Homo sapiens
agcggcgttggaggccaccgtttccaggcctcaggagtgcaagtagctgatgaagtatgtcgcattttttatgacatgaaagttcgtaaatgctc

SEQ ID NO: 607049 - DNA, 100 bp, Homo sapiens
cccgtgaccaagtggagccccaaacaagtggtggactggactagaggcaatggacctcatcatgaccgttgctgtacttacaatgaaaacaacttggtgg

SEQ ID NO: 607050 - DNA, 100 bp, Homo sapiens
aatgcaagcgagacccctgccactcggatgtccataattcaggttgtacggctctccaggtgacattgacctctggcccgcccttatggttgaagacctg

SEQ ID NO: 607051 - DNA, 83 bp, Homo sapiens
ccctcgtcagcggctccctgcccttcgacgggcacaacctcaaggttcaagaacatgaagactcgggtgactcagaagtggag

SEQ ID NO: 607052 - DNA, 100 bp, Homo sapiens
gagttgacgggatttcctgaaatgttggggggacgtgtgaaaactttgcatcctgcagtccatgctgtgagagtctgagaaaactgtgcgtcttcaagaa

SEQ ID NO: 607053 - DNA, 100 bp, Homo sapiens
atgaggagcggagcggagaatgccaagccacataaagaagatccctaatagtcatttctcaacaattatatagtcaactgatgtaacaatggtactaata

SEQ ID NO: 607054 - DNA, 100 bp, Homo sapiens
aactttaaatcttgagaaaagaagattgtctatcatgaaggaggtaaaataccatgaagattttgaaaaaacaaaggggagaggctttactcccgtcgtg

SEQ ID NO: 607055 - DNA, 120 bp, Homo sapiens
ccggcctcgcaaggcgcttcccctttccagagagccagaaagaaggatcgcttacacctgagacgaactacagaacagcacgtaccagaggtggaagtccaagtcaaacgcagaaggact

SEQ ID NO: 607056 - DNA, 132 bp, Homo sapiens
aggagcgggccctggaggagcagctgctcaagtactcgccggacccggtggtcgtccgcggctccggtcacgtcaccgtttgcctttccccatcttcctggttctgctccttcgtggcctagtcttgtggac

SEQ ID NO: 607057 - DNA, 74 bp, Homo sapiens
taaagcatgtcagggaacttgctgagcaactattcaaaaatagtattggaacagttgtgctgctgccagcgatc

SEQ ID NO: 607058 - DNA, 80 bp, Homo sapiens
acattcaagaaaacacacagactccaactgtacaagaggagagtgaagaggaagagtcagggactatgcggcgcaaacat

SEQ ID NO: 607059 - DNA, 101 bp, Homo sapiens
tggactggttaaataagaggctgggggccgaaggccagagaccaggatttggctacggaggcagagcgtccgactataaatcggctcacaagggattcaag

SEQ ID NO: 607060 - DNA, 100 bp, Homo sapiens
gaaccgctcctacagcaagctgctgtgcggcctgctggccgagcgcctgcgcatcagcccggacaggcctctacaactactacgacgacgagaaggaaaa

SEQ ID NO: 607061 - DNA, 100 bp, Homo sapiens
gctcgctccgctcgtcccgctcgtcatggcctacccgggatacggaggagggactttgtgtggacagtaatgacctcacgtttccgattgcctgctggca

SEQ ID NO: 607062 - DNA, 96 bp, Homo sapiens
ctgccaccgaggccccctcttcgcctcctccagaaaatgcttggacagaagagatgagtactatttccactaaggcctagaattgcctactgtaca

SEQ ID NO: 607063 - DNA, 98 bp, Homo sapiens
cagggcttgggaaggggaaggaaacctctctgaaatctgacacctgctctcccggcaaggaaacttcgcaggctgttggggaatggcggtcaatgtgt

SEQ ID NO: 607064 - DNA, 83 bp, Homo sapiens
gtctgaggtcatcggggatgtggacgaaggggccgacctcctagtattctaccttgtaaatactgttatttgtatatactgta

SEQ ID NO: 607065 - DNA, 90 bp, Homo sapiens
agagctatacagctgctattaggcaggcggccttctgatctgtttaccacgtgagcaagcagctcggttctgtgcagagataaagtcccc

SEQ ID NO: 607066 - DNA, 100 bp, Homo sapiens
actttcccagaagttgttctaacgctgcctttgctttaaaacagtattacttgcggtactccacatcagcattctcaagactggagaagttaggcctcag

SEQ ID NO: 607067 - DNA, 75 bp, Homo sapiens
tgtcgcgttacgggcggtacggaggaggttaatgttcgtgaagaaattgaagagttttttccaagaatgtggaag

SEQ ID NO: 607068 - DNA, 75 bp, Homo sapiens
ctgcagagggtcccacggtggaagcgagagaggagggtttgatctgtggatgaaatgaatcatgattttcaagct

SEQ ID NO: 607069 - DNA, 133 bp, Homo sapiens
tctggtcacgcccgagctctgatgcaagcgaagaaccttttccctaatacgtacctcattgtgggaggtataatttgggcgactacaatggagagatcatgtctgaggttatggcacagagacagccaatgaa

SEQ ID NO: 607070 - DNA, 131 bp, Homo sapiens
gcccctggtgaccaacttgctgcggtttttgttcctggggctgagtgccctcgatgttcatgagagcgcagtttgactatgatcccaaaaaggacaatctgatcccttgcaaggaggcgggactgaagttt

SEQ ID NO: 607071 - DNA, 100 bp, Homo sapiens
ccttcgcgttgttgctcaggagcgccaggctggtgagctggatgagtccgtgctggaactgacaagccagattctgggagccaaccctgattttgccacc

SEQ ID NO: 607072 - DNA, 101 bp, Homo sapiens
agagaagagaatgcctgaagacttggatgaaaatatggattacaggttgatgtgggaggtcttgttgcagtaggagaaagagcacaaaagaggtctgggaa

SEQ ID NO: 607073 - DNA, 75 bp, Homo sapiens
gaatcaacccagaacggatagctccctcctggaaaagctatcagttgagggatttgcagttgataaaatggctgg

SEQ ID NO: 607074 - DNA, 82 bp, Homo sapiens
gggagctggacggcgagcgcgagcggcgcgagaaatttgctggcctagacctgaactcttcagataatcagagtggaggaag

SEQ ID NO: 607075 - DNA, 75 bp, Homo sapiens
ttgctttactggaaagacccagaatatgccaagtatctaaatacaagccagctgccatgttgtgagcacatacca

SEQ ID NO: 607076 - DNA, 83 bp, Homo sapiens
ctgggaccgggacctgctgctggacccggcctgggagaagcagcagcgcaagatgaaggatttgggggcagagcacttggcag

SEQ ID NO: 607077 - DNA, 75 bp, Homo sapiens
agactgtttgatgctgaacttcaccgttaagatggtatgttacttacggtcatgaactgatttggaagaacaggg

SEQ ID NO: 607078 - DNA, 100 bp, Homo sapiens
aaaattgtggaaaagtcactctgctcaaagcttggattctgccgtgccactcacgaatggcgacacagaagacgatgctgacaaaatgcacgttgatagg

SEQ ID NO: 607079 - DNA, 100 bp, Homo sapiens
gaaacacgctggcaagcaagattataatcaggaagtggatgcctccatttttaaggcattttttactgtctacagaaacttattgtaattcatttttcct

SEQ ID NO: 607080 - DNA, 98 bp, Homo sapiens
ttcgactggctcctgattacgatgctttggatgttgccaacaaaagctggaagtcgagtgtgctactcaactcaggagatttggagacaaactgaact

SEQ ID NO: 607081 - DNA, 90 bp, Homo sapiens
gattataaccggagattctcagggcaacccagatctaattatatccagatcgagagacagaagattctgaaagggttcaatgaaatgaga

SEQ ID NO: 607082 - DNA, 100 bp, Homo sapiens
gatcagcacaaccttgttgcatgccagataaatgatcaggtctcctaaaaacccagaacagaagatcattaagagagtgattgctcttgaaggagatatt

SEQ ID NO: 607083 - DNA, 76 bp, Homo sapiens
tgcaatgaaaaaagttggaagaaagggtgtcatcacagtaaagggggagaccaaggtcctgaagctgaagaacctg

SEQ ID NO: 607084 - DNA, 98 bp, Homo sapiens
gaaaattcctagcatgtcgtctaaccccggacatggagactaaactcctcttcatgacatcccggtcccttttctagctcctccggtcatgatacatc

SEQ ID NO: 607085 - DNA, 101 bp, Homo sapiens
gttcctttttgtagtaaaatgaatctttcaaagtgccgcagtgtgtctggagaataaatgtggatatccctgaggaagctaatcagaatctttcgtttggt

SEQ ID NO: 607086 - DNA, 100 bp, Homo sapiens
tgaggacaagaccatcgagctcatggtatgatctcgtgaaatcttgagagaaactgaatgacgaatgaaactattgttcctgtttcacacagaagaaaac

SEQ ID NO: 607087 - DNA, 75 bp, Homo sapiens
gggaagtgtgaagcggccaatggcacggaggcctgcgtgttttaaaatcaaagatgggaaaatcggagaaaattg

SEQ ID NO: 607088 - DNA, 50 bp, Homo sapiens
cattgcatcacatgattttgaccccacagagccagagcccagaggtggag

SEQ ID NO: 607089 - DNA, 90 bp, Homo sapiens
ctggaatacacccacctaccttgaaccagataagagatgctgcctatttctataagcgaagccagtgctacaaagacgctttcagatgct

SEQ ID NO: 607090 - DNA, 100 bp, Homo sapiens
ggtccctcagcccagccaccatgagcaccaagcagatcacttgcagaatacctcctctgaaaaatggcagaagcagttttccatgccccaaagaggaaaa

SEQ ID NO: 607091 - DNA, 75 bp, Homo sapiens
ttcagctccatgaaccatttcttctgtatagaaatgcaagctatgaccgtcgtgatgtgagtaggtatggagaag

SEQ ID NO: 607092 - DNA, 100 bp, Homo sapiens
ctgccatcttctccgcgctatggctgcgttcggccgtcagatggtggatgcttccaaaagcatcgaagctgtccatgaggacatccgcgtgctctctgag

SEQ ID NO: 607093 - DNA, 82 bp, Homo sapiens
aaagacgacatccggtgcgccgaggctgctcacaaaagtactccaaagattcaggtttactcacgtcatccagcagagaatg

SEQ ID NO: 607094 - DNA, 82 bp, Homo sapiens
ttggtggcgctgaagctggtgcagggcctcctggcttccctgtgggcctctgagaaaggtttctggaactcccaccaccccc

SEQ ID NO: 607095 - DNA, 75 bp, Homo sapiens
cctaatactattgagtacaaaggctgttacttgaaagaacacactgcttgggtctctacagcggaacaatgtcgt

SEQ ID NO: 607096 - DNA, 100 bp, Homo sapiens
tgacaaccaggcaatgctggatagataccgaattcttatcacaaaggtccctgagcagcagcctattactttgtgtagtggggttgaagacacaaagcat

SEQ ID NO: 607097 - DNA, 98 bp, Homo sapiens
caaacaagtgttatgggaccgcaccttcagtcttttccagcagctcattcagagtgctggacccaaaggagacaacatttatgaatggaggtcaacta

SEQ ID NO: 607098 - DNA, 100 bp, Homo sapiens
acgacaccatggtggaggagcagtacggccagatgtacatcaaggcctccggcagctatgcaggcccactgctcagtggagcgtggaggacgaggaggag

SEQ ID NO: 607099 - DNA, 100 bp, Homo sapiens
tcctggtcctgaaatatagaggcctgattaaatactggtttcacactccaccaagcatcccattacagatagaagaggaggtaggaaaagtaattggaat

SEQ ID NO: 607100 - DNA, 103 bp, Homo sapiens
cccagacgaagacagtccctggatcaccgacagcacagacagaatccctgctaccaatttggtgcttccagatgtgagttatcaggtggaatccagtgaggag

SEQ ID NO: 607101 - DNA, 51 bp, Homo sapiens
tgctggcttgcctacagcaattgccaaagaggtgctgaaaaaatatttgga

SEQ ID NO: 607102 - DNA, 75 bp, Homo sapiens
atttgcgccatcatcctcatcatcatcataggtgacgttcaccaagcggaagttcgggctgatgaagaaggccta

SEQ ID NO: 607103 - DNA, 75 bp, Homo sapiens
ttttgttggaagagatgactgtgagctcatgttgcaggttgcttgggttacaagatctggcaaaaccgagctggc

SEQ ID NO: 607104 - DNA, 75 bp, Homo sapiens
atcagtacaacaatgagccttcaaacatatttgagaccctccgcttgaattgccgtctttctacatgactccatc

SEQ ID NO: 607105 - DNA, 100 bp, Homo sapiens
agcccgaggccggcgccggcgccggcgccgcggcctcttcggctgcggaccctgccattccggaggagtgtctcaatgagatcttggagtcagcagatgc

SEQ ID NO: 607106 - DNA, 100 bp, Homo sapiens
ctcacctgtgcgggatggaacaaaaggattgtgcagactggtgcttaaaatggaagtcgatattaatggagagtctagaagtaccctgaccaccttgccc

SEQ ID NO: 607107 - DNA, 96 bp, Homo sapiens
cagcaaggagaccaggaaggggtggacgcagtggtggcagcaaggtaccagcaggtgttggcagagtggaaggcctgcgaggtggtggtgaggcag

SEQ ID NO: 607108 - DNA, 100 bp, Homo sapiens
ggggtcacccgctacgggaagcaggcctcgccacagaggttggaaagaaccatgactgtattcaggaaggcacatgaactgaagcttctgtcagaatgcc

SEQ ID NO: 607109 - DNA, 100 bp, Homo sapiens
gcgactttttgggagccaggaaatcatgactgagaaagatatggaattatttcgtgatatccaagaacaagcactgcagcaagaaagtacgactatcagc

SEQ ID NO: 607110 - DNA, 99 bp, Homo sapiens
agatttgataacactggagatcagcaccaaatcccacagaggcatctgagcccgaagcagtcgtattcctcgaccaagtgtgagtcaaggatgcagccg

SEQ ID NO: 607111 - DNA, 99 bp, Homo sapiens
gatgactccttccccatgttctacaccaccagtcaagaagaagaagatggagtgtgggagaatggactttcctatgaatgccgtactctgcttttcaaa

SEQ ID NO: 607112 - DNA, 50 bp, Homo sapiens
tgggaggctgaggcgggcggatcacaagaggcatgccaaagggaggctgc

SEQ ID NO: 607113 - DNA, 90 bp, Homo sapiens
ccgcgaggagacagctgaggcccgcggagaccagggcgaggatgccatgaggaaagctggtgtggcacacagtaaatccagcaaggatat

SEQ ID NO: 607114 - DNA, 80 bp, Homo sapiens
cgagcgggcggcttcctggcctgggcgctccggtggcggcggaggacggggaggtttactgcatcgacgcgcggttctac

SEQ ID NO: 607115 - DNA, 99 bp, Homo sapiens
cccagaaaggattgtgacatatcgttggacccagaattgagatacctgggagagaggatttttcatgttaccaacacaaagaaatgataaaggtttgag

SEQ ID NO: 607116 - DNA, 82 bp, Homo sapiens
tctctgctcttcagtacaatcctcaagaggtggaaacatacagaagaagcaaggaaattacagttagaggtcacaactgccc

SEQ ID NO: 607117 - DNA, 100 bp, Homo sapiens
cgaggtctccgcggcccgaggtctccgcccgcaccatgcggctgggcaggacacaactcagatgggaagttcatcgcccgggcacagcggatagagtacg

SEQ ID NO: 607118 - DNA, 50 bp, Homo sapiens
tgcccagtatatccagcagggccccagcatgagaccagatgtaagctctc

SEQ ID NO: 607119 - DNA, 97 bp, Homo sapiens
ggggcagaatacagagatatggaatcaggcagaagctcctcctggggtagagacagatcttattgatgttggattcacagatgatgtgaagaaagga

SEQ ID NO: 607120 - DNA, 82 bp, Homo sapiens
cccccactctttccgccctaatggaggtctccagtttcgacggtctggaaaatcccgaagcagaagcccgtattcatctagg

SEQ ID NO: 607121 - DNA, 102 bp, Homo sapiens
ggggccagggaaccctggtcaccgtctcctcagccgcggcgagtcctttgcacatgttggcaacacacgcatccgcatcggcctccctgcccacaaagcgcc

SEQ ID NO: 607122 - DNA, 51 bp, Homo sapiens
ggaaccctattttggactgaccagcctcccgcgacgatgcccctcaacgtt

SEQ ID NO: 607123 - DNA, 97 bp, Homo sapiens
agcgaagacgcggagaaaaaagttctcggatcagattttattaagacctctactggaaaagaaacagtaaatgccaccttcccggtagctatagtaa

SEQ ID NO: 607124 - DNA, 100 bp, Homo sapiens
aagtttctgagcatccctgcaatgaagagaacccagggaagttcctttttgaagtagttccaggtatcatctttatcagaaagtgaggagtcccaggact

SEQ ID NO: 607125 - DNA, 95 bp, Homo sapiens
ccggcggcatgatccgacacgccggggcgcccgcgcgcggggaccccacgggggccatgctgcaccttacaaaacggtctccgtccgcgcggcca

SEQ ID NO: 607126 - DNA, 100 bp, Homo sapiens
taaaatatggcatcctaatattagttccgtcacaggggctatttgtttggatatcctgaaagatcaatgacttcagtattgatgctcctccatcctttaa

SEQ ID NO: 607127 - DNA, 83 bp, Homo sapiens
ctgaattaaaaggtgtcaagaagctcagaatgctatgatacttgggtccatagtaatgatgttgatgctgaaattgaagatcc

SEQ ID NO: 607128 - DNA, 100 bp, Homo sapiens
caccagttcgcccgtccccctgccccgttcacaatagagtgactcagacatctcctctacaagtacctaacccatcctggatgcaccaccattcatacct

SEQ ID NO: 607129 - DNA, 98 bp, Homo sapiens
atggtttactcccagatcacagcaagactgttctgaatacctcagatttctccttgacagatgtaaaatggggtaaactgagagattatcaggtccga

SEQ ID NO: 607130 - DNA, 91 bp, Homo sapiens
cgtggaggagctgtgcagccgcgaggaggcgcgggaggtgttcgagaacgaccccgagacgaatagcctaacatggcagaccagagacagc

SEQ ID NO: 607131 - DNA, 100 bp, Homo sapiens
ataaagaaatccaacttaccttgtcagccatggatcatctgcagtcattcattgcagattgtgatcgtagaacagaagtggccaagaaaagattagcaga

SEQ ID NO: 607132 - DNA, 100 bp, Homo sapiens
tcattcttccgggcctccaaggaacttaagcaaagaactatttcaagcctagaagaaattgttgaaaagcaaggagacaccattgaatacctgaagcgac

SEQ ID NO: 607133 - DNA, 51 bp, Homo sapiens
atattttggaaagcagtttttaagacaaaccctgtattcagtggatcagct

SEQ ID NO: 607134 - DNA, 100 bp, Homo sapiens
cctggagagggagtgcgtggaggagctgtgcagccgcgaggaggcgcgggaggtgttcgagaacgaccccgagacggactgcaagatggaggaaggcggg

SEQ ID NO: 607135 - DNA, 101 bp, Homo sapiens
tggctttgactcagactctcagcttccaagtcctgatgccctcaggccctctgcccaggacatcagtggtgcccagcctgccgagtgcctgcgattgcagg

SEQ ID NO: 607136 - DNA, 104 bp, Homo sapiens
gttaagggaaagcgccgagatgacgggctttctgctgccgcccgcaagcagagaacaagttgaaatcatcgcagaaggataaagttcgtcagtttatgatcttc

SEQ ID NO: 607137 - DNA, 75 bp, Homo sapiens
ggtcatgatggaccccaactccacccagcgctaccggctggaagccctcaagaggagaaggcagagcccccccag

SEQ ID NO: 607138 - DNA, 97 bp, Homo sapiens
atgccagagccaggtgaactggaggagcgatttgccatcgtgctgaggtggtgggacacacgcaggggccactagatgggagcctgtatgctaaggt

SEQ ID NO: 607139 - DNA, 74 bp, Homo sapiens
cacacagcaggcctggtggagaagaacaagatggccgccctgctcccccaatgaaaggccagcttcgaagaaaa

SEQ ID NO: 607140 - DNA, 100 bp, Homo sapiens
ggtttggcactgctcctgctggccgcctggacggctcgggcgctggagatagttttgaggcagctgtgccatcaaatagccacattgtttcggaacctgg

SEQ ID NO: 607141 - DNA, 98 bp, Homo sapiens
gacagtgcactccgggccgcagttactcttcagggatgtgctgggaattccaaatgaaagctggagaataacaaagataaatgaacgatatgaacttt

SEQ ID NO: 607142 - DNA, 102 bp, Homo sapiens
ggaaagtttgcagaagtggaaggagcagaacgtgagggtgtaacttacaaaaagaggctgggaggcggcagaatgcagccagaggagggcacaggctggctg

SEQ ID NO: 607143 - DNA, 100 bp, Homo sapiens
gggtcttttttgtcttcattcactttcccccctcagtttctgaaatgattctccagaatttctcctcataaaaaaggcataatcaccagcaacacccggg

SEQ ID NO: 607144 - DNA, 100 bp, Homo sapiens
ccgttcttcaggcacttgcatccacagtaaacaggttttttgctccactcaagcctgttagaatcaccatggaatacagctccagtgggaaggccactgg

SEQ ID NO: 607145 - DNA, 80 bp, Homo sapiens
ctggagagcttcatcaaaaatagtgatagctttgataagttcgtgctgtaagacctaaagttcttatgagattgtccaaa

SEQ ID NO: 607146 - DNA, 100 bp, Homo sapiens
atgccatttttcttaaatggcccacatcaggacagctgttccttggccatcccaaagctattctgggggcaacagagacacagctccgaattgattcctt

SEQ ID NO: 607147 - DNA, 98 bp, Homo sapiens
agagatgtgatgttggagaactatagcaatctggttttcttgggtgccaatgggtcatgtttggttagaaggtgacaatctacagaattctacagatt

SEQ ID NO: 607148 - DNA, 50 bp, Homo sapiens
atgatgatgaagaggatgatgatgaagatcaccattactttaagtactgc

SEQ ID NO: 607149 - DNA, 98 bp, Homo sapiens
gaaaaaggaatcattgacccaacaaagattagctttatttgctcaccgtgaagatggacctggaatcccagcggatattaaactttttgatatatttt

SEQ ID NO: 607150 - DNA, 90 bp, Homo sapiens
attggcaagacatatccttacaggcagagaggggctttgttatgcacctaaagccatattggaagctccagaagaaagagcaccccccgg

SEQ ID NO: 607151 - DNA, 98 bp, Homo sapiens
cgatgcgtcaagtacactgaaattcatcctgagatgaggatggaggatgaagctgtcctggacagaggggcttccttcctcaagcatgtgtgtgatga

SEQ ID NO: 607152 - DNA, 128 bp, Homo sapiens
ttcggaagctgttaccaattgtgtccatcgatataggtccaagtcctggcaatgaggtgaattttgattcatcaggtccaaactgctttgcaggaacgacgataattccagctggcattgaagtgaaa

SEQ ID NO: 607153 - DNA, 126 bp, Homo sapiens
gatggatgttaaaaatcaacaccaggactacagtaaggctgaaatcattgaagtgcttggagtgcagaactgaaagagagcacagcaatggaggaaacagctatatgggaacaacatacagtgacg

SEQ ID NO: 607154 - DNA, 101 bp, Homo sapiens
caagaacatgctctaaagcccttcacagcaagacccaggaagccgcgggcaaactcagactcgaaggctcggacatcatcatgcagctggacgacgtggtt

SEQ ID NO: 607155 - DNA, 100 bp, Homo sapiens
cattcagcgagactacagcagtggcacacgctgccagttccagaccaagttccctgcggagctggagaaccgggttatgggtgctacatgtgtgctttca

SEQ ID NO: 607156 - DNA, 50 bp, Homo sapiens
acatctacaaccttcgatctcctgacgatgttctaagaacggaagcatct

SEQ ID NO: 607157 - DNA, 50 bp, Homo sapiens
cttcttcgggctcctccagatggtggacccaagtggagagattgtggaac

SEQ ID NO: 607158 - DNA, 83 bp, Homo sapiens
ggaacctcacttcgtggtggtccactgcacaggctacatcaaggcctggcccccagcagcaattctggggtcagaagccatgg

SEQ ID NO: 607159 - DNA, 100 bp, Homo sapiens
ccttcacccattgtttgatgagacctttgaattgatgaaaactttcggaagagaaagttgcctgtggtaagttcagttgttaaagtaaaaaaattcaatc

SEQ ID NO: 607160 - DNA, 50 bp, Homo sapiens
cctacagcgtctcttcaaaaagggtgcagtacatgttaatgacaggattg

SEQ ID NO: 607161 - DNA, 50 bp, Homo sapiens
gcaggctgatctactgcaggaggtttgcagttgcaactccagaggagctg

SEQ ID NO: 607162 - DNA, 87 bp, Homo sapiens
ggcattaaaggtcagagttctgagacctgctctggagtaccagaggtttgaaaaggcatttctcctagctgttgacgttggtgctcg

SEQ ID NO: 607163 - DNA, 51 bp, Homo sapiens
ggagtccggacatctgaaacttggaaaatatgttgtgttcttcttttaccc

SEQ ID NO: 607164 - DNA, 80 bp, Homo sapiens
cggaacgccaccactgtgaaatttgccaaacaatgcagatcttcgtgaagactctgactggtaagaccatcaccctcgag

SEQ ID NO: 607165 - DNA, 90 bp, Homo sapiens
cagaggcgctggagctgggtcagtccgccgctcaccccgcggccgcaccttcccgccttctcagctatatgttctcctttcagccaagac

SEQ ID NO: 607166 - DNA, 90 bp, Homo sapiens
gggaagtctataagctttgcaacagaattacagagtatgatgtgatgatgaacagtctacacagatggctgcaagttgggaagatgataa

SEQ ID NO: 607167 - DNA, 75 bp, Homo sapiens
cgcagccggagtggggccgtgaggtgatgggcagaatctgtttacgaaagacgtgacagtgatcgagggagaggt

SEQ ID NO: 607168 - DNA, 80 bp, Homo sapiens
acgacatcatcttcccctttgagtttgacaccacagtcaggtgaggaagaggatggagatgaagatgaggaagctgagtc

SEQ ID NO: 607169 - DNA, 100 bp, Homo sapiens
gagaaactgcaccttatcacccggaacctgcagaaactacgcccgccgacagaaacatctgcaaagatacagtctgactcagtgggttgacaggaacatg

SEQ ID NO: 607170 - DNA, 100 bp, Homo sapiens
gtggccctgtaccggctgcaggagcatgtgcgtcgctccctccccgagctggcccagcacaagcccatttgcttatgtggaccccttgcactgtaacatg

SEQ ID NO: 607171 - DNA, 100 bp, Homo sapiens
ctatgagcgggaccaccctgggcacagcaggcatcggaggacggggaggtttactgcatcgacgcgcggttctacgggaacgtcagccggttcatcaacc

SEQ ID NO: 607172 - DNA, 115 bp, Homo sapiens
ttggcaatacttgttggtttagtgctgttattcagttgaaagatgcatgagtgtgatgcagtccgggacacagatgatcaagctgaaacgtggaaccaaagggcttgtccgcctc

SEQ ID NO: 607173 - DNA, 88 bp, Homo sapiens
cttggtcatcacaaaatgccttgatgttcctgacccttttgtgcctgaccctactgggccccgccgtggcgggcatcctctccatcca

SEQ ID NO: 607174 - DNA, 90 bp, Homo sapiens
gggaagtcgcctctgtgctcgtgagtgcatggggtataaggttcaagaacatgaagactcgggtgactcagaagtggagaatgaagcaaa

SEQ ID NO: 607175 - DNA, 90 bp, Homo sapiens
tagaggaggcagaagatttctggccagtggagagaggaattcctcaagacaccattccaggtgtctgtgacctttgaggatgtggctgtg

SEQ ID NO: 607176 - DNA, 75 bp, Homo sapiens
ctttttcttctcaccatttctggccaaaactacaaacaagacttcgcaggtattagaaaactactcggatgctcc

SEQ ID NO: 607177 - DNA, 80 bp, Homo sapiens
cctgagtctttgaggacacagcctcgctggaggcagtttctggtcgatccagtgtttacaagggaagtgaaagccaaagt

SEQ ID NO: 607178 - DNA, 95 bp, Homo sapiens
ttgtggatgcctctcatcgggagaatgctcttcaggatagtatcttggccagggaactcaaacagcagatgcagtgcctacaccaactaatgtta

SEQ ID NO: 607179 - DNA, 90 bp, Homo sapiens
tgagctgaaagcgaaaaactatgctgaccagagtaacacaagtggcaagacagccgggaacccctaccccatccccttattcagcacatg

SEQ ID NO: 607180 - DNA, 73 bp, Homo sapiens
ccagtggccccgaggagcctggggagaagcgccccaagtttgaaacctatgagaatatcccaggccagtcaaa

SEQ ID NO: 607181 - DNA, 74 bp, Homo sapiens
aacaagtggctgatttacaactcaaactttctcggttagaagagcagtggtggacttgctttgtgaagagacag

SEQ ID NO: 607182 - DNA, 100 bp, Homo sapiens
tggcacgccagtgcagtgactcttcggccatggaatccctgaccaagcacctatttgctatcctcggagctacagcagcacaaggatgaggacctctcca

SEQ ID NO: 607183 - DNA, 100 bp, Homo sapiens
cagatctattccggccacccattgatttgatgcataaaggcagctttgaaacagcagtctgggctcttggcaacattgctggagatagtaccatgtgcag

SEQ ID NO: 607184 - DNA, 111 bp, Homo sapiens
cgcggaccggcgtccccggcgcgaagaggctggactcggattcgttgcctgagggggatatgagactttctactcggaatatcctgagtgttgcgtggatgtaaaacccat

SEQ ID NO: 607185 - DNA, 75 bp, Homo sapiens
ggcacttcattggccacctacagaaacaaaatgtcaacaaattgatggattctgaaaaagagttccacgtcctcc

SEQ ID NO: 607186 - DNA, 100 bp, Homo sapiens
gggggggccggagaggagcatgaatggagcaaaatggcggatcatgtgcaggctggagcattggatttgctaaaggagcttaagaatattcctatgaccc

SEQ ID NO: 607187 - DNA, 90 bp, Homo sapiens
agcctcaccatgaaatcacagcttcagatcactggagagttccagtgatggaggtgatggcgtttttagcgaaaagaaggatgacagccg

SEQ ID NO: 607188 - DNA, 50 bp, Homo sapiens
cccgaactaagcagggcggtcggggagtacaggggctcaggtccaggtgg

SEQ ID NO: 607189 - DNA, 83 bp, Homo sapiens
agccacctgttgcctatccagaagaaaatacactactcatcaaggaagaaccaggatttcttacaatctccagctacaacctg

SEQ ID NO: 607190 - DNA, 82 bp, Homo sapiens
atgaaccgcgccgtgcaactgctcatcctggcctacgtcatcgggtgaaagaacttgtcctggacaacagtcggtcgaatga

SEQ ID NO: 607191 - DNA, 100 bp, Homo sapiens
atggcgacgggcggccagcagaaggagaacacgctgcttcacctcttcgccggcggccgagccgctgccgctcatggatttgtgccgtcgctcggtgcgc

SEQ ID NO: 607192 - DNA, 104 bp, Homo sapiens
ggatgaagatagtttaaccaaacaaccagaagaagtatttgatgtcttagagaaacttggagaagggtatagagcaccaagactcacagcattctttcttggca

SEQ ID NO: 607193 - DNA, 74 bp, Homo sapiens
aaagaagaagctgacccctgaaggaaacaaagggacccggactcagatccttctgtcactgagccaacaagaag

SEQ ID NO: 607194 - DNA, 90 bp, Homo sapiens
agacttggaggaggtatgcctggactgggccaggtacaagaaaattccccaggacacagagctggtttggagcctttctttgattttatt

SEQ ID NO: 607195 - DNA, 100 bp, Homo sapiens
gggggtgctgggcgacctgcaggcagcaccggaggcccaggtctccgtgcagcccaacttccagcaggacaagctaacaggcctcacctcttccattccg

SEQ ID NO: 607196 - DNA, 96 bp, Homo sapiens
cgccatgtcgggttattcgagtgaccgagaccgcggccgggaccgagggaatccagcactacgccctgccctctactgactggaggcaggcctctg

SEQ ID NO: 607197 - DNA, 74 bp, Homo sapiens
tgggaagcgctttgtgactggaggtcagcgtgggcagttctatcagtgtgtatatttgcgtgctctcgtgagaa

SEQ ID NO: 607198 - DNA, 97 bp, Homo sapiens
atgacagacgggatgatcggtcgtggagctccagagatgattactctcgggatgattataggcgtgatgatagaggaaagacacagatgaagctgac

SEQ ID NO: 607199 - DNA, 51 bp, Homo sapiens
ggccgagctttgcgggaaagcagcgaaatcaacgaccgggagcagaagttg

SEQ ID NO: 607200 - DNA, 97 bp, Homo sapiens
cgggaagttcttccaaagcaagctttcaagatgttagaaagttcaagccagaagtttcttcagggtttggtctatctcattgggaacctgatgggtt

SEQ ID NO: 607201 - DNA, 80 bp, Homo sapiens
tggggattgataggcagcatattcctgatacatatctatgtgaacgttgtcagcctaggacagtcattttgtttactcat

SEQ ID NO: 607202 - DNA, 100 bp, Homo sapiens
cgggcatcagccccctccagcaaatggtggcctcaggcaccggggctgtggttacctctctcttcatgcggcgagggaactccccaggccaccgggttct

SEQ ID NO: 607203 - DNA, 73 bp, Homo sapiens
aaagacaattgatgacctggaaggtagtgggcagcagtcagtgacaggtgtaacctctgtggatgacagcaac

SEQ ID NO: 607204 - DNA, 100 bp, Homo sapiens
caactccatccaacacttcgtttactccgaccaggccactctggatgacatggagaagtctgtgaatgatgatatgaaacgaatcataccctggattcag

SEQ ID NO: 607205 - DNA, 74 bp, Homo sapiens
ctcctcggcctggaaaagacagccagcatttccatcgcaggtactttggtcaataatgtccgactcccaagagg

SEQ ID NO: 607206 - DNA, 83 bp, Homo sapiens
gcgggagatcatcatctgcacctaccgccagggtggcccagttgaaatccttcccttcctctaccttggaagtgcctaccatg

SEQ ID NO: 607207 - DNA, 100 bp, Homo sapiens
cctcaagcccgcgaacatcctgctggatgcccactaccacgtcaaggagggtgtgaagacagagaatgaccacatcaacctgaaggtggccgggcaggac

SEQ ID NO: 607208 - DNA, 83 bp, Homo sapiens
gaaactccagcgtgtctccagccgtgatcaatgtccgagttaccaccatggatgcagagctggagtttgcaatccagccaaat

SEQ ID NO: 607209 - DNA, 75 bp, Homo sapiens
gaatatagatggttttgaaaagttcatgctgtcccttcattgaattttaggaggagacatcacagctttcccaga

SEQ ID NO: 607210 - DNA, 100 bp, Homo sapiens
tcactattgatggtgtagcgctttaggggaaggcctgtgtcacttgtgaaaatgaagattcagctgatggtgcggccacatcctgtggtcaggttctggt

SEQ ID NO: 607211 - DNA, 74 bp, Homo sapiens
gtcaacttcctcaagtcgcccaaagtcgtggcattcctggtggctttccatcagaacaagcagctcatcggtga

SEQ ID NO: 607212 - DNA, 100 bp, Homo sapiens
tatcaccactggggttccgtggactcccacttccaagaggtggctcagaaattccaaggtgtggtatctgtgcgctttgaagaagatgaagacaggaact

SEQ ID NO: 607213 - DNA, 100 bp, Homo sapiens
cgtggccaagatggccgcgtgcgggatcctcgggtaccgggagcgaacgaggaggttctggctcagacagtctcgtgctgttgccaggctggaatgctgg

SEQ ID NO: 607214 - DNA, 75 bp, Homo sapiens
ccagtttctcttaagtgccctgtacatatttgtgatttggaaggaatcatgccaaatgttaccatcagcttgagt

SEQ ID NO: 607215 - DNA, 96 bp, Homo sapiens
ccaagtgcatcattcagatgtctggaagcaccaccaacctgcgaccgcatcaagcagtccgccagcggaaccaagcggcgcgtgttcatcatcgag

SEQ ID NO: 607216 - DNA, 130 bp, Homo sapiens
ccagaacatctgggagaatatttaatggaaaatcgcttggttaaaacctgacacttttaacaggaaccacgtgaatgttgagggggcgacacacaagcaggtggtggacctgattcgagcaggcgagaag

SEQ ID NO: 607217 - DNA, 97 bp, Homo sapiens
cactcacaacacagtcagggggtgttcatacttctacagggtttctcctcttcaaaaatctgaagttgttgagatggttaagaaacaagtcaaagtc

SEQ ID NO: 607218 - DNA, 51 bp, Homo sapiens
cccggggcgccgagccggaggaaggagaaaataaacagagttgtctttgtt

SEQ ID NO: 607219 - DNA, 50 bp, Homo sapiens
agtgtaaatggggaagcgctgtctgctggaacccaatgtgaatattggac

SEQ ID NO: 607220 - DNA, 100 bp, Homo sapiens
ccaaaattgtggaaaagtcactctgagtatcctgagctccagctggaccctaaattggatcctcttcctgctgagagtcccctaatgaacattgaggttg

SEQ ID NO: 607221 - DNA, 96 bp, Homo sapiens
agaggtggccccggatgctgcggcgcccgctggccgggctggctgcggccgccctgggccgggccccaccggacgaacatggtccaagacaattcc

SEQ ID NO: 607222 - DNA, 75 bp, Homo sapiens
ggccgcctcgtctccgctcctgggggaccgcagttttcggctttgtgagaaaccttaccatcaaacacgatggcc

SEQ ID NO: 607223 - DNA, 75 bp, Homo sapiens
ctgacaccatcagcaaaggagactttataactatagggagatgtttcacaaagcagaagaattattttctaaaac

SEQ ID NO: 607224 - DNA, 100 bp, Homo sapiens
gccgtgcgccgcagcccgggcccaggccccggcagcgcctgggacaaggcgatttgacagatctgttgagaaatggcggcgttttcattatgatataaag

SEQ ID NO: 607225 - DNA, 117 bp, Homo sapiens
gaaatcctcttcttatcattagtgtctctaggaagagagaatattgatattgggacccgagctgatccagaaagccaacggtctccacggcttcatgaattggcctcataatctgct

SEQ ID NO: 607226 - DNA, 98 bp, Homo sapiens
tggaaacatagatacaccagaaggaggttttgacgccatgcttcaggcagctgtctgtgaaagatggacagagacgtatgtgcgttggtctcctaagg

SEQ ID NO: 607227 - DNA, 96 bp, Homo sapiens
ataaagacagggatatgagtgaagaaaacacagagccaccctggaaaggtcatcatcagatttgaaatatttaaagtggatacaaaactatttcag

SEQ ID NO: 607228 - DNA, 82 bp, Homo sapiens
tggccgcccgagtggcccgggagatgggtgtgaagcttgggaatgaggttggcacttaccaagttggatattttggacatgt

SEQ ID NO: 607229 - DNA, 100 bp, Homo sapiens
cacctgctgagtcaaaggaacagtctccccagaacggggttgcagaaatacccgtctacatcagaagcagtgctagagaccgttggatggcagcttaacc

SEQ ID NO: 607230 - DNA, 100 bp, Homo sapiens
cccggttccccggcccacagtgggggtgtgcaaacccgagagaactgggtgtgatcagcactggaaaagatgcctgcccctgctgccacatatgaaagag

SEQ ID NO: 607231 - DNA, 75 bp, Homo sapiens
ctcgcctcgctgggcagcctcaacatcccctacaagatcgaggccgtgcagatggagacctttggcgacttggcc

SEQ ID NO: 607232 - DNA, 82 bp, Homo sapiens
ggaacttacagcttccttgatcggactcagcattcatgatgaagatgaagatgaagccctgtaccagaaggtatcctctgag

SEQ ID NO: 607233 - DNA, 74 bp, Homo sapiens
ggacagttcgctacacagcaatgcatcgaggctcccgtagggccattgaaatgtgaagaatccttcgtctatga

SEQ ID NO: 607234 - DNA, 100 bp, Homo sapiens
tgggcttcagcctggaaggagggaagggctccctacacggagacaagcctctcaccattaacaggattttcaaaggttcttgctggtgtgaaatgactga

SEQ ID NO: 607235 - DNA, 99 bp, Homo sapiens
attagaacttgcaagaagatgggcattaagacagttgccatccacagtgatgttgatgctagttctagcatgtaacttctaatgccagcgatagtgaaa

SEQ ID NO: 607236 - DNA, 100 bp, Homo sapiens
gcctagcgagcctgccggtcgaccccagccagcgcagcgacggggcgctgcctggcccaggcgcacacggaagtgattcctcagttccttttagatgatt

SEQ ID NO: 607237 - DNA, 75 bp, Homo sapiens
ctcaaagccgggagatcgactgtttgagcccggaagcgcagaagctggtcataactccatgcaggaagctcatct

SEQ ID NO: 607238 - DNA, 100 bp, Homo sapiens
aactgcagagacaagacctccagagaatacccaggccccagccttcttcttggagttatcaggaactgttgccgttattacatcagatgggagaatgatt

SEQ ID NO: 607239 - DNA, 98 bp, Homo sapiens
ggaggatcgcactgctcatcttggccatcactatacacaacgttccaggtgagagttacgtgtgtgcatccaatgaaccatttcgtaaagtcgattac

SEQ ID NO: 607240 - DNA, 99 bp, Homo sapiens
gaacctggaatttatgcaggatattttgattggaaggactgcctgcctccaacagcaccatatgaaggcggagtatggaaagttagagtggacctacct

SEQ ID NO: 607241 - DNA, 87 bp, Homo sapiens
agtgggagcaccaggatctcgggctcggaacgagactgcacggattatgtatatcacgtagtgagtgcgatctgtgaatggacagtg

SEQ ID NO: 607242 - DNA, 75 bp, Homo sapiens
aatcgctcctgtttgtcttctgctttggcccagttggttgaatctggcgatgtggaacccatggatatggagggc

SEQ ID NO: 607243 - DNA, 101 bp, Homo sapiens
ctacatgaataacactgtcaacaccatgcgcctctggtctgctcgggcaccaaatgactttaacctcagagactcaccctgaagcgggcccttgaagtctt

SEQ ID NO: 607244 - DNA, 50 bp, Homo sapiens
gctttccaaggccaccgagggagtactgggatttaatgaatttgtctgaa

SEQ ID NO: 607245 - DNA, 110 bp, Homo sapiens
gcaggggaaggaactttgggtcctgaatcttctgggagctgaggaaccagatatcttgaaaagctgccagaaagcgggaaccacatcttcaagggccgtgctgccggcat

SEQ ID NO: 607246 - DNA, 98 bp, Homo sapiens
tgtagacgcccgcccctgcctcagagaaggtatctctcctaaatgtgtgatcaaggaattaccaccaacagagaacagtaatacaggagaaaggttcc

SEQ ID NO: 607247 - DNA, 89 bp, Homo sapiens
gaactatgttttgaatttggtctggagcttgatgaaattgtatggcatttcaaatatagatacaaccattgaaggaacgtcagatgacc

SEQ ID NO: 607248 - DNA, 90 bp, Homo sapiens
ttgaaaaggagaaaaggttcgtttggaagtatagaccatctccaggcctactgaacttgacgcactggtatttggccatctatacaccat

SEQ ID NO: 607249 - DNA, 100 bp, Homo sapiens
cgtggtcaagttcaccatgagagggtgaatctggattgggaaagtcgacattaatcaactcattattcctcacagatttgtattctccagagtatccagg

SEQ ID NO: 607250 - DNA, 100 bp, Homo sapiens
tccctctgttggaccatcagggcgcgcattggaagaacgcggtgggcttctgtgttttccaagcagtgaagcacttgccgtgttgaactgaatgcactac

SEQ ID NO: 607251 - DNA, 101 bp, Homo sapiens
atcaaagaagatcaaaggctgctgggattccatccacgtggtagaagtgcagtacctcatgatccagcagactccatttgtgcgccgtcaagtccgcaaac

SEQ ID NO: 607252 - DNA, 80 bp, Homo sapiens
aggtccccgccccgcccgcctggctctctcgccgcggagccgccaagatgggggatgctttggagtctgcaatgaagaat

SEQ ID NO: 607253 - DNA, 100 bp, Homo sapiens
ggcgagtccggtctcaaaatggagggttttggccaaattgggcgagggcacaaaataaccacttaccccttctcaccgaggaagagcgggagaaagggta

SEQ ID NO: 607254 - DNA, 101 bp, Homo sapiens
gctggcctatggtttctgcattttgttaagaagcacctcatgcaagcgagggacctgggactgctcacagccaggaagttgctggagactgtatactactc

SEQ ID NO: 607255 - DNA, 50 bp, Homo sapiens
gaaaaggctttattgccaaactgatccaaactactggatacaggtgcatc

SEQ ID NO: 607256 - DNA, 100 bp, Homo sapiens
ttcaccaaataatagctgtttgtattttggctgctgcaggagccattttagatggttggaatccattttcgtacccatacaaaaaactggattatggaaa

SEQ ID NO: 607257 - DNA, 96 bp, Homo sapiens
tgtgttcagccaggacccgggctccaaggccgtcgccgaccgctacgctgtctactggaacagcagcaaccccagtagagacgaggtttcgccatg

SEQ ID NO: 607258 - DNA, 75 bp, Homo sapiens
cctgacatacatcagtctgttacacagactgtcagcatcaataaggccattaatacgcaggaagtggctgtaaag

SEQ ID NO: 607259 - DNA, 110 bp, Homo sapiens
gacaaggaagatgagctgtcctttcaggaaggagccattatttatgtcatcaagaagaatgacgatgcaagtgagaaacagatggtggtggtgtgcaaggagtccccaaa

SEQ ID NO: 607260 - DNA, 83 bp, Homo sapiens
atcactcgctcccttgatgatcttgaggtgtggtggacacaggcctattcatcaacatggctgagagagtctactttgggatg

SEQ ID NO: 607261 - DNA, 95 bp, Homo sapiens
agctgggcctcgtggagttcagagaccccaacgccaacctacttgagatatgctacaaggaccgcatccagcagtttgatgatgatgaggaagag

SEQ ID NO: 607262 - DNA, 75 bp, Homo sapiens
gaggccacctgcctattgtgatgccaaagaaattaaagatgccatctcgctggttgtcttcttgcctgccctgtg

SEQ ID NO: 607263 - DNA, 100 bp, Homo sapiens
actgcctgacctcattcgaagctgccattgaatatattcggcaaggaagcctctctgctaaacccccttacgctggggaggaggaggaggaagggagcgg

SEQ ID NO: 607264 - DNA, 74 bp, Homo sapiens
cggccaggtccctgctgaatcacacgccgccatccgggaggcccagggaaggctatgacttctgccaggtcctg

SEQ ID NO: 607265 - DNA, 78 bp, Homo sapiens
gcacacctcctccccgcagccccaacccatctccagagagaccaagttcgatcctttggtacagaagacagaccgaca

SEQ ID NO: 607266 - DNA, 100 bp, Homo sapiens
gccgccgcttgtgctgcagccatggtctgtctgctatcagctatgccgctgcccgttgcgctgcagacccgcttggccaagagaggcatcctcaaacatc

SEQ ID NO: 607267 - DNA, 75 bp, Homo sapiens
gatgctctttcagatactgaacggtacatgtcccagagcaagcacacggaggcccgggagctcatgtactcggga

SEQ ID NO: 607268 - DNA, 88 bp, Homo sapiens
actcacagtcctaaatatctgacagcgagatcgcttgtaggtctgtaaacagatttggctaggattatttgatgatagatcttcagca

SEQ ID NO: 607269 - DNA, 100 bp, Homo sapiens
agcacaaataactccataatgtctgaaaatactgaaattgatagcagtttgaatggtctctaattaacagaagatggcaaagcccagccacagcagctat

SEQ ID NO: 607270 - DNA, 50 bp, Homo sapiens
cttggactcgacagactctaagataacgaaggaggcccaacttcattcaa

SEQ ID NO: 607271 - DNA, 83 bp, Homo sapiens
cagctgggctgcagtgaccccgctttcctcacgcccaggtcagcccaagactaccccgtcggtcattctgttcctgccgtcct

SEQ ID NO: 607272 - DNA, 80 bp, Homo sapiens
ggcagcagcccgacgcaaaccaaggatctggggatcttcgcactatcccaaggggatcctgctaaagcggagcggcaagt

SEQ ID NO: 607273 - DNA, 100 bp, Homo sapiens
caccatgtcgaatctgagcaaaggcacgggcagccggaaggacaccaagatgcggatccgggcctttccggctctagaccaagatagaacagcccttcag

SEQ ID NO: 607274 - DNA, 100 bp, Homo sapiens
agccctgtccggcatctgtcttgagctcccagcaagcacttaaatatagatccggtggtatggatgagaaaacaattgctttacttgttgctggactagt

SEQ ID NO: 607275 - DNA, 74 bp, Homo sapiens
cgacctagtatttgaatttgctagtaacgtcatggaggatgaacgacagggaagaaacccttttttcttggagc

SEQ ID NO: 607276 - DNA, 82 bp, Homo sapiens
taccaggacccgggctttagctatggcagcggcagcaccgggagtcagcagagtgaagcgggacctggacttcaccatcgac

SEQ ID NO: 607277 - DNA, 82 bp, Homo sapiens
gtccgttggccttcgtacccgtcttgattgagagacagggcagggcattgttcatgcactgaccgacctcagcagccccggc

SEQ ID NO: 607278 - DNA, 88 bp, Homo sapiens
aatttatggtcgcctttttgaatgagctccaaagacaacaggccctccctctgccctcccgtctgtgagctccctgcccagcaccacc

SEQ ID NO: 607279 - DNA, 100 bp, Homo sapiens
aaacactcgctccatctgtctccttgagcaaaaaagaaaagttgtttcctccaacattgatgttcctccagcaagatgggacctgcaaaggataaactgg

SEQ ID NO: 607280 - DNA, 100 bp, Homo sapiens
cctactgcttcgcgtccagacagtaagactttgaccccgacgcaggcttcagtgattgccgcggatcagaagcctgagcactttggctcgagacaattaa

SEQ ID NO: 607281 - DNA, 105 bp, Homo sapiens
agggtgattctgaagagggtctggaggagccttctcaagaacagaggaatgtatcctgtcaggtataatgtcagtgaatggcaagaaagttcttcatatggatcg

SEQ ID NO: 607282 - DNA, 82 bp, Homo sapiens
agccgatccagcctgcggagcctgtggggcagtgagaaagatcagtctaaagaaaaggagaagaaagtgaaaaaaacaattc

SEQ ID NO: 607283 - DNA, 97 bp, Homo sapiens
actttcctgataaagtggccctgctgcagagaaagctttgatgttcacaagaagtgtcccctctgtgagttaatgtttcctcctaactatgatcaga

SEQ ID NO: 607284 - DNA, 52 bp, Homo sapiens
aggacaggcagatggacactgaggctgctgcatctgaagccccccaggatgt

SEQ ID NO: 607285 - DNA, 100 bp, Homo sapiens
gacgcgcacaccaaggagatcgacctggtcaaccgcgaccctaaacacctcaacgatgacgtggtcaagcccaacctcagcgcttgcctcagcttcagac

SEQ ID NO: 607286 - DNA, 100 bp, Homo sapiens
ccagtgagcccatcccgttctctgatttgcagcagggtcctgtagcatccacagtatcagcgttttctgtcctctcctctgggcctggccttcctccacc

SEQ ID NO: 607287 - DNA, 80 bp, Homo sapiens
aggtgatgctggagacctgtgggcttctggtcgcactggtacctgttggatcagactgatgtgttggtggttggtgtcct

SEQ ID NO: 607288 - DNA, 75 bp, Homo sapiens
agtggctcaacaggctgaagggaggactccctggaggaaaagcggaagcggcagcggtctgaacgcctggaacgg

SEQ ID NO: 607289 - DNA, 75 bp, Homo sapiens
cggtgccggcctagcgtcctggaattacttcaatcaaatagaccacatggtacaaggccatgctgcttttccaga

SEQ ID NO: 607290 - DNA, 100 bp, Homo sapiens
ggactattcaaggaggtctccaggacggacttcagatcactgtcaatgggaccgttctcagctccagtggaaccagtcttggtgatgccttggacagcag

SEQ ID NO: 607291 - DNA, 100 bp, Homo sapiens
gatacttgtctgctggctaccatggggctgcagctgaacatcactcaggataagggtcttactgaagtaacacaaagcttaaaaatggaaaatgaagagt

SEQ ID NO: 607292 - DNA, 78 bp, Homo sapiens
aatacccagactgttactacaacctcgggcgtctgatggagtgaaggtacctgagcgcaggaaccatggtcttcattg

SEQ ID NO: 607293 - DNA, 98 bp, Homo sapiens
agccgcttggggcccgcacggaccctctacttcagcatggctaatgtaaaagcagccccaaagataattgacacaggaggaggcttcattttagaaga

SEQ ID NO: 607294 - DNA, 98 bp, Homo sapiens
ggacgccgccgaagaagcatcgttaaagtctctcttcaccctgccgtcatgtctaagtcagagagaggagtctgcaatgccgagtggaggaaggagga

SEQ ID NO: 607295 - DNA, 75 bp, Homo sapiens
cactcacctgcaaagttgtttattcctacaaggcctccggtgtggctgtctctgatggtgtcatcaaggtgttca

SEQ ID NO: 607296 - DNA, 75 bp, Homo sapiens
tagtcatggagatcgagaggaaataatgagagatgggtgtaatgcctgagattgcacaagctgtggaagagatgg

SEQ ID NO: 607297 - DNA, 100 bp, Homo sapiens
gtggaagagacagttgtgagattcccttgcaaatttacatacgagaatggcttgtgaaatcatgcctctgcaaagagatttctgcatattttggatctgg

SEQ ID NO: 607298 - DNA, 56 bp, Homo sapiens
gccgccccgcgcccccgccgcgccctcagcagaaggccgagtcccgaagtccctcc

SEQ ID NO: 607299 - DNA, 75 bp, Homo sapiens
gactgaggaacggtgcctggaaaaggctgttcggctcttgaatcccagcgatgaaaccaggaactcactttcccg

SEQ ID NO: 607300 - DNA, 100 bp, Homo sapiens
gtcatcgtccactctgccaagggatttaagcaatcagccatttttggctttcacccccaaccagtgaccaaagacttgaccactcaaagtccagctcccc

SEQ ID NO: 607301 - DNA, 95 bp, Homo sapiens
agcaccatgacgtccatccatttcgtggttcacccgctgccgggcaccgaggaccagctcaatgacagggctcattgtcatccccaagccaggcc

SEQ ID NO: 607302 - DNA, 113 bp, Homo sapiens
gtctgtgaagctaaactcaatgctgctgtgtgggaagaagatttgtaaagaaaactcttagatggcagtggcagcaccatgatgcaaaccaagaccttctcctcttcctcctc

SEQ ID NO: 607303 - DNA, 75 bp, Homo sapiens
cacctggagagaggccgcgtcctgggcagagatcttagcaaagcaatgtctcaagatggtgcttctcagttccaa

SEQ ID NO: 607304 - DNA, 100 bp, Homo sapiens
gaccacggcgtcctggacgccctgcacgtgctcgagggcctcttccgcaccgaccccgaggccaaggtacagcagggaagaactggaaactcagagaaag

SEQ ID NO: 607305 - DNA, 75 bp, Homo sapiens
ttgtagaaataagaagaagcaactgtacaaaccatccgttggacataccagatggtcgaagagctccacttcctg

SEQ ID NO: 607306 - DNA, 75 bp, Homo sapiens
ctacatctcaagctcatattttgaagtgtttacggtcagactcagtcacatgcccactcgaagtcgcactgctat

SEQ ID NO: 607307 - DNA, 100 bp, Homo sapiens
aaccattgtactcagtagaggagtatcagttcagtatcgctacttcaaagggtactttttagaaccaaagggtgtggatgaatggaacatagctcgcctc

SEQ ID NO: 607308 - DNA, 88 bp, Homo sapiens
tgaaactgactcttcccctccaccatatagtagtattactgtggaagtacctacaacttcagaattaaacaaccaccatgtcgagcaa

SEQ ID NO: 607309 - DNA, 83 bp, Homo sapiens
agggaaccctggtcaccgtctcctcaggtgcagcggaactgctgcctgacgctctgcaacttcagcatccccgaggagctgga

SEQ ID NO: 607310 - DNA, 116 bp, Homo sapiens
ccacgaggagggagaacctgaagccgcctctgcaggctcctgcaaatgaacgagataattgggagagacatgtcccagatttctgtttcccaaggagcaggggtgagcaggcaggc

SEQ ID NO: 607311 - DNA, 98 bp, Homo sapiens
gtgatgaggactcaagctgggctaccttatcccagggcagcccctcctatggctccccagaggacacagttgtcacaggtagtactgatggaattgga

SEQ ID NO: 607312 - DNA, 82 bp, Homo sapiens
gctggatgggaagttaatgtttacggcgaagtctactcaacgtttccaagccctccagaatacccatcatatagcccctgag

SEQ ID NO: 607313 - DNA, 97 bp, Homo sapiens
aagtggacattttactggctcaaagtatgccaagatggaaggaagcctcatacagtgagattaataatccgtcggtattcctctgagaagcactatg

SEQ ID NO: 607314 - DNA, 83 bp, Homo sapiens
gttaagacattcttggaagccttaccgaattttgatttggctgctgggctgctaccttgaaatccaagccctaaaaatgccag

SEQ ID NO: 607315 - DNA, 87 bp, Homo sapiens
gagccgcgcgcctttgtgcgcgcgccgagatcaatgaactgagccatgttcaaatccctgttatgttgatgccagatgacttcaaag

SEQ ID NO: 607316 - DNA, 75 bp, Homo sapiens
ctctgcgacgtgggcaccgccatcagctgttcgcgcgtcttctcctccaggtcctttcccataacctgtgcacgg

SEQ ID NO: 607317 - DNA, 100 bp, Homo sapiens
caaaggtgaatcttttggttggtgattttgatgatagccacaaagcaagcagggccgccatggcatcagatgaaggcaaactttttgttggagggctgag

SEQ ID NO: 607318 - DNA, 100 bp, Homo sapiens
agcttgcggaggtgcggctgcaggccgttgttggtcgagctggcgggtcccgcgggccaggccgtggaggtaagaatgattgatgttggctgatattgga

SEQ ID NO: 607319 - DNA, 100 bp, Homo sapiens
ggaagggaacgtggaaagcgcatacaggaccctaaacagggggagctgatcaccttctattactattggaagaagacccccgaagcagccagctcccgag

SEQ ID NO: 607320 - DNA, 100 bp, Homo sapiens
tgttaccatactgtgtgacaaatttagtggccatcccaaaggagacgagttgtactgctgtcacaggaaatggacgctggattacaagcatggcagctca

SEQ ID NO: 607321 - DNA, 100 bp, Homo sapiens
gtgtactggaacagctccaaccagcaggctccacgtgttccccacgtttgtggcgtacgagctcacggtgctggtgttcctcaccttgtcagtggtggtg

SEQ ID NO: 607322 - DNA, 74 bp, Homo sapiens
gaagactcgcctgatgaactccaagggggagtatcagaggaatgtcgggtcctcacaattcaaaacaattgaag

SEQ ID NO: 607323 - DNA, 100 bp, Homo sapiens
tcggcgcccagcaatcacagaagccgacaaggcgttcaagcgaaaacatgaccgctgagcccatgagatcctaaatgcccaggagatgttgattttcata

SEQ ID NO: 607324 - DNA, 75 bp, Homo sapiens
acgactctacaatgttgtagtagacacagaacagggaaaaggggtcgaggccggtcctgacctgttacaatgaag

SEQ ID NO: 607325 - DNA, 101 bp, Homo sapiens
tctgccagcaccttgggaagagaaagaaaatgccgaaggcactcagacaggttcttggaacaccaaatgaggacacatggcctggagttcattctttacca

SEQ ID NO: 607326 - DNA, 90 bp, Homo sapiens
tccatctcattaatgacaatcagccatcctggattggacagcacagaccccacaggctcctcggacactgggtccatcacctcctgcccc

SEQ ID NO: 607327 - DNA, 106 bp, Homo sapiens
cttggcggcgcccggagccggcgtggcgctcatcgagggacgcccggcccaagtgaacaagttgaaatcatcgcagaaggataaagttcgtcagtttatgatcttc

SEQ ID NO: 607328 - DNA, 100 bp, Homo sapiens
caggtgcaggaggagctgctcagctcccaggtcacccaggaactgaggagcagtacatcttcattcatgatgcaatcctggaggcctgcctgtgtgggga

SEQ ID NO: 607329 - DNA, 82 bp, Homo sapiens
atcctttatcctggtcatcttctatttccaaacagaaaggacccaggagcgataacagtaaatcaaataagatatttgtcgg

SEQ ID NO: 607330 - DNA, 82 bp, Homo sapiens
tgccatggacgacgaggaggagacgtaccggctctggaaaatccgcaagaccatcatgcagtgtcggagatgtatgcagtgt

SEQ ID NO: 607331 - DNA, 73 bp, Homo sapiens
tcagtgccgtttaacctttattgtggtggagtccaccccgctgtgaacattgacatcaccaatttcagcagca

SEQ ID NO: 607332 - DNA, 98 bp, Homo sapiens
agaatgttaatgcttgatgggatgccggcagtcagagtcaaaacagagcttttggaatctgaacaaggggaactttatattgctgttggaatatctgg

SEQ ID NO: 607333 - DNA, 100 bp, Homo sapiens
cggcgctagcttcggagtctcccgcgcgcacctcagccgcctcctagcggcgcggcgctcgctcctacggatgttaaagtctttagtgaagatgggacaa

SEQ ID NO: 607334 - DNA, 73 bp, Homo sapiens
ttacgtagataagacactgcaacatatgacaacattttgatggaagaggctgctcagattctggagatagaaa

SEQ ID NO: 607335 - DNA, 83 bp, Homo sapiens
taacaccctgtaacagctgaatagagtacaatgaatctatgaaggcctatcataattcccccgcgtaccttgcttacataaat

SEQ ID NO: 607336 - DNA, 75 bp, Homo sapiens
cgcggggaccgctgtgctctcgggcctagatctagggtccctggctgccctctgctggtactcccggcccctttc

SEQ ID NO: 607337 - DNA, 99 bp, Homo sapiens
gagtggttcaccctggtcaacaagaagaacgctctcatccggaggcaggaccagctgcagctgctgcatccgtgtcattctggaccttactcccaacta

SEQ ID NO: 607338 - DNA, 83 bp, Homo sapiens
gtcggatttcaccacaagaagggctgccaggtttggacctcctgcgtacagacggtttagtagtggtggtgcctatcccaaca

SEQ ID NO: 607339 - DNA, 90 bp, Homo sapiens
atcgaggcaccatgggcgcgtgtggacgaaatgaggggctacgcggagaaggcccatggacagaccttcacgttcccagatctgtttccc

SEQ ID NO: 607340 - DNA, 98 bp, Homo sapiens
cctggagatggaacaggcccagaaggccaagaacccccaggagcagaagtccttcttcgccaaatacgtgatccggacggacacgttcaagcacctgc

SEQ ID NO: 607341 - DNA, 75 bp, Homo sapiens
ccaagacagtgcctggataccttcgaataggagaacggagaccaacctgggctgaagaaagaagattaaatgctg

SEQ ID NO: 607342 - DNA, 98 bp, Homo sapiens
agaaaacaaggtgtctgcaggaccaacctctcctctggatgctctaggctccctggcattgggcagtgttacagtgcactcttctgaacctgaagtca

SEQ ID NO: 607343 - DNA, 100 bp, Homo sapiens
cgatctggagcttttcccctccccggccagtgttttggggtttgaagttggaatcttcagctactgtcaagaacagccacaaaaatgtgtcacgatcaag

SEQ ID NO: 607344 - DNA, 96 bp, Homo sapiens
atagaggcaagtgggggaggagcgttccttgtcctccctctgcacaaggctttccttaaagtttcccatgtctcaatggactcctgaatataacga

SEQ ID NO: 607345 - DNA, 80 bp, Homo sapiens
tggaccgtggttttgcaggaaatgtgaatctcaggagagagcagccagagtgtttagaagaagaatgtgaatcctctctt

SEQ ID NO: 607346 - DNA, 98 bp, Homo sapiens
cagcaccatcgagccagaagcagtatttgtcctgagcaaacgaggcccctgagagctccacctagttcacaggataaaatcccacagcagaactcgga

SEQ ID NO: 607347 - DNA, 100 bp, Homo sapiens
gatcaggaagaggacttggagctactttcatccttaggaatgttatcgaaggacaagatgtccgtaggagaattgaacttattcaggactttgaaatgcc

SEQ ID NO: 607348 - DNA, 100 bp, Homo sapiens
taaagacgttgaactctcagtggtcctacctggggatattatcaaatctactactgttcatggcagggcggcaccttcctacttctgcccagccacagcc

SEQ ID NO: 607349 - DNA, 74 bp, Homo sapiens
tgctgctgccgttaatggagataagggtgctctacagaggctcatcgtagcttctggctagcaaggaggacgag

SEQ ID NO: 607350 - DNA, 83 bp, Homo sapiens
ctggatctcagcaatggggataccattctggaagacttgcccatccaatctgagcactacaaacaccactggtttcccgaaaa

SEQ ID NO: 607351 - DNA, 100 bp, Homo sapiens
gcaaattcttcttggatggacacagttataagacaaattctgcttggtcagaatcgtgatggcattgtgttcagcactgatgactattttcaccatcaag

SEQ ID NO: 607352 - DNA, 83 bp, Homo sapiens
gcctgcgacccagccagccagcaacctggaccgggacaaaagtggctctcaatccagcacatgcacattgaagcaagttaaag

SEQ ID NO: 607353 - DNA, 80 bp, Homo sapiens
agctgtgctcgcgctactctctctttctggcctggaggctatccagcggctcttccgtgggcggcggcttcgcgggcttg

SEQ ID NO: 607354 - DNA, 100 bp, Homo sapiens
cgagtgaagcagctgagtgatgggcagcccccaccacccgcccaggccagccccagcagcaacagcagcacaggtctctaattaacagaagatggcaaag

SEQ ID NO: 607355 - DNA, 74 bp, Homo sapiens
cattatacagcggcctctttgcctatggaggatggaaaacatttaaagttgatgatatgttatcaaaagtagag

SEQ ID NO: 607356 - DNA, 74 bp, Homo sapiens
ctccacagcagttaatagatctccggcataagctcaatcttcggagcccaatgacgaaagtggagctaacgtgg

SEQ ID NO: 607357 - DNA, 100 bp, Homo sapiens
tgatgacaatgtctttgttccaccagagtcattgcaggaagtggatgagttccacctcattttagagtatcaagcagggtttttaatgaccacaacaagc

SEQ ID NO: 607358 - DNA, 100 bp, Homo sapiens
tcatcaaaaatagtgatagctttgataagctaaagaattacctccaaagccattgtcaagaccacagcagtcatctgcaccagtccagctgaactctggc

SEQ ID NO: 607359 - DNA, 100 bp, Homo sapiens
agcggcacctacggggacgtctataagagcatgcttgagaagggaggataaaaactttcagaatgagcaaaacaccatcaacgttaattccagagatgga

SEQ ID NO: 607360 - DNA, 100 bp, Homo sapiens
gagacgaagagcccgggcggcgctcgtacttctggccactgggcgagcgtctggcagacaactgcagtgacctgaactcagaactgcagagggtgctgac

SEQ ID NO: 607361 - DNA, 75 bp, Homo sapiens
gcaggagcggctgggcatcctcctgagactccggggtcagacgcccactccagagttgtggaaagtaaaaatgta

SEQ ID NO: 607362 - DNA, 100 bp, Homo sapiens
ctttctgtgtggctggagcctgtccgaacgctttgggctgttagggattccagactccatcatttctcgtggtgttcaggtgctcccacgagacacagcc

SEQ ID NO: 607363 - DNA, 73 bp, Homo sapiens
gttggtcggtcccggggtcacccgctacgggaagcaggcctcgccacaggccagggtcaagccccaccggacc

SEQ ID NO: 607364 - DNA, 82 bp, Homo sapiens
ctctccgcaccgcggcttaaatgatgtattttgtgatcgcagcgatgaaaggagacagatcagttggaggaagaaaaagcag

SEQ ID NO: 607365 - DNA, 98 bp, Homo sapiens
gtgggtgaggtgtccagctgcccaaaggcgacagaacgtgctggccaaagcgctctatgacaatgtggccgagtccccggatgagctctccttccgca

SEQ ID NO: 607366 - DNA, 75 bp, Homo sapiens
gtgctagtgacctgactgatgccttcgtggaggatgaatccttaaagcaattgcaggtagttcatcaaccatgga

SEQ ID NO: 607367 - DNA, 76 bp, Homo sapiens
caaaggatggtgagattgttggcctttcaggaagagtgcttaaggctggcagtgatggtgaaagcataggaaactg

SEQ ID NO: 607368 - DNA, 100 bp, Homo sapiens
aaacagcagatttcccaagagcagcggaaaatgatccagtcacaggaagtgtttggattgtgagctatttcagaactgttctcaggactcattattttaa

SEQ ID NO: 607369 - DNA, 50 bp, Homo sapiens
gggagaagtgaccctcctgcgcctggtgggaagtctgaagctcagagagc

SEQ ID NO: 607370 - DNA, 98 bp, Homo sapiens
gaattccctctgctgacaaccaaacgtgtgttctggaagggtgttttggaggagttgctgtggtttatcaaggaggtgaagatcgagaacttattcag

SEQ ID NO: 607371 - DNA, 100 bp, Homo sapiens
ttaatgcggaaggttaagaaactgcgcctggacaaggagaacaccggaagttggagaagggtgaatttggaagtgaaaagaaaactgctttgcatgaaaa

SEQ ID NO: 607372 - DNA, 85 bp, Homo sapiens
gtggtcatcgctgtgaagctgcagtttgtcccgctggctggaagcctggcagtgacacgattaagcccaacgtggatgacagcaa

SEQ ID NO: 607373 - DNA, 100 bp, Homo sapiens
aaggacggcctccagagtgcccagcccacggaaggccaggggctgggtgaccgatggcttcagttccctgaaagactactggagcaccgttaaggacaag

SEQ ID NO: 607374 - DNA, 90 bp, Homo sapiens
tcacccaccaacaacaccacaataatccacagccaagatgttccatttaagcagacctcttccatagctgtagctggagcggtaattgga

SEQ ID NO: 607375 - DNA, 100 bp, Homo sapiens
caccattgtcccagactcgaagccgaggctccactaatctctttagtaaattaacttcaaaactcacaaggaggtgaaaaaccttttgaatgtccaaatt

SEQ ID NO: 607376 - DNA, 100 bp, Homo sapiens
cctctccagaaacgttgagaggagcaatagaagacatgggatttgatgctaccttgtcaggttttaaaaagacaaggctatgatgctgcttgtgatatat

SEQ ID NO: 607377 - DNA, 49 bp, Homo sapiens
gcagctagcccttttcctcaagctccaaagacaacaggccctccctctg

SEQ ID NO: 607378 - DNA, 90 bp, Homo sapiens
cagaagtacaacgtgcgatccatgcccatccgaaaggatgatgaagttcaggtctccaggtcctgacctggccttcctgacttcctgtcc

SEQ ID NO: 607379 - DNA, 100 bp, Homo sapiens
aaagcctttctaattaatggctacacttcgatggacctgttgaaaaaaatctgggaggttgaacttattaatgcttgtctggagcgggaaagactactgt

SEQ ID NO: 607380 - DNA, 100 bp, Homo sapiens
gtccggagtaacttggccaggctggccccgagcggaactggagaaagctgagggatccaaactactggatacaggtgcatcgcttggaacatggagatgg

SEQ ID NO: 607381 - DNA, 75 bp, Homo sapiens
aaaatctgtacctggctggaaatcaaagtccaccatgtgcttttgcacatccaatgtccagctcgccgctgtcca

SEQ ID NO: 607382 - DNA, 85 bp, Homo sapiens
tggctcaaaggagttgtatttagtgtgacgactgttgacctgaaaaggatcgagatgaccacagccacccctctgggggatacca

SEQ ID NO: 607383 - DNA, 75 bp, Homo sapiens
ccagacatggccatcatggctgtaaacagctttgtgaagggaggagatgaagtggcggcagtgggcggacgactg

SEQ ID NO: 607384 - DNA, 75 bp, Homo sapiens
ggcggtatcaaatggaaagtttttccaaatattcatctgtacaggtgaaaagcaataaggatgtttaagtgctgg

SEQ ID NO: 607385 - DNA, 80 bp, Homo sapiens
cttcgccgttaccttcttgctggcgttggtgggagccgtgctctacctctatccggtttgggccccatggtatccctgtg

SEQ ID NO: 607386 - DNA, 74 bp, Homo sapiens
cgggggctcagagatccaagtgcgcgccctggcgggtccggaccaaggagacaaggagaaggccttaggatcta

SEQ ID NO: 607387 - DNA, 100 bp, Homo sapiens
agagggatccttcacccgtgtctgccaccttctgggtgaaccctcagttcaagatccggctggatgagacggatgacccggacgactacggggaccgcga

SEQ ID NO: 607388 - DNA, 100 bp, Homo sapiens
ctcctctcctgggcggcggggatgggagcccaagatttctctacatttggccaaatgctcgtatctcagtgatgggaggagagcaggcagccaatgtgtt

SEQ ID NO: 607389 - DNA, 100 bp, Homo sapiens
tgcgcggtttccagccaggaagcttcgggaagcctggactcctagaagtaccccaccccacccctgctccttggaggacaacgtgatcactgtattcagc

SEQ ID NO: 607390 - DNA, 50 bp, Homo sapiens
cccggagcccccagcgcagcggccgcgattcctggtcgggtggcttccag

SEQ ID NO: 607391 - DNA, 82 bp, Homo sapiens
ctcagctggagaacgcggctaaagttctgatgaagccccatgtgccactcccctgatctgcagcttcggtaggccggtggac

SEQ ID NO: 607392 - DNA, 100 bp, Homo sapiens
agcagtagtattggcattcccattgctgtgcctacaccttcgccacccactattggaccagctgcttctaaacaaaagtccagcagccatttgccagcaa

SEQ ID NO: 607393 - DNA, 100 bp, Homo sapiens
tcaccgaaacatagtgagcgattgttcagcttttgtgaaagcaacagagtggtccatcaagattcacaatggtagcagtgaagcgctttctcaatataaa

SEQ ID NO: 607394 - DNA, 78 bp, Homo sapiens
tggacttccggaagagtgtgttcgaggaggtggtcagagcgctcacggtgatgttgcacagacagtggctgacagtgc

SEQ ID NO: 607395 - DNA, 90 bp, Homo sapiens
acacctcagctggctgacattgttgcaacaggggttaagcaacatcattggcatcatagtttatatatcagccaacgccggagaccccgg

SEQ ID NO: 607396 - DNA, 74 bp, Homo sapiens
ccgagccgggcggggcgagggcagctccggagccaagccgccatggcctaccacagcttcctggtggagcccat

SEQ ID NO: 607397 - DNA, 98 bp, Homo sapiens
tggattccagtgggcccgacagcgcaacaggacacattcagctaacgtattttagcaggtggagtgaggttgaagattcctgtgacagcgatgccata

SEQ ID NO: 607398 - DNA, 98 bp, Homo sapiens
cagtatttcaagagtcacttctttacttggtgcaggaaggcagtctttgctacgtacagcaaaaggctgcggaaacgggactgcggccactacttccg

SEQ ID NO: 607399 - DNA, 88 bp, Homo sapiens
gagtccctgggacaaggccaccctcagcatggttcaagtgctggggccggcagtggagagttccacgtgtacagacatctgcgccgga

SEQ ID NO: 607400 - DNA, 51 bp, Homo sapiens
cctgtacaaccagaagcgacacagcttagagctttcacagacaacagagac

SEQ ID NO: 607401 - DNA, 75 bp, Homo sapiens
ggggagatagcaagattctggagtctggaaagccttcacttggaaatggcacctcgaaaggggaaggaaaagaag

SEQ ID NO: 607402 - DNA, 100 bp, Homo sapiens
gcaaatgccaaaggaattggttatccagttgcccagaagattgttgccacaaggaagaagcagcagctgtccataggaccctgcaagtcgctacctaatt

SEQ ID NO: 607403 - DNA, 75 bp, Homo sapiens
cacctcttccaagtggagtacgcgcaggaggccgtcaagaagggctcgaccgcgatgtataatttcaccagtttc

SEQ ID NO: 607404 - DNA, 100 bp, Homo sapiens
agccgcggaggagagcggggccggcaagaaggacaagagctgagggcagcagtaaaatccaggcccgaatggaacagcagcccactcgtcctccacagac

SEQ ID NO: 607405 - DNA, 50 bp, Homo sapiens
cagaatcaccagcactggctgaaggtgacttaagagattaaaattaattt

SEQ ID NO: 607406 - DNA, 75 bp, Homo sapiens
gccagacctcggtgtccacgctgtccccgcagcccggcagcggtcagaagacatgtcttcatctacatggcatct

SEQ ID NO: 607407 - DNA, 100 bp, Homo sapiens
ccggcctccggcggcgccccagccagcctccaggcccagaacggagccgccttggcctcggggtctccctacaccaacgactctgaagaagaagctatgg

SEQ ID NO: 607408 - DNA, 75 bp, Homo sapiens
gtggcacagtggagcagctctgaagatgcaaaggcctatatgaacccaatagcaatggcgagatcaaggggtcca

SEQ ID NO: 607409 - DNA, 100 bp, Homo sapiens
tgggagacacgccgcttcatcgagctgcctttacaggacgaaagcaatacgagaattggagacccaaccagccagacagcttcttttctgctggagaaga

SEQ ID NO: 607410 - DNA, 90 bp, Homo sapiens
gagcacaagtacttcgaggagagcttcaaggaaggaacagcttctacatgggcacttgccaggatgagcctgagcagctggatgactgga

SEQ ID NO: 607411 - DNA, 97 bp, Homo sapiens
aatgagacagcaaaagttcaaatggcctgtttcaagtttctgatataaaacgatgacattttcaggaaaatcctgaacgctttaccctgtacagctc

SEQ ID NO: 607412 - DNA, 73 bp, Homo sapiens
caagaaccacatccagtggctgtcaatcatgcgaggctgtgacaacatgtgtagctactgcattgttcctttc

SEQ ID NO: 607413 - DNA, 101 bp, Homo sapiens
attttctagctgctgcaactaaacgaggaaagatctgcatatgggatgtttccaaacttatgaagtttccagttgtcatcacaagaagcagtaatgtttat

SEQ ID NO: 607414 - DNA, 75 bp, Homo sapiens
ttctttactactaagcaccgttggtatcctcatggacgggaatgggtactgttcaaaaaggaatgccccacaagt

SEQ ID NO: 607415 - DNA, 74 bp, Homo sapiens
caaatttattgtgttctggttccagtcaagcaaaattattcagcaccaaatcctcactatggatgggctcattg

SEQ ID NO: 607416 - DNA, 100 bp, Homo sapiens
gaagaaggggacttgggcccagtttatggcttccagtggaggcattttggggcagaatacagagatatggaatcaggagccatgtggctagaaatcctcc

SEQ ID NO: 607417 - DNA, 100 bp, Homo sapiens
accatggtggacacttttcttcagaagctggtcgccgccggcagatacatccagaaagtgcccagaagaaacttcctgctggaaaaaatgaaaaagcagt

SEQ ID NO: 607418 - DNA, 50 bp, Homo sapiens
atcgcctttctggtgggaggcttgattgtgcagtgcctggagatgaccac

SEQ ID NO: 607419 - DNA, 75 bp, Homo sapiens
agagaagttcttatgactcctccatgtctccaggtcagcccaaggccaaccccactgtcactctgttcccgccct

SEQ ID NO: 607420 - DNA, 100 bp, Homo sapiens
ccagatccatttacactttacagaaacgccaccccagtgaccaccactgccccgtgggcctccctgggcctctccgccaagacctgcaacaacgtgtcct

SEQ ID NO: 607421 - DNA, 96 bp, Homo sapiens
tgacaagtttgagtgttgctggaacggttcggataggctcctgggtagaactgcacttcagcaataatgggaacgggggcagcgttccagcctcgg

SEQ ID NO: 607422 - DNA, 88 bp, Homo sapiens
attgaccagctggccctggagtcccctgaggaaaagagcactggttgccattggtacccatgatttggacactttgtcgggcccattt

SEQ ID NO: 607423 - DNA, 100 bp, Homo sapiens
aggggtgcagtgtgtctggtcttatgagttggaaaatggatataccttatttgattatgatgttggactgaatgatataattcagctgctagttcgccca

SEQ ID NO: 607424 - DNA, 74 bp, Homo sapiens
ccctcgcttcctgctcgacctgcggcagtacttggaacaactctgctcatggtgattacatgcaaaataacgag

SEQ ID NO: 607425 - DNA, 117 bp, Homo sapiens
ggcaggggcggaggcggaggcagaggtggaggcgctttgaaagatatcagttttagagaatgtggcgtggagaaattctcaaggaaagagtaaaatgctggtgatgtgctgagggaa

SEQ ID NO: 607426 - DNA, 100 bp, Homo sapiens
caaatggcaaagcagttaggttacaaacttttaccggctttcaacactaccagtggccttccttatccaagagttcaacttttagatacaaagagacaac

SEQ ID NO: 607427 - DNA, 100 bp, Homo sapiens
cattacttgagaaagagaccactagatttttctttttctctaagaatgatgaacgacttcaagattgaggacgagacgcaggtgtcacgggccactcagg

SEQ ID NO: 607428 - DNA, 75 bp, Homo sapiens
cgggaattcagtactctgtaacacccagctaccaggcctcattgctacgatttcagagtaccctggtaatagctg

SEQ ID NO: 607429 - DNA, 90 bp, Homo sapiens
cggcctgcacaccaagggcgcccttcccctggatacggtcactttctacaagggtggtgaaggaggagatctttgatgacaatgccaagc

SEQ ID NO: 607430 - DNA, 75 bp, Homo sapiens
attaaaaggtgtcaagaagctcagaatggatctgaaaccaaacaacttgttgctagatgaaaatggagttctaaa

SEQ ID NO: 607431 - DNA, 100 bp, Homo sapiens
cttcggagcattcagcccagagcctttgccaagaacccccatttgcgttatatgttccttgcattgactccatggagagtatatcacctgatttccgtca

SEQ ID NO: 607432 - DNA, 98 bp, Homo sapiens
aaaaagctgtggaaggctctggataaggaccagtacctgcccaggaaactggctcaactcagtttccttataaccctctgactatgcggatgctcagc

SEQ ID NO: 607433 - DNA, 88 bp, Homo sapiens
aacacctggagtctccgcgggcagtcaaataaagtgcccgtggtgcagccatcccatgcggtccatcctctcacccccctcatcactt

SEQ ID NO: 607434 - DNA, 100 bp, Homo sapiens
cggtacctgccggacacgcttctcttggagaaacagggaaacagccttgcagctgaggactggtgtgaaggtgctgatgactggggaagtgatactgagg

SEQ ID NO: 607435 - DNA, 98 bp, Homo sapiens
tcgagggccaggcagctgcagaaggcggtggctgagagtgaggaagctggtaggtgagtgctgtcctcggctcactttcctcaagctctccggctgcc

SEQ ID NO: 607436 - DNA, 101 bp, Homo sapiens
cttgactggtcttacattgctgcatcaagaaacccaagctgctgaggtgaccaagaatatggcccaggtgaccaaagccctggacaaggccctgagcacca

SEQ ID NO: 607437 - DNA, 98 bp, Homo sapiens
catgaagaagcgcctcttgatgcccagtaggggtcaccctcgagtcctggctgattcttttcctggcagttccccttatgagggttacaactatggct

SEQ ID NO: 607438 - DNA, 51 bp, Homo sapiens
gttccaccaggccgggaagcccatcggaagagcttctcctcatcaactggg

SEQ ID NO: 607439 - DNA, 90 bp, Homo sapiens
taccataactggatcaacttatgcacctattggagaagtgtcaccagaaagacctacaggggatcttagagaaagaatgaagaacaagcg

SEQ ID NO: 607440 - DNA, 101 bp, Homo sapiens
tctcgctccgtggccttagctgtgctcgcgctactctctctttctggcctggaggctatccagcgtatgtgaggagcagcgctgtgaggaggaagtcttcc

SEQ ID NO: 607441 - DNA, 82 bp, Homo sapiens
ttgcttggaaaaacgtgtgggtacgaccttggaaaatgtttataggaggccttagctgggacactacaaagaaagatctgaa

SEQ ID NO: 607442 - DNA, 100 bp, Homo sapiens
ggctggaaggcgtggatgcaccagcaggaacgaggtggctgggtggtcatcaacccaggttttcttccacccctgagatggcaagaccagccccttgtct

SEQ ID NO: 607443 - DNA, 75 bp, Homo sapiens
gtgccatgtggggaaggcggaggaccgggagcggctggtggccacgttccgccatggagtcatagttgcagctga

SEQ ID NO: 607444 - DNA, 100 bp, Homo sapiens
ttcaagccagcagtggctcagcctgatgacaccttctactttgacaccgagttcacgtcccgcacacccaaggctccctacaccatcatcaccttcccct

SEQ ID NO: 607445 - DNA, 75 bp, Homo sapiens
ctaacagaactggaccttttcgtgggagattcttcacagtcaagctcccagttgctcttgatcctggggccaaga

SEQ ID NO: 607446 - DNA, 100 bp, Homo sapiens
gtttccccatctgcaaactccggaccctggagacgctgtttggaatgtgagatgggcggcgactacgtgcacaagtctgtgtttatcattttcttccaag

SEQ ID NO: 607447 - DNA, 90 bp, Homo sapiens
atactctagaatatacaaagacaaaaggagattctgatgaagaagttattcaagatgctatcatggtgaacttacttcagattgtgcggg

SEQ ID NO: 607448 - DNA, 82 bp, Homo sapiens
aagtctgtgtcaaacatccatatcataagtggaattttggagatattcaaagatgatcaagttccagatgatcctcagtgag

SEQ ID NO: 607449 - DNA, 100 bp, Homo sapiens
ctggactttagggctgtggtgatggatgaggtggtgctgacaatcgagcaaggaaacctgggaaattgttgaaaacgttaaatttgattcctaaaaggac

SEQ ID NO: 607450 - DNA, 76 bp, Homo sapiens
aatagtgctgtattgccagaaatggagaatcaggttatttccagaaagaagagaatggcaaagtatgagaaggctg

SEQ ID NO: 607451 - DNA, 88 bp, Homo sapiens
gcaattgttgccattgaaaaccctgctgatgtcagtgttatatcctccaggaatactggccaggctgaccggttccctgatgtgttac

SEQ ID NO: 607452 - DNA, 74 bp, Homo sapiens
ggcgcggcgcaggcaccggcccggggagaggcaccatgagcgagccctatgagtttgtctctctggaatggctg

SEQ ID NO: 607453 - DNA, 99 bp, Homo sapiens
acagtcagacccccaagctcccgagaatcactccagctctcctggaagcagataccatgtttgtgtggaagtgccccgtgtttgctatgccgatgctgt

SEQ ID NO: 607454 - DNA, 75 bp, Homo sapiens
ccctcctccgagggaggggggttgtgaccccaggtatggtgtcagtcgtggaactgaaacagagttcagtaatgc

SEQ ID NO: 607455 - DNA, 83 bp, Homo sapiens
ctcatggggaaaatctccccggtgactttcagatgtctttggtggacttgggaaagaggttgctagaagcagcaagaaaaggc

SEQ ID NO: 607456 - DNA, 99 bp, Homo sapiens
cgcggtgctgccggtggagcttcagggagaccaaattttgaggaaggtggaccaacatcagtagggagaaagcatgaatttatacgctcagaaagtgaa

SEQ ID NO: 607457 - DNA, 74 bp, Homo sapiens
tacgagggagtttgacagctattaaaaccagggctccacagttaggagatccaattctggtacagcagttgcgc

SEQ ID NO: 607458 - DNA, 82 bp, Homo sapiens
gcaagaacgggaacaaaactctgggagatcttgtgcgaaaactcaaagaagataaagcaccccaagtagacgtagacaaagc

SEQ ID NO: 607459 - DNA, 82 bp, Homo sapiens
tacggcccgagacacaccaggccggcaggctgagaaaagcgagaccgcgtgcgaggaccggaggcatacacggaatacctga

SEQ ID NO: 607460 - DNA, 100 bp, Homo sapiens
cctgtgactccagcttcagtagcggcatcagtgtcttcactgcagccagggaatgcgttgaatatgtcaagagcttcaatatccctctactcgtgctggg

SEQ ID NO: 607461 - DNA, 100 bp, Homo sapiens
gccaaatttgttaaagagaggatagaaattgaacagaactatgcgaaacaattgaggttggcatcactctcttcactgtgtctcataggaaatctctttg

SEQ ID NO: 607462 - DNA, 98 bp, Homo sapiens
ttctgcgtggctgtcgggcggcgtttggtcccgggagcctcgccgggacgaaatagattgtttacagaaagaagtagaagagcttaagagtaaaaatc

SEQ ID NO: 607463 - DNA, 74 bp, Homo sapiens
cgaggtggatggtgtggatgaagaggaggaggacgaaggtggagccgccaccaaaatgcagattttcgtgaaaa

SEQ ID NO: 607464 - DNA, 100 bp, Homo sapiens
cagctctgcctggagcactcgctggccgactgcgccgagctgcacgtcctcgaacgcgaggccaacagccccggatgtcttcatcacattttgccagtcg

SEQ ID NO: 607465 - DNA, 95 bp, Homo sapiens
ggacttgaaaaaaactttgctgccaatactctggattggtgaaagacaacaagtgttagtaacagaagaatcttttgattccaagttttatgttg

SEQ ID NO: 607466 - DNA, 80 bp, Homo sapiens
ggagagatctctaaaaaagtggctcagattcagaatgggacaaagtggccttcatcacaggaggcggctctgggattggg

SEQ ID NO: 607467 - DNA, 50 bp, Homo sapiens
tggaaagcatctgtgtggtatggcaacagacggagtctcactctgtcgcc

SEQ ID NO: 607468 - DNA, 102 bp, Homo sapiens
ggaatgtgctcttgtcctggcattgcatccacaggaggggcaggaaattctttgaaggcaaagcagagagcagaggttcttcagtccacgcaacggttcttc

SEQ ID NO: 607469 - DNA, 98 bp, Homo sapiens
tggaaacaaaatattcatgctggatattgagctggaaatcttccatttggttatgtatcgaaactaccagcggaagaatgacatggatgagcccccac

SEQ ID NO: 607470 - DNA, 100 bp, Homo sapiens
caccatccgccctcggcttccgcggggcgctgggccgccagcctcggcaccgtcctttcctttctccctcgcgttagtggtggtgaccgcggtggcttca

SEQ ID NO: 607471 - DNA, 100 bp, Homo sapiens
gtactgagggagagccggatcctttcccagaagaatgagaatgaggcacgtgtggttctcaaatataggcattctgatgggaacttgtgtgttaaagtaa

SEQ ID NO: 607472 - DNA, 75 bp, Homo sapiens
ctagaaattccccccgaagaagactcccccacatctgggtcctggaatctcaaaatttgttcagaaagtaaatga

SEQ ID NO: 607473 - DNA, 75 bp, Homo sapiens
caagaaatgttcaaaggaacaacatctttaccatctcatctcaagaatggagggcaagaagttatgaaatggaat

SEQ ID NO: 607474 - DNA, 75 bp, Homo sapiens
accacacctgggcacctccctttcccatctgcaaaagtactgaaacagataagatagtcgttggttcatcagttg

SEQ ID NO: 607475 - DNA, 90 bp, Homo sapiens
cccaacgaggcgctggtggtttcaggttccccaaggactctagcacctggactgtggaccaccagctcctgtggggggaggccctgctca

SEQ ID NO: 607476 - DNA, 83 bp, Homo sapiens
tttactttctgacaatgcagcttctcttgcagtgcagcttccatgaggcaggctgaacctgcagatatgcgcccagagatatg

SEQ ID NO: 607477 - DNA, 49 bp, Homo sapiens
tggacggtttcgccggcagtctcggttgaccccctgtttacagtgccag

SEQ ID NO: 607478 - DNA, 100 bp, Homo sapiens
acccgacccagtgccgcgcagctgctggaggttatatatgatgctctgcaaaacctggataagaagattgatgtgattcgtagaaaggtttcaaaaatcc

SEQ ID NO: 607479 - DNA, 75 bp, Homo sapiens
ctgctggccgcgccgggagcggcgctggccccaaggcgctgccctgcgcagggtgtgtgatggatgatgacaatg

SEQ ID NO: 607480 - DNA, 99 bp, Homo sapiens
tttaatccatatccaagaaagcagcaattacactactgtgaagtgtgaaaaaacaactgatgtgaagaaaagtaaattctgtgaagctgatgtctccag

SEQ ID NO: 607481 - DNA, 82 bp, Homo sapiens
cgcaactctcagttcgagagtaaaggtgaaatgacaatggatgctctgttggctcgattgaaacttctgaatccagatgacc

SEQ ID NO: 607482 - DNA, 100 bp, Homo sapiens
agagcggagagcggagcccggagcccgccgccccaggtgaatgaaaactttgccattgatttgatagcagagcagcccgtgagcgaggtggagactcggg

SEQ ID NO: 607483 - DNA, 100 bp, Homo sapiens
tcaggattaacactgcagagtaatggaaagattctgaagcttggcggagaggggtgtgtgagtggacaccagtgaagtaacggtttttgtgttacgatga

SEQ ID NO: 607484 - DNA, 100 bp, Homo sapiens
acccctgtaataccatctgctgccgtgaggacctgaactcacctaacccaagtcctggaggttgttatgacacaaaggacatggatttgattgacatact

SEQ ID NO: 607485 - DNA, 101 bp, Homo sapiens
tcctcactactctcattctcatattagtgtgtgcttggcactggagaaacaggaggaaatagccctgtccaggagttcactgtgcctgggagcaagtctac

SEQ ID NO: 607486 - DNA, 82 bp, Homo sapiens
gcagagtggctatggtgggcaaactaagccgattttccggaaaaaggccacactggtgtgtctcataagtgacttctacccg

SEQ ID NO: 607487 - DNA, 101 bp, Homo sapiens
tccaaaaggaaattaaaagaggcacgaagctggtatttgttactagcagtggaaagtacaatgaacttggatatccatttggttatttaaaagccagtaca

SEQ ID NO: 607488 - DNA, 51 bp, Homo sapiens
ggggcagaatacagagatatggaatcaggcaggccagaaagcagacccagg

SEQ ID NO: 607489 - DNA, 100 bp, Homo sapiens
cagagcgtcacggcgtacgccctcatggggaaaatctccccggtgactttcaggtaagagcaaagaggcggaaattaagagaatcaacaaggaactggcc

SEQ ID NO: 607490 - DNA, 101 bp, Homo sapiens
cccgcgagcacagagcctcgcctttgccgatccgccgcccgtccacacccgccgccaggaatcttgtcgattggcctggctgctgcctactacagcggagg

SEQ ID NO: 607491 - DNA, 75 bp, Homo sapiens
tccgcccgcagccgccgcggaccaggcagacagccacaaccaaagtcccggagatccgtgatgtaacaaggattg

SEQ ID NO: 607492 - DNA, 90 bp, Homo sapiens
tcaaatctgaggtcttattttgttgagtcgaaagtgaaattttcctttggccaacgtgacaggatggagggtacagagtctgcctacatc

SEQ ID NO: 607493 - DNA, 75 bp, Homo sapiens
gctgcatttacggggtctcccggagggccagagtcggaaagccgggttagtaaagcagttgaagtgatgattcag

SEQ ID NO: 607494 - DNA, 100 bp, Homo sapiens
atgcctacgagccaagatgctcagctgaagaaaaggtgactggtctcatgagccctgaagaatgaactcagaggaggttgtttacatgaggttctcccac

SEQ ID NO: 607495 - DNA, 75 bp, Homo sapiens
attcagagccttggaagtcaacactgtcattgagtcgtggggacagcttgaaggagccaacctcaattgcagaga

SEQ ID NO: 607496 - DNA, 82 bp, Homo sapiens
gacaccgcctgtgtggggcccaccctccgacaatgcagatcttcgtgaagactctgactggtaagaccatcaccctcgaggt

SEQ ID NO: 607497 - DNA, 100 bp, Homo sapiens
cagcgatggaagaggatcaggagctggagagaacatggtccaagacaattcctgggaaagttcagttcttctcaagtgagggttctgacacatctgtacc

SEQ ID NO: 607498 - DNA, 74 bp, Homo sapiens
agcaatccagacctctctggagacgagaatgtatttaccttgctgtggattgctgactggatggtccatcactt

SEQ ID NO: 607499 - DNA, 100 bp, Homo sapiens
gctgccaaaattatcaacaccaaaaagctttctgctagggtcaagagaatccatcccattaaatgacctgaagtcagaagtatcaccacggatttcagca

SEQ ID NO: 607500 - DNA, 50 bp, Homo sapiens
atgatgttcgtccgcaacgattgcaaggatcccaatgaagatacagaatg

SEQ ID NO: 607501 - DNA, 100 bp, Homo sapiens
taaaaatcaacaccaggactacagtaaggctgaaatcattgaagtgcttggagtgcagaactgaaagaggcgacattgactacagcaccgtgctcctcgg

SEQ ID NO: 607502 - DNA, 100 bp, Homo sapiens
cttttcctcgctggggtgtacggtgttacctcattttgaaagtcttgggaaacaggaaaaaattcctaacaaaatgtcagcttttcgaaatcattgtcca

SEQ ID NO: 607503 - DNA, 50 bp, Homo sapiens
cgggctggagcctgacgagctggcgggaagagtgtcttccaaagtgttct

SEQ ID NO: 607504 - DNA, 82 bp, Homo sapiens
atgagctggggcaccgagctctggttgcagagtgggcaggatcttaagacccgataggtgcagaacccatctggacacggag

SEQ ID NO: 607505 - DNA, 75 bp, Homo sapiens
ggaaaatgcaagaagactgatggagcaggcttgcaatattaaaatttccatggtgtcagtgattcatattcctga

SEQ ID NO: 607506 - DNA, 83 bp, Homo sapiens
cgcgagcacagagcctcgcctttgccgatccgccgcccgtccacacccgccgccaggtggatgaaaatactaggaaaagttta

SEQ ID NO: 607507 - DNA, 50 bp, Homo sapiens
agaagctgctgcgctgctcgcgttgtttcagatacaccacctccaccgcc

SEQ ID NO: 607508 - DNA, 100 bp, Homo sapiens
ccggcagaacccaggcgagggacagctccggacaggctttggttggagagaaggcttgttatcaatccatcagtagctatggtggtcagatcttttattt

SEQ ID NO: 607509 - DNA, 82 bp, Homo sapiens
acaagttcctcatctgggacactgctggtcaggaacgggaattgaatgatctggcacgggaccctccagcacagtgttcagc

SEQ ID NO: 607510 - DNA, 74 bp, Homo sapiens
ctggatgaatccaagttaacccttaccacccagcagcagggcatcaagcactgatagccattgggcgatacagc

SEQ ID NO: 607511 - DNA, 84 bp, Homo sapiens
ggcgccccgtcaaaatccgaaagattcgggccagagacgacaacccgggcctccgaggtcaaaatgcagatcttcgtgaaaacc

SEQ ID NO: 607512 - DNA, 100 bp, Homo sapiens
gcccgaatgcaggaagaccgtgatgggagctgcagcacagtcgggggtgtaggttatggggaatggtcctagtgccagatcgtgtcataaaatgtgcatt

SEQ ID NO: 607513 - DNA, 100 bp, Homo sapiens
agtgaaaatacagccaagatcttggcaaagcttctccctcagtatttagaccaggtcaaaatgcagatcttcgtgaaaacccttaccggcaagaccatca

SEQ ID NO: 607514 - DNA, 100 bp, Homo sapiens
acaggactgcggacaagggctggcagagctcccagctcctccagcagccgacaggaggcccgtcaagatgcaggcaggcattgccaccccagggatgaag

SEQ ID NO: 607515 - DNA, 75 bp, Homo sapiens
gtgagcggcctccacctaaacgacttactaggaattgaatgatctggcacgggaccctccagcacagtgttcagc

SEQ ID NO: 607516 - DNA, 48 bp, Homo sapiens
ctggggtatgattctaatatgacggaacctgtggatgtgcctacgttt

SEQ ID NO: 607517 - DNA, 75 bp, Homo sapiens
gtggaacactggtggtttgcagatcactgagggaggaatgatcaattggaatcgtctttttcctcctttacgtca

SEQ ID NO: 607518 - DNA, 100 bp, Homo sapiens
ggggacctggtgttcgccaagatgaagggctacccacactggccggcccgggtagtaatgaaggtggtgcagctgctacccgatgggcaccgtgtgaaga

SEQ ID NO: 607519 - DNA, 83 bp, Homo sapiens
cagattcgcagtggtcgcttcttctccttggagaccagtatgatgtctgtgccatttgcctggatgaatatgaggatggggac

SEQ ID NO: 607520 - DNA, 95 bp, Homo sapiens
agtttcaactttatcagaggttaaaatttgaaagagccaaatttgtatcctactgtggggcttcaaacaccaggagaagtggtcgatgccaattt

SEQ ID NO: 607521 - DNA, 100 bp, Homo sapiens
gcttctccatcgacagccctgacagcctgggtcgatgagcagatgcttaacgtgcagaacaagaacagcagctactttgtggaatggatccccaacaatg

SEQ ID NO: 607522 - DNA, 100 bp, Homo sapiens
tacaagatatgtgcctggatgcagctcacctccgagtgttgcggagataggaacatgggagagaaacaatctgggtaacatgaaagtgatgctggttgct

SEQ ID NO: 607523 - DNA, 75 bp, Homo sapiens
gctgcttcctcctcatcttccgcctctggcagaatgcactgcttgaaaaggaagtgctcctgtcctctcagctgt

SEQ ID NO: 607524 - DNA, 96 bp, Homo sapiens
taggcgttggtcttctgatagcaactttaatgtggtgaatctggattgggaaagtcgacattaatcaactcattattcctcacagatttgtattct

SEQ ID NO: 607525 - DNA, 100 bp, Homo sapiens
tacccctgtggcaatgcctgcactattgatgggctccctgtccggcagcctacccggctcactcaggcttaatggacagcacgaggaggtagggactgac

SEQ ID NO: 607526 - DNA, 97 bp, Homo sapiens
tgccaccccagcccgtggtcctgatgccaacagtgtaccagcagggcgttggctatgtgcccatcacagggcagctggtggaatttttgaagaaaat

SEQ ID NO: 607527 - DNA, 75 bp, Homo sapiens
ggaaggactgctctgcacgcaccttacctggagtagaacagaaaaattattatgtctgtgttcccttgggactca

SEQ ID NO: 607528 - DNA, 100 bp, Homo sapiens
gtgaccgagaccgtgaccgagagcgtgaccgagagcgcgaatatcgtcatcgttagaaggttttgacctgtagcagagaaccaattctggagaacagcct

SEQ ID NO: 607529 - DNA, 75 bp, Homo sapiens
tggaggacatctgggggccacaaatgctccttctcctggagacgcaactcaagcttgaacaggatcttgagttgg

SEQ ID NO: 607530 - DNA, 51 bp, Homo sapiens
tgcagtttcaagttcctgggctcaaaagcctggctacagataagggaccaa

SEQ ID NO: 607531 - DNA, 75 bp, Homo sapiens
tgtggcgtttatagagtctctgaagaggttcaagggcagcaggaaagacgagatcctgggcatcgccaacaaccg

SEQ ID NO: 607532 - DNA, 87 bp, Homo sapiens
ggggccgggcagcccgcgcgactttcggattttttatcaagcagaaatgcatcgaacaacgagaatcaagatcactgagctaaatcc

SEQ ID NO: 607533 - DNA, 107 bp, Homo sapiens
accatgccgctcctaagcctgcacagccgcggcggcagcagcagtgagagggcagctggtggaatttttgaagaaaatggaatctcgaggccccctttcgtgcgaca

SEQ ID NO: 607534 - DNA, 100 bp, Homo sapiens
agcttccagctgagacaccgtgagtctcttcaactaagagtctttgctgggatggaagatttgggccgtgtggtgcctcagggaagttctggttacagag

SEQ ID NO: 607535 - DNA, 80 bp, Homo sapiens
gacctcggtttcctggacccattccgactcaggtgtgatgaatgcagactctgctaccattttggctgtttggatcctcc

SEQ ID NO: 607536 - DNA, 101 bp, Homo sapiens
tcgcccctggcctcgcgggccgtgtctccggcatcatgtgtggtgctggagaatctggtaaaagcaccattgtgaagcagatgaggatcctgcatgttaat

SEQ ID NO: 607537 - DNA, 100 bp, Homo sapiens
gggaccttgaacaaggcaaatatggttttgtgatgtcttggttcgtgtccccactgctttctggaattatgtctggaattttattcttcctggttcgtgc

SEQ ID NO: 607538 - DNA, 75 bp, Homo sapiens
atctccccaggaaaacggccctgctgtccacaaaggttattgcagccgaaggagaaatgaatgcatccagggctc

SEQ ID NO: 607539 - DNA, 80 bp, Homo sapiens
ggggaccaggacagtcgcgaggttcgagtgttgcagagcctgcggggcaagatctgaggccccgtgtgggccgcggcccg

SEQ ID NO: 607540 - DNA, 100 bp, Homo sapiens
ccggctgccgctgctgccgccgccgcctcgggtcgtggagccaggagcgacgtcaccgccatggcaggcatcaaagaaaaagcttgtggtgaaggggggc

SEQ ID NO: 607541 - DNA, 101 bp, Homo sapiens
cgggccgtgaacgaaagcagtgacggaggagcttgtaccaccgggcctattccactagaagcaagatggctgaactcaatactcatgtgaatgtcaaggaa

SEQ ID NO: 607542 - DNA, 51 bp, Homo sapiens
gaggcatgggcaaaacttgatgtggagcccttgtttgctgcccgagtggtt

SEQ ID NO: 607543 - DNA, 75 bp, Homo sapiens
catcactggagtcagagcgataaatgagttctgcctcaaatccaggacacagcattgttggttttgccatgtact

SEQ ID NO: 607544 - DNA, 133 bp, Homo sapiens
ccccgggtggcgcctccctgcgactcctggaccaccgggcgctggtctgctcccagccgacaatgcagatcttcgtgaagactctgactggtaagaccatcaccctcgaggttgagcccagtgacaccatcga

SEQ ID NO: 607545 - DNA, 90 bp, Homo sapiens
actggagtccctgatggaattatgcagtttattaaggaagagagaagggcacagttacctaagtatcaacgtaatcttcctcggccagga

SEQ ID NO: 607546 - DNA, 100 bp, Homo sapiens
gtactaccgggcgcccgaagtcatcctgggtatgggctacaaagagaacggaattgattcggaaggccatgcagctaactttgtagaaacagaacaaatt

SEQ ID NO: 607547 - DNA, 82 bp, Homo sapiens
ggaccacggtcaccgtctcctcaggaaggaaaatcacctcggcagtgtttgaaggaaggatactgcaactctttgaagtacg

SEQ ID NO: 607548 - DNA, 98 bp, Homo sapiens
aacacccttggggaaaacattgctgacaacggaggggtgcggcaagcctataaggtctcctctgagcctccggcctccataagacccaaaacagatga

SEQ ID NO: 607549 - DNA, 82 bp, Homo sapiens
cgacaagccgctggcagccgcggatctcaccgccgctcagggtgagcgagtgctgtgctttcatgggcctcttctttatgaa

SEQ ID NO: 607550 - DNA, 100 bp, Homo sapiens
tacgccagccccgccaagctcgagtccatcgatggactggaaggatcaccagcacatatgcggccagtcagcagctgtcaccgtccaggcagacgaagtc

SEQ ID NO: 607551 - DNA, 75 bp, Homo sapiens
cctcgaggatgccatggtgttctggatcaacaaggaatgtaagaagcacttggcaggcttgggggctttggggct

SEQ ID NO: 607552 - DNA, 99 bp, Homo sapiens
gtggcaatgacccagacccggacgacccccattgctgagccagcggagctgcttgccacttatgaatcagtgttgttccatcaactacaagaaataaag

SEQ ID NO: 607553 - DNA, 83 bp, Homo sapiens
ctcagagagcactgcattgcaaaggagttaagggagcatggagaaaagaagaaacgctcgcgagaggatgctggagataatga

SEQ ID NO: 607554 - DNA, 83 bp, Homo sapiens
tgtcgcgttacgggcggtacggaggaggaagtactagccggacatcatgagtggctgtcgggtattcatcgggagactaaatc

SEQ ID NO: 607555 - DNA, 83 bp, Homo sapiens
tttgaaactattccaatgttcagtggcggaacttgcaccgccgccgcgccgccgtcgctctccaacgccagcgccgcctctcg

SEQ ID NO: 607556 - DNA, 98 bp, Homo sapiens
cggaccccaggactcaccccaagggctacaccgagtacaaagtaaccgcgcagcttcgccgacacgaggtgaccatctgcaattacgaagcatctgcc

SEQ ID NO: 607557 - DNA, 96 bp, Homo sapiens
ctaggagtaaaacgtgataaaaatgggaagatcattggtaaataccagctgtcccctacagtgaatatgccccaagatgacactgtcattatagaa

SEQ ID NO: 607558 - DNA, 51 bp, Homo sapiens
acatgagaccatagccaaacccccaggtgctggagaatctggtaaaagcac

SEQ ID NO: 607559 - DNA, 100 bp, Homo sapiens
gggcgctccgcttctacgacagatccgacatcgacgcagtctacgtggagccttacaaagtaaacctctctcaagatttagagcatcagctgcaaaacat

SEQ ID NO: 607560 - DNA, 73 bp, Homo sapiens
tgaaacacattgttatagatgggagcaatgttgcaattacaaatgagccgtcagactgctacagcattaccta

SEQ ID NO: 607561 - DNA, 97 bp, Homo sapiens
caacattcctgtgtcaattcgacggagctggatgaactcattcagatatcctctgagagccaagcaaagaacattaaggaaggaaggaggaatgagg

SEQ ID NO: 607562 - DNA, 75 bp, Homo sapiens
aaaatcgcttggttaaaacctgacacttttaacagctccaaagacaacaggccctccctctgccctcccgtctgt

SEQ ID NO: 607563 - DNA, 100 bp, Homo sapiens
tgatgaagaagatccttcaaaattaaaagaggagcagcatggcatttcagtcactggtttgcagagtccaggcatccagggcattgtggatgcctaccgc

SEQ ID NO: 607564 - DNA, 98 bp, Homo sapiens
cttctgtctccacagcaggacagccgaactggaatctggatgagcagctcaagcagatggagaaggatgaaactgtgagtgactgctccccacacata

SEQ ID NO: 607565 - DNA, 100 bp, Homo sapiens
aagccaaacgaagttaaaggaagtgttccccacggctgcgctcatgccaggtttgccagaacccaataaagatgccatcttccaaggcctgacgcaggac

SEQ ID NO: 607566 - DNA, 83 bp, Homo sapiens
taaaaacagaacaggaggtggtagagggcatggatatctctactcgctccaaaggattacctcacagacctcatcaccaatga

SEQ ID NO: 607567 - DNA, 76 bp, Homo sapiens
gtacagactgcttttccagcagcatggacacaagaagcatagtgcttgtgagtgaggattctgacagtgatggcat

SEQ ID NO: 607568 - DNA, 100 bp, Homo sapiens
gtcgggtggttttactggagtattggaactcaggcgcattggagtgactgtctggcatcaccaagatgacactccacgccacccggggggctgcactcct

SEQ ID NO: 607569 - DNA, 101 bp, Homo sapiens
ccgtagaccagtttatgatggaaaaagaagtctttacaccgccaatccacttcctgtggcaactacagggctctacatacaaactaccacgcttacaatct

SEQ ID NO: 607570 - DNA, 73 bp, Homo sapiens
ttgcccctgtggtgccaagagaatattggaattccagatgctcagtgacctccaggagtctgtggccagctct

SEQ ID NO: 607571 - DNA, 90 bp, Homo sapiens
tcttctgtgtctttgcagggctgttttggactcagtattcacctaagcactccaaattggagccaagaaccatggggtagtcatgccaga

SEQ ID NO: 607572 - DNA, 74 bp, Homo sapiens
ccagccccaagaaggagaccctcatccagctgatgcccttcttcgtaaagcgtggatacccatcaacgaagttt

SEQ ID NO: 607573 - DNA, 100 bp, Homo sapiens
agaacaatgcttccctctctgacacctctcccatggacagttccccatcagggattccgaagcgtcgcacagggagtggacatccgccataacaaggacc

SEQ ID NO: 607574 - DNA, 90 bp, Homo sapiens
ggagttactacttcagaaacgcaaagagtcccattgttaggcatgcggcaactgctccacctcattcgtgtcctcccgatgatacgaagt

SEQ ID NO: 607575 - DNA, 100 bp, Homo sapiens
tgatgatcacgcagctggctggcttcagtggaccagcaattgagatggaattgaggcagatggaggtggcccaggccaatcgacacatgtccctgctgac

SEQ ID NO: 607576 - DNA, 100 bp, Homo sapiens
cgtctggacatctgtagctgtcgtttggtttgatcttgttgactatgaggaagttctagtgcctgtagtagaagaacatccatctcatgagcagatcatt

SEQ ID NO: 607577 - DNA, 50 bp, Homo sapiens
gcgggtggaactgatccttgaaccaaagcaagtgcagccgcggagccctg

SEQ ID NO: 607578 - DNA, 100 bp, Homo sapiens
cacaacaagggccggattctcacccagtgccggtggtggtgtgcacattgagccccggtatagacagttcccccagctgaccagatcccaggtgttccag

SEQ ID NO: 607579 - DNA, 75 bp, Homo sapiens
ttcagcatccccaagcagggggaggcacttcaaaaaacgtatcagaagatacttcgagaaaaagaaagtgcttta

SEQ ID NO: 607580 - DNA, 90 bp, Homo sapiens
ctgctgcctccccggagctcccgggccagtagattccagaggggtgactaccatattgatgtctgtatcaatgactacctggatgttttc

SEQ ID NO: 607581 - DNA, 100 bp, Homo sapiens
ccccactccgcctccgggagaggttgaaactccattggaagaagctattaaatttttaacaccgttgaagaacttggtgaagaacaagatagagactcat

SEQ ID NO: 607582 - DNA, 100 bp, Homo sapiens
tataagaatggggacctgtcctttaaatatgtgaagaccttcaacatggatgagtacgtggatggcaggattttcataatatatgtagtatgagttccac

SEQ ID NO: 607583 - DNA, 100 bp, Homo sapiens
acgagctgatcctgaccacagagtccatcatgaagaagagtgagttcctctgctgccaggacagcttcctgcagggctacttctacaagtccgaacagcc

SEQ ID NO: 607584 - DNA, 98 bp, Homo sapiens
ccgccgccggcccggacatggccgccaacatgtacagggtcggagctgagctgactgctgcccactttggaggaggcggtgggctccttcacaagaag

SEQ ID NO: 607585 - DNA, 100 bp, Homo sapiens
gacaacaatagtaatacactcttacccttacaggagtctcaggagcaggggctgcggcagaggctgctggacgagcagttcgcagtgttgcggggcgctg

SEQ ID NO: 607586 - DNA, 75 bp, Homo sapiens
ctgatgccttcaaagatgaccgaaaggagcgttcctgggtgcctgtgtggctgggtctgatgagcctggcccaga

SEQ ID NO: 607587 - DNA, 101 bp, Homo sapiens
ctgtctctttttaaatttatgaactcgaaatgaagcggaaagcagatatgcgcgtcagcatactttggcggacaaaggagggcgagtttaccctgtcggcc

SEQ ID NO: 607588 - DNA, 100 bp, Homo sapiens
taaatttctcaacaccacagtcagctaaggcagaagtcaattcatctggaaagactatctctgagtcagacttaaaccactctttttcactaactgattt

SEQ ID NO: 607589 - DNA, 75 bp, Homo sapiens
gatgtccctctgaaaactgaggaatttgaagtgaccaaaacagcaggcatccgtgtcattctggaccttactccc

SEQ ID NO: 607590 - DNA, 87 bp, Homo sapiens
ctcttccaggactttgagccagtccagaccctgctgctgtcttcaaagaaggaagctcttcgtgggcggtcttgactggagcacgac

SEQ ID NO: 607591 - DNA, 100 bp, Homo sapiens
agccgcgaggtggccaagggcctgctgcgggagctcctgccgcccgccgctggcttcaagtgcaagattccaacaatgtctcacccatcttggctgccac

SEQ ID NO: 607592 - DNA, 83 bp, Homo sapiens
aaaatgaagtcaaaggtgactgggtgacacaaacagctcagtgtcccttttgatgagaagaataagcctcattctgattcaac

SEQ ID NO: 607593 - DNA, 100 bp, Homo sapiens
aagcggcctggcaggggaaggatcgagtgtgccgtgcaggtgaagctggagctggggcaccgcgcccaggtgaggaaaaaacccaccgtggagggcttca

SEQ ID NO: 607594 - DNA, 82 bp, Homo sapiens
ttcgtgtttacctggctcttcagtctaaactgcagttggttgaatctggcgatgtggaacccatggatatggagggctgact

SEQ ID NO: 607595 - DNA, 100 bp, Homo sapiens
ccggctcgccaactcggctgctctgggggattcgtgcgcggtaagaagctgcgcggtagcgcggtgagaggaaggaacagagccacagagaaaaatgact

SEQ ID NO: 607596 - DNA, 100 bp, Homo sapiens
gcggccccgagtatgcttcgtttttcgccgtcatgggcgcctcggccgccatggtcttcagcgtggaatgcagtagccctctgggcctgggatattgtgg

SEQ ID NO: 607597 - DNA, 80 bp, Homo sapiens
aaatcagagctggaacctgaggagagaggtacctagtcgatagtcgctggttcaaacagtggaaaaaatatgttggcttt

SEQ ID NO: 607598 - DNA, 100 bp, Homo sapiens
gatgggaagggaactggaatatctagaggaggtacctccaggaaatgtgctagggtctgggcttcagcatcgttgggggaaaagacagcatttatggccc

SEQ ID NO: 607599 - DNA, 82 bp, Homo sapiens
ctaggtcttcaagccccaccgacacgaattggccttattaatgatatgatcctgataacttaagtgactctctcttttccgg

SEQ ID NO: 607600 - DNA, 50 bp, Homo sapiens
ggaaacagttaatggagtatgcaatgaggaccccagagagatgcccaggc

SEQ ID NO: 607601 - DNA, 100 bp, Homo sapiens
atgagatcttcagcctccaggctctccagtttttcgtcgagagattcactatggaatcgcgattattggagccggaattggtggcacttcagcagcctat

SEQ ID NO: 607602 - DNA, 83 bp, Homo sapiens
cggcaggagagtccggccgcgacaggacgggaaatcctcattgacgattcaatttgttgaaggccaatttgtggactcctacg

SEQ ID NO: 607603 - DNA, 100 bp, Homo sapiens
aagatgatagaatgattttaaagttatgggactacaacagcagccacaggaaccttgagatggtgatgggaatctttgcaaattgtatcttctgtttgaa

SEQ ID NO: 607604 - DNA, 90 bp, Homo sapiens
ccaggcagagtctctgcgttacaaactcctaggagggcttgctgtgcggaggtggctgtctatgttccaggaagtaaaggtgcaccttca

SEQ ID NO: 607605 - DNA, 73 bp, Homo sapiens
tgcgtcaagtacactgaaattcatcctgagatgagagaggaacgtaatgacatcctggctgtggctgactggg

SEQ ID NO: 607606 - DNA, 116 bp, Homo sapiens
aacaccctcagctccacattgagagcaaaatctacaagatgatgcagggaggagctggtgaaactgcgtgctgtaagctgggaccagctttgtccataactgctgagagaacttgc

SEQ ID NO: 607607 - DNA, 74 bp, Homo sapiens
ccccgctaccggactacatgtcggaggagaagctgcaggagaaagtgctcttacagatggaaggtgggggccag

SEQ ID NO: 607608 - DNA, 50 bp, Homo sapiens
aaaatggagcccttcaccaatggtgaaactattttttgaatctcttgagg

SEQ ID NO: 607609 - DNA, 75 bp, Homo sapiens
aagctccgttgactaccgtggagagatcataatttggggttcaagattccagagccccagtttgagggacagcgg

SEQ ID NO: 607610 - DNA, 100 bp, Homo sapiens
gtcatgctcgcttcacggaggcaatagctagccgatggaggaaaggaagtgctgtccatgcaccagattctcctgtacttgttaaggtgcagcaaagccc

SEQ ID NO: 607611 - DNA, 111 bp, Homo sapiens
gatctctctcatctcgctcggctgcgggaaatcgggctgaagcgactgagtccgcgatggagacctgcctagagctggaacgttacctccagagcgagccctgctatgttt

SEQ ID NO: 607612 - DNA, 119 bp, Homo sapiens
ccgtgcgcagcggagatgccaccttccccaaagctatggacaacgtgacggtccggcagggggagagcgccaccctcagctcctctggtgcaagtgtggtagctattgacaacaaaatc

SEQ ID NO: 607613 - DNA, 75 bp, Homo sapiens
aacgatgcgtctcctggatgggttcttgagcacgtgcccctgctgctgtatatcttggcagcaaaaacattaatt

SEQ ID NO: 607614 - DNA, 75 bp, Homo sapiens
cgcagcccgggcccaggccccggcagcgcctgggacaagctgttttcactcattagctcctgaggtaaacaaatt

SEQ ID NO: 607615 - DNA, 97 bp, Homo sapiens
ctttctacaatgaatccttcagcttcaaagttccccaagaagaactggaaaatgccagcctagtgtttacaggttgctgtagtaaaactaaaaaatg

SEQ ID NO: 607616 - DNA, 51 bp, Homo sapiens
tgtgttcagtcggagccagtaaagcagccaagccgtacaaaaatgatccag

SEQ ID NO: 607617 - DNA, 82 bp, Homo sapiens
ggattccgggataacaaaattccagtcaatttgccgggtttggaaatcccttgtctccaggttgctgggattgacttcttgc

SEQ ID NO: 607618 - DNA, 96 bp, Homo sapiens
tcaaattgtcaggatcaggaatgtatgttttcttccatctggattctaggatatcaatgcttacaattgtgaagagcccacagaaaagttaccttt

SEQ ID NO: 607619 - DNA, 50 bp, Homo sapiens
ctggggaagcggatgctatcagggccatgtgaaactttctgactttggtc

SEQ ID NO: 607620 - DNA, 76 bp, Homo sapiens
acattccaaaggaaaaatttcagcccctcatatggaaaatttgaaatgcagaggggaaacagtagcaaaggagatc

SEQ ID NO: 607621 - DNA, 83 bp, Homo sapiens
cccagggcaagccccgctccggccaacaagttttaaaatcaaagatgggaaaatcggagaaaattgcccttccccatggccag

SEQ ID NO: 607622 - DNA, 98 bp, Homo sapiens
tgcacttcgcattttggcattgacatttaattttagggtcctttatatagaagggagagtagtggtgtttccccaggatctgctggagaaaggcctcg

SEQ ID NO: 607623 - DNA, 98 bp, Homo sapiens
cttcttcctcttcttcctcctccgctaccaccaccacaccagaaactagcaccagccccaaatttcgaaagatactattcaagtccagtacatcataa

SEQ ID NO: 607624 - DNA, 100 bp, Homo sapiens
tgtgagcagttcatagccgagatgtctggtttcgaaaaaacgatgaaatgaaagctatggatgttttaccaattttgaaggaaaaagttgcatacctttc

SEQ ID NO: 607625 - DNA, 76 bp, Homo sapiens
tcgaagacgggatactgctcagcaaggtgttgtgaatttcccatatgatgatgttaatttggagtggcccctggag

SEQ ID NO: 607626 - DNA, 74 bp, Homo sapiens
aaggaaaaggaggaattcgccgtgcccgagaatagctccgtccagcaggtgatgactgaaaaagggaaactgtg

SEQ ID NO: 607627 - DNA, 100 bp, Homo sapiens
tggcctagcacgtggaattcgcgaagctgccaaagccttagacaataacaaatgtggcaattattttggatctatcacctgtcatcataactggcttctg

SEQ ID NO: 607628 - DNA, 100 bp, Homo sapiens
ctgcagcagcgatttgatgtgtccagcacgtccgtgttcaagcagcgagcccagatccacatgcgggaggctgtaccttcacagtcctggtgcacacgag

SEQ ID NO: 607629 - DNA, 100 bp, Homo sapiens
aaggcatattggattacgtagtagaaaccaccaaaccaatttctcctgcaaaccagggtatcagaggttcctccccgggcagaagaaatcaccattccag

SEQ ID NO: 607630 - DNA, 100 bp, Homo sapiens
atttcctcaggactccagattatctacaacactgatgagtttggtgaggattcatcaacctccagtatgatgtctgtgaactttgatgttcaatcaaatc

SEQ ID NO: 607631 - DNA, 74 bp, Homo sapiens
atttttcagggaacattaactaatgaaaccagatgtcttacttgtgaaacttctcactttatctctgcactgac

SEQ ID NO: 607632 - DNA, 101 bp, Homo sapiens
catatctaccacaggccactttggcatgctgagatctgtatctgtggacctgaatgttgatccctcgcttcagattgacatacctgatgcgctcagtgaga

SEQ ID NO: 607633 - DNA, 82 bp, Homo sapiens
tttgtcagtgcacaaaatggcgccctacagcctactggtgactcggctgcagctgctgatgcaaggaatcccctgggctccc

SEQ ID NO: 607634 - DNA, 90 bp, Homo sapiens
tgattggaatgttggcagctataacttacacaatccaaaaggaaagtcctcggccgtagagattcagatgatgaccactcccgaaaccat

SEQ ID NO: 607635 - DNA, 90 bp, Homo sapiens
tctcagtccacccaaggtctcctcggatcgcctggagaggcactcggacctgttcaggacctcaaggggctcggctatgagaaggggaag

SEQ ID NO: 607636 - DNA, 100 bp, Homo sapiens
gggccgagccgggccgcccgggcgcagtctttaaccatggcgtccctcttcaagaagaaaaccgtggatgagaatggcaatggtctctgcgatgtcctgg

SEQ ID NO: 607637 - DNA, 98 bp, Homo sapiens
tttggtcctttaccttgcagactgatccagaagcttggaagctgtattacagatccaggtaatcgagagacctcaggaaataccatgcacacagtgtt

SEQ ID NO: 607638 - DNA, 90 bp, Homo sapiens
gagtgctcccggatcaaggccttggcagctttcctgctctgggaccctaccaaggtgcccccacgactgcaggctgtgactgatgaccac

SEQ ID NO: 607639 - DNA, 89 bp, Homo sapiens
caaacattcgtctcggaaaccccgcctcttacagtcacgaggtgtggccgacgacgatgccctcgctgaggagcgcatgcggagaggcc

SEQ ID NO: 607640 - DNA, 101 bp, Homo sapiens
cccctctagaagtttctgaggaacaggatggaaggcttcgggtgaatgatcaactgatagcagtaaatggagaatccctgttgggcaagacaaaccaagat

SEQ ID NO: 607641 - DNA, 87 bp, Homo sapiens
caagctcatctcatagaacttctctgtagattcgtgtgagggatgacaagatgcctttggcgcaccttgcaatagctgttgaagctg

SEQ ID NO: 607642 - DNA, 80 bp, Homo sapiens
ttacgcggatgtcggcgaagagttcaaccagattcttcgctgctgctgccttaccgccgagaaccaccacccgccaggcg

SEQ ID NO: 607643 - DNA, 74 bp, Homo sapiens
ccgccgtcatggcccggcatcggaatgttcgaggctataactacgatgaagataaacaggggtcacatgacgac

SEQ ID NO: 607644 - DNA, 74 bp, Homo sapiens
attctcttcattctcttggactgaacttaaatactgatagataaagtggagaattttcatgaagaacatgaaaa

SEQ ID NO: 607645 - DNA, 100 bp, Homo sapiens
agttctccaaacatgatcgtttactgcaaagttgcactgctgtgatccatcctcatctcctaaagatgcatcctgacttatctccacacttgcacactga

SEQ ID NO: 607646 - DNA, 130 bp, Homo sapiens
caaataccaggctaccatggtctacaagactctcttcgctctttgcatcttaactgcagcatttgacattgtgcagcaaagaaatggttatggagaagcccagtccgctgcttgtagggcgggagtttgt

SEQ ID NO: 607647 - DNA, 75 bp, Homo sapiens
gaaaataccacaggatggagactacgagtttctctacattaatcatactcctccaccactgtccaagagtaagga

SEQ ID NO: 607648 - DNA, 50 bp, Homo sapiens
cagggagctggaggccctgcggcagctcttcatcacggtcatggacaagc

SEQ ID NO: 607649 - DNA, 100 bp, Homo sapiens
ctcactggtaacctctgaccttcagtcacctaacctgcagggagtatatgttgctgcagtacgggaattttacttgtctgtttattttttcaaaaagaaa

SEQ ID NO: 607650 - DNA, 100 bp, Homo sapiens
ttcatcatatttttgttagtgataggaactcttcttttagccctactcctgactgcaaagagatgctgatgataaacacaagcttataaccaaaacagag

SEQ ID NO: 607651 - DNA, 100 bp, Homo sapiens
acctttctcatctgactcgtgatctgcccatcttgttactccctagcagtgtggtaagtggtggaacgttgtcactggggaatcctcacagaccttctac

SEQ ID NO: 607652 - DNA, 100 bp, Homo sapiens
acggcggcagcagcggcattcaggcctcccagaagttcctgccgaatcgtcttcgtcacccccggggtccgaggtagcctcccttacacagcctgagaag

SEQ ID NO: 607653 - DNA, 100 bp, Homo sapiens
tagatacaaatttttggatgatgatggatccatttctcctattgaggagtcaacaggagctctacggtgactttgaagacttggaaacaggggacgtgca

SEQ ID NO: 607654 - DNA, 100 bp, Homo sapiens
tgtcgtttttacccggccaaagtcactgctgttaacaaggatggatcttaagattgaaagtgatgttcaagaaccaactgaaccagaggatgaccttgac

SEQ ID NO: 607655 - DNA, 75 bp, Homo sapiens
gcgactcagaccctgacagtgacaaaggaaaatgttctgctgctgccctggatgttcttgcaaatgtgtatcgtg

SEQ ID NO: 607656 - DNA, 75 bp, Homo sapiens
gactgcagtagtgcaaaaaccattcttaacttccgggaggatttccattataatgacacagctgggtacttcatt

SEQ ID NO: 607657 - DNA, 75 bp, Homo sapiens
aaatccaatgtttgcttgtctggaaatggattatgaggtgacagagttagtccttgataattgcctgtgtgtcaa

SEQ ID NO: 607658 - DNA, 82 bp, Homo sapiens
gtcaccctgcctcccctgcgtcccgccaccggccgcttctgtcctcgggcgccctgcgtccggcagaggaggcgagcatccc

SEQ ID NO: 607659 - DNA, 97 bp, Homo sapiens
tgccacgtgtggtctgtaagtaggctgaccggttccctgatgtgttacctgcttctgctactgatccaaactgcagaacttctcattcatccccaag

SEQ ID NO: 607660 - DNA, 75 bp, Homo sapiens
tgaatcatgattttcaagcacttgctctggagggaagagcgatgggagagatgccttcaattaagttgcagagtt

SEQ ID NO: 607661 - DNA, 100 bp, Homo sapiens
cggcggtagcggcagtggcggcgcgtaggaggcggtgaacagtggtatagcagccactccagcctctgctgcagcagccaccctggatgtggctgttcgg

SEQ ID NO: 607662 - DNA, 50 bp, Homo sapiens
agatgttgtccaccttgacagtgaaaaggatgtgaaatggtctgacttcg

SEQ ID NO: 607663 - DNA, 100 bp, Homo sapiens
attgacatttaattttagggtcctttatatagaagggagagtagactttttcacagggtacctttagtggttgccaatctgggcatgtctgaacaactgg

SEQ ID NO: 607664 - DNA, 87 bp, Homo sapiens
cacctatacctgcgacattggccaggcccagtcccgggcccagctcctagtgcaaggtattgtcaatatggactcgccatatggttc

SEQ ID NO: 607665 - DNA, 83 bp, Homo sapiens
tttgatttccggagtcagtcattttactgtcaagacatttcttcggcattctgcaacaggctgaccaactgactgaagagcag

SEQ ID NO: 607666 - DNA, 90 bp, Homo sapiens
agtgatgttaatgatgatgtcaggagggcagcagtagaatcacttgggttcattctattcaggtcacatttagggcaggcaaaacataag

SEQ ID NO: 607667 - DNA, 75 bp, Homo sapiens
gtggaatcggagctgttgtattacctggggtccttgaatgggcaagagggcacatgaagtacggcgtcctccaca

SEQ ID NO: 607668 - DNA, 80 bp, Homo sapiens
gagatcgtcccgcgcctgccggtatataatgtttacatggcagggaggcagctgtgttctaagcggtaccgggagtttgc

SEQ ID NO: 607669 - DNA, 49 bp, Homo sapiens
gagaatttgcaactcatcatagtcctggcctgttgattgcatactgtag

SEQ ID NO: 607670 - DNA, 75 bp, Homo sapiens
gactcatggaggctgagcatttattcagaatggtgtgctcttgcttgcacagcttttgaatgaggacccagtact

SEQ ID NO: 607671 - DNA, 74 bp, Homo sapiens
tttctgtacagcctgcagaactgattcagtggtcctgagccttctgaagttaggcttctgcctggtggtgggga

SEQ ID NO: 607672 - DNA, 101 bp, Homo sapiens
tgaactttattgtgaacaggtagagtacctgttgttgcagagttattttctgagtcagtttcaggtgcatcatttctggcatggcttcaggaagcattgtg

SEQ ID NO: 607673 - DNA, 101 bp, Homo sapiens
gtagcaagtggccatggggagcctcagcggtctgcgcctggcagcaggcgcttaaattcctagcgaagtgccgtaagaaaaagaaactatttgctccttgg

SEQ ID NO: 607674 - DNA, 95 bp, Homo sapiens
cgtgaggggtttgtactatcctcggtgctgtggtgcagagctagttcctctccagctcagccgcgtagattgttcagtttggcatgaatgaaaag

SEQ ID NO: 607675 - DNA, 78 bp, Homo sapiens
gagtcaatacctccggatactcagtttgtaaaaacatggcggatccagaattctggagtggaagctggacacactatg

SEQ ID NO: 607676 - DNA, 100 bp, Homo sapiens
cgctcaaccagatcgcgcgggagtgcaacaaagattccatacagctccaaggaaggagccaagaaaaacattctgtgccaaagtgagatcctggaagtga

SEQ ID NO: 607677 - DNA, 100 bp, Homo sapiens
caaaagaggagtccatgatggaggcagaggtaaacttggagaggaacgtcaaggtcgtgggaaataaaaggcagttctacacagactgcagcaacggttg

SEQ ID NO: 607678 - DNA, 80 bp, Homo sapiens
cccgcggggagcgcccccggcgcgatgcccttcaggaaaggaaatctggcattttttaaagtttgcgccccacaaagagg

SEQ ID NO: 607679 - DNA, 101 bp, Homo sapiens
cgaacacacaatgtgactgagaaagtgacccagattgaagacccactagctattcttattctctttgatgaagccagatataatttattgaagggctttta

SEQ ID NO: 607680 - DNA, 87 bp, Homo sapiens
caaattagacttgcacagatgatttcggaccataatgatgctgactttgaggagaaggtgaaacaaactccagttgtacagaatgca

SEQ ID NO: 607681 - DNA, 83 bp, Homo sapiens
aaattccgccgaaaaagagaagacgctttacccgactctttgggccgttatctcacgttttgggatttgagattgacgcggtg

SEQ ID NO: 607682 - DNA, 76 bp, Homo sapiens
ttgagggcttaagagatttggaactatttggagcacccgacagctacaaagtgcaagataagaaaaatgcctccag

SEQ ID NO: 607683 - DNA, 90 bp, Homo sapiens
cagccggcacagctccgaccgcgaggacgacttctccgcagccatccagggggacagtgagaaccaggtgctggtgctggtggagcgaag

SEQ ID NO: 607684 - DNA, 98 bp, Homo sapiens
gacccgtgaaggcaatgatttataccatgaaatgattgaatctggtgttatcaacttaaaagatgccacctctaaggaaaatggaaggtatgggcgcc

SEQ ID NO: 607685 - DNA, 75 bp, Homo sapiens
attgtaaggagtgcaccatccaggagaaggacatgcgcctgcttcctctgcgccagaagaaggcccacctgatgg

SEQ ID NO: 607686 - DNA, 82 bp, Homo sapiens
cttcaaggataagggtgacagcaacagctcggcgggctggaaggtttacccaaggtccagcctagcccctaggcaccatgtc

SEQ ID NO: 607687 - DNA, 75 bp, Homo sapiens
gaagaggaagaggagatggagacagaagagaaagaagctgggggctcaggaaccccaactgaggagacgtggcca

SEQ ID NO: 607688 - DNA, 75 bp, Homo sapiens
cagctgcctcagttcttagcgcaggagagccagtgtaactccttcaagactggagtgacacacactgcatctgca

SEQ ID NO: 607689 - DNA, 83 bp, Homo sapiens
cgaccacctcttcaagctgctcatcatcggcgacagcggttttaaaatcaaagatgggaaaatcggagaaaattgcccttccc

SEQ ID NO: 607690 - DNA, 100 bp, Homo sapiens
attgtgtggccagtatcttacaccagaagagatgaatgcaagtgggctggaaaagacatcctgaatgtgaaagatgttgcagaagtgttccagaagtggc

SEQ ID NO: 607691 - DNA, 101 bp, Homo sapiens
acctgaatcccagaattattgctgcaattaagaaagagagcacgttttcaatatcataggagcatttgatattccacgctttgtgtacaattcagaaagaa

SEQ ID NO: 607692 - DNA, 99 bp, Homo sapiens
gcaaaggctgctctgaagcgcacgacctccgactactttctccttcaagaggagaaggcagagcccccccaggctatgaatgccctgatgcggttgaac

SEQ ID NO: 607693 - DNA, 100 bp, Homo sapiens
cgtggctctagcaggctccactaactggggctacgactctgatgggcagaaaccccaatgatgggaatctgccctgctggccacgctacaacaaggatga

SEQ ID NO: 607694 - DNA, 71 bp, Homo sapiens
aagaaggctccctatgaatctcttatcattgatgggtacagtgaaggtgaaattcgatttaatttaatggc

SEQ ID NO: 607695 - DNA, 82 bp, Homo sapiens
cttcgccagcacgctgatcaccaccgtgggcaccatcatgggagcagcattgctggaggactggtgaagggggctttgtctg

SEQ ID NO: 607696 - DNA, 75 bp, Homo sapiens
agaacttctggagctggccaacgtgcaggaggttatttcttatgagggtcatggatatcccctatctaaacttgg

SEQ ID NO: 607697 - DNA, 96 bp, Homo sapiens
ttctggagatgcttccgaactgtgggcaaaaatggcggatggtaagcggatgtttggcacctattttcgtgttggtttttatggaaccaagttcgg

SEQ ID NO: 607698 - DNA, 75 bp, Homo sapiens
gatgtagcctcccgtgggctagaagaacatgtgatcatccaggccgagttctatctgaatcctgaccaatcaggc

SEQ ID NO: 607699 - DNA, 75 bp, Homo sapiens
gcgccgccgctgttgccgggcaacgcggccccggcctggcctttattgcgtaccccaaggcggtcaccatgatgc

SEQ ID NO: 607700 - DNA, 75 bp, Homo sapiens
gtgccaatgctggcccagctctccgtgttccggtgtgcactattcctgatcagagaactccagttgcttcaacac

SEQ ID NO: 607701 - DNA, 98 bp, Homo sapiens
ctcttccccagtttgaaattttcagacaaagatacagaagcccctcagggtacctgtctgaccttcatgcgtctggtgaccctgcttggcaatgcatt

SEQ ID NO: 607702 - DNA, 98 bp, Homo sapiens
aaaaagaggccaaagatctgacagaactggttcagcggagaataacatatcttcaggtctctaattaacagaagatggcaaagcccagccacagcagc

SEQ ID NO: 607703 - DNA, 100 bp, Homo sapiens
gtcaccgacagggatcacttcatccgaaccctcagcctcaagccgctgctcttcgatctgcagcctcctccgtggtggcatcgccgagcgtgggggcatc

SEQ ID NO: 607704 - DNA, 51 bp, Homo sapiens
gagcagtttacacatctcacccaattcagtatcaccttttgccatgatagc

SEQ ID NO: 607705 - DNA, 82 bp, Homo sapiens
ttccttcactgtgcgtgctgaccatgtggagcgtcgccgccgagacaagatcaacaactggatcgtgcagctctccaagata

SEQ ID NO: 607706 - DNA, 98 bp, Homo sapiens
gccaaggaaaaatcgagcagaaagaatgtctttcaggaggaactctctggaatgaaaaataaaatacaagtagttgtgcttgaaaacgaagggctcca

SEQ ID NO: 607707 - DNA, 90 bp, Homo sapiens
ctggtggctccgcggattataacagacatgcgtcgggatgtccaggaaatttttcgcatgaccccccacgagaagcaggtcatgatgttc

SEQ ID NO: 607708 - DNA, 75 bp, Homo sapiens
ggggcttggcggcttttctcctcagttttctggagtgctttggaggagagaatccaggaattgatgtctgatgat

SEQ ID NO: 607709 - DNA, 99 bp, Homo sapiens
ctgtgcgccgcgggccaccgcgccgaactgctccggttcccggagccccccaagatgaacccagtggtggagccactgtcctggatgctgggcacctgg

SEQ ID NO: 607710 - DNA, 83 bp, Homo sapiens
tacttgaaacaaaataggaaaatggcagcaaactcttcaggacaaggatcctaagcacttcaagtcagagaagacaggacggg

SEQ ID NO: 607711 - DNA, 73 bp, Homo sapiens
gactttacagagaacaatgaagctatacagacttccagatgcgccaagcccatctttgtgtgcttgcatccaa

SEQ ID NO: 607712 - DNA, 100 bp, Homo sapiens
accattgtcaagatccctccacatgtactgagaaactctgtgaaggcatatttaaagtccttataaaggacatcccaacaacatgtcaagtgtcctgcct

SEQ ID NO: 607713 - DNA, 74 bp, Homo sapiens
cggagaccccgcgccggaccctgaggcagcgaaatgcgatgctggtggcagagaaggcagctttgcaggggcag

SEQ ID NO: 607714 - DNA, 89 bp, Homo sapiens
caccatcaacaaagaagaccacacactgggaaacatcattaaatcacaagttcaccgattcagccattgccatgaactcgaaagtgaat

SEQ ID NO: 607715 - DNA, 82 bp, Homo sapiens
gctactctgcctcggggacgaaagcagtgttctaagaacggaagcatctgggctggatggaatttagcatcaagcagagtcc

SEQ ID NO: 607716 - DNA, 89 bp, Homo sapiens
cgccgcgtccttggctggcgtcttgccttgcgccatggactggcagccagacgagcagggcctgcagcaggtcctgcagctgctcaaag

SEQ ID NO: 607717 - DNA, 50 bp, Homo sapiens
atttagcacagccttggggataatgtgtgagttttgccgaattgacaagc

SEQ ID NO: 607718 - DNA, 51 bp, Homo sapiens
gcctcccaaagtgttgggattacagataagctaaatgttactgattccgtc

SEQ ID NO: 607719 - DNA, 96 bp, Homo sapiens
cagaaggactgtacatggtgaatggaccaccacattttacagaaagcacagtgtttccaagtaaagatgacggcgccttgaggtaagctacaggca

SEQ ID NO: 607720 - DNA, 99 bp, Homo sapiens
aatgattgatctttacccaagagacttgtggaattttgtctttggacaggcctctttgacagatgggttttcacaacatggtatgattggtgtaactca

SEQ ID NO: 607721 - DNA, 100 bp, Homo sapiens
atttgggcaactttaattatgggcttccgagtggacctgccaatcaagtcggcccgctaccgtggccagtacaacacctatcccatcaagctcttctata

SEQ ID NO: 607722 - DNA, 98 bp, Homo sapiens
gggaccagcgaagaccaccagcacttcacctgcaccatctggaggttgggtttcagtaacacctaattttaaggacagactgcatctccgaggctata

SEQ ID NO: 607723 - DNA, 80 bp, Homo sapiens
agggcctgccgccccattatgatgatgtcgagcgttatcgaactccttccagatccagatcaagggatcgtttcagacgt

SEQ ID NO: 607724 - DNA, 98 bp, Homo sapiens
ctcacattcaagctgataggctgcgctaccggaatgtcatccagcgagtgattaggtacatttaggtcattaaacattggagccctggaagagctgcc

SEQ ID NO: 607725 - DNA, 108 bp, Homo sapiens
cctacgaaagcctggtccacgccgtggccggagccgtggtatgggcactaggaaaagacttcttccatcaagcttaattgttttgttattcatttaatgactttccct

SEQ ID NO: 607726 - DNA, 100 bp, Homo sapiens
accacctccaagatcctggtgcggaacatccccttccaggcccacagccgggagatccgagagctcttcaggagtctggttggaagcaaatgttttttta

SEQ ID NO: 607727 - DNA, 100 bp, Homo sapiens
cctggtcttgctcggccgatgaagtgcagaggtttttttctggtaactagttctcccaactgtacagacatgagtaatgtttgtcaaccaacagagttca

SEQ ID NO: 607728 - DNA, 100 bp, Homo sapiens
ctcaaacaatttatgagattattgataattctcaaggattctacgtgaaagaccacagcaagattctttcattcgtctcctcctagcctgggggaccagg

SEQ ID NO: 607729 - DNA, 73 bp, Homo sapiens
ttggatccatttggcttttccaggcaaactcctggatgcgacccacgtctacatgtacgtgttcatcctggcg

SEQ ID NO: 607730 - DNA, 100 bp, Homo sapiens
tcagctctttcaagtccttcctggggaccggggaatcggatataacatcatccgggtacccatggccagctgtgacttctccatccgcacctacacctat

SEQ ID NO: 607731 - DNA, 50 bp, Homo sapiens
gaagacttgcccatccaatctggtcaatgtgacggtggactacattagac

SEQ ID NO: 607732 - DNA, 74 bp, Homo sapiens
ccgccgcctgaggaggcgagctagccgggagttacaccgccaccgccagctcatcgagcggtccccccgcaccc

SEQ ID NO: 607733 - DNA, 98 bp, Homo sapiens
gaaccctcagtcaaattgcctagtgtaccttctactcatctgccggcagggccagctttcaccaacaatcaccagtggtttacacaacattgcaagga

SEQ ID NO: 607734 - DNA, 98 bp, Homo sapiens
ccacaccttataaaaagcagcttaatgaggaactccagcggcgctcttcagcattagaacagctttgctgagccatcaaggtctaatggaagcatggt

SEQ ID NO: 607735 - DNA, 74 bp, Homo sapiens
tcatcctggttctggaatcctcagttcaaggatttggtgctatggagaaatttttggtagaatataagagtgca

SEQ ID NO: 607736 - DNA, 97 bp, Homo sapiens
gaaaggggagtcctattggtattcagttaccgcctccgtagttacaaggattgtggagaatattgaagcgcagttgtgtagcagttgagtaatgctg

SEQ ID NO: 607737 - DNA, 101 bp, Homo sapiens
cagcgggagtcgcggaacagcaggcccgagcccaccgcgccgggccccggacgccgcgcggaaaagatagttttgaggcagctgtgccatcaaatagccac

SEQ ID NO: 607738 - DNA, 98 bp, Homo sapiens
tgcgtggtcgtgcggcaagtgagcgatttggtgaacagacactcccttctgtaggatatttgcttaagagcaggctatgcattaacactttttgcctt

SEQ ID NO: 607739 - DNA, 74 bp, Homo sapiens
cccagtgagggtgtacaaatacccctttgaattaattatggctaaattgagggtgctgcaaaggaagcttgagg

SEQ ID NO: 607740 - DNA, 50 bp, Homo sapiens
cttcctctaccacatccacctgtggatcaatggcggctcagcggcagcgg

SEQ ID NO: 607741 - DNA, 100 bp, Homo sapiens
attgaaccaccaaaagtccattatgaaactgaatatgcttttaaggctattaaccagggtggccttacatcagtagctgtcagagggaaagactgtgcag

SEQ ID NO: 607742 - DNA, 99 bp, Homo sapiens
ccagaccctggagcctcagttggaagcagccgatccagcctgcggagcctgtggggcaggttcacagcagatgaggctcgggacctgattcaacgttac

SEQ ID NO: 607743 - DNA, 55 bp, Homo sapiens
aaaaacctcagcgacctgatcgacctggttcctaaagagaaagatgaaatggtag

SEQ ID NO: 607744 - DNA, 100 bp, Homo sapiens
tttgttaaggattccaagtaactcttatttggttaatttggagtggcccctggagtcagtttcctacaccatccgaggccccacccagcacgagctacag

SEQ ID NO: 607745 - DNA, 83 bp, Homo sapiens
ccgctagcccggggggccctccccgcggggcagatgagagtgataatgaactctcaagtggaacaggtgatgtgtctaaggat

SEQ ID NO: 607746 - DNA, 75 bp, Homo sapiens
gccatcgttgctgccttcttcgtcaagttttatccaagtatgaagatcagattactattttcactgactacctag

SEQ ID NO: 607747 - DNA, 75 bp, Homo sapiens
cttggactgagtcctgcaggacacagccaccagtggtaaaaacagagatggtaacaatttctgatgcctcacaaa

SEQ ID NO: 607748 - DNA, 82 bp, Homo sapiens
cggcgcccgcagccgcagccccctgctccggaggctggtgcaggtctcctctgagcctccggcctccataagacccaaaaca

SEQ ID NO: 607749 - DNA, 146 bp, Homo sapiens
ccctctggacaaatacaagattcaggcgatcgacgccaccgactcttgtatcatgagcattggatttgatcacatggggccaagaccagcttcaagtctccatggtaccagaaaacaacaacctcacagcacctgaacctcaagaa

SEQ ID NO: 607750 - DNA, 100 bp, Homo sapiens
tcaagaaaagaccaatggaagttgttaatacagagtttgctggaacattatcagatggcttagggaagacgatggacaatcggcatcagtcagagcggga

SEQ ID NO: 607751 - DNA, 100 bp, Homo sapiens
cgcccctcctcaccgaggaaggccgttgtcgccgtgatcctgaaggcgctgacctacgacgagaagcggggtgcctgcagcgtgggcaccaacgtcaggg

SEQ ID NO: 607752 - DNA, 90 bp, Homo sapiens
gtgctgaagaaatttgtgtggagcgaggaaaggtgtgctgtgcctgaggccagctatgatacttgggtccatagtaatgatgttgatgct

SEQ ID NO: 607753 - DNA, 75 bp, Homo sapiens
gtgagcgcccccatcccggaggtctccgccggctcccggagctgtaggtaaaacttgcctactgatcagttacac

SEQ ID NO: 607754 - DNA, 98 bp, Homo sapiens
ctgtgatcaccaacttaaaaaggagatactcgtttagattacacattgctgacattatctctacggtagaattcaaccacacgggagaattactagcg

SEQ ID NO: 607755 - DNA, 100 bp, Homo sapiens
tctgcgccggcgatccgcctttcggactgaggcccagcgcagcgcttgcaaagaggccgtaagttcatcatcgccaacgctcgggtggagaactgcgccg

SEQ ID NO: 607756 - DNA, 95 bp, Homo sapiens
gatgtggtggaatatgccaaggaaaaactggagagcttcatcaaaaatagtgatagctttgataagtggtcactaactgccaagagagaatccag

SEQ ID NO: 607757 - DNA, 90 bp, Homo sapiens
tgaacctcgtcttcatcctcatcctctccaagatctatgtatccctggcccacgtcctgacacgatgggatccatctgtgtgtgctgtgg

SEQ ID NO: 607758 - DNA, 82 bp, Homo sapiens
ccttgctttcagaatttcacccaggttctgacaggacactgcccatctctaagataagaacctggaaaggggactctgttgg

SEQ ID NO: 607759 - DNA, 90 bp, Homo sapiens
aagagaaccaagaaattcatccggcaccagtcagaccgatatgtcaaaatcaaggtttctgacaaagcgggagcaaaaattaatgcaacg

SEQ ID NO: 607760 - DNA, 83 bp, Homo sapiens
cgacgagcgcggaggaccgggaggctcccgggcttgcgtggcggagctggagtttgttcagatcatcatcatcgtggtggtga

SEQ ID NO: 607761 - DNA, 50 bp, Homo sapiens
gaaggaagcgactgcactgatccagatcctcactcacccttcgccataaa

SEQ ID NO: 607762 - DNA, 83 bp, Homo sapiens
aagagctgttatttatctgaaagtacttggaccatgagactgtttcagccactttcatcgacagcagtggacagtttgtttcc

SEQ ID NO: 607763 - DNA, 102 bp, Homo sapiens
gcttcccgaggagcattggaaggtaactcagcagttgaaggcgcgattcttaccaagtccagttgttattaagaaacgtattgaaggacttattgagagaga

SEQ ID NO: 607764 - DNA, 97 bp, Homo sapiens
gacacagtatggtagccacacccccaggtaatcttcagcaagtactgcaactccagcgacatcatggacctgttctgcatcgccaccggcctgcctc

SEQ ID NO: 607765 - DNA, 80 bp, Homo sapiens
cagcgccgtcccgtccgacagccaggcccgggagaaaagtccattggaatattaagcccaggagttgctttggggatggc

SEQ ID NO: 607766 - DNA, 113 bp, Homo sapiens
gaggcatcctccttgaagtatttggctgaggagttttcaatcccagtgtgatgaatgcagactctgctaccattttggctgtttggatcctcctttgaaaaagtctcctaaac

SEQ ID NO: 607767 - DNA, 75 bp, Homo sapiens
taccttctttatggtaaccgagctctttgttttcttcgtactggacagtttagatgctgcagttggagaagaaac

SEQ ID NO: 607768 - DNA, 75 bp, Homo sapiens
attggaccctcctcccaactgtaggaatccagccatcatctgaggaagcagttcatgtcgcagcaaaggaagttc

SEQ ID NO: 607769 - DNA, 155 bp, Homo sapiens
cagtatgtttcagaagtggaaataattaatgaccgaacagaaacccctcctcccctagcttcactcaatgttagtaaggcatgcatgtagggaataccggattcataaagagctggatcatcccagaatagttaagctgtatgattacttttcac

SEQ ID NO: 607770 - DNA, 90 bp, Homo sapiens
cgccggtctctgttccgcaggatgccaatggagatcttcgtggatgatgagacgaagttgacgctgcatgggttgcagcagtactacgtg

SEQ ID NO: 607771 - DNA, 113 bp, Homo sapiens
tcaaagagcagtgggggttgctgacccagaggagagttctccaaacatgatcgtttactgcaaagccctccctatcctgaagacattagctgagagtctggcaccttttaaag

SEQ ID NO: 607772 - DNA, 82 bp, Homo sapiens
agagccgtatcataattaccgagctcttgtcaggatggtgaagctgttcatcggaaacctgccccgggaggctacagagcag

SEQ ID NO: 607773 - DNA, 100 bp, Homo sapiens
gaatcaaagagctgctttgaatcagcagatcctgaaagccgtgcggatgaggaccggagcggaaaaccttctgaaaacctgtctgagaaactctctgaac

SEQ ID NO: 607774 - DNA, 98 bp, Homo sapiens
caatacatactttgggaaagggggtacaatctgatgacctcaaagtagggccacaggtacagacttcagtacatatggagtcttgctctgttgccagg

SEQ ID NO: 607775 - DNA, 75 bp, Homo sapiens
tcgggaatgtacactggagaccacagttcatgccagcggctggaataagggacctgttgcaatgagagtggcaaa

SEQ ID NO: 607776 - DNA, 99 bp, Homo sapiens
gcccttcgaaaaatgatcaactattgaccatataggttgctccttgagggcaggacagttcttatggctttatccgttgcgtaagcacagagaggtctg

SEQ ID NO: 607777 - DNA, 83 bp, Homo sapiens
cgctcaggtgctgcaggcacagcccgagaaaccgcagcactacacgtacggagatacaagggcctcatggactgtgccaagca

SEQ ID NO: 607778 - DNA, 97 bp, Homo sapiens
ctctcatccaccccaccttgtatgcaacgccccccttcacacacagtaagaattaaagctatagagagtcccaacaaagaagatgatacccagtggc

SEQ ID NO: 607779 - DNA, 100 bp, Homo sapiens
ggagaggggccgtggcccctgcagcggaaccggacccagtccctgagccgcccctacacccacaggacaaccctccatatgataagggagccttcagaat

SEQ ID NO: 607780 - DNA, 96 bp, Homo sapiens
cgcggagggtcgaggcggcgcggcctgagctttatcttcaagccaggatgaagggagactgggcaagactcttacgccccacactgcaatttggtc

SEQ ID NO: 607781 - DNA, 51 bp, Homo sapiens
agaaaggaaggaatatatcctgactgattaaacagacacttccagttgctc

SEQ ID NO: 607782 - DNA, 124 bp, Homo sapiens
gatatggtcgtgatcgtgactattcagatcatccaagtggaggttcctacagagattcatatgagagttatgtcacgtgaactggaaatttcagtttattggcgtgattggcggtctctgtgtg

SEQ ID NO: 607783 - DNA, 75 bp, Homo sapiens
cggaggaggcattaacgagaccgggttatacattggctcttcaaagacgttcacctcatcagagaaatccctgac

SEQ ID NO: 607784 - DNA, 100 bp, Homo sapiens
acgctggccgccgcaggcacaggcgcagagtccactgcgcgggggcgggaccggggagctagctgcagctcctctggcttatgagccattctctactcta

SEQ ID NO: 607785 - DNA, 75 bp, Homo sapiens
agggctcgagtctacctggatgaaaactacaaatcccaggagcacttcacggttcattttccagacactgaaaga

SEQ ID NO: 607786 - DNA, 99 bp, Homo sapiens
tgttaaaggatggctttggctttgcagacagcacagtcttacaggtgtgctcagtgaaggaacggcatgccagtgaaatgagggatttgccaagtcgat

SEQ ID NO: 607787 - DNA, 101 bp, Homo sapiens
cgctggactggagcagaaccccaggactgcgcccccgggagcgggcgcccagagacccactccggatacttctccagcctgtacccccatcaccagtttgg

SEQ ID NO: 607788 - DNA, 50 bp, Homo sapiens
gtcgccgccactgccgcaggaggcgtgaggctggagtgcagtggcttgat

SEQ ID NO: 607789 - DNA, 100 bp, Homo sapiens
tgatgatggaaatgaagtataataccaagaaagccccacttgtctctgctggatgaaccgaatcctaacagtccagccaatagccaggcagcacagcttt

SEQ ID NO: 607790 - DNA, 75 bp, Homo sapiens
tggccctcttcaatttctgacaaaaggggacatcacccagaagggctatgaaaagaaaaggtccaaactcctatc

SEQ ID NO: 607791 - DNA, 75 bp, Homo sapiens
ctgaaacgatcctctcatctcagcctccaaaagtgctggcattacaggactggaaggatcaccagcacatatgcg

SEQ ID NO: 607792 - DNA, 97 bp, Homo sapiens
ggacaattccatttggggaccagagatggacggtcactcagcctatggagataaagtaagcatattgtcaaccttcctcgctcctttcaagcacctg

SEQ ID NO: 607793 - DNA, 74 bp, Homo sapiens
tctggaattcccatagatatgtggaatatattagtttggaaagaacttgactatggctccatgacagaagctga

SEQ ID NO: 607794 - DNA, 100 bp, Homo sapiens
ctcatgggcaagaccatgacggaggatgatgacatcactaccggagattggtgtggggatcaccggtttcggcatcttcttcatcctctttggaacactc

SEQ ID NO: 607795 - DNA, 121 bp, Homo sapiens
aatggctgtatcctgggagatgagatgggcctggggaagacctgccagggtctcctatggacagaagtgcgggcaaggagctttgttcctccccgatgtcaccctcccacagcccacttgc

SEQ ID NO: 607796 - DNA, 74 bp, Homo sapiens
atgaagcagagctgcatcatgcggcagtgcatcgcgacctgcctagagctggaacgttacctccagagcgagcc

SEQ ID NO: 607797 - DNA, 90 bp, Homo sapiens
acatgctagaattacctggaacttcatcatcatctacttcacaggaattgccatttcgtttagtgggctacagatggcatggcatctaaa

SEQ ID NO: 607798 - DNA, 83 bp, Homo sapiens
cgcggggaaccaaggagacgctcctggcactgcaggtggctgaatccacagaggagcctgctggttctaatcggggacagtat

SEQ ID NO: 607799 - DNA, 100 bp, Homo sapiens
ctcctcagcggcgggctatgcctgcctagcttatcttaatggccatgcagaaaccccagtatatcgattctcgttggctgatggaactatagtgactgca

SEQ ID NO: 607800 - DNA, 49 bp, Homo sapiens
cagcaccggctccagtgggctctgtgaggaattttaaattggaacaaga

SEQ ID NO: 607801 - DNA, 96 bp, Homo sapiens
cctggataacccggtggtgcagctgggcctgaccaacccgaaaacattgctagagctccacgcaggagatcggtgaggagctgatcaacggagtca

SEQ ID NO: 607802 - DNA, 74 bp, Homo sapiens
cccccgagtacctgaccagccccctgtctcagcagtcccagctgattgggcagaaagtggcccatgctctggca

SEQ ID NO: 607803 - DNA, 75 bp, Homo sapiens
acctgcaccactgtcgccttcacacaggtgaactcctcctgcacaggcagagcacccaactgctggcacagagac

SEQ ID NO: 607804 - DNA, 51 bp, Homo sapiens
cgcgaatatcgtcatcgttagaagaattgtattcctattgaagagcagctt

SEQ ID NO: 607805 - DNA, 76 bp, Homo sapiens
ttcgcacttccacgcggtgaacgtggcgcagcccgttcgcttcagcaatcaatccataatggatgttttgaagcat

SEQ ID NO: 607806 - DNA, 101 bp, Homo sapiens
cgagcgcagagcgccgcgcgttcgcgctcaagatcaacagacaaatcttcctattttcaagctgaaagaatctactgttagaagaagatacagtgactttg

SEQ ID NO: 607807 - DNA, 100 bp, Homo sapiens
ttgttggtggaggaggtggcaggcctcggcggctaataataagccagagatcgaagcggccctcttcctagactggatgagactggaaccccagtccatg

SEQ ID NO: 607808 - DNA, 75 bp, Homo sapiens
ccctaatctgatgggtcattatgaccagagtattgccgcggtggaaatggaggcatggaagaggagatggttcgt

SEQ ID NO: 607809 - DNA, 100 bp, Homo sapiens
cgtcggcgctccctgcgcggccccgctgagcctcggtgcggcggcgagcgcggtcgagatcgccatgcctacccgctgaagaaatgtcaacaattgggag

SEQ ID NO: 607810 - DNA, 75 bp, Homo sapiens
gctagcaggaatgcttactgttgcgtggttcgttattaacaggcttctcgtcagtgcctcgcaggatggtaaact

SEQ ID NO: 607811 - DNA, 100 bp, Homo sapiens
ccacgagcaggtggtggagcggctgctggaaacgcaagacggtgccgagaagcagctgcgaggtgtggatgaggtcaccattgtcaacattttgaccaac

SEQ ID NO: 607812 - DNA, 100 bp, Homo sapiens
gtccattgatagcattcagaaagatcccagagtggagagatctacagaccaagtaatcaagccagtcaatgtaggagctctatcaaaatgggttgggaag

SEQ ID NO: 607813 - DNA, 82 bp, Homo sapiens
gaaaagattttacaagaaaaatgatagagatggcttccccaagtacttccaggttcactattatgaagatggcaatgttcag

SEQ ID NO: 607814 - DNA, 100 bp, Homo sapiens
gactccatggccaactccttcgtgggcacgcgctcctacatggctggtcctggatatgcccacccaagaactgggcctccccgcctaccgcaagtttgac

SEQ ID NO: 607815 - DNA, 83 bp, Homo sapiens
cctggtgatcggctccttaccagctcacctctcaccgcgcatgtttggagtacctggagtagaacagaaaaattattatgtct

SEQ ID NO: 607816 - DNA, 82 bp, Homo sapiens
cgggaggaaggaacgaggcaaggagctaaagcagcgtgcgttcagccctgggacctacatcggctccatcctggcctccgtg

SEQ ID NO: 607817 - DNA, 50 bp, Homo sapiens
aagcctgatctaacccctagaaacagactcttgttcatctgatagtgaaa

SEQ ID NO: 607818 - DNA, 80 bp, Homo sapiens
cacatgcaccggcagaagccgcccatcatccacagggacctcaagcatcatggcagaacaggatgtggaaaacgatcttt

SEQ ID NO: 607819 - DNA, 75 bp, Homo sapiens
cagccacgaagtacagccggaggtatttctgggaaaagccagcttctgtttgcactggtcttcacaactcgttac

SEQ ID NO: 607820 - DNA, 75 bp, Homo sapiens
aaatcagaggcatactttataggttatggaggttttgatgactatggtggctataataattacggctatgggaat

SEQ ID NO: 607821 - DNA, 98 bp, Homo sapiens
cagaaccacagtttatcatcccttcctgcagcagtgaggatgccagagttcatgggtttctagaagacaagttttcaactgcagatacaaacatcagg

SEQ ID NO: 607822 - DNA, 82 bp, Homo sapiens
cataaacgaggcgcagcgggtgaagctctctgaacaacggggcccagagctgatggcagacaatgtcagccactaacaacat

SEQ ID NO: 607823 - DNA, 75 bp, Homo sapiens
acacccacaggtcggccctgcggacccggcaggtgactttgggtcaaaagcggctggtgctttccgaaagctgct

SEQ ID NO: 607824 - DNA, 87 bp, Homo sapiens
cgtggctgcgtcaccgccgcccccccagacaagatggacaccgcggaggaaggtgttgaaaagtctcctctagagctttggaaggct

SEQ ID NO: 607825 - DNA, 50 bp, Homo sapiens
cccgagttcaccaaaattcagacattagagaagaagaaggaggttcctgc

SEQ ID NO: 607826 - DNA, 100 bp, Homo sapiens
tcaagctctgggggatcgaccgggacagctaccggcgcatccttatgatgttcattctggacagagtggaaggtgatacttgttcccttaatgagtttac

SEQ ID NO: 607827 - DNA, 91 bp, Homo sapiens
tgagttctgacacgatggttgggagctgtgacaggcagacgaaaaatggagccaaatggcatggaggctggagtgcaatggtgcaatctcg

SEQ ID NO: 607828 - DNA, 100 bp, Homo sapiens
tctacagagtcaccactgaacaatatcagaaagctgctgaagaggtggaagcaaagttcaagctgaaggggatgctaagggagataaagcaaaggtgaag

SEQ ID NO: 607829 - DNA, 93 bp, Homo sapiens
cagaagaccaagtacctgcagatcctgacctctctgatgagatggatcggtttggtgcacctcgatttggaggaagtagggcagggcccttat

SEQ ID NO: 607830 - DNA, 100 bp, Homo sapiens
gggaggctctcactaaccacaggcatcagttggtactcgccatgaaactcaaagatcgagagccaaggaagtatcgcctggggatgctggaggagaggct

SEQ ID NO: 607831 - DNA, 74 bp, Homo sapiens
tcccagatcagcgcagacagtggtgtgagcctgacgtctagttcccagagtaccaagttcgatccatagcaagt

SEQ ID NO: 607832 - DNA, 75 bp, Homo sapiens
ccatcagatgtcaactccaaacaaggcgtgacacgggcagttgacctgtgtgcagccccaggcagctggagccag

SEQ ID NO: 607833 - DNA, 74 bp, Homo sapiens
cgacgaggcagctgagttgatgcagcaggataaaagaatcagagtgtctcaacccttgacaagaggaccaagtg

SEQ ID NO: 607834 - DNA, 149 bp, Homo sapiens
ctcccagaggcccaccttcaagcagctggtggaggacctggaccgtgtccttaccgtgacgtccaccgacgtgccaggcccacccccaggtgttcccgcgcctgggggcccacccctgtccaccggacctatagtggacctgctccagt

SEQ ID NO: 607835 - DNA, 100 bp, Homo sapiens
aagaaacccgggatgcccaatgtatctaacgacctctcacagaaactatatgccaccatggagaagcataaagaggctttcatagaaaccatgttcacca

SEQ ID NO: 607836 - DNA, 82 bp, Homo sapiens
aatttccatgtcaacatagtccagcaagagtgagccatggagctacgtgtggggaacaagtaccgcctgggacggaagatcg

SEQ ID NO: 607837 - DNA, 98 bp, Homo sapiens
tgtccaaaggcctggcccggcggctcagccccatcatgctggattgccacggcagtgaagtttctacagaattcccgggtccgccagagcccacttgc

SEQ ID NO: 607838 - DNA, 82 bp, Homo sapiens
cccattgccgtaccctgcatgggtggagctggctggggcggggctgacccaggggaatgacgttggccggagctcctatggc

SEQ ID NO: 607839 - DNA, 82 bp, Homo sapiens
gtgtctctggattcaagtcccaggagtcctgaccagagagcagtctgaccagtgcacaggacttcagggcttcctggtgttc

SEQ ID NO: 607840 - DNA, 100 bp, Homo sapiens
gcgggagcggcgccgagaggccgtgcgggacgcgggcgccaggaccggccgaacgcagaggtctaccccgagccccggagcgagagcgagtgcctgagca

SEQ ID NO: 607841 - DNA, 88 bp, Homo sapiens
atcctgatggcctgtcgagagatagagaatgggcggtcccggagctggcagcacgtgggatcatccagcaggtgttccctgtccacga

SEQ ID NO: 607842 - DNA, 100 bp, Homo sapiens
tctcagcagcaacctgaaacgaacagccagcaaccctaaagtggagaatgaggatgagctggctctgaagcaccgacaaggcaagaatcacaagatgcgc

SEQ ID NO: 607843 - DNA, 100 bp, Homo sapiens
gagtgggcgagaacgtccactgcgggccggcgaaagctgcacatgattaagtaccggtacatcccgttcacacatgggaagagaaggtacagaggcaagg

SEQ ID NO: 607844 - DNA, 100 bp, Homo sapiens
ccccggcggctcgccgcgcccacccgctccgcgccgagggctggaggatgcgttccctggggtccgggtgggctggatgacactttgcacacaattattg

SEQ ID NO: 607845 - DNA, 87 bp, Homo sapiens
ttaatggaaaccaaaaattctggctctgattcaccttataaagcaaataaacattgctatcttcagaaattaaggaatgagaggcaa

SEQ ID NO: 607846 - DNA, 101 bp, Homo sapiens
gtcacaggagctgtagagaggaccccggtacatctgaaagccgggaaatgattcttctgctgatcgacattgagcagtcctacatcaacacgaaccatgag

SEQ ID NO: 607847 - DNA, 83 bp, Homo sapiens
cttcacccatctgaagggaggaaatagtggcaggtgacagtctgcatgtgcagttttcaggacaatgaaaagcgaaccccatt

SEQ ID NO: 607848 - DNA, 75 bp, Homo sapiens
tgctaaacttttggtgcttaaatccagctgtgacgctgaccggaaaggagattgagattgacattgaacctacag

SEQ ID NO: 607849 - DNA, 80 bp, Homo sapiens
cgactgttacagaggtctccagagccttctctctcctgtggagccacatgttcctcctgatcgaggaccaaggtgcccag

SEQ ID NO: 607850 - DNA, 82 bp, Homo sapiens
gaagtggcggcggcggcaggcggcagaggggagatgggatgtcaggtcgggaaccatccttggaaatcctgccgcggacttc

SEQ ID NO: 607851 - DNA, 83 bp, Homo sapiens
attagccttttctctgccttgcttgcttgagcttcagcggaattcgaaatggtgaaatgacaatggatgctctgttggctcga

SEQ ID NO: 607852 - DNA, 97 bp, Homo sapiens
cttcgctgtggtgaagctggggcggcaccggatcaccaagacggagagttgcctcactcacagagctctccaactgtcagcagcacctgtactaaag

SEQ ID NO: 607853 - DNA, 100 bp, Homo sapiens
aaactgctacaagacaacaccctgatctggcatggacatgacttcaaacaagtgtgaagaggctgtgtggcgagattgtggaactgaagcagcacctgga

SEQ ID NO: 607854 - DNA, 75 bp, Homo sapiens
gcaagactgtttgtgttgcgggggccggacttcaagcaccagcagacgtttttgaatcaactgagagaaattacg

SEQ ID NO: 607855 - DNA, 100 bp, Homo sapiens
tgatggatattttgctaatgaatgattttaaacttgtcattaataaaatagcatatgatgtgcagtgtccaaagagaggcaggcattccagaccctccaa

SEQ ID NO: 607856 - DNA, 83 bp, Homo sapiens
caccttctccgagttcaagcaggcctatatcacctgatgccatggacaatattaccaggcagaaccaattctacgatacccaa

SEQ ID NO: 607857 - DNA, 75 bp, Homo sapiens
tgaagagggaagacacgcggaaacagtcttcccatgcacaagatgattaatacagatcttagcagaatcttgaaa

SEQ ID NO: 607858 - DNA, 97 bp, Homo sapiens
tggatgaatttgcttttctggaaggggcaccaccacgaggcgatttgtgggccataccaaggatgtgctgagtgtggccttctcctctgacaaccgg

SEQ ID NO: 607859 - DNA, 99 bp, Homo sapiens
ctgctccatgcttgaaaacatggggattggaattcggtaccagacgtgctccaacaatgggctggtggcaggattccagagccgctacttcgagtcagt

SEQ ID NO: 607860 - DNA, 75 bp, Homo sapiens
catgctccaaacctcacgtgatacagcctatcatcttacagactctttcagcacctacgaaaaatttagaacagc

SEQ ID NO: 607861 - DNA, 77 bp, Homo sapiens
tgatgaagtttccattagagcaatagggacattccagctacatcacacaccttgactggtccccagacaacaagtat

SEQ ID NO: 607862 - DNA, 74 bp, Homo sapiens
ctctcagcctactatctgtctggagaagaggatactgctattgttcatccagttcccattcgtatgactccaag

SEQ ID NO: 607863 - DNA, 75 bp, Homo sapiens
gcatacgagggatgtgctaatgcattaacttcacctcccaagacttcagtattgatgctcctccatcctttaagc

SEQ ID NO: 607864 - DNA, 74 bp, Homo sapiens
tggcgatcgctggagctaaactggagccgtccataggggtgaatgggggtgacaatccttacccttccaaggag

SEQ ID NO: 607865 - DNA, 82 bp, Homo sapiens
gggaccgcggggttagccactgctggctgcttccagtgttcgccgagagatgaagatctccttcaacgacaaaagcctgcag

SEQ ID NO: 607866 - DNA, 88 bp, Homo sapiens
aggctcggaagaggaagagtaatgaaatggaggagactgggcatttagctatggagacattattatcccttacttctaaacgagcagg

SEQ ID NO: 607867 - DNA, 102 bp, Homo sapiens
tcgccgtgctctctcgcggcggccggcggggcccgcgctgcagccggagacccggagaaaggtggtctcacgtgtgaaacatggctacagattggctgggaa

SEQ ID NO: 607868 - DNA, 100 bp, Homo sapiens
tctagtcttgactaccttccatgtaccactggtaattatgacttttggacagtccaagctatatcgaagacctttaccagaagatgatagtattgaagca

SEQ ID NO: 607869 - DNA, 100 bp, Homo sapiens
tataaacaagtggatccgtctattacgtgactctgacatcattagaagcatgccagaacagactggtgaaaagtaaaccttttcacctacaaaatttcac

SEQ ID NO: 607870 - DNA, 90 bp, Homo sapiens
tgtaccctcagtacgccacctactattacccccagtatctgcaagccaaggtactactacaaacgggagatcctggaacgggtggatggc

SEQ ID NO: 607871 - DNA, 101 bp, Homo sapiens
tcttctccatgctctgctgcttctggcctctgggcatcgcagccttctacttgtcccatgaggaccaagaatcgccttcagccctgtctggtgcatccttg

SEQ ID NO: 607872 - DNA, 100 bp, Homo sapiens
agggtgacggcgccgctaggatgaagctcgtgagcccagctcaacattggcaatgtgctccctgtgggcaccatgcctgagggtacaatcgtgtgctgcc

SEQ ID NO: 607873 - DNA, 100 bp, Homo sapiens
ctactttggacttttgtttcaggaaagccctgagcagaaagtcaacaaaaatctctcatttacttcaccaccagcagtttcctcacaacagtctaagtta

SEQ ID NO: 607874 - DNA, 49 bp, Homo sapiens
gaagcaaaggtcatctaatctttaaaagcatgaagccaaaatcaagtca

SEQ ID NO: 607875 - DNA, 80 bp, Homo sapiens
tactatgacaaatccaagtcgttcttcgacaacatctcttctgaactcaagaccagggaagatggagagttggaagaagg

SEQ ID NO: 607876 - DNA, 96 bp, Homo sapiens
agcgggggcagcgcgatgaggcgggtgaccctgttcctgaacggcagccccaagaacggaaagggcactagctgacatgaataatgatggaagaat

SEQ ID NO: 607877 - DNA, 123 bp, Homo sapiens
ccccaagccctgataacctccatactctgtttgaatttgtatttaaaggatttgatgctctgcaatatcaggttagaaaatggatttctgactggaatctcaccactgaaaaaaagcacaccc

SEQ ID NO: 607878 - DNA, 75 bp, Homo sapiens
ggcggccccggccgcctccgcgagggcaccatggaggtgaatgcaggtgtttgtgctctgccaaggcctcctgca

SEQ ID NO: 607879 - DNA, 75 bp, Homo sapiens
ttgtctcggacgtgcggggcctgggcctcccggtccgcaagcagaacaagttgaaatcatcgcagaaggataaag

SEQ ID NO: 607880 - DNA, 73 bp, Homo sapiens
cgtggacgatgcaatcaatgggctaagcgaggagcagaggcaggacaccatgtaaaattgaacctagtataaa

SEQ ID NO: 607881 - DNA, 100 bp, Homo sapiens
cagcctctgttgacctatgatctgcagggagacgcacagccaggacatcctggaacctgggaaaggctctgaccacaaagccgagctctctgtcctggct

SEQ ID NO: 607882 - DNA, 100 bp, Homo sapiens
cccataccactatttgttgagaaatgtgtggaatttattgaagatacagacaagttggatggcttgaggactggtactaaaaggaaacgtgactgggagg

SEQ ID NO: 607883 - DNA, 51 bp, Homo sapiens
tgaacctgatcgagctcttcctgcagtaaagatgttggtgtcattaaaaat

SEQ ID NO: 607884 - DNA, 100 bp, Homo sapiens
ggacaggtttagaaaatggaatcctcctctgcgaatcgatctctttgggctgcctgacctccttgggtgcttgctattaattaacagactttgtggggaa

SEQ ID NO: 607885 - DNA, 82 bp, Homo sapiens
cccgggcatggtggtctggggcaacgcggaaggtttttagaacttcagccataaaaatgggcagaattttccttgatcatat

SEQ ID NO: 607886 - DNA, 82 bp, Homo sapiens
tcagcctcccgagtggctgggactacagatctggtaccaaaggagaatttggagagctggctaaattatttgaagaaagaat

SEQ ID NO: 607887 - DNA, 113 bp, Homo sapiens
aaagagacccacagatttggatgtagatacgttagccagtttacttaatcttttatgacctagtgcggcaaattaacagaaaaactccagtgcctgggaaggctcgcaaaaag

SEQ ID NO: 607888 - DNA, 100 bp, Homo sapiens
gccgtgctggctgtccccctggagcgaggggcgcccaacaaggaggagacccctgcgactgagagtcccgccccggtggcccggccccggatgagtgccc

SEQ ID NO: 607889 - DNA, 82 bp, Homo sapiens
ttccaccggaagtgtccgatcggaatcagccctgtccgagaggacgattactgagagccaatcagattagtttcaactggga

SEQ ID NO: 607890 - DNA, 74 bp, Homo sapiens
gggcctgctggagagaggagcgctgcggaccgagttgcattaaaatcctcccctactgaaagaaacggaggcca

SEQ ID NO: 607891 - DNA, 82 bp, Homo sapiens
ggaaatcagggagctcttaacccagtttgaaacgtaactggttccctgaccaggtgtccccaggtgtcattgccaacccctt

SEQ ID NO: 607892 - DNA, 75 bp, Homo sapiens
tcgcgacacccttgaagctgagaaatggatgccttccgcgccttccaccctgacctggaattcgtgggcaagttc

SEQ ID NO: 607893 - DNA, 83 bp, Homo sapiens
atttacctcggatccattcacgaaaaacccttccttaccttcgaaggctgctgagcttcgtgcttatctgaaatctaaaggag

SEQ ID NO: 607894 - DNA, 75 bp, Homo sapiens
ggagagtaaaccaagaagaaatccacagatttagttctgacaaaactttcggtttgaagaataagaaaggagcaa

SEQ ID NO: 607895 - DNA, 100 bp, Homo sapiens
gacattcgattccccagaggggaaagcaggagaaactgcctacatccgggttaaagttgatgggcccagaagtccaagttatggaagatctcgatctcga

SEQ ID NO: 607896 - DNA, 98 bp, Homo sapiens
gagcggggccttccacaccccctccgtgggtgtgtgagccccccaagatgaacccagtggtggagccactgtcctggatgctgggcacctggctgtcg

SEQ ID NO: 607897 - DNA, 75 bp, Homo sapiens
tgcatagacagtgtgtcgtttgcaagattaaggctgctgtcccaagcatcaaattctgcttggacaatggagcca

SEQ ID NO: 607898 - DNA, 82 bp, Homo sapiens
gtaatggtgcaaagcctgaacctgtggacatctctacagcaatgagtgaacgggcacttgctcagaaaagactcagtgagaa

SEQ ID NO: 607899 - DNA, 55 bp, Homo sapiens
attatgtcaaatagttagaagattcccagcttttagaaattaactggacaggact

SEQ ID NO: 607900 - DNA, 75 bp, Homo sapiens
acagtggaaaggaaccgttctggatcagacatattttggaatggatgtctctgcagttgaagatccagttcagag

SEQ ID NO: 607901 - DNA, 97 bp, Homo sapiens
gagttcgaggtggtgggactcaccgctctggccagggtgcttttggaaacctacgacgaggacttcaaccatgagccgtgtcagaggaagggccaca

SEQ ID NO: 607902 - DNA, 90 bp, Homo sapiens
cggaattaagaaaacagagcgacgagcaagaagcagcccaaagtcgaatgattcagacttgcaaggcctggagctgctgaagactgctat

SEQ ID NO: 607903 - DNA, 76 bp, Homo sapiens
ttccagcccgtggtccttctccatattcgagtactgccaaatctgtcgaaagggagataatgaagaactgcttctt

SEQ ID NO: 607904 - DNA, 100 bp, Homo sapiens
ggatgctgaaaacctttgggcttcatggagtcgtcttagatgttgattcagtgaaaggtgtagcagtcactcggcctacacccacagcatcgaccttgtg

SEQ ID NO: 607905 - DNA, 100 bp, Homo sapiens
ccaagcctggaagaactcgtcatgctctttgtagcgtggtgcttctgttgctcacaggtgggagtgtaagataaccttccagataaagagttgctgctac

SEQ ID NO: 607906 - DNA, 76 bp, Homo sapiens
tattggcattcctgtgtatgtgggccgcaaggttgcaatgaatgtgtatgagttatcatcagctgccggattacct

SEQ ID NO: 607907 - DNA, 100 bp, Homo sapiens
ggcgaggcagatcctgccccgtggccgcggccgtctcgtagctacagagggccggagctggagatgtggtctctgggagtcactctgtacacgctggtct

SEQ ID NO: 607908 - DNA, 96 bp, Homo sapiens
aaaaaggagagcctctgagctcaacggaggattgtgcctgagaagaacccacagagtttaaaaggatgcttaatcgggagctcacccatctctctg

SEQ ID NO: 607909 - DNA, 83 bp, Homo sapiens
caccctggagtaaccctcactggagaatccagagattctgtcatgacctgcctggcgatcattaccgtgatttcctgtctgct

SEQ ID NO: 607910 - DNA, 98 bp, Homo sapiens
cttcactgacccctcggtggagatctgagcctcaggatgcaggattgaaagaaggtggcaagaggaagaagcagaagcagagagaggagtcgaagaag

SEQ ID NO: 607911 - DNA, 73 bp, Homo sapiens
gccgccatccggactcccgggtcctctgtgcaggtcctggtgaacgccatcatcaacagtggtccccgggagg

SEQ ID NO: 607912 - DNA, 100 bp, Homo sapiens
tcatcccagatcaccatgcagaagccttctctcctcctcgcctggccccctcaggctttgtggaccaactcgtggaagattcctccttatggacaacaag

SEQ ID NO: 607913 - DNA, 100 bp, Homo sapiens
gggcggccttcgagccctctggacaagcagcagcggcagcacctaaggggaagcagctcttgaagctcaccttgtccctgtcttgcactctctctggcct

SEQ ID NO: 607914 - DNA, 100 bp, Homo sapiens
gcagaagccatttgtcaacaaatatttgctaagaagtgaattcatgttcccagaggtgattgaactgagctctggagaggaggacactctgcacattgtg

SEQ ID NO: 607915 - DNA, 75 bp, Homo sapiens
ggagccgcacgcggcgatatggaagaggagggcaagaagggcaagaagacggtctggaaaatcccgaagcagaag

SEQ ID NO: 607916 - DNA, 83 bp, Homo sapiens
gggccagccccgccgccctcgcaacctggcagccgccgccgtggaagtgctgggcctaaaggagataacatttatgaatggag

SEQ ID NO: 607917 - DNA, 75 bp, Homo sapiens
gaggacaagaccatcgagctcatgcagagcatcctggccagaacaagccaaggagccaagacgagagggacacac

SEQ ID NO: 607918 - DNA, 83 bp, Homo sapiens
gttggattcaaagacagcccagaatctctatgccgacaaaaggatcaaggtggcgaagcccgtggtggagatggatggtgatg

SEQ ID NO: 607919 - DNA, 107 bp, Homo sapiens
aaggagcgcggaatcggggagcgtccggagctagctggatcctctaggcaggacccagatgatgtggtaccagttggccaaagaagagcctggtgttggtgcatgtg

SEQ ID NO: 607920 - DNA, 51 bp, Homo sapiens
cttctcacccccaggatgtcatcgaggcctttctgagaaaagtctacagca

SEQ ID NO: 607921 - DNA, 83 bp, Homo sapiens
tttgccgatccgccgcccgtccacacccgccgccagggccgagaactactggtggcgtggccagaacacacggacgctgtgtg

SEQ ID NO: 607922 - DNA, 75 bp, Homo sapiens
gcggcgaccgagccggagctgctcgacgaccaagaggcgaagaggttatgaagacagtatggagtttccagacca

SEQ ID NO: 607923 - DNA, 74 bp, Homo sapiens
acttcgcgacacccttgaagctgagaaatgctatatgttctcctttcagccaagacctttcaccagtgcagggg

SEQ ID NO: 607924 - DNA, 74 bp, Homo sapiens
ggacgcatggaatatttgcttgtgatggagtactatcccaataattatatccagatcgagagacagaagattct

SEQ ID NO: 607925 - DNA, 100 bp, Homo sapiens
caaggacctggccgacatcgcggccttcttccgatccgcaatggctgccatccggaagaaactggtgattgttggtgatggagcctgtggaaagacatgc

SEQ ID NO: 607926 - DNA, 95 bp, Homo sapiens
caccaaactggaggatgcctatgtattccctggggatggcgcatcacacaccaaaggtgctcctgacctctgataaagctgcagccaatttctca

SEQ ID NO: 607927 - DNA, 75 bp, Homo sapiens
ttggttaaaacctgacacttttaacagtcttttcgtctgcagatgactatagagaacatgaaccatttgaaattc

SEQ ID NO: 607928 - DNA, 100 bp, Homo sapiens
ttgttttttcctgtatgaagcggttggcaccactgaagtgaccgaatgagggtgcttattggttctccgttagttggccaacccaaaaacagaactggag

SEQ ID NO: 607929 - DNA, 90 bp, Homo sapiens
ggcggtggctgagagtgaggaaggtaacctgtgtatggtgactggaggtgctaacctaggaagaattggtgtgatcaccaacagagagag

SEQ ID NO: 607930 - DNA, 100 bp, Homo sapiens
cccattggtcactgtacacttggaaaactatgtgatgatgatgccatttaaacgacaggctctagtggaatttgaaaacatagatagtgccaaagaatgt

SEQ ID NO: 607931 - DNA, 100 bp, Homo sapiens
ctgtgtcttcttcggctgtttcacaaagaagcatattcacgagcatgcgaaggcgaagcggcacaacctggagctgtccggcagcagaacaagccattcg

SEQ ID NO: 607932 - DNA, 100 bp, Homo sapiens
aaagaccactggatcccaagagtgaagctcagcttcagataagcatggattcctggttcattcttgttctgctcggcagtggtctgatatgtgtcagtgc

SEQ ID NO: 607933 - DNA, 100 bp, Homo sapiens
ctggaactccccattatatgagtcctgaggctctgaaacaccaaggctatgacacaaagtcggacatctgtattggtaaaggttttcaaggtgtcatgaa

SEQ ID NO: 607934 - DNA, 50 bp, Homo sapiens
ggagactggatgatagaatttgagtgatagttgcttcaggaatcttgcag

SEQ ID NO: 607935 - DNA, 83 bp, Homo sapiens
gtttcccttggtcaaaagcgcactaaatcgtctccaaggtgagtgtttctatggttggctagaacctctgttggccagaatag

SEQ ID NO: 607936 - DNA, 50 bp, Homo sapiens
ccgaggctgttgctgttgatctgtggactctgacaccaccataccaatgg

SEQ ID NO: 607937 - DNA, 100 bp, Homo sapiens
cgaggacatgttgacgtcgtccgagagtcttaaaatcctgctctggccggattccagactcgtgggggaaaggctggtagatcatggcaaccatagaaga

SEQ ID NO: 607938 - DNA, 83 bp, Homo sapiens
ctttatcgtggtggagtccaccctggctgtgcttcgaggcagagaatgggccgacaccatctcctggccgcagccccctggac

SEQ ID NO: 607939 - DNA, 90 bp, Homo sapiens
gactttaaggtgaaaacaatttcagtggatggaaataaggctaaacttgcaatatgggggtttcttttgcgggacagaggatcagatgtt

SEQ ID NO: 607940 - DNA, 75 bp, Homo sapiens
cactgctgtttaccttggcgaggcctttcaccaagtccatgcagaagatggctgtgccacccacgtatgccgatc

SEQ ID NO: 607941 - DNA, 76 bp, Homo sapiens
gggctggcatggtcatattacatcggatatctgcggctgatcctgccaggttcagcgctgtgtggagatcctgagc

SEQ ID NO: 607942 - DNA, 95 bp, Homo sapiens
ctcgtcgacatgagtgatgtggaggaaaacaacttcgagggcagagagcatggggaagtgattgactgtgtgcaggagctgagccactccgtgaa

SEQ ID NO: 607943 - DNA, 74 bp, Homo sapiens
ttttgccgcagacatacggagcactggtcgaattgacaaatcttaccctacagtatgtggccacacaggaccag

SEQ ID NO: 607944 - DNA, 97 bp, Homo sapiens
aagaagtctaactatgaagtattagagcagtatttggcagtcgtattcagagataaacccctggagctatgggatgttaggacttgtacccttctta

SEQ ID NO: 607945 - DNA, 99 bp, Homo sapiens
agaagccttaagacgcagttcacggacagcccccagtaaagtccagcgccgaggatggcaccagaaaaaactgcctctgacagctcttgctcaaaatat

SEQ ID NO: 607946 - DNA, 74 bp, Homo sapiens
gaggaaccccagcgactcttttatggacaccatgtaaaattgaacctagtataaaccacatcctaagcaccaga

SEQ ID NO: 607947 - DNA, 90 bp, Homo sapiens
gccacagataaaattccacaccctcttgtgccttttgatggacctggtcgtttatacgcaatgcagactggaatgaagatcgatagtaaa

SEQ ID NO: 607948 - DNA, 50 bp, Homo sapiens
gtatcagaacttgtaagagtatccagaaggagcagcctctgaagacggac

SEQ ID NO: 607949 - DNA, 89 bp, Homo sapiens
tcaaggacacctcctccaaggtcatccagtccgtcgctaagctactatgtgggcatgtgccttgcggcttcagaaaagcggctccacgc

SEQ ID NO: 607950 - DNA, 75 bp, Homo sapiens
caccaagtatggcaacatgacagaggaccatgtgatgcacctgctccaggccataggaaaaggatacagagtaga

SEQ ID NO: 607951 - DNA, 100 bp, Homo sapiens
aagattagaacagctcataggagagtcatgattttgaatcacccagataaaggaatggcggcgctagatagtaaggcatcagggaagatgggaatgcgag

SEQ ID NO: 607952 - DNA, 82 bp, Homo sapiens
acacagttgtttacagctctaacaaaatagacggtggataattactgtaccttcctcatggaaaaagttttatttaaagtgt

SEQ ID NO: 607953 - DNA, 100 bp, Homo sapiens
catgggaactgcacgtcaagatgtttatgatttgctaaaaacaaacctttatcaggatgatgcagtaacagttagttgatactactgtggagttggcaaa

SEQ ID NO: 607954 - DNA, 73 bp, Homo sapiens
aggacgacctggctggcatgttcctccaggtatcagaagcatgtgcacacgtatcgcattctgcctgatggag

SEQ ID NO: 607955 - DNA, 85 bp, Homo sapiens
ccgagcacggaaccacagccaccttccaccgctgcgccaagggccatgtgtccttcaagcccagcttagaccaacagcgttcatg

SEQ ID NO: 607956 - DNA, 112 bp, Homo sapiens
gtttaaatgatacctatcactcaagagactcttcatttagattggattctgaatatcaggattctggactctacttataatatccctaactgctggattctcctgttgcagc

SEQ ID NO: 607957 - DNA, 83 bp, Homo sapiens
cgggctggagacatggaccgcggcgagcaaggctgtattcatcaccaaagaaaaaacttacaccaatgcagaaatcggttagt

SEQ ID NO: 607958 - DNA, 100 bp, Homo sapiens
ccacgctgcgggcccgggccatggccgccgccgatgccgagaaggacagaataacgggctcccagattcacaagccccaccaagaggatcaccccaggaa

SEQ ID NO: 607959 - DNA, 100 bp, Homo sapiens
aggaagggatgcacatcatcacaccatcagcttcagagaatggcagccatttatttgtcccgtgagcccccctccatgcgcctgaaggcccgacccagca

SEQ ID NO: 607960 - DNA, 98 bp, Homo sapiens
gtccagctttacttcatcttgttcatgatttcacaaaaaatgttggtttgatgatctgtggccatgtacatatgcatgtttgtgtcattagtgaaact

SEQ ID NO: 607961 - DNA, 75 bp, Homo sapiens
gctgggatgtgccttagaggattatggaatttcacaaacttgtttggacagccactagtctgcttgctttctcct

SEQ ID NO: 607962 - DNA, 100 bp, Homo sapiens
tagaaactgggttggaagtcagagctgcacaaagggaaagggtacttcttcctgccctctctcccaccatgaccatgggcacagttcagagatgggaaaa

SEQ ID NO: 607963 - DNA, 50 bp, Homo sapiens
tcagcaagaacgggaacaaaactctgggatttgtcttggctgttactatg

SEQ ID NO: 607964 - DNA, 101 bp, Homo sapiens
cggcgccgtcttggggcctagcggcgaggcgacccgcacagcttagaccatgctcagcctccaagcagccttgtcatcgacaaagaatctgaagtttacaa

SEQ ID NO: 607965 - DNA, 88 bp, Homo sapiens
gctcaaagacattgaacacgcgttgtctgtgtcggttttcaataacaagaacaccgaacgaccctgtcaccaacatttgccaagcagc

SEQ ID NO: 607966 - DNA, 75 bp, Homo sapiens
atcacacaaaagcacacaaagacctcctcctccacaggggagacagagtgcacagccagagaacaacacatcaca

SEQ ID NO: 607967 - DNA, 75 bp, Homo sapiens
gcaggaaatgaccccaacgccaccgagagggcgcctggaatatcaggatcctcatgaccagccaaagagaagaag

SEQ ID NO: 607968 - DNA, 95 bp, Homo sapiens
gttgggaatctggagatgatccatgggtagaacatgccaagtggtttccaagcgcccttgtggatgaattaaaggagagtatattcccagtcgtc

SEQ ID NO: 607969 - DNA, 99 bp, Homo sapiens
ttctgatgaggatgctgcagatgctggtgttacctctcattgtctccagcctggtcacagtcttattgccagcagttttgaagatgactcccgtgtagc

SEQ ID NO: 607970 - DNA, 82 bp, Homo sapiens
gcaggtcttcacccaggccctggagtgcatgcgcaggttttgcaaaaggcatcaaattaaatcaagttcaaatattccctgt

SEQ ID NO: 607971 - DNA, 124 bp, Homo sapiens
tgaagcacatcgaccggcgacagcagccaggagtcatgagcgacagcggcgagcagaactacggcgagcgggtactccaaagattcaggtttactcacgtcatccagcagagaatggaaagtca

SEQ ID NO: 607972 - DNA, 98 bp, Homo sapiens
ttcatcctggtttatagcctggttaatcaacagtcttttcagatctattccagaggggagcttcaccacttcattgacggctttaatgaagagaaaag

SEQ ID NO: 607973 - DNA, 100 bp, Homo sapiens
ggacgtgtacaacccgacgaggaacgaatgggacaagatcccgtccatgaatcaggccggatcacctcaacagtcacgtcagacaagtgcactcaacaga

SEQ ID NO: 607974 - DNA, 100 bp, Homo sapiens
tggaccacttctctgtcgacggctatgacagttctggcaatgcggtgtgcagagggtgcttggtggttctctcctgatggccccgcagggtctgcagcct

SEQ ID NO: 607975 - DNA, 88 bp, Homo sapiens
ggtggagtccggcccccgaaagaggagacagggcagggcattgttcatgcactgaccgacctcagcagccccggcatgacctcaggga

SEQ ID NO: 607976 - DNA, 89 bp, Homo sapiens
gaactggattccatgtagagacccctggaggcagagatcctacaagaatccaggatgatgatcccagattgccagcgcaggttggaagc

SEQ ID NO: 607977 - DNA, 51 bp, Homo sapiens
gtggttcttcctcagctctctcctgcagttgaatccttggcctgaatatat

SEQ ID NO: 607978 - DNA, 100 bp, Homo sapiens
cggctgggcgggagccccagagtgaaaatgcctcgtgtaaaagcagctcaagctggaagacagagctctgcaaagagacatcttgcagaacaatttgcag

SEQ ID NO: 607979 - DNA, 100 bp, Homo sapiens
aaccgctgccaacactgtcgattacagaaatgccttgccgtagggatgtctcgagatggttacaggaaatacaggaggcagaggaacaaataaaagacac

SEQ ID NO: 607980 - DNA, 75 bp, Homo sapiens
atttctcttgagtaaatacctaaaagtgggcttgctgggatatttggccttgacattaaaggcagagactgtggc

SEQ ID NO: 607981 - DNA, 100 bp, Homo sapiens
taaagctaccaaagacgtagaaagaaatcttagcaggtgtttcaggcctcacctgaagatcatgaaaaatacggtggggatccacagaaccctcataaac

SEQ ID NO: 607982 - DNA, 82 bp, Homo sapiens
agcgaaggaagaagcgtccctccaggagccaggaagatgtgaagttcatttccaatccgccctccatggtggcagcggggag

SEQ ID NO: 607983 - DNA, 100 bp, Homo sapiens
aatttgccctatgtctatatcccctctaagacggtcagggtagtacaaactacggcaagagccagcgacgtggtggccatcagaataactacaagccata

SEQ ID NO: 607984 - DNA, 75 bp, Homo sapiens
cagagacagaagcagatggattcgtccttttaggaaatccttgcacgaggaattcttcttccattaataaatcaa

SEQ ID NO: 607985 - DNA, 75 bp, Homo sapiens
tttgtttgctgcatatactggagatgtgtctgcacttcgaagttacatgggaattggtctttctgctcaaggtgt

SEQ ID NO: 607986 - DNA, 98 bp, Homo sapiens
attgggcaagagaagaattcagaagaaacaaaagtgccaccgaagagctcctgtcacatatagagaaacttcgaacctcaatgatagatgatctaaat

SEQ ID NO: 607987 - DNA, 96 bp, Homo sapiens
aagggccacgccggcgatggaggcggcggcggcggactggcgggccatggcgagtgtcactgcggggaatgcaagtgccatgcaggttacatcggg

SEQ ID NO: 607988 - DNA, 51 bp, Homo sapiens
ccaacagacaggaacctatgtcactttcaaatgtatgtccctgggaagctg

SEQ ID NO: 607989 - DNA, 145 bp, Homo sapiens
tcaagtgctgtaaggaagctgtgtgtgtcattgacatgtcctctttcacaaagtttgagataacagcactggtgaggtggattgatgatgaatcttctggcacacctggagcaactccagaacacagtcgtgaggataatgggaa

SEQ ID NO: 607990 - DNA, 82 bp, Homo sapiens
taatgcaatggtctcaatctctggaaaaacttcttgccaaccaaagtataatgggtctctcccaaatggcgatagaggaagg

SEQ ID NO: 607991 - DNA, 100 bp, Homo sapiens
ctctgcgcggctttttgagcggtcccgcatcaaggctctggcagggccatgaaatgacaagcattggactgctacttggtgtttctgctgcaaaactagg

SEQ ID NO: 607992 - DNA, 100 bp, Homo sapiens
ggacttttctttctagcccaatggaagtgggcaaaaagttattggagtggtttaatgacccgagcctcagggataaggaaccctaaggactctgcaatat

SEQ ID NO: 607993 - DNA, 75 bp, Homo sapiens
gctgcggccgtcctgggggccttcagagccgcaatcaagcaggtgttcgaaatccgcaccactgatgacctcact

SEQ ID NO: 607994 - DNA, 75 bp, Homo sapiens
cagactatgagtctagtttaaaggttgaagccatccttgtcaatatatttggtggtatcgtcaactgtgccatca

SEQ ID NO: 607995 - DNA, 51 bp, Homo sapiens
ccatcattgatgtggtgcgatcgactgtggatattcataaggagaaagtgg

SEQ ID NO: 607996 - DNA, 100 bp, Homo sapiens
atctttgtcagtgcacaaaatggcgccctacagcctactggtgactcggctgcagggacctcctggagccagtgtcctgtgacctcagtgatgacatgcc

SEQ ID NO: 607997 - DNA, 114 bp, Homo sapiens
ggtgtaccgcggcgagaagccccagctgcactacgcggtgtcatggagaaactccagctgggcccagagattctgcagcgggaaaatccaaggcttatttatgccaggctgagt

SEQ ID NO: 607998 - DNA, 75 bp, Homo sapiens
atatccagattttaagcagcatgttcagataaatctgaatggaagagtgaggttctgtcatatgttgaagaatcc

SEQ ID NO: 607999 - DNA, 83 bp, Homo sapiens
catgcggaagatcgtcgccacctggatgctggagccggtggctgctggcagcggaatcccccagatcaagtgcttcctcaacg

SEQ ID NO: 608000 - DNA, 90 bp, Homo sapiens
aaacataggatgttttggcgagagatgtattcagtggaggaagctgtgtttctctcctgaggcaaagcccaacacacctgtcttttgtcc

SEQ ID NO: 608001 - DNA, 100 bp, Homo sapiens
tggaagtcctgcaacgggatccaaactcccctctgtactcggtgaagtcgtttgaagagcttcggctgaacatggagctgatccaggacacctcccgccc

SEQ ID NO: 608002 - DNA, 100 bp, Homo sapiens
gccgcttccccggcggtagcagcctgcagccacggatccaccttgatgttcagtgaagagtaccagaaaagtctgctagagcagtaccatctgggtctca

SEQ ID NO: 608003 - DNA, 123 bp, Homo sapiens
gacgagccagtggcaatgacccagacccggacgacccccattgctgagccagcggagctgcttggtgacaagttacagtccaactggtcttcctctgattcagctgtggagtgtggttggaga

SEQ ID NO: 608004 - DNA, 98 bp, Homo sapiens
gagcctaatcaatatgttcaaactatactaaaacacctacagaatctttttgtaccaagggaaaagaagatctcccggagcagtgccctgaaagtgct

SEQ ID NO: 608005 - DNA, 82 bp, Homo sapiens
aatacttcatatttggcttcaatgtcatattttggtgaagcctggtgttcggtacagagaattgggaaacattatccagaag

SEQ ID NO: 608006 - DNA, 82 bp, Homo sapiens
tggagacgggagccaaccagggctgcattggagggacccagacatggagctgcgggaagaagcctggtctccggggccgctg

SEQ ID NO: 608007 - DNA, 75 bp, Homo sapiens
ctcttctaaggatcgctgtcctgacagaagagttggctggggaacagaccagggaattggtggatttggagaaga

SEQ ID NO: 608008 - DNA, 97 bp, Homo sapiens
gttaaagagaggatagaaattgaacagaactatgcgaaacaattgaggagtttccagatgtcttggaatgcactgtatctcatgcagtagaaaagat

SEQ ID NO: 608009 - DNA, 75 bp, Homo sapiens
ctctgctgcggcgcggggaccgctgtgctctcgcgggctgacgcacgaggcacacaggaaggaggtggagcaggt

SEQ ID NO: 608010 - DNA, 50 bp, Homo sapiens
gacacagcctcgctggaggcagtttctgcaggatcctaaggcctttgtag

SEQ ID NO: 608011 - DNA, 100 bp, Homo sapiens
cggcggaaaaccgaagttggaagtgtctcttagcagcgcgcggagaagaacggggagccagttccagggtctccctccactgctgtagtaacccgggtcc

SEQ ID NO: 608012 - DNA, 98 bp, Homo sapiens
cagaaaggagagcgcgacatcctctccaacggccagcagggaaccattaaagagatcctggggactgcccagtcagtgggctgtaatgttgatggccg

SEQ ID NO: 608013 - DNA, 89 bp, Homo sapiens
ctcgatccgcctgcctgcgcacctgcattcagaatggacagtttagaagaacctcagaaaaaagtctttaaggctcgaaaaacgatgag

SEQ ID NO: 608014 - DNA, 76 bp, Homo sapiens
ttgtatgcctcaatttgctggatttaagcactgctgcactttatgaggttaaagctgaagctcaacaaagatatag

SEQ ID NO: 608015 - DNA, 100 bp, Homo sapiens
ccggcctcctccgtgcggagaagaagctgcggccgcacctggccaagatatcagaaaaccaggactctgcagatgttgatcctcaggagcattcatttac

SEQ ID NO: 608016 - DNA, 75 bp, Homo sapiens
tgccagttttgtcaaagggaaggtaaaggatttttacctcctataactccaccagaaaagttttttctttcccag

SEQ ID NO: 608017 - DNA, 82 bp, Homo sapiens
gaatggaagaagaaagaattgaaaccgcacagcagctcctctggtgcaagtgtggtagctattgacaacaaaatcgagcaag

SEQ ID NO: 608018 - DNA, 100 bp, Homo sapiens
ccccggaatcgtgtgctgggctggtcccccttgtttgcctgagaatacagatcaacccacagaacaaagcggatttccaaggcatctccccagagcgagc

SEQ ID NO: 608019 - DNA, 100 bp, Homo sapiens
gacagttgaaaaattacagcaatattatatttttattccctctaaattcaaggtggtttgtgatgaaaatggttccaagggctatggatttgtacacttt

SEQ ID NO: 608020 - DNA, 100 bp, Homo sapiens
ccctctgacgtctcccacttccgcttccatggaagtcgagataacatgagtattgtactagtttgcttttcaaatgctcccaaggtctcagatgaagcgg

SEQ ID NO: 608021 - DNA, 75 bp, Homo sapiens
gtgagccctgtttttgccaccacactccagcttggatgtttactgaactgcaacagatgaggcaacagttaccag

SEQ ID NO: 608022 - DNA, 74 bp, Homo sapiens
gtgtggtcgcgtctcggaaaccggtagcgcttgcagcatgcttggacgaaccttgacaggatgggtgcagcgaa

SEQ ID NO: 608023 - DNA, 74 bp, Homo sapiens
aggaactctacaacccaatccagaggagaattctgcctaagccaactcgaaaaagccgtacaaaaaataagcaa

SEQ ID NO: 608024 - DNA, 100 bp, Homo sapiens
taaagtggactgcacggcccactccgacgtgtgctccgcccagggggtgcgaggataccccaccccctggactttcaccttctgggaaaacaacagatta

SEQ ID NO: 608025 - DNA, 83 bp, Homo sapiens
ggggctgcggccgcgggcgatgccaaaaacgatgaaggatttgggggcagagcacttggcaggtcatgaaggggtccaacttc

SEQ ID NO: 608026 - DNA, 75 bp, Homo sapiens
ttccatcttttcatttccccagcgcagctttctgtagcttggaccaatcagccttgtgtttataggaattatttc

SEQ ID NO: 608027 - DNA, 100 bp, Homo sapiens
catccagaagcatctgaagaccatggatcacaaccggaaccgcagggtacggacattgctgcaggagaagaggttgccatcaagcttgaatgtgtcaaaa

SEQ ID NO: 608028 - DNA, 78 bp, Homo sapiens
gaacatttctgggtgacactcaacaggattcccgtgatcagggccaaagcggtcagtgagaaggaagtggactctgga

SEQ ID NO: 608029 - DNA, 101 bp, Homo sapiens
tgcgtcagtagggtgagcacataaaaaatccatgtcttgcacctgtattttagcgtactatgcaggtgcagattcactttataggaacagcttcagcttca

SEQ ID NO: 608030 - DNA, 100 bp, Homo sapiens
gcgtttgtcactttttgtacaaaagaagcagctcaggaggctgttaaactggctcatgctgaagattcggttatggaccatcatttccggaagccagcaa

SEQ ID NO: 608031 - DNA, 100 bp, Homo sapiens
cgctagccaagctgtcctgcctggtcaggtcaattcagtgaagatatgatacccacagtgggcttcaacatgaggaaggtaactaaaggtaacgtcacaa

SEQ ID NO: 608032 - DNA, 75 bp, Homo sapiens
atgggagataagaagtatgaagacatggaaggacacagcattgttggttttgccatgtactattttacctatgac

SEQ ID NO: 608033 - DNA, 100 bp, Homo sapiens
caagcaagacaaaaagctgctaagcactgctccctccgtctctgtgaagagaccagcttctaacaggtgttggagcgggccggagagaagtagagtgggc

SEQ ID NO: 608034 - DNA, 82 bp, Homo sapiens
ccgatccagcctgcggagcctgtggggcagataagtaatggaacatcatctgtgatcgtctccagaaagaggccatcagaag

SEQ ID NO: 608035 - DNA, 74 bp, Homo sapiens
gccattacggggagcacgtgtgcactgctaaggtgctggacgtcattgctcctccttatacctctgacttcgtg

SEQ ID NO: 608036 - DNA, 83 bp, Homo sapiens
ccatctcaggagcacctgaatgggcccatggaggaagtggagcggcaggtcctcccagaccccgaggtgctggaagctgtggg

SEQ ID NO: 608037 - DNA, 88 bp, Homo sapiens
ggagcgcttgaaggagctgcgggtgtacctgaaggaaatcttaaaagaaattggtgttcagaatgtaaaagggatccacaaaaacaca

SEQ ID NO: 608038 - DNA, 152 bp, Homo sapiens
ctaaaaaatgcagatgaattagtcaaacagaaaattcatcccacatcagttattagtggctatcgacttgcttgcaagtttggccgtaagctctgcctcctaactacagtcctcataaatgctgcagctggagttctcatggccatttcccc

SEQ ID NO: 608039 - DNA, 75 bp, Homo sapiens
atcttcatctgtcacgccaacgtcatccgctacatcgtgtgcagcttttcctccgcaaccatgtctgacaaaccc

SEQ ID NO: 608040 - DNA, 88 bp, Homo sapiens
agaagcgggaacgcaggcgtaccatccacaccttcccctgcctcaaggagctgtgcaccagcccccgcttcgtgctgaacctgggcaa

SEQ ID NO: 608041 - DNA, 90 bp, Homo sapiens
caaattgctccatttcacactgaattcaccattaaggaaatttccctggacctcaagaaaactagaggaagcgctatagaaatgaaggga

SEQ ID NO: 608042 - DNA, 100 bp, Homo sapiens
cggggaggtaccaggtatttgagagcaatcgccaccgctttcctggaacttgagggggattttggcactcaaaaagaagctgcttgggccataagtaact

SEQ ID NO: 608043 - DNA, 98 bp, Homo sapiens
agatgggctacctcaggatcggatgaccggaaagaagggatgaccgcgtttgtggaaaagagaaaggccaacttcaaagaccagtgagaaccagctgc

SEQ ID NO: 608044 - DNA, 100 bp, Homo sapiens
tcctcgggcagcgagattgctttttttccggctactgcagcactggggtgtcagttgttggtccgacccagaacgcttcagttctgctctgcaaggatat

SEQ ID NO: 608045 - DNA, 100 bp, Homo sapiens
gacggcgtgatgcggatttttggaggcgtccagcagctccgtgagcaggaagtcattatgcaacttacacatattcatcagatttcctctgacttacccg

SEQ ID NO: 608046 - DNA, 97 bp, Homo sapiens
accaagatcaggaacctgccctgatgatggtgtgagcatccccggggagtacacttcctttctggctcccatctcttcctccaagctgtacaatgag

SEQ ID NO: 608047 - DNA, 50 bp, Homo sapiens
tggtgcaggaaaaatgttcactgcaggccaccagcccctcgggttccaag

SEQ ID NO: 608048 - DNA, 100 bp, Homo sapiens
agacgcccgaggacagggaggtgcgtctgcagctggcgcggaagagccacccgtgggaaactgttacaacagctgcaatgcagaaatacccaaaccctat

SEQ ID NO: 608049 - DNA, 75 bp, Homo sapiens
tgcggaagatctgtgctttggatgacaacgtctgcatggcctttgcaggcctccccaccagatgccctgcgctgg

SEQ ID NO: 608050 - DNA, 100 bp, Homo sapiens
ccggcccctcccctcgcctcctctcctaggtgccggccgggagggcggccgcagcagatcagggagctgattttggatggatctttacagttgatccagg

SEQ ID NO: 608051 - DNA, 100 bp, Homo sapiens
tgaacagacacgggtgaatgctgctaaaaacaagactggggctgctcccatcattgatgtggtgcgatcgagattccagacattctaaatgcaagtaatc

SEQ ID NO: 608052 - DNA, 90 bp, Homo sapiens
ccgggactccctggaaacctagaaatggcatcaagcatgatggaaccatgtgtgatacctgccgccagcaaccaatcattggcattcgat

SEQ ID NO: 608053 - DNA, 100 bp, Homo sapiens
caccaagtttgccctggtggcccctgtccaggctgaagaagactctggacttgaaaatactggaaatctgtccggatccaaattattttgcaagccagat

SEQ ID NO: 608054 - DNA, 87 bp, Homo sapiens
gtggaaggatcaacagtcaattgtgtactagcattccaagagagaaaaggaacagttccgtaagctctttattggtggcttaagctt

SEQ ID NO: 608055 - DNA, 90 bp, Homo sapiens
cagacaccgagcttcagcaagctctctccaacgaaagctgacttcatgagaccgaggatctcgttcgttgatcgatgctacatattcagc

SEQ ID NO: 608056 - DNA, 99 bp, Homo sapiens
aagggacaccccagaagttagcatcagtgggactcggaagctccgatctcaacaaagatccgtgctcagctcacagagcagatgaaatgcctggaccag

SEQ ID NO: 608057 - DNA, 75 bp, Homo sapiens
cagccaggaaccaagaaaacttggagattagcagaggcatttcatatcagtgaggattctgatcctttcaatata

SEQ ID NO: 608058 - DNA, 100 bp, Homo sapiens
tcttcagtccgataacagtgcttgttggctaggaattcttctttgcctttatcagcttgtgaaaaattatgaatgggaatgacaccgtgacagagtcttc

SEQ ID NO: 608059 - DNA, 73 bp, Homo sapiens
atgggcggcggaaaatagcctttgccatcactgccattaaggtcatctaatacatgggagaaacatggatttt

SEQ ID NO: 608060 - DNA, 127 bp, Homo sapiens
cgggagccggggcggcccttggccgcattcccgcccgtcccgcagcggcgcgcggagccagaataacatagctgatccagaagaactgttcacaaaattagagcgcattgggaaaggctcatttggg

SEQ ID NO: 608061 - DNA, 75 bp, Homo sapiens
gtcaagtgaaaggtggtgaagagccaattgaggcaaagggcgttgtgaatacagctgtgtctgcagcagtccaag

SEQ ID NO: 608062 - DNA, 75 bp, Homo sapiens
aaactagaacaggatatgactacagtagatgaaggaatgtcgttgtctgctgggtcttcccctcttcattccccc

SEQ ID NO: 608063 - DNA, 98 bp, Homo sapiens
gccttcgccgaccggctacgcgccgtggacacagacggggtggagcccatggaatcggtcctggaggacagtgccaactacctcaggaaccgggagtg

SEQ ID NO: 608064 - DNA, 95 bp, Homo sapiens
ggcagattctggaaactgtacattgaagcagagtttaagctatgaagaaggacatccctcacactctgaaacagatctccttcagagacagagtt

SEQ ID NO: 608065 - DNA, 75 bp, Homo sapiens
gcagaactgggttctggactttgggcgtcccattgccatggtactggttttggattaggaattgttttctcactt

SEQ ID NO: 608066 - DNA, 75 bp, Homo sapiens
tgagccaatgcaagcatttttaaatcttcctgggtcccaagtgagtgatagttgcttcaggaatcttgcagaaga

SEQ ID NO: 608067 - DNA, 100 bp, Homo sapiens
cgcctctttggaagaaatggcttctctagaggaggaagcctgcagccttaagcgcaccatcctgggaagtgcatgtctcagaccaactccaccttcacct

SEQ ID NO: 608068 - DNA, 100 bp, Homo sapiens
ctggtttcgacaggggccagttccataagcagattgctgtcatgcggggccaggctaaagaattacctccaaagccattgtcaagaccacagcagtcatc

SEQ ID NO: 608069 - DNA, 100 bp, Homo sapiens
tttctctagctattgccttattttttctcatggatgttcttcttcgagtatttgtagaagggttcggcaggaattattggaggaatatgaacaagttaaa

SEQ ID NO: 608070 - DNA, 90 bp, Homo sapiens
tctactcaacctactcattcatggaaagtaggagacaagtgtatggcagtctggagtgaagatggacaaacgtggaatcttgtagaagga

SEQ ID NO: 608071 - DNA, 51 bp, Homo sapiens
cagggcttcctggcccgaaaggagagcctatgatgaggagtctgatgagga

SEQ ID NO: 608072 - DNA, 128 bp, Homo sapiens
ttcgcgcagaaatctggctacttcctgtgccttagttctctgggcagcctagaggtaatagcctgcagctggtgttttgagaagccctactgctgaaaacttaacaattttgtgtaataaaaatggag

SEQ ID NO: 608073 - DNA, 100 bp, Homo sapiens
cgcctgcctccccagcaaatcgagaaaaacctcagcgacctgatcgacctggagtctccccaggacagtgctatcacccgggatattaaccgaacattcc

SEQ ID NO: 608074 - DNA, 98 bp, Homo sapiens
ttctggttgcagcaagcagtcaggctccttcaggaaattcagacatcagactgcgggttcgggctgaatactgccagcatgagactgctctgcagggc

SEQ ID NO: 608075 - DNA, 50 bp, Homo sapiens
ttgaggtgtggaatgcgatgactcggagatctataaggacaggcagaaat

SEQ ID NO: 608076 - DNA, 90 bp, Homo sapiens
gtccctggctccctcattaccgtcgccagcggagcgaacccgagagcgtggagcgggctgggccagcttatcacacagactttcagccac

SEQ ID NO: 608077 - DNA, 98 bp, Homo sapiens
ggagctcggcggacgcgggagggcagcaccacgggcggcagtacggcaagaagaagctgaaatacctgccctacaatcaccagcacgaatacttcttc

SEQ ID NO: 608078 - DNA, 100 bp, Homo sapiens
tggaagaaggaaaagaaggcagtcacgtttttcgatgatgtcacagtctacctgtttgaccagaagatgctgtggacaattatcgagatagactaacaga

SEQ ID NO: 608079 - DNA, 75 bp, Homo sapiens
atccattgtcttccaccgaaagaagaatcttcaggtgtgatccctcacatccacaaatctctgattggaaagaag

SEQ ID NO: 608080 - DNA, 87 bp, Homo sapiens
cactgtcctacaaatctaagcagttctgcaaaggaacaccaggcagattcatttatacagatgccttcaattaagttgcagagttct

SEQ ID NO: 608081 - DNA, 100 bp, Homo sapiens
aatcagacctctgtggcagcattttttccagaacacaaaaggctctgtgtgctccgggatggagcaggtgtgcagagggtgagaacccagctctgggacc

SEQ ID NO: 608082 - DNA, 50 bp, Homo sapiens
cagccctgcctcggcggaccaaaggatctttaatctcatgaagtacgaca

SEQ ID NO: 608083 - DNA, 83 bp, Homo sapiens
ggtagccatggcacaagaatataatgatcaagcggtgctgattcacgagagtggaagcctccagagcttggggctttctggct

SEQ ID NO: 608084 - DNA, 97 bp, Homo sapiens
taatgaggatgaagattcaccaaataagctatatactttggttacctatgtacctgttaccactttcaaaagtatatgaatgacctaaaggtacaaa

SEQ ID NO: 608085 - DNA, 75 bp, Homo sapiens
ctgtgttactttggctctgtgaccagtatgggatccctaaatgtatctgtgacttcacatgtatcattctccgag

SEQ ID NO: 608086 - DNA, 98 bp, Homo sapiens
cacatgggagtccccaaaattacattgccaaggcatccgtgtcattctggaccttactcccaactaccggggtgagaactcgtggttctccactcagg

SEQ ID NO: 608087 - DNA, 75 bp, Homo sapiens
tagaactgcagaggttcctctacagcaaggaaccactcgttttgactattattttatcactctttgtgaaacttc

SEQ ID NO: 608088 - DNA, 50 bp, Homo sapiens
gtgatttgcctgaggccccacagcagggatcaagcatgaattgcaagcaa

SEQ ID NO: 608089 - DNA, 51 bp, Homo sapiens
ttcccctctacatagacgacaccctgacggcctgtttaaagaagaaaaccc

SEQ ID NO: 608090 - DNA, 75 bp, Homo sapiens
ttctcccattccgggtaccagttcgcgtcctgctccaaggactgcactgtgaagactcggagccgtgggtcccga

SEQ ID NO: 608091 - DNA, 96 bp, Homo sapiens
ctgacctcggtttcctggacccattccgactcagatgaagactcttaagatgacagaaggtgatttttctggtgatcgaggacttccggggtaatg

SEQ ID NO: 608092 - DNA, 98 bp, Homo sapiens
atctccatcacccaccaacaacaccacaataatccacagccaaggctttttctcctccgtgacagccagagtaatccaaaggcatttgtactcacact

SEQ ID NO: 608093 - DNA, 50 bp, Homo sapiens
gttttgtgcagattgccagtctaaaggtcctactgctctgttggctcatg

SEQ ID NO: 608094 - DNA, 100 bp, Homo sapiens
tgcagcttcaagcttaggaccacccaccatgcctatccaggagacctgtgccaggatcctcctgtatcgaggtgccgacaaggatgtgaagaacaacaac

SEQ ID NO: 608095 - DNA, 101 bp, Homo sapiens
atggcggcgccgagcgcggggtcttggtccaccttccagcacaaggagctgatggccgctgacaggggacgcagacatgggagatgaagtttacgatgatg

SEQ ID NO: 608096 - DNA, 80 bp, Homo sapiens
tttgaagataagtttaggccagacatggagggaaaggggcgtattcgtcgaggaaactatccaggtccatcgtctcctgt

SEQ ID NO: 608097 - DNA, 75 bp, Homo sapiens
aatgtgatcacagagcctatttacccagaagtagtccatatggatggatgtggacagtttccatatgatgcaaac

SEQ ID NO: 608098 - DNA, 75 bp, Homo sapiens
caaaattcgagcaattggcaagatggcaagagtcttctctgttctcaggacagagcgggatgccaccagcttgtc

SEQ ID NO: 608099 - DNA, 100 bp, Homo sapiens
ggagctttttctgatgagttgtcatttaagcgtggtgatgtgatttacattcttagcaagagagaaaaggaacagttccgtaagctctttattggtggct

SEQ ID NO: 608100 - DNA, 100 bp, Homo sapiens
ctccacgcgcgccgcctcgcagtaaacgcaaggactcagaaccccgcaccaaatgcctcctgaacaatgccgacctcgcccctcaccaccccaaggaccc

SEQ ID NO: 608101 - DNA, 75 bp, Homo sapiens
aacaagggccgcgatgtggaagttattgaagacaatggtgttcgaagagttgtcgtggtccctcaggcaccagag

SEQ ID NO: 608102 - DNA, 100 bp, Homo sapiens
aaatattatggtctttgtgcacatttacatcaaggtgtggaaacaggaagagaactagaactggaagtaaagcattgaagatgtgactgaattgctgcaa

SEQ ID NO: 608103 - DNA, 76 bp, Homo sapiens
ctgagattgacactcagcactttgcgccaccttactctaaccagatctcagaaaactgatcttcacaatgaaggct

SEQ ID NO: 608104 - DNA, 75 bp, Homo sapiens
tgcctcttcatattggcgatcctgttgtggatctgaaacttgcccacccttcgggatattgcaggacgctgcatc

SEQ ID NO: 608105 - DNA, 100 bp, Homo sapiens
agggagcccaagctttgcagagctggcagagaggctgatgacatcgtgaactggctgaagaagcgcacgggcccggctgccaccaccctgcctgacggcg

SEQ ID NO: 608106 - DNA, 80 bp, Homo sapiens
ggcgccgctcatccccctctcccagcaggtgtcccgacccaggctaagcttgagcatggctgagcaggagcccacagccg

SEQ ID NO: 608107 - DNA, 87 bp, Homo sapiens
ctaatcctggcgttccaccagcaaccatgagtggttccatgatgggaagtgacatgcatttaaatcaaacggtattgagatggattg

SEQ ID NO: 608108 - DNA, 75 bp, Homo sapiens
tctggtcagagatacttcttaaagagtggacgcttctcttgtgagccagctggaggtcttacctctttgactgaa

SEQ ID NO: 608109 - DNA, 75 bp, Homo sapiens
tgggtgaagatgggcaagccctcagcgccgcaggaggcggaggacaacaaatgggtgagaaatcttgaaagcaaa

SEQ ID NO: 608110 - DNA, 100 bp, Homo sapiens
agcgaaattggtcattctcgctaacaactgcccagctttgagaagctatggagatattttgcatagaatgaaggatctctgcagatacatgaacaacttt

SEQ ID NO: 608111 - DNA, 90 bp, Homo sapiens
aagatgtcttgggggatgagagtcagacaaccccaaatcgaggttagaaaatggatttctgactggaatctcaccactgaaaaaaagcac

SEQ ID NO: 608112 - DNA, 100 bp, Homo sapiens
ctttctacaacccgttccagttcgagatcaccttcgagtgcatcgaggacctgtctgaagatacacaatcatcatcttactagttctctgtgttgctcgc

SEQ ID NO: 608113 - DNA, 75 bp, Homo sapiens
aacagattggcacccgaattgccaaagttttggaaaagatgccagaccagtttgaccaggcggttgtgctgaacc

SEQ ID NO: 608114 - DNA, 83 bp, Homo sapiens
ccagagtccgcggccggggcgcgggaggaattgcattttccagatcacgtgcagtcatgaaactagagcgaggagaagagccc

SEQ ID NO: 608115 - DNA, 130 bp, Homo sapiens
cagtatggcaactcctaggatttgtcacgaatgggaagccaagtgccatcttcaaaatttcaggtcttaaatctgcactatgttggccatggaaatgctatcaatgagctgaaattccatccaagagatc

SEQ ID NO: 608116 - DNA, 106 bp, Homo sapiens
ttcctggagtagagtcttttttcactgagggaatgaatctgaagtctgctgcagtaaaacacagaaggctttaaaatgttttcttgcataaaattcaaaactttta

SEQ ID NO: 608117 - DNA, 75 bp, Homo sapiens
atgcagaaccattgatcaatttggatgtgaaacctgctgtggaccctgctgctgccaagctgtggaccctctcag

SEQ ID NO: 608118 - DNA, 83 bp, Homo sapiens
ttatggacagcatccaaacattatcactctaaaggattgtcctggtgaagacctagttcttgccggagacaattccactgcag

SEQ ID NO: 608119 - DNA, 100 bp, Homo sapiens
caggggccatggcgaagcacgagcagatcctggtcctcgatccgcccacagacctcaaattcaaagaggtgtgctctgaacaagccgagacggggccgtg

SEQ ID NO: 608120 - DNA, 83 bp, Homo sapiens
gctcgatcttgggacccaccgctgccctcagctccgagtccagggcgagagacatgaggctgagctggttccgggtcctgaca

SEQ ID NO: 608121 - DNA, 90 bp, Homo sapiens
agcaagaccatcatgctgcgcggccttcccatcaccatcacagagagcgatatttatcatagaatccccgactcagacccatcttctagc

SEQ ID NO: 608122 - DNA, 97 bp, Homo sapiens
gctctcagtttgttcccgaaatgagacttggtgcactctatacctactgggttcccctggaagagtttaaagaacgctgtactcagtgtgctgctgt

SEQ ID NO: 608123 - DNA, 97 bp, Homo sapiens
gctggtggtgttgtcgtggccggagcggcccgcgcctgggctgccggcacttcgcggcaggctatgactttgcagccgtcctggagtggttcgcgga

SEQ ID NO: 608124 - DNA, 74 bp, Homo sapiens
cggcgagtttccgatttaaagctgagctgcgaggaaaatggcggcgggagaaatggaatctatttggaatttgc

SEQ ID NO: 608125 - DNA, 90 bp, Homo sapiens
tggttggatatttagaggacattatcatggatagaagaagtcagagatgccatggaaaatgaaatgagaacccagcttcgccgacaggca

SEQ ID NO: 608126 - DNA, 74 bp, Homo sapiens
cgcgtcttcccggtctcctttcccggccgcacaggagctcaaagcatgcctgtttttaaggaagtaaaggtaca

SEQ ID NO: 608127 - DNA, 74 bp, Homo sapiens
ggaatctgtcttggaggacatcagaagggcagctgcaatgactctccgcacggtattattgtcattgcaagcac

SEQ ID NO: 608128 - DNA, 100 bp, Homo sapiens
ctggccctgacttttctaagatgagaggagctggtaggaacaatttggttcatacagtcaccaggaagcccatgtcttggcatgataacctggaggaacc

SEQ ID NO: 608129 - DNA, 75 bp, Homo sapiens
tggaggtagccgcagcgccagcaccagctaagggagaacattgagcaattcttcaccaaatttgtagatgagggg

SEQ ID NO: 608130 - DNA, 76 bp, Homo sapiens
tgagaatttatcctcaagagtcagctggcagcaggttacgggcaggacttgagtggcttcggacagggcttctcag

SEQ ID NO: 608131 - DNA, 87 bp, Homo sapiens
gaaactggctaaacgcctcaagaaggagaaagtaaatgttgacattatcaattttggggaagagggccctggggggaggacgaggag

SEQ ID NO: 608132 - DNA, 88 bp, Homo sapiens
aaataattaagaagaccaagtagcatccaagctgctactgtttgaacggtcttggatgaacagatggaagtctgctgttctgcatgaa

SEQ ID NO: 608133 - DNA, 98 bp, Homo sapiens
cctgctgggaacgggacttctaaaaggaactatgtctggaaggctatgtccaaactgggtcttcggcaggttacaggagttactagagtcactatccg

SEQ ID NO: 608134 - DNA, 98 bp, Homo sapiens
ggcgccccactccgcgcagcgggttgcctccgctccccatacggcggccccagcttggtgatccagctatttttcctgccgtaattgtggaacatgtt

SEQ ID NO: 608135 - DNA, 83 bp, Homo sapiens
ctgataagattgaatgccaagcagaaaattacctaaatgcactctttcgaaagaaaggggctttgttatgcacctaaagccat

SEQ ID NO: 608136 - DNA, 95 bp, Homo sapiens
tcccaggacctccactaatcaccagaacaaaatgtgcagctctggtcccattttggcagaagaagctgtcctgaagcagaagtgtttactgacca

SEQ ID NO: 608137 - DNA, 82 bp, Homo sapiens
agacgacgagtttgaagagttccctgccgaagatataatgaagatctggaacttgaagatgccattcatacagccatcttaa

SEQ ID NO: 608138 - DNA, 114 bp, Homo sapiens
cctgcggacctaactagctccaggttaggccgagctttgcgggaaagcagcgagctgcctggagttcagcctcagaatccaggagttcattgaactcatccggcagaataagag

SEQ ID NO: 608139 - DNA, 46 bp, Homo sapiens
cttcgttgagttcgaggacccgcgtgtcacaccatgtctgaccgga

SEQ ID NO: 608140 - DNA, 101 bp, Homo sapiens
tgaatggtgatctgtctgagatgtacgctaagactgaacaggatattcagagaagttctctcatgatggagcagtccaagaagtcctccctcatggtggcc

SEQ ID NO: 608141 - DNA, 82 bp, Homo sapiens
gacctgttgctggagtcggccttcctggagctcttcatcctccgcctggcgtacaggccctgggaggagcggggacactgag

SEQ ID NO: 608142 - DNA, 100 bp, Homo sapiens
ggccagggtcaagcggagggctccgacggcgcggacggagcgaagcgccgagccatggcgcaccaaacgggcatccacgaacgtgctggccaaagcgctc

SEQ ID NO: 608143 - DNA, 80 bp, Homo sapiens
gtgaagaataacatgggagagaagcatctttttgtagatctcggcctatgagagctacaagaagaaggactacacccagg

SEQ ID NO: 608144 - DNA, 100 bp, Homo sapiens
ggaccggcggcgctggaggagcgaggcagctgtactaggactgggaacggcctcaaggaataggttctcctagtgtctatcatgcagttatcgtcatctt

SEQ ID NO: 608145 - DNA, 100 bp, Homo sapiens
cggagggactgcaccttctccatcaggtgcagaaggttatcaatactctggctgaccatcatcatcgtgggactgactttggtggaagtccttggttaca

SEQ ID NO: 608146 - DNA, 98 bp, Homo sapiens
acaacagcgaggaagaagaggacgacgacgacgaggaagaggaggtttctgagattggcatggtagcttggaaaatgacctttaaaagtcctgaatat

SEQ ID NO: 608147 - DNA, 50 bp, Homo sapiens
gagcgctgccgccgccgcagcaggtctagatgttgatggaatatatcgag

SEQ ID NO: 608148 - DNA, 100 bp, Homo sapiens
aactgagtgaaaatacagccaagatcttggcaaagcttctccctcagtatttagaccaggctccctacacaccttttctcactgaattgatgtaccagaa

SEQ ID NO: 608149 - DNA, 82 bp, Homo sapiens
cggcagagcaaggggcttacgcagaaggacctggccacggctctgacgcccgctctgcggcttcggtgtttgaacaggccac

SEQ ID NO: 608150 - DNA, 100 bp, Homo sapiens
ccgaggcccctgaatcttcgcccccacttcctctaagctccctgccgccagaagccagccaaggtttccttaatgacaacaaaaaagggagtaatcctac

SEQ ID NO: 608151 - DNA, 83 bp, Homo sapiens
ctgaaggcaaagtgacctgtgcttcctgcctgacacagctcacttcaagaagtgcacaatgtcagaacgtggaattaagtggg

SEQ ID NO: 608152 - DNA, 98 bp, Homo sapiens
aaccctggaaagtttgcagaagtggaaggagcagaacgtgagggtgtaacttacaaaaagataaacattgacgatcttgaggatgaccctgtggtgaa

SEQ ID NO: 608153 - DNA, 100 bp, Homo sapiens
tgaagaaatactctaagatctttgaacagaaggatcgtttgagtcagtccaaagcctcaaaggtagcttttaaatattgccagaaatatggaagtgacaa

SEQ ID NO: 608154 - DNA, 75 bp, Homo sapiens
cggaggcagaggtggaggcgctttgaaagaaggaattacggagatatagaattgctgttccagctgctccgagcc

SEQ ID NO: 608155 - DNA, 91 bp, Homo sapiens
agcccaggcacagccgacgccgcggggtcaaaatgcagatcttcgtgaaaacccttaccggcaagaccatcacccttgaggtggagcccag

SEQ ID NO: 608156 - DNA, 100 bp, Homo sapiens
aacagggacagcacctcatcccctggatgggggaccacaagatcctcatcgacagagcaagtgcaccggcacctggaccaacacgaagtgagatacctgc

SEQ ID NO: 608157 - DNA, 50 bp, Homo sapiens
gtcagttgagctgcctgtggagagatgagcatcaggattttatggatgag

SEQ ID NO: 608158 - DNA, 94 bp, Homo sapiens
ttatggaggaggtgatggtggatataatggatttggaggtgatggcctactgaacttgacgcactggtatttggccatctatacaccattctta

SEQ ID NO: 608159 - DNA, 90 bp, Homo sapiens
gctacacatcttgaaagagaagctcttcctgtgaggatcccaggagggcactcatggtggtttatgggactctggactcctgagaagcgg

SEQ ID NO: 608160 - DNA, 82 bp, Homo sapiens
gaagataccgtgaatctaagaagatcgatcgccacatgtgcttatgggcaacgttccagaccgggggggccgcccaaatgag

SEQ ID NO: 608161 - DNA, 90 bp, Homo sapiens
cgactacctacgctggatcctgtgtgtgtaggagatgcggatgaagaccccatcatggggttccaccagatgttcctattaaagaacatc

SEQ ID NO: 608162 - DNA, 75 bp, Homo sapiens
gtccacccaccgccgccgcctcccagatgagcgggatcgtgtgcagaagaaaaccttcaccaagtgggtcaacaa

SEQ ID NO: 608163 - DNA, 98 bp, Homo sapiens
gcaggatcctggtatccgctaacagaacccttaggagaaatcttgagagtggacagcaattgtgaagatcgccagagagttctgtgtttcatcaccgc

SEQ ID NO: 608164 - DNA, 100 bp, Homo sapiens
tgggcctaatttttggtggggaaaacctgtcgattgttacgacacatatctgggacagaacctctggaaataacctgtatacatgcagaggagacatttc

SEQ ID NO: 608165 - DNA, 90 bp, Homo sapiens
ttttcatttccatttctaccttgtatgcctcaatttgctggatttaagcactgctgcactttatgagattacctggctggtgtttgcttg

SEQ ID NO: 608166 - DNA, 100 bp, Homo sapiens
aatcctctttacatcatagactttcagctacttgaagatagccatcagccgctacgtgactcttttctccagccgagccgctgccgctcatggatttgtg

SEQ ID NO: 608167 - DNA, 100 bp, Homo sapiens
ggaacatgctgagaaactgatgaagctgcagaaccaacgaggtggccgaatcttccttcaggatatcaagctcagtgtggaggctgctggccctgccatc

SEQ ID NO: 608168 - DNA, 100 bp, Homo sapiens
aagctatcaagtcctgaagatgacccaacttgcaaaacaaaggaattttgggccaccattttggattcagcagaatacaaatcatattcccctgaagccc

SEQ ID NO: 608169 - DNA, 100 bp, Homo sapiens
gaccaaacctgtgataacctgtctcaaaaccctcctcatcatctactccttcgtcttctgggatcgggagactcaccactagaagacgatgaagtcgggt

SEQ ID NO: 608170 - DNA, 50 bp, Homo sapiens
gttcaccagcacactgctctgccagaaacagcacttcttctcagtctcag

SEQ ID NO: 608171 - DNA, 75 bp, Homo sapiens
cggggcttgccctggtcttgctcggccgatgaagtgcagaggtttttttctgggaaaccatctgccgtgtgactg

SEQ ID NO: 608172 - DNA, 98 bp, Homo sapiens
gtttgtcatcagaatcagagggtgtctgatgatttgtgagcctcaagtgactactctgtggaatcatctgtccttgcctttgaattagctttccctag

SEQ ID NO: 608173 - DNA, 90 bp, Homo sapiens
gcccgcctagagggagtggagcgttcgcctattgcgggaggagctacagctgctgcaggagcagggctcctatgtgggggaagtagtccg

SEQ ID NO: 608174 - DNA, 100 bp, Homo sapiens
agagagcgaaaccatcttcaagttagcagcgtttattttacaggaacttgaaatgcaggctcgagctcatggactttcccttattccatccacgggtctc

SEQ ID NO: 608175 - DNA, 97 bp, Homo sapiens
aaagcacagtaaatacccactatttctccatcgatgaggagctggtctatgaaaagtatttcatggaaacttggagagagaaaagtgatgaagtgat

SEQ ID NO: 608176 - DNA, 75 bp, Homo sapiens
tgtggggctgggtctcggagtgggagacgtggagtgcagaacatgccgagtttttgcactgcaagtccaaaaagt

SEQ ID NO: 608177 - DNA, 90 bp, Homo sapiens
acaggcctggcgcgctccaaaggcttccgcgtccttgacgcctgcaggtcattctagtcttgactaccttccatgtaccactggtaatta

SEQ ID NO: 608178 - DNA, 82 bp, Homo sapiens
tcgcgtgtctaggtgagtcgcggtgggtcctcgcttgcagttcagcgaccacgcccagctcaacattggcaatgtgctccct

SEQ ID NO: 608179 - DNA, 100 bp, Homo sapiens
gccgacgcctgcagctgctccccggtgcacccgcaacaggcgttttgcaatgcagatgtagccttgaaaagatcttttgaggtcgaggaggtcgagacac

SEQ ID NO: 608180 - DNA, 80 bp, Homo sapiens
ggggtcatcgacagctgcaaggaggccgtcaccttcaaggccgtcagacaagtgctacagttgaaactccagcagcgccg

SEQ ID NO: 608181 - DNA, 73 bp, Homo sapiens
gatgagctatgacttgctaaacaatctgttgggccactgtgcatgtgcgggtcaacgatgtgaacgagtttgc

SEQ ID NO: 608182 - DNA, 50 bp, Homo sapiens
tttactcttggtagaaaaagggagacgctgttggaagctctgactgtggc

SEQ ID NO: 608183 - DNA, 87 bp, Homo sapiens
gggatcttcctgagcagagctctccgggttccccggctcgcggggcccggcgaagggcaggctaccggctctctgaccagttccacg

SEQ ID NO: 608184 - DNA, 74 bp, Homo sapiens
aggaaaggtgtgctgtgcctgaggccagtgccggtggtggtgtgcacattgagccccggtatagacagttcccc

SEQ ID NO: 608185 - DNA, 100 bp, Homo sapiens
catgtttgaggcccgggaatttcttcgaaaaaagcttattgggaagaagaatcagtcggatttgtcagatgaagagctaaatgatgatcttttgcagagt

SEQ ID NO: 608186 - DNA, 82 bp, Homo sapiens
gcggtggtgggggacctgccggcacgcgactccccccgggcccaaagtgtcgtgaaaactacccctaaaagccaaaatggga

SEQ ID NO: 608187 - DNA, 73 bp, Homo sapiens
ctgggttctttactgctggatcgcaggtggtgatctttgtgaagtctgtgcagcggtgcattgccttggccca

SEQ ID NO: 608188 - DNA, 78 bp, Homo sapiens
agaagatcctgctgcccgagcccaggcacttccgttccggcgcccctccggtcatcaacccgctgggcaccagcttcc

SEQ ID NO: 608189 - DNA, 50 bp, Homo sapiens
aaaccccggaactagaactggtgttcctccccgggcagaagaaatcacca

SEQ ID NO: 608190 - DNA, 95 bp, Homo sapiens
aaatcggctgattctgcatctggaaactgccttcatcttgaaagaaaaggtgccgtgagcgatgtggagatgcaggaacactatgatgagttttt

SEQ ID NO: 608191 - DNA, 90 bp, Homo sapiens
gaggattcagggaataggagctggggagcccttctgcgccacaggttgtctgcattcaaaagagcattctattaaagctaccttaatttg

SEQ ID NO: 608192 - DNA, 100 bp, Homo sapiens
taaaaccaatcaccaaagactacattatgaacccaccactgggcaaagaaagtatccctttaaccttctgataacttaagagagattctccaaaatgtgg

SEQ ID NO: 608193 - DNA, 90 bp, Homo sapiens
cacggcacagcacgctcgacttcatgctcggcgccaaaggctgctttgaatgctgcatcaagtgtctgggaggagtcccctacgcctccc

SEQ ID NO: 608194 - DNA, 101 bp, Homo sapiens
agaagatggaggagagtatatgtgtaaagcagtcaacaataaaggatctgcagctagtacctgtattcttaccattgaaatgccttcccagaccttccacc

SEQ ID NO: 608195 - DNA, 98 bp, Homo sapiens
atgaggcgccagcctgcgaaggtggcggcgctgctgctcgggctgctcttggaggtcacacagcggcagtgataaagagcacagggatgtggagagat

SEQ ID NO: 608196 - DNA, 100 bp, Homo sapiens
tgcgcaccaacgcccaggaccagttcctgctgaagcaggttaatgttgaagaaggaaaatgcggaagtcgtcatttgacaagttttataaatgagtattt

SEQ ID NO: 608197 - DNA, 101 bp, Homo sapiens
gcctcagcctcccgagtagttgggactacagggaagcttgtgggctgtgccatcatccatgtcaatggagacagcccagaggaagtggtccgtgccacacg

SEQ ID NO: 608198 - DNA, 75 bp, Homo sapiens
tactcatagattgtgtaggcgttggtcttctgatagcaactttaatgtgatacagtttatgtaacttgatggaag

SEQ ID NO: 608199 - DNA, 83 bp, Homo sapiens
acaccgcctcacagatcgactccaggtcaccctgctgattgccttcatctgtgtgcggagctccctgtggaccaactacagcg

SEQ ID NO: 608200 - DNA, 101 bp, Homo sapiens
cagtggccgctatgaagagctggctcggatgctgatggggctggacctgctggtgttcgcccacgaccatgatccagacatttaatgtggatgcaccatgc

SEQ ID NO: 608201 - DNA, 100 bp, Homo sapiens
tgcggctcggggacccacagacacagccggggtcgggagccgcccggggcagggctcgggagagcgggtgacagagctgaatgaacctctctccaatgaa

SEQ ID NO: 608202 - DNA, 100 bp, Homo sapiens
ccccctttattaccctttgtgtcatcctccacagctccagggaaggcactcaaaagtggggggcaggaaaggaagaaggtagataatgactataatgccc

SEQ ID NO: 608203 - DNA, 83 bp, Homo sapiens
ccgacagccaggcccgggagaagactggagactgatgcatgagggggctacggaggcgcaggagcggtggtgatggtctggga

SEQ ID NO: 608204 - DNA, 100 bp, Homo sapiens
tccaccctcagtgacccggtgcagctagaagtccatatcggtctacatgttcaagtgcgtgtggcggtgctacagattgatcaagtgcatgaactcggtg

SEQ ID NO: 608205 - DNA, 82 bp, Homo sapiens
cccagaccctggagcctcagttggaagcagccgatccagcctgcggagcctgtggggcaggaacttataatcaaaactgtat

SEQ ID NO: 608206 - DNA, 74 bp, Homo sapiens
gctgatgataggggggttccatctcccaacttgtccatagttgatctctctaatgtattagatcttcatgcctt

SEQ ID NO: 608207 - DNA, 75 bp, Homo sapiens
ccgcagccgcccagaccgcgcagcgcgggaggcaggttccgcacggtggtttcagacaccctcacaggttttcta

SEQ ID NO: 608208 - DNA, 74 bp, Homo sapiens
cggcagggatccttctctctcagctctaatatataagtactcgcagaaggaagacagatatgaggaagagatca

SEQ ID NO: 608209 - DNA, 100 bp, Homo sapiens
ggaaaataccagaaagatttttagtggccccaaacggctgcagccagctggaaggacattcaggtacccgggtaggctcctccctgcgacagaccttcag

SEQ ID NO: 608210 - DNA, 90 bp, Homo sapiens
aagggtattgccgctgttactgatatacctttaggcagttccttttagtcttgacagtgttgcaaattccattcactccttattttctga

SEQ ID NO: 608211 - DNA, 95 bp, Homo sapiens
agcagcagtagctatggcagtggcagaagattttaattaggaggatgaaattttgaacagatcaccaagaaacagaaagccacgaagagagtgaa

SEQ ID NO: 608212 - DNA, 75 bp, Homo sapiens
agcattgaagatcagtacaaaaattcttcaagaaatctaaggacttcatagacctcacgttgtcgaagactcaac

SEQ ID NO: 608213 - DNA, 96 bp, Homo sapiens
cgccgggacaccaagaagcagggaaatggaatactcccccagttgcaagaggcgcaggaccgtggaagacttcaacaaattctgcacctttgtctt

SEQ ID NO: 608214 - DNA, 75 bp, Homo sapiens
tctgctgatttacaggtttctgcaaagattgggtttttgaagtatcttgagaattacaaatgctatagaaaaatg

SEQ ID NO: 608215 - DNA, 75 bp, Homo sapiens
ccagagccccgcgtttcagccctagggaaggtggatagatacttctcaagacatcacacagcgtgagtcaatcaa

SEQ ID NO: 608216 - DNA, 75 bp, Homo sapiens
ggggcaagcggaaggtgatgcccaagatggaccaggagcggtggtgccccccccgggcacggggccatgtacaac

SEQ ID NO: 608217 - DNA, 82 bp, Homo sapiens
ccgctggtgaccctgccgctggcgagcgccaccgcatggggctgaagaagatgcagagcagcctgaagctggtggactgtat

SEQ ID NO: 608218 - DNA, 100 bp, Homo sapiens
caagttatttactttcccatcaggtttcctgatgtgagcagataagtttataccatggatagcacaaaggagaagtgtgacagttacaaagatgatcttc

SEQ ID NO: 608219 - DNA, 100 bp, Homo sapiens
cgagctgaccctaggcctccaccctggcaggaatcccaatttgcctccacttagtgagcggaagaatgccaacaaatggaattttcttgagcatgtttct

SEQ ID NO: 608220 - DNA, 98 bp, Homo sapiens
cggctcacctgtgcgggatggaacaaaaggtacagacagtgtttgtgtgttcctgttgtggctaactttaagaagcggtgtttctcagaattgataag

SEQ ID NO: 608221 - DNA, 100 bp, Homo sapiens
aaggatgtgatttccatatttcaagtcattcaaagacagatggctcatttttggacagtacatcacccctcctggcaattgctgcctgcacagccctggg

SEQ ID NO: 608222 - DNA, 96 bp, Homo sapiens
ttctcccagttcctgctacctgcagaatcatgtccctaaggaggaagctggagctccacgaggggaggggccggccatcccaggagacaccccacc

SEQ ID NO: 608223 - DNA, 74 bp, Homo sapiens
acccgaagaagagaccatccatatttccaggatgaatgctatcaagtaagacaagtgtttgcccagaaacttca

SEQ ID NO: 608224 - DNA, 123 bp, Homo sapiens
tggcattgactttttatcaaaaactatgtacttggaggatcgaacagccataggaaaaggatacagagtagagtttcatgaacctgaaacttggtggaaatttgatcctgaagaattagaaaa

SEQ ID NO: 608225 - DNA, 75 bp, Homo sapiens
taactttctcccttgatccgggagtctttccactgggaataactcaagtcacctgtactggaaatcagtttgctg

SEQ ID NO: 608226 - DNA, 75 bp, Homo sapiens
tccaaggaagccacgtgcagacatctacaaccttcgatctcctgacgaaatgtccctcttccagtggaaagccca

SEQ ID NO: 608227 - DNA, 75 bp, Homo sapiens
tccaagaaaatcacctcgtttaatggcacaaggcctatggcatgtctgcgttacctttaaatctgataaaaggca

SEQ ID NO: 608228 - DNA, 100 bp, Homo sapiens
ctcggtgaaatcctgtcctgaagactgtaagtccatggttcttctgcttcatagccagcggcagtacatcttcgaatacgatatgtgggaccgcctgtct

SEQ ID NO: 608229 - DNA, 98 bp, Homo sapiens
gaggcagcaggtgtaggagggaaagaacttgtattccaaacagctttggaggaattttttacatcacttgtgaagcaagaaatggtgaatatgcctcg

SEQ ID NO: 608230 - DNA, 90 bp, Homo sapiens
ctaccgggcccagcacagccagcaccgcacgccctgcaagggagatgactttgggaaattgctgctggctgaggccctcctggagcagtg

SEQ ID NO: 608231 - DNA, 82 bp, Homo sapiens
gccctcgcaacctggcagccgccgccgtggaaggaaagagcatctacggtgagcgcttccccgatgagaacttcaaactgaa

SEQ ID NO: 608232 - DNA, 117 bp, Homo sapiens
ggccaaatggagagaattatgcacctgacagcatctattacctttgccttggaatacaggagtccaagacatctctggcatcatcaataggaagaccaatgacaggggctattcagg

SEQ ID NO: 608233 - DNA, 100 bp, Homo sapiens
gataatggctttatgagaaaacgagaaagccagtctgttgaagaggccctcaaaaagcttggaattcaggtcaaaggtgggaacctaaattattctgcaa

SEQ ID NO: 608234 - DNA, 75 bp, Homo sapiens
gtacgctggttggcatttgctctgagcatcagtcacggggcagcaggatgggtgtggaagcagtgatggcacttt

SEQ ID NO: 608235 - DNA, 100 bp, Homo sapiens
cactacataagcgaggctgtggaagatgctcccagctacagagggtaccgggatgcctgcaccattactgctgctaaatcctgaagatgacctcttacca

SEQ ID NO: 608236 - DNA, 89 bp, Homo sapiens
aatacgaaggtttctggctgggtagtgggcagcagtcagtgacaggtgtaacctctgtggatgacagcaacagttactggaggatacgg

SEQ ID NO: 608237 - DNA, 100 bp, Homo sapiens
tctcctggccattgcccttctggaaggaggcaacaccaccatccagcaaagccgaattgaagatcgtttagaaagactggatgatgctattcatgttctc

SEQ ID NO: 608238 - DNA, 113 bp, Homo sapiens
tggttcaatgggtagcctcaccatgaaatcacagcttcagatcactggcagaggtggaggagacactgaagcgactgcagagccagaagggagtgcagggaatcatcgtcgtg

SEQ ID NO: 608239 - DNA, 75 bp, Homo sapiens
gggattataggcgtgagccaccgtgcctggctgaagcacttttcaggattagaagaggctgtgtatagaaacata

SEQ ID NO: 608240 - DNA, 80 bp, Homo sapiens
gtcgtgggggctgactgtcgctctgcctttgacaggagaggctgcttcttgtagaggtcaaaatgcagatcttcgtgaaa

SEQ ID NO: 608241 - DNA, 97 bp, Homo sapiens
cccgggactccctgtgccttgcttggagctgacgccgacggatattctctaagccgctttcatcatgggagaaatagagcagaggccgaccccagga

SEQ ID NO: 608242 - DNA, 102 bp, Homo sapiens
gatgcaagaagtttctaggaaaggccggacaccaggtgattttcttccacccccacctccacctctagatgattccagtgcccttccatctatctctggaaa

SEQ ID NO: 608243 - DNA, 83 bp, Homo sapiens
gatggcagcgaccgatatagctcgccaggtgacccgggaaaaggagaagatgaaggaagccaaggatgcccgctataccaatg

SEQ ID NO: 608244 - DNA, 100 bp, Homo sapiens
cggcaccaccgctgcaagagccgggatttgcagatttacagaatggctgcacattaatggaaagagaagcataaacctatcttctttcattatggaggga

SEQ ID NO: 608245 - DNA, 100 bp, Homo sapiens
cagcttaatagatccagacacttcattaagtgaattgcgggattacggggcgctgaaagacatcgtgatcaacgcaaacccggcctcccctcccctctcc

SEQ ID NO: 608246 - DNA, 74 bp, Homo sapiens
gacccactggactcctctggaggtatctactgagcgtttcagtcaacaatacagctcgtgttcgacaatattcc

SEQ ID NO: 608247 - DNA, 106 bp, Homo sapiens
aaacaaccttgaggaaccttgacgagtgtccggagtttagaaaacttagggatgggttcgagaacttgtcttggacaattgcaaatcaaatgatggaaaaattgag

SEQ ID NO: 608248 - DNA, 76 bp, Homo sapiens
atcgcactgctcatcttggccatcactatacacaacgttccaggtcgctacgcatttcggatctggaaacctctag

SEQ ID NO: 608249 - DNA, 80 bp, Homo sapiens
tgtccagagttgcttcctgttgacgacagctctcctcagataacgaaggaggcccaacttcattcaataaggagcctgac

SEQ ID NO: 608250 - DNA, 97 bp, Homo sapiens
ggagggatgagggagcctgccctcgcatggtggccagggcacgtcactgcaggccagacggttgatgatgaagcgccggccgtgtaaatgaagatcg

SEQ ID NO: 608251 - DNA, 83 bp, Homo sapiens
aagagaaccctgcggaggagaccggcgaggagaagcagactgaaatcgccaagagattgaatacgatttgtgcacaagtcatc

SEQ ID NO: 608252 - DNA, 100 bp, Homo sapiens
gcaagatggcagccaccacgggctcggaaactatgttccaacttcctgtcaacaatcttggcagtttaagaaaagcccggaaaactgtgaaaaaaatact

SEQ ID NO: 608253 - DNA, 74 bp, Homo sapiens
cggaacatgaggcagcacagcaaggtggtttcctagaaacatgattgtttattggcattgatctcacagtctgg

SEQ ID NO: 608254 - DNA, 82 bp, Homo sapiens
agcttggctctgggagacctgctgcacatcgtcattgacatccctatcaatgtctacaaggcaggccagaaagcagacccag

SEQ ID NO: 608255 - DNA, 100 bp, Homo sapiens
ccgcgccccacttgctcgtgcactttacacacatgaggtttaagttactgagccaggaggaaggcgagtacttcaatgtgcctgtgccaccagaaggaag

SEQ ID NO: 608256 - DNA, 95 bp, Homo sapiens
caccactctcattagtgagaatggtcatgctgccgacaccctgacggccacgaacttccgagtgggaggcaggtggaagtcatcataaagtttct

SEQ ID NO: 608257 - DNA, 100 bp, Homo sapiens
ggcaaatgctggacccaacacaaatggttcccagtttttcatctgcactgccaagactgagtgttatgtgtctcggtaccacgtgaaagactcctcacgc

SEQ ID NO: 608258 - DNA, 100 bp, Homo sapiens
caggctcctcaccaagtacgctgaggccgagaacaccattgaccagctacgcctcggggccaagggacctgatttcccatcgccttctgtccccctaaag

SEQ ID NO: 608259 - DNA, 74 bp, Homo sapiens
cggagctgtgcgagagcctcctcacttgggtcaaaatgcagatcttcgtgaaaacccttaccggcaagaccatc

SEQ ID NO: 608260 - DNA, 100 bp, Homo sapiens
ctccagtcccgcgtcggtcgccgcagtcacggagcgcaccctatttcaatgatattgctgtaggtgcagtatgctgtagggtggatcattcacagaatca

SEQ ID NO: 608261 - DNA, 50 bp, Homo sapiens
agcaaggcccaatgacccaggcgtctaatgctggcgtgctatgcgggaca

SEQ ID NO: 608262 - DNA, 101 bp, Homo sapiens
ccgagtgcctggatctcagcaatggggataccattctggaagacttgcccatccaatctggtctgtgctgagggcaacctggtggtggccggctctggaga

SEQ ID NO: 608263 - DNA, 82 bp, Homo sapiens
ctgccgctgccgctgccgcacctccgtagctgactcgggtggcccagttgaaatccttcccttcctctaccttggaagtgcc

SEQ ID NO: 608264 - DNA, 100 bp, Homo sapiens
tcccgggctccgggaaaactacactggccagctgatcttgcatctttaatggataaaacatttgagagaaagttgcctgttagttctttaacaatatcac

SEQ ID NO: 608265 - DNA, 75 bp, Homo sapiens
acctgctaacagaactggaccttttcggatcccagctggctactgctttgtagaatttgcagatttggccacagc

SEQ ID NO: 608266 - DNA, 112 bp, Homo sapiens
cggcctgcagatgagcctacccctgccagcaagtgctgcagcaagccacaggtgacacaggcagccatgccgcgcagcccaacatccagcgaggacgagatggcccagagct

SEQ ID NO: 608267 - DNA, 100 bp, Homo sapiens
gtaattcagcggctgacacttcaggagcacaagatggtgtggaatcgaaccacccacctttgacgactgcaagaacattgccaacatcatgaagacactc

SEQ ID NO: 608268 - DNA, 74 bp, Homo sapiens
ctacaacttattcctgtccggagacagcctaagggatggcaccaagcattatgaaaagcctaatggaccacacc

SEQ ID NO: 608269 - DNA, 100 bp, Homo sapiens
acctgacttaatagagatggttctcgataaactcagaccagaaaatgtccggtatcttggcctcagctgtccttgaagtcaccatggcgtggtccccacc

SEQ ID NO: 608270 - DNA, 87 bp, Homo sapiens
agctccatggtgggcctcattctagattgctgctaaaattgattcaattcctcacttgaataattccacacctctagtggacccctc

SEQ ID NO: 608271 - DNA, 50 bp, Homo sapiens
cccaggagccggcgcccccgccctgtaggcgcagcccagcctcgaaatgc

SEQ ID NO: 608272 - DNA, 100 bp, Homo sapiens
aaccaaagcctgaggttcgaggctatcattgtactcatcaatgatacacttgatgacatctttgacggttctgatgacgaagaagaaagccaggatattg

SEQ ID NO: 608273 - DNA, 100 bp, Homo sapiens
atcttgattcaaaacatctatcgtaatccccaaaacagtgcacagacggctgacggctcacactgtgactcaggctgtagcaaagctggggatgtctcag

SEQ ID NO: 608274 - DNA, 100 bp, Homo sapiens
ccagaatgagctgctggagtttcgaaacctagagctagaagctttcttgatcatggatggtgaagatataccagatttttcaagtttaaaggaggaaact

SEQ ID NO: 608275 - DNA, 75 bp, Homo sapiens
cggcggcgacaagggtgttcccgaactagagtggaggagaaaagccatactcctgtggcatttgtggcaaatcct

SEQ ID NO: 608276 - DNA, 75 bp, Homo sapiens
ggctactcacagttgaagcctgattgcaggcttaatgccagaccgggagttggaggtgtccgatctcgagttggg

SEQ ID NO: 608277 - DNA, 82 bp, Homo sapiens
gacagtggagtctggcatcttattgcccatagatgagagcagccagatgagtgacctccctgtcaaagtgactcacacagaa

SEQ ID NO: 608278 - DNA, 75 bp, Homo sapiens
cacaccaaagaccaggggaacagtcagaagcactgggtattgtacccctccaatatgtgtttgttatgaccttta

SEQ ID NO: 608279 - DNA, 100 bp, Homo sapiens
gccctgcaatttgaagatacatgagacagcagccaaacccccagaaagccaagacgaacttgaccattatatcaaccaccttctgcaaagcacatcgttg

SEQ ID NO: 608280 - DNA, 101 bp, Homo sapiens
gtctgtgcagtggcacctgcgcgaagctggccaaagcctgcccagacggctcacctgtgcgggatggaacaaaaggaatagccaggccagaagaaggaagg

SEQ ID NO: 608281 - DNA, 75 bp, Homo sapiens
cgcctgaaaggcgactctcctagctgttgcgcagccattggtacctgtattggggaaacatagcatacaagcaag

SEQ ID NO: 608282 - DNA, 75 bp, Homo sapiens
ggggagacacattttatgttgtgtcatttcgaaggagctccttaataagcatttatagtcagtttttggcagcaa

SEQ ID NO: 608283 - DNA, 100 bp, Homo sapiens
tgttcttcctagcttccctgtatgtgatgatgaccgtcaccaactggttcaacactgccccccaggtgttgagtaccagctctccagcccaacaggcaga

SEQ ID NO: 608284 - DNA, 98 bp, Homo sapiens
aggagccggtgctgcagaaccagatccgggagcacgtcatcgccatcgaagatgctttcttcacatgtcgaaaaaatgtccttctggcgaacagctca

SEQ ID NO: 608285 - DNA, 100 bp, Homo sapiens
gtcggtgaagttagttgttctcattctttttcttctggacaacggctgacagtgaagatagtactgtgtccatccagataaaattagaaaatgaaggcag

SEQ ID NO: 608286 - DNA, 87 bp, Homo sapiens
tgatgtgactcgtcggcgaatgcaattaggaactgttctgccggaatttgaaaagtgcctgacagtcttatgaaattcgaatgctag

SEQ ID NO: 608287 - DNA, 98 bp, Homo sapiens
aaagactcagtgcagagagccagagactggcttcaggatgtagagggcctgcagattgattttgtagcccatgatgatattccttattcatctgctgg

SEQ ID NO: 608288 - DNA, 100 bp, Homo sapiens
ggctgcgcggcctgcgcgcgcctcccgggcggattccagccccgagcgggacagcgcggcggggagcgacgagggtgagcccctccagactccgaatagg

SEQ ID NO: 608289 - DNA, 74 bp, Homo sapiens
atctctgcagttacaggaacatcgtctgcttcatggaacaagcacatcatgattgacttggggactggcaacaa

SEQ ID NO: 608290 - DNA, 82 bp, Homo sapiens
gcgagcgccgcccgggcatgcgaagccgtccctccccggaagccccatgtgccactcccctgatctgcagcttcggtaggcc

SEQ ID NO: 608291 - DNA, 100 bp, Homo sapiens
tcgggagaagcagcgcctgttcccggggcagatccaggttcaggctgaagccgacgtagcttctctgaacagacgcatccagctggttgaggaagagttg

SEQ ID NO: 608292 - DNA, 96 bp, Homo sapiens
ccacatttgaagtatatgttgaagtggcctatcccaggacaggtggcactctttcaggcaatggtggcttgctatccgggaaatggaacaggttat

SEQ ID NO: 608293 - DNA, 100 bp, Homo sapiens
caaaaacccaccaagaactacaggaatttctactgaagggaaatgcaataccttatttccagatgactcctatcagcacttctctctgctggaatgatct

SEQ ID NO: 608294 - DNA, 122 bp, Homo sapiens
ggagaagaagatgtcttgggggatgagagtcagacaaccccaaatcgaggtaatcatagcctcctggtattgcacattcatgggaataatgaatttatttggactagaaactaagacctgct

SEQ ID NO: 608295 - DNA, 82 bp, Homo sapiens
cacgcaggctttaagatgatgagcaaaatcatccgggaagcccacgggaccctcaggcgggcaggatgaacgactggcacag

SEQ ID NO: 608296 - DNA, 74 bp, Homo sapiens
ctcgttttccaaaagtacaaattcctctgatgtttcagctaagtcagcaactgaacgaggaagggatgctgttg

SEQ ID NO: 608297 - DNA, 100 bp, Homo sapiens
accccctggtgtggcatctgaagacagagagacttgccactggggtctccagactgtttttgcataaatgcagttccaactacaacgaagattttgtgct

SEQ ID NO: 608298 - DNA, 80 bp, Homo sapiens
cccaaatcccggaaactccagcgtgtctccagccgtgggaaatcctcattgacgattcaatttgttgaaggccaatttgt

SEQ ID NO: 608299 - DNA, 75 bp, Homo sapiens
cagttgtggagagctgattcccaaatctaaagatttcgatggggtcctctatcatatttcaaatcctaatggaga

SEQ ID NO: 608300 - DNA, 100 bp, Homo sapiens
gcgtcccggcgccgtcgcgccactcctccgagaactcgaatcatttatgacagaaagtttctgttggatcgtcgcaattctcccatggctcagaccccac

SEQ ID NO: 608301 - DNA, 100 bp, Homo sapiens
gcccaccagttcgcccgtccccctgccccgttcacaatcaatggtacaacagctccatgaacgtgatctgcacctggttgacggaccggatggacttaca

SEQ ID NO: 608302 - DNA, 83 bp, Homo sapiens
cttggactgagtcctgcaggacacaggagtgagctgagtcgacagaaacttcatacccaagagctgctttctcagctggaaat

SEQ ID NO: 608303 - DNA, 83 bp, Homo sapiens
atgagttcaagatcacatggtgacaatgcagatcttcgtgaagactctgactggtaagaccatcaccctcgaggttgagccca

SEQ ID NO: 608304 - DNA, 100 bp, Homo sapiens
cagaaggattagtagctaatgtgattacagcaggagattatgaccttaacatcagtgatctttaatctcatgaagtacgacagctacagccgcttcttaa

SEQ ID NO: 608305 - DNA, 100 bp, Homo sapiens
cgagcctggaggattgtcactccaacctcttttcgctgattgctcgctgtaagcagctcatctgtgaccccagctacgtaaaagatcgggtagaaaaagt

SEQ ID NO: 608306 - DNA, 100 bp, Homo sapiens
caatcagatactgaatgccgtgaaagtgacgccttcgctcaacgaggacctgcaggtggaagtgatgaaggtgctcaggaacagcccatggaagaatcat

SEQ ID NO: 608307 - DNA, 95 bp, Homo sapiens
gacaaaagcgttattatctggacatcaaaactggaaggcattctgaagtacacatgctgggctcttgcactgtttggtggaaatggtgagacagg

SEQ ID NO: 608308 - DNA, 88 bp, Homo sapiens
cctgctgctgaagatctggaagacgcgctcctgcgccgtgaaaccttctaagcccctttgtagcgttcaaggaagaccagaaactggc

SEQ ID NO: 608309 - DNA, 74 bp, Homo sapiens
cgccgccgccgccggagctaacctcggggaccgagatgcagggccaattcctgtccccccagcagcatggcatc

SEQ ID NO: 608310 - DNA, 100 bp, Homo sapiens
tccatcctcgcattgctgttgaatggaagaaatgttggctatttggcgatgagaggtggtgaacagtgaccatactggtatacaacactatgggacctgg

SEQ ID NO: 608311 - DNA, 98 bp, Homo sapiens
gcggggacagcagccggccagccggggggcactgcccgcccgggctctgaccggtaccgggagtaccagtggatcggactcaacgacaggaccatcga

SEQ ID NO: 608312 - DNA, 100 bp, Homo sapiens
tgttcaccgccaaccccttcgagcaagacgtggacctgtcatttactccatcctttatagtgatgctacaggacgaagaggaatggataaaaacattggc

SEQ ID NO: 608313 - DNA, 82 bp, Homo sapiens
cgaggagataccagtcggtagaggttctgcctcctgggggcattgctggcccccatccgagtgcttctggcctttatcgtcc

SEQ ID NO: 608314 - DNA, 74 bp, Homo sapiens
agccaaaagcatggactcactgagtgctgcagctggggccagtgatgtgcctccatccaagcctacagttaaca

SEQ ID NO: 608315 - DNA, 100 bp, Homo sapiens
ttgtgtaggcgttggtcttctgatagcaactttaatgtggtgttacagggtcttgattatttacataccaagtgccgtatcatccacactgacattaaac

SEQ ID NO: 608316 - DNA, 100 bp, Homo sapiens
agctggacaaagcgtccatcatccgcctcaccacgagctacctgaagatgcgcgccgtcttccccgaagctgagatctgtatctgtggacctgaatgttg

SEQ ID NO: 608317 - DNA, 83 bp, Homo sapiens
ctgagcccgcccttgatcttcgctgtggcatggcggacgaggggaagtcgtacagcgaactgaaggcagaagctagtctaatg

SEQ ID NO: 608318 - DNA, 74 bp, Homo sapiens
aggaaattgtccataaacttctgggagacaaattcaaggtgggcccatctggggcagggaagagcacaattttg

SEQ ID NO: 608319 - DNA, 98 bp, Homo sapiens
atccctttggtgtggacatctgctgccggaaggggtcccgaagccccctgcaggaactctacaacccaatccagaatcttgcctcctggaatccttca

SEQ ID NO: 608320 - DNA, 98 bp, Homo sapiens
gggcagcgcagcgccgagcggggcccgcgggcccatgaggaggcctggggaccatgggctccaggatcaagttctggctccttggcagcaatggctgt

SEQ ID NO: 608321 - DNA, 82 bp, Homo sapiens
atgtggactcagccactttgctgcactgaccacctgtggacatctctacagcaatgagtgaacgggcacttgctcagaaaag

SEQ ID NO: 608322 - DNA, 100 bp, Homo sapiens
aaacaagactggggctgctcccatcattgatgtggtgcgatcggaatctctgaaggaagaagatgaatcagatgatgataatatgtaacatttactccag

SEQ ID NO: 608323 - DNA, 75 bp, Homo sapiens
gatgatgctaccccaccaccagtgattgctccacgcccagagcacacaaaatctagccgagactgtctgaagctg

SEQ ID NO: 608324 - DNA, 75 bp, Homo sapiens
ctgttacaatcaaggtctatgaaggtgaatgaaaactttgccattgatttgatagcagagcagcccgtgagcgag

SEQ ID NO: 608325 - DNA, 100 bp, Homo sapiens
tccagcaccctcagggtccacgccatccacgcctgtagagtttgattcccgaaggaccttaactagaactacagttcctgaggaagaactaaatccaaag

SEQ ID NO: 608326 - DNA, 90 bp, Homo sapiens
ctgattctttaagaaaatcagataacttgtactggagagaaatcctacaagtgtgatatgatggtaattccctgctaagtagcattgaat

SEQ ID NO: 608327 - DNA, 100 bp, Homo sapiens
tgatggcatgcctgtaaagaacttgcagttgaaggagtataacacagccttcacagttgttgatcacatagcatggtcatccactcacagcttaaaaaaa

SEQ ID NO: 608328 - DNA, 100 bp, Homo sapiens
aggagttggtggtgaccccgcccagttggcccagaggatctcttctaacatccagaagatcacacagtgttgtgctgtcatctatatgatctcagtattt

SEQ ID NO: 608329 - DNA, 96 bp, Homo sapiens
atttgatttggaacagcagtggcaagatctcatgtccatcatggaaatgcaggttttgcagacattgggtacagaaacttaccggcctagttctgc

SEQ ID NO: 608330 - DNA, 83 bp, Homo sapiens
gggaaccctggtcaccgtctcctcaggcctgtcatctttacttcagagtgttactgggaacccagttccagccagtgaagctg

SEQ ID NO: 608331 - DNA, 101 bp, Homo sapiens
gcggaagctggtgggcactcagcaccctctgcttaccacagccaggagattgatggcaacgctctgctgttgctgaagagtgacatggtcatgaagtacct

SEQ ID NO: 608332 - DNA, 73 bp, Homo sapiens
tccgaggtgcctttctccaaaaggtgcagctcagtggaagatgatgacaaccagaagacatgagctaaggttt

SEQ ID NO: 608333 - DNA, 100 bp, Homo sapiens
gctaatggagcaatacgtttccattgtgatcccaccttctgggcaaagaatgtagtcaatttagatcctgataacttaagtgactctctcttttccggtg

SEQ ID NO: 608334 - DNA, 90 bp, Homo sapiens
cgatgtggtaatggcggcgaccgagccggagctgctcgacgaccaagaggcgaagaggtgaatccgccatactacatcccgctggttgag

SEQ ID NO: 608335 - DNA, 50 bp, Homo sapiens
tcttctatcttattaaatgggatgaactgcatgaagtcatcaatatcaac

SEQ ID NO: 608336 - DNA, 83 bp, Homo sapiens
gtggaagctgagcgcgtggtggagttttcctgtgcctggtccgacccccagtggcactaacgtgggatcctcagggcgctctc

SEQ ID NO: 608337 - DNA, 75 bp, Homo sapiens
tgatataggaatggtgcttctcctgagacagccccatatcagcagctattcaagggaggtaatgccactgctcct

SEQ ID NO: 608338 - DNA, 100 bp, Homo sapiens
gtggcacctgcgcgaagctggccaaagcctgcccagacggctcacctgtgcgggatggaacaaaagcaggcgcgtcgggacgccccgaggcatcctcccc

SEQ ID NO: 608339 - DNA, 99 bp, Homo sapiens
cgtggccggacccccacccgccgaggggcccagggaggacgcgggtggtttataaaatcctccaatgaagctactaacattactccaaagcataatatg

SEQ ID NO: 608340 - DNA, 87 bp, Homo sapiens
aaaattcaaagtcgaatatcatgctggtggctctacccagaattcaattaaagtggctcaggtccaagacaactttgacaagattga

SEQ ID NO: 608341 - DNA, 100 bp, Homo sapiens
attttctgtggcatcctgaagttaatggttctatgaaacagtgtatcaaagtgtggactgaggtaaatcagaagactgaagcacggcatatactcacctt

SEQ ID NO: 608342 - DNA, 100 bp, Homo sapiens
acccccaccagccagcgctcccgtgggtggaattggaaaatggatataccttatttgattatgatgttggactgaatgatataattcagctgctagttcg

SEQ ID NO: 608343 - DNA, 83 bp, Homo sapiens
cgctcacctgcgctgtgatgcctgcagagctgtggcttaccaggtgggcatgacggctcccgggacccggcggcacatctatg

SEQ ID NO: 608344 - DNA, 99 bp, Homo sapiens
tcgcctgctgtcctctggagcgctgttcctctgtcatgcttcttggcatgatggcacgaaatgctccacctgtaagaacagaaaatcgtcttatagttg

SEQ ID NO: 608345 - DNA, 71 bp, Homo sapiens
acctggctggccatcaagtgctcgcccagcctgcacgtcgacgacaggaatgacgggacagagtttggcgg

SEQ ID NO: 608346 - DNA, 75 bp, Homo sapiens
ggtcagagcctcccaaagcagagacccaggagggagacccttgtccccggccaatgtccctgctctgcctggcga

SEQ ID NO: 608347 - DNA, 50 bp, Homo sapiens
acagaaagtcagcctcttgtgtgcacgatctgattttctggagagatgtg

SEQ ID NO: 608348 - DNA, 88 bp, Homo sapiens
accttattaatctcagggaactggatgtcagcaagaatgccctgtgtgtccaaatgctgggagaacatcaccccttggatgaattgcc

SEQ ID NO: 608349 - DNA, 90 bp, Homo sapiens
gtgacagtccatatgtaaccaaatattatggatcctatctgaagttttttgtagcatcagatccaacagttaaaacagatcgactgtggc

SEQ ID NO: 608350 - DNA, 80 bp, Homo sapiens
tgagctcgggctccccgagcagtttgagtccccttgcccgctccttcagactgtgccctgtccacggtgcctcctgcatg

SEQ ID NO: 608351 - DNA, 82 bp, Homo sapiens
atggttccccttctactacatgctgaaggttgtggaaaatgcccttaaagtgaacccaatactaggtccacaaatgtttcaa

SEQ ID NO: 608352 - DNA, 74 bp, Homo sapiens
gctttgtctccttcgacttggagtctttgtccaggacggttgcttatggaaccacagagaacagtcccgtgaca

SEQ ID NO: 608353 - DNA, 75 bp, Homo sapiens
gaagaatattcccaagtccttcacccgggttatgaagacagtatggagtttccagaccatagtagacatttgcta

SEQ ID NO: 608354 - DNA, 100 bp, Homo sapiens
cctttgtgaggtccactccagatgggacagggggacctcgggggccggaagaccctccagcagagatggacgacgtttttgaaagctgacctgctctgtc

SEQ ID NO: 608355 - DNA, 82 bp, Homo sapiens
ctggagcctcagttggaagcagccgatccagcctgcggagcctgtggggcagcacaaacacagagcagtctaaagcaaccga

SEQ ID NO: 608356 - DNA, 100 bp, Homo sapiens
gcgtcacattcccgtccgacgaggatatcgtgtctggagcagtggagcccaaagacccctggagacatgatgccttcaattaagttgcagagttctgatg

SEQ ID NO: 608357 - DNA, 90 bp, Homo sapiens
attgatgatgaacgtctccggaaagagttttctccatttggtacaatcactagtgcaaaggaaaatcgtgaagtcgatagaaatgaaggc

SEQ ID NO: 608358 - DNA, 50 bp, Homo sapiens
cttctccttcacagtaaagtggctgacttacagattccagtctgctgtta

SEQ ID NO: 608359 - DNA, 96 bp, Homo sapiens
atctcttcaattctgatgaagatgaactaacactcattcttggaatcccagaacaggccttaagtcttctccacatggccatcgagcccatcttgg

SEQ ID NO: 608360 - DNA, 75 bp, Homo sapiens
tgggagaaatccccactcctccaagaaccaacccccaaattggctgggacaggtcttcatcctccaggtccacct

SEQ ID NO: 608361 - DNA, 96 bp, Homo sapiens
ttcggctgttacggacgttttataccagagagctctctaacttttatttcagtataatcaaagatagttttaacttctagtcatggcgaatgatcg

SEQ ID NO: 608362 - DNA, 75 bp, Homo sapiens
ggctttcgcatttgggaccctgcaggaacccttaggagaaatcttgagagtggacagcaattgtgaagatcgcca

SEQ ID NO: 608363 - DNA, 75 bp, Homo sapiens
caagtctgcatggctgttgacataggcgggaactgtctgggacctttgctcatctgtgtcagcaagttgacgtca

SEQ ID NO: 608364 - DNA, 50 bp, Homo sapiens
ttcgagactactttcccatccagccccccgaatccaagcccaacttcacc

SEQ ID NO: 608365 - DNA, 74 bp, Homo sapiens
atgataactttggcgtgctgggcctggacctctggcaggaatgtatcctgtcaggtataatgtcagtgaatggc

SEQ ID NO: 608366 - DNA, 126 bp, Homo sapiens
agtttagcaatggaaaagataaagtgttttggttttgatatggattatacccttgctgatggactagaggcttttaccagatttcttaaaactgaattcagtgaagaaaatattgaattttggata

SEQ ID NO: 608367 - DNA, 75 bp, Homo sapiens
tccgaagttgagcttggaggaaatggtttaaagagatggcccactgcgtgaccttggttcagctgtccatttcct

SEQ ID NO: 608368 - DNA, 100 bp, Homo sapiens
acagactggccgttgctgtggagacgcctggtagatataatctgtggtgatcacctgttggagcagtatcaaactctaagggaaatccgacgtgcaatag

SEQ ID NO: 608369 - DNA, 82 bp, Homo sapiens
ctagcaagtgcgtctgaaaaacgtccagaggaccagaggttaatttattctgggaagctgttgttggatcaccaatgtctca

SEQ ID NO: 608370 - DNA, 83 bp, Homo sapiens
atttgatttccggagtcagtcattttactgtcaagacatttcttcggcattctgcaacaggacatgggcaagttttgcctcac

SEQ ID NO: 608371 - DNA, 85 bp, Homo sapiens
ccaacgtggtcccttcacccgggctccgctcttgccttctccacacttgtttgattcatgacagatgctgcccgccgagagcagg

SEQ ID NO: 608372 - DNA, 100 bp, Homo sapiens
gggcgctgacgccgcggacctccctgcgaccgtcgcggaccatgggcgacaaagggacccggcatggaagaggagatggttcgtgttacgcagtggccgt

SEQ ID NO: 608373 - DNA, 88 bp, Homo sapiens
ggggctcagctcgcagcgcatccccgcgcacagcatccctctctacctgccaacatcctgtattagagaacttgtggccggaggtgtg

SEQ ID NO: 608374 - DNA, 80 bp, Homo sapiens
acattggctgacatcacagttgtctgcaccctgttgtggctctataagcaggaaaaaggtcactggtcagaacagcaaga

SEQ ID NO: 608375 - DNA, 76 bp, Homo sapiens
gtttcatctgccactgccccaagtgggctcgggatgagtttgaaggcctcttcaagcagccagcagaaaatgtcaa

SEQ ID NO: 608376 - DNA, 75 bp, Homo sapiens
ttccacgtcatccgcatcaacaagatgttgtcctgtgctggggctgacagcttttcctccgcaaccatgtctgac

SEQ ID NO: 608377 - DNA, 97 bp, Homo sapiens
aataaagtttatcacgccgggcatggcggacaccgacctgttcatggaatgtgaggaggaggagttggagccatggcagaaaatcagtgatgtcatt

SEQ ID NO: 608378 - DNA, 82 bp, Homo sapiens
cgctacgggaacatcaccttgcccatgtctcacgcgggtgtcagctgtgatgcatgtttaaaaggaaattttcgaggtcgca

SEQ ID NO: 608379 - DNA, 75 bp, Homo sapiens
cgcgaggcagagcgggagcgcgcagccaggtgttagtccagaagtgaatgaactattgatggaagcccagctgct

SEQ ID NO: 608380 - DNA, 90 bp, Homo sapiens
aacggaacttgccgcgtcgaggactgtcggtcttactgttaacagtcccaggaatggaagagaccacatcagaggcagacaaaaaccttt

SEQ ID NO: 608381 - DNA, 100 bp, Homo sapiens
ccccatcagctactctcaccgtcaagtttctctccaagtatcaccttttgccatgatagcatttctttcattggacagttccttacaagggctccactca

SEQ ID NO: 608382 - DNA, 74 bp, Homo sapiens
aggaaaaacctgtatgtggaaccacctgtggctttcttcctccagaagaaataaaagaaagatttgacagcaac

SEQ ID NO: 608383 - DNA, 101 bp, Homo sapiens
gaagaattgcgtatgagaaggggattcgggttcgtaactttcgagaatagtgctgatgcagacagggccagggagaaattacacggcaccgtggtagaggg

SEQ ID NO: 608384 - DNA, 82 bp, Homo sapiens
ggaccacggtcaccgtctcctcagggtcgggtgtgctgacagccggctgttaagccctgcctgccccgcgccaaaggaagtg

SEQ ID NO: 608385 - DNA, 82 bp, Homo sapiens
gagaagcgcagcaacgtgcggtgggaccacgagagcggcgccatgttttggaagtttgacctgcacacaagctcgcacctgg

SEQ ID NO: 608386 - DNA, 74 bp, Homo sapiens
ggatgggcacaaaatccagatgaaagaccatctttcttaaaggctgggaggcggcagaatgcagccagaggagg

SEQ ID NO: 608387 - DNA, 109 bp, Homo sapiens
gcgcctggtgatcggctccttaccagctcacctctcaccgcgcatgtttggagttactggggcttccggatgcagatgacgatgcgtttgaagagtacagtgctgacgt

SEQ ID NO: 608388 - DNA, 82 bp, Homo sapiens
cggccaacttcggcaagatccagatcgggatttacgtggagatcaagcgcagcgatgcaaaatgatgcttcaacacccaggc

SEQ ID NO: 608389 - DNA, 108 bp, Homo sapiens
ttccaagctggccgtggctctcttggcagccttcctgatttctgcagctctgtgtgaaggactcctgatagttcaggatgcttcagagagggcagcacttatacctgg

SEQ ID NO: 608390 - DNA, 75 bp, Homo sapiens
ctcaagccttattgaagagataggaactcttggttgggataagtacggattttcaaatatgcgctatatttcttc

SEQ ID NO: 608391 - DNA, 100 bp, Homo sapiens
cttctcccttctttgaactggaccccgcgagcaccagagtcggcgtaactatcgcctgacaggtactatactggcaattgctggagaagattttgcaatt

SEQ ID NO: 608392 - DNA, 100 bp, Homo sapiens
atcagctaccctctgcacttccccctgtcatgaaacagcaaccagttgctatttctagcgcaccagcatttggataaatgctgtatccaatgctcaggtg

SEQ ID NO: 608393 - DNA, 74 bp, Homo sapiens
tgcacgaggtctatgagaacaagacggacgtcatcctgatcttggaactaggatgtactgagtaaagatgctgg

SEQ ID NO: 608394 - DNA, 51 bp, Homo sapiens
gaaaaggcctaagaattttggcattgtaataaaagactagtggccttagtg

SEQ ID NO: 608395 - DNA, 75 bp, Homo sapiens
ccgcagcccgtgccgccgccgcctcctgggaaggtccaggaggcccaggaggtcctgggggacccatgggtcgca

SEQ ID NO: 608396 - DNA, 74 bp, Homo sapiens
cgcctgttcccggggcagatccaggttcagtgccggtggtggtgtgcacattgagccccggtatagacagttcc

SEQ ID NO: 608397 - DNA, 98 bp, Homo sapiens
atctggaaagatgttagaattgaagcctataatatttgtcacctgaactacttcacattttccccaatatatggtccagaggtgtccttctaaagctg

SEQ ID NO: 608398 - DNA, 75 bp, Homo sapiens
gcggaaaggataagcctcgacttagaagctaccgagttaccctaagaaagcactggtgaccccggcagccctgag

SEQ ID NO: 608399 - DNA, 50 bp, Homo sapiens
gcgttggctatgtgcccatcacagccgccgccatgtctgcgcatctgcaa

SEQ ID NO: 608400 - DNA, 100 bp, Homo sapiens
ctgggccggaagatcggcagcggctccttcggagacatctatctcggatattcaaatagaagccttgctgatgagagcctgtgagcccataattcagaac

SEQ ID NO: 608401 - DNA, 82 bp, Homo sapiens
cgaggtctacgacgacggcaccaacaccttcttctgggtggtgaaggaggagatctttgatgacaatgccaagcttccctgc

SEQ ID NO: 608402 - DNA, 75 bp, Homo sapiens
actttgagaaagtgcaggagcaactgggaaatgatgggtgtcgtagtcattcttcagcacaattcttaattggag

SEQ ID NO: 608403 - DNA, 100 bp, Homo sapiens
agggtcgacatgttaaaacgggtcagttggcagccatcaaagttatggatgtcactgagttagagatgtttatgattacttccgagctgtcctgcagcgt

SEQ ID NO: 608404 - DNA, 74 bp, Homo sapiens
aagaagagcagttcccaggatctgcataaagcaggggaaatgctgtctgtagctgagcacttcctggagcagca

SEQ ID NO: 608405 - DNA, 100 bp, Homo sapiens
accgaagacgaccatgacgagctctagctggatgggcgcagaggcccggaggctgtttgatgtcctgcacgagcccttcttgaaagtaccctgatgaccc

SEQ ID NO: 608406 - DNA, 75 bp, Homo sapiens
acaccaacaggaatgcggcttcccccacatcagtcaggcagataaaacgtcactgtgcagagccttttacagaat

SEQ ID NO: 608407 - DNA, 82 bp, Homo sapiens
tcccatatctggacatctggaacatccatgaagcctaaagaaactgttccaactcttgctccaaaaactctttcagtagcag

SEQ ID NO: 608408 - DNA, 50 bp, Homo sapiens
tcttcctataaatagcaatccaggatactcgatactccaagctattatgg

SEQ ID NO: 608409 - DNA, 75 bp, Homo sapiens
ctggatgcacagccccggcgctgccttccttgaatccagaagctggcaaacagcatcagccatgcagacctattg

SEQ ID NO: 608410 - DNA, 100 bp, Homo sapiens
ccacccgcgcctgggaccatggccactgactcatgggccctggcggtggacgagcaggaagctgcggctgagtcggaagcaaggcagcgaagacaacctc

SEQ ID NO: 608411 - DNA, 75 bp, Homo sapiens
atgatgtcttcagcaccatggcaggcctggaagaagctgatgctgagaattcagtgacgcgcagcgcccccatca

SEQ ID NO: 608412 - DNA, 83 bp, Homo sapiens
cgggacaccgcacagccgggaaatgccctcccaggcccaatacttcaaagcatcctacctctgctcaatatatattacttgga

SEQ ID NO: 608413 - DNA, 90 bp, Homo sapiens
gtcgcagtccagccgccgcctgccctcagccgcccgctggccgggagcggagcccctgtgggaagaaggtagataatgactataatgccc

SEQ ID NO: 608414 - DNA, 89 bp, Homo sapiens
attggagacaggcacagatgtcaggacagttaaagaggacttacaaagtacccaagcatctagtctggaactgacagagataagtagag

SEQ ID NO: 608415 - DNA, 82 bp, Homo sapiens
cggagcccaaacccggggcaggcgggcagctgtgcccgggcggcacggccaggtttacccaaggtccagcctagcccctagg

SEQ ID NO: 608416 - DNA, 100 bp, Homo sapiens
gctcaatgcagaccctcacaatgtcgttgttctacacaacaagggaggtcctggacacctctatctcctcaagaacaaggtggccacctttgccaaagtg

SEQ ID NO: 608417 - DNA, 75 bp, Homo sapiens
tcaacgccgtcaaatctctcatattgggaaaggttttaggtggctttctagaagatgaccatagaggaccttcca

SEQ ID NO: 608418 - DNA, 83 bp, Homo sapiens
atgagggaaatcgtgcacttgcaggccgggcagtgcggcaaccaaatcggcgccaagcgtgagtgcatctccatccacgttgg

SEQ ID NO: 608419 - DNA, 83 bp, Homo sapiens
cggggatgtggacgaaggggccgacctcctaggaaggtgctcgggtcttcggggcactgggtcccatcggtccctcctcacct

SEQ ID NO: 608420 - DNA, 75 bp, Homo sapiens
gaagctgatcgagcccctcaccaatctcatccacagggccaattcctgtccccccagcagcatggcatcgtgtgc

SEQ ID NO: 608421 - DNA, 100 bp, Homo sapiens
tttcctatctgcatgcgtttgctgagagtagtatctgttctgattaagcagttttacagtcttttggaggagatgttaaagtaacccatcttgcaggacg

SEQ ID NO: 608422 - DNA, 98 bp, Homo sapiens
cctgcacggacggtgttggttgggttggttgaatctggcgatgtggaacccatggatatggagggctgactatatacaccatgttttttcctggcaca

SEQ ID NO: 608423 - DNA, 75 bp, Homo sapiens
atcaactcagtgatcctgattatattaatcagtatgtcatatggatgctctttcaccatgcctggatcacttcct

SEQ ID NO: 608424 - DNA, 80 bp, Homo sapiens
atgttgtggccggtggtgccagactgcacgctccattctagggaaggggctgtgcctgcgcccagaagcagctacacttc

SEQ ID NO: 608425 - DNA, 101 bp, Homo sapiens
taaagccatattggagtagcgaggaatctgattccaagcaaaaaccaggtttgaagatgccgcatttggattggatgaattccaaattctgcttgcttgct

SEQ ID NO: 608426 - DNA, 51 bp, Homo sapiens
cttattattggccctccagatacactttaaacctttcagctcttggggcat

SEQ ID NO: 608427 - DNA, 100 bp, Homo sapiens
ggcaatttcactgggtccacacatgtctgctggagtttgttggagttccactccagaccctgtttgcctgggtatcaccagcagaggctgcagaacagca

SEQ ID NO: 608428 - DNA, 50 bp, Homo sapiens
gattgttctacagaatgccatgcaatttgaatcaacccatagaagtgaca

SEQ ID NO: 608429 - DNA, 113 bp, Homo sapiens
ctcctacttccagaaaaagtgctcctgggactccaggataccagggacattgctgtccggaacatcctggtggcctcccctgagtgtgtgaagctgggggactttggtctttc

SEQ ID NO: 608430 - DNA, 125 bp, Homo sapiens
aaggaacttacgcacttaaaataattgggcagaagagaagcagtgaaggagtgcagaggcatcacctgaaaggaaattggccttgcctctctgggtgcacctgatgaatacattgaaaagctcgc

SEQ ID NO: 608431 - DNA, 88 bp, Homo sapiens
tatgtccaccagtatagctctgggaaatttgacaatgcactgccgttaattaaggaaaagttgagccagggcgtgaccctcgtcgtgg

SEQ ID NO: 608432 - DNA, 100 bp, Homo sapiens
caaacaggagcttgatgatatcctcaaatttggcactgaggaactattcaaggatgaagccactgatggagcttcttctgcacggtacctgagatcctgg

SEQ ID NO: 608433 - DNA, 100 bp, Homo sapiens
agccagcccgagcaagtaaagattgctgatgactatcagccagttcgtctgctcagtaaacctggggaactgagaagagaatatgaagaggaaataagca

SEQ ID NO: 608434 - DNA, 110 bp, Homo sapiens
aagtgagctggaaggtcttggagcgaagagctcggaccaagcgctcagcatgctacaagtgaaaactgatgagaaactgaatgtgtctgatgagaatacagcaagttgcc

SEQ ID NO: 608435 - DNA, 101 bp, Homo sapiens
gaaaacgtagggaccacatcaaagacagctttcacagtttgcgggactcagtcccatcactccaaggagagaaggtggcacaagaatggctcaactctcca

SEQ ID NO: 608436 - DNA, 100 bp, Homo sapiens
ggaacagtacgggaaattgggtcacaagctgtttggtcactctcatcttgcaaaccagaatatccaaggtatctccaagcacccaattcagattactaca

SEQ ID NO: 608437 - DNA, 83 bp, Homo sapiens
ccggcaggatggcggcggacacgcaggtttgcctgcaatgagatttcattctctacatttaaaggacatcctttctgagctgc

SEQ ID NO: 608438 - DNA, 100 bp, Homo sapiens
cggaggagaagccggaggaggacaacgactaccaccgcagcgacgagcaggtctataacttgacccaggagttcttccggcacgataaaccagtcaatgc

SEQ ID NO: 608439 - DNA, 75 bp, Homo sapiens
ggaatttcaacttgccaatgtgcaaagctgcagaaaccacagtggtagagccttctttgaatcctggggggagcc

SEQ ID NO: 608440 - DNA, 83 bp, Homo sapiens
ctggaagagctgtcttgttggcaggacctcctggaactggcaagaccatggcaaaagttataaccaccgtactgaagttccct

SEQ ID NO: 608441 - DNA, 98 bp, Homo sapiens
agtgccctgagggccttcgagagctaccgcgccagacaggtcagcccaaggccaaccccactgtcactctgttcccgccctcctctgaggagctccaa

SEQ ID NO: 608442 - DNA, 73 bp, Homo sapiens
gggggactgcaaaggccaatgttggtgctggcaaaaaggaaaccgtggctgccaggctttctgtttcactctt

SEQ ID NO: 608443 - DNA, 100 bp, Homo sapiens
cataatccaagcggatgagcccacgactttaaccaccaatgcgctggacttgaattcagtgcttgggaagcatgattttgaagtcagaggagatgtggtc

SEQ ID NO: 608444 - DNA, 80 bp, Homo sapiens
agccgggatttgggtcgcagttcttgtttgtggatcgctgtgatcgtcacttgtctcacagaaagttctccgctcccaga

SEQ ID NO: 608445 - DNA, 120 bp, Homo sapiens
aagactgttgcccaaaactacagttctgtcactcacttacacagtattgggaaatctgtgaaagtttgccaaggcacgagtaacaagctcacgcagttgggcacttttgaagatcatttt

SEQ ID NO: 608446 - DNA, 100 bp, Homo sapiens
cgggagcaggagcccgcggccggccagccgaagatggtggcggctactcctcctggccaggtcagagcagcccaccatgggatggggagggggtggaggc

SEQ ID NO: 608447 - DNA, 82 bp, Homo sapiens
ccagaaacgggtcctgctgctcaccaaggtgagaagccctaccactgcaactgggacggctgcggctggaagtttgcgcgct

SEQ ID NO: 608448 - DNA, 90 bp, Homo sapiens
gctatgaaaagagtacgagaagcacagtccctaatttctgctgctatagaaccagcttgacaaaagtaagctgaagccaggaacaagagt

SEQ ID NO: 608449 - DNA, 118 bp, Homo sapiens
tcaaggcccaggctgctttcttcggtagctaccgaaacgctctgaaaatcgagccgaatatggacggagccttgaagatgacattcgctctgacacatcgttcatgttccagcgagtg

SEQ ID NO: 608450 - DNA, 100 bp, Homo sapiens
aggaggaggactatgagcagtggctggagatcaaagccttgttgtcctcctggtgcgaagagctcggccgcctgctgctgctccgacatcagaagagccg

SEQ ID NO: 608451 - DNA, 82 bp, Homo sapiens
tccactgttcctgccacagcggcttcgagctctcctctgatggcaggacctgccaagggctccacgtgttccccacgtttgt

SEQ ID NO: 608452 - DNA, 89 bp, Homo sapiens
cacagtttttcactcaagaggaggggccgggcatcgatggcatgaccacctcagagagggtctacgaccccttccgctttgacccagag

SEQ ID NO: 608453 - DNA, 100 bp, Homo sapiens
gtttggacttactcgcaaatgaaggatacttgaatccacaaaatgatacagtgattttaagacctcagcagggcccaggttccagcccagatcccagcat

SEQ ID NO: 608454 - DNA, 75 bp, Homo sapiens
ataattaaagagtaaagttgtgctcaacggtattgatggtccagctgctgtcctgaaaccagacgaagttcatgc

SEQ ID NO: 608455 - DNA, 100 bp, Homo sapiens
gctggacgacagcgagtacacctgcaccatccaggaagaccaacactgtcatctgaagttggaatcatcatctgtgatattgctaatccagcctcgcttg

SEQ ID NO: 608456 - DNA, 78 bp, Homo sapiens
ccctgcctgcctgaggaggcctcggttggatgcgaaggagctgcagcatccagatctacgaactgcgtgtgatggaga

SEQ ID NO: 608457 - DNA, 100 bp, Homo sapiens
atggtgtccaacatgctagcacaggacagccacctgctgtcgggccagctgcccacggtttggtgcacctcgatttggaggaagtagggcagggccctta

SEQ ID NO: 608458 - DNA, 129 bp, Homo sapiens
ctgaagaaggctctgtgcaatcctcacattcaagctgataggctgcgctaccggaatgtcatccagcgagtgattagggagcatttcctgaagacgtagtcatgcagcacgtcagcagctcccagagca

SEQ ID NO: 608459 - DNA, 100 bp, Homo sapiens
gatggtggtggctgggaagctccaggaccgggggcctgatgtgctcacagccacagtcagtgggaagctgggaaagccaccagggtgggtggcgagcctg

SEQ ID NO: 608460 - DNA, 100 bp, Homo sapiens
gcatccaagttccagtttgtggcctcctaccaggagctcatggttgagtgtacgaagaaatggtgcgtataacccgtatatagagataattgaacaaccc

SEQ ID NO: 608461 - DNA, 74 bp, Homo sapiens
gctggttgttccgttgcgagctgcagctgcgatctctgtggtaggcccaggcctccagctaaaccagaaggccc

SEQ ID NO: 608462 - DNA, 93 bp, Homo sapiens
agggactcacagctgatgacctgctgctcgtgctgatctcagggatacccacccaccatcccagggtctacaacatccacagccggaccgtca

SEQ ID NO: 608463 - DNA, 100 bp, Homo sapiens
cagagggtggcccatgagccggttgcgccacccgaggacaagctcccggagccctgcctgttccctgtccatccaggccagcagctgaaggagcctcacc

SEQ ID NO: 608464 - DNA, 100 bp, Homo sapiens
ttgcaccacgcccggggggacgctcttctccaccacaccgggagataattcgtgtccagtccccggatggagtgaagcggatcacagcaacaaagagaga

SEQ ID NO: 608465 - DNA, 82 bp, Homo sapiens
gttctctcgatcagggcatacatctttcttcgacaaagggttgacatcatggacatatgtgagtccatcctggagaggaagc

SEQ ID NO: 608466 - DNA, 75 bp, Homo sapiens
agaggaattacgggaacagaaagaaaagtccgaaagagctgtactcccctagcatgacaatgagcgtgtgatcca

SEQ ID NO: 608467 - DNA, 99 bp, Homo sapiens
ggctcatcctgtccatcgtgtgcctgatgatcacgcagctggctggcttcagtggaccagagctcgaagagaaacatcgggaggcccaagtctcagccc

SEQ ID NO: 608468 - DNA, 90 bp, Homo sapiens
cgcggcccggcccgcagcgtggggccccgagcgcgaatgcttcagacatgcctgaaacaatcaccagccgggatgccgcccgcttcccca

SEQ ID NO: 608469 - DNA, 85 bp, Homo sapiens
gtcatcatgtcgcgttacgggcggtacggaggagtgcctccggagccagcgtggtggccatagacaacaagatcgaacaggccat

SEQ ID NO: 608470 - DNA, 75 bp, Homo sapiens
cgttaatgtttgcaaatgcagaggaagaatttttctatgagggttacattccgaaaagcaaatgggagatggaca

SEQ ID NO: 608471 - DNA, 92 bp, Homo sapiens
ttttatgctgtactgaagggaacagttctttacttgcaaaagaattcaagccaggaagaagcagcaatctgtcttctggattaaaactgaag

SEQ ID NO: 608472 - DNA, 83 bp, Homo sapiens
caagaacagcgccgtcaccagcaggtgaggcggaaccaaccctcctggccatgggaggggccgtggtggacgagggccccaca

SEQ ID NO: 608473 - DNA, 98 bp, Homo sapiens
ggagccttagctgaaaggcagcagctcatcccagaattggtgcgaaatggagatgaggagaatcccctcaaagtctctaattaacagaagatggcaaa

SEQ ID NO: 608474 - DNA, 125 bp, Homo sapiens
aggcaatgacagcggctccggcgtctccgcagcagatcagggaccggctgctgcaggccatcgacccccagagcaacccggcacagtcttcactaccgtagaagaccttggctccaagatactcc

SEQ ID NO: 608475 - DNA, 82 bp, Homo sapiens
aggagcgcctggctcttctccacaaagacacacctgcctagagctggaacgttacctccagagcgagccctgctatgtttca

SEQ ID NO: 608476 - DNA, 152 bp, Homo sapiens
ggggattgtgggagtctccgcgtcccgctcgctgggagagaggtacctctccttttccctctccctttccctaagacaatgcagatcttcgtgaagactctgactggtaagaccatcaccctcgaggttgagcccagtgacaccatcgagaa

SEQ ID NO: 608477 - DNA, 96 bp, Homo sapiens
ccttctccgagggtccctacgcgtcctgggcggccaccgtgcgccgcgccagctgcccgccgcgcgctgactcctgagttctcacaacgcttgacc

SEQ ID NO: 608478 - DNA, 98 bp, Homo sapiens
gtcatattcttgggttcaaattcaagttttaccagggcttccgttacaagatgaggtctgtgtatgctcacttccccatcaacgttgttatccaggag

SEQ ID NO: 608479 - DNA, 82 bp, Homo sapiens
atatcataagtggaattttggagatattcaaagcatatcccagtagaatacgggcttttccagggcaggaacctttagctgg

SEQ ID NO: 608480 - DNA, 90 bp, Homo sapiens
gttgtggaagaggttacattgcacaatatttgaataagacatcaactagtcaggcagtcttccgtctccagtctggcatctgccatctct

SEQ ID NO: 608481 - DNA, 83 bp, Homo sapiens
tcacggagattgtcttctgtgctgtcacctcgaatgagcaggtcaaggttgtccccccggcacgctccacagctggtgacccg

SEQ ID NO: 608482 - DNA, 74 bp, Homo sapiens
gcaacccgacgagggagtgggatatgggtaagtgtcaccttaccaaaggcaaacaggctctagagattcgaagt

SEQ ID NO: 608483 - DNA, 75 bp, Homo sapiens
ctggcggacccgtggcagaagatggctgtggagagcccgtccgacagcgctgagactgttcgccatggatttccc

SEQ ID NO: 608484 - DNA, 100 bp, Homo sapiens
aacacggtgttcatcttttctacagatgttcagcctgttgcctatgaagagcctaaacattggtgttcaatagtctactatgaattaaacaatcgtgttg

SEQ ID NO: 608485 - DNA, 95 bp, Homo sapiens
caggactcagaggccgccatcaaccgccagatcaacctggagctctacgcctcctacgtttacctgtccatgaattcagcggggtgccaagtcgt

SEQ ID NO: 608486 - DNA, 75 bp, Homo sapiens
ggaattttcgcctgcttgcagagctttccagcccgtttgtgaatcagcggatctcactctgtcacccaggctgga

SEQ ID NO: 608487 - DNA, 75 bp, Homo sapiens
acgcggccaaggtgccggccgacaccgtgaactatcgtggctccacgggctttggccaggacagcatcctctccc

SEQ ID NO: 608488 - DNA, 83 bp, Homo sapiens
ctcctcttcccttcgctccggcccggtgaaactgaacttataatcgtcactggattaatgtgaaaacctttgcatcttctgat

SEQ ID NO: 608489 - DNA, 90 bp, Homo sapiens
ggagagccccttgcagaagacgccgtacgagttgcagcatgagaaagccgaactagaacagcatcttgaacaagagcaggaatttcaggt

SEQ ID NO: 608490 - DNA, 75 bp, Homo sapiens
catggaggaggacgacagctacggggccaaaccagtgctcctgccacctctctggctgccccctagagcctgccc

SEQ ID NO: 608491 - DNA, 75 bp, Homo sapiens
tccgcttctcagaggacgccttcaacaccaccttcatctccaccatcggtcgggaaagaggttaaagaagacacg

SEQ ID NO: 608492 - DNA, 83 bp, Homo sapiens
gcttcggcccccaccagagactcggtcacgagaagagaatgccttctagatgcaaaatcacctccaaaccagaccacttttct

SEQ ID NO: 608493 - DNA, 100 bp, Homo sapiens
cggagggcgtcaagcagcatgtgaaggagaccaagagcacctactgtgccaccatggtccagcactgtgaagccctcaaccggtctgtccaagttgtaaa

SEQ ID NO: 608494 - DNA, 74 bp, Homo sapiens
cccgcccggaccagcctgccccggcgccgagatgatatcatcaagttgaatcgaaaggaagggaagaagcagaa

SEQ ID NO: 608495 - DNA, 98 bp, Homo sapiens
cgaagcctaaattccaggaggtaagactttgaccccgacgcaggcttcagtgattgccgcggatcagaagcctgagcactttggctcgagacaattaa

SEQ ID NO: 608496 - DNA, 100 bp, Homo sapiens
gaatgcccaacagagggaactacaaccagctatggaagggccgctggcagggcaatgacattgtcgtgaaggtgctgaaggttcgagactggagtacaag

SEQ ID NO: 608497 - DNA, 100 bp, Homo sapiens
ccctgtctcccgctccgcagccccgggcacggcggaggcagcggagccctgggccatcgtttggtgccctggttgtcagatgttggaaagcagtaggacg

SEQ ID NO: 608498 - DNA, 87 bp, Homo sapiens
acggacggtgatggtggtcgccgcggcggcgtgtgcgcccctcaggtgtcagttgtacccgaggcgttctcagcagcagcaagtacc

SEQ ID NO: 608499 - DNA, 90 bp, Homo sapiens
ccttccggagcttctcagaagacagagggttttcttttgaggccttggacaagattcgctatgagagcctgacagacccttcgaagttgg

SEQ ID NO: 608500 - DNA, 98 bp, Homo sapiens
gtcactgggattgctgtagcggccattgttgctgctgtagtggccttgatctactgcaggaaaaagcggatttcagactgtgcccatttccagttgag

SEQ ID NO: 608501 - DNA, 90 bp, Homo sapiens
tgctgggattcgcgctgctgggcacccacggagcctccggggctggttttggctacgggcctccacctccaccgccagatcagtttgccc

SEQ ID NO: 608502 - DNA, 100 bp, Homo sapiens
aggaaatctaaagcatgaacaggcatctaatgttcttagtgacattagtgatgttgctgactataagtcgaaaggaaagtttgatggtgcaaagggtcct

SEQ ID NO: 608503 - DNA, 75 bp, Homo sapiens
ggaccgccgccgccgccgccaccatggggttatggttttgtgaaattcacagatgaactggaacagaagcgagcc

SEQ ID NO: 608504 - DNA, 71 bp, Homo sapiens
ggaggaaaacaacttcgagggcagagagttaaagttcctcgtaattttcgcttgttggaagaacttgaaga

SEQ ID NO: 608505 - DNA, 90 bp, Homo sapiens
cgccggcagaggatccagtgttcaccatcctggccccggaaggctggaagggagtggcgcaatcatggctcaaatgcagcctggaactcc

SEQ ID NO: 608506 - DNA, 135 bp, Homo sapiens
ctgcggcccccccctcgccggggaccgagcgcgctcgctccggcgccggcctcgcctcctcgcagcagcgccatgcttcggaaccaaaaagaagcttcccagagccggggccaggagccccaagcgccctctagc

SEQ ID NO: 608507 - DNA, 90 bp, Homo sapiens
tgctccctcgcccctgcagccagcccttcggcccaaccccaccgccatcctggatgagattggtgctgaagacatggacggcttccaggc

SEQ ID NO: 608508 - DNA, 82 bp, Homo sapiens
agcagccgagtctgacggcgccggttcgctgcccggtccgcccgcggtgagagtatcctagaaggaaaacatcaccatggct

SEQ ID NO: 608509 - DNA, 98 bp, Homo sapiens
tcaaaagggagttctacatcacatttgccaaagacccctacaagtcttttggtttaccatctattgggagattgtctcagtaccaagaaccgttacat

SEQ ID NO: 608510 - DNA, 115 bp, Homo sapiens
gaatatatgctggcgttccttctgctgctattggatcctttcctaatggaagttggctggaatgtgatgacttaaaaggcccatgttctgaaaggcacaagaaatttgaagttcc

SEQ ID NO: 608511 - DNA, 101 bp, Homo sapiens
cacatccttgtctgtgaagctaaactcaatgctgctgtgtgggaagaagatttgtaaagaaaactcttagatttaggcattggagatctaattcctgtgga

SEQ ID NO: 608512 - DNA, 100 bp, Homo sapiens
acgccagcgacttcagcgtcctgagtgcgctcaacgagctgtatttctatgtcaccaagtaccgccaggagccgggaagaagtccctgacctacttccac

SEQ ID NO: 608513 - DNA, 100 bp, Homo sapiens
cggggcgctgctggcgtgtctcctcctagtgcttcccgtctcagaggcaaactattgcaaatagaagagtcttccaaaccagtgaggctatcacaacagc

SEQ ID NO: 608514 - DNA, 100 bp, Homo sapiens
ccgggccaagtacgagcgacaggagttcatctacccggagaagcaggagccctactcggcagacaatgcagatcttcgtgaagactctgactggtaagac

SEQ ID NO: 608515 - DNA, 101 bp, Homo sapiens
ccgaagcctaaattccaggaggggaaagcaggcaggatgggagagtcgccgatagaaccacctcttccctgcctcctgggcttgggggaagcttgaatgac

SEQ ID NO: 608516 - DNA, 95 bp, Homo sapiens
ggagagaatgggcgggtgctggccgggcagaccctgggtgcccccacttgactctcgccccagctccccagccctctacttcacccacgatgcca

SEQ ID NO: 608517 - DNA, 111 bp, Homo sapiens
ggccagcagatgcaggaaaatttcgatattgaagtgtcaaaatccatagatggaaaagatgaacaggctgtgtataataggccacaaacagttgacaaagtacgaatcaga

SEQ ID NO: 608518 - DNA, 75 bp, Homo sapiens
tttttggaacaaggattttggatgaagaagtttttgagctacaagagactgtgaaaaggaagttggaaggagctc

SEQ ID NO: 608519 - DNA, 98 bp, Homo sapiens
ccgagatgtctcgctccgtggccttagctgtgctcgcgctactctctctttctggcctggaggctatccagcggaccagttactctccacaagaaaat

SEQ ID NO: 608520 - DNA, 95 bp, Homo sapiens
gtcctcctgtcccggatcattatgaaggagaagcagagcaccaagaccatggcagccgtgaccatgtcggtgcccgggcggaaggcgccccccag

SEQ ID NO: 608521 - DNA, 75 bp, Homo sapiens
agaactgcctcctcttgctcaggatcaagcatgaattgcaagcaaactgctacgaggaggtcaaggaccgctgca

SEQ ID NO: 608522 - DNA, 90 bp, Homo sapiens
ttaaagatgcagtacgccacggggccgctgctcaagttccagatttgatgacatttgatccagaaatcttcttcaatgttttactgccac

SEQ ID NO: 608523 - DNA, 90 bp, Homo sapiens
cgcctcagccgcggaggagagcggggccggcaagaaggacaaggttttgcaaaaggcatcaaattaaatcaagttcaaatattccctgtg

SEQ ID NO: 608524 - DNA, 75 bp, Homo sapiens
atatgaaagtgctgcaagacaggcttcttaaggacatggttcgaaccagtgtcctaccagaacataaggatcccc

SEQ ID NO: 608525 - DNA, 98 bp, Homo sapiens
gaagattaggaagaatccactgatagaaatcatttccatcaataccgggctgagtcatcactagagagtgggaagggcagcagcagcagagaatccaa

SEQ ID NO: 608526 - DNA, 100 bp, Homo sapiens
gcgacggcgtcctcaggagctgtggggtcccctgctagaagtgggggactcggcggggatgttcttgagtcgaagaacagcaccatcaaggacctgcagt

SEQ ID NO: 608527 - DNA, 103 bp, Homo sapiens
cgggagggcagccactccccgctggacagcgccgacgtccgggtgcacgtgccacgcacgcctgacatttaccccggtaactgctgggcatttaaaggctccc

SEQ ID NO: 608528 - DNA, 74 bp, Homo sapiens
tcagcatgtgccaggaacacaacctcaccttgatcagtggacctaagcgttatgactggactgggaaaaactgg

SEQ ID NO: 608529 - DNA, 98 bp, Homo sapiens
ggacgcggaacccggcgcggcggcggcacgatggtcatggcgtatttcgtcgagaatttttggagtttatgtggccgaggcagacaagtggaattagg

SEQ ID NO: 608530 - DNA, 100 bp, Homo sapiens
aggggcaatgctgctgttagatgaaagacaagatgtccatcttctcatgaccaactgtatcaagaaatgcaccagcaaggaatactgaagaccgatgatc

SEQ ID NO: 608531 - DNA, 101 bp, Homo sapiens
gggaaagcggcgagtaagatggaagatgaggaggtcgctgagagctgggaagaggcggcagacagcgggttccggaaccccaaggcatccttgcgtgtgcg

SEQ ID NO: 608532 - DNA, 83 bp, Homo sapiens
tgagggaaatcgtgcacatccaggctggtcagtgtggcaaccagatcggtgccaagggactttgaacatgtcggggatcgccc

SEQ ID NO: 608533 - DNA, 83 bp, Homo sapiens
gtccgggtccggagcgccacagttaatttggagtggcccctggagtcagtttcctacaccatccgaggccccacccagcacga

SEQ ID NO: 608534 - DNA, 82 bp, Homo sapiens
cttatggcggcgctggagagggggcgctgagctgttgggatcagttggccttatttcctcagtggaaatctactcactatga

SEQ ID NO: 608535 - DNA, 97 bp, Homo sapiens
cagctgcggctgctgctggaagtcacctatgaagccatcgtggacggagatgtatcggcaagcagtgtaaacggaggacttggggaaaaaggaccac

SEQ ID NO: 608536 - DNA, 100 bp, Homo sapiens
taacccctagaccggtttttagtccattgactatgcagcctaatgagtgcagcagctgccccgagccccgtgcttggcaacattccccccaacgatggga

SEQ ID NO: 608537 - DNA, 95 bp, Homo sapiens
cagcttttccggcctgacaacttcatctttggtcaaaatgcagatcttcgtgaaaacccttaccggcaagaccatcacccttgaggtggagccca

SEQ ID NO: 608538 - DNA, 96 bp, Homo sapiens
ctacgagtacctgatccgcctcttccaggagtgggaggagtacgagagggcctccaaagtggaccagtttgtgacgcgcttcctgctgcgggagac

SEQ ID NO: 608539 - DNA, 97 bp, Homo sapiens
cttcgaaaaaagcttattgggaagaagggtgtccgcaatgttgccagtgtctgtctgcagattggctacccaactgttgcatcagtaccccattcta

SEQ ID NO: 608540 - DNA, 101 bp, Homo sapiens
tctcagccctccggttcctgggcagagagaaaggctgggccctgtctcaggcccccaggctttccccaaactggtgcggatcctcacggccttttcctccc

SEQ ID NO: 608541 - DNA, 100 bp, Homo sapiens
ccggcgctggcggccgtgccgggaggcatgatgacctgaaggagatgctggacaccaacaaggattctctcaagctggaggccatgaagaggattgtggc

SEQ ID NO: 608542 - DNA, 50 bp, Homo sapiens
cttttgccctagagcaattgaagcactggtgaccccggcagccctgaggc

SEQ ID NO: 608543 - DNA, 75 bp, Homo sapiens
tacctagaagtctactaatggacagttagtcacccacctacatgttgagcaataagagctaactgccatcaagag

SEQ ID NO: 608544 - DNA, 109 bp, Homo sapiens
gaaggagtcacggggcgcgcacgccggggaagactacaaggtgcgggagtatgagttaagaaaaaacaacttctcagatactggaaactttggttttgggatccaggaa

SEQ ID NO: 608545 - DNA, 73 bp, Homo sapiens
gagaagaacccagaaaattgatcagttctaaaaaaccatgccccactgggtaattccagaattgattggccat

SEQ ID NO: 608546 - DNA, 100 bp, Homo sapiens
gggcatctatgccagtgagaggcccaagtccctaggcacgtgtggttctcaaatataggcattctgatgggaacttgtgtgttaaagtaacagatgattt

SEQ ID NO: 608547 - DNA, 74 bp, Homo sapiens
tgctgatgatatggatagaattatgacgctaggccacaaaaatcagtcaacaaacactcgggtcctatacttca

SEQ ID NO: 608548 - DNA, 89 bp, Homo sapiens
tctcttctcatcccaaaacaatgcctttgcacaaaataaaccaactggctttggcagcactggtgaggtggattgatgatgaatcttct

SEQ ID NO: 608549 - DNA, 100 bp, Homo sapiens
gaccattccaacagatttgattgcctccagtggagatatcatcaaggagagctcaaaggatggctactgacatgcagaggaagagaagcagcgaatgcct

SEQ ID NO: 608550 - DNA, 75 bp, Homo sapiens
ggagcccactccttcatcaacgagcctcaagtactacagccttccagcagccttcccagacccacagatcacacc

SEQ ID NO: 608551 - DNA, 100 bp, Homo sapiens
gatcggggaagcatggggatccgggagaagcacccacaaaactagcatcctcctggaggagctcggttcttcagattattaaggaatcccagcagcagca

SEQ ID NO: 608552 - DNA, 75 bp, Homo sapiens
catcaccatggaagggtggaccactgtgctgtacaatgctgatgaattcatccgagcaaatgccaccaacaagct

SEQ ID NO: 608553 - DNA, 93 bp, Homo sapiens
ccgcgaaccgcagtatcatgctggccaagaagatcatcattaaggacggaggcacggaatactcccccagttgcaagaggcgcaggaccgtgg

SEQ ID NO: 608554 - DNA, 100 bp, Homo sapiens
cgcagtccacgctgcggatgttactcaggccatgcactgttacttaaaggaacctaagggagagtcccgtattctcagagtaaaagttgtttctggaatt

SEQ ID NO: 608555 - DNA, 75 bp, Homo sapiens
tattcagatcagtagaagcagatttcttttggatagtgatgggaaaagggagtttgaggacatcaccaatgcgag

SEQ ID NO: 608556 - DNA, 100 bp, Homo sapiens
agccaatattttgatgctgtcaaggtccagatggctgtggaggccaagtttgtccaggacaccctgaaaggagacggtgtgacagaaatccggatgagat

SEQ ID NO: 608557 - DNA, 90 bp, Homo sapiens
gtttgcctccttcatagacaagagatgccctgtatccaagcccaatatgggacaccagcaccgagtccgggaccccgtgaccacctggca

SEQ ID NO: 608558 - DNA, 100 bp, Homo sapiens
cgcgcatcaaggtgggacgggattacgtccagaaggcgcagactaaagagcaggctgactgtgctgtcctgattgttgctgctggtgttggtgaatttga

SEQ ID NO: 608559 - DNA, 100 bp, Homo sapiens
agatgtcaaacggcccccagcgcccctggtaactgacaaggaggccaggaagaaggttctcaaacaaggtctggagcccggcactgtggtcataacagag

SEQ ID NO: 608560 - DNA, 100 bp, Homo sapiens
aaacgcctcttatggaaaagccagagcgccaggagtcagcaaaacacactaaagattgggcagtcactggggagaacatgtatgtccatccctgtgacga

SEQ ID NO: 608561 - DNA, 100 bp, Homo sapiens
cttgagctccaggagttcgtctcttacgtctgcggaagtgcagctgcctcagttcttagcgcaggggcggcgaagaggacccgcaggctgcaaggagcaa

SEQ ID NO: 608562 - DNA, 96 bp, Homo sapiens
ttggaagtccagagatagttgtgcttttacacggttttccaacatccagctacgactggtacaagatctccatttgccaggagatgcccagcctgg

SEQ ID NO: 608563 - DNA, 75 bp, Homo sapiens
cgagagcggcctgattgggaagaaactcttagcgcaatgagaaagcatgggattatggcaaccacagaatctcag

SEQ ID NO: 608564 - DNA, 50 bp, Homo sapiens
cagctcactggagtatctgtttgctcagtgcaagccagcagtaagccgca

SEQ ID NO: 608565 - DNA, 100 bp, Homo sapiens
ccccgcggggggcgatgaccgtgcgctgaccctgactcactccagtgaagaaaaaatgactgctgcccgcattagaaaatgccacaagtgtgggactggc

SEQ ID NO: 608566 - DNA, 100 bp, Homo sapiens
ttgattctaaaactggcgatttaggggacatcaatgctgagcagcttcctgggagggaacatcttaatgaacctgggacaggagagagtggcaagagtac

SEQ ID NO: 608567 - DNA, 98 bp, Homo sapiens
tggaggggtggtgaccatcgaaaggagcaagagcaagatcaccgtgacatccgaggtgcctttctccaaaagtgtactaatggtcacttgatgtgcgc

SEQ ID NO: 608568 - DNA, 82 bp, Homo sapiens
tagaagctccttccattcagatccaggaatccccatctctaatgtaagcttggagatccgggcccccgggggacaggtgact

SEQ ID NO: 608569 - DNA, 75 bp, Homo sapiens
aggtcacgaggacggagggccatgtgttgggtcagcaccatcagagaatctggacgaggctagagaacagaaaga

SEQ ID NO: 608570 - DNA, 100 bp, Homo sapiens
gaaatagcaaggtgctggatcaaatactgtttgactctcatgcagaatgcccaactctccatgcagcccatagatgagagcagccagatgagtgacctcc

SEQ ID NO: 608571 - DNA, 83 bp, Homo sapiens
ggcgggcgccgcgggacctctccgggccatggacctgcaggctgggacaatgaaaagaaaatagctattttacatgaaaattt

SEQ ID NO: 608572 - DNA, 97 bp, Homo sapiens
tctgatgacggcactgttagaatctgggactttcttcgttgccatgaggaaagaattctccgaggtgtcatggagaaactccagctgggcccagaga

SEQ ID NO: 608573 - DNA, 100 bp, Homo sapiens
tggaccgggcggcacgcacgcggtgcagggtaacatggcggatgcggaaggatcagctgctgctctctgaaaagccacagttgtgtcagctatgccagga

SEQ ID NO: 608574 - DNA, 75 bp, Homo sapiens
tgctcctgggactccaggataccagataccggggagaccacgacgctgcctcctgggcgccatgagttcctgttc

SEQ ID NO: 608575 - DNA, 74 bp, Homo sapiens
tgggagagatgaagaacctgagtcaggacgtaaatggaaccctggtggagataagtaattaacatttcgaaaca

SEQ ID NO: 608576 - DNA, 98 bp, Homo sapiens
gcactgagggtgaagtggcaggaggaggaggaggggctccggctggtctgtggtgaggcgctgagatgcgtctggagagccagagggcctgcctgaag

SEQ ID NO: 608577 - DNA, 83 bp, Homo sapiens
cgctccgacggcggtccatcctgttactatgcgagtcagaagaaaacatttgaaattaatcccagacacccgctgatcagaga

SEQ ID NO: 608578 - DNA, 98 bp, Homo sapiens
cttgcttgctactgaaaaagtgatcagttccctggaaaagtctagagattctgataaggaaacagagcaaatgcagcgttacaatcaaagacttattg

SEQ ID NO: 608579 - DNA, 104 bp, Homo sapiens
cacgggatccagagcgccgcgcacttcgtcatgttcttcgcgccctggtctcctctgagcctccggcctccataagacccaaaacagatgacacctcttcccag

SEQ ID NO: 608580 - DNA, 75 bp, Homo sapiens
ctgcgatccgcgcatataacgcttagaccatgctcagcctccaagcagccttgtcatcgacaaagaatctgaagt

SEQ ID NO: 608581 - DNA, 80 bp, Homo sapiens
agcgttggagaggtgttaccggaacggcggcgacaagggtgttcccgaactagagtggctatacctgcaggcccgcttca

SEQ ID NO: 608582 - DNA, 89 bp, Homo sapiens
gacaggagaggctgcttcttgtagaggaggagacatcacagctttcccagatcgggaggaaaaatatggaatgtgttttaccgctgact

SEQ ID NO: 608583 - DNA, 59 bp, Homo sapiens
tgcaccaacaaccgcttggaatgctgcaacaatggattttgaattatgggatgatgtag

SEQ ID NO: 608584 - DNA, 82 bp, Homo sapiens
tgaccccaccacggttacattatactcctcctctccagtcaccaattatacgagagcaggatgagaagacaagtgcagtgaa

SEQ ID NO: 608585 - DNA, 75 bp, Homo sapiens
tgtttgtggatcgctgtgatcgtcacttggtgaccccagggtttgaagaaaaggagggggagctgctggtgaggg

SEQ ID NO: 608586 - DNA, 100 bp, Homo sapiens
agtgtgggaattttagctaatgaacagagtatctgtcaggcaagagctgctgtgatggtttatgatgatgccaataagaagtgggtgccagctggtggct

SEQ ID NO: 608587 - DNA, 75 bp, Homo sapiens
gactttgtggtggtgctaacgggaactattccctcctggacatgaggccaccaccaactgcgatgatcactttaa

SEQ ID NO: 608588 - DNA, 75 bp, Homo sapiens
tcagagttctgcagcacccctgcctgctctgagggccgtggatccaggacatcgagggagccagcgccaaggacc

SEQ ID NO: 608589 - DNA, 82 bp, Homo sapiens
ttctgccacagattcactgtgtaacctggggtatctcttccaaatgcacaatgaaggagttctcatcaacagcacaaggcaa

SEQ ID NO: 608590 - DNA, 75 bp, Homo sapiens
catacctcacccatgactctccaaatttgtatcctactgtggggcttcaaacaccaggagaagtggtcgatgcca

SEQ ID NO: 608591 - DNA, 82 bp, Homo sapiens
cagaacccagccatgtggtcagcctgatctcggacttcacagccagcagaactaccataaatactgtatcagaagttattcg

SEQ ID NO: 608592 - DNA, 100 bp, Homo sapiens
acaaaagagggtgttctctatgtaggtgcagcagtagcgggcatttacagagtagctgggaagaacatggcccctttggaagcgctggtatggggcgttg

SEQ ID NO: 608593 - DNA, 75 bp, Homo sapiens
tctgcactgtaactgctggacccaaggacatggtggtcggatacacaccatctcagcaaggagtggcattcaact

SEQ ID NO: 608594 - DNA, 83 bp, Homo sapiens
ccgaaagctttagagttccatatgatcctggactgaaagcaggagcgctggcacaatcatcctcttccagtggtagcgtgttt

SEQ ID NO: 608595 - DNA, 100 bp, Homo sapiens
cagcgcccctggtaactgacaaggaggccaggaagaaggttctcaaacaaggtggcccatggcgccctcagtgatggtgccattgatgctgtggagacac

SEQ ID NO: 608596 - DNA, 74 bp, Homo sapiens
cggacaccgacgcgctcatctgctggagcccgtatgaccctcaatttggcgatgccttctggaacagcagcaaa

SEQ ID NO: 608597 - DNA, 83 bp, Homo sapiens
ccctattcaagttcatgtcacgctgggtaatgaggatttgactgtgaagacagcacccaagaaaacctcatttggctcgctga

SEQ ID NO: 608598 - DNA, 50 bp, Homo sapiens
cgacagttggaggtatacacaagcggagtaccatctgccagcatgactcg

SEQ ID NO: 608599 - DNA, 100 bp, Homo sapiens
ttgcccttagtggccgtcttttgcctctttctctcaggctttcctacaactcatgcccagcagcagcaagcagatgaagatcgactttctagaagaaaaa

SEQ ID NO: 608600 - DNA, 100 bp, Homo sapiens
cggtgccgcagctgcgatggccgtggccgtggggagaccgtctaattagaagtgcgtctcaccaaccagccaagatgaacatggtgaagaggatcatggg

SEQ ID NO: 608601 - DNA, 75 bp, Homo sapiens
gaccatctggcccaccattcccattgctccagatatgagaggacagaccccagagggtataagtgaagaacagag

SEQ ID NO: 608602 - DNA, 75 bp, Homo sapiens
ctcttagataaaatgacgacgtccttctggaagaggcgaaactgaccgagacatgggtgcccggcaccgcgcccg

SEQ ID NO: 608603 - DNA, 122 bp, Homo sapiens
ctcatgtggacaacattgagacagccaacagttttgctgtaacaaacgcctaacacagatatgtagaactcttcttgaattctacagcaggagcaagcggtggtgcttatggtagccaaatg

SEQ ID NO: 608604 - DNA, 100 bp, Homo sapiens
tctgctagatgttgtggttgaaaataatctagatattgatggctttgttaagctgaaggaatctgttgttgaaaatcatgcagtgttaagttatgctgtg

SEQ ID NO: 608605 - DNA, 75 bp, Homo sapiens
ccagaagcagctgtccccacaaaaagtgacgctttacctgcgaccaggccatcaccatcgaggctgagccaagag

SEQ ID NO: 608606 - DNA, 100 bp, Homo sapiens
ccaagctcctggccctggccctgatcatcctgctgggcttcgtccagatcgggaaggtgatgaacggcagcagccactcaccaacagccatcaatggtgc

SEQ ID NO: 608607 - DNA, 100 bp, Homo sapiens
cagcggcctgatctgggttccgctgattcctttcgtaaccgcaccacacccgagtgtactaaaggaagtataccaagcctttaatcccaaagcagtggtc

SEQ ID NO: 608608 - DNA, 74 bp, Homo sapiens
cggaagtgcagctgcctcagttcttagcgcagatacctagagatgctgcttgagtaccttcaggattacacaga

SEQ ID NO: 608609 - DNA, 118 bp, Homo sapiens
cagatgaaggcttttccagaagcttccccgtagaagaggatcaggcatccaactggttaaggaacaagttccagttccagtctaccacccaacacctagccagactcggctagcaact

SEQ ID NO: 608610 - DNA, 98 bp, Homo sapiens
cttcagccatgcttcctatctaccctgccattgatattgatgcacaggctgaccggttccctgatgtgttacctgcttctgctactgatccaaactgc

SEQ ID NO: 608611 - DNA, 50 bp, Homo sapiens
ctctggtgcatgctgatgacgaaaaacgttttgagcaaaattttggactg

SEQ ID NO: 608612 - DNA, 75 bp, Homo sapiens
tattggtcatttctcccttgttggtttgggatttgaagaacacgaatttaggaaacttgaggaaaacaatggcac

SEQ ID NO: 608613 - DNA, 83 bp, Homo sapiens
ggagaaggccatcaccacgcagaacgtcaacaccaagtgcatcaccatccccagaagtccattggaatattaagcccaggagt

SEQ ID NO: 608614 - DNA, 100 bp, Homo sapiens
gttctggaataagaatataggttcaaaccgtcctctgtctccccacattactatctacaggctaaagaattacctccaaagccattgtcaagaccacagc

SEQ ID NO: 608615 - DNA, 83 bp, Homo sapiens
cgggagccaaccagggctgcattggagcgccatcatgaccgggtcctataacaacttcttcaggatgtttgatagagacacgc

SEQ ID NO: 608616 - DNA, 100 bp, Homo sapiens
ctgggaccgtgcgcgtgcgcctgggggcaccgctgccgttccgaggctgaagccgacgtagcttctctgaacagacgcatccagctggttgaggaagagt

SEQ ID NO: 608617 - DNA, 90 bp, Homo sapiens
gtcgactacaagaagagggcggagcggagacgggagtattatgaaaagatcgaggagataagcaaggacctcagagccacactgaacgcc

SEQ ID NO: 608618 - DNA, 87 bp, Homo sapiens
gagaccgtcgaaagcggattccaaggaatccaggtgctggagaatctggtaaaagcaccattgtgaagcagatgaggatcctgcatg

SEQ ID NO: 608619 - DNA, 100 bp, Homo sapiens
ccatttctaccttgtatgcctcaatttgctggatttaagcactgctgcactttatgagatattgatgatgttaagaagttcaaaccgggttacctggaag

SEQ ID NO: 608620 - DNA, 98 bp, Homo sapiens
aggcagactgagcgccagagaggacgtttccaactcaaaacctgcaggctgggacaatgaaaagaaaatagctattttacatgaaaattttacaaccg

SEQ ID NO: 608621 - DNA, 83 bp, Homo sapiens
gcttctgctccgctatccgagagggggtgaatctctacattaagaacttggatgacactattgatgatgagaaattaaggaaa

SEQ ID NO: 608622 - DNA, 93 bp, Homo sapiens
attcgagtgaccgagaccgcggccgggaccgagggggccaaaccagtgctcctgccacctctctggctgccccctagagcctgcccatcccag

SEQ ID NO: 608623 - DNA, 83 bp, Homo sapiens
ggcgcttccacctctccaccaccgaccgcgtcatcaaaggaatcgggcgcctgattgctgagtgtcatctcaaccccatcatc

SEQ ID NO: 608624 - DNA, 83 bp, Homo sapiens
gaacggccaggactgctcgcttctgctgacggccacagccccctcggaaaaccacactgagagttgcattaaaaaccagcatg

SEQ ID NO: 608625 - DNA, 97 bp, Homo sapiens
agcagcttccaggatcctgagatccggagcagccggggtcggagcgggggtccagattttatggaaatgagctcaagaaagaaaagcaagtcaacca

SEQ ID NO: 608626 - DNA, 90 bp, Homo sapiens
aagaaaatgatatggaaatggaaattaaatgggttccagaaatacctcagggactttttcagcgtgatgctccagtccgcaacatctccc

SEQ ID NO: 608627 - DNA, 100 bp, Homo sapiens
ctcagctcacagagacgctgggcttctacgagagcgaccggcggcgggagaggcgccggggccgcacagaatgaagaaggagccccacaggaaggaattc

SEQ ID NO: 608628 - DNA, 75 bp, Homo sapiens
gacaaatttggtggggagcataatccaccatcaatatatctggagccacccacacagaatatgcctatgggtcct

SEQ ID NO: 608629 - DNA, 83 bp, Homo sapiens
ggcaaaaatcccatctaccgcaactctcagttcgagagtaaaggagcgagcccagggcgtggtgctgaaagtgctcacaaact

SEQ ID NO: 608630 - DNA, 100 bp, Homo sapiens
ccattgtcaacacaaatgatgctgttgtccccccagctgagcccaacagtgacctgcagggggtaaatgttttcctttggaatatggataaatacaccat

SEQ ID NO: 608631 - DNA, 100 bp, Homo sapiens
cgacataggcaagaacatagttggagtagtccttggctgcaataatttccggtttatggttggctgtgggagatgtgatgactggtttcatggtgattgt

SEQ ID NO: 608632 - DNA, 75 bp, Homo sapiens
cttgcaacagtggccgcacgcatagctgtgtaaagtttcaagagagtaatgataaaacccagctcatctttggtt

SEQ ID NO: 608633 - DNA, 100 bp, Homo sapiens
ctggagccaccatcaagctgtctaagtccaaagatttttacccaggtttctaagcatgaattgaggaacagaagaagcagagcagatgatcggagcagca

SEQ ID NO: 608634 - DNA, 74 bp, Homo sapiens
cgagtcctagcgcctggcctgcgcgccgctgcccgcgccacagccaccccacgtcatgctgcagcgccgcagag

SEQ ID NO: 608635 - DNA, 100 bp, Homo sapiens
gccggggtcgggtcgcttccccgcagcatggaggacgatgcaccagtgatctacgggctggagttccagctgccttcctatttcaaggaaagacgccaag

SEQ ID NO: 608636 - DNA, 85 bp, Homo sapiens
tcagtgaaggagtcttcaagtgccctgaggaccagcttcctctggactatgccaagttcagagggctgtgtacaaggacctggtg

SEQ ID NO: 608637 - DNA, 83 bp, Homo sapiens
ctccagtatgcaactgactacaaggaggttttaaaatcaaagatgggaaaatcggagaaaattgcccttccccatggccagct

SEQ ID NO: 608638 - DNA, 74 bp, Homo sapiens
tatctggagccatccaacatttagctgggatgaaagacagcaagtggccgcaagaggaagaggacgtggaatgg

SEQ ID NO: 608639 - DNA, 83 bp, Homo sapiens
tgctgctgtactccttctccgttcaaatctgaacatcaatgatgtactagggaactactcattgactcttgttgatgcattgg

SEQ ID NO: 608640 - DNA, 83 bp, Homo sapiens
cggggtccgggagaagagcgaccctcacagacagcacatgtggctttcctgcaatgggatcgtccttcaagaggacctcacag

SEQ ID NO: 608641 - DNA, 75 bp, Homo sapiens
gagcggctgctgtctgcgcttgaggacttggaggtcctgtctaggtaactataactacccaatattgcagccatg

SEQ ID NO: 608642 - DNA, 74 bp, Homo sapiens
ggtaacccgtgtgactttgactggcgtttagtgggctacagatggcatggcatctaaaaccttacaatgcttga

SEQ ID NO: 608643 - DNA, 75 bp, Homo sapiens
aaacctgcattctcgaaaacttgttagctttacattgtcaggaaataatgaagatgtttcattttcaagaccagc

SEQ ID NO: 608644 - DNA, 88 bp, Homo sapiens
gggagccgttggctgggaccgtgcgcgtgcgcctgggggcaccgctgccgttccgagtgaagatagtgatccggggagacaggaacac

SEQ ID NO: 608645 - DNA, 87 bp, Homo sapiens
catgtgaaaggccagccaccagttcaggagcacttgggagtgatctagtacctgccatcctggctggacttgaccccagggacattg

SEQ ID NO: 608646 - DNA, 83 bp, Homo sapiens
ggattcccagccatggcagattcctccgggcagcagggactcaagcacagagggttcggaaaccgcgttgctgcacggggccc

SEQ ID NO: 608647 - DNA, 75 bp, Homo sapiens
ggacgaccccgaactccaggacagcatccaggcctcattggacagcattcgaggctttccatctgatggtcccct

SEQ ID NO: 608648 - DNA, 50 bp, Homo sapiens
tagttcctctccagctcagccgcacagcccacctgaggatattgaccata

SEQ ID NO: 608649 - DNA, 100 bp, Homo sapiens
tggacttcaaatctctgcactcccggccgggtggtgggcgcatatcctgggtagcctctaggaagcgctagacacatccagagactgctgctactttgaa

SEQ ID NO: 608650 - DNA, 74 bp, Homo sapiens
cccagactctgttggatcagaaggtcaagcttcacttaaagagaggaaacttcttggtgctcaaagcaaaggag

SEQ ID NO: 608651 - DNA, 76 bp, Homo sapiens
ggaggatggcggagtcggggctcctgacgaaggacagaataacgggctcccagattcacaagccccaccaagagga

SEQ ID NO: 608652 - DNA, 75 bp, Homo sapiens
ctcaactaactacaattgtattggcagctagagagattgaggaacttcagcaggctttaatagtaaagcaaaatg

SEQ ID NO: 608653 - DNA, 50 bp, Homo sapiens
aaaatgaatgccaaatgggacacgtcttcccaagggattgttgaagaaac

SEQ ID NO: 608654 - DNA, 75 bp, Homo sapiens
gagtactggcggaggggctggacgttccacgccaaaggtgctggagaatctggtaaaagcaccattgtgaagcag

SEQ ID NO: 608655 - DNA, 98 bp, Homo sapiens
ttcaaaaagtggcctttgactttgctgcccgagagatggctccaaatatggcagagtgggaccagaaggcaaacctgtatgtgggactggtggtcatg

SEQ ID NO: 608656 - DNA, 80 bp, Homo sapiens
gtggcgctcgagttcctggaccgtgagagcatcaagctcgtgtccatcggttatgaagacagtatggagtttccagacca

SEQ ID NO: 608657 - DNA, 96 bp, Homo sapiens
ctttatgatccccacctgggttctggtggacctctcggctttcctggtcagcagcgacttggaaaactacatctcagacccaactatcttatggag

SEQ ID NO: 608658 - DNA, 50 bp, Homo sapiens
cgccttcgttgagttcgaggacccgcgcgtgagtgcatctccatccacgt

SEQ ID NO: 608659 - DNA, 74 bp, Homo sapiens
ccgtgtaactgtgaatctttcaaagggccgttgctccagggagaactgcaaatatcttcatccacccccacatt

SEQ ID NO: 608660 - DNA, 74 bp, Homo sapiens
ttctccttgaagaggtccttcacatcccttatgaagaaagttctcctcctgatcacagccatcttggcagtggc

SEQ ID NO: 608661 - DNA, 82 bp, Homo sapiens
caatatctgtcttcggtggactccttcggcagtccacccaccgccgccgcctcccagattacctaggaacagtacgatttgg

SEQ ID NO: 608662 - DNA, 101 bp, Homo sapiens
ttctgaagctttcacctataaatatataccaagataatttcagataagtgtcagcaaagaagccttaaacagtaaaaatcctcaactccataaagaagatg

SEQ ID NO: 608663 - DNA, 74 bp, Homo sapiens
tactggcctgctgctggcccgcaggaaactggcgatggaatatgagaggagccctctggaaagaaaaggacaga

SEQ ID NO: 608664 - DNA, 75 bp, Homo sapiens
cagaaggactgcctcactgagcaaccaagaaaatgaccgctccttcatctgtcctgcagaaggttgtgggaaaag

SEQ ID NO: 608665 - DNA, 100 bp, Homo sapiens
gccctgctgtagtcacaggaggtgtagagaggaccccgggacatctgaaagccaggaaatggctgacccaaaatgaactcaacgatgaagtggcagagag

SEQ ID NO: 608666 - DNA, 100 bp, Homo sapiens
atggaccttaatcgtgtcatcaaactcctcgaagagactgataaagggacggaaaatatagtcgcggtgatgataagcaacctgaaaggcatggaaattt

SEQ ID NO: 608667 - DNA, 75 bp, Homo sapiens
catcaataatgaaatgctgactaaggaacaaggagtccaacctataccttctcagggaggcaaactagaaatagc

SEQ ID NO: 608668 - DNA, 82 bp, Homo sapiens
gtggtgttgtcgtggccggagcggcccgcgcctgggctgccggcacttcgcggcagcattttgaaagcgaagcagaagccgt

SEQ ID NO: 608669 - DNA, 95 bp, Homo sapiens
gaagaactccaagttactggacaccaggacaaaccagatggactcaccctgtcacccaggttggactgcactggcctcaacctcctgagttcaag

SEQ ID NO: 608670 - DNA, 82 bp, Homo sapiens
actcgctggccctggtcaccgtcctgaacgaggacaccgagatcctcgacagtgccatgtatcggagccgtgccaacttggg

SEQ ID NO: 608671 - DNA, 75 bp, Homo sapiens
gagtggtgcgggcggctccgtgagaaaggcgggactttaatttttggaagtgaataaaacttgttttagaagacg

SEQ ID NO: 608672 - DNA, 74 bp, Homo sapiens
gggagctcatgagcagcattgtccatcagaattactctatgtctgtatatcttgtacggcagcttacatcagcc

SEQ ID NO: 608673 - DNA, 75 bp, Homo sapiens
ccacagctaagactccaggaccctctggaagcctagaaatgggagaagaaatgggtgaccgttggtgacacatcc

SEQ ID NO: 608674 - DNA, 98 bp, Homo sapiens
ttggcatccccttgctggacagtggctgtggcttgatggtgtcaggctatgctgtgactggggctgtcctgggccaagacaggctgatcaactatgcc

SEQ ID NO: 608675 - DNA, 80 bp, Homo sapiens
ctagagcaaataaccgttttgaaattggaagatcagttttcctgccatccaggctgctccctccttcagcaactcattcc

SEQ ID NO: 608676 - DNA, 129 bp, Homo sapiens
tgggaaggtggtgcttgtcctggctggacgctactccggacgcaaagctgtcatcgtgaaggtcactctacatgacatgatcctgaaaaatatcgagaagatcaaacggccccggagcagcaatgcaga

SEQ ID NO: 608677 - DNA, 100 bp, Homo sapiens
ataatgaacccacatgcctctaccaatggacagctctcagtccacactcccaaaagggaaaggagcctcacagtctactcagagaaaaataaaagaaggc

SEQ ID NO: 608678 - DNA, 98 bp, Homo sapiens
aatcttttattccactgacaagaagctgtgctgaatggtttggtggccactgaggtgttgatgtggttttatgtcggagagattataggcaagcgggg

SEQ ID NO: 608679 - DNA, 98 bp, Homo sapiens
gagccgagagattaggcatcttggctggcttgcagaaaaggcctcaggagtgcaagtagctgatgaagtatgtcgcattttttatgacatgaaagttc

SEQ ID NO: 608680 - DNA, 75 bp, Homo sapiens
gagagattaggcatcttggctggcttgcagaaaagtctagtatagagatggattaacagtaggaagagtttaata

SEQ ID NO: 608681 - DNA, 90 bp, Homo sapiens
gcgacacaattgtctgtgacagtaacagtacttgggatcccccagttccaaagtgtcttaaaggcatcctgtcggctcacaagataatag

SEQ ID NO: 608682 - DNA, 75 bp, Homo sapiens
gaaaattgaaagatgggaaattagtggtggaatgcgtcatgaaaggcgtcacttccacgagagtttatgagagag

SEQ ID NO: 608683 - DNA, 80 bp, Homo sapiens
gcgggccaggagagcgctcggcgggacttgaaaatactggaaatctgtccggatccaaattattttgcaagccagatgag

SEQ ID NO: 608684 - DNA, 82 bp, Homo sapiens
agaaaagcgagaccgcgtgcgaggaccgatgtgaagttcatttccaatccgccctccatggtggcagcggggagcgtggtgg

SEQ ID NO: 608685 - DNA, 87 bp, Homo sapiens
caaaacaggactggctgatactacatattccagatgccctactgccaataaagggaaaataagagatgctcatcgacgaattatgct

SEQ ID NO: 608686 - DNA, 75 bp, Homo sapiens
cgggtcctcctagaaattccccccgaagaagactcccccacatctgggaatagagctgtgcccccctggaaaacg

SEQ ID NO: 608687 - DNA, 73 bp, Homo sapiens
attcatcaatgttcccaccgtcagtttttcaagataccttcgaggtgccttgcacaccaagaggcctcaagtg

SEQ ID NO: 608688 - DNA, 82 bp, Homo sapiens
gccctggccatctaccatgtggtctcctccgggctggggctgagcaagccctcggagtgaccgtgggtgacagcggctccag

SEQ ID NO: 608689 - DNA, 83 bp, Homo sapiens
gggagattcagccgtgaagcaagtgcagatagatggccttgataccatacttgcagagctccttcagatacataaagaacaca

SEQ ID NO: 608690 - DNA, 100 bp, Homo sapiens
ccagaaatggctgcaggccaagcgcctcacgccggacctggtgcagtggtagcaactgcccttgctaatcaccgtaacctcggctgagaaagaagaggaa

SEQ ID NO: 608691 - DNA, 98 bp, Homo sapiens
tggttgcagaagtgccgaaagagcactggactccggaagttgaagattcctgtctctggatccaaatcagagggccttctctacgtccactcatccag

SEQ ID NO: 608692 - DNA, 83 bp, Homo sapiens
ggaaaaggagttcgagcagatcgacaagtccgggagctgggcggccatttaccagcaaccgcctccacgtttgataaactttc

SEQ ID NO: 608693 - DNA, 82 bp, Homo sapiens
ggcggcgtcactgacgcttcgctccggtcctcggatcccgagcgcggggaggcagaccggtcgcaatggaagaagagatcgc

SEQ ID NO: 608694 - DNA, 73 bp, Homo sapiens
ggacctggcactaagggagcacgccgcggtcaaccagaccatctgcctgtgggacatcagtgccgttccaaag

SEQ ID NO: 608695 - DNA, 100 bp, Homo sapiens
gatgcccatgagagaggagaaaaacttcctgttactgagttatgaggagctgaaacagaatataggcccaaagcagcatcctgaagacccaattggccac

SEQ ID NO: 608696 - DNA, 75 bp, Homo sapiens
gtgtgattagcttcgcagtctggaaagctttaggagttcacagtaattatatccagatcgagagacagaagattc

SEQ ID NO: 608697 - DNA, 100 bp, Homo sapiens
gctaatggtcgtcgtcggcatcctcctggcctacctggcaggacctggcctgggccgtcagctactacatccggttcttcatcacctacatccctttcta

SEQ ID NO: 608698 - DNA, 100 bp, Homo sapiens
catgtttgcaaaatggatggtcagcacaaccaatttgcattagaaagtttagtgtttccttgaagcatggaaatacagattcagagggaatagttgaagt

SEQ ID NO: 608699 - DNA, 75 bp, Homo sapiens
cttagctgtgctcgcgctactctctctttctggcctggaggctatccagcggtttggaaatcccttgtctccagg

SEQ ID NO: 608700 - DNA, 101 bp, Homo sapiens
ataatgaagatgagaaagactcttggtcataatcttctagtttctgaattatataatcagctgaaatttccagtaaagtgacctgaccaacggtgcagatg

SEQ ID NO: 608701 - DNA, 95 bp, Homo sapiens
agcagctgtactggagccacccgcgaaaattcggccagggttctcgctcttggcgtttagagaaaatggcagacgatattgatattgaagcaatg

SEQ ID NO: 608702 - DNA, 96 bp, Homo sapiens
gtcaagacatcagagacttttatgaaatgttagccgaaagaaggcatctgtcatcagttctggggaataagtttgaccatggagctgaagccatta

SEQ ID NO: 608703 - DNA, 74 bp, Homo sapiens
aatggctggggaaggtgctcaattcccatacatgcactagagtatccggagtgtgatgcagaagtaccttgcag

SEQ ID NO: 608704 - DNA, 74 bp, Homo sapiens
cttataaaggaccagacaaatcaaattagtggttttgtaatggaggggaaagttccagtcgcagcgctgagaag

SEQ ID NO: 608705 - DNA, 51 bp, Homo sapiens
ctcattcctgtaatagctgtggtagaacacctgaaggagaagctcattagc

SEQ ID NO: 608706 - DNA, 75 bp, Homo sapiens
ctccttcggcagtccacccaccgccgccgcctcccagaggccacaagaggaagctgaatgaagaggacgccgcca

SEQ ID NO: 608707 - DNA, 85 bp, Homo sapiens
tatggtccagctgtgccgcaccgaggcgagcaggagcagggaacaggtcttctttgatgtgaggattggagacaaagatgttggc

SEQ ID NO: 608708 - DNA, 75 bp, Homo sapiens
cccggcgggcggcctcgcgggtcagggttgaaaaataccggccacagaccctgaatgatctcatttctcatcagg

SEQ ID NO: 608709 - DNA, 102 bp, Homo sapiens
cgcagatccgctgtacttgcgtccgctacagtatgtcaatcgcttgccccagcacaggtcaaaatgcagatcttcgtgaaaacccttaccggcaagaccatc

SEQ ID NO: 608710 - DNA, 146 bp, Homo sapiens
gaacagagaacagaagctcagagaagtgaagcaacttgcccagctatgagagacagagccaggatttgaaaccagtttgggcttcctgtagacacccttttcctgcgcaacagagctgggcctccctttctctaatttccccctta

SEQ ID NO: 608711 - DNA, 82 bp, Homo sapiens
cggcagtcctgtttccctgtaagggccgttgctccagggagaactgcaaatatcttcatccacccccacatttaaaaacgca

SEQ ID NO: 608712 - DNA, 89 bp, Homo sapiens
ccggcccctcagggccacggctttagcggtgtcttttgcggctctgacgcccgctctgcggcttcggtgtttgaacaggccacagtcca

SEQ ID NO: 608713 - DNA, 100 bp, Homo sapiens
cctcttgcccgagatcctgttaaacatattgatgatgttaagaagttcaaaccgggttacctggaagctactcttaattggtttagattatataaggtac

SEQ ID NO: 608714 - DNA, 75 bp, Homo sapiens
gaagtatttggctgaggagttttcaatcccagagtccaatgtgctgattgctgctaacagtcagggtacaattaa

SEQ ID NO: 608715 - DNA, 90 bp, Homo sapiens
aagctgccttttagagcctttcgcacaggttgatttataccaattacaagtaaatacacttaggagatacaaaagacacttcaagctacc

SEQ ID NO: 608716 - DNA, 50 bp, Homo sapiens
ggcggctgggcgggagccccagaggtggggaccaatgccatggacagccc

SEQ ID NO: 608717 - DNA, 98 bp, Homo sapiens
agatggcagccagtcagtggtggagtgcaattgggtatctcgaagagcagatcaagggcctaaaactatcgaacagattcacaaagaggctaaaatag

SEQ ID NO: 608718 - DNA, 75 bp, Homo sapiens
cagaaacaaaatgtcaacaaattgatggcccctagtccaattcctgacccttcagtagcaactgttgccacaggg

SEQ ID NO: 608719 - DNA, 100 bp, Homo sapiens
aagccaaaacagaagcataaccgttggtcgtggggaggctctctccatgggagccctagcatccacagtgcagtatgactatgaatatgatgaaaatggt

SEQ ID NO: 608720 - DNA, 75 bp, Homo sapiens
gactgaggcacagagtgaaggggaggtgccagcccgcgaatccggccggagagctctgaggaacatgaatacagt

SEQ ID NO: 608721 - DNA, 101 bp, Homo sapiens
gcatcttcctctggctctacagcggtcctgcaaccctggttccagtctggcaagcattgtagacctggctgctgaagactgacggggcccagggtccgctg

SEQ ID NO: 608722 - DNA, 75 bp, Homo sapiens
aaagcacccgccaggctccgaggactctgttccagcctcagacaggtgcctatcagaccctggccaaagagtgtg

SEQ ID NO: 608723 - DNA, 100 bp, Homo sapiens
ttccagtgccaaaccaaactggagctggtgcagcaggaattgggatcgtgtcgctgcggctctacagattctcccctgcccctggagaaggaggagcagg

SEQ ID NO: 608724 - DNA, 90 bp, Homo sapiens
tccactacctcataaaggctgataaggagattgatatcagtaaatgccattatttagtggatttggacaccatgagagaaacaccccggg

SEQ ID NO: 608725 - DNA, 75 bp, Homo sapiens
tgcccacccctcctgtaacccagcctgtttcacttcttggttccgtggggaccccactgcctggagtacaggtgc

SEQ ID NO: 608726 - DNA, 75 bp, Homo sapiens
cgacgaacatttctgggtgacactcaacaggattcccggtgatttgaagatattaaagctagaaattggaactag

SEQ ID NO: 608727 - DNA, 83 bp, Homo sapiens
ccagcctgcggagcctgtggggcaggtcagaagccaatgacctggccctgaggctggctcgccactacacgggacaccaggac

SEQ ID NO: 608728 - DNA, 88 bp, Homo sapiens
tggcttatgagtggaacatggctagcaggaatgcttactgttgcgtggttcgttattaacaggtaccacatggaatgcttggaccccc

SEQ ID NO: 608729 - DNA, 82 bp, Homo sapiens
tcagacctgccaatttaccagagataattgataacaccctgtaacagctgaatgaagctactgaatctttacatcaaacgtg

SEQ ID NO: 608730 - DNA, 82 bp, Homo sapiens
gagaaggagaagtttccgcaggactacttccccgaggtcttgagtcaccacgtccgaatataattcttgggttagtaatctg

SEQ ID NO: 608731 - DNA, 83 bp, Homo sapiens
cttttggccatcttctcgcagagtgctccctgctaacggggacagatgtcaagccctccaacatcctagtcaactcccgtggg

SEQ ID NO: 608732 - DNA, 82 bp, Homo sapiens
accagacaggcggcgccatcttcgaacttagacttccggaaggactttggcgaggggaactactggagaccacgtgccgcct

SEQ ID NO: 608733 - DNA, 100 bp, Homo sapiens
cccgccgccggcccatgaggatattgccgtgaaagagtgatcagcagctggactgtgccttggacctaatgaggcgcctgcctccccagcaaatcgagaa

SEQ ID NO: 608734 - DNA, 80 bp, Homo sapiens
taatggcgtgttccagtccacgggagcaagagcagctctacctgaggtcaggtgtggtgtcctctgccaccttcgagcag

SEQ ID NO: 608735 - DNA, 100 bp, Homo sapiens
acagaaacaaaatgtcaacaaattgatggatctgaacagaattaagacgaacgagctttcacaattgcagcagatgaagatccattggtaaattgatcag

SEQ ID NO: 608736 - DNA, 88 bp, Homo sapiens
aacatccaaggcaagactggcacccagcacagcaggagcctgtggtgctgaccgacacaaatcttgtgtatcctgccctgaaatggga

SEQ ID NO: 608737 - DNA, 82 bp, Homo sapiens
tgagcctgcagccggccctgccggctcttgtcaggatggtgaagctgttcatcggaaacctgccccgggaggctacagagca

SEQ ID NO: 608738 - DNA, 74 bp, Homo sapiens
cactacctacaacaagcacattaacatcagcttccacagaacaccttccaccatgaccacctcagcaagttccc

SEQ ID NO: 608739 - DNA, 90 bp, Homo sapiens
ctttggattcaggagggatggattccagtcctagcttgccacttattaggtgggaccatccagttgcaggaaaacaagcttgacacgccc

SEQ ID NO: 608740 - DNA, 75 bp, Homo sapiens
tgacgactggagaagttgttcacatagattacaatgtttgctttgaaaaaggcacctcattgtgaacatgctttc

SEQ ID NO: 608741 - DNA, 101 bp, Homo sapiens
atttgaaggacgtgtctgcttccactcctgccgtgattgtcagcttcctgaggtctcctcagccatgctgaactgaattactctgcttaatgtaagcaagc

SEQ ID NO: 608742 - DNA, 75 bp, Homo sapiens
agcctatctattggaattcctcgaactccaagtatgagaaagtgccagtcatcttggttgggaacaaagtggacc

SEQ ID NO: 608743 - DNA, 98 bp, Homo sapiens
aaaaacctatcgttagagtcttcctgcccaacaaacagaggacagtgaccccatatcatgtgaacctcctcctggctggctatgatgagcatgaaggg

SEQ ID NO: 608744 - DNA, 82 bp, Homo sapiens
cttcaggcggcggaggcagcaccgaggaagcatttatgaccttctacagtgaggacgcaatgagcccctgaagaaagagcgg

SEQ ID NO: 608745 - DNA, 95 bp, Homo sapiens
acgacctggtgaagagggcccggctggtgcgagctccaggaggccagagctctactgaagcggcggcggccccgggggccagggggccggggact

SEQ ID NO: 608746 - DNA, 75 bp, Homo sapiens
gtcagttacctgagagccaagagcttctttgatggcctatatgaacccaatagcaatggcgagatcaaggggtcc

SEQ ID NO: 608747 - DNA, 83 bp, Homo sapiens
ttcatcatcaagcagatgaaggaggatggcgcctgtctcttccgggctgtaggactcctcctattttgaggacttctccaaca

SEQ ID NO: 608748 - DNA, 75 bp, Homo sapiens
ctttgcttgctgtggggttgacccagaacaaagcattgccagaaaacgttaagatgatgtgatgccagccactta

SEQ ID NO: 608749 - DNA, 83 bp, Homo sapiens
ctctgactcttgcgccgccgccttccacccggagacaaatttacatgtattggagaccagaccagaagcccttctgaattaag

SEQ ID NO: 608750 - DNA, 75 bp, Homo sapiens
ctttacccgactctttgggccgttatctcacatgttctcagtgcagctgagtcttggtgagcagacatgggaatc

SEQ ID NO: 608751 - DNA, 83 bp, Homo sapiens
gcccagagccgcgccgtccgcgccgcccgttctgcctcttctgaaacagtctccctggagcaaccatcagagcagtggctggg

SEQ ID NO: 608752 - DNA, 100 bp, Homo sapiens
gcaaggtgccatgtgtggggctcagcattggggtggagcggattttctccatcgtggaacagagactagagttgcctgacctggtaccccagctggggac

SEQ ID NO: 608753 - DNA, 100 bp, Homo sapiens
aacttcctctcgaatatcaagaaatgcagtaaccagcatgtcaataaggggtcataggtggaaaagacatggtatgctatacctccggagcatggaaaac

SEQ ID NO: 608754 - DNA, 100 bp, Homo sapiens
tttgtttgttttttatgatttgtatttgactgagagaaacccactgaagacgtctgcgtgagaatagagaccaccgagcatcaacaacagcaacttgtga

SEQ ID NO: 608755 - DNA, 100 bp, Homo sapiens
cctgcagtacctgcagaaggtctctggagacatcttcagcaggttatttggaaatagcggtgcttgcagcgcttgcggacagtcgattcctgcgagtgaa

SEQ ID NO: 608756 - DNA, 72 bp, Homo sapiens
ggatggtgccacaggaggctgtgcgggccccgctccgcttcgaatggtttaagctatgaagaaggacatccc

SEQ ID NO: 608757 - DNA, 100 bp, Homo sapiens
ctgttcaacgaatatttgtggaatggaccaatgggtccccagctcttcatgattggctaaaagatgtgtgtgaaaagaataagtggagtcacaagaattc

SEQ ID NO: 608758 - DNA, 101 bp, Homo sapiens
gctgccaaaagcctattgaacaagaagtcggatggcggtgtcaaggttggaaaagagactgttcaaaccactgaggatcagattttgaagagagatatgcc

SEQ ID NO: 608759 - DNA, 100 bp, Homo sapiens
gggaatagactccatctatccatatgaggcgtgaattacccttcactaagtcggctcatctcaccaatccttggaatgaacataaaccagtaaagatcgg

SEQ ID NO: 608760 - DNA, 101 bp, Homo sapiens
gattctgcctgacgagttccagctctttgttgctcagataataccactagtctgacggataaacacctggacccaatcagggaaaatctgggaaagcactg

SEQ ID NO: 608761 - DNA, 100 bp, Homo sapiens
aattgacactatttgtggaggattgatatgacagaaaggagccaaggatgactcaagtttttggccagagctgagtatgagtttatcagctctggtctct

SEQ ID NO: 608762 - DNA, 100 bp, Homo sapiens
taaatgttgagcctttttggcctggcttgtttgcaaagggagaagagcctgctgagtgcagtgaggccggtctcctgcaggagggagtacagccagagga

SEQ ID NO: 608763 - DNA, 82 bp, Homo sapiens
tggcagactttgggacgtgctcaacttggtttaggagagataatcctgattagaagcccaggacccaggaaggagacacagg

SEQ ID NO: 608764 - DNA, 100 bp, Homo sapiens
tcgaaaaaagcttattgggaagaaggtctgaatttcctgctgctgttcacaaagatgctttttatctttaactttttgttttccccacttccgaccccgg

SEQ ID NO: 608765 - DNA, 96 bp, Homo sapiens
tcaaggcttggttcaagccagatagcacctgaggacagaacatatcagggctccccagaataatccagaagtcgattccatcatggcagaactcaa

SEQ ID NO: 608766 - DNA, 100 bp, Homo sapiens
tctgaactcaggacttggcaagcagtgatgaacaacttggaaaattagtctacaatgctttggaaacagccactggtggctttgtcttgttgtatgagtg

SEQ ID NO: 608767 - DNA, 82 bp, Homo sapiens
cgcggattcgccgaggcaccgaggcactcagaggagatacactctgtgcagttttagagagagacacactcagtattcgaga

SEQ ID NO: 608768 - DNA, 95 bp, Homo sapiens
tgtggaaagaagttgcaaaacactgggtgctcaaaaatgtgataactttgctgaaaaaagacccctccttggtgtttgtaagagcattggatctt

SEQ ID NO: 608769 - DNA, 88 bp, Homo sapiens
acgggtagagattggcttcgggctgagctagcagtgagcaccttttggcccaatgaatatcaggaacttagtgatttggcccgtgacc

SEQ ID NO: 608770 - DNA, 83 bp, Homo sapiens
cgcccaagcgcaggggctcctcgggctcagtgggaactgtggctgcaccatctgtcttcatcttcccgccatctgatgagcag

SEQ ID NO: 608771 - DNA, 103 bp, Homo sapiens
cacaattgcctgattattgtaaatactctttatgaaattgactttgacgtggaaatacagggccttctgtccttaactttggtaatatttgtgtgaactctcc

SEQ ID NO: 608772 - DNA, 82 bp, Homo sapiens
gtaccggctgggccggaagatcggcagcggctccttcggagacatctatctcgtttggtgccctggttgtcagatgttggaa

SEQ ID NO: 608773 - DNA, 75 bp, Homo sapiens
ggagttcttacaacatggcagacattgacaaggggtgaagccagccagttttgacaaagtagcaattcctgaagt

SEQ ID NO: 608774 - DNA, 89 bp, Homo sapiens
ctggtcgtcagcgccgaggctgggctgaggcgccgcggtaccatgaggcgccggaatgtatcctgtcaggtataatgtcagtgaatggc

SEQ ID NO: 608775 - DNA, 101 bp, Homo sapiens
ttcgtcgcctccttgcccgtgaccgtcgctagaactcagttgtgcgttgcggccagtcgccactgctaagaagactgcataaactgggcgtgtcaaaggtc

SEQ ID NO: 608776 - DNA, 96 bp, Homo sapiens
ggcagccacatcagcctgccctctggctgctctttggcgtaaattgcaatcgattagggatcgtttctcagaatcaagttagaagtgagagttcag

SEQ ID NO: 608777 - DNA, 82 bp, Homo sapiens
ctgcggtcgaagaaggggacgccgacaagatctgactgcagccatgagcagcaatgagtgcttcaagtgtggacgatctggc

SEQ ID NO: 608778 - DNA, 98 bp, Homo sapiens
ggcagccctcatacctcaagggttctcttgtttatcgagggttttgggctggtggtctcggcagggacaccatgtggcggatctttactggatcgctg

SEQ ID NO: 608779 - DNA, 89 bp, Homo sapiens
ggaacaaaaggtcccggaccccccggatctgacggggcgggacctggcgccaccttgcagggtaaaccagacttgaatacaacattgcc

SEQ ID NO: 608780 - DNA, 96 bp, Homo sapiens
gatgagctgaagactgattacaagaatcctatagaccagtgtaataccctgaatcccgtaccagcatcaagatgatttatggtaataaggtactca

SEQ ID NO: 608781 - DNA, 83 bp, Homo sapiens
cccgggggcgcagggaaggagggcgtccgagtcaacaaccgcttcgagctgctcagagcccgggcgctgtggaagagattcta

SEQ ID NO: 608782 - DNA, 82 bp, Homo sapiens
atacagccaacctccaggtttcagtggcagttctcagcttggaactgcagttggctttttgctaccaccagttttagtaccc

SEQ ID NO: 608783 - DNA, 83 bp, Homo sapiens
tacatctacaagaggggacaagtacctttatgaaccagtgtatcccaacactattcctgatcagagaactccagttgcttcaa

SEQ ID NO: 608784 - DNA, 100 bp, Homo sapiens
tctgagtgcagccaccacctttgagcctcttgagcctgtgaaggacactgacattcagacaaatgctgtgcttcatgaagttaaaagagaggggctcccc

SEQ ID NO: 608785 - DNA, 83 bp, Homo sapiens
caccgaccccgcctactgcggcgcggggacccttgcagtctctggtcccagcccaccccatggcccctcccagtcccagcacc

SEQ ID NO: 608786 - DNA, 50 bp, Homo sapiens
cccagatccatttacactttacagtttatggttggctgtgggagatgtga

SEQ ID NO: 608787 - DNA, 83 bp, Homo sapiens
agctggctaacctccacttccacattccagcccaagggaaagtccaagatgtggaagatgtgaaatttgtcatcaattatgac

SEQ ID NO: 608788 - DNA, 82 bp, Homo sapiens
tggagagaacagtccagccccgcaggggcgacttgcggaagtccaggactcttccatgccaagccggtgccatctgtggggg

SEQ ID NO: 608789 - DNA, 100 bp, Homo sapiens
caagaatctcgtgctcaccggtttctcccacatcgacctggagagaagatgactgaggaggaggtggagaccgttctggcaggacacgaggacagcaacg

SEQ ID NO: 608790 - DNA, 120 bp, Homo sapiens
aagaccgtttgtgttttgtgatggaatatgttaatgggggcgaggtagctttggatatgttaaatcctcatgttactttgcctgttttttacccacatcttaagcatggtggtgtatgtg

SEQ ID NO: 608791 - DNA, 100 bp, Homo sapiens
ggagaatctgctgtcgcctgcagctgctcgcctgtctccgtcggaagggagcccaagctttgcagagaacgtgcgcatcgaccccagtagcctgtccttc

SEQ ID NO: 608792 - DNA, 97 bp, Homo sapiens
aaaagggaggaaactcagaaaagcgtaagcttgctcaggtgaccaagaatatggcccaggtgaccaaagccctggacaaggccctgagcaccatgga

SEQ ID NO: 608793 - DNA, 100 bp, Homo sapiens
acaaatccgccctatattttagagcatctggagatgcgccagggccgaggtaggctgggcgaggaagactctgatgtagatattgaagggtatgatgatg

SEQ ID NO: 608794 - DNA, 75 bp, Homo sapiens
taatactcctggacctgtgtgtcagttaatgtggtctcccatgtctcatgaatcacactgtcagagtacttccgt

SEQ ID NO: 608795 - DNA, 101 bp, Homo sapiens
aagagaaactccaggggcagataagggagtccaagaggaattcccgcttgggcactgcacttggctgtgattcatcagcatgaacccttcctggattttct

SEQ ID NO: 608796 - DNA, 89 bp, Homo sapiens
cacaacctggagcagcagatccaggccaggaacaccatgaagaagacttctttctctacattgcctacagtgacgaaagtgtctacggt

SEQ ID NO: 608797 - DNA, 83 bp, Homo sapiens
gaaaaacacccacctgaaaatatcattgatggataaccatgatgactacacagacttctactatgacatttgctccttttgag

SEQ ID NO: 608798 - DNA, 98 bp, Homo sapiens
caacccagagcaaattgagacgtccggaaaatcccgttttgtcaacctaatgaagcattcaaagaagacatatgactcttttcaagatgaacttgaag

SEQ ID NO: 608799 - DNA, 74 bp, Homo sapiens
ccggtgcagtcgggcctgcccggcatgcagatgagcagcaccagcagtaagagggctccgaccacggcaaccca

SEQ ID NO: 608800 - DNA, 100 bp, Homo sapiens
caacctgaactgcccccagcacttccgagccccgacccctgcagctgtgaggtatgattttgtagaagttgaggaacccagtgatggaactatattaggg

SEQ ID NO: 608801 - DNA, 98 bp, Homo sapiens
ctgcctgacccgagggaacttactggacgtcctgcaggagggcttcaatgagattgatatcagtaaatgccattatttagtggatttggacaccatga

SEQ ID NO: 608802 - DNA, 100 bp, Homo sapiens
gaggatgggcacttcctggagaagggccctgtggtcatgacatccatgcaggccgacggtcgcaaggtcctacggtcaagcatccgggagtttctatgca

SEQ ID NO: 608803 - DNA, 98 bp, Homo sapiens
gtgctgcggagcgacgcggcctgggaggataaggtaaactcctccctgctgacctcagactgcagcgagcgctgttcctgttcctcaagctctggcct

SEQ ID NO: 608804 - DNA, 101 bp, Homo sapiens
gaagtggatcgacgggcgcctggaggagctgtaccgcggcatgtgagaaagatcagtctaaagaaaaggagaagaaagtgaaaaaaacaattccttcctgg

SEQ ID NO: 608805 - DNA, 82 bp, Homo sapiens
tgactttcagctatggaatcgaaacattgaatgaggaggataaagcaaagattgctaaaagcaagaagaagatgaggcagaa

SEQ ID NO: 608806 - DNA, 98 bp, Homo sapiens
tttggcccttgtggtctgttctgtagtcagcacaaatctgaagatggtgtcaaagagaaattctggatgaagccccacccgcccttcaggatgccagc

SEQ ID NO: 608807 - DNA, 75 bp, Homo sapiens
tgacgtgatggcggcagcggtgctgacggaccgggcccaggtgactaataaaggtaccagaagaatatggctgca

SEQ ID NO: 608808 - DNA, 101 bp, Homo sapiens
cagggacccccaggtgagccccatgcactgcctggacgaggaaggcgatgactcagatggggttctgtccatgacggcacagccgggccctggccatggga

SEQ ID NO: 608809 - DNA, 98 bp, Homo sapiens
cctagatgaaatggccaaacaagctcgaaatctcatcactgatatttgcacagaacagtgtacccttagtgaccagccaaacatttcagtaatgcaga

SEQ ID NO: 608810 - DNA, 100 bp, Homo sapiens
cagtccccagtgagggtgtacaaatacccctttgaattaattatggctgctcattggtgggcagtattacttatgggaattgctctgatcatgctaatgg

SEQ ID NO: 608811 - DNA, 100 bp, Homo sapiens
gatgacaccggagtttgacgaagaggtggtttttgagaacgtgcgcatcgaccccagtagcctgtccttcaacatgtggaaggagatccctatccccttc

SEQ ID NO: 608812 - DNA, 100 bp, Homo sapiens
atgaccaagtggcagtcaccattctttggtccccaggggccctcgctttagcgtcacctccctcactgggcagcatgggggagaagtcagagaactgtgg

SEQ ID NO: 608813 - DNA, 98 bp, Homo sapiens
gcaaaacacactaaagattgggcagtcactggggagaacgcagaagctgaggaagattgtcattctgatactgtcagagcagatgatgatgaagaaaa

SEQ ID NO: 608814 - DNA, 100 bp, Homo sapiens
cagaggaggacgaggacctggggcagatcttcaccatccgcaggtgcccctccacggacccaggtggatcatccatgccatggagtatgaacttcagatc

SEQ ID NO: 608815 - DNA, 75 bp, Homo sapiens
gcccttcctggaggtcaccaaggaggcctttgacagatcgaggagctgctagagctgctgatgactgagatcctg

SEQ ID NO: 608816 - DNA, 75 bp, Homo sapiens
gacatcagccccaaacaggacgaaggcgtgctgaagatcactgtgtccactactatgatcttcgtaacactaaac

SEQ ID NO: 608817 - DNA, 90 bp, Homo sapiens
cctggttcctgcgtgctacggccctgtgggcctgggagctgcctctgaggaacacgccgcagagagaagaagaaggaggttcctgctgtg

SEQ ID NO: 608818 - DNA, 97 bp, Homo sapiens
gctaatcccctcagttaccaatccagaaaaccttccatcgctgccagatattccacccatacagctctgtgcagtgtgcctagaagacttcaagcct

SEQ ID NO: 608819 - DNA, 98 bp, Homo sapiens
cacctgaacagaaaactgcatttgacaaggaagcgtcctgatcagacatgggttcagtgtgatgcctgtctaaagtggcggaaattacctgatgggat

SEQ ID NO: 608820 - DNA, 96 bp, Homo sapiens
acagcatcggcgaggacgggaagtgcctccggaaaagaccaaagacaaagggaagaaaggcaagaaagacaaaggccccaaggtgcccaaggagtc

SEQ ID NO: 608821 - DNA, 100 bp, Homo sapiens
cggaggccctgccctcagagacgcgccccctagtggaagcagagtgggaagcagaaaatccattcctcgctgccgaagaattaacaggatgctctccaat

SEQ ID NO: 608822 - DNA, 98 bp, Homo sapiens
tcagtccacccaaggtctcctcggatcgcctggagaggcactcggacctgatcatggaagggaagtggttgctgtgtatgttactggtgcttggaact

SEQ ID NO: 608823 - DNA, 50 bp, Homo sapiens
agctcagcaattcttaccttgaacagatgttgttattgtaaagaatggaa

SEQ ID NO: 608824 - DNA, 82 bp, Homo sapiens
agatggagcccggactcctgggggatgcaggtggagattctggacgcaaagacaagggagaagctgtgtttcttggacaagg

SEQ ID NO: 608825 - DNA, 96 bp, Homo sapiens
gagtgtatgaccacaaacagccatcaaggtgccagcgagatttcagattcctgtaaacctctaaagaaaaggagtcgcgcctcaactgatgtagaa

SEQ ID NO: 608826 - DNA, 98 bp, Homo sapiens
cactgcgccatgcaggcaagaaggtttgggtacccagaccccacctacctgacccgggtgcaagaggagctgagagcgaagggtatcacagatgactg

SEQ ID NO: 608827 - DNA, 96 bp, Homo sapiens
cagtgccggaacactgtggcggccatcgaggaggtgtttgcaagagcagacccttggacctggtgtttatcattgatagttctcgtagcgtacggc

SEQ ID NO: 608828 - DNA, 99 bp, Homo sapiens
acctggatgagacatttgctacagcatcccacattaagtcaacgtgacgggtcagtcttacgagaatatggtaactgagatcatgtcaatgggctatga

SEQ ID NO: 608829 - DNA, 100 bp, Homo sapiens
tggatgctacttcctattctaatgggcaccagttgcgtcttgaagtgccatcagctgtaaccaaagttccacatcccaagacgacagccaggcgttcctg

SEQ ID NO: 608830 - DNA, 100 bp, Homo sapiens
gaaaacaggccagttcgttggatggctcttgaaagtctggttaataacgagttctctagcgctagtgatgtgaattttgattctgacattagcagtgtgg

SEQ ID NO: 608831 - DNA, 74 bp, Homo sapiens
gaaagcatactgcgagccctgctacattgaatgaagccaagagtgatgaaagaagctgtatctactccatcacg

SEQ ID NO: 608832 - DNA, 75 bp, Homo sapiens
agacccagtgaacaaatccgggggcaaggccaaaaagaagatgtcaaaatccacaggcaacttcctcactttgac

SEQ ID NO: 608833 - DNA, 100 bp, Homo sapiens
ccgaccttgagctccaggagttcgtctcttacgtctgcggaagtgcagctgcctcagttcttagcgcagggcgtctctggccgagcctctttttgtggaa

SEQ ID NO: 608834 - DNA, 100 bp, Homo sapiens
tcttcctcttgctgccagtggtagcgctcgtctggcggagctgggaacgagtctttgggaacgtggtccacccagggatgtaaaactgtgcttaccgatg

SEQ ID NO: 608835 - DNA, 78 bp, Homo sapiens
tgcgaggagatcgccattatccccagcaaaaagctccgcaacaagatagcagggtcacggtctagatcacattctcga

SEQ ID NO: 608836 - DNA, 50 bp, Homo sapiens
attggattggcatctttagagcagtcgatgatgtgaagaaaggttacatc

SEQ ID NO: 608837 - DNA, 98 bp, Homo sapiens
ccccgctggctgctgctcacatggtgtctgggcccttggcactctgctggaggagcaccggaattcacagaagcagatgaagctcctacagaaaaagc

SEQ ID NO: 608838 - DNA, 80 bp, Homo sapiens
ccccatgcagccccctctcagctccatgagctccatgaaacccactctgtcgcacaggtgtgtgtctggggaagagactt

SEQ ID NO: 608839 - DNA, 75 bp, Homo sapiens
aaccaacccagccgaccccccagaatttgccattttcagtggaaaacaagtggtcgttactagctaagatgtgtt

SEQ ID NO: 608840 - DNA, 100 bp, Homo sapiens
gggagcctgccctcgcatggtggccagggcacgtcactgcaggccaggtttacccaaggtccagcctagcccctaggcaccatgtcggacagtgatctag

SEQ ID NO: 608841 - DNA, 50 bp, Homo sapiens
aggaagacttgtaacctggagaagaggtgcaaacagctgcacagcaagtg

SEQ ID NO: 608842 - DNA, 82 bp, Homo sapiens
caaagagctcattaaggacgggaagaacctcatcgctgcgacgaaaagaacttagtgatttggcccgtgaccctccagcaca

SEQ ID NO: 608843 - DNA, 74 bp, Homo sapiens
agatctacctgacgggcctgcgagggttgaagattgtgaagcaatagcctaagtctattgcgtctgcagacatg

SEQ ID NO: 608844 - DNA, 75 bp, Homo sapiens
gaggaggttttcaggaccaaaattgtggaaaagtcactctggatattagaaatggctactccccagtcaattttc

SEQ ID NO: 608845 - DNA, 75 bp, Homo sapiens
tatagctgaactcatggacaagccatgaatcatcttaatggacagaaaatgtatggaaaaattattcgtgttact

SEQ ID NO: 608846 - DNA, 50 bp, Homo sapiens
agactccctgcctcctgagtcccaagcctggcccaactagagaatctgtg

SEQ ID NO: 608847 - DNA, 100 bp, Homo sapiens
ctcgagtagagagacgattccacttttcacagtctctaacaacgttgagaaagaagggccttaatggctgtgacagcccagaccccgatgcggacgattc

SEQ ID NO: 608848 - DNA, 96 bp, Homo sapiens
ggaaaactaggaatctatgatgctgatggtgatggagattttgatgtggatgatgccaaagttttattaggaggacttaaatgcattggacagtgg

SEQ ID NO: 608849 - DNA, 99 bp, Homo sapiens
tctggcccttgagttgtcagagaagtttaccagaacctgcgatatcctgaggattgctgagaaaaggcagaggcagctgctcccaaccccagaaccttt

SEQ ID NO: 608850 - DNA, 100 bp, Homo sapiens
cgctgaagctgccgccgttgcctccgccgccaagagtgagcgagcggacccgcgatggtgtgaagcctcagtttaggtcatctggtggttcagaacactc

SEQ ID NO: 608851 - DNA, 97 bp, Homo sapiens
agattccagtctgcattaaagtcattgaggacaagagtggacggcagagttttcaagctgtgacagatggctaccctgagaggaatctacatgcaga

SEQ ID NO: 608852 - DNA, 89 bp, Homo sapiens
tgttgaagacttaatccttcaaatgaaggcgctcaacgttgaaaaggcagcctggcatcctcgctacaacctcattgttgtgggccgat

SEQ ID NO: 608853 - DNA, 100 bp, Homo sapiens
tcgtgaacgaagattcgaaaagccacttgaagaaaagggtgaaggaggcgaattttcagttgataggtgtgatccctcacatccacaaatctctgattgg

SEQ ID NO: 608854 - DNA, 100 bp, Homo sapiens
gcaggggacgtgaacatggatgaccctaagaaggaaggagccaaaaacctgtatatcatctccgtgaaggggatcaagggacggctgaacagacttcccg

SEQ ID NO: 608855 - DNA, 75 bp, Homo sapiens
gctggatgagctgctgaagcccaccgaattagcaaattgtggctactaatttgccccctgaagatcaagatggct

SEQ ID NO: 608856 - DNA, 83 bp, Homo sapiens
cgcagtggtcgcttcttctccttgatggctctgagagattcctctgcgaatctgtttttagctatcaagtggcatccacgctt

SEQ ID NO: 608857 - DNA, 82 bp, Homo sapiens
gggacaccctggaagccaggaaatgttgctgcagcaaacgagattgctaaggaaaggaggaagcaagatgtggttaatcgtg

SEQ ID NO: 608858 - DNA, 82 bp, Homo sapiens
gcggcggcagcagcagtgagagtgtctccagaacgctatagctatggcacctccagctcttcaaagaggacagagggtagct

SEQ ID NO: 608859 - DNA, 50 bp, Homo sapiens
gtccattgactatgcagcctaatgatattctctaagccgctttcatcatg

SEQ ID NO: 608860 - DNA, 82 bp, Homo sapiens
caagaatccttttggcttagagatcactaatccatcttcagcttcaattacaattatgggttattgatgaaaagaactggaa

SEQ ID NO: 608861 - DNA, 74 bp, Homo sapiens
aaataaggctaaacttgcaatatggggaccagttactctccacaagaaaattcacacaaccacagtgctcttca

SEQ ID NO: 608862 - DNA, 90 bp, Homo sapiens
gcgcgacgcgcaccaacggtggaggagagattaaacagattctagaaaatgaacttcagatacctgtgtccaaaatgctgttaaaaggct

SEQ ID NO: 608863 - DNA, 103 bp, Homo sapiens
cagctccatccaggccaccactgcggcgggctctggtctgctccatctggacacaagcatctgacggtagaagagttatttggaacctctttgccaaaggaac

SEQ ID NO: 608864 - DNA, 75 bp, Homo sapiens
cgtcccgctgccgtcgccgccgccaccatgcccaagagaaaggtaaggctggcctctctgcagtcagaggtctga

SEQ ID NO: 608865 - DNA, 100 bp, Homo sapiens
cttttcctcgctggggtgtacggactcccaaattcgtcagagcacagcttatagcttacatcagcctcagggaaacaaggaacatgggaccgagcggaac

SEQ ID NO: 608866 - DNA, 100 bp, Homo sapiens
gtgggacttcgaaggagggctctcctgtctgccaccatcctgggttgacaattctacacaaggaggtgctggagaatctggtaaaagcaccattgtgaag

SEQ ID NO: 608867 - DNA, 82 bp, Homo sapiens
cagaagtcgcgtgtctaggtgagtcgcggtgggtcctcgcttgcagttcagcgaccacggccgggctctcgccatgggtcac

SEQ ID NO: 608868 - DNA, 101 bp, Homo sapiens
gataggggctgtggcagtacgcggggacccggctgcggtggctgcgggactgacgagtatcattgcccagtgcctaagatcttttatgttcagctcactgt

SEQ ID NO: 608869 - DNA, 50 bp, Homo sapiens
cgcggatctcaccgccgctcaggatatgatgcttcctggtgtgtttagtg

SEQ ID NO: 608870 - DNA, 100 bp, Homo sapiens
ggattccgcgactgccggggcaccgcaggttttggactcgctgaagcgggtgcccgggaaacatttgagaattactaccgaaaacagaggcgaaaacagg

SEQ ID NO: 608871 - DNA, 83 bp, Homo sapiens
caatgatattaacattgaaactgacaacgacagtgatttttctgtgagcgagtgctgtgctttcatgggcctcttctttatga

SEQ ID NO: 608872 - DNA, 87 bp, Homo sapiens
gagcatggccaagtccagatatatggagctctacacatattactcacgcgcagatgcggaaaacgccatgcggtacataaatgggac

SEQ ID NO: 608873 - DNA, 74 bp, Homo sapiens
atgatctacctaccaatcgtgaaaactatattcacagggaaaccaggaacaactggtaactgtcatggaggaac

SEQ ID NO: 608874 - DNA, 75 bp, Homo sapiens
cccgggacctgcatggccaggcagagtcagcagctgcagtgtggaagggtggcccggtggaaatcctgccctttc

SEQ ID NO: 608875 - DNA, 82 bp, Homo sapiens
gcgacagtacaaagaagactcttgtcacactaattgccaacaacaatgagaaacttgcccaggccaaagaagagaacgtggg

SEQ ID NO: 608876 - DNA, 83 bp, Homo sapiens
taggcctggaggccgccgcgagcccgctttccaccccgacctctgcccaggccgcaggatcctgatggtgaacatgccaggag

SEQ ID NO: 608877 - DNA, 96 bp, Homo sapiens
tgtcaggctgggaggaggaggaggagagctggaccttcctgcagacggtgagcagtgagaaggtccgctccactaatctcaactgctcagtgattg

SEQ ID NO: 608878 - DNA, 110 bp, Homo sapiens
gagaccaccgaagactgcatcgccaagatcatgctatccgtggtcctgaaccagttatgtgtgttgcatgagaaaacgccagtaagtgacagagtcaccaaatgctgcac

SEQ ID NO: 608879 - DNA, 101 bp, Homo sapiens
taatggttgccaaatgtcagatgcagttactgtagaagtcactcaatataatccaccttttcagtgggctcgggatgagtttgaaggcctcttcaagcagc

SEQ ID NO: 608880 - DNA, 100 bp, Homo sapiens
atcgactacaaacggaacttgccgcgtcgaggactgtcggaaagcatgctctgaattgccatcggatgaagcctgctctgttcagcgtgctctgtgagat

SEQ ID NO: 608881 - DNA, 100 bp, Homo sapiens
cagacggctgcccttcaagtaccatgcaccaattccagctggacatcactgtgaaaatgggacgggataaagtccgagaaatgtttatgaagaatgccca

SEQ ID NO: 608882 - DNA, 74 bp, Homo sapiens
tttgtggtattaaacatctgcattcagctggtataattcatagactctagaggacaaaatcccagtccttggca

SEQ ID NO: 608883 - DNA, 75 bp, Homo sapiens
acgcagcaacaacagcagccggcccttgttaactacaacagaccatctggatgatgaggatgataatgcaggcac

SEQ ID NO: 608884 - DNA, 90 bp, Homo sapiens
agcgcctacaccaccaagattctgctctcaaaggtctatggccctgtgttcactctgtattttggcctgaaacccatagtggtgctgcat

SEQ ID NO: 608885 - DNA, 130 bp, Homo sapiens
cctggctgctgacccctatccagaggtctcggacgtggccatgaaagtactcaacagcatcgcctacaaggtttacaagtcgtcctgaagtcgatcatgaaggcgatgatccctttgctgcagatcggcc

SEQ ID NO: 608886 - DNA, 82 bp, Homo sapiens
gttcattgaactcatccggcagaataagagactggacgctgtgaggtacatgtcccagagcaagcacacggaggcccgggag

SEQ ID NO: 608887 - DNA, 50 bp, Homo sapiens
agaactggatgaaaagcatcaaggaggactggacctacagagacatctgg

SEQ ID NO: 608888 - DNA, 99 bp, Homo sapiens
gcttaacaagcagagagctcacctaccacaaacagccaggtgaccaagaatatggcccaggtgaccaaagccctggacaaggccctgagcaccatggac

SEQ ID NO: 608889 - DNA, 100 bp, Homo sapiens
tttggagtatttggatttgaagaaaagactcttgctttggaacgtcagaaaactgcagagaaagagcgattatttcttgtatatgctaagcagtggtgga

SEQ ID NO: 608890 - DNA, 100 bp, Homo sapiens
acgatccgttctgacatggatcagattgtgaactcaaagaactatttaattggaaagatcaaaggtaattaataatgcttgtgctactcaagccatagtg

SEQ ID NO: 608891 - DNA, 83 bp, Homo sapiens
aacagacttcggagtacctgcgctatgaagacacgcttcttctggaagaccagccaacaggccctgaatgaagccttgaagct

SEQ ID NO: 608892 - DNA, 82 bp, Homo sapiens
tggggatcttcgcactatcccaaggagccttcacgtaaatgggtccagtcatgcctcccagtaagaagccagaaagctcagg

SEQ ID NO: 608893 - DNA, 50 bp, Homo sapiens
ggtccctcgcctcccggccgagctgacgggtatatttacttctggcacat

SEQ ID NO: 608894 - DNA, 100 bp, Homo sapiens
tcttccccagctctgcagccacatactatccgtttgttcaggaaccaccagtgacagagtaggtcgatttggacaattaacttatgttcgcagttatcag

SEQ ID NO: 608895 - DNA, 50 bp, Homo sapiens
gccatcgtccaaggaggtggcaggaccaggaagaaacaggctcctgccag

SEQ ID NO: 608896 - DNA, 98 bp, Homo sapiens
cgggcggcaaaggagcagccatgagggccgggcccagtcaccgaccgaagactatgaccgtctgaggcctttatcttacccaatgaccgatgtcttcc

SEQ ID NO: 608897 - DNA, 76 bp, Homo sapiens
ttgagagctgccaaagaccttccttcgtttgagtacaagctcagcttcaaaggcccaaggctggcattgcctgggg

SEQ ID NO: 608898 - DNA, 98 bp, Homo sapiens
gagcctggagtctgcgaaggccgggacccggttccccggcccacagtgggggtgtgcaaacccgagagaactggatttcaacactacacttgcacaat

SEQ ID NO: 608899 - DNA, 100 bp, Homo sapiens
atggaacccgaagaagaaaggattcgttacagccagagattgattttaggtgatgggcaagtcagaaagtcagatggatataactgatatcaacactcca

SEQ ID NO: 608900 - DNA, 75 bp, Homo sapiens
agcaagaggtgtcggaggtctcatctttgaactactgccggagcttctgccaggacaaggaagatggggagccaa

SEQ ID NO: 608901 - DNA, 74 bp, Homo sapiens
ggagcccagaagctgccaccgaaccaagaccaagatcactccatggatgaaatgacagctgtggtgaaaattga

SEQ ID NO: 608902 - DNA, 101 bp, Homo sapiens
cagatgccttccctctctgttttgtctgtgtgcacagaggaatcatcacctccaaatactggtcccacggcaacagctgaacagatgcgtctcgctcaagt

SEQ ID NO: 608903 - DNA, 90 bp, Homo sapiens
tggatccttgaatgttgaagatgtccttaccagctttgacaatacaggaaatgtttggattaaagcctgtggtttccacagaagcaccac

SEQ ID NO: 608904 - DNA, 100 bp, Homo sapiens
ccccgcagggcgatggacggccgaaccccgcgcccgcaggacgccccagccagatttattgctaaacatgggtgcatttttggataaacccaaaactgaa

SEQ ID NO: 608905 - DNA, 75 bp, Homo sapiens
caaagaacagacaccttgggattctataaaattgacttttgaagcaacaggctggagtgcaatggcgcgatctcg

SEQ ID NO: 608906 - DNA, 50 bp, Homo sapiens
gtgccctttgtattaaggatgaagataactgtgtccagaggacccccagg

SEQ ID NO: 608907 - DNA, 50 bp, Homo sapiens
cactatggcgctgaaacggattaataagactccagggattagagctcgat

SEQ ID NO: 608908 - DNA, 83 bp, Homo sapiens
cccggagtggggtgtcggcgcctcattcgggtggagctgagccggagacagcggaaggagagttttacatggaagtggcttac

SEQ ID NO: 608909 - DNA, 50 bp, Homo sapiens
gtcaggtgctcctccaccctggtgacgtgaaatattgtggggctgagatc

SEQ ID NO: 608910 - DNA, 100 bp, Homo sapiens
gcctccctcgtgagttgggcttggtaccgtgctgcccagaatgcccttcgggaggtgctctggacccctcgggtgctgtcaaatggcgtccagttctcgc

SEQ ID NO: 608911 - DNA, 98 bp, Homo sapiens
tgtctggaatatcaaagagatgctcagtattccttcaggctctggattagaagcccaggacccaggaaggagacacaggaaatttattcaaagtcccc

SEQ ID NO: 608912 - DNA, 100 bp, Homo sapiens
gcagccgcgaggaggcgcgggaggtgttcgagaacgaccccgagacgggtgacatccagcagctgctctttgtctcggaccaccgggcagcttatgatta

SEQ ID NO: 608913 - DNA, 97 bp, Homo sapiens
cgtgcccgccggggggctagtggccacgctgcagagcctcgggaaaagttaaccattggatgccgccagctggttgagatggaatataccatgcagc

SEQ ID NO: 608914 - DNA, 100 bp, Homo sapiens
gaaggcgtccgttggccttcgtacccgtcttgattgagaacatgaaaggctcccggagcagcgctgactcctccaggaaacactgaggcagacgtgtcgg

SEQ ID NO: 608915 - DNA, 98 bp, Homo sapiens
tgatttgactcccttcctggttttgaaagcaagaaagaaacaaaagttcacctctgcgaaggaaatgggtcctgatgaatatgaagagatggaagaag

SEQ ID NO: 608916 - DNA, 98 bp, Homo sapiens
cctccaactttgcgacggaaatgtgtcatcgaaagccaggtcccagtagggatggcacaatcagcgaggacaccatccgagcctctctcatctctgcg

SEQ ID NO: 608917 - DNA, 95 bp, Homo sapiens
attcgcagtggtcgcttcttctccttggttgtttttcaccattcagaacattgcctgaagcaggtccaccatgccgttagtaacgaggaacatcg

SEQ ID NO: 608918 - DNA, 82 bp, Homo sapiens
tgctctgcgtcctcatcgggcttatgttcgaggaccaactgttgccaatcctgagctgttccgcaagttcggacgagggcca

SEQ ID NO: 608919 - DNA, 50 bp, Homo sapiens
tggcccccaagatcggccccctgggtctgccacccgtgggaaactgttac

SEQ ID NO: 608920 - DNA, 75 bp, Homo sapiens
tggaccctggagtacaccccgcagcacagccgcgacttcaagagtccttggtataaatgaatggcagaatacggg

SEQ ID NO: 608921 - DNA, 83 bp, Homo sapiens
atgggagttgcttttggaatgaatttggaatcttcccttgaagaggttatggaaacaaaggacatgctttacatcgtcactga

SEQ ID NO: 608922 - DNA, 50 bp, Homo sapiens
acagcgcagccatagaggaagtgttggaggcatctgtccacccatgtggt

SEQ ID NO: 608923 - DNA, 75 bp, Homo sapiens
cacagaacttctagaagttgaagttacaaaggctgcgtccctgctggctgtgctgctgctgctgctggagcgcgg

SEQ ID NO: 608924 - DNA, 100 bp, Homo sapiens
ctgtcttggctggacccaggtgggcagatcctcagatcagagagcacgttttcaatatcataggagcatttgatattccacgctttgtgtacaattcaga

SEQ ID NO: 608925 - DNA, 83 bp, Homo sapiens
ctgagaaccttgtgctccaggctgccccataataataagactttgaccccgacgcaggcttcagtgattgccgcggatcagaa

SEQ ID NO: 608926 - DNA, 82 bp, Homo sapiens
gcgccgagggcgaccagatcaacgccagcaagaacgaggaggacgcgggcaggttcaggagaagtggcacctggtggaggac

SEQ ID NO: 608927 - DNA, 50 bp, Homo sapiens
agagaatttgaccttctaagatcaaaaacacatttactccccaataattg

SEQ ID NO: 608928 - DNA, 89 bp, Homo sapiens
gtggttttgatttacaacctgtcaggaattacatgaacgacagccttcgcaccgacgtcttcgtgcggttccagccagagagcatcgcc

SEQ ID NO: 608929 - DNA, 90 bp, Homo sapiens
attttgttgaagatgactcggacattttacatggtatgatctcgtgaaatcttgagagaaactgaatgacgaatgaaactattgttcctg

SEQ ID NO: 608930 - DNA, 73 bp, Homo sapiens
gttcagcacaccagtggggcagtgcctcggatgccgaggaatgtgacagggctgggagtgtggccacctgcca

SEQ ID NO: 608931 - DNA, 90 bp, Homo sapiens
agcccatggcgtacagtcaaggaggcggcaaaaaaaaagtctgctactactacgacgtttgtagatgcggacaacctgatcctcaaccct

SEQ ID NO: 608932 - DNA, 75 bp, Homo sapiens
tctcagagtttggacagttcctgcccgaagccaagcggtctctgaactggaagaagttcgggaactcagagtttg

SEQ ID NO: 608933 - DNA, 57 bp, Homo sapiens
ctgtgcctgctgctgagcagcgccgcggcttgaagaagagagtaaaggagattgtac

SEQ ID NO: 608934 - DNA, 100 bp, Homo sapiens
ggctgctcccatcattgatgtggtgcgatcgacaaaaaacttggactttcgccgaaagtgggacaaagatgaatatgagaaactcgccgagaagaggctc

SEQ ID NO: 608935 - DNA, 90 bp, Homo sapiens
atccgccgcgacgggaccctggtcaccggggccatgaagcccccaggaggagaatcgagcaatctttttggaagtccagaagaagctact

SEQ ID NO: 608936 - DNA, 50 bp, Homo sapiens
tgtctctgcccagaagctttgcgaagactccagcgggaggaagaagaggc

SEQ ID NO: 608937 - DNA, 83 bp, Homo sapiens
tggctgcagtttgaggctctgaacaagattgatccaaatcctgatcagtcagcagatgatagaccatcctgcccctctcgttg

SEQ ID NO: 608938 - DNA, 74 bp, Homo sapiens
gtgagggccgagtgaaatcgtgcatttgcgggagcagattaagcgagtaaaagactcggatgatgtacctatgg

SEQ ID NO: 608939 - DNA, 96 bp, Homo sapiens
actgctccgctctcagctcatcctgaagcttcggcagcactatcgggagctgtgccagcagcgagagggcatgtcagagcgggagcgacaggtgat

SEQ ID NO: 608940 - DNA, 75 bp, Homo sapiens
tgtctattctgaactcaacttctgaaatttacagaaacaaactacatctcaggacacatcatctcagagttggag

SEQ ID NO: 608941 - DNA, 75 bp, Homo sapiens
cttaaatctgtcgtttgaatttaggaccacctcgcctatttgatggctttgcagatggactaggagttgctgaag

SEQ ID NO: 608942 - DNA, 75 bp, Homo sapiens
atttgaaccatgtttggattgaagccgcctctgtattacttaccagggtttccaggcctgaggtgcccgccctgg

SEQ ID NO: 608943 - DNA, 75 bp, Homo sapiens
agaggctgcccagaaagcagttaacagtgccaccggtgttccaactgtttaaaggttaaagcacgaattgggagc

SEQ ID NO: 608944 - DNA, 98 bp, Homo sapiens
aggatggcggagtcggggctcctgacggctaaggcagctggataagcacagccaggccacagcccagcagctggtgcagctcctcagcaagcagaacc

SEQ ID NO: 608945 - DNA, 75 bp, Homo sapiens
actgccctctgcgctcctgcatctgcctccccatatattgatgatgttaagaagttcaaaccgggttacctggaa

SEQ ID NO: 608946 - DNA, 51 bp, Homo sapiens
ctggaagatcggcttccagctggaccagttgctcttctgtgatgactgcga

SEQ ID NO: 608947 - DNA, 75 bp, Homo sapiens
cgcgcctggccgcgaacccggaccctaagaagggagctcgaggagcagcacggcatccactgcaacatgacgtta

SEQ ID NO: 608948 - DNA, 88 bp, Homo sapiens
tcgggacaccccggaagctgggaaatgaatcaaaggcatgggaggttgatacctgccggggccattacaacaatgtatcttgtgccgt

SEQ ID NO: 608949 - DNA, 112 bp, Homo sapiens
gttgagaagaatccaactattgtcaatttccctattacgtctggtcttctctcgtctgagccctgagtactacgacctggcaagagcccacctgcgtgatgaggagaaatcc

SEQ ID NO: 608950 - DNA, 100 bp, Homo sapiens
ggcacgggcggctccgcagtgaccggactcgggggaggtcgagctgtgtttagagtgcatcgaatgggccaagtcagagaaaagaactttcttacgccaa

SEQ ID NO: 608951 - DNA, 74 bp, Homo sapiens
ccagtgtttccgtcagtacgcgaaggatatcggtttcattaaggacaaggagactggctttcacagaggtttgg

SEQ ID NO: 608952 - DNA, 100 bp, Homo sapiens
ggaaaacatgacgtctccagccaaattcaaaaaggataaggagatcatagcagagtacgatactcaggtcaaagtggtagacggaggagaagtccatccc

SEQ ID NO: 608953 - DNA, 88 bp, Homo sapiens
acaaacgcttgtgcgagtaaatgtagagtcattaacaaggagcatgtactggccgcagcaaaggtacaacttggccaagtagaaatca

SEQ ID NO: 608954 - DNA, 97 bp, Homo sapiens
aggggccttgataacacagagtttcaaggtgtcatggagaaactccagctgggcccagagattctgcagcgggaaaatccaaggcttatttatgcca

SEQ ID NO: 608955 - DNA, 96 bp, Homo sapiens
ctttgcagagccatacaaagttgttgacatcatggacatatgtgagtccatcctggagaggaagcggcatgacagcgaaaggtctacttgcagcat

SEQ ID NO: 608956 - DNA, 100 bp, Homo sapiens
ggagaactaacccacacaggatcatttcgtgaaggagcaaggctgaagaaccagacctggactttcttaggtaagaatgattgatgttggctgatattgg

SEQ ID NO: 608957 - DNA, 90 bp, Homo sapiens
ccctcaggggagggcgatcccccgcggcaccccggggccaccaccggcccacggagcagacagtggtgaccgaggattttagccacttgc

SEQ ID NO: 608958 - DNA, 71 bp, Homo sapiens
ccaggatggacaacagcaaacagcaccaaccactgtatcaaacacgcaaacatgcagatctttgtgaagac

SEQ ID NO: 608959 - DNA, 100 bp, Homo sapiens
ggagcaagaggaccctgcggactactgcaaaggtcattcctgtcccaatcagctgctctactactgatgacattaaagatgccttcattacccaggcaca

SEQ ID NO: 608960 - DNA, 95 bp, Homo sapiens
ggttggagacctggttccttgacttcaaagtcctaccccaggaagctgaagaggagcgatatgagaggttccccttccaagcctccgtggagttt

SEQ ID NO: 608961 - DNA, 100 bp, Homo sapiens
cggggcctgaaccgtatccagactcagaagttgcatgctccaggcagattccgaaaagctgcgccaggcatggattaaggctgttcagaccagtattgct

SEQ ID NO: 608962 - DNA, 90 bp, Homo sapiens
caccatgtgggaggaggaaaatcatcttatcagacgaaggcaaaatgtatggtctagtgacggagcccgcgcgcggcgccaccatgcggc

SEQ ID NO: 608963 - DNA, 82 bp, Homo sapiens
gcacatgcaccggcagaagccgcccatcatccacagggacctcaagcaaactgtcatcaggagcttaaataggacagatttt

SEQ ID NO: 608964 - DNA, 97 bp, Homo sapiens
atccaaatcttgcggcaacgcccccgggacatgcatcgtcccctggactctctcaaaattgcggcgagcagtaagaagcagcgtgtggaaaagggag

SEQ ID NO: 608965 - DNA, 82 bp, Homo sapiens
gggagcagctggctctgggccttgaacattccgaaactgtcaagattggcaaggatggagaagatttgatggatgagagtgt

SEQ ID NO: 608966 - DNA, 83 bp, Homo sapiens
cgtcggagcacttactggagtccaagatgctaatgttccacaaccctgcttaggctattgtcattcgtggaacaaatatttat

SEQ ID NO: 608967 - DNA, 83 bp, Homo sapiens
cgccgccacaccgccgccacaccgccgctgcctcagtcatgccgcttgcttggctcaggaacaacagaagagaataaagaaaa

SEQ ID NO: 608968 - DNA, 90 bp, Homo sapiens
agttctcccggtgtggccacgagtcggagctccttaataagcatttatagtcagtttttggcagcaatagaatcactaaaggcattctgg

SEQ ID NO: 608969 - DNA, 50 bp, Homo sapiens
tgcccctggagtccatcaaacccagatggcacatttcctagaggcagaat

SEQ ID NO: 608970 - DNA, 100 bp, Homo sapiens
ccccgatggcaccgattgccaccgcaaagcctacagcaccaccagtattgccagcgtcgctggacccgtcgccatgggccgtgtgatccgtggacagagg

SEQ ID NO: 608971 - DNA, 75 bp, Homo sapiens
gcggagggaaaaaggaagaggagaaggaaattgtcccgaatccctgcagggagaaggactcagaattgaaccaga

SEQ ID NO: 608972 - DNA, 51 bp, Homo sapiens
ctgattttagattttggtacatttcagagtaaacatcagtctccaaagata

SEQ ID NO: 608973 - DNA, 87 bp, Homo sapiens
atacaacattgaacgtcataagacttgttgtttctgatgaagaattgaaaagaagagtagctgaggagctggcattggagcaagcca

SEQ ID NO: 608974 - DNA, 106 bp, Homo sapiens
ttattatcaggttcacgccaacagtacctcattgctctttggcgactcttattgtatacaattggaccgtggatgaggtggtacagtggctgatcacatatgtgga

SEQ ID NO: 608975 - DNA, 90 bp, Homo sapiens
tagcattgcagttggctgaaccttgtgtcaaccatccattccaggagccagctatctgaggtttaagaattgtttaagctgcatcaatgg

SEQ ID NO: 608976 - DNA, 75 bp, Homo sapiens
ctgaagcagtggccgacatcaagttttcctctgcagataactggttaagggaagttaatttatggtgccctactt

SEQ ID NO: 608977 - DNA, 73 bp, Homo sapiens
tctgtcgagcagcggacgccggtctctgttccgcaggatgcaacatgaaccgtgaagaccggaatgtgctgcg

SEQ ID NO: 608978 - DNA, 100 bp, Homo sapiens
aggcgcgagaagagaaggcactactgccattagaactacaagatgacggctctgacacactcctggaagcctgcactttccgtagaccttaaaatctcag

SEQ ID NO: 608979 - DNA, 90 bp, Homo sapiens
ctggtgacgtagtgagtgtgatggccgccgcgaggccgggaaggtgaagggcggcaccttcctacttctgcccagccacagccctcccct

SEQ ID NO: 608980 - DNA, 109 bp, Homo sapiens
gtcaaacatattcatgtcaaagctttttccaaagatcaggaggatttgacagctaaggatattgaagaaattattgatgagctcaaggctggcaaaatcccaaaaccag

SEQ ID NO: 608981 - DNA, 100 bp, Homo sapiens
ggcctgggagcttgctgcagcttcagctttgagagagaaaagaaccacagtggttgcacaactgaaacagcttcaggcagaaacagaaccaattgtgaag

SEQ ID NO: 608982 - DNA, 75 bp, Homo sapiens
caccctgttgtggctctataagcaggccataggaaaaggatacagagtagagtttcatgaacctgaaacttggtg

SEQ ID NO: 608983 - DNA, 88 bp, Homo sapiens
cagcatcaagatgatttatggtaataagaacatggtccaagacaattcctgggaaagttcagttcttctcaagtgagggttctgacac

SEQ ID NO: 608984 - DNA, 51 bp, Homo sapiens
gaacgaacatcttctggacctttgtccagggtaagggactgttctgaagaa

SEQ ID NO: 608985 - DNA, 100 bp, Homo sapiens
ggcagttcagaatgatggatcaagctagatcagcattctctaacttggttttaggagaagttttagcacaacttctgcttcttcccaaaaggagattaac

SEQ ID NO: 608986 - DNA, 96 bp, Homo sapiens
cgacggagtgcgtttcttctatgaagggtaacccagtgcaagtacaaacgcatcggctgcccatggcacggccccttccatgagctgacggtgcac

SEQ ID NO: 608987 - DNA, 98 bp, Homo sapiens
cgactcgagggtgacgctcgctccgctcgtcccgctcgtcatggcctacccgggatacggaggaggggctgggatatgaagaacaacagcctgaggtt

SEQ ID NO: 608988 - DNA, 83 bp, Homo sapiens
gccaatgtgggatcgatgtttcaatattggaagcgctttgatttacagcagctgcagttgcagagtgggcaggatcttaagac

SEQ ID NO: 608989 - DNA, 80 bp, Homo sapiens
tgtcagcctgccctaggacttcatgtctatatatttccccattcactgatctccagcaccctgccggtggcactactgag

SEQ ID NO: 608990 - DNA, 74 bp, Homo sapiens
cgagctccagccgaaggagaaggggggtgcagctgaacctggtgttttagaggataccttggtcccagagtcat

SEQ ID NO: 608991 - DNA, 87 bp, Homo sapiens
ggcctggcgtgcactccgcacctcggggacattattgcgcgtggaacggctgcttttggaagtaaaggcatgacttcctggcaccac

SEQ ID NO: 608992 - DNA, 149 bp, Homo sapiens
cgagcgaggaggcccgggagcgccgagcgtcgccgccgccgccgccatgaacaactcgggcgccgacgagatcgggtacatgtcccagagcaagcacacggaggcccgggagctcatgtactcgggagccctgctcttcttcagccatg

SEQ ID NO: 608993 - DNA, 100 bp, Homo sapiens
ttaacacatcatgaaggctagtttggatgtggaggggaatagactccatctatccatatgagggagagtcccgtattctcagagtaaaagttgtttctgg

SEQ ID NO: 608994 - DNA, 75 bp, Homo sapiens
ttcagcttgagccccatcactagcaagcaactttgactgctgtcttggatacacagaccgtattcttcatcctaa

SEQ ID NO: 608995 - DNA, 100 bp, Homo sapiens
ccgtttccctctgtgcggcggccggcgggaccataagggcttaactcatatatttaacccccctccaaaaagctggcagtgatggtgaaagcataggaaa

SEQ ID NO: 608996 - DNA, 95 bp, Homo sapiens
caagatgtctgacatggaggatgatttcatgtgcgatgatgaggaggactacgacctggtgggaaactacctccgtatgttccgaggttctctgt

SEQ ID NO: 608997 - DNA, 74 bp, Homo sapiens
ggaggctctaggctccaagacgccgtcgcttgagagttcttcagatgctatatatttggcaaggcatgttggtt

SEQ ID NO: 608998 - DNA, 100 bp, Homo sapiens
tcagcgagctctatcgggacccagcggaggatggggtcaccgccctcagtgtctacctcacccccaagaccagtggccactaacacggacaccagccgaa

SEQ ID NO: 608999 - DNA, 82 bp, Homo sapiens
atgcctgccacgtgccagccaccagctaagggccggtcactccgcgcaagtttgggttcctgttttagaactgccacctaag

SEQ ID NO: 609000 - DNA, 85 bp, Homo sapiens
ctatgcccacagagcttgatccagaagtgcacagatttattgctaaacatgggtgcatttttggataaacccaaaactgaaaaac

SEQ ID NO: 609001 - DNA, 98 bp, Homo sapiens
atgtatgaaaattcctactggacaagaatatgctgccaaaattatcaacaccaaaaagctttctgctagggggccgttgctccagggagaactgcaaa

SEQ ID NO: 609002 - DNA, 75 bp, Homo sapiens
caggcccagatgcgcgcgatgctggaccagttgatgggcacctcccgggacggacaagtcctgcgcttggggatc

SEQ ID NO: 609003 - DNA, 90 bp, Homo sapiens
ccccaagcggatactggtcttctcgtcggattgcccatgcacttgttgcagaaacagccaagtattatcagaaaatccacccagcttcac

SEQ ID NO: 609004 - DNA, 75 bp, Homo sapiens
cagggatgagtcatgtggtggtgaaaaatgaccctgaactggaccagcagctctaacactccaagaaaggctgtg

SEQ ID NO: 609005 - DNA, 51 bp, Homo sapiens
cacaccgacaggctggagcgcgagaagtcttgctgtgtcacccaggctgga

SEQ ID NO: 609006 - DNA, 76 bp, Homo sapiens
gttgatgtttaggaggttgagaggtttgcctttagaaaactctcccaccatgtcgcagaatggatacttcgaggat

SEQ ID NO: 609007 - DNA, 75 bp, Homo sapiens
acagaaaaatagagcctctattaatggacacttctataaccatgaagtagttgatgtcacttggcgatattcctg

SEQ ID NO: 609008 - DNA, 100 bp, Homo sapiens
cgaatatcagcctggcaagtcttccgttctgaccaacgaaaagatgacatatctgaagagatggattaagaatgctttggattaaggattgtggagcaca

SEQ ID NO: 609009 - DNA, 95 bp, Homo sapiens
atggattgctctccaagtttttgtgttcctggcctttggaaccccttcatcatattccgcagattcttgagtatcagaacaccaccttctttggt

SEQ ID NO: 609010 - DNA, 75 bp, Homo sapiens
taccacagtgaagaaattcttcagtgcatcttccagggtcggatcaaagaaggggggctagagagctgaaggaga

SEQ ID NO: 609011 - DNA, 87 bp, Homo sapiens
ggtaggaaggagacacagttccatggatcagaaggcagacaagcagcttttcagatgcaaatgcggggatctgatgagcttctttct

SEQ ID NO: 609012 - DNA, 83 bp, Homo sapiens
gcttctgcggctgtacggagccatcttgcaggagtctatgaagatcgcgctgcagcacggggaccggccactgcaggcgctct

SEQ ID NO: 609013 - DNA, 76 bp, Homo sapiens
gcgtgccctacttcaaggataagggcgacagcaacagctctgccggctggaaggaaaaacaagaatggtggtggct

SEQ ID NO: 609014 - DNA, 74 bp, Homo sapiens
ttcctgctagtcctggtggatctgcagtacgaaggcttggagtcccgatttcagagcaagtctggctatctgag

SEQ ID NO: 609015 - DNA, 51 bp, Homo sapiens
gctgagtcctacacagttctggcctcggccttcatcatcgtcatgctcctg

SEQ ID NO: 609016 - DNA, 50 bp, Homo sapiens
ttccgctttgaaatgcagcgggatttgggaagacatgtaaggaatttgca

SEQ ID NO: 609017 - DNA, 101 bp, Homo sapiens
ctgggacttcccgtccgcggcgtggaggcctgcctagggtagttaaaagacgagtgaatgctctcaaaaacctgcaagttaaatgtgcacagatagaagcc

SEQ ID NO: 609018 - DNA, 75 bp, Homo sapiens
ggcgccgagaggccgtgcgggacgcgggcgccaggaccggccgaacgcagagagctgacatcgcgctgatcggat

SEQ ID NO: 609019 - DNA, 100 bp, Homo sapiens
aaatcatggcggctttatcagtttgacttcatgggcctcagaaacaccacagaaatcgtgacaacgtctgcaggcctggttgcagtatgcttgaaatctg

SEQ ID NO: 609020 - DNA, 75 bp, Homo sapiens
ttgtgcgaaccccgggcagcccgggaaatctccaagtcagaaaggaattgaatgatctggcacgggaccctccag

SEQ ID NO: 609021 - DNA, 100 bp, Homo sapiens
tcttctgcaagctccatgttttcacatcttccctttgactgtgtcctgctgctgctgctgctactacttacaagtaatagcctgcagctggtgttttgag

SEQ ID NO: 609022 - DNA, 100 bp, Homo sapiens
ccgcagcccagcccccaagccccgccagcggttaaacacagtgggaatatcacttttgatgagattgtcaacattgctcgacagatgcggcaccgatcct

SEQ ID NO: 609023 - DNA, 100 bp, Homo sapiens
atcccgggcatgggcggcaactctttgatgtactactataatgggaaagcggtgctgaccttaaggaaagagccaaaatgagttccagtgaagttggtcc

SEQ ID NO: 609024 - DNA, 96 bp, Homo sapiens
agctgtttcgggccagcgacccgctgctcagcgtcctcatgtggggggtaaaccactcggtaaagatgagccttccagctacatttgcacaacatg

SEQ ID NO: 609025 - DNA, 100 bp, Homo sapiens
gaagtatcattggccttgaggaagaagacatgctctacagtgctcagtctttgagggaactgggaattgaagctggagtgactgcagctacttatacacc

SEQ ID NO: 609026 - DNA, 76 bp, Homo sapiens
cgggggccgctctgggatcccggccaccagcaattgtccggtacccgaggattaataaagaatctttacttcctgt

SEQ ID NO: 609027 - DNA, 98 bp, Homo sapiens
ggccaggcgccgctcagaacgatggactcaccctgtcacccaggttggactgcactggcctcaacctcctgagttcaagtgatcgtcccacctcagcc

SEQ ID NO: 609028 - DNA, 102 bp, Homo sapiens
tgggcaaccgggcggccacgttcccgctgcaggtgagaagccctaccactgcaactgggacggctgcggctggaagtttgcgcgctcagacgagctcacgcg

SEQ ID NO: 609029 - DNA, 71 bp, Homo sapiens
ctgggagaagcagcagagaaaggattttttatcaagcagaaatgcatcgaacaacgagaatcaagatcact

SEQ ID NO: 609030 - DNA, 102 bp, Homo sapiens
cagcagagagctattattccctgtattaaagggagtgcatccgccccaacccttttccccctcgtctcctgtgagaattccccgtcggatacgagcagcgtg

SEQ ID NO: 609031 - DNA, 118 bp, Homo sapiens
gtgtgtatcacagaagttataaagttattgctaagtgtgggaattttagctaaaaaaggaacggctgtagtagatctctctgggaatggcgacccctcctcaatttgtactgtaatgc

SEQ ID NO: 609032 - DNA, 99 bp, Homo sapiens
aggaagctaaggccgcgttggggtgagaccctcacttcatccggtcaaaatgtgggtacagctcctgattcccaggatagaagatggaaacaactttgg

SEQ ID NO: 609033 - DNA, 75 bp, Homo sapiens
catggcggggggcagcgactgcctcatcgtcgggactttgaacatgtcggggatcgccctcagcagactcgccca

SEQ ID NO: 609034 - DNA, 50 bp, Homo sapiens
aatatttcgagcagtttggcaagtttggaaattttagcattcaggtgcca

SEQ ID NO: 609035 - DNA, 75 bp, Homo sapiens
acgatgggaccgagatccacgaggcctcggcgtactccaaagattcaggtttactcacgtcatccagcagagaat

SEQ ID NO: 609036 - DNA, 75 bp, Homo sapiens
cgacaacatgtcacccgcgctccaagacctgtcgcaacccggcacccgacaggaggatcctttattcgtccgaac

SEQ ID NO: 609037 - DNA, 75 bp, Homo sapiens
ctgattgcagaaccttccctgattacagaatcttggaaaccttccttccttccagatgtgtgtcagtagaattac

SEQ ID NO: 609038 - DNA, 75 bp, Homo sapiens
gaaatcctttgctttcgttgggactacttccagcaacccagtctcctgccatgtccgaccccatcacgctgaacg

SEQ ID NO: 609039 - DNA, 90 bp, Homo sapiens
cccaggcgcagatgcgggccctgctggaccagctcatgggcacggctcgggacgaggagacacaccttgaagaaacaacagagagccaac

SEQ ID NO: 609040 - DNA, 75 bp, Homo sapiens
cggctctccttcagcctggacgtggcagatgaggacggggacttggttgccttttccagtgacgaggaattgaca

SEQ ID NO: 609041 - DNA, 100 bp, Homo sapiens
ccggaagtcaccattggagctcatcagactgaccgtgtcttacatcagttcagagagttcctccgtgtcacaaagcagtacctgccccacgtggcgcgcc

SEQ ID NO: 609042 - DNA, 100 bp, Homo sapiens
cgctgagggaaaggagcgggactccggacctccaggaggagtggttaatgtgttgctaacaactccactctgggtggtaaacaccagactgaagcttcaa

SEQ ID NO: 609043 - DNA, 100 bp, Homo sapiens
tgcatttctagtggctacaaatgcccctcaggagctgcaattggaacatgcaagacaagcctttgcactcaaagacaaaagcaaaagtggcatgatttct

SEQ ID NO: 609044 - DNA, 82 bp, Homo sapiens
cttagctgtgctcgcgctactctctctttctggcctggaggctatccagcaggctgacccgcggctgattgagtccctctcc

SEQ ID NO: 609045 - DNA, 120 bp, Homo sapiens
ggttgacgtgagtgaatccacatggtacagggctggagaataaagagtagcttggggcttccttggtcgcacccaccacctgcctgcccactggtcagccttcagggaccctgagcaccg

SEQ ID NO: 609046 - DNA, 89 bp, Homo sapiens
aggaggacctcactgagatcagggacatgttgctggccaataaggtgttccggctgccggtgcaggagtgcctgagctacccgacctgc

SEQ ID NO: 609047 - DNA, 99 bp, Homo sapiens
cagatggggaggacagtctagagagaaaggtatgagaaagtgccagtcatcttggttgggaacaaagtggacctggaaagtgagagagaagtatcgtcc

SEQ ID NO: 609048 - DNA, 101 bp, Homo sapiens
gcccaacctgcccgacatggggaaccccgggcccaggttatgaagacagtatggagtttccagaccatagtagacatttgctacagtgtctgagcgagcag

SEQ ID NO: 609049 - DNA, 82 bp, Homo sapiens
atggtctcaatctctggaaaaacttcttgccaaccaaagagacgttgatccagcagcacgtgtcatttcattaggtcctgta

SEQ ID NO: 609050 - DNA, 134 bp, Homo sapiens
ccgcgaaggccctgcaggcccactggcagctcatgaagcagtattacctgctggaggaccagacaggtctgaatttcctgctgctgttcacaaagatgctttttatctttaactttttgttttccccacttccg

SEQ ID NO: 609051 - DNA, 116 bp, Homo sapiens
cttgtttaatgactttggtgccctcaacatctctcagagacgaaaggctgaacgagcgcgaccgcctgatcaagaggctgggccggaagacgcccccgacgctgttccggggcagc

SEQ ID NO: 609052 - DNA, 100 bp, Homo sapiens
ttcctgctttcacagaattattccagggtttatgtgtcagtccttgctggtgcagacgaagcggcgggctctggagaagattgaccttaagttcattgac

SEQ ID NO: 609053 - DNA, 95 bp, Homo sapiens
ccggatcaccgagggcatttacggcaggacacattcagctaacgtattttagcaggtggagtgaggttgaagattcctgtgacagcgatgccata

SEQ ID NO: 609054 - DNA, 75 bp, Homo sapiens
gattcagggaataggagctggggagcccttctgcgccacagtcaggatttgcatgaagatgtcgaagaagctggt

SEQ ID NO: 609055 - DNA, 100 bp, Homo sapiens
gccccggcgccccgaagcgggaaaaaggctgggtgccgccgtcccccagctgcgcaaccctaggaactctcgggctttcaaggatatgctgtattcagct

SEQ ID NO: 609056 - DNA, 95 bp, Homo sapiens
tggagcaccctttgctgagtggcctcttataccccggactgcagggaaatgggtaaagtatgacagagtcatgatgagaccactatacagccatt

SEQ ID NO: 609057 - DNA, 75 bp, Homo sapiens
aaagcagctccgagccccagaccagctctcaggatgactttattcgtattttacatggagaagtgaacaaagtga

SEQ ID NO: 609058 - DNA, 100 bp, Homo sapiens
taggaagagtcagaggggtgaccagagagcccaacgcctggtgctcaagactttctccgaggattcttacagaagcagagattgatgctcaccttgttgc

SEQ ID NO: 609059 - DNA, 74 bp, Homo sapiens
attaaagagtaaagttgtgctcaacggttaaaaagatcaagtggcatgagcagccttttggggaaaattggtgc

SEQ ID NO: 609060 - DNA, 74 bp, Homo sapiens
agtccgacgcgcctggctaggagcgccgaccgcagggcctctacggaggctgataaaataccagtaatgcgtgg

SEQ ID NO: 609061 - DNA, 101 bp, Homo sapiens
tatgagagggatatggacataattatgaaattgaaggaagaggacatggccatgaatgcccaacaagataatggccactgtttgtggaagatataatgaca

SEQ ID NO: 609062 - DNA, 83 bp, Homo sapiens
ctcgcccgccaccctgcgctgccgccgctctgaggagttaaagggaagatcagttttcctgccatccaggctgctccctcctt

SEQ ID NO: 609063 - DNA, 98 bp, Homo sapiens
ttctgacagtatttcatgacagaatcgctcttggatctacacacaaaagtaacaaaaactaactgttgtgaaagttctgaacagattaaaaggttgtt

SEQ ID NO: 609064 - DNA, 75 bp, Homo sapiens
ataatcatcgtgttccactgtgaattctcctcagagaggggcccccgaatgagacccccttcccacagaaagccg

SEQ ID NO: 609065 - DNA, 82 bp, Homo sapiens
gcgggcaagcaggactacaaccgcgaggaggacgccgcgctcttcaagggttcgggggtgattaaagctggctttgcaggag

SEQ ID NO: 609066 - DNA, 75 bp, Homo sapiens
tgacagagaaagagcatggaagctggagaattgccctggtggaaaatattcctgaaggccttaactattcagaaa

SEQ ID NO: 609067 - DNA, 75 bp, Homo sapiens
tgggcttttcacagtgggctttactgtgttgagcaccctggaggagaagaggttctgctggaacaagctggtgta

SEQ ID NO: 609068 - DNA, 75 bp, Homo sapiens
gtccgagccagccgctgttttgccggaggagcccctcaggccgtgacttctgggggaacagaaagcatactgatg

SEQ ID NO: 609069 - DNA, 75 bp, Homo sapiens
aagtggcgaaggagccggctccaaggtctgaaggggcgtctcgattacctgagctctctgaaggtgaagggcctt

SEQ ID NO: 609070 - DNA, 80 bp, Homo sapiens
tgctgggcagggcccccacgcacgcggacgggcaccagcacgtgcacgtgctcccaggctgaccccgcactacatctacc

SEQ ID NO: 609071 - DNA, 100 bp, Homo sapiens
ctgctgaggagggggacctactggatgatgatgataatgaagatcggggggatgaccaggagcctgtgttggaagagatggtgatgggcctgggcgtttt

SEQ ID NO: 609072 - DNA, 100 bp, Homo sapiens
cagatatcaccgaagccattaaactagactcaggagtcgtcaagaggctctgcaccctggatggaaagcagacaagagatgatttcctaggtcaagtgga

SEQ ID NO: 609073 - DNA, 100 bp, Homo sapiens
tgacttcatcaaaaagtttcttaaacttgtggcctcagaacagttgaatttgccattttcagtggaaaacaagtggtcgttactagctaagatgtgtttg

SEQ ID NO: 609074 - DNA, 97 bp, Homo sapiens
gaggaggcgctgatgatgagcgatcatcctggcgtaatgctgatgatgaccggggtcccaggcgagggttgaggcctctggtgtctacgcagccagc

SEQ ID NO: 609075 - DNA, 98 bp, Homo sapiens
gagaccctatggctgtgatgagtgttctgactcctcaggagcaaaaaacataacctgaagagggaggaagtggatttggggttcaccatttcttgggg

SEQ ID NO: 609076 - DNA, 90 bp, Homo sapiens
tggggggggtcagccccccgcccggccagccgccccgtccgggaggtgtgtgatggatgatgacaatgaagtaagggaccgagccacctt

SEQ ID NO: 609077 - DNA, 78 bp, Homo sapiens
cgtgtcttcctgcaatatgagttcacccacttgggcctggacctgtacttggagcgctgccgtcaacgccgtggcctg

SEQ ID NO: 609078 - DNA, 80 bp, Homo sapiens
cggtgatctacaccatggagaacaagcccatcgtcacctctagaagaaccacacctcttttggaatatattaaaaataga

SEQ ID NO: 609079 - DNA, 90 bp, Homo sapiens
caggtctggagctcgaccgggccaggtagatgctggctggattggattttggtccatagttggaggctgtgttgttggaatagctatggc

SEQ ID NO: 609080 - DNA, 82 bp, Homo sapiens
cccggttacgcctgtcacataaagtgtgattcgtcatcgagatgttcgatcctgtcactatggtgtaatagacaaattccgt

SEQ ID NO: 609081 - DNA, 75 bp, Homo sapiens
agaagagcagattacctgcaaaggacagacttagccgcggcgagtcctttgcacatgttggcaacacacgcatcc

SEQ ID NO: 609082 - DNA, 110 bp, Homo sapiens
tgagtgatgtggaggaaaacaacttcgagggcagagtgtatgcagggcctcctccaagtggtgcctacctggttgcagggaacgcgcagatgagccacctccagagctac

SEQ ID NO: 609083 - DNA, 74 bp, Homo sapiens
gggattcgtagccagagtctttggtgtgtgatcctgtaaaattaaatcttccaagatgatctggtatatattaa

SEQ ID NO: 609084 - DNA, 83 bp, Homo sapiens
ctcgtcatggcctacccgggatacggaggagggggtggcccagttgaaatccttcccttcctctaccttggaagtgcctacca

SEQ ID NO: 609085 - DNA, 76 bp, Homo sapiens
cggaggcagagcggctgccatggtgctggcccagcagggggagtacagtgaggccatccccatcctgagggcagcc

SEQ ID NO: 609086 - DNA, 83 bp, Homo sapiens
gcgctgtgatgcctgcagagctgtggcttaccaggtccccgtgggcacgctggtgaaggagggaggcagagttgtggccgacc

SEQ ID NO: 609087 - DNA, 100 bp, Homo sapiens
cgatgtcattccctcggaagccatcaatgagctcactgttctggtgctggttaacaccatttacttcaagggcatcgtgagagcaattcgagattaccag

SEQ ID NO: 609088 - DNA, 90 bp, Homo sapiens
accgagtttgtaatgtgactagacggccagccagtcatcaaacgagtacgaccccagcaaagcgacctttgtgaaggtggtgccaacccc

SEQ ID NO: 609089 - DNA, 73 bp, Homo sapiens
caaagccccctctgtgtcccgagggagccaggagcccagtctctgggtctctccagtgcagcagccagcatgt

SEQ ID NO: 609090 - DNA, 100 bp, Homo sapiens
attcacacctagataccggaggaggatcttctgcggattgttggaatctaccgaatggcggcgctagatagtaaggcatcagggaagatgggaatgcgag

SEQ ID NO: 609091 - DNA, 83 bp, Homo sapiens
acaagatgaccacactccaggaatgccagtgcatcttttgcacagcttgtggaaaagccactggcagtgattcaagtggtgtc

SEQ ID NO: 609092 - DNA, 51 bp, Homo sapiens
gtccccaagctccccgtcctcggaacactctgctccagccaaggtggtgag

SEQ ID NO: 609093 - DNA, 80 bp, Homo sapiens
cctcgcctcccggccgagctgacgacgtccttctatggccgcttcaggcacttcttggatatcatcgaccctcgcacact

SEQ ID NO: 609094 - DNA, 100 bp, Homo sapiens
cccgccacagcacaacacaggtctgggagggatccctgtagcagggggtcctgatgacaacttaattgaaggtggaggaacaaaatttgtctgcaaacct

SEQ ID NO: 609095 - DNA, 74 bp, Homo sapiens
agaaactgtgaagcaaattcgtcagatcaaagaacaaggcactacaagggcccccagggatggagaagtaccag

SEQ ID NO: 609096 - DNA, 100 bp, Homo sapiens
ccttattggagcaagggaaagaaccctggctggggaaaagggaagtgaaaagagatctgttttcagaatatgacagatacctagcatctagcaaaataat

SEQ ID NO: 609097 - DNA, 80 bp, Homo sapiens
gtcctactaccgcctcacacgcttcctctccagagtgatcaagtgtgacccggagtctgctacaccatttttgatttggg

SEQ ID NO: 609098 - DNA, 90 bp, Homo sapiens
cctgcggggaagaacgtgctactgctggaccagcatctcagacatgtcgaaaaagatgttttgatccctaaaataatgagagaaaaggcc

SEQ ID NO: 609099 - DNA, 102 bp, Homo sapiens
gagaaattccacaatgaattaaatgcccacataaaactttctaatttgtacaagctttctaaaaccaatttttccaacaacaacgatttccgtgctcttctg

SEQ ID NO: 609100 - DNA, 100 bp, Homo sapiens
ccaccacggatgcccagctgaagagcctgctgatgtcagtgggacccattcagaatgaagtccctgaggtgaagaaagaggagactttgctggatctgga

SEQ ID NO: 609101 - DNA, 101 bp, Homo sapiens
tcgctacccgggtaacgggtcccggctgtggaagctcccgcggcgccgcgatggacctcgaggaggcgcacaaccagtgtctctgaagaagatgtctcaag

SEQ ID NO: 609102 - DNA, 83 bp, Homo sapiens
ccccagcaaacctccgggcccccaggcatggctagctcggactcagcccaggagagtgttattactcgagatattcatcgtac

SEQ ID NO: 609103 - DNA, 101 bp, Homo sapiens
cggcagagagggaatggtgcaggcaggcgctgagaaggacgcgcagtccatctctctcagagccatcacattggagaatcagctggtgatcctcgccacca

SEQ ID NO: 609104 - DNA, 95 bp, Homo sapiens
gcctggtgcctcccgcctccgtgtgccctggttgtgagaagacgtctgtgtcgtgcggtacccagacagccattgtcttcatcaagcagccgtcc

SEQ ID NO: 609105 - DNA, 85 bp, Homo sapiens
cgtcatggagacaggtgctctcggttgcacaataaaccgacgtttagccagttactttgacgagccagtggagttaaggagcagt

SEQ ID NO: 609106 - DNA, 75 bp, Homo sapiens
tcctcattcgtgatagtgaatcttcgccagaaacgtttgagcatctttttatcaagcatacagcatcagtgacat

SEQ ID NO: 609107 - DNA, 74 bp, Homo sapiens
accaagtcacatgacaagcattgctgccaaacaaggtgaatccgacccagagaggaaagaaacaaggcagaaag

SEQ ID NO: 609108 - DNA, 100 bp, Homo sapiens
gaagcatcaaacctggttcgaatgagaaaccagtcccttggacagtctgcaccttctcttactgctggcctggttcttcagatagatcctgaagttacag

SEQ ID NO: 609109 - DNA, 50 bp, Homo sapiens
agagcggcctgcgggcgatcgggccgaggcatctcgtccccggtgaagaa

SEQ ID NO: 609110 - DNA, 80 bp, Homo sapiens
gaagggtttcactacctcgtgtttgacctgcaaactgtccttggaagaattcatcagaggtgccaagagcgacccctcca

SEQ ID NO: 609111 - DNA, 101 bp, Homo sapiens
cggaaaccgatctgcccgttgtgtttgtgaaacagagaaagataggcggccatggtccaaccttgaagcactgggaggtgttcagaaaagttacagaagtt

SEQ ID NO: 609112 - DNA, 100 bp, Homo sapiens
aagagcaggaagtcattacatgatacctaatcatgagctggtttgggctaaaatgaaaggttttgggttttggccagccaaagtcatgcagaaagaagac

SEQ ID NO: 609113 - DNA, 86 bp, Homo sapiens
gtgttaagaattgcctttgggactctgaaggctgaagatgcagacagacatgctgaactatctggaagtccactgaaaagcaaaag

SEQ ID NO: 609114 - DNA, 98 bp, Homo sapiens
atctgtactgccggcacctcaaccagatgaggaagtacaactttgaggacactgcccatctctaagataagaacctggaaaggggactctgttggcca

SEQ ID NO: 609115 - DNA, 75 bp, Homo sapiens
cttctccgcgctatggctgcgttcggccgtcagatcacccggaagttcaggctgaattctgaaggcaaacttgag

SEQ ID NO: 609116 - DNA, 100 bp, Homo sapiens
cactgaggagatgttgctgaagcatctgcagaggatggtcagtgtgccccaggtgaaggccagtgctctcaagcatcagaggctccttgaaatgctagat

SEQ ID NO: 609117 - DNA, 97 bp, Homo sapiens
aaagatatttatgcttatctgagacaacttgaggagtatgacagtagttttccaaactgggaatttgcccgaatgattaaagaatttcgggctactt

SEQ ID NO: 609118 - DNA, 75 bp, Homo sapiens
gctgaacgtggacagcctcatcacccggctgctggagggagcatcagatccatgctgctgctgactcggagcccc

SEQ ID NO: 609119 - DNA, 98 bp, Homo sapiens
ggaggcccaagccaagaagttaggaaacaactgcgttttcgccccagccgacgctaaagaattacctccaaagccattgtcaagaccacagcagtcat

SEQ ID NO: 609120 - DNA, 50 bp, Homo sapiens
gccatttagtaacttctttgcaagaaaggcctaaagaatgtatttgacga

SEQ ID NO: 609121 - DNA, 82 bp, Homo sapiens
gcggatctcatatcttcacttggcaaactcaacaagcatttgaagacatgctggagaacccactgaacagcacccagtggat

SEQ ID NO: 609122 - DNA, 75 bp, Homo sapiens
ggaagaaagggtgtcatcacagtaaaggcagctagtacaccactgaatcctttaagctttcagtgtgaatttgta

SEQ ID NO: 609123 - DNA, 100 bp, Homo sapiens
aaaattggtcaactatcctggttttaatatatctactcccagaggaattccagacattactccaaaggtttcggcggcaaatacggtatcgacaaggaca

SEQ ID NO: 609124 - DNA, 75 bp, Homo sapiens
ccctgctgaatagctggggctacaggcgtgtgtcactgcgcccagcactgctcagcacgcaggcatgtgaggaag

SEQ ID NO: 609125 - DNA, 74 bp, Homo sapiens
atgaagatggacgaggtcctgtacagcatcgccgagaaggcctcttctgaagagctgaaagctgcctaccggag

SEQ ID NO: 609126 - DNA, 95 bp, Homo sapiens
ccgtcgcccaggagtcatcggacgccagaatctggtatcgagaaccttccctgcgaacttcagaggaacttccagctgatgcgagagctggacca

SEQ ID NO: 609127 - DNA, 100 bp, Homo sapiens
aagctagataccagcaccatgacatggactcttatctgtacaaagggcagccccgagaaccacaggtgtacaccctgcccccatcccgggatgagctgac

SEQ ID NO: 609128 - DNA, 90 bp, Homo sapiens
cgcggccgactcgcaagatggcgccgaaatgagccgtcagactgctacagcattacctaccggtacctcgaagtgtccaccatcccagag

SEQ ID NO: 609129 - DNA, 75 bp, Homo sapiens
tcggcctcccggaatcctggtcccggcgtgcacttctgaaggacttcagtgtcttgggacaaggtgcgcattcct

SEQ ID NO: 609130 - DNA, 101 bp, Homo sapiens
cagcgccagctgcagccccggctgcccactcgcctcacctgagcctggcatcgagagtaaacatgaggttacgatcctgggaggacttaatgaatttgtag

SEQ ID NO: 609131 - DNA, 100 bp, Homo sapiens
gtcacgctgcctttggcagcctaccagcactacatcctggccaagccttggtggaggaccagatgatgcaaaagaaattatgagacacagtttcttctct

SEQ ID NO: 609132 - DNA, 90 bp, Homo sapiens
atcatcaataccttctattccaacaaggagattttccttcgggagttgatctctaatgcttctgatctgtcaccactgactaaagaagag

SEQ ID NO: 609133 - DNA, 98 bp, Homo sapiens
agttaaaggcccagatgataggaatcccatctcatttagcctttgacgacccctatgccctggtggtgctggctgaggaggagctggtggtgattgac

SEQ ID NO: 609134 - DNA, 100 bp, Homo sapiens
gaaatcacctatgtttacagcgacaggaaaacaatgaagagtcgttatatggaactctatgaccttaatagagacttgctaaatggatataaaattcgct

SEQ ID NO: 609135 - DNA, 51 bp, Homo sapiens
gccttgataacacagagtttcaagcctggctctggtgtttctgctgaaact

SEQ ID NO: 609136 - DNA, 100 bp, Homo sapiens
cctgcgtcccagaagtgcctgcagttcagacccttctctcccctccactttctcccgggtgttcacgctgcccaaggtgagtgccaagctgaagttgaag

SEQ ID NO: 609137 - DNA, 101 bp, Homo sapiens
taccaggaggccaggggtgtcgccatgcttggaagtctttttgcatgttactgttccactgaagtcactcaggcaatatgggatggatatctacaacaagc

SEQ ID NO: 609138 - DNA, 75 bp, Homo sapiens
aggaggaggaagagggagaggacgaggaagagctgagtgggacaaagggcgaccattgacgaggtggagacggac

SEQ ID NO: 609139 - DNA, 100 bp, Homo sapiens
aatgagccagagggacacgctggtgcatctgtttgccggaggattccaacaatgtctcacccatcttggctgccacccaaaagcactggtgagcccctcg

SEQ ID NO: 609140 - DNA, 76 bp, Homo sapiens
tccaaacaagcttcattgttttcagctaacagtaaccccaggaagatgagaatgtgcctactgctcctgatcctcc

SEQ ID NO: 609141 - DNA, 98 bp, Homo sapiens
gaaaccatgcctcactgtcctaggcaagtatgtgccaagagttgtaacctctgcacaacagaaagcaggaagaactattacagcccggatcacaggaa

SEQ ID NO: 609142 - DNA, 75 bp, Homo sapiens
ctggatgggatcatttcggacttcgaagaacccagcgggtgccgcttctccacccgaggcttccacctccaacga

SEQ ID NO: 609143 - DNA, 90 bp, Homo sapiens
tgaggctctgctgtagtcctgttcttctggctctaagatctgaatgttgtgaccactaatttgtagccggatcgagctgggagatgtgac

SEQ ID NO: 609144 - DNA, 90 bp, Homo sapiens
tccgtggatgaggctctgcggctggtccaggccttccagtacacagacgagcatggggaagataagctgtggttctgctgcctgtccccc

SEQ ID NO: 609145 - DNA, 75 bp, Homo sapiens
gcaggtgctgacgggtacaacttcctggagaagcagaaaggcactgggacattagtcatgagtgccgagtgtgcg

SEQ ID NO: 609146 - DNA, 90 bp, Homo sapiens
ggcgcccttcccctggatacggtcactttctacaagacaagctgtaacccttcacgtgccttaccttcactcaatactggcagctcttcc

SEQ ID NO: 609147 - DNA, 120 bp, Homo sapiens
ctcatggagatgttggtgagcggagacttaaatgccgtccatggagccatgcgtgtgctgacaggtagctttgcagtttggggagggctgttttccatgattgactgtagtatggttcaa

SEQ ID NO: 609148 - DNA, 98 bp, Homo sapiens
cctattccactggattgggaaagaccatggcagatcaaaggatcatggacagggaagaatcgcgtccagaatccctacagccatggcaatattgtgaa

SEQ ID NO: 609149 - DNA, 100 bp, Homo sapiens
gaattacatagctggaaaggatcttacagatcaccggcgtaatcaacccagcgttggacaaatactttccgtcagactctggagtgagaatcatagctga

SEQ ID NO: 609150 - DNA, 100 bp, Homo sapiens
ggagattttgatgtggatgatgccaaagttttattaggccctccaggccctccaggtggtctgagaatagaagacattagagccacttctgtggcactta

SEQ ID NO: 609151 - DNA, 80 bp, Homo sapiens
catggtcagtgccatttcgcctttatcgtggtggagtccaccctggctgtgggaaaagaagatctcccggagcagtgccc

SEQ ID NO: 609152 - DNA, 137 bp, Homo sapiens
tattgcctgttcagtactgtgggtgatatttgcctttagtgcactcttctccttcacagtaaagtggctgagctacagagacttctgaagtggagagtctgcgacctcctcggttcttcaatgaagatggagttatc

SEQ ID NO: 609153 - DNA, 75 bp, Homo sapiens
ctcctacgacaaggtgatatttgggccagggacaagcttatcagtcattccaatgtttgtggagaaggtgctgca

SEQ ID NO: 609154 - DNA, 75 bp, Homo sapiens
cttttggcacctcctctccgcgcgttcttgggattttatttggagagaagcaagcatctttgcctctttggagta

SEQ ID NO: 609155 - DNA, 100 bp, Homo sapiens
cgacgatcccccacagaagccccctcggtccatcaccctcaggcgatgcggtttcactatggtgtccaggctggtctgcaactcccgggctcaagcgatc

SEQ ID NO: 609156 - DNA, 100 bp, Homo sapiens
aattttgcccctggactctgaagaccctggactttgtgaagttgttagagtacatgagcattacttgggcttggagaaccccctgcctgagcgtccccgg

SEQ ID NO: 609157 - DNA, 90 bp, Homo sapiens
accgaatcgctgtcacgccggcagaacccagcgggtgccgcttctccacccgaggcttccacctccaacgagccatgttccaggctgcag

SEQ ID NO: 609158 - DNA, 75 bp, Homo sapiens
ggatttgcttttgtaacttttgatgatcatgatacagttgataaaattgttggggcctgctttggacagaccagg

SEQ ID NO: 609159 - DNA, 96 bp, Homo sapiens
cgccgagtgctcttctactttgatgagccgaatttgccacatacctgaatttctgccgttccttgcgttttgacgacaagcctgactactcgtacc

SEQ ID NO: 609160 - DNA, 51 bp, Homo sapiens
gcaagctgtgcgacgtgaccctcaaggaatagccaggccagaagaaggaag

SEQ ID NO: 609161 - DNA, 75 bp, Homo sapiens
ggagccggcagcccagcactccgtccacgctggcagtgtgggtgaagtggcccatccatcccagcgccccagagc

SEQ ID NO: 609162 - DNA, 50 bp, Homo sapiens
ggaggaaaacaacttcgagggcagacccaacagcatggtggtggaacacc

SEQ ID NO: 609163 - DNA, 100 bp, Homo sapiens
cgggcccgggggtggtgacagcaggtctgagaagacttgcactatctgccagatgctgcttcctaaccagtgcagttatgcatcacaccagagaatccat

SEQ ID NO: 609164 - DNA, 75 bp, Homo sapiens
cctacagtaaaaaccctcatcaagtcctttgacagtgcatctcaagattgggctaatggatactacagacaacag

SEQ ID NO: 609165 - DNA, 51 bp, Homo sapiens
gcaaacaagccaatcccaggaggaaaaacgaaacgcttcgttaagggactc

SEQ ID NO: 609166 - DNA, 74 bp, Homo sapiens
ccgaatttgggcctgactccggcgggagagtaaagtaagactttgaccccgacgcaggcttcagtgattgccgc

SEQ ID NO: 609167 - DNA, 96 bp, Homo sapiens
taccatggctctgggaggatggatcaacattctcttctaacttgctggagtagagtggcacgatcacgactcactgcagccttgacctccctggct

SEQ ID NO: 609168 - DNA, 74 bp, Homo sapiens
ggcaccgcggtgctgctggtcacggccaacgtgggctcgctcttcgacgacgttgtggcagcactgcctgaagg

SEQ ID NO: 609169 - DNA, 88 bp, Homo sapiens
gcaggcctcgtgccgttacggccatcacggcggccgcagtggcgtcctggagccctcctcagcttcaaagaacccccgctcttgcttg

SEQ ID NO: 609170 - DNA, 100 bp, Homo sapiens
tccgtcatcgagcagctcttcttcgtccgtttgactttgtgtggacagtaatgacctcacgtttccgattgcctgctggcagaacctacaatgtacgagc

SEQ ID NO: 609171 - DNA, 83 bp, Homo sapiens
gtgcagaagatctgggtgcccgtggaccacaggccctcgttgcccagatggaaccttctgaccagcctcatgggctcctcaga

SEQ ID NO: 609172 - DNA, 75 bp, Homo sapiens
agacgcagccgtagacaccagctccgaaatcaccaccaaggactcgctcagcagcagcctgaaaacttgctacaa

SEQ ID NO: 609173 - DNA, 82 bp, Homo sapiens
cacctgcagcccacggcagagaatgcctatgagtacttcaccaagattgccaccagtgtgtcccggcatggatatccggaac

SEQ ID NO: 609174 - DNA, 51 bp, Homo sapiens
gcctgccctgaggagtccccgctgcttgtatgaaatgcttcatgtcacacc

SEQ ID NO: 609175 - DNA, 83 bp, Homo sapiens
cgggcgcctgaaggagttgttgtctcggcagcgcccgcggagacgtgaagaggacttccaatagtagtcagacattatcatcc

SEQ ID NO: 609176 - DNA, 75 bp, Homo sapiens
cacctggttaccatgaagatcagccactgggatggcaaattgtggctactaatttgccccctgaagatcaagatg

SEQ ID NO: 609177 - DNA, 98 bp, Homo sapiens
agttattgaatatcaagaggaggagttgttgaatgtgtgaatgacaactactggtttgggagggacaaaagctgtgaatattgctttgatgaaccact

SEQ ID NO: 609178 - DNA, 50 bp, Homo sapiens
ccgcttgctagaggttgaggacgctcaggactggtgattgcagctggaag

SEQ ID NO: 609179 - DNA, 83 bp, Homo sapiens
gtgcaaagggccaacttaccaacataggagccctgcagattgaaagcagtgaggaaaccgaccagggcaaatatgagtgtgtg

SEQ ID NO: 609180 - DNA, 98 bp, Homo sapiens
ggagcgtggcggggacgggggcgagagtgaacgattcaacccgggggagctcagggtcttactgaagtaacacaaagcttaaaaatggaaaatgaaga

SEQ ID NO: 609181 - DNA, 83 bp, Homo sapiens
ctgagggagctgtcaatctcatctcaagagggagaaccgaagattacaggaggccagcatgaggttggaacaagagaatgatg

SEQ ID NO: 609182 - DNA, 100 bp, Homo sapiens
gagactgagccttgagcagaggaacctatacaaagaagtgatgctggaaaatctcaggaatctggtctcattggaaaagcattcatatttcatgtccaaa

SEQ ID NO: 609183 - DNA, 100 bp, Homo sapiens
gggtagtgccagctacggtccgcggctggggttccctcctccgtttctgtatccccacgaggcgcgggtttaagtggacgccaggtgcaccggacacagg

SEQ ID NO: 609184 - DNA, 90 bp, Homo sapiens
cagatcaagaccctcaacaacaagtttgcctccttcatagacaaggtcagaatggcggcagcggagcatcgtcattcttcaggattgccc

SEQ ID NO: 609185 - DNA, 100 bp, Homo sapiens
ctgagcgcagtggcgccgagcagcccctcccgcagccggtgtgacctgtcccttcaggtcctgaacgaggctgtgggggccctgatgtaccacaccatca

SEQ ID NO: 609186 - DNA, 100 bp, Homo sapiens
caacaactgcgaggaaaatgagcagtctctgcccccgccggccggcctcaacaggtgtttctgtggcctgggactggttagcaccaacaagtcctgctcg

SEQ ID NO: 609187 - DNA, 100 bp, Homo sapiens
cggggcgcagttcggaggttcagaccatgctcgacagctgaccaaggccatgatgcgaaaggccacggccagccgcctggtcacgcagcgcgatgcggac

SEQ ID NO: 609188 - DNA, 100 bp, Homo sapiens
cagccactagtgggtttgccagtggaatggtttgatagtccctgaaataaggggcaatgaaactgtgcctgaagttgttactacatctggctatgcactg

SEQ ID NO: 609189 - DNA, 100 bp, Homo sapiens
ttctaaacagagcagcagcagcagagatgataacatgtttcaggttaaaaggacaactctggtggatagcagaacatctgttactgatgtgaagtttgct

SEQ ID NO: 609190 - DNA, 74 bp, Homo sapiens
gatgagacatttgctacagcatcccacattaagtcaacggtggtagacttgctgctggctcgaggtgcaaataa

SEQ ID NO: 609191 - DNA, 98 bp, Homo sapiens
atccattccatgggttttattcacagcaaagtgcctgcattcgtgaggatgattgctcccgagggctccttggtgtttcatgagaaagcctggaatgc

SEQ ID NO: 609192 - DNA, 100 bp, Homo sapiens
gatctaaaggcgggactgccacgtccaagcaaaccgggaaaggagaggatcccggagccggtacaacagaatagctcgggaatggactcagaagtatgcg

SEQ ID NO: 609193 - DNA, 52 bp, Homo sapiens
gtttacgaattctttaaccactgttggggtccttggtaaatcctgcaagcca

SEQ ID NO: 609194 - DNA, 83 bp, Homo sapiens
cggccctctcgcgctgcactgtctctccgacgcaagactgtcccggcccggcaaacatgtcttgacggaagacatagtacacc

SEQ ID NO: 609195 - DNA, 100 bp, Homo sapiens
cgatggcgcgaggccgcagagctaaatgggggcctctccagggagtgctctgttcacggctccatcgctgttagttaaaaatctgtaagagcctgatttt

SEQ ID NO: 609196 - DNA, 50 bp, Homo sapiens
agtgcttcgtggtgactgaaaaaggtgtgatgaatgcagactctgctacc

SEQ ID NO: 609197 - DNA, 82 bp, Homo sapiens
tgcagcccctgcgtcgccgggaccctcgcgcgcgaccgccgaatcgctcctgcagcagagctggtaggtgagtgctgtcctc

SEQ ID NO: 609198 - DNA, 98 bp, Homo sapiens
gtgactcagcttcgagcttgtgccaaataccacatggaaatgaattctaagggtgaggcgctcaggcaagttctggtcaaccgttactatggaaacgt

SEQ ID NO: 609199 - DNA, 75 bp, Homo sapiens
ggtgcggggagcggagccatggcctccgcccctcttggagtctgtgccttatgaagaagcactggcaaaccgccg

SEQ ID NO: 609200 - DNA, 97 bp, Homo sapiens
ctcatcttcttcaagataacttgccaaaatgaaggatttgatgccctggatccctttattcccatcctggtttccaactataacccaaaggaatttg

SEQ ID NO: 609201 - DNA, 76 bp, Homo sapiens
ctcagatgctgccagggtccctgaagagggaagacacgcggaaacaggtggccgtcagacccaagagcaacgaact

SEQ ID NO: 609202 - DNA, 50 bp, Homo sapiens
gtggggcggtcccggccccgcagcagttggaattgatcacaccttttcag

SEQ ID NO: 609203 - DNA, 101 bp, Homo sapiens
cgcagggccatggaggaggcggccgcagctccgctctccgtggctaacaaggcccctgggaccgaggggcagcagcaggtgcatggcgagaagaaggaggc

SEQ ID NO: 609204 - DNA, 100 bp, Homo sapiens
gaagatggcggacggcgtggaccacatagacatttacgcggatgtcggcgaagagttcaaccaggtctcgtctacagaggactggtctttcaatagcaag

SEQ ID NO: 609205 - DNA, 74 bp, Homo sapiens
ggaaaggccaagacaaaggcggtttcccgctcgcagagagccggcttgcagactatcaagaaatccaagtggta

SEQ ID NO: 609206 - DNA, 100 bp, Homo sapiens
ccgacttatcgacatgagcaggcaccaaggtgactctgacatcattagaagcatgccagaacagactggtgaaaagtaaaccttttcacctacaaaattt

SEQ ID NO: 609207 - DNA, 143 bp, Homo sapiens
ggccgtgtcagtttggggcatctccgcggtccggcccggggccccgggatctcggctgtccttcctcccgcctgatgaagtcctccgatattgatcaggatttattcacagacagttactgcaaggtgtgcagtgcacagctg

SEQ ID NO: 609208 - DNA, 96 bp, Homo sapiens
aaaggtagctggatccgtagagatctgtgactttggcctggcccgtgttgcagatccagaccatgatcacacagggttcctgacagaatatgtggc

SEQ ID NO: 609209 - DNA, 102 bp, Homo sapiens
tccccctgaagagttaccagatttctccgaagaccctacctcctcagcaaccctacaaggatcagaagctgccaggaacaaggagaagacgctccccttcct

SEQ ID NO: 609210 - DNA, 88 bp, Homo sapiens
gggcgacgctggctgcagggacccggtgacagcgtgagagggggatatgagactttctactcggaatatcctgagtgttgcgtggatg

SEQ ID NO: 609211 - DNA, 90 bp, Homo sapiens
cgcaatgatgagacagggctgtggcagtgccccttctgtcagcaggacaatttccctgaactaagcgagagtaccaagttcgatccatag

SEQ ID NO: 609212 - DNA, 98 bp, Homo sapiens
ggacaaaatgcagccgagaactccgctcgttctgtgcgttctcctgtcccaggactttgggaagtgcccgcgactgaggctgtttactcaggagtaca

SEQ ID NO: 609213 - DNA, 50 bp, Homo sapiens
gtgacttcccggacgctgggaaatggtcagcccaaggccaaccccactgt

SEQ ID NO: 609214 - DNA, 82 bp, Homo sapiens
ccaagtcaaaatgcatagacctaaagaagctgttctttcatgcagtcaaggtgaaaagtagtgatgaggcagtgatcctgtg

SEQ ID NO: 609215 - DNA, 90 bp, Homo sapiens
agaacatacggatccagcaagaacaaaaaagaggacgttttcacggagggtaaaatgaaaggcctggcatttattcaagatcctgatggc

SEQ ID NO: 609216 - DNA, 88 bp, Homo sapiens
ataaaaggacttcatctcctcaacatggaaactaaggtgaactgtcacccctacaactcagcttgcaaccagccctggccaccagttt

SEQ ID NO: 609217 - DNA, 82 bp, Homo sapiens
aggaaccgggaccgccagcgcaggagacaatgcagatcttcgtgaagactctgactggtaagaccatcaccctcgaggttga

SEQ ID NO: 609218 - DNA, 95 bp, Homo sapiens
ctgccgagataaagccaccacgtctggggaggaagttgccttgtactgtgccaaatatcttcctgatatcatcaaagatcagaaggcctacaagg

SEQ ID NO: 609219 - DNA, 90 bp, Homo sapiens
tattcagaagtgccaaatttcagtgaacccaacccagattatcgaggacagcagaacaaagggatttgaactttctgtctccaatctcat

SEQ ID NO: 609220 - DNA, 100 bp, Homo sapiens
aaaacatcaatgaatgtaaatgaaatattcatggcaataggccataaaattttgagtagaaaaatccagaaatttgaaaatcagtatcgtggtagagagc

SEQ ID NO: 609221 - DNA, 100 bp, Homo sapiens
tcttacgtctgcggaagtgcagctgcctcagttcttagcgcaggaggaattttgttgtcagagaataaaaggaggttgtccataattgactttaagcagc

SEQ ID NO: 609222 - DNA, 52 bp, Homo sapiens
ctcaagggaggccgtttctaccaggatgcagaaagcctcagtgttgctcttc

SEQ ID NO: 609223 - DNA, 82 bp, Homo sapiens
aatgagccgacccatcttgtacagcaactggctgtcaaaggtcgctattaaagcatgaagactttctgaaacctgccctaga

SEQ ID NO: 609224 - DNA, 75 bp, Homo sapiens
tggaaactgaatgcatttagcatattttgaaactgaagtcattcattagagacggggtctatgttgcccaggctg

SEQ ID NO: 609225 - DNA, 82 bp, Homo sapiens
gccgctccgccgcccgcaggctccggcttccgtcccggacagagcccgtggtcgcgcagtgttttacctcaatcatatatcc

SEQ ID NO: 609226 - DNA, 75 bp, Homo sapiens
tgcatggagtactggcccttggagctcgaaatgagccgtcagactgctacagcattacctaccggtacctcgaag

SEQ ID NO: 609227 - DNA, 75 bp, Homo sapiens
tgatgggcacctcccgggacgactatgtcttcagcagtggtgcagttatatgcagcagatcggaactgtatgtgg

SEQ ID NO: 609228 - DNA, 97 bp, Homo sapiens
ggctcctcgataaagtggagctgatgctgcccgagaaattgaggccgttgtacaaccatccagcagaaaagagtctcatcgtggaaggcaagaggga

SEQ ID NO: 609229 - DNA, 82 bp, Homo sapiens
ccccgatctacggggctgacatcagcggctctttgtatgatgacactgcctctgtcaccgggtccctccacccttgtctcct

SEQ ID NO: 609230 - DNA, 82 bp, Homo sapiens
tttcgccagcccgtgccgcgagcgcggcctgcaggagcccagctcaacattggcaatgtgctccctgtgggcaccatgcctg

SEQ ID NO: 609231 - DNA, 83 bp, Homo sapiens
gttttaaggtcggagtaggcaaagttatcagaggagcatttgcccccagcacagcaaacgtttcctgagagctctaaccaaag

SEQ ID NO: 609232 - DNA, 50 bp, Homo sapiens
ggacaatggtcaccgtctcttcagggttcatcatttacaacccaacagcc

SEQ ID NO: 609233 - DNA, 82 bp, Homo sapiens
tattcctctttgtatatgtgtaaacccaaaaggagcatgaaacgagacgacaccaagcggaagatggagaaccgtgattacc

SEQ ID NO: 609234 - DNA, 100 bp, Homo sapiens
gcaaccgcgggagcagccaagtggactggactcttttcttgacttagctaccaggatctaaaatgtccactgaggcacaaagagttgatgacagtccaag

SEQ ID NO: 609235 - DNA, 75 bp, Homo sapiens
gaagtgtggcatccaaaatcagagcatttccggagagttcttttgaagtcacttcagaaggatctacatgaggaa

SEQ ID NO: 609236 - DNA, 75 bp, Homo sapiens
gaggccccagaactatcttttcggtgtgaccatgaagctcatggatgaggtcgccgggatcgtggctgcacgcca

SEQ ID NO: 609237 - DNA, 80 bp, Homo sapiens
ccagcaggccagccggcctctcgcccacactgaccccgggggagcggcagcagcagaaaggacccaggagcgataacagt

SEQ ID NO: 609238 - DNA, 75 bp, Homo sapiens
ctgacccctttatccggcggctgggcctggaagcagagctgcaggtcctacgggaagtgaaggtgctggcaggtc

SEQ ID NO: 609239 - DNA, 98 bp, Homo sapiens
cctgcagcaggacgaggacctgagccaggaatgcaggatggcggcggtgaagaaggaagggggtgctctgagatacttggtgcttgaaaaactgaaga

SEQ ID NO: 609240 - DNA, 75 bp, Homo sapiens
cgagaattaaatgccgagaaggccagtacgctgtcccctttcctccaacccaacggcttactttcaaggaagtat

SEQ ID NO: 609241 - DNA, 98 bp, Homo sapiens
ttcgttctgtgcggcgacctcatccacgccatgccaggactcgattaccaatcctgccctacatcagaagactgtgaaaataatcctgtggattcctt

SEQ ID NO: 609242 - DNA, 75 bp, Homo sapiens
agccagcagcgtggaggagcctgaagggcaattgaaggaacagactaaaaatcgtgtcctggaaggaaactacag

SEQ ID NO: 609243 - DNA, 50 bp, Homo sapiens
agaagatcatcattaaggacggaggcacgactgtgccctgtccacggtgc

SEQ ID NO: 609244 - DNA, 75 bp, Homo sapiens
cacgaattgggtcgatctgtgacagatctctattaccaggttttaaacttcgccatgatcgtgtcttctgcactc

SEQ ID NO: 609245 - DNA, 75 bp, Homo sapiens
gagatgttacccagtatcttggtgttgctgaagagtttgtcagaggaatggctgtgaatggatgcctggaaggac

SEQ ID NO: 609246 - DNA, 100 bp, Homo sapiens
tgcccgagagatggctccaaatatggcagagtgggaccagaagagacctcatggcctatgacagaagagggagacctggagaccgttacgacggcatggt

SEQ ID NO: 609247 - DNA, 75 bp, Homo sapiens
accctcaaacccctcagacaatgaattcacaacctcaaacccgttctccgtccacctaaacccactgtgttcatc

SEQ ID NO: 609248 - DNA, 83 bp, Homo sapiens
cgatcgcctcgcgccggctgctctttccggttcaaatctgaacatcaatgatgtactagggaactactcattgactcttgttg

SEQ ID NO: 609249 - DNA, 77 bp, Homo sapiens
ccggcccgggggtgagcgccgggctccgtggggaggaagcgggggccaccaaggcgcagcccagcctcgaaatgcag

SEQ ID NO: 609250 - DNA, 75 bp, Homo sapiens
gccgagttcaacatcctcctggccaccgactcctacaagtgcctccggagccagcgtggtggccatagacaacaa

SEQ ID NO: 609251 - DNA, 96 bp, Homo sapiens
atgcattgatgtggaagatgcagatgacgagcacatcgtcctggagccgggagacctcttcccccccttctcccctccaccctcaccccggggaga

SEQ ID NO: 609252 - DNA, 75 bp, Homo sapiens
ctagatgaggagggcatgaatatgggtgattcttggtgccaccattgagaactccaggattgtcctgcagatcga

SEQ ID NO: 609253 - DNA, 88 bp, Homo sapiens
accgtgcccctttccggggggagataaacatgatgctggcaaacctgtacaagaaggctggtcaggagcgcccttcagtcaccagcta

SEQ ID NO: 609254 - DNA, 140 bp, Homo sapiens
gcttcattcagatgtggtggaatatgccaaggaaaaactggagagcttcatcaaaaatagtgatagctttgataatgaggatgaggatgatgaccttcagtatgccgatcatgattatgaagtaccacaacaaaaaggac

SEQ ID NO: 609255 - DNA, 100 bp, Homo sapiens
ggatatatcttccttgacagcaaagatgctgggctcttgcactgtttggtggaaatggtgagacaggatttgagcaaaattctacttattcagtgttcag

SEQ ID NO: 609256 - DNA, 100 bp, Homo sapiens
gtgttctcaactcccacacacaggatgtcaagcatgtggtttggcacccaagtcaggaggttggatggcaagcatgtggtgtttggcaaagtgaaagaag

SEQ ID NO: 609257 - DNA, 98 bp, Homo sapiens
ctgatggtgatggagattttgatgtggatgatgccaaagttttattagggaggagagagcgatggcttttttcacccagaaggccagccccagcggct

SEQ ID NO: 609258 - DNA, 97 bp, Homo sapiens
tccagtcccgcgtcggtcgccgcagtcacggagcgcacgtcacaatccaaggtccggctcctccgcgtcccagggccggacggagggatgaggcagg

SEQ ID NO: 609259 - DNA, 83 bp, Homo sapiens
tgatggatgtgtctggtgtgggtttcccaagcaaggttccttggaagaagatgtctgcagagataacagtcttcactcctatg

SEQ ID NO: 609260 - DNA, 75 bp, Homo sapiens
gccctgcagtacctgcagaaggtctctggagacatcttcagcaggtgccagagtttgtagcctattggaggaaaa

SEQ ID NO: 609261 - DNA, 82 bp, Homo sapiens
ctggagccctactttgacttcatcatcaccattgggcactcgaggctgggtcccaccttgtggtcaccaactgctccgcgga

SEQ ID NO: 609262 - DNA, 97 bp, Homo sapiens
gctgcggcggctcggggtgctctactggaagatagtcgtgcaagcactgcagtgttcccattattcgattctttggcagttggtgaaaattactgat

SEQ ID NO: 609263 - DNA, 90 bp, Homo sapiens
ctagaattcacacagagccacctaggtgaagattgtccccagtggatggtccctatcacaatctctactagtgaagaccccaaccaggcc

SEQ ID NO: 609264 - DNA, 50 bp, Homo sapiens
cactgtgtggccatctaccactttgaagcaggttacgggcaggacttgag

SEQ ID NO: 609265 - DNA, 100 bp, Homo sapiens
ttacatccaaggagtggccagcgagcacatgaagcgattatttgcatgggtgcaaaagaaaatggtttgccgctggagtatcaagagaagttaaaagcaa

SEQ ID NO: 609266 - DNA, 97 bp, Homo sapiens
tcggcatggctctcctggtgctcgggagatgcagttaaagacttgatgcttcgctttctgggtgaaaaagctgcagcaaagagacaagtcctaaatg

SEQ ID NO: 609267 - DNA, 100 bp, Homo sapiens
ggaagaggtgggagattttattcaacgctaccaggatattgagaaagaatctgagtcagatgcagctaagcccttcagcgtggtggtcttccattgccgg

SEQ ID NO: 609268 - DNA, 97 bp, Homo sapiens
ccgctggccgggctggctgcggccgccctgggccgggccccaccggacgtgtggacgaatgtggaacctcgctctgtggctgtgttcccttggcact

SEQ ID NO: 609269 - DNA, 82 bp, Homo sapiens
cctcgacaaaatggctgatgatttgctggcagctgctgacaaggttaaagctgaagctcaacaaagatatagtgatctctgt

SEQ ID NO: 609270 - DNA, 83 bp, Homo sapiens
tctatgatggccagtacctccaggccctgaacgcggactggcacgcagactgcttcaggaactgtggctgcaccatctgtctt

SEQ ID NO: 609271 - DNA, 74 bp, Homo sapiens
ggctgtgctgacttttttatccgtggagagcgactcagggacaaaatgggtcaaaaattgcatgttcaaacaaa

SEQ ID NO: 609272 - DNA, 82 bp, Homo sapiens
tcagctggaaaaatcaagcagttttgtaaaacctgcaacactcaaagctggtggagttgagatctataatggagatcgtaaa

SEQ ID NO: 609273 - DNA, 142 bp, Homo sapiens
gtcttccttcctgactgactcatcaggaagtcagactcccgaaccattgctccaaatatccgttgaagcaggtgcaagaattgtttatccgtgattatggagagatttttaatgtccagttaccggataaagaagaacggac

SEQ ID NO: 609274 - DNA, 88 bp, Homo sapiens
cagttactttatcccttcatctgtggatgggcagaattcctggaaaactcaagcaattcgtatttgacttacattctggaaaactgca

SEQ ID NO: 609275 - DNA, 75 bp, Homo sapiens
ggacgggccaacgccgtggccagctccactgagagaaccccaggcaggaaactgcatatcttctggtttacatga

SEQ ID NO: 609276 - DNA, 50 bp, Homo sapiens
ctttggagaatgatatcaaaccagttatcaatactctggctgaccatcat

SEQ ID NO: 609277 - DNA, 100 bp, Homo sapiens
tccaaccaacattgtttacaaaatagatgacatgacagctgcacccatggacgttcgccagtgggttgacacagatactgaggctgatgtgaatccaaag

SEQ ID NO: 609278 - DNA, 98 bp, Homo sapiens
tcgggcttggcgcggcggccagaggaaccccgaggtcatttggatccaggattcctagcaagtgacaaaacatctggcaatgcgccactcaatgaaga

SEQ ID NO: 609279 - DNA, 98 bp, Homo sapiens
aaaagtctgacggtctgtccactcacagaagctctcttctcaacagccatgatttcttcaagaagttcttatatgagccattgccagtagaatctcac

SEQ ID NO: 609280 - DNA, 73 bp, Homo sapiens
ggcgatggagctgttatttttagatacttttaaacacccgagcgctgagatacccagaaataatcgcttaatg

SEQ ID NO: 609281 - DNA, 75 bp, Homo sapiens
cgcgtctgagcggttctcgaggcgttctcgcctcggtctctggcgagtgcacggagtcttgctctgtcgcccagg

SEQ ID NO: 609282 - DNA, 82 bp, Homo sapiens
ttccctgttgccaatgtctcgctgactaagggtggacgtgatcgggatgctttcattggatttggaggaaatgtgatcaggc

SEQ ID NO: 609283 - DNA, 100 bp, Homo sapiens
tagctctgaaggtgatcaggctgcaggaagaagaagggacacctttcacagctatcagggaagtgtgccatgcggagctgaatgccatcatgaacaaaaa

SEQ ID NO: 609284 - DNA, 80 bp, Homo sapiens
aaagcctctcattcgtagccccccccagctggaaaatggtctgctctgcgaatcgttggaatcgaagcctcttaaaatgg

SEQ ID NO: 609285 - DNA, 100 bp, Homo sapiens
gtgcagctgcctcagttcttagcgcagacttggagtccaggtgtgagaaatttctacaaaaagacatttttgaaatcggggcattcaactgggagataat

SEQ ID NO: 609286 - DNA, 90 bp, Homo sapiens
cggcggggcccgcgctgcagccggagacccggagaaaggtattggtaaaggttttcaaggtgtcatgaaaagatggggatttaaaggcca

SEQ ID NO: 609287 - DNA, 90 bp, Homo sapiens
gaactccttccctcaagtgattcttctgcctaatcctcccaaagttcttagattacaggttcgggatgagtatcggcaggactacgatgc

SEQ ID NO: 609288 - DNA, 100 bp, Homo sapiens
atccgtagggaggacaccgtgacttcccggacgctgggaaatggtgttcttcaacggtgccaacgtccggcaggtggacgtgcccacgctgaccggagcc

SEQ ID NO: 609289 - DNA, 50 bp, Homo sapiens
gacatggagagaatttcactatattcaggaattgaatgatctggcacggg

SEQ ID NO: 609290 - DNA, 74 bp, Homo sapiens
aactcgcgtttccacttcagagatctggtaggagcattgcttttcgtggtgaaagaggcaatgatgaatctgcc

SEQ ID NO: 609291 - DNA, 83 bp, Homo sapiens
gattatctaccgggacctcatcagcccaaaagactgttgaagtagagagcattttgcccagctcactcggattctttgctggc

SEQ ID NO: 609292 - DNA, 75 bp, Homo sapiens
cctgctaagccaaacagagaagagacgagttgtactgctgtcacaggaaatggacgctggattacaagcatggca

SEQ ID NO: 609293 - DNA, 100 bp, Homo sapiens
acctgcttcatccttgtttaatgactttggtgccctcaacatctctcagagacgaaagattctggacaatcaggaagtccaagccacaatgatcctgcca

SEQ ID NO: 609294 - DNA, 97 bp, Homo sapiens
gacttgcctccttcccgcagcgccgtagagatcgctcccactcaggtcacaggtgactcgaaaagccctgtttcctggtgactctgagattgaccag

SEQ ID NO: 609295 - DNA, 90 bp, Homo sapiens
cagcttcaagcttaggaccacccaccatgcctatccaggtccagccctgctgggagttttctgccacacagatttgcggaagaacctgac

SEQ ID NO: 609296 - DNA, 90 bp, Homo sapiens
gcggggcctgggcctcccggtccgcaagcaggaatccctttgcccacgtccagctgaagccgacagtgaccaacgacaggtctgcccccc

SEQ ID NO: 609297 - DNA, 101 bp, Homo sapiens
ggagagtctgtgccgacaagatggcggacggggagctgaacgtggacagcctcatcacccggctgctggagggtgctttacaaggccaagtacggtccaat

SEQ ID NO: 609298 - DNA, 80 bp, Homo sapiens
cgctgccctccggctccgcgggcggcccacggcgagaaacatgatcaggggcaagtcttgttggatgtcgtcttcaagca

SEQ ID NO: 609299 - DNA, 100 bp, Homo sapiens
agcaatatctctgggctttcacaggactcgctgattcttgagaagagtcaaaactggagctctcaaaaaatggaccatattctgatttgctgtgtttgtc

SEQ ID NO: 609300 - DNA, 100 bp, Homo sapiens
ttgccagtactttgtttccagccattgagaaaaatattgttaagaaaatggttgctttcaataaccaaaatggtgtgctcttgcttgcacagcttttgaa

SEQ ID NO: 609301 - DNA, 100 bp, Homo sapiens
cgcgccccgagcgcaggctagcgtgcctgggtgcccggccatgggctgtatcggctctcggagcccggcgggtcaggaacgacaccgtaactatccgcac

SEQ ID NO: 609302 - DNA, 82 bp, Homo sapiens
cgcgcagggcctgcagcgggagctggacggcgagcgcgagcggcgcgagaaaagatcccgctgtgcgctggctgtgaccagc

SEQ ID NO: 609303 - DNA, 100 bp, Homo sapiens
gaagcagttgagaaagaatttgagcctctgctgaattggatgaaagataaagcccttaaggacaagctttcaccaacaatcaccagtggtttacacaaca

SEQ ID NO: 609304 - DNA, 75 bp, Homo sapiens
ctccgtaatgagagcccggaaccactctttgtgccgcagcttcgcagggtaagaaggtggatggctctgtaaatg

SEQ ID NO: 609305 - DNA, 75 bp, Homo sapiens
gcagccgcccgtggcgcttaagaaagaagagcttgggaaagtcgaggtgacggtgtttgaccctgactccctgga

SEQ ID NO: 609306 - DNA, 75 bp, Homo sapiens
cttttttccatgcttcaagtccatcatgttcagatccccgtcgaggtcaagatcaagatccaggtctatttcacg

SEQ ID NO: 609307 - DNA, 75 bp, Homo sapiens
gcaacgtgtaatcagaaggcacagattagaggaaggaagagacgtgcagttcctggcctcggtgctgcccccaga

SEQ ID NO: 609308 - DNA, 100 bp, Homo sapiens
acagtgtggagagccgtgatatgttccagttgcacatttcctgcaaggactccaaagtggtgaggcctctcttctgtggaaactctgaagccgaccagtt

SEQ ID NO: 609309 - DNA, 83 bp, Homo sapiens
cggcgagcccttgggccgcgtctcctttgaggcgccatgtcagaaccggctggggatgtccgtcagaacccatgcggcagcaa

SEQ ID NO: 609310 - DNA, 74 bp, Homo sapiens
ccatctccacttaatgactgtctcacattggccggcaacttgttccagggtgtacaactatgagcctttgacac

SEQ ID NO: 609311 - DNA, 75 bp, Homo sapiens
tagagcgcctgtaccatgatattgcccagcaaggacaaattgatggccaggagatcactgccaccgccgtgctgg

SEQ ID NO: 609312 - DNA, 100 bp, Homo sapiens
gaggtggagttgctgcccttccggagtccgccccgtgaggagaatgaatatcctccgaatcctaaatctagagctccaaggatgctggtcattaagaaag

SEQ ID NO: 609313 - DNA, 51 bp, Homo sapiens
aaacctggcagctgaagataaaagagaagtcattcagaattcaaaagaagt

SEQ ID NO: 609314 - DNA, 75 bp, Homo sapiens
gcatccaacgccgtcgctgtggctaatgtaatgcttgaatatgatattgatgaagctcaggcattgttggaaaag

SEQ ID NO: 609315 - DNA, 50 bp, Homo sapiens
cccagacaggtggcgacggcagaggagacagtcattttgtttactcattc

SEQ ID NO: 609316 - DNA, 100 bp, Homo sapiens
tggagattgcagaaaaaaaattgcttggtccccttggcatgaaaactttagatccagagtggcaattttggaggtagccccggttatggaggaggaagag

SEQ ID NO: 609317 - DNA, 78 bp, Homo sapiens
gattccaagtaactcttatttggttcacgagtactaatcttcagtcaaatgacaagggtattggacattttggaagat

SEQ ID NO: 609318 - DNA, 95 bp, Homo sapiens
tgccgagctttccgcgacggccgctccgaggacttccgcaggacccgcaacagcgcagagggtatcattgcccagtgcctaagatcttttatgtt

SEQ ID NO: 609319 - DNA, 100 bp, Homo sapiens
gatgattagagacatactaatgtacatggcagctgttgtgctgtgtatggacgtgggctttaccatgagtaactccattcctggtatagaatccccattt

SEQ ID NO: 609320 - DNA, 75 bp, Homo sapiens
gatcaagccaacaacagtgacggaatgcctccatacatgtgaagtggatcctaaagagaggatagcacgccaacg

SEQ ID NO: 609321 - DNA, 100 bp, Homo sapiens
aacaaagtggtgtaggaggacgccagttactgcacggaaagcagcgtcaggagccatagtacctacagcagcactccagcttgccgaactaaagcaagaa

SEQ ID NO: 609322 - DNA, 95 bp, Homo sapiens
ggaccacaaaccgctgccagaaaaagcacccacggtgttccccgaaatgtggacgagctgtcaagcctccagtcttcagcggacacatcctcaag

SEQ ID NO: 609323 - DNA, 100 bp, Homo sapiens
ctgacttttcttatgctgggatgtgccttagaggattatggatatttggatttgacctgcattttggaatttatctacacttaaaatgccaccagcagtt

SEQ ID NO: 609324 - DNA, 114 bp, Homo sapiens
gctggatggtggactcagagaccaataaaaataaactgcttgaacatcctttgactggttagccagcttggctgaagaggaaataaaaacagaacaggaggtggtagagggcat

SEQ ID NO: 609325 - DNA, 83 bp, Homo sapiens
ggaacaactgtgtcagcagctagcccttttcctcaaggctattgattactatttgaaagcgctaaggtcattgggaacacgag

SEQ ID NO: 609326 - DNA, 49 bp, Homo sapiens
tggactgtgggctggtgtgtggaactgaccattaaaaatctcaagtgac

SEQ ID NO: 609327 - DNA, 100 bp, Homo sapiens
ccgcgggatacgcctcagcgcgaaaatgtatggagatctagatgtcttattcctgacagatgaatacgacacagttctggcttatgaaaacaaagggaag

SEQ ID NO: 609328 - DNA, 76 bp, Homo sapiens
aaatatgctatgccaagctcagccccgaagtgcttcagatgtagagccaaaccaaacaggaagcttacttttctct

SEQ ID NO: 609329 - DNA, 100 bp, Homo sapiens
gggtgctggaggagctgcacaaggcggaggacagcctcctggccgccgaagaggccgccgccaaggccaaacgtaccaagaaagtcgggatcgtcggtaa

SEQ ID NO: 609330 - DNA, 105 bp, Homo sapiens
ggagaccctcccttgaaaccggcactgggacttctcgatctctggaggcacctgttgcaagtgacagatacagtttatgtaacttgatggaagaaaatggaatta

SEQ ID NO: 609331 - DNA, 91 bp, Homo sapiens
tctcggcggcgcggcggcggtggacgagtacctggagtaccggaggtcgaggtcaaggagacattctcatagacgttacactcgatccaga

SEQ ID NO: 609332 - DNA, 110 bp, Homo sapiens
aatgtgaagagacatgagacagtagtcaaatactcagataacaacgaacttgatgcaagtgataggtttgccaaggtcagacctctcatcatccggatgaactgcaattt

SEQ ID NO: 609333 - DNA, 75 bp, Homo sapiens
cgaggctcggccgccccgccgcgagcagcccctgtcaaagggaacaggaagcagtccacggagggtgacgcccta

SEQ ID NO: 609334 - DNA, 80 bp, Homo sapiens
tgactgggacctaagagaatcctgagctggagggtttccaggcctgaggtgcccgccctggccccaggagaatgaaccag

SEQ ID NO: 609335 - DNA, 100 bp, Homo sapiens
atttgaggatcttattcagcgctgcctttcttcagcaacagaccctgtgtatggtggctgatgaagtaagtgtttcaatggtttttatgtcttttataag

SEQ ID NO: 609336 - DNA, 100 bp, Homo sapiens
tggatcctgcacagcttggaactgctagatgaacccatcccccagatagtggctacagaattagtgacaagagctggggttaggatccggttggactctg

SEQ ID NO: 609337 - DNA, 98 bp, Homo sapiens
tggaatcagaagatgaccctgtcataaagaaaattgcccttcgggaaatccgaatgctcaagagtggcagaatttagtgacatttggaagcttttcaa

SEQ ID NO: 609338 - DNA, 82 bp, Homo sapiens
gccggggccggaggaaaaagctcggtgacttaagagattaaaattaatttggttgctgttggttctgaacaaataatgagtt

SEQ ID NO: 609339 - DNA, 100 bp, Homo sapiens
cctggggacacatatggaggacaaggcacagaaaactgaatctgtagataacgagggagaatgaattgtcatgaaaaattggggttgattttatgtatct

SEQ ID NO: 609340 - DNA, 50 bp, Homo sapiens
gggcccgtcaagctgcgcctgacaggtgctggagaatctggtaaaagcac

SEQ ID NO: 609341 - DNA, 75 bp, Homo sapiens
tggcggcgcggtggagctctagcgggcgatgatgagatctcatttgaccctgatgacatcatcaccaacatcgag

SEQ ID NO: 609342 - DNA, 100 bp, Homo sapiens
ggtcagcacttaccggctgccccagatcgcgcgcctggacaacggcacattgcaagcaacccgtgccttgatggtggttggcatcctcctgggagtgata

SEQ ID NO: 609343 - DNA, 100 bp, Homo sapiens
actgatttcatcaagttcgacactggtggtgttcccactgatgaagagcaggcgactgggttggagagggagatcatgctggctgcaaagaagggactgg

SEQ ID NO: 609344 - DNA, 100 bp, Homo sapiens
gagatcaagccctcctcggcccctgagctccaggccgtgcgcatgtttgctgactacctcgcccacgagagtcggagatgggatattcagaggatcaggg

SEQ ID NO: 609345 - DNA, 50 bp, Homo sapiens
ctgcaggcacagttgccgattacagttaccttatcccatatcacacaact

SEQ ID NO: 609346 - DNA, 83 bp, Homo sapiens
cgagttgtcatccccccttcaagcaagggcatgatgcctccactagcagttatacttaagcatgaacattgacgacaaactgg

SEQ ID NO: 609347 - DNA, 83 bp, Homo sapiens
atttcaaccataaagacatcttaattgggcacgaaagaggtgctacaaagtacacagataaagacaatggagggatgcttgta

SEQ ID NO: 609348 - DNA, 82 bp, Homo sapiens
tggacgtcactggccctggtggggattgacagccacgggaagaacccagcgggtgccgcttctccacccgaggcttccacct

SEQ ID NO: 609349 - DNA, 100 bp, Homo sapiens
gcggggcgacgctggctgcagggacccggtgacagcgtgagagttttcggctttgtgagaaaccttaccatcaaacacgatggccagcaacgttaccaac

SEQ ID NO: 609350 - DNA, 75 bp, Homo sapiens
tcgtttcatactttacgcttgtgtgataaaactgggctttcagtggacacgctacagtttctgctcttcttatac

SEQ ID NO: 609351 - DNA, 83 bp, Homo sapiens
ccgaaggacctgcggcatctgcgggcctgtttgctgtgttcgctggtcaaggaactgtggctgcaccatctgtcttcatcttc

SEQ ID NO: 609352 - DNA, 100 bp, Homo sapiens
atgctcctttaatttttgaacgagatgacgcagctgctgactgtctctttcttcgtcctgggttgcctggtgtgccccctttcctcctgcaccgtggagg

SEQ ID NO: 609353 - DNA, 90 bp, Homo sapiens
ggacgcggcgctgctgaccgacatcgaaggatcgccccaggacattcgacatgcactcactggagagttcactcattgacataatgagag

SEQ ID NO: 609354 - DNA, 98 bp, Homo sapiens
agaacgagtccctcttcactttcctcggcaagaaatgtgtgatccaaaacgctaacgatgtattaattgcaccacttgagaaatttcgaaaagaacag

SEQ ID NO: 609355 - DNA, 96 bp, Homo sapiens
aggctcactcaaggatcagttggctttagcaattggaaaccatcaacacaggcccttttgtgatgcgttccacgtgtaggagatgtggtggccgcg

SEQ ID NO: 609356 - DNA, 100 bp, Homo sapiens
aaatgtcatccgatggcacaatcaggatgaagatttgataaagtggaaggcactgtttgaggaagtccctgagttactcactgaggcagagaagaaggaa

SEQ ID NO: 609357 - DNA, 100 bp, Homo sapiens
agagacaccaggacagaaaagacagtgttctgctttcatggagttcacagaagagtcgaggaggagcgggacggtatgcgggccatcctggggtcctacg

SEQ ID NO: 609358 - DNA, 49 bp, Homo sapiens
tgctggagatggtggagtccgtcagtctcaacatatgcactagtggaag

SEQ ID NO: 609359 - DNA, 89 bp, Homo sapiens
cctcaacgccagcgggagcacatcgagcctgccctcgcaaaacccgatcttgaagaatatcaccgactacctgatcgaggaagtaagcg

SEQ ID NO: 609360 - DNA, 50 bp, Homo sapiens
atccaatcccttgtccttaaaagctggagtcacatcagaagccgcgcaga

SEQ ID NO: 609361 - DNA, 51 bp, Homo sapiens
atttaggatcttgttgaatccagtccagaaatttggagagcttgtaatgac

SEQ ID NO: 609362 - DNA, 98 bp, Homo sapiens
aagtacccgcgtgcatacggctgccggcatggcacattacaacttcaagaaaattacggtggtgccgtccgccaagattaagatgttctacgaggagc

SEQ ID NO: 609363 - DNA, 100 bp, Homo sapiens
gcggctgggcgttcatctaccacgctttcgtgtgtcgtgaaaactacccctaaaagccaaaatgggaaaggaaaagactcatatcaacattgtcgtcatt

SEQ ID NO: 609364 - DNA, 131 bp, Homo sapiens
agcctaccaccccagcggcaaggaccagaccgtcgggaacagccatgcaaaggcaggggaggaagccacctcgagcttagaccatgctcagcctccaagcagccttgtcatcgacaaagaatctgaagttt

SEQ ID NO: 609365 - DNA, 89 bp, Homo sapiens
aaaatcactcgaagatttaatttttgagtctttaccagagaatgcatcacacaagttagagtgtggtttattgacaatcatttacaatg

SEQ ID NO: 609366 - DNA, 90 bp, Homo sapiens
cgattggttatattaatactcctggacctgtgtgtcagttaatgtggtctcccatgtctcatatattctctaagccgctttcatcatggg

SEQ ID NO: 609367 - DNA, 101 bp, Homo sapiens
ttacaacatggcagacattgacaatgttggaaaaccttggacagacaattgtccccgatttgggatcactggaaagtcagcatgattttcgaaccccggag

SEQ ID NO: 609368 - DNA, 82 bp, Homo sapiens
cacttttgagtgcaactgccttccaggagtggagtcaacatatcaatggagcaagtcacagtcgtcgatgccagcttcttct

SEQ ID NO: 609369 - DNA, 75 bp, Homo sapiens
gccggaatctgtctcctgatcatcattcagttgaaggcacagttaaatgaaacactcacaaaacttagaactgaa

SEQ ID NO: 609370 - DNA, 74 bp, Homo sapiens
attaaaagagttcggcgaggaactccagaatacaaggcctccaagactgcagagaatgccaccagtggggaaac

SEQ ID NO: 609371 - DNA, 100 bp, Homo sapiens
caaaaagatgcttgtggaagccacccgggagtttgaggaggttgtggatttcaaatatgcgtgcattagagaatgattttttcaattctcccccaagaaa

SEQ ID NO: 609372 - DNA, 71 bp, Homo sapiens
aaccacagacatgactgagtcctccatgaagactgttctccatagtggtgttcggctccatcgtgaacgag

SEQ ID NO: 609373 - DNA, 97 bp, Homo sapiens
acgaaacagaaatttcatgttgcaccctcacagcctatgcccctgaggccaccgactacgatgtgcgggtgctactgcgcttcccccagcgcgtgaa

SEQ ID NO: 609374 - DNA, 100 bp, Homo sapiens
cctccagcactgagggcagcgccacccacgccacccagctgctagtgctagccaaaactggacaagccaaggcatctgtagccaaagtaaacaaatctac

SEQ ID NO: 609375 - DNA, 100 bp, Homo sapiens
tgggggcctctccagggagtgctctgttcacggctccatcgctgttagttgcttttaactttgacagaggaagaattttccaagacgccctataccatag

SEQ ID NO: 609376 - DNA, 131 bp, Homo sapiens
ccgccatcgatgcatcccagacccccgatgtcgtgttcgcaagcatcctagcagccttctccaaagccacatgtcccagctagtccacagggaccagcagtgccatggaaggatttaacatgtctcagagc

SEQ ID NO: 609377 - DNA, 82 bp, Homo sapiens
aaatctaatttgggcggaatcccacaagcacagactagtgtctgcgagattaatctctcatggccgctgcacaagaacctgg

SEQ ID NO: 609378 - DNA, 90 bp, Homo sapiens
agagaacagaagctccaggatattatgaagttataaggttccccatggttaacagccaggtccttgcctgctgtgcagtctgatgaaaga

SEQ ID NO: 609379 - DNA, 101 bp, Homo sapiens
tcatgaaggagctcatgcagtggtacaaggaccagaagaaactgcaccggaaatgtgcctaccagaattctgagggggatgcccagacgctgacggaagtg

SEQ ID NO: 609380 - DNA, 96 bp, Homo sapiens
caaaaagttaaacaagcaagcctgccataagtgagaaggtaagttctcttctacgctgtatgagactggtggctgtgatatgtcacttgtgaattt

SEQ ID NO: 609381 - DNA, 109 bp, Homo sapiens
cccgcctgcgtcccagaagtgcctgcagttcagacccttctctcccctccactttctcccggaccatggtgaatccgggcagcagctcgcagccgcccccggtgacggc

SEQ ID NO: 609382 - DNA, 74 bp, Homo sapiens
cggggctgaggcggccgcggggcccgagcgcagttgctggactgagacatgagcctccaactgtgtggttgggc

SEQ ID NO: 609383 - DNA, 50 bp, Homo sapiens
cagggagccaagcgtcctgcccggccggcgtgatggtgggcatgggtcag

SEQ ID NO: 609384 - DNA, 83 bp, Homo sapiens
gttttctagaagcctgtcgaaaaatgggggtgcctgagcaagagtgagccatggagctacgtgtggggaacaagtaccgcctg

SEQ ID NO: 609385 - DNA, 75 bp, Homo sapiens
gccgcccccagctcccccgcctcggggagggcaccagtcattgttaaagctaccaatggaccaagatatgttgtg

SEQ ID NO: 609386 - DNA, 90 bp, Homo sapiens
cacagacacagctcatgtctcattaatcacaccaacaaaaagatcctgtggtacaggttcggacaagtggacctccctagaaagaaaact

SEQ ID NO: 609387 - DNA, 75 bp, Homo sapiens
ccctcatctatatcctttggcagctcacaggagaagatggtataaactggtccatcagtgacaaagacattgagg

SEQ ID NO: 609388 - DNA, 132 bp, Homo sapiens
cgccccgggctgggcaccaaataccaggctaccatggtctacaagactctcttcgctctttgcatcttaactgcagtttgtggggacattcatggacaattctttgatttgatgaagctctttgaagtcggg

SEQ ID NO: 609389 - DNA, 100 bp, Homo sapiens
ctttagagcctggctactcacagttgaagcctgattgcagaacacagatatgtagaactcttcttgaattctacagcaggagcaagcggtggtgcttatg

SEQ ID NO: 609390 - DNA, 100 bp, Homo sapiens
gtcccttcgcctccttcaccgccgcagaccccttcaagttctagtcatggacgtggtgggtcctctggtgcgaaattccggatttccttgggtcttccgg

SEQ ID NO: 609391 - DNA, 100 bp, Homo sapiens
agctctctgtcctgcacaactttttcagtccttcccccaagaccaggcgccagggcgagggcctgcggtccaatgtcctcttgtcttttgatgacacccc

SEQ ID NO: 609392 - DNA, 75 bp, Homo sapiens
aggtggccagcagggagcagctcttgtacctgtatgccaggtacaaacagggccgttgctccagggagaactgca

SEQ ID NO: 609393 - DNA, 98 bp, Homo sapiens
tctcgtagtggaactaatatgggagaaggactgttgggagaatttaggatcttgttgaatccagtccagatgtgaatttcttcggagtaagaaatcct

SEQ ID NO: 609394 - DNA, 50 bp, Homo sapiens
gaagaattccagtcttataaagaaggaactgcaggagctgcagaatcttt

SEQ ID NO: 609395 - DNA, 83 bp, Homo sapiens
gggcgagatcctggcgagcctgcaggatggcgcggccgagtccccgtacggccacccggcggaattcagaaggagctggcgga

SEQ ID NO: 609396 - DNA, 110 bp, Homo sapiens
ggcgattccagagagcggcggaaaggataagcctcgacttagaagctaccgagttaccctaagaaagatcgaagccgcggtcaaggccgccagagaagcctttcccagct

SEQ ID NO: 609397 - DNA, 100 bp, Homo sapiens
atttcatccaccacattacttagcatgcttttcacttccactgcatctctcgctggctcaaaacacgacaggtgtgtccattggacaacagagagtggga

SEQ ID NO: 609398 - DNA, 100 bp, Homo sapiens
gatctccgcttagccattgcgctgggtgatgcggtcaaccatccgactcccatggcagctgcagcaaatgaggaaatcaaagagcaggaggttgtggaca

SEQ ID NO: 609399 - DNA, 75 bp, Homo sapiens
cgttcacaagacttcatcacctctttgtacatcttctgcaattactcgtgagaaagatcagtctaaagaaaagga

SEQ ID NO: 609400 - DNA, 82 bp, Homo sapiens
gcgggaggtgttcgagaacgaccccgagacggtttttagaacttcagccataaaaatgggcagaattttccttgatcatatc

SEQ ID NO: 609401 - DNA, 75 bp, Homo sapiens
tctgcggatggttcgccgcaataacctgtttaacaggtctcacatgagtacttcacaatggggaaactgaactgg

SEQ ID NO: 609402 - DNA, 87 bp, Homo sapiens
gttcagttcgtcatggggctgtttggaaagacccaggagaagccgcccaaagaactggttttaaaatcaaagatgggaaaatcggag

SEQ ID NO: 609403 - DNA, 100 bp, Homo sapiens
gatttgaggagctgctgctgcaggttctgctccagacgagcccttaccacgttgactcactcctgcagctcagcgatgcctgccgctttcaagaggatca

SEQ ID NO: 609404 - DNA, 98 bp, Homo sapiens
gccggatccagcatctctccaccatcgactacgtggaggacggtgtggatgaggtcaccattgtcaacattttgaccaaccgcagcaatgcacagaga

SEQ ID NO: 609405 - DNA, 75 bp, Homo sapiens
ccggttccccggcccacagtgggggtgtgcaaacccgagagaactggagtggcagaatttagtgacatttggaag

SEQ ID NO: 609406 - DNA, 100 bp, Homo sapiens
acccgccctgcgccccgctctgctgtgggcgctgctggcgctctggctgtgctgcgcgacccccgcgcatggttgtggcagcactgcctgaaggtatgag

SEQ ID NO: 609407 - DNA, 89 bp, Homo sapiens
aaaacctgcctcaaagttgagattatagagaaggacaccaagtacagtgtcattgtgatccggaatggagtttcactcttgttgcccag

SEQ ID NO: 609408 - DNA, 75 bp, Homo sapiens
tacaggagcgtcaacctgatcttaccaggaatcactcactcaggttacttcttgctgcagattctgcgcaggatc

SEQ ID NO: 609409 - DNA, 98 bp, Homo sapiens
gcgaaagcgaggctgatggagcgaagccaggaagaggatgcggagacgcgggggtcgacatgttaaaacgggtcagttggcagccatcaaagttatgg

SEQ ID NO: 609410 - DNA, 87 bp, Homo sapiens
atggacaagcttaataaaataaccgtccccgccagtcagaagttgaggtcctttctgaaagatctgctactgaagtagacaacaatt

SEQ ID NO: 609411 - DNA, 96 bp, Homo sapiens
aaccctgagatttacctctttgtgaaggtccagattcggccttggaatctcagtgacagtgactttgtgatggatggttcacagccacttgaccca

SEQ ID NO: 609412 - DNA, 49 bp, Homo sapiens
ctaccatgatcctttcctcctacggtctggaaaatcccgaagcagaagc

SEQ ID NO: 609413 - DNA, 100 bp, Homo sapiens
cgcggtgacggtggcgccgcccggggcgaggcagggccagcagcaggcgggagcaggcgcggggcgaaggagctgctagaacaatgctgaggcgggtgag

SEQ ID NO: 609414 - DNA, 101 bp, Homo sapiens
gaatcacgctcggaaacaatggtaaaggcatgacttcctggcaccacagggaaaatcgggtgcaagcccagaaactatttccccaccaccacttgttgaaa

SEQ ID NO: 609415 - DNA, 49 bp, Homo sapiens
atgaaggagcattcctcttggggaattgatgttgatgctgaaaattgtg

SEQ ID NO: 609416 - DNA, 88 bp, Homo sapiens
ccttccccctgtctctgccctcctggcgggcccggcggctctcactatccagaaaaatggctacaaacttcctagcacatgagaagat

SEQ ID NO: 609417 - DNA, 90 bp, Homo sapiens
ccccagagagcgccctgagagaacagggtggccgcttggtccagaaagggctattgcaagacacgaagtccgagaaattgagcagcgaca

SEQ ID NO: 609418 - DNA, 60 bp, Homo sapiens
gcggttggcaccactgaagtgaccgaatgagtgtaaagagaatggcgctttcactgtgct

SEQ ID NO: 609419 - DNA, 100 bp, Homo sapiens
cgccgatcccggagcccgagccgggagagggagccgccgcagccgccggcgctgtggagataaatttgcgcctcattttggtaagcggaaaaacaaaaga

SEQ ID NO: 609420 - DNA, 75 bp, Homo sapiens
ctggaaatgatggtgcaagaggttgtggagttgctcagtgcttgaagattgtctgccaagttgggagattagaca

SEQ ID NO: 609421 - DNA, 50 bp, Homo sapiens
aggaggtatgcctggactgggccaggatttggtgctatggagaaattttt

SEQ ID NO: 609422 - DNA, 75 bp, Homo sapiens
gaacttcttttggccaagctcaagaaagatgtgcgggacatcctcaccccaattcagattgaagctgcttaccac

SEQ ID NO: 609423 - DNA, 83 bp, Homo sapiens
agccgcggcggagccggaggaagctgatggtcatcttttccaagtttacccaaggtccagcctagcccctaggcaccatgtcg

SEQ ID NO: 609424 - DNA, 90 bp, Homo sapiens
agccgcccaccggtttttctgccacttttgcaagggcgaggtcagccccaaactaccggtctctaattaacagaagatggcaaagcccag

SEQ ID NO: 609425 - DNA, 75 bp, Homo sapiens
ctggcccaggcgcacacggaagtgaggtcattttcttctgaggaagtcattcttaaggactgttctgtccccaac

SEQ ID NO: 609426 - DNA, 83 bp, Homo sapiens
attatggatgaacgtaacagacagaatatattgcactttatccatattcaagtgtggaacctggagatttgactttcacagaa

SEQ ID NO: 609427 - DNA, 135 bp, Homo sapiens
agcgcccggggctccggggacggcgagatgggcaagcccaggaacgtggcgctcatcaccggtatcacaggccaggttgaaaggattgttgacaaaaggaaaaataaaaaagggaagacagagtatttggttcgg

SEQ ID NO: 609428 - DNA, 100 bp, Homo sapiens
aaatgcaccaatcagcatgctgtgtctagctcaagtgctacagttgaaactccagcagcgccggacccgggaagaactggtgagccaagggatcatgccg

SEQ ID NO: 609429 - DNA, 100 bp, Homo sapiens
ctttggaacgtcattcattctcgatgtcgtgctaaatcacttatatagaattggtgataggatcacaacttctgaggtcccagcaagagtcctaacatct

SEQ ID NO: 609430 - DNA, 88 bp, Homo sapiens
agggaggagactcctgaccctcagaatggtctgaatttcctgctgctgttcacaaagatgctttttatctttaactttttgttttccc

SEQ ID NO: 609431 - DNA, 90 bp, Homo sapiens
accggcgtgaacaggagcttcatcgctcttgccactgaggcggctcccagctgcgttggcgacatggccgacacccccagagatgccggg

SEQ ID NO: 609432 - DNA, 87 bp, Homo sapiens
gaccgtcgggaacagccatgcaaaggcaggggaggaagccacctcgagacttgtcagcttgtgggaaagtgacatcagcgtccaccc

SEQ ID NO: 609433 - DNA, 98 bp, Homo sapiens
tctggtgcatgctgatgacgaaaaacgctggacgtaaagaaagaagtgatgcactcaattctgcaatagataaaatgaccaagaagaccagggacttg

SEQ ID NO: 609434 - DNA, 50 bp, Homo sapiens
ccagtgcatcttttgcacagctagcactgttattgggcctggcttgtaat

SEQ ID NO: 609435 - DNA, 90 bp, Homo sapiens
ctcagagctcgatgtcaggcatcagatgactgaagacttccttctgcaggagctgcctggtgaagtacctggaggagaacaacacctgcc

SEQ ID NO: 609436 - DNA, 50 bp, Homo sapiens
gagaatccgcatctggggcacggaggatgttggggatcagccaggtgagg

SEQ ID NO: 609437 - DNA, 98 bp, Homo sapiens
ttcaacttcaatttttctgcagtggctctgggtccagccccttacttaaagttggccagtcagtgctgaaagatgtaagcaaagtgaagaagctgaag

SEQ ID NO: 609438 - DNA, 100 bp, Homo sapiens
tggttcactgaaacctctgcctttctggttcaagcaattctcatgtttcagcctcccaggaactctaatgaatcattgattgaccagcactattttacca

SEQ ID NO: 609439 - DNA, 90 bp, Homo sapiens
ggcgggtgcaagaggacaaggagatgggcaagtgtcgtggacttcgtactgctaggaagctccgtagtcaccgacgagaccagaagtggc

SEQ ID NO: 609440 - DNA, 82 bp, Homo sapiens
gcagaaatggactgtgtacagagagcctggtgtggagcaagataaggttcaaaccttgtactactcagctgatcacaagctg

SEQ ID NO: 609441 - DNA, 100 bp, Homo sapiens
ctcttcgtgctcacctgcctgctggcggtcttcccagtttttgaatcagagccgacaggcacttgaattgaaaatggaaaaccctactgctggtggtgct

SEQ ID NO: 609442 - DNA, 75 bp, Homo sapiens
ctagaattggaaaaccttacagagttggaacaaaaattgaccccactttgtgccgggctgacagaatggtggggc

SEQ ID NO: 609443 - DNA, 100 bp, Homo sapiens
tctgcgtcaggtccgggctcctggacttcgcctttcccgagccctggaggtggggagaaaagccatcatctgccctccaccatccatacctacgtttgca

SEQ ID NO: 609444 - DNA, 90 bp, Homo sapiens
aagaagccacccgagcggactcccgagctctctatcaatatcagctcacatcattgaaaagataattttgaagacatgttttgctgaaaa

SEQ ID NO: 609445 - DNA, 56 bp, Homo sapiens
ggctggcggagcagaacggattgcagggagtggttgaatctgctgccttagtcgtt

SEQ ID NO: 609446 - DNA, 100 bp, Homo sapiens
attgggagatccacagctaagactccaggaccctctggaagcctagaaatggtgctttgaagaagagtctcacagccaagcaggtccaggcggatttcat

SEQ ID NO: 609447 - DNA, 90 bp, Homo sapiens
ctgctccacagggcccgcttcgaggacggccgcccatcgccacgttctctgccaatccggaggcaaaagtcaggatggctaaaggtgacc

SEQ ID NO: 609448 - DNA, 108 bp, Homo sapiens
aattgtccccgatttgggatcactggaaagtcagcatgattttcgaaccccggagtttggaaatcctcattgacgattcaatttgttgaaggccaatttgtggactcc

SEQ ID NO: 609449 - DNA, 100 bp, Homo sapiens
gaccaccttcataattggagaaacaccaaaaggaatccgcagaatggagatttacagacagtcatctgggtggaggacacccttttgggatcagcactga

SEQ ID NO: 609450 - DNA, 90 bp, Homo sapiens
ggctctagcaggctccactaactggggctacgactctgatgggcagtcaaaccaggcaatgtgaggaacatcattcagcactttgagaac

SEQ ID NO: 609451 - DNA, 89 bp, Homo sapiens
ggcactgctactgcgaagacagctggcaggctccaggaggccagagctctactgaagcggcggcggccccgggggccagggggccgggg

SEQ ID NO: 609452 - DNA, 100 bp, Homo sapiens
gacaaggctgacctcagtgccaggagggtccctggtgggtgctgcatgaggcaggcgtcactgcagaagtgttttaactcaaatgggtgatgaaaaggac

SEQ ID NO: 609453 - DNA, 110 bp, Homo sapiens
cagaggcgctggagctgggtcagtccgccgctcaccccgcggccgcaccttcccgccttctcagctgccccagagcacatcagctatgtgccccagctctcaaacgacac

SEQ ID NO: 609454 - DNA, 101 bp, Homo sapiens
gtggttacaaccgcagcagtggtggctatgaacccagaggtcgtggaggtggccgtggaggcagaggtggcatgggaggtgaactgttgcaatgggatctc

SEQ ID NO: 609455 - DNA, 74 bp, Homo sapiens
aggacctgtttatctctgatttctggagttcagcactaggctaagtcctatcagccatggaaacaccattgctc

SEQ ID NO: 609456 - DNA, 95 bp, Homo sapiens
tgctgacccaagggaatacctctgtttggacaatagtgcaagggatagctgggagtatggccaccctgctccacgatgcggtaatgaatccagca

SEQ ID NO: 609457 - DNA, 75 bp, Homo sapiens
ggcatgaccattttcttcagcctccttgtcctaggagcttactccacgggaacagcctctagataatctgagttg

SEQ ID NO: 609458 - DNA, 100 bp, Homo sapiens
ccagcaacagagctgggtccgggtgtacgttttgagtatccgaggagcccaggaggaggaacccacagacccccagctgatgcggctggacaacatgctg

SEQ ID NO: 609459 - DNA, 83 bp, Homo sapiens
ggggcctttgtccgtgttcggtgaccgcagcactggggaaacgatccgctcccaaaacggcgtgtgtacatttcttatctgga

SEQ ID NO: 609460 - DNA, 100 bp, Homo sapiens
cttccacacgaacaagcgcgtgtgcgaggagatcgccattatccccagcaaaaagctccgcaacaagatagcagggaaaactcactaccatgagaattgc

SEQ ID NO: 609461 - DNA, 100 bp, Homo sapiens
gagttaaggaacagatccccggaggagattatgatgcatcattatcacagaagaaattcgtgtctatagcttttaaggacttgattacatcattttcaag

SEQ ID NO: 609462 - DNA, 101 bp, Homo sapiens
ccccagcatgggctcctctgtcaatgacgctttaaagagagataaagatgccatttatggtacctggagtagaacagaaaaattattatgtctgtgttccc

SEQ ID NO: 609463 - DNA, 73 bp, Homo sapiens
tgatgtagaaaccaaatatggtttgcttcagccctattacttatgcctgggaaggtggaaaattgatatcaga

SEQ ID NO: 609464 - DNA, 90 bp, Homo sapiens
gtcctgggccccgggcggcggtcgccaggtctcagggccgggggtacccgagctgcagtcgacttcggcaggttcagagcatcctgaccc

SEQ ID NO: 609465 - DNA, 83 bp, Homo sapiens
tcgccctggctgtgaagaacagcaaatcaatctctgaggttggacctgtcttcctcgctggaagttttgcgtgagtgacacag

SEQ ID NO: 609466 - DNA, 95 bp, Homo sapiens
gggagtctccgcgtcccgctcgctgggagagaggtacctctccttttccctctccctttccctaagtgtcttgggacaaggtgcgcattcctggt

SEQ ID NO: 609467 - DNA, 100 bp, Homo sapiens
gggctcatctgctggcagtatacaagcgaaggacgggagccgaagctcaagcccctctgctgccagtctgctggtgtttgctggaggtcccctcctgacc

SEQ ID NO: 609468 - DNA, 78 bp, Homo sapiens
ccgagttatgcccaccctccaactttgcgacggaaatgtgtcatcgaaagccaggtgctggagctggcaggtaatgct

SEQ ID NO: 609469 - DNA, 100 bp, Homo sapiens
agaaatatatctgatttgaccttgtccattagcttttatgaaatgtggaagtgaggacactgctccagttattatatttgtttccaaaatgtttgcagtt

SEQ ID NO: 609470 - DNA, 98 bp, Homo sapiens
tgctctcccgcgtccctgagccaggccagcgccgacctggaggttgtgcacagggacctgaagcccagcaacatcctgtatgtggacgagtccgggaa

SEQ ID NO: 609471 - DNA, 102 bp, Homo sapiens
cggcaggacaacaaggagaactggctgcactgctgaaaatggcctttgacgaggaggtggggtctgacagcgccgagctcttccgtaagcagctgcataagc

SEQ ID NO: 609472 - DNA, 83 bp, Homo sapiens
gagaatgacagctgtgataaaaaaaaaattcatctgggcggtatctggaacttgcatgttttagaggttcgtcctctaaatca

SEQ ID NO: 609473 - DNA, 75 bp, Homo sapiens
aacagggcggagtagcggccgagctgcgaaagaggacctagtgaatattgagatgttcctgacggccaaagaggt

SEQ ID NO: 609474 - DNA, 50 bp, Homo sapiens
cactcctgggccgtccctgaagatccctttgggcgtcccacaagcttcgc

SEQ ID NO: 609475 - DNA, 100 bp, Homo sapiens
cgcagcctcacctgctgcccattctctacctgaacggcgtcgtcgggccgccgcagcccgccgaaggcgcggccttgttgtcctcctggtgcgaagagct

SEQ ID NO: 609476 - DNA, 83 bp, Homo sapiens
ggaacctactgtggggccgcggccggaccgagcgcctcgacctcggtctgagagggagaaccgaagattacaggaggccagca

SEQ ID NO: 609477 - DNA, 50 bp, Homo sapiens
gccgggagcccttagggaggcaggcagaatccagagaccacatttgaagt

SEQ ID NO: 609478 - DNA, 75 bp, Homo sapiens
tgttcccggagatgcggcgcgcaggtgtgactgcacagaaaagttacaaaacaaatttgactttttgcgctcaca

SEQ ID NO: 609479 - DNA, 100 bp, Homo sapiens
ccgcctgaaggcaccttggccaggtccccgtccattgatagcattcagaaagatcccagataacaacgaacttgatgcaagtgataggtttgccaaggtc

SEQ ID NO: 609480 - DNA, 100 bp, Homo sapiens
tctacttggtggtgtgtaacgactgtaatcaggttgtcaaaccgcaggcatttcaatcacattatgtatttgactacagtcattccttatgagaaaaaaa

SEQ ID NO: 609481 - DNA, 74 bp, Homo sapiens
cccagcccactgggctacgcagcctccagggtcgtatagacctccccctcctatgggcaaaccaccaggttcaa

SEQ ID NO: 609482 - DNA, 100 bp, Homo sapiens
atcaagccagagaagtgcccgaggagagttaacagggttccaggaagaagccctggccagacagccccggagatcaagcatctcctcctggggatgcccc

SEQ ID NO: 609483 - DNA, 78 bp, Homo sapiens
gaaaactgaagtttgccataaaagttgatggagattacctttgggttccattacagcttatagaaagtgttgaatgcc

SEQ ID NO: 609484 - DNA, 89 bp, Homo sapiens
tttgtagcgtggtgcttctgttgctcacaggcaaggggagagccagttgcgcagagccctgcaaccagcagtccagggagaagtggtga

SEQ ID NO: 609485 - DNA, 82 bp, Homo sapiens
gcctcggggtccggaaccagacgatgagacagagttgcgaccgcgcggcagtgttcggctaatgaatgagttcactaatatg

SEQ ID NO: 609486 - DNA, 100 bp, Homo sapiens
atgtaaatgacttacctgtaaatagtggtgtaacccgaataagctgtcagactttgatagtttatgtgaagaaccagctcagtgggactctacagattaa

SEQ ID NO: 609487 - DNA, 75 bp, Homo sapiens
cccagggcggacagcagcctcgggtgcaatcctggagccccccagtgagggtcctaggcctacttacaagcctcc

SEQ ID NO: 609488 - DNA, 76 bp, Homo sapiens
tttgacaagtgatgagaagctgtcggagcttcccaaggaataaaacatcagcttcgagttcacttgtcttttggat

SEQ ID NO: 609489 - DNA, 82 bp, Homo sapiens
aggatatgaagaaattgagggttcttgccatgattacacagatgaatcttgcactttcaagatatcattgcgaaatttccgg

SEQ ID NO: 609490 - DNA, 75 bp, Homo sapiens
tgacttgtttctggatgattctaagagctgccacgcctcccaatgctgtggaccggccctgcctgcgactgaagg

SEQ ID NO: 609491 - DNA, 50 bp, Homo sapiens
gatggctactatttcaccaatctgctccagtgatccacaagctcagaaat

SEQ ID NO: 609492 - DNA, 100 bp, Homo sapiens
ggaagatgtgctgcctactcggccaaagaagagggcacgatctgtagaacgggaccaggactaaaacctccagaggaacggacaatagaatacctagaag

SEQ ID NO: 609493 - DNA, 100 bp, Homo sapiens
aaccccaagcacgcgtctgtgttggcagaaaggatccacctgatggctggccgagtaccccagggagctgatcgaatagcagtcaaggctgagatggagg

SEQ ID NO: 609494 - DNA, 101 bp, Homo sapiens
cctggcacgggaattatacaccctacaagtacaacctgaagaatttcatggttatcaactcagtggcctttgaccatgcatcactgtgtgcccagtattct

SEQ ID NO: 609495 - DNA, 82 bp, Homo sapiens
ctggccgccccgagcggagcctggagtggacatcctcatcatggatgatgacgacgtccccagctggcctcccaccaagctg

SEQ ID NO: 609496 - DNA, 75 bp, Homo sapiens
ctggagatccgcgccatggatgagggaaaaagaccttgatgaagttctgcagacccactcagtgtttgtaaatgt

SEQ ID NO: 609497 - DNA, 100 bp, Homo sapiens
tgccttggccatttaagcactattattcatgaggcaaatgaggaacagggcaatagtatgatgcctcaagtactacagccttccagcagccttcccagac

SEQ ID NO: 609498 - DNA, 83 bp, Homo sapiens
ctgggtgcagttcctgcagtaccccactctacgatcaggacttctgcacggacctggccgtctccagtgccaacttcattccc

SEQ ID NO: 609499 - DNA, 99 bp, Homo sapiens
cacccgagtggggcagttgtggccgtaggactgaacacggggaggggtccccacggagtctggaccatggaggagcgaggtctggcccccaagttcgac

SEQ ID NO: 609500 - DNA, 97 bp, Homo sapiens
catgatccaccggcctcggcctcccaaagtgctgggattataggcgtgagccaccgtgcctggctgaagagaaatggtcaatgcatggtttgctgag

SEQ ID NO: 609501 - DNA, 100 bp, Homo sapiens
ctcagccaggcagcctctgcccagaaggaacgtgccgctggagttatactcccaaagacaaggcagggctcctctctgatgtggcaaacaaggctagatt

SEQ ID NO: 609502 - DNA, 75 bp, Homo sapiens
cccagctcggcccgcgggggagccccgggagccgcacgtttccagccagagacgacactcttccatggcccggat

SEQ ID NO: 609503 - DNA, 100 bp, Homo sapiens
taaaatcttgtacacatcttagctgcaatacatatgtagagtgtgtcggtcagaaggaacacctgagaaaccgctttatcatccttgtgtatgtactggc

SEQ ID NO: 609504 - DNA, 99 bp, Homo sapiens
acacattcccgtcagctggctgatccgcgctaatgtttctccatcccagagagatgaagtaattcaatggctggccaaactcaagtaccaattcaacct

SEQ ID NO: 609505 - DNA, 75 bp, Homo sapiens
gaggagtctgcctccaaggagaagggcgagggagtaaagccacggcaggaggagccaatggagatcttcgtggat

SEQ ID NO: 609506 - DNA, 75 bp, Homo sapiens
aactttcttactcaacatgcttccagatcaagagtataaggagattgctgcgatgattgacactgagtttgccaa

SEQ ID NO: 609507 - DNA, 75 bp, Homo sapiens
aaaccgcagcagccgtcggagcacttactggagtccaagatgctaatgctcttcaagtctgcaataaaaaatggc

SEQ ID NO: 609508 - DNA, 88 bp, Homo sapiens
ccgccgagctggacccggaccggttttggtttttagtgggcatgaaaggcaaggatgaagctatggccattggaggccactggtctcc

SEQ ID NO: 609509 - DNA, 100 bp, Homo sapiens
atgcgctggttcctgccggacttgcctccttcccgcagcgccgtagagatcgctcccactcaggtcacaggctgggacgcagagaccggcagcgattcgg

SEQ ID NO: 609510 - DNA, 100 bp, Homo sapiens
agcaggttgggagatggcaaagacatcttctggtcagagatacttcttaaaatgagctcacagtgcctgcactttaccccagtagccctgaagtgtgggc

SEQ ID NO: 609511 - DNA, 82 bp, Homo sapiens
gggtacttcattgatgccacaaccataatagaatgtctacattcctgaactgtggctgcaccatctgtcttcatcttcccgc

SEQ ID NO: 609512 - DNA, 96 bp, Homo sapiens
ctgggctttaccatctttgtggctgtgcttgccaggcctggctccaagaggaggttcagatgagcccctgctgacttgagagagacagagagacca

SEQ ID NO: 609513 - DNA, 89 bp, Homo sapiens
agcgagctgagtggttgtgtggtcgcgtctcggaaaccggtagcgcttgcagcatgggtgtgtccgcagccggccaggtggtatccctg

SEQ ID NO: 609514 - DNA, 126 bp, Homo sapiens
cacaacaagcttcggggccaggtgcagcctcaggcctccaacatggagtacatgatgacgtccggttgtttgccttcgtgcgcttcaccaccggggatgccatgagcaagaggtccaagtttgccc

SEQ ID NO: 609515 - DNA, 75 bp, Homo sapiens
cgtgaaggcgtcggccggaggacaccccatcgtgcaggttaatttggagtggcccctggagtcagtttcctacac

SEQ ID NO: 609516 - DNA, 50 bp, Homo sapiens
cgcgcctttactcactggaaacactatggcctcacctactgctattccat

SEQ ID NO: 609517 - DNA, 100 bp, Homo sapiens
atatttgggaagtgttgaaaaaaagcagacaatctgaggatgatgttgacttggggatccaaaggcacagggaaagcgctctagcgagtgctgatttaga

SEQ ID NO: 609518 - DNA, 73 bp, Homo sapiens
ttaaagtctctcttcaccctgccgtcatgtctaagtcagaggtgtttgatgcgatcatgaatttcaagaaaga

SEQ ID NO: 609519 - DNA, 109 bp, Homo sapiens
agaaggatatcgacgtcgtgatccagaagtccagagctgaggactgcctgtttgcagacaagttggatggcttgaggactggtactaaaaggaaacgtgactgggaggc

SEQ ID NO: 609520 - DNA, 100 bp, Homo sapiens
aatttaccagagataattgataacaccctgtaacagctgatgccaccatggcaactgcaccatacaactactcttacatctttaaatatattattattgg

SEQ ID NO: 609521 - DNA, 75 bp, Homo sapiens
agaaagatatggaattatttcgtgatatccaagaacaagcactgcaggactgcaatgtgccgatcttagctgctg

SEQ ID NO: 609522 - DNA, 75 bp, Homo sapiens
tgcacaccattggcaaaactgtggagtatctgcactcacaggggtctattatcctcccagtccacaacgctgaac

SEQ ID NO: 609523 - DNA, 98 bp, Homo sapiens
cggcatgcagcagttacttccactcaagaatcgtaggccaggctgatggagagctgaacattactcttccagaagagaaatgagccgtcagactgcta

SEQ ID NO: 609524 - DNA, 75 bp, Homo sapiens
gaagcccctgcttggatgcctgtccaccactgtactacgagctcaggaaagggacaagcagtggctggagcatgt

SEQ ID NO: 609525 - DNA, 90 bp, Homo sapiens
aggatatcgacgtcgtgatccagaagtccagagctgaggactgcctgtttgcagaattcagaaggagctggcggacatcactttagaccc

SEQ ID NO: 609526 - DNA, 100 bp, Homo sapiens
gctgctgtgtgcagaagaagctgcccagtttgagatggcagaagagcaccacaggcacagccagctggtgatggcccgctccctctccccacccccggag

SEQ ID NO: 609527 - DNA, 100 bp, Homo sapiens
tgaagtttgccataaaagttgatggagattacctttggctctaagcgaaagacatgaggcctcagcctgaaatgaggttgttttgaggtcatctgatttc

SEQ ID NO: 609528 - DNA, 101 bp, Homo sapiens
aagtgtgaagcggccaatggcacggaggcctgcgtgattgtcagtggcttcgccccgaggagagctgactgccctgggctgctgcctccggcagagctgag

SEQ ID NO: 609529 - DNA, 75 bp, Homo sapiens
gtcctttatatagaagggagagtagccgattcgaagacagtctcttacacctcctcctcagaacactattacatg

SEQ ID NO: 609530 - DNA, 75 bp, Homo sapiens
cagaaaacaaggtgtctgcaggaccaacctctcctctggatgctctagatatgtgttgagacggattctccgccg

SEQ ID NO: 609531 - DNA, 50 bp, Homo sapiens
gacggacacgcggacgtctagcggaggttccccacggagatccattctgg

SEQ ID NO: 609532 - DNA, 90 bp, Homo sapiens
tgaattttgaaacttcacggtgtgccaccctacagtactgccctgacccttacatccagcgattttatttggagagaagcaagcatcttt

SEQ ID NO: 609533 - DNA, 100 bp, Homo sapiens
ggaggacccgacgcgcggcgtttacccagcgcagcgttccaccgctcgggtttggctggcacccaccaaggctccggatgtgttccccatcatatcaggg

SEQ ID NO: 609534 - DNA, 82 bp, Homo sapiens
gtcttgttgcgggcaccgcagtcgccgtgaagatggcgtctaccagccggaatatattaaaggaatctgtgaacctgaacta

SEQ ID NO: 609535 - DNA, 100 bp, Homo sapiens
tcagtgccaggtggaccaaagtcatgggcacagctgaatggaaagccagtaggacacgaaggtgatacaaactggactctcaggacaaaacgacaccagc

SEQ ID NO: 609536 - DNA, 80 bp, Homo sapiens
tttggcagcctaccagcactacatcctggccaagaaatttgcctgtaatggtactgtgattgaacatcctgaatacggag

SEQ ID NO: 609537 - DNA, 83 bp, Homo sapiens
caagttcaccagcatccctgcagccttctggtataccatcgtcaccatgacaacactagggccatcgaagacggcaatttgga

SEQ ID NO: 609538 - DNA, 83 bp, Homo sapiens
ctcaaagcaataccaggatagctgttgtttcagagaaagaccactttacctgcattgtgaaggtactttttaccctactgtac

SEQ ID NO: 609539 - DNA, 83 bp, Homo sapiens
gcatcctatggctcaaagaaagatgattatttactccacaggatccgctgaacataggatgttgccacaaaatctacctcgtg

SEQ ID NO: 609540 - DNA, 75 bp, Homo sapiens
gggcggggaccttgccttgcccgggacctctgtgagtgaaagccttcagagggaagctgctaagaagcaggccat

SEQ ID NO: 609541 - DNA, 90 bp, Homo sapiens
gtccagaactggattgaattacttagtggtgaaaaaccttttgaatgtccaaattgtcatgaacgatttgctagaaatagcactctgaaa

SEQ ID NO: 609542 - DNA, 86 bp, Homo sapiens
aaacccgggacccacttcactccagtgcctccgacgcctcctgatggagcaggccgggctctcgccatgggtcactgtcgcctctg

SEQ ID NO: 609543 - DNA, 114 bp, Homo sapiens
ctggagacagattgtaggaccgagcgcgggcaggcgggaggcaacggagctaccagccgacaatgcagatcttcgtgaagactctgactggtaagaccatcaccctcgaggttg

SEQ ID NO: 609544 - DNA, 82 bp, Homo sapiens
ccctgcaggaactctacaacccaatccagagacctattactacatttctccattagttggtgtatttttcttggctctaacc

SEQ ID NO: 609545 - DNA, 95 bp, Homo sapiens
tggttggtggtaccctaaaattagggcatgattaagggttgactttgataaagattgtgaagatcctgaatataaaccactccaaggtcccccaa

SEQ ID NO: 609546 - DNA, 83 bp, Homo sapiens
ggattatcttacgtagataagacactgcaacacaatgtctcaggctgtgcagacaaacggaactcaaccattaagcaaaacat

SEQ ID NO: 609547 - DNA, 100 bp, Homo sapiens
cgcgaaggagcggaagaatggcagtgctcaaactcaccgaccagacaatgcagatcttcgtgaagactctgactggtaagaccatcaccctcgaggttga

SEQ ID NO: 609548 - DNA, 102 bp, Homo sapiens
gaatcaactgagagagatgcttaaaaatcaccagttactttaatgagtgtgttccagagaacaagccttcagacatttgctatattgacgctgagctgtcag

SEQ ID NO: 609549 - DNA, 82 bp, Homo sapiens
tttgggaagatcatccgcaaggaaataccagccaaaatcatttttgaggatgaccggggggatatgagactttctactcgga

SEQ ID NO: 609550 - DNA, 88 bp, Homo sapiens
ggaccctcagggagagcgggcagccttccaggtggacaggtctccgtgaggccgggtgacgctccagaatgggagacaagccaatttg

SEQ ID NO: 609551 - DNA, 95 bp, Homo sapiens
agattttcagcttcgggacaagtacatgtttgctacaaaggtggtgggctaaggaatatgagagtttaatggaaaccaaaaattctggctctgat

SEQ ID NO: 609552 - DNA, 96 bp, Homo sapiens
gtctggtcctactacgcgtacgtggtggagctctgcgtgtcatcctgaggttagcattacacttctcccagtggagcccatgacttctgatcagga

SEQ ID NO: 609553 - DNA, 51 bp, Homo sapiens
ggagaatatggtgcagaggccctccacgattcatgatgttgctatcaaaag

SEQ ID NO: 609554 - DNA, 75 bp, Homo sapiens
acagccccgaagacgccgacctcttccactccgaggaaatcaagcaacacagtcactcctggcggcaaaccaaac

SEQ ID NO: 609555 - DNA, 75 bp, Homo sapiens
catgcctcaccaagtcacatgacaagcaaaagatgttctcgtccgtggcgcacctggcgcgggcgaaccccttca

SEQ ID NO: 609556 - DNA, 98 bp, Homo sapiens
tgatcccagcgatgtgactgctcaatggagagaaggaaagtcaatcgtaggaagaacacagtacagattgctacgctttacatatggtccttcatttc

SEQ ID NO: 609557 - DNA, 90 bp, Homo sapiens
ttacgcactgtggatccagagacacaggcacgactagaagcattgctagaagcagcagggtgtcaaattgagaaccaggtagatccccac

SEQ ID NO: 609558 - DNA, 75 bp, Homo sapiens
gcaagagcgatgtctactacttcagatttttgatgaaattgagtcatgaaactgtaaccattgaattgaagaacg

SEQ ID NO: 609559 - DNA, 98 bp, Homo sapiens
ctctttccacctgatgtgattgcaagcatcttttcttctgcatggtgggtacccccatgctgtggcacggcttcagggccatgaaatgacaagcattg

SEQ ID NO: 609560 - DNA, 82 bp, Homo sapiens
gcctgttctcgggctgtttggcggttacagaatgtctgaaggggacagtgtgggagaatccgtccatgggaaaccttcggtg

SEQ ID NO: 609561 - DNA, 100 bp, Homo sapiens
tagctaagacttcgcgacacccttgaagctgagaaatgccccggccggcggcgtcctggacaaggacgggaagaagaagcactcgcgcccgaccttctcg

SEQ ID NO: 609562 - DNA, 100 bp, Homo sapiens
caagagcagagcgccagcatgaacttgggggtcagcatgctgaggatcctcttcctcctggatctgctttgccacggcatggaggcagaagatctttcaa

SEQ ID NO: 609563 - DNA, 74 bp, Homo sapiens
tacccgccgccgccgttggctggaggctgtattcatcaccaaagaaaaaacttacaccaatgcagaaatcggtt

SEQ ID NO: 609564 - DNA, 100 bp, Homo sapiens
ggccgcggctccaagcagctgggcatccccacaggggtggctgtgaaggtggaggagcccaggtataaaaaggacaagcagctcaatgagaaaatctccc

SEQ ID NO: 609565 - DNA, 100 bp, Homo sapiens
gtgaggctctgctgtagtcctgttcttctggctctaagatctgaatgttgtgaccactaatttggcagaagactgatttttggaaatatgtatttgggag

SEQ ID NO: 609566 - DNA, 75 bp, Homo sapiens
ggaggagtgggttaaattcctcaggagagttgctggcacaccctgtggaggaaagttcacatccttggctccttc

SEQ ID NO: 609567 - DNA, 90 bp, Homo sapiens
aaggagctggagctgtcggtgcccaaattcaagaaataacatctgctttgctgccgagctcagaggagaccccagacccctcccgcagcc

SEQ ID NO: 609568 - DNA, 74 bp, Homo sapiens
ccagctgacggagatggtgcagaagatggaggaggcacgtggactccctttaatccagtgactgtcaggtcgat

SEQ ID NO: 609569 - DNA, 115 bp, Homo sapiens
tgtttggagggaaatgggaatgtacacgataattaaagagtaaagttgtgctcaacggtgatgtgctctatgaactccttcagcatattctgaagcagaggaaacctcggattct

SEQ ID NO: 609570 - DNA, 100 bp, Homo sapiens
cagaccactatcaatacagacattgagctcctccctgtgaactcagcattgctgcagctcgtgggtgctcagggaacctcagaacctgttctggatccac

SEQ ID NO: 609571 - DNA, 75 bp, Homo sapiens
ccagttgtctgtgccaggtggcctccttggtatgccagatgccatggacaatattaccaggcagaaccaattcta

SEQ ID NO: 609572 - DNA, 50 bp, Homo sapiens
atcaaacagtcggcctatgactcgaaggtatgagaaagtgccagtcatct

SEQ ID NO: 609573 - DNA, 75 bp, Homo sapiens
gggggggatggcgtctccccgactccacctgagggactggctcctgggatcactgtcgtcttcctgaaagatgag

SEQ ID NO: 609574 - DNA, 100 bp, Homo sapiens
caaggccaagagggccaagggcaaaggccgagggctgacagatgaagagattgatatggccttccagcagtcgggcactgctgccgatgagccttcgtcc

SEQ ID NO: 609575 - DNA, 98 bp, Homo sapiens
gctgcaatgccgctttcccaggcgcctggtggtccttggcttcccttgcaaccaatttggacatcagcaaaccagtccagctacgggggcccagccag

SEQ ID NO: 609576 - DNA, 51 bp, Homo sapiens
cctgacacttggcatgacagtggatatggctttagttgcccctgaagctcc

SEQ ID NO: 609577 - DNA, 100 bp, Homo sapiens
ggatcaacatcattgtggccacaccaggccgtctgctggaccatatgcagatttgtcaaggtttgaaactgacatttgatactaccttctcaccaaacac

SEQ ID NO: 609578 - DNA, 95 bp, Homo sapiens
gatcctgtttgaccaggcccagaggtccgtgcggcagcagctccagagctttgtcaaagagagcaccctggggagctgtccagagcgctgtgccg

SEQ ID NO: 609579 - DNA, 49 bp, Homo sapiens
aggaaaggcttggtaaaaaaggttcagggtctcactctgtcacccaggc

SEQ ID NO: 609580 - DNA, 50 bp, Homo sapiens
caatccattccatgggttttattcacagtggatgtcacactgaattcagt

SEQ ID NO: 609581 - DNA, 90 bp, Homo sapiens
tcccagacgaagacagtccctggatcaccgacagcacagacagaatccctgctaccagtactccaaagattcaggtttactcacgtcatc

SEQ ID NO: 609582 - DNA, 89 bp, Homo sapiens
gatgggcagacggattcatttagagctgcggaacaggacgccctctgatattgagaggatccagaatccagatctctggaatagctacc

SEQ ID NO: 609583 - DNA, 98 bp, Homo sapiens
tggactcatggaggctgagcatttattcagagatttacaaacgaggaccacctggcagttcataaacacaagcatgagatgacattgaaatttggccc

SEQ ID NO: 609584 - DNA, 82 bp, Homo sapiens
cttttgtctgcccctattgtaagtgcagatggaacacaacagtttctggtagaatgctggcaatttccaggaagatacgtgg

SEQ ID NO: 609585 - DNA, 75 bp, Homo sapiens
caagccaacaacagtgacggaatgcctccatacatcttcgtagatcagaagtcggttgtcggtctcactggacta

SEQ ID NO: 609586 - DNA, 83 bp, Homo sapiens
tgaattcgtttgtgaacgacattttcgagcgcatcgcagcttgcgcgatctctggcctcttcaactgcatcaccatccaccct

SEQ ID NO: 609587 - DNA, 75 bp, Homo sapiens
gtgacagagtggagccatggctagagacctcctgccccccgaggtctgcagtctcctgaacccagcagccatcta

SEQ ID NO: 609588 - DNA, 100 bp, Homo sapiens
gtctttttgttcaagataaagtgattttttgcctttgttgattaactggacaaattcagggccacattgtccacaactggaaggcgcgatggttcatcct

SEQ ID NO: 609589 - DNA, 75 bp, Homo sapiens
ctctcttctttgccgacaaactttacaaatccatgaagggttccgagtctgaggaagacataaccttgtgcctgc

SEQ ID NO: 609590 - DNA, 100 bp, Homo sapiens
ctgctggctgtagctggatctagaggcataattaggataataaatcctataacaatgcagtgtataaaggccaaagaccgggttccagatgtggttagaa

SEQ ID NO: 609591 - DNA, 100 bp, Homo sapiens
agatagacagctcaaatgaattggattttgaagccttaactccaaacttgctggccaggactgtagaaacagtggaaggtggtgggctagtggtcatcct

SEQ ID NO: 609592 - DNA, 82 bp, Homo sapiens
cttcatacgactgaccctggagctgaaggccaggttttgcagtggtctgaggacttttccagatttctcagaataaagtagc

SEQ ID NO: 609593 - DNA, 107 bp, Homo sapiens
ctcctcggagctgcctccggtctccggtactggagccggcggctgcggccggcagccggcagctttgcagcgggtgatgcagaagatggggaagaatatgatgaccc

SEQ ID NO: 609594 - DNA, 75 bp, Homo sapiens
tgaagattgctgtaaaaaatttcaggattggtactacaaggctggactctgtgaagctgagcaggagcagatgcg

SEQ ID NO: 609595 - DNA, 100 bp, Homo sapiens
cttccttcagggtttaggagaagcactgttgttttccacacaggttggtgaaaaccctgtgtccttggagaaagctggttcccgttttccagagggggag

SEQ ID NO: 609596 - DNA, 90 bp, Homo sapiens
ggccaagctggacacggagaacaagcggctgcgggccgaactgcaggagatctattgggaaactgattataaccactcgggcaccatcga

SEQ ID NO: 609597 - DNA, 82 bp, Homo sapiens
cccagaccctggagcctcagttggaagcagccgatccagcctgcggagcctgtggggcagggcaaacctggtggacctgcag

SEQ ID NO: 609598 - DNA, 98 bp, Homo sapiens
gaatttgacagtttcctgccaggcgccatcatcggcatagcccgggagatgcagccagtttacagtgccggtggtggtgtgcacattgagccccggta

SEQ ID NO: 609599 - DNA, 75 bp, Homo sapiens
cagaaattgccggtctgggagttgggggcaaggagaagatcctggtagttgatgtcacttggcgatattcctgca

SEQ ID NO: 609600 - DNA, 75 bp, Homo sapiens
gtgctcttgtcctggcattgcatccacaggaggggcaggaaattctttgaagctgcagaaccttggcctgaaaat

SEQ ID NO: 609601 - DNA, 99 bp, Homo sapiens
gagattacaatttgactgaagaacagaaggcgatcaaggccaagtatccgccagtcaataggaagtacgagtgagcgggacggtatgcgggccatcctg

SEQ ID NO: 609602 - DNA, 90 bp, Homo sapiens
tttgactcagagctgatcagatgtggggaatgccatcacacctgcggaacctgcgtggggcctgacgttaacccggctctggcactggag

SEQ ID NO: 609603 - DNA, 82 bp, Homo sapiens
ccgccgccccctccggcgtgttcatgcccccgggatgccatggacaatattaccaggcagaaccaattctacgatacccaag

SEQ ID NO: 609604 - DNA, 73 bp, Homo sapiens
ttcctctgaaggcaaagtgacctgtgcttctacacagctttgcggaaagagtctgggaccaaactggtggatg

SEQ ID NO: 609605 - DNA, 98 bp, Homo sapiens
gaatcatcagaaatgtggattcgaacaacaaggagttatctattgctatccgtggatatggactttttgcaggagatagaatttttgcggcatttgaa

SEQ ID NO: 609606 - DNA, 100 bp, Homo sapiens
tggtagccaccggcactcacgaggccatgtggaagtgttacatcaccttttgcttggaaagatttactaagaagtcaaatagtgggttccttagagggaa

SEQ ID NO: 609607 - DNA, 100 bp, Homo sapiens
ggaaggtggccgagtgtgtcgccgcggccatcaggacaattggcgggcaacgacctttcttttatccacccaaaggccttgtctgggttgaaagaactca

SEQ ID NO: 609608 - DNA, 82 bp, Homo sapiens
tggagcctcagttggaagcagccgatccagcctgcggagcctgtggggcagttggcaaacatgaattgactgggcataaagt

SEQ ID NO: 609609 - DNA, 90 bp, Homo sapiens
tctagaagatgacgaagacatgacacttacaagatggacagggatgataattgggcctccaagaggtctcattctgtcgcccaggctgga

SEQ ID NO: 609610 - DNA, 75 bp, Homo sapiens
ccggcgtctgcctcgagactgaagaccgtggaaagaggcaaaacctgatgaattaatggattccaaattgagatg

SEQ ID NO: 609611 - DNA, 99 bp, Homo sapiens
cttcagaagtcgacctgtggcaaatgtggctaccctgccaagcgcaagagaaagttgcctccggagccagcgtggtggccatagacaacaagatcgaac

SEQ ID NO: 609612 - DNA, 82 bp, Homo sapiens
ccttgcccatgtctcacgcggagctggaagtcgagtgtgctactcaactcaggagatttggagacaaactgaacttccggca

SEQ ID NO: 609613 - DNA, 124 bp, Homo sapiens
ggaggcttcgcgggaagacgcggcggcggcggcggaggatgagcctgcagagcgcgcagtacctccggaaatctactttcttcaatgtgttaaccaatagtcaggcttcagcagaaaacttccc

SEQ ID NO: 609614 - DNA, 100 bp, Homo sapiens
tggattcagaggaggtcgtgggggccgggagtttgcggattttgaatataggtattctgaaaaggaggacaaatatgaagaagaaattaaacttctgtct

SEQ ID NO: 609615 - DNA, 98 bp, Homo sapiens
tctggaggcaaagaacctgaagaagatggatgtgggtggcttatccgctccctgtgctgtcaggaatctacaggacttggctcgtatttacattcgac

SEQ ID NO: 609616 - DNA, 75 bp, Homo sapiens
acctcatcccctggatgggggaccacaagatcctcatcgacaggatggtactggggaagtatgactgttaatgaa

SEQ ID NO: 609617 - DNA, 52 bp, Homo sapiens
ggaagacagttacgggcagcagtggacctatgagcagaggaaaatcgtggag

SEQ ID NO: 609618 - DNA, 82 bp, Homo sapiens
ggaggatccacctggagctgaggaaccggaccccggcagctgtgtggacactgccagcggctgcagccgacttggaatgacc

SEQ ID NO: 609619 - DNA, 75 bp, Homo sapiens
agagtacagacagcccggtagagtgtatgggccaggagaaaggggaattcagagagaaccaaatgggcaggaccc

SEQ ID NO: 609620 - DNA, 98 bp, Homo sapiens
gccaggacttcaacatgatggagcaaaagaagagggtgtccatgattctgcaaagccctttggaaattttgcagaagagtaaagaagaagcttacgtg

SEQ ID NO: 609621 - DNA, 100 bp, Homo sapiens
acctgcccttcgccaaggagatcgtctctctcatcgaggcccaaaccgccaaggctcttgcagccaatgccggaacaggatttgctgttgctgagcctca

SEQ ID NO: 609622 - DNA, 100 bp, Homo sapiens
ggcctattgtggaaaaatgaattttgaccacaagaatgaaactctaagtatatcagccttgtctggttttagacagattcatgttatagatatggacact

SEQ ID NO: 609623 - DNA, 50 bp, Homo sapiens
acccccatctccgcatcaggaccaaggcttctttgctaaagaatgatgag

SEQ ID NO: 609624 - DNA, 98 bp, Homo sapiens
cgatccgctggcgctagtctgaccctccgccaggcaaaaggaagaattttgtagccaccttggctaatgggatgagcctccagccgcctcttgaagaa

SEQ ID NO: 609625 - DNA, 105 bp, Homo sapiens
aagacaaacaacttcgaatctgggtcacttaaacaagccatctatccagaagctccaccatgaggcgaggtggatggaggaagcgagctgaaaatgatggctggg

SEQ ID NO: 609626 - DNA, 100 bp, Homo sapiens
cttcaatccagttccaaggactccacggggtttccttaatgacaacaaaaaagggagtaatcctacccactgtaagagtcatgactcttgattgcagctg

SEQ ID NO: 609627 - DNA, 100 bp, Homo sapiens
gacattgtttgaaaatgtccaaagtggctgaaagctcttgcaggaggctaccatgagctctctctggtgctcagggactggagatgtcatcgaggactgg

SEQ ID NO: 609628 - DNA, 90 bp, Homo sapiens
gtgcccagcattctgcggggcaggcgggctgacgcgccactatgtagcgggtttcgggcgggccacgcgtgcgggacaggaacccaaccc

SEQ ID NO: 609629 - DNA, 75 bp, Homo sapiens
tattcaaaacgtcagcaaccaaaggcaccggccttgatgaggcaatggaatgagtctagctctgttgcccaggct

SEQ ID NO: 609630 - DNA, 90 bp, Homo sapiens
ctggagaacatggcccggcctcccgggggctctggtcccctcctcggtgttacacataatattgcattacttcgagaggtgataatcaac

SEQ ID NO: 609631 - DNA, 96 bp, Homo sapiens
caggtcttctgtgaggaatctggattgtcacctttgctgcaaaaaattacgggtaattcatttgcacacctgttagcaagaaacagaagttgaagg

SEQ ID NO: 609632 - DNA, 75 bp, Homo sapiens
tgacgaaagactcctgctgaaagaagacagcactctgaaagcagctggaatcgctatgtggattaccccatctat

SEQ ID NO: 609633 - DNA, 75 bp, Homo sapiens
tggagtgcaagaagaaattcccacctgtcaaagaggtgtggacactgccagcggctgcagccgacttggaatgac

SEQ ID NO: 609634 - DNA, 75 bp, Homo sapiens
tctggaatcagcttctctcattttctttccctgcaccaactagcaggactcagcccaaaaccatgtttgcccaag

SEQ ID NO: 609635 - DNA, 101 bp, Homo sapiens
agcgagctgagtggttgtgtggtcgcgtctcggaaaccggtagcgcttgcagcatgtgccctctggtggtcagaagatgctgtgctgtctcgttaggatga

SEQ ID NO: 609636 - DNA, 100 bp, Homo sapiens
ccagtaacactcaagcaaagaagagttgagcacaatcagtttccagagtgtggattctttggcatgtatgacaaaattcttctctttcgccatgacatga

SEQ ID NO: 609637 - DNA, 75 bp, Homo sapiens
cttttacgaatgcttttcaagcgaaatcctgcaaacagattagacttagaaggttttgactccgtggtatcatct

SEQ ID NO: 609638 - DNA, 75 bp, Homo sapiens
tccctggagctggtgcacaggttccaggagtggaaacaaaatgtcagtcagtgtgcatgagaaccgcaagtccag

SEQ ID NO: 609639 - DNA, 75 bp, Homo sapiens
tatcaacaccaaaaagctttctgctaggggtaactactccagacccccagcgtatagtggggtgcccagtgcaag

SEQ ID NO: 609640 - DNA, 83 bp, Homo sapiens
cttcaatcaatcatatttcacaacgaaaccttgaaagccatttgatgtcccctgctgagattccaggccagcctgtccctaag

SEQ ID NO: 609641 - DNA, 100 bp, Homo sapiens
agccttcagaaattgccggtctgggagttgggggcaaggagaagatcctggaagtactcccactaccccaacctcctctcaagccccacagaaactggat

SEQ ID NO: 609642 - DNA, 100 bp, Homo sapiens
atctttcgggaaagctctctggggcagggcaaggcactgacgtttcttctgctacagcctccaagccccaaacttcctccacacagcactatccgaagaa

SEQ ID NO: 609643 - DNA, 97 bp, Homo sapiens
gtatgaccttcacgcagtcaagaacgacttccaggtagcagaaggtcaagaaatttgtgtgattgaagccatgaaaatgcagaatagtatgacagct

SEQ ID NO: 609644 - DNA, 95 bp, Homo sapiens
agctaagatgccaggaccacctggaagcctagaaatgattggcgctgttccactggctgctttgggggctcctactcttgatcctgcccttgctg

SEQ ID NO: 609645 - DNA, 100 bp, Homo sapiens
gggagattggacaagtatgctgcaagtgagaacatatttaacagaaactggcgatggaatatgagaggagccctctggaaagaaaaggacagaccctgtg

SEQ ID NO: 609646 - DNA, 82 bp, Homo sapiens
cgaaaagcgtttccgcagacagaagtggggagaagcggagggtgaggtggctttgaccccgggttgcccggccagcacgacc

SEQ ID NO: 609647 - DNA, 90 bp, Homo sapiens
tgtaagtggcagaacaaggatttgaagctggcagtctggttccaggtcccttcaccgatgttgtcaccaccaacctaaagcttggcaacc

SEQ ID NO: 609648 - DNA, 100 bp, Homo sapiens
ttcaaagtaaaatcagtttaatttcagaaaagggttctccaaaaaatgtggaatcctttgcatctatgctgagacattctcctcttacacagatgggacc

SEQ ID NO: 609649 - DNA, 101 bp, Homo sapiens
aggcagtcatggctagagcagatttggaacgcagggcctgtttgccagaggttgccacttggcaaagtccctccctttgccctccagtgtgaatcggcccc

SEQ ID NO: 609650 - DNA, 98 bp, Homo sapiens
agagtcgactgggagcgaccgagcgggccgccgccgccgccatgaaccccgaataatccccgtcgaggtcaagatcaagatccaggtctatttcacga

SEQ ID NO: 609651 - DNA, 51 bp, Homo sapiens
gagacatgagaagattcatactggaactaagcgtcttgtagaaggaactat

SEQ ID NO: 609652 - DNA, 83 bp, Homo sapiens
aagaagatccttcacgcaggctttaagatgatgagcaaagaattctgtggccacactgcgaggagatcggttctgggtcggag

SEQ ID NO: 609653 - DNA, 97 bp, Homo sapiens
atcaagcattcaaattgctcacagctgatcctaaggtgcctgcattattgcttactggcgatatggttcatggcttggggcaatcagttgtccaatc

SEQ ID NO: 609654 - DNA, 50 bp, Homo sapiens
tggaaagaaccctgcccttggggaatccatagtcagtttaaaaagaaagt

SEQ ID NO: 609655 - DNA, 100 bp, Homo sapiens
cgaaccgagccggggcgccgggagctattgggacctgcgggaaacatactggggagaaaccctttgagtgtcccaaatgtgggaagtgttactttcggaa

SEQ ID NO: 609656 - DNA, 100 bp, Homo sapiens
gtgcgaagaagctgcagccgcacctggccaaggcttttatcaaaatacaactcaaacctagctactccaatagcaattaaagcagtgccacccagtaaaa

SEQ ID NO: 609657 - DNA, 73 bp, Homo sapiens
gttggaggctggcagcgaagaagatcgaaaattaaacctcagttgtctatcaacgtctatgactacaactgcc

SEQ ID NO: 609658 - DNA, 101 bp, Homo sapiens
aaaaagccagtctcaacgttttacttatacaccagactcagattgatggacaacttttcttaattaagcaccttttgatacttcgtgaacaaattgctcca

SEQ ID NO: 609659 - DNA, 101 bp, Homo sapiens
gcggatcagagagggctaccttgtgaagaaggaaccaaagaggttgttgtaaatgtggatgatgatggagtcatttcattgaacttcgagtgtgataagat

SEQ ID NO: 609660 - DNA, 82 bp, Homo sapiens
cggagacaggtgcagtccctcacctgtgaagtggatgcccttaaaggaaccgaataaaggttggggagactacacctgacaa

SEQ ID NO: 609661 - DNA, 108 bp, Homo sapiens
tggcattaaaaccgaacctgagttctttgaacttgatgttgtggtacttggctctcacctgatagatgactatggatgccaattctcggaagcaagaagcagagtgga

SEQ ID NO: 609662 - DNA, 100 bp, Homo sapiens
gccggcttctcccctacgcgctacacaagtggagctccttttcctccacctaccttcccgagtgtggaatatcaaacaaatgattaagttgacacaggaa

SEQ ID NO: 609663 - DNA, 75 bp, Homo sapiens
tcctcacctatgcaaagaaagggaagctattgctgggattttgaggagttgccaaaacaaaggggatttggtgat

SEQ ID NO: 609664 - DNA, 90 bp, Homo sapiens
actgtttccggaagactctttttagagaggataaaatggaccagttgctacagatgctgcaaagtacagaccccagtgatgatcagccag

SEQ ID NO: 609665 - DNA, 100 bp, Homo sapiens
ctaatttgatggagaaggttcgaggcctacagaacctagcctatcagctggggctggatgagtgttctgtggatggagttataaaggaagtgaatgtgag

SEQ ID NO: 609666 - DNA, 50 bp, Homo sapiens
gatcgttctctacagcctctgcaagaatgaaatgaatgatgtgcctttct

SEQ ID NO: 609667 - DNA, 76 bp, Homo sapiens
gtattgtggaaattcccagaggactttggagaccaggatttgtacacacagatatgacgaaagacttgaaagaaga

SEQ ID NO: 609668 - DNA, 83 bp, Homo sapiens
cttctggctctaagatctgaatgttgtgaccactaatttggaactgtggctgcaccatctgtcttcatcttcccgccatctga

SEQ ID NO: 609669 - DNA, 75 bp, Homo sapiens
tatgggatctgatgatgctgcctacacacaaggttttgactggatcatctcgtcaaagttattcacctggctatc

SEQ ID NO: 609670 - DNA, 100 bp, Homo sapiens
gaacctatcgaaggacatgaagactaccacatgatggtgtttcagtcacctccagtaacacgggcgtgccagatatctcgggttctgtgtactccaaaac

SEQ ID NO: 609671 - DNA, 90 bp, Homo sapiens
aggaaaacccgctctctgcctgaccggacacccttccatacctactttgagaatcactacaagaaaaactccttgtggtgaaggttctaa

SEQ ID NO: 609672 - DNA, 75 bp, Homo sapiens
agaggagggaactgcggagcggtcatacaggagtggcagaagagaggcggacagccctggcagctcatcgagccc

SEQ ID NO: 609673 - DNA, 75 bp, Homo sapiens
tgcaagccagtgttacctgtgcccctctgctcaacagaaatttggagagcttgtaatgaccaaagaatcaaaggc

SEQ ID NO: 609674 - DNA, 145 bp, Homo sapiens
gactagccactttgcattgactggaaacaatggcatttacagaaagagtcaacagcagtggcaacaggtgaaatgacaatggatgctctgttggctcgattgaaacttctgaatccagatgaccttagagaagaaatcgtcaaag

SEQ ID NO: 609675 - DNA, 50 bp, Homo sapiens
cgcaggagcctcccggagctgattcactgcgtgctgtcctcacttgttct

SEQ ID NO: 609676 - DNA, 141 bp, Homo sapiens
aggcagatctggaaacagtgtagcagcattggttttccaaaaaatgtgagactttttcttggacgaattcagcttcctgcctgacacagctcacttcaagaagtgcacaatgtcagaacgtggaattaagtgggcttgtga

SEQ ID NO: 609677 - DNA, 101 bp, Homo sapiens
gagtccctctccgcccagttacaaggacctgctgaagttcccatgatgtcacccaatggatccattcctcccattcatgtgcctccaggttatatctcaca

SEQ ID NO: 609678 - DNA, 98 bp, Homo sapiens
tgacgcttctcactcacgtgtgaagcacttttcaggattagaagaggctgtgtatagaaacatacaagcttgcaaggagcttgcccaaaccactcgta

SEQ ID NO: 609679 - DNA, 100 bp, Homo sapiens
cccctcctttggtgacccacagctatcccctgaggcccgacccagtgtggacaacagtgagtatatgcggaatggagacttcttacccaccaggctgcag

SEQ ID NO: 609680 - DNA, 100 bp, Homo sapiens
tgactttctggacttctacttggaatatttccctgagcttaagaaaaagagagtggatatcattccagacccagaacgctggacaaacattcctttgctg

SEQ ID NO: 609681 - DNA, 75 bp, Homo sapiens
gcaagcgcggggaaccaaggagacgctcctggcactgcaggtggagtattgctcctggaaaatccaaaaggtgac

SEQ ID NO: 609682 - DNA, 74 bp, Homo sapiens
ctaaccacgaccatcaaatccgtgtcggagtccttacagccctgtatgatgagattcgtcagtttcgcaaggcc

SEQ ID NO: 609683 - DNA, 92 bp, Homo sapiens
ctactgtactggctattggaaggaggagattctgaagataaggagtctctagtgatccctgaaaagttccagcatattttgcgagtactcaa

SEQ ID NO: 609684 - DNA, 50 bp, Homo sapiens
gtcgggagtcatgctgacgtggggagcgtgttcaatacgtggaaacccat

SEQ ID NO: 609685 - DNA, 96 bp, Homo sapiens
taggaatgcatgggatgcttatggaatgtgcgagaacacggctctcctcccaaggacagtgaagtagagcagaacaaactgctggctagggctgct

SEQ ID NO: 609686 - DNA, 75 bp, Homo sapiens
ctcatgttgctggacacgctttttggggaactggtgtggaggtcgcagcagttgtggtagaaatttctgggttag

SEQ ID NO: 609687 - DNA, 75 bp, Homo sapiens
gtcatatgtactgtgtcagccatcatgtgtgtcagcatgagagcacggccgacaagaacggggccctcaagtgca

SEQ ID NO: 609688 - DNA, 83 bp, Homo sapiens
ggaaatgctgcttggggatgagcatgaggaagttaacatccctaataggagggttctggttactggtgccactgggcttcttg

SEQ ID NO: 609689 - DNA, 75 bp, Homo sapiens
ttgccaccttcagcccccccgcgaacgcccaagcgaggacgtgggacttctcagacgtcaggagagtgatgtgag

SEQ ID NO: 609690 - DNA, 100 bp, Homo sapiens
gtcggcgctgccccgtgggctcgctggggagccacggcggagacccccgccctcaactgaggaatgtatcctgtcaggtataatgtcagtgaatggcaag

SEQ ID NO: 609691 - DNA, 75 bp, Homo sapiens
atcatcgtctcctgtggctgggacaagctggtcaaggtatgtgcaagaggtgaaataattggcgtgaaagttcta

SEQ ID NO: 609692 - DNA, 90 bp, Homo sapiens
attccagaaccatggcccaatttgtccgtaaccttgtggagaagaccccggcgctggtgaacgaaacaaagggtcatcctttctagaaag

SEQ ID NO: 609693 - DNA, 100 bp, Homo sapiens
caataggatttgctataatgggattcattggcttctttgtgaaattgatccatattcctattaataacatcattgttagagacggggtttcgccatgttg

SEQ ID NO: 609694 - DNA, 100 bp, Homo sapiens
ccccttccctgctcactcagagcaaagtcgtggtcaacactgacccaggtccttgaatgggcaagagggcacatgaagtacggcgtcctccacattcacg

SEQ ID NO: 609695 - DNA, 100 bp, Homo sapiens
tgaccagtctgaagatgaggcacttgaattagaggggcctcttatcactcctggatcaggctgccattggacctgtcaagtgcctgagtcatgtgataat

SEQ ID NO: 609696 - DNA, 74 bp, Homo sapiens
gaagagaaagtctttatttacagcttcatggagacctggtcaggctgtcattatttgtatcaaaaacaaagaat

SEQ ID NO: 609697 - DNA, 100 bp, Homo sapiens
gtctggagcaaggaaaagatccctggaatatgaagagacacagtatggtagccacacccccagtggtctggaactgaaagtgatgcgtatttctgagtta

SEQ ID NO: 609698 - DNA, 135 bp, Homo sapiens
ctggaccctgctcagaggactctatacagggacgtgatgctggagaattataggaacctggtctccctggattgaagtggatattcctcgctgtcatcagtacgatgaactgttatcatcaccagaaggtcatgc

SEQ ID NO: 609699 - DNA, 75 bp, Homo sapiens
cttgccagcctgtgaccctctcaggatcggggacgcagaatgtcagcatctcattagatggtgcttggccctgag

SEQ ID NO: 609700 - DNA, 82 bp, Homo sapiens
aaaagccaaaaagataaaagcccggatgaacttcagtgggaatgtaagacggacttagatattgcatacaaatttggaaaaa

SEQ ID NO: 609701 - DNA, 90 bp, Homo sapiens
caagcagtgcccatatcggtccccagatacaaacatgtggagcagaatggtgagaagtttgtgatgcgtctgaagaaacatcgctggtat

SEQ ID NO: 609702 - DNA, 98 bp, Homo sapiens
caaagaaacaagccgtggaataggtgtatcaagtaatggtgcaaagcctgaagatgtaattggctgtactcaggagatggatttcattctttggcctc

SEQ ID NO: 609703 - DNA, 123 bp, Homo sapiens
gctccgcagcttcctcggcgcccccggccgctaccgctcaggtgctgcaggcacagcccgagaaaccgcagcactacactatcagatgtagaaggtggtgatggactgcagctcagaaaggaa

SEQ ID NO: 609704 - DNA, 51 bp, Homo sapiens
ctgggagctccattccctaaggcactgtgatacgtaggtaacctttccaga

SEQ ID NO: 609705 - DNA, 100 bp, Homo sapiens
tgcaagaaataatctcatgggcgatgacatattctgttattatttcaaacttttccaggaaaggttatttgtcaatgaagaaaatgttaatgagtttctt

SEQ ID NO: 609706 - DNA, 83 bp, Homo sapiens
agcggagggagccccagacacggtccaggtgcaggtacagcagtctccgcaacaggtctcggctcagctctccccacaactca

SEQ ID NO: 609707 - DNA, 75 bp, Homo sapiens
aagatcttgtcaagctgtgtcagcctcaagtctctatttatgaggtggacaagcaagattgtcgcaaattttgca

SEQ ID NO: 609708 - DNA, 100 bp, Homo sapiens
aggtgaaaggagcagtagatgatgatgtagcagaaggtgaaggaaatactcatgaccagccagatgtcttaaggaatgcttttgaaaagaacagaggcgt

SEQ ID NO: 609709 - DNA, 82 bp, Homo sapiens
attcagtcttgcagccactcgagacatcacttctgttcattctcattcagattgtggatgcctcgtcagtcatcacttggga

SEQ ID NO: 609710 - DNA, 100 bp, Homo sapiens
ccgctctgcacgcttgccagcgcggtggaatagccaggccagaagaaggaaggcctgtggtgagtgggacaggaaatgacatcaccaccccaccgaacaa

SEQ ID NO: 609711 - DNA, 104 bp, Homo sapiens
ggaagaccgcgcgcagggcctgcagcgggagctggacggcgagcgcgagcggcgcgagaaaatgtgcactcccagcaacacccctgccacgccgcccaacttcc

SEQ ID NO: 609712 - DNA, 75 bp, Homo sapiens
gaaatggccgaggagccggagccgcaggcataatcaccagcaacacccgggacaataatacgggggccacctacc

SEQ ID NO: 609713 - DNA, 96 bp, Homo sapiens
gcaaacagtgagtggggttcagcgtagactctggaccaggagaggcccgcggtgaccgaggcctgggccccgggtaagaatgattgatgttggctg

SEQ ID NO: 609714 - DNA, 100 bp, Homo sapiens
ccagataaaaggggtctctgcgtctgtagttcatttgaccaaacggtggaaccgtcccaaaatgtcccttgctcagaagaaggatcgggtagctcaaaag

SEQ ID NO: 609715 - DNA, 97 bp, Homo sapiens
cgggctgtcgcggcccccacctcagaaacttgtgatactttctcactacatggtgcaaacagctgagtcaagttgtccctgagagtagccacctttc

SEQ ID NO: 609716 - DNA, 75 bp, Homo sapiens
attcattctgatgtctggagcttaggaatctcttttatggaggtgaccaagaatatggcccaggtgaccaaagcc

SEQ ID NO: 609717 - DNA, 75 bp, Homo sapiens
gtgaaggttgtctgggtcaaacagtgagaaagatcagtctaaagaaaaggagaagaaagtgaaaaaaacaattcc

SEQ ID NO: 609718 - DNA, 74 bp, Homo sapiens
gtatatatctgggatccacataatggagacattctgatggaatttggaattacatgatgcgtaatgctgtgctg

SEQ ID NO: 609719 - DNA, 90 bp, Homo sapiens
aggaactgcccagacttcaccacgatgcaatatatgcatatgcaggccctgacttcctgtgagtgcaccatctgtcctgactgcttccgc

SEQ ID NO: 609720 - DNA, 100 bp, Homo sapiens
caaggatctggggatcttcgcactatcccaagtcctggaaagacaagcatcatgcctctgaccagtgccttcagggctgtggacaacgaccctgggatca

SEQ ID NO: 609721 - DNA, 75 bp, Homo sapiens
atatgtactgtgtcagccatcatgtgtgtcagcatgagaggaagtttgtgtttttcaacatacctcagattcaat

SEQ ID NO: 609722 - DNA, 100 bp, Homo sapiens
gtggacactccaccgcatgtagcagctgggctgaagaattggcagagggggtcgatttgggaggaaaggtgtggctataaactttgttactgaagaagac

SEQ ID NO: 609723 - DNA, 83 bp, Homo sapiens
tctaattcaccgcaggatttccggagaaaaggaaatgtctgcagagttggaagcactctatggtgacatcgatgctgtggagc

SEQ ID NO: 609724 - DNA, 100 bp, Homo sapiens
cggaccttggtcacggccgcaggtgaccccttagcccagctccagtgggcgggtggcagattaagatgttctacgaggagcatttgcacttggacgatga

SEQ ID NO: 609725 - DNA, 75 bp, Homo sapiens
ctgcggcgcggggaccgctgtgctctcgggtggcccagttgaaatccttcccttcctctaccttggaagtgccta

SEQ ID NO: 609726 - DNA, 98 bp, Homo sapiens
cttgaagacaaaaaggaaccattttctcagggagtgaccttcacaatggcatcataggattcagtgaggagtcccagagtggactagaactcagggaa

SEQ ID NO: 609727 - DNA, 98 bp, Homo sapiens
cgaaggccgggacccggttccccggcccacagtgggggtgtgcaaacccgagagaactggtggaagtagtggaggaagtggaagtcgagaaaacagtg

SEQ ID NO: 609728 - DNA, 82 bp, Homo sapiens
gttcttggtgggatctgagcagcaacatggctgacaaggccaagcctgccaaagctgccaacaggacgccccccaagtcccc

SEQ ID NO: 609729 - DNA, 90 bp, Homo sapiens
gccagaagcgggcggcgcgggggagatggctccctgactggcagtcctcacctttccgagctgtctgtgaactcgcaggggggagtggcc

SEQ ID NO: 609730 - DNA, 49 bp, Homo sapiens
tctggcatcagcccctcccatagccagatggagtctctctctgttgccc

SEQ ID NO: 609731 - DNA, 83 bp, Homo sapiens
atctgatctggagttgctgcaggaacaagatcactcaaggtgaaggataatctactaataccagcactttgaatgaaaatttg

SEQ ID NO: 609732 - DNA, 83 bp, Homo sapiens
cccctcggcacccccggccccggagctgcctggaggcggccgcactcggatgccatggacaatattaccaggcagaaccaatt

SEQ ID NO: 609733 - DNA, 127 bp, Homo sapiens
ggcggcccctccttgggcctgcggctctctacgtccctgcggagcagccgggcatggtgctgatgtgaaatgtgtagactggcatccaaccaaagggttagttgtttcaggaagtaaagatagtcaa

SEQ ID NO: 609734 - DNA, 140 bp, Homo sapiens
attcagagacaagtaacatggacaaactattgccacattcctcagtgctcacttggaatacagttaatgttgaagaaggaaaatgcggaagtcgtcatttgacaagttttataaatgagtatttgaagctcaggaataag

SEQ ID NO: 609735 - DNA, 100 bp, Homo sapiens
gaggaagtagagcccgggaccgccaggccaccaccggccgcctcagccatggacgcgtccctggagaagtgaggtgctggcggaggagtccatagtatgt

SEQ ID NO: 609736 - DNA, 100 bp, Homo sapiens
cgcagctgcgggtccgggattcccagccatggcagattcctccgggcagcagggcccatggacagaccttcacgttcccagatctgtttcccgagaaaga

SEQ ID NO: 609737 - DNA, 100 bp, Homo sapiens
cccatggggcgggaaggcgtgaccgccatgcacaagctctttgactgggccaataccagccggcgcggctaacaacctgagagaagattacaaatttcac

SEQ ID NO: 609738 - DNA, 90 bp, Homo sapiens
gctatcagttgagggatttgcagttgataaaatggctggagaggttaaggtggaataacactcccatggatgaagcactgcactttggac

SEQ ID NO: 609739 - DNA, 90 bp, Homo sapiens
ctggggcaaagggaccacggtcaccgtctcctcagggactttgaacatgtcggggatcgccctcagcagactcgcccaggagaggaaagc

SEQ ID NO: 609740 - DNA, 89 bp, Homo sapiens
gaaaaaacaaagtaatggttattatcactgtgaatcttccattgtgattgcatatatagcagtgacgaggatgatgaggactttgagat

SEQ ID NO: 609741 - DNA, 83 bp, Homo sapiens
cctcagccttccaagtagctgggactacagacatgcgccagcacgcctgagatgccctgtatccaagcccaatatgggacacc

SEQ ID NO: 609742 - DNA, 75 bp, Homo sapiens
ggaccagaccatgggcctgagcatcagtcaaagaagtttggcagagatcacggagctaattcatattgctctcct

SEQ ID NO: 609743 - DNA, 82 bp, Homo sapiens
gatattgatctaatgatcagcaggcaaagattgtgtatcgccaaactgaggcagcaactacaacgcagtaaacagagtagtc

SEQ ID NO: 609744 - DNA, 50 bp, Homo sapiens
atggccgtaaccccgaaggaaatcgcccgggggctggagaaggccaggca

SEQ ID NO: 609745 - DNA, 82 bp, Homo sapiens
ctgaatgttgtgaccactaatttgttgctgatgtatattcaagatgagtggattaggagaaaacttggatccactggccagt

SEQ ID NO: 609746 - DNA, 76 bp, Homo sapiens
aacgatccagacggcagggagtgcatcaaaggtgtgaacacagggatgaccaacccggaggtgattcagaacctgg

SEQ ID NO: 609747 - DNA, 88 bp, Homo sapiens
tccagttcctcaaccagatgacccttacattgcagacctccttcaagtggctgataacagtgcatcatgcatcttgaagatagactac

SEQ ID NO: 609748 - DNA, 74 bp, Homo sapiens
aagaagaacgaatggttgagatgtttctggaatatcaaaatccatcaacaaagagagcattgtggatgtagaag

SEQ ID NO: 609749 - DNA, 76 bp, Homo sapiens
gcggtcagccaccgtggtctatgacgacagtacagagagacaagagagacacctccaacttcgacaaagagttcac

SEQ ID NO: 609750 - DNA, 100 bp, Homo sapiens
gcctaaactctcatctccggccctctcggcgtccgccagcgatggcacagctatgttagatactaaagaaggcttccccacaacccatatgcatctgctt

SEQ ID NO: 609751 - DNA, 74 bp, Homo sapiens
ttttggacctgaaacagaaattctggaacacctatatggcaacagcattattgagaaaagcccttacagaagag

SEQ ID NO: 609752 - DNA, 75 bp, Homo sapiens
tgaggcttcatgaagatggcgccagaacgaagaccctactaggcaagaaatgcactcggtgatggaaagagagcc

SEQ ID NO: 609753 - DNA, 75 bp, Homo sapiens
gcgaatatcgtcatcgttagaaggtctcctcatttaccacatcccccaggttgaaccacgggaccttgacttcag

SEQ ID NO: 609754 - DNA, 97 bp, Homo sapiens
atcctacaggagtccagggctggagagaaaacctctgcgaggaaagggaaggagcaagccgtggtttgtgaaatggctgctgacatttctgaatcca

SEQ ID NO: 609755 - DNA, 85 bp, Homo sapiens
ggatggaatagagccttgccaagttgtcatgctgtctgtggaagcccgtaaagagatgactagaaaggctattaagacagtcaaa

SEQ ID NO: 609756 - DNA, 95 bp, Homo sapiens
ccatttcaggagtacctggaggctcaacggcagaagcttcaccacaaaagcgaaatgggcacaccacagctttggagtttaacccttctgccaat

SEQ ID NO: 609757 - DNA, 98 bp, Homo sapiens
tctcctgcagtccgcctctgggccctgccggtgaatccgccatactacatcccgctggttgagctggtcccccacccggagacggcccctacgacagt

SEQ ID NO: 609758 - DNA, 100 bp, Homo sapiens
tggagtcaagatggaggagtacgcgcgagagccttgccttcacttaacttaagggaccttggattatctgaactaaaaattggacagattgatcagctgg

SEQ ID NO: 609759 - DNA, 100 bp, Homo sapiens
atgatgtgtgatatcatctatgccggtgagaaggcccagtttgcacagccggagatcttaataggaaccatcccagggagtgcatccgccccaacccttt

SEQ ID NO: 609760 - DNA, 88 bp, Homo sapiens
cgaagaccaccagcggctatgcagatactaatggaccatactaccaaggaccagtccacctgaaccacacactctaaagaaatatttt

SEQ ID NO: 609761 - DNA, 71 bp, Homo sapiens
ataatgacaatctcctcagggaaggggcagcacaagataattgacgaccttgccaacctagtggagaacac

SEQ ID NO: 609762 - DNA, 80 bp, Homo sapiens
ggaccttggagtccagcactctgcatgtgactccccgcagcctggacagacccctgtaaaagagcccaacagtgaaaatg

SEQ ID NO: 609763 - DNA, 87 bp, Homo sapiens
gattcgcagtggtcgcttcttctccttggagactataaatattcaggaagagatagtttgatttttttggttgatgcctccaaggct

SEQ ID NO: 609764 - DNA, 82 bp, Homo sapiens
cagctccgaaatcaccaccaagacctccgcgctctggcagctcctcttccgtgtgctctcgccactccctgcgggcaacgcc

SEQ ID NO: 609765 - DNA, 75 bp, Homo sapiens
actcagaagacaaagatgtgaagaccaagaaggatgattctcactcagcagattattgcttgggttagaatatgc

SEQ ID NO: 609766 - DNA, 106 bp, Homo sapiens
ttcgaacgctatggcgagcccagcgaagtcttcatcaaccgggaccgtggcttcggcttcatccgcttggttcattggcatggaaaaatgttcagtgggaggatta

SEQ ID NO: 609767 - DNA, 100 bp, Homo sapiens
cgggtccttccttccagcctgatgctaccaaaggtggaaagtcctgaagaaatccagtgggagcaggccgggctctcgccatgggtcactgtcgcctctg

SEQ ID NO: 609768 - DNA, 100 bp, Homo sapiens
tggagatgcagatgggcatgcagccgagttgtcaggtactgggcctaatcgctacgtgcctctttggctatgatgcctatgtcaccttccccgttcggca

SEQ ID NO: 609769 - DNA, 74 bp, Homo sapiens
cattaccactgcctcctttattgcagcaggaatttggtatattgagatcttcagaagtagcaggagtgaaatca

SEQ ID NO: 609770 - DNA, 75 bp, Homo sapiens
gagtgctacccggtgtactggaaccatccagctatgggacacagcaggacaagaacgattcagaaagagcatggt

SEQ ID NO: 609771 - DNA, 82 bp, Homo sapiens
ggagcccaaacccggggcaggcgggcagctgtgcccgggcggcacggccaggaatagccaggccagaagaaggaaggcctgt

SEQ ID NO: 609772 - DNA, 100 bp, Homo sapiens
catcacccaggcgcggagggaagacgccctggtgctcaccaagcaagtccttttcagtggagagggaactacaggataacagcagttaccccgacgaacc

SEQ ID NO: 609773 - DNA, 97 bp, Homo sapiens
gaatcactagttccccttgtacagagtttgaaaaaacggatggaagtaccagactatgaaatgggcaattaggacaattgttcaaagtagttttcca

SEQ ID NO: 609774 - DNA, 101 bp, Homo sapiens
atttatggacaagaagttatcatggaaagaatatggcaaagctgatgcaagatgggtttattttgatccaaccattgtgtctgtggaaattctgaccgtcg

SEQ ID NO: 609775 - DNA, 100 bp, Homo sapiens
tggcaagttttccgtggtatacgcaaaatgtgattccagtccaggtcctggcattgatgtgcctgctccagacatgagcacaggtgagcgggagatgtcc

SEQ ID NO: 609776 - DNA, 83 bp, Homo sapiens
aaaggaaatgcatctttatgtcagaaacacaaagcagcccaaccaaagggagtggttaatgtgttgctaacaactccactctg

SEQ ID NO: 609777 - DNA, 74 bp, Homo sapiens
tcggaggggaaggctgaggaaaggtaccgaaagcacagtaatcactggtgtcgatattgtcatgaaccatcacc

SEQ ID NO: 609778 - DNA, 97 bp, Homo sapiens
gatttcatccattatgctggctgttatgtacgcaggaggtgaccaagaatatggcccaggtgaccaaagccctggacaaggccctgagcaccatgga

SEQ ID NO: 609779 - DNA, 100 bp, Homo sapiens
caccagcggctgcaggactgggcacagcatgagatccaaaggcagggcaaggaaactggccacaagtcgaaatgagaaggggcagctgggacatggtgac

SEQ ID NO: 609780 - DNA, 100 bp, Homo sapiens
cgagagaaaagagaggacagcggacgagcagatccgtacctggagtagaacagaaaaattattatgtctgtgttcccttgggactcattggaaattgtac

SEQ ID NO: 609781 - DNA, 74 bp, Homo sapiens
tgatcccgcggtcccttcctgtaccttgtcctcagtcccttcagtctgaatatgttcattactaaggccttgcc

SEQ ID NO: 609782 - DNA, 75 bp, Homo sapiens
actgctaccacgagaaggacccggacggcagaggcaaggctggcagcaaaacgggctgcccgggcagaagcaaga

SEQ ID NO: 609783 - DNA, 50 bp, Homo sapiens
gacagaatcaccagcactggctgaaggcactgaaaatgaagtatttcagt

SEQ ID NO: 609784 - DNA, 82 bp, Homo sapiens
ttttgccatggtggattttgatgaaggctctgatgtatttcagatggtaccatttggcccttttgccttcatgccaggaaaa

SEQ ID NO: 609785 - DNA, 85 bp, Homo sapiens
atataaccgactgacctggatagtagttgttcttcagggattaaagcctgtggtttccacagaagcaccacctatcatatttgcc

SEQ ID NO: 609786 - DNA, 75 bp, Homo sapiens
tgcccgagaaggtggacgtgctggtgtctgagtggatggggacctgcctgctggagctcatgggacacatgtagc

SEQ ID NO: 609787 - DNA, 100 bp, Homo sapiens
tgaggaatcggcaaactccctggtctctgttggtgtagaagccaaaatcaggtagatgacattaatgctgataagaatatctcttctgcacagattgttg

SEQ ID NO: 609788 - DNA, 82 bp, Homo sapiens
aacctggccaacaagattgtccccattgccatccagaaccaaaaacttttgctagaaaatcagcttttacgagagaaaactc

SEQ ID NO: 609789 - DNA, 96 bp, Homo sapiens
gagaaagggaaatgaggaggagtagtggtttgcgagcaggttctcggagggaccgggatagatccaggtccagagagcatcgcagacatcgatctc

SEQ ID NO: 609790 - DNA, 82 bp, Homo sapiens
tgtttgagcccggaagcgcagaagctggtgacgcggcgcacggcgcggatggtggccgagtggcagtgtgtgggcttctgcc

SEQ ID NO: 609791 - DNA, 78 bp, Homo sapiens
ccagcgctgcaagaggcctacgtgcgggtggtcaccgagaagtccccgaccgactgataacgaaggaggcccaacttc

SEQ ID NO: 609792 - DNA, 98 bp, Homo sapiens
caagtgtgggagaggaagcggcggcggcggcgccgggcccgggggtggtgacagcaggtctgagttatagctgaggtggtaccagtttaagaagtgag

SEQ ID NO: 609793 - DNA, 73 bp, Homo sapiens
agcaccgagctcgcggcacggtaggaggtcaaaatgcagatcttcgtgaaaacccttaccggcaagaccatca

SEQ ID NO: 609794 - DNA, 100 bp, Homo sapiens
ccgcggggccaggaagtcggagtttgagccccggaggcagagcggctgccatggtgcccagggtggctccgtggcccgcacactcctggaagatgggaca

SEQ ID NO: 609795 - DNA, 100 bp, Homo sapiens
aaatcctcactctgagtacggtctcacagacaacgttgaggtgaaagcatgtattgccaatgtagaacccaaccaaacagtggagatcaatgagcaagaa

SEQ ID NO: 609796 - DNA, 100 bp, Homo sapiens
ctacttaagaaacgcagctatgggactggaagaagaaacacatgctcattacatcgatgttgccagatagtgattatagagcacaaatccatcatctgcc

SEQ ID NO: 609797 - DNA, 98 bp, Homo sapiens
caattgttcagttgcaaaaagaaactggagccaccatcaagctgtctaagtccaaagatttttacccagctttggggccatttggatcacacgatgtt

SEQ ID NO: 609798 - DNA, 103 bp, Homo sapiens
tagtcctggatcttctggggttccctatgcaaatgccaaaggaattggttatccaggtgaagagatggcgtttgtgaagagtggctggttgctgcgacagagt

SEQ ID NO: 609799 - DNA, 101 bp, Homo sapiens
ataaatcctgcacatttgatgtactgctttaaacttaaagacctctttggacccgaaattgtaaggcttctccatcattctctgttccttggaagcgtgag

SEQ ID NO: 609800 - DNA, 100 bp, Homo sapiens
catcaccgacctcatcagtgagctgtccctgctggaggagcgcttccggtagtattattgattccacagaatacagccaacctccaggtttcagtggcag

SEQ ID NO: 609801 - DNA, 97 bp, Homo sapiens
ccgggagtccgcaccaggggccctcagggaagagaccctgcaaagatcctgggagaccaaggcctcaggcccaggcccaaggccaagtgagagagcc

SEQ ID NO: 609802 - DNA, 100 bp, Homo sapiens
agattttgatccagaagaggatgaacccacgcttgaggcctcttggcctcacatacaggctctgtgtgctccgggatggagcaggtgtgcagagggtgag

SEQ ID NO: 609803 - DNA, 100 bp, Homo sapiens
catctttgtctagccccagtgcagttgacgccagagggaggcatcaaaaaaagattcggagcaaaactcagaattacctcaacgtgtatgcggcggaagg

SEQ ID NO: 609804 - DNA, 100 bp, Homo sapiens
ctgaaagatgtcactttacagaaacagtgtgtaccattccgacgttacaatggtggagttggcaggtgtgcgcagggaggagagagaatgtcttttcgag

SEQ ID NO: 609805 - DNA, 49 bp, Homo sapiens
cgggcgcaatggagcggaagagcgctcctttaccctcatcgtggaggcc

SEQ ID NO: 609806 - DNA, 100 bp, Homo sapiens
tgctgggacttatttttgtatagctgataatggaaatgagacaattgaagctcaagcagagcttacagtgcaagttattttaccaagaaaatggtttgca

SEQ ID NO: 609807 - DNA, 90 bp, Homo sapiens
gttcttgtctcccctggtttgtgaagtgcggaaaaccagaggtgcagagcattgtagaccaaggagccatggataggagaagtatgggtg

SEQ ID NO: 609808 - DNA, 100 bp, Homo sapiens
cgatggttctgcttaacaagcagagagctcacctaccacaaacagccaggttgccacattcatcctccagaagatcttgttagatgacactggtttggct

SEQ ID NO: 609809 - DNA, 51 bp, Homo sapiens
cgcggcgtgccctgcttgtcacagatatttggagttcttacaacatggcag

SEQ ID NO: 609810 - DNA, 83 bp, Homo sapiens
ccgggcggcgaccggggcctgggtccacgccgagggcaggacgaacttcaccaggcataatcaccagcaacacccgggacaat

SEQ ID NO: 609811 - DNA, 105 bp, Homo sapiens
gatggatttactgtacggtctcgtgtggctgctgacagtcctcctggaggggatctctggccaaggagtgtacggttatcaagttatacccaaccagcagcaaaa

SEQ ID NO: 609812 - DNA, 100 bp, Homo sapiens
cccaagaagaccattcagatgggatctttccggatcaatccagatggcagccagtcagtggtggaggaagcagaacatcagagagccatgcagagacgtg

SEQ ID NO: 609813 - DNA, 100 bp, Homo sapiens
gaagaaaagcactagcaacttcaaagccgacggcctgtccggcactgctgaaggaagagaggatggtgatgcaccggttacaaaagatgagaccacctgc

SEQ ID NO: 609814 - DNA, 75 bp, Homo sapiens
tttcaccaaggaactggtgctgcagcgagagttgtgaatgggagagttcacatccgcgactggcgagaggagaca

SEQ ID NO: 609815 - DNA, 74 bp, Homo sapiens
caggccagtggatcggaatggtggagaacttcaaccaggcactcaaggttcgagaacatcatcgaaaattaaga

SEQ ID NO: 609816 - DNA, 75 bp, Homo sapiens
gtggtgtgcggaggagctccaggcccgtcggcgcggagtgttaaaagatcactgaagttggatggtctgttagaa

SEQ ID NO: 609817 - DNA, 100 bp, Homo sapiens
tagctgccttgtcaacatcttcgagcatcggcagctccggaggccggggtaactggcagaatctctactgacaccacgcttggcccccagcaaacccttc

SEQ ID NO: 609818 - DNA, 78 bp, Homo sapiens
gacgcctcagccgcttggggcccgcacggaccctctacttcagttaaacccatccagagtaatggctgcggccttacc

SEQ ID NO: 609819 - DNA, 96 bp, Homo sapiens
ttctgttcaggccagaccctctgggagcttctcagccattttccacagatcaggtgtggcagaaaaaacacagcttctgaaattgaatgtacctgc

SEQ ID NO: 609820 - DNA, 75 bp, Homo sapiens
ccccaccacaggacctcccaggatctcccaagtcgggaccaccaccagaacagcaccgcatgccacgggagcagt

SEQ ID NO: 609821 - DNA, 100 bp, Homo sapiens
gcttcatatggaatctcctacctgcttgagggattcaagaagtcctggacccactgatctcagcatgaagagacaattggcgactagctcaggatcctcc

SEQ ID NO: 609822 - DNA, 100 bp, Homo sapiens
tttatttggcagatctgaagggaaagctccagatactaataaaagcttcgatgatgaagaatcagtggatggaaataggccatcatcagctgcatcagcc

SEQ ID NO: 609823 - DNA, 98 bp, Homo sapiens
ggctttcggcaagaactggattcgtggcgccacaagctcattcactgtgtaggggatcccaacaagccctcaggattcagaagtgttaaagctcctgt

SEQ ID NO: 609824 - DNA, 83 bp, Homo sapiens
cgtggaccacaggccctcgttgcccagatgttctgcggggagtgtctccagccctgcctgcaggtgccatccccgctgtgccc

SEQ ID NO: 609825 - DNA, 50 bp, Homo sapiens
tgcgacctcaggaaggagatgagactgttcgccatggatttccctatcaa

SEQ ID NO: 609826 - DNA, 100 bp, Homo sapiens
agtgttgaggaccatcttgcctggagcaagtcccatgagcgtgtaagcaagcgtctacatcagagattccaggcctgggtagataaatggaccaaggagc

SEQ ID NO: 609827 - DNA, 98 bp, Homo sapiens
tcgccccgaacgggggtcttcctcctccgccgttgacagaatgtttcatccatttgtggaccaaaagatggagttggtttttatttttaaaaagataa

SEQ ID NO: 609828 - DNA, 83 bp, Homo sapiens
tgcgtctgggctgtggaggattcctctaaacaggcacagccaccctctggttgatattcactgatggactccaaagaatcatt

SEQ ID NO: 609829 - DNA, 75 bp, Homo sapiens
actatgctgctgcctcagggatgaaagcctgtgtagagcaagcttgcgggttcgagtacacctctaaacttcagc

SEQ ID NO: 609830 - DNA, 100 bp, Homo sapiens
aagagacgaagagacagctggatgaagtctctggacctctgactgacactgtgcctgcccaggtccctgtatgcactgccacagtgccctgggccccatg

SEQ ID NO: 609831 - DNA, 50 bp, Homo sapiens
agtgcgtcaatcagagcgtcctgtgcggatattgactgggtacagacaga

SEQ ID NO: 609832 - DNA, 83 bp, Homo sapiens
gtttgagatgccaagggaacctgtcttttgatttggggttcaacatacagagacaatgcagatcttcgtgaagactctgactg

SEQ ID NO: 609833 - DNA, 112 bp, Homo sapiens
cctccagacaacaggatttggtctccacggtcaacgtggtatactcgcagacaacccaaccggtatacaatggcatcaagcatgatggaaccatgtgtgatacctgccgcca

SEQ ID NO: 609834 - DNA, 83 bp, Homo sapiens
gcatatctaagaggctgaacatgaatccacagatcagagagtaaaacttgtctcggcacagagtcaagtaaagaaagccaaca

SEQ ID NO: 609835 - DNA, 82 bp, Homo sapiens
ttgctgccaggaagcttcggccccgcagctcggcttgctgcggtctcaggttgctccttgagggcaggacagttcttatggc

SEQ ID NO: 609836 - DNA, 97 bp, Homo sapiens
cgtggaataggtgtatcaagtaatggtgcaaagcctgaaggtgaagttgaacaaattgctatgatgaaaccaaaaggccagactgaacacgatgagg

SEQ ID NO: 609837 - DNA, 75 bp, Homo sapiens
aaagaaacaagccgtggaataggtgtatcaagtaatggtgcaaagcctgaaatatgcacccaatgtccagggagc

SEQ ID NO: 609838 - DNA, 104 bp, Homo sapiens
cttttggtttccctggcaggggttgaactgtggagtgtgtgggtgctggagaatctggtaaaagcaccattgtgaagcagatgaggatcctgcatgttaatggg

SEQ ID NO: 609839 - DNA, 100 bp, Homo sapiens
caataccaacatgtctgtacctactgatggtgctgtaaccacctcacagattccagcttcggaacaagagaccctgctcgccctcccctacctgcggaag

SEQ ID NO: 609840 - DNA, 106 bp, Homo sapiens
agcagctcagaatccattaaaaggagagctgggaggagctttaatgaagcaccagttgagattcccagtccttctgaaaccccagctaaaccttctgaacctgaaa

SEQ ID NO: 609841 - DNA, 74 bp, Homo sapiens
cgtatagatgatttgctcagggatcgaggccatcaagctacagatggtcttacaaatggaaccccaaatgagct

SEQ ID NO: 609842 - DNA, 75 bp, Homo sapiens
gtctctgctcttcagtacaatcctatggagtttcactcttgttgcccaggctggagtgcaatggcgtgacctcgg

SEQ ID NO: 609843 - DNA, 90 bp, Homo sapiens
gggatcgtgaccgagaccgtgaccgagagcgtgaccgagagcgcgaatatcgtcatcgttagaaggcccaagaggatgctgagaaacttc

SEQ ID NO: 609844 - DNA, 82 bp, Homo sapiens
gggagatatcatgctctggaattttggcatcaaggacaaacccaccttcatcaaagggggccaggatcctcttcctgctcca

SEQ ID NO: 609845 - DNA, 88 bp, Homo sapiens
cgaaaggagctggtgcctgtgcaagttgttgaggtgctggagaatctggtaaaagcaccattgtgaagcagatgaggatcctgcatgt

SEQ ID NO: 609846 - DNA, 74 bp, Homo sapiens
cggccttccctcacctacaagaatgtgttcagagcaacattgttttgttgacacaagcatttagaagaaagttt

SEQ ID NO: 609847 - DNA, 74 bp, Homo sapiens
atggaaggaaatgagggcaacttctgaagacttcaacaagggtggagagattcaaccagttagcgtgaaagttg

SEQ ID NO: 609848 - DNA, 75 bp, Homo sapiens
ggggttctgagactccctgtcccggaccgcagttgttgacctcctgtactggagagacattaagaagactggagt

SEQ ID NO: 609849 - DNA, 96 bp, Homo sapiens
tcgggttctctctccgcgcgttcagccaccattggttcaggcaatcttcagcggtgatccagaggagatccggatgctcatccataaaactgaaga

SEQ ID NO: 609850 - DNA, 82 bp, Homo sapiens
gagaagagaagtcctctggagggatgaggtactttggaagttcgtcttatgggctgccaagatatcctagagaatgtccctg

SEQ ID NO: 609851 - DNA, 74 bp, Homo sapiens
actgaatgatgaaagaagagaaattctcgaaatgactgaaagagagtggttggaatgcagtggcacgatcttgg

SEQ ID NO: 609852 - DNA, 100 bp, Homo sapiens
cgtgcgcccgcgccaccatcttcggctgaaggaacttggggcacacttgaatcaatcttacaagaagaaaactttcattctcatcttcaacagttcatca

SEQ ID NO: 609853 - DNA, 83 bp, Homo sapiens
gtcgagctgaagacaattttaacttggaaaaggcgaatctggctttgggggaagaggaagaaaagtcggattacaagatcaac

SEQ ID NO: 609854 - DNA, 75 bp, Homo sapiens
cagagattgaactcagctatgcaaagcaactcagagccgagactgtctgaagctgggcccacctgctgagggaga

SEQ ID NO: 609855 - DNA, 75 bp, Homo sapiens
agcagcccccgggaggccgagtgcatctgttggaccgtgcgaggacaggctgcgggaggagctgcaggactgagg

SEQ ID NO: 609856 - DNA, 50 bp, Homo sapiens
tttggcaagtggacattttactggctcaatctcacagaaagttctccgct

SEQ ID NO: 609857 - DNA, 50 bp, Homo sapiens
ggagacatgggcatcaagggtgatcggaaaacgcccactcctggatcttc

SEQ ID NO: 609858 - DNA, 100 bp, Homo sapiens
ggcctcccaaagtgcttggattacaggtgtgttaccgagtggaatgggccaaattccaggaacgtgagaggaagaaggaagaagaggagaaggagaagga

SEQ ID NO: 609859 - DNA, 100 bp, Homo sapiens
atgaacagaaacacctaggaagggagaactgtgaagctgtggtctaccaatctagacaactcagtggcaagcattgaggcaaaggctaatgtgtgctgtg

SEQ ID NO: 609860 - DNA, 82 bp, Homo sapiens
cgagcccagcgtcaacttcctcaagtcgcccaaaggtgtggacactgccagcggctgcagccgacttggaatgacctgggag

SEQ ID NO: 609861 - DNA, 101 bp, Homo sapiens
gcctcgaggagggggaccttgaagacgacttcgaccctgcccagcacgaccagctcatgcagaacctcaagaaggcatgaagccagcccctgcagtgccgt

SEQ ID NO: 609862 - DNA, 89 bp, Homo sapiens
cgactcagacgcttcctatccctacaaagccatggtacatgtccagggccgccgggtccccttccccattgccagcccctgaccctgca

SEQ ID NO: 609863 - DNA, 90 bp, Homo sapiens
ggaggtgttgggggagatgtccagtgcactgacaggcagaactcaccagtcacatcaccaggatcctctccccttgcccagagaagaaag

SEQ ID NO: 609864 - DNA, 82 bp, Homo sapiens
tgacgctgctgctgcccggcctcgggttatacatgggaagctgttgataccaaaaataatgtactttataaaatcaacatct

SEQ ID NO: 609865 - DNA, 88 bp, Homo sapiens
agctgtactaggactgggaacgggttgatatccctgaaagtacttaatagcatcgtgctgttggggaaatcgtgccagtatgtgaagg

SEQ ID NO: 609866 - DNA, 100 bp, Homo sapiens
tgatgaaaattctcttcattctcttggactgaacttaaatactgatagagcaaaatatgctgtgaattccatcaagaagaaagtcaacgacaagaaccca

SEQ ID NO: 609867 - DNA, 50 bp, Homo sapiens
gcggtgttcatctccgacatccggaactgactgtccaacccattccgggg

SEQ ID NO: 609868 - DNA, 100 bp, Homo sapiens
actgaggttgcagttggcgtgaaggaggaatgccagctcctgagcaggcctcattggtggaggaggggcaaccacagacccgccaggaagctgcctccac

SEQ ID NO: 609869 - DNA, 100 bp, Homo sapiens
caaatcaaatcagaaagacatccttcggaatgtgttcagaacgcttgcgtaatggaatgtgaaggtaaactgccttctctgaaaatttgggaaacctgca

SEQ ID NO: 609870 - DNA, 101 bp, Homo sapiens
tctaactcttatttctccgttggcccaaccagtcccagcgctgtcgtgctcctctactcgctaaaccatttacttctaaagtgaaacaaatgcgattacat

SEQ ID NO: 609871 - DNA, 90 bp, Homo sapiens
attgacgccatgtcgggttattcgagtgaccgagaccgcggccgggaccgagggtatcatgatattagctggtttgacatcaagtcattt

SEQ ID NO: 609872 - DNA, 100 bp, Homo sapiens
gcccctgaggccgtgctcttcacctatgtgggaaaggtggccgtaacctttggcctggggcagctgcaggagcgctgcgtggctttcatagaggcccaca

SEQ ID NO: 609873 - DNA, 96 bp, Homo sapiens
ctggactgtaccagtgcacagcaggcaacgaagctgggaaggaaagctgtgtggtgcgagtaactgtacagtgtactcatttatgacagatttggc

SEQ ID NO: 609874 - DNA, 75 bp, Homo sapiens
caacttattcccttcaattcaagtaacagtctcagaccagtatccttcaggggttctcttactctgatttgcgga

SEQ ID NO: 609875 - DNA, 100 bp, Homo sapiens
caggaactagagacagcttgctttctgtcgtggcaatgttttgaaactggcaaaatcaggtggcgacagacaaagttgcagaaaagctgagctctactct

SEQ ID NO: 609876 - DNA, 74 bp, Homo sapiens
accagagcctgaacacactgggaaatgccgtgtcagtggggttgttttggcactattcctgatcagagaactcc

SEQ ID NO: 609877 - DNA, 101 bp, Homo sapiens
gacctcggggagccctggacaaacatgcatgtgtgcgacgcttgtaacaaacctgcaaggttccacataccaacaaaactagtgatgccagctgctctgaa

SEQ ID NO: 609878 - DNA, 88 bp, Homo sapiens
tgagtatttagtaggagaagagctcccggcgatgttgaaagtacgggacccgcggccctggctcctcttcctgctgcacaacgtgggc

SEQ ID NO: 609879 - DNA, 100 bp, Homo sapiens
ctaccacctgggggctgcgggagccaccaaaggtataaagatggctgtgaccacatcggggagcaccgagatgatgaaagagaactggcccctgggagcc

SEQ ID NO: 609880 - DNA, 75 bp, Homo sapiens
aaagccaagaggaggacagttcgctacacagcaatgcatcgaggagctgggcaccaccccatgggaggagagcac

SEQ ID NO: 609881 - DNA, 90 bp, Homo sapiens
ctttttgtacttacaaagtccatgctaacctactatgagggtcgagcagaggttttcaagcctatggctgatgctgctgtgaagattgtg

SEQ ID NO: 609882 - DNA, 100 bp, Homo sapiens
gagaaacctcgtggcctggtctccattatttgagatgagttacatcttggagaacatacatatgatagttgagaaagacacatattctgatcatgaagaa

SEQ ID NO: 609883 - DNA, 100 bp, Homo sapiens
gcagtggcacctgcgcgaagctggccaaagcctgcccagacggctcacctgtgcgggatggaacaaaagaggcgtcagtggctgcaggaggccatgtcgg

SEQ ID NO: 609884 - DNA, 75 bp, Homo sapiens
aggtgctcttggaaaactcaagcatagtcaagatccaggaatcaactcaattacatcacagaagaacttagaaac

SEQ ID NO: 609885 - DNA, 97 bp, Homo sapiens
ggggacgctggtgaccaagatggcggcggagctggtggaggccaaaaaactagatgatggccatttaaacaactctttgagctctccagttcaagcg

SEQ ID NO: 609886 - DNA, 82 bp, Homo sapiens
gtcagacgcagccgtagacaccagctccgaaatcaccaccaagagctccaaacgagaatggaagccgctggaggaccgtagc

SEQ ID NO: 609887 - DNA, 82 bp, Homo sapiens
agcctcccaagtagctggtattacagcggaggaggcgatgactcggctggtcaacattctgatcctgtcagtcagggatgca

SEQ ID NO: 609888 - DNA, 100 bp, Homo sapiens
tacgagctgtttctcatctttatactcttccaggagctgacatggacccaaatcctcgggccgccctggagcgccagcagctccgccttcgggagcggca

SEQ ID NO: 609889 - DNA, 75 bp, Homo sapiens
ctttgatcagccactgcctgacttagaatgattcctcccaggggttgtgcctatattgttatggttcataggcaa

SEQ ID NO: 609890 - DNA, 101 bp, Homo sapiens
acgtgcatgaaccaaacccacttcgttcaagacaggtgtttaagcgaaatggatcagacaatggctgccaatgctcagaagaataaattcttgattgatgg

SEQ ID NO: 609891 - DNA, 75 bp, Homo sapiens
ataatggccgagctgttgactggaagaacattgtttcctggtacagacctgattgtctgtgcttcactaatttcc

SEQ ID NO: 609892 - DNA, 101 bp, Homo sapiens
ctgcgcgccgctgcccgcgccacaggatctaagcctttcccacgttatggttataaaccctccccaccgaatggatgtggctctccactgtttggtgttca

SEQ ID NO: 609893 - DNA, 100 bp, Homo sapiens
aggaaatgattggttaatttgggatattactcggtccagaagggagagaaggtacccaaagggaaaaagggaaaagctgatgctggcaaggaggggaata

SEQ ID NO: 609894 - DNA, 90 bp, Homo sapiens
gaggccgtgtagcgtcgccgttactccgaggagataccagtcggtagaggggtttgaacatcctcatccctgtgttagaccggatccgat

SEQ ID NO: 609895 - DNA, 100 bp, Homo sapiens
ctctgagaggcccctcttctcctccaacccagaactggacaatctgggggcagtacccaaaggaaacgctacgaaagaatacatggagagcttgcagctg

SEQ ID NO: 609896 - DNA, 50 bp, Homo sapiens
ccaagctgaagatcattgagattttgcagcttgaagtacaatcttgttgt

SEQ ID NO: 609897 - DNA, 100 bp, Homo sapiens
tccatttggggaccagagatggacggtcactcagcctatggaggctctgggcatcaccagcggccccagggaaaaagaaagaaatgggaaacagcatgaa

SEQ ID NO: 609898 - DNA, 60 bp, Homo sapiens
gggccggttgccgggcgcgggcgagaaagtttcgagtatttacagcccccttccataagg

SEQ ID NO: 609899 - DNA, 74 bp, Homo sapiens
cggcgcaccgactggaccgggaaggagcatcccaggacctaccagaatctgggaggtggggaagacagggctcc

SEQ ID NO: 609900 - DNA, 50 bp, Homo sapiens
aaagagccccagaaattcacaaaggaatacggggtgctttgcattcagga

SEQ ID NO: 609901 - DNA, 83 bp, Homo sapiens
ctcagttggaagcagccgatccagcctgcggagcctgtggggcagctttctatgggaggattctcgtaacagcagcacaccaa

SEQ ID NO: 609902 - DNA, 100 bp, Homo sapiens
ttttgatgatggcgtacttggtctggcttgggttggagcaccttcaggtgtggatgaggtcaccattgtcaacattttgaccaaccgcagcaatgcacag

SEQ ID NO: 609903 - DNA, 138 bp, Homo sapiens
ctggtgcagttgtatgctgtggtttcagaggagcccatttacatcgtcacggagtacatgagcaagggacaagcactgatcctgaggggatactgtggagcagcccagtccacaccagagccccacgcggctgcccgg

SEQ ID NO: 609904 - DNA, 90 bp, Homo sapiens
cgaggacggtcggactcccgcggcgggaggagcctgttcccctgagacttaaaaggaattgtattcgtcatccagagtcaaagtaattct

SEQ ID NO: 609905 - DNA, 100 bp, Homo sapiens
tacttgcctaaatgaggaatgtctttcctaccatctaaaatacgaaggtttctggctgggtgatctttagacagtgactgagtatggatcatttgaacga

SEQ ID NO: 609906 - DNA, 100 bp, Homo sapiens
ttccctgcactacgaggaagagtgcatcagacaaaaatcagcttctttatcaatggcgtggagaaggatcatacacctttcaatgcaagaactctaagtg

SEQ ID NO: 609907 - DNA, 73 bp, Homo sapiens
gaggatgagcctgcagagcgcgcagtacctccggtatgtgacgcattcccagactcttcagccaactgagcat

SEQ ID NO: 609908 - DNA, 99 bp, Homo sapiens
cgtgcatcatctggttggccttcctccctatattttatgtgacatcaagtgactacagagggcgagaggtcaatgatcttaaaagaaaatctccttcag

SEQ ID NO: 609909 - DNA, 100 bp, Homo sapiens
cggattaaaatcgttctgaagtgggtactggccccgacctttttgctttagcttgaacatgcgaaagtgacacagacagagttgatgcgtgagtcattta

SEQ ID NO: 609910 - DNA, 82 bp, Homo sapiens
gtcagacgcagccgtagacaccagctccgaaatcaccaccaaggctgctgacttgagtaaaccaatagataaaaggatatac

SEQ ID NO: 609911 - DNA, 76 bp, Homo sapiens
acactgaactttgggcctgaatggtagatttcgggcagacaacttgaacaagctgaagaacctatgcagcaagaca

SEQ ID NO: 609912 - DNA, 96 bp, Homo sapiens
aaccagtggtaattaccatcaatactatggaatgcattttgaaacttaaggatgggatacagatgtctttggtggacttgggaaagaggttgctag

SEQ ID NO: 609913 - DNA, 74 bp, Homo sapiens
cggtttgctgatcgccccagggatcaggagcctctgctgcgagaagttctggagaagcagccagtgctaagcca

SEQ ID NO: 609914 - DNA, 50 bp, Homo sapiens
atctcttctccctccccttcttggttactataacaacagtaccaaggtgg

SEQ ID NO: 609915 - DNA, 100 bp, Homo sapiens
aaacaagtccgacagtgagaatggtgatgtccttgttgctgtgaatgatgtcgatgttactactgaaaacatcgagagagttctgtcttgcattcctgga

SEQ ID NO: 609916 - DNA, 100 bp, Homo sapiens
tgctttgaagaagagtctcacagccaagcaggtccaggcggatttcataactctggtctgttatgttctgaacccacacatgttttcggaaggaccagat

SEQ ID NO: 609917 - DNA, 51 bp, Homo sapiens
ttgtgttcctggaactggctcagtggtttgatgataagaacccaatttggg

SEQ ID NO: 609918 - DNA, 82 bp, Homo sapiens
gatggtgctggccacttgcttgggatcctttatcctggtcatcttctatttccaaattccagggtctccctccactgctgta

SEQ ID NO: 609919 - DNA, 75 bp, Homo sapiens
ccctgcactgtgtgtgctgcacagaggatgggagttctgggaaatcgttcattcatttacagatgaacagaaaag

SEQ ID NO: 609920 - DNA, 82 bp, Homo sapiens
ctgcagctgcccccgagtcagagggcgcagtccgcattcaaagaattaccaccagccagccattttgaattcatcggctctt

SEQ ID NO: 609921 - DNA, 75 bp, Homo sapiens
gatcctggaagagactcggggccccccagcctccgccaacccagcggcgcccaggatgaacgtggcctgaagccg

SEQ ID NO: 609922 - DNA, 100 bp, Homo sapiens
ctcaggatgaaaaccgaagaagaggcccggactcatacagagattgaaatgttccttagaaaggagcagcaggcaccaccttccatggtcaataatgaac

SEQ ID NO: 609923 - DNA, 100 bp, Homo sapiens
gcccctccctgctgtcacccagacccgcggtgcgacaggacattgccgagaatggctgcgcccccaccccagaagagcagctgccaaagactgcaccgtc

SEQ ID NO: 609924 - DNA, 95 bp, Homo sapiens
gggccaggcgccgctcagaacgggtttggaaatcccttgtctccaggttgctgggattgacttcttgctcaattgaaacactcattcaatggaga

SEQ ID NO: 609925 - DNA, 50 bp, Homo sapiens
ccacccgagaggtggagaaaggccgggccaacgtggaacctgttgtgccg

SEQ ID NO: 609926 - DNA, 90 bp, Homo sapiens
ccagcatcaagatgatttatggtaataagcatgtcaatccaaagaagcaaacaataggtaattcttgtaaagcctgtggctatcgaggca

SEQ ID NO: 609927 - DNA, 99 bp, Homo sapiens
cttctctcattttctttccctgcaccaactagcagatgccttcaattaagttgcagagttctgatggagagatatttgaagttgatgtggaaattgcca

SEQ ID NO: 609928 - DNA, 51 bp, Homo sapiens
cgaggatcaaaatcttcgaaggaggaacgacaaatcctccacccctgggct

SEQ ID NO: 609929 - DNA, 85 bp, Homo sapiens
gcccttgttcccccaaatgtctgactctgactctcggactgagaaacgcaagctcaccatggatgatgatatcgccgcgctcgtc

SEQ ID NO: 609930 - DNA, 75 bp, Homo sapiens
gcccgagtccatctgggacacaaagctggctgtcggcacaggttacaaggagctattttcgtatcctaagcatat

SEQ ID NO: 609931 - DNA, 78 bp, Homo sapiens
gcggctcttcggggcgcgatgcccaggccgcgccgccacgagcactctcgagtggaccctgaggagctcttcaccaag

SEQ ID NO: 609932 - DNA, 100 bp, Homo sapiens
tgtcgtgaagaagcaggaggctaagaaagtggtgaatcccctgtttgagaaaaggcctaagaattttggcattgtgccctgcaggagtcattaaatcaaa

SEQ ID NO: 609933 - DNA, 101 bp, Homo sapiens
accgacctgcaggctctgtcccgggtggagcgagctggcgcctgtaacacgtttttccagaaaggaggagtcaaggaagcccttagtgaacgagaactctt

SEQ ID NO: 609934 - DNA, 100 bp, Homo sapiens
aagaaaaaagtagggcttctcaaggagattcaaccctatgaaaagataaaggccaggggcttgcctgataatatatcttccgtgttgaacaaactagtgg

SEQ ID NO: 609935 - DNA, 83 bp, Homo sapiens
gcagaggctcccgggctggactcaggcttctcaggtcagaagttgagtagcaggggcctaggagggctcgaagccttcacagc

SEQ ID NO: 609936 - DNA, 125 bp, Homo sapiens
caggtgccagatgccctcgagtgggaacagcagaatcaaggcctgggttgttttggaaaccgaaataacaaataagtccgctttgaaactttatgaaaatcttggttttgttcgagataagaggc

SEQ ID NO: 609937 - DNA, 134 bp, Homo sapiens
tacaacctggtgcgcttccggatcgggggcaagcggaaggtgatgcccaagatggaccagtaagactttgaccccgacgcaggcttcagtgattgccgcggatcagaagcctgagcactttggctcgagacaat

SEQ ID NO: 609938 - DNA, 100 bp, Homo sapiens
ggttcagtgtatcgacggataacagagttcacatattcaaacctgtatctgtgcaggcaatgtgggcagggtgccatttgccgtgcctgacaaagtgctg

SEQ ID NO: 609939 - DNA, 50 bp, Homo sapiens
catcatcaaggacttcaccaagcagcttccgccctgcgctgccagtctcc

SEQ ID NO: 609940 - DNA, 98 bp, Homo sapiens
aatattttggagcctttggagagaaaatatcagagagcgttatggaaccctaacaggcgagctgcatatgattgaactggagaaaggtcatagtggtt

SEQ ID NO: 609941 - DNA, 75 bp, Homo sapiens
tgccggggcaccgcaggttttggactcgctgaagcggcccagcagcaaagaaacctggataacatcgtcttgcaa

SEQ ID NO: 609942 - DNA, 95 bp, Homo sapiens
tgactttgcttctggttacacgtgggaatagaaccggctaaagaggactggcatcctcaagtgcccagagcaccccaggtaactctgcttctctg

SEQ ID NO: 609943 - DNA, 51 bp, Homo sapiens
tgatgtggtctacagaccaggagcgggtaccatcgaatgcttcatgggagc

SEQ ID NO: 609944 - DNA, 75 bp, Homo sapiens
ggaactctacaacccaatccagtcacccacaaaagctgtatataatgccagacattggaatcatccagattcaga

SEQ ID NO: 609945 - DNA, 90 bp, Homo sapiens
ttacctgcttaccagccgggaccagagctaccagttcaagacgggcgctgaggtcctcaaggctagcagctggagcagacacaaacccac

SEQ ID NO: 609946 - DNA, 51 bp, Homo sapiens
ggatcccttcaagatgcgctagaagatgcctgtcttagatgtcaagctgaa

SEQ ID NO: 609947 - DNA, 90 bp, Homo sapiens
tggaccctgcccagcagaatttgtatagagatgtgatgttggagaactacagaaacctggtctccctagttttttcaagggggaacatgg

SEQ ID NO: 609948 - DNA, 98 bp, Homo sapiens
atcagcgcggctacctgctgacacggaaccctcacctcaacaagagcaaacgaggcccctgagagctccacctagttcacaggataaaatcccacagc

SEQ ID NO: 609949 - DNA, 100 bp, Homo sapiens
tttgctggcaagcagctggaagatggacgtactttgtctgactacaatattcaaaagtggagggtagacagcgcggcaacttccgggtatgagataggga

SEQ ID NO: 609950 - DNA, 100 bp, Homo sapiens
gggcaacattttgggagcgtgcctagcttcttctgttcttcagtatggttatgagatgtcggtctcgaaacgagcccgaaaggcctccagcgacctggat

SEQ ID NO: 609951 - DNA, 100 bp, Homo sapiens
ccaagaaaaaaaccacaaatgtttttctgttttgcctgaatacatgatttaaacaagagatttccacagaaggactttgcctcccgggccaaactggcag

SEQ ID NO: 609952 - DNA, 100 bp, Homo sapiens
ggagcgcctggacccagcacggagggacttctgcagagagagtgcgcagaaggattccgggagcacagttccgccgagttatgagtccagggacaatatg

SEQ ID NO: 609953 - DNA, 88 bp, Homo sapiens
ccaacacctgatccccaagattgaagatggaaatgattttggggtagcaatccaggcacagaaagctgaaggtgctggagatgccaag

SEQ ID NO: 609954 - DNA, 74 bp, Homo sapiens
ggcacttggagtccggacatctgaaacttggactccatgttttcgttggccctgaaatgccttatcagtctgtc

SEQ ID NO: 609955 - DNA, 74 bp, Homo sapiens
gttcagctgcttcaagatgaaggcagacctgttatcctaaactaggtgagtcagcttttggtacatgtgatgat

SEQ ID NO: 609956 - DNA, 75 bp, Homo sapiens
gtcacaggccatgctctggcaaaaacgttgtggcagcactgcctgaaggtatgagaccagattctaatctttatg

SEQ ID NO: 609957 - DNA, 100 bp, Homo sapiens
ctttgggacgtcctttttgcccttcctcctctgtgcggtgctgctcagtgcagttcagtcttactactttgaccgcgatgatgtggctttgaagaacttt

SEQ ID NO: 609958 - DNA, 75 bp, Homo sapiens
aaggattccaagtaactcttatttggtataccaagcttggctacgcaggcaacactgagccccagttcattattc

SEQ ID NO: 609959 - DNA, 101 bp, Homo sapiens
cttcctcttccacaagtcaggtgctttggagggacagcctcgaggctactgttttgttaactttgaaactaagcagacctgcaggctgggacaatgaaaag

SEQ ID NO: 609960 - DNA, 100 bp, Homo sapiens
aaccgcaagctcattgagacgaagccagctgaagatgagtggggtaaaaccccagacgccatgaaagctgccatggccctggagaaaaagctgaaccagg

SEQ ID NO: 609961 - DNA, 97 bp, Homo sapiens
cagaaaccacaagaaaacatggggagggcgatcatctcagtccacattggaacgatctgaacagcagatcagggctgcttctagtttggaggaacta

SEQ ID NO: 609962 - DNA, 100 bp, Homo sapiens
aaattgtacagtgacatcttctgggatttagtctggtgcaattaaaaactagcatttctagtcagtatgtaattcggatgcagccgactaatagatgcct

SEQ ID NO: 609963 - DNA, 101 bp, Homo sapiens
gcatggcggtctgtcggcggagtcgccctcgggggctgtcaggtcaagaagaagagagattggccctagaaactgccctgatgtacggagctaaaaagccc

SEQ ID NO: 609964 - DNA, 82 bp, Homo sapiens
cggctcggacgccagcggacacgcgggcgagatcacggatacacgactctagccaccagtgtgaccctgttaaaagcctcgg

SEQ ID NO: 609965 - DNA, 74 bp, Homo sapiens
aaagaaacaaaagacaactctgcttttccagaaactgtgccaggatcacggtcctgctcaatctggaattttgt

SEQ ID NO: 609966 - DNA, 83 bp, Homo sapiens
ccgcactcctggtcctgctcggggctctgttcccaggattatattccatcacaacaagatattctgcttgccagaagacccac

SEQ ID NO: 609967 - DNA, 100 bp, Homo sapiens
gaagctgtcggagcttcccaaggaagatgaagtcctcagtacattctgaagaagatgattttgttccagagctacatagaaatgtacaccctcgagagcg

SEQ ID NO: 609968 - DNA, 120 bp, Homo sapiens
aagaaactgaagcaaaagatcagcgaggagcagcagcagctccagcaggcgctggctcctgctcagcagaaaaagtcctacctggagcgaagcgttaaggaagctgaggacaacatccgg

SEQ ID NO: 609969 - DNA, 83 bp, Homo sapiens
gtatctcgccctggctgtgaagaacagcaaatcaatctctgaggttgggcccaagtctgttttggtggtctgagaggaaaaaa

SEQ ID NO: 609970 - DNA, 83 bp, Homo sapiens
cgcttcggctccgctccctgtgcgttggttgaatctggcgatgtggaacccatggatatggagggctgactatatacaccatg

SEQ ID NO: 609971 - DNA, 50 bp, Homo sapiens
caggtcccagcagagctgctgctgacctccaagaagctggtgaactcggt

SEQ ID NO: 609972 - DNA, 100 bp, Homo sapiens
gtgattctttactcagctgagtgtgccacacaggtagccctggacggcattcagtgttttggtattggttgctctggcatctgaagaacttgccaaaggc

SEQ ID NO: 609973 - DNA, 100 bp, Homo sapiens
cggagttccgcgtccgaggtgtgaaggatgccttccgtgccttccatcaagatctcaattttgtgcgcaagttcctacagcccctgttgattggagagct

SEQ ID NO: 609974 - DNA, 75 bp, Homo sapiens
ccgatcgggccgtgtccgccgcggccctgcgaggtccgaggggtttaaacttacacgaatcgctttctggaggag

SEQ ID NO: 609975 - DNA, 75 bp, Homo sapiens
atttgatcctggggagtctgattcagatgacaactgtacagatgtcactgtcataccctaatgatcccagcaaga

SEQ ID NO: 609976 - DNA, 90 bp, Homo sapiens
ctgcgttctgaagcccgagaggagccacaatggagacgccgccgctgcctcccgcggtagtggtggtgcacgaagatccgcactacttga

SEQ ID NO: 609977 - DNA, 75 bp, Homo sapiens
aaggaaccaaggcggccctggctgggggaaccactatgatcagcaatttgaatcaacccatagaagtgacagcgc

SEQ ID NO: 609978 - DNA, 73 bp, Homo sapiens
cgaggcaggtggatcacttgaggtcctggtgcttgatggtcgaggccatctcctgggccgcctggcggccatc

SEQ ID NO: 609979 - DNA, 75 bp, Homo sapiens
tcatatttggcttcaatgtcatattttgggtaacagcttgcctgattgctgtggccaaaacagatggtgaagttc

SEQ ID NO: 609980 - DNA, 75 bp, Homo sapiens
agaagccacagctgctgcggcacatggaacagcatgtctccttcaaggttttgattcccaccatggccatcaccc

SEQ ID NO: 609981 - DNA, 100 bp, Homo sapiens
tgtatgtgctgtatatgtagtaaagccaagaagcttgagagaagaaaaatttcagaaaaattgtctcaatttgactagaatatcaatgaaccaggaaaac

SEQ ID NO: 609982 - DNA, 75 bp, Homo sapiens
caagtcaccaccgtgaacaaggagaattgtaagtgctcagagcttggctgaagatgatgtggaatgagaaacaaa

SEQ ID NO: 609983 - DNA, 82 bp, Homo sapiens
ctgcctggctgcgagcacatgatggcgatacgggagctcaaagtgtgccttctcggggtcaaaatgcagatcttcgtgaaaa

SEQ ID NO: 609984 - DNA, 74 bp, Homo sapiens
acagatgatacctttgatccagaacttgcagcaacaatagtgactgagatgctggtaaatgtcctcaacatctg

SEQ ID NO: 609985 - DNA, 100 bp, Homo sapiens
tgagaaaagggggaaaatgcccaggaggaagcaggagcagcccaagcgccttccctcacgtcagcccaaggccaaccccactgtcactctgttcccgccc

SEQ ID NO: 609986 - DNA, 75 bp, Homo sapiens
cttcacccgcttcaccaaccagacccagggccgggaccgactcttcagggggcagtacccaaaggaaacgctacg

SEQ ID NO: 609987 - DNA, 100 bp, Homo sapiens
ggcggatctggacacccagcggtctgacatcgcgacgctgctcaaaacctcgctccggaaaggggacacctggtaatgggaaacccaggaactttcaaaa

SEQ ID NO: 609988 - DNA, 100 bp, Homo sapiens
cgctgtcccgcggcctggagtacaacgaggtcaacgtcaccctggacctgggccagctcggcaagatgtcggtgaaggagggcgcacagcgcaagtgggc

SEQ ID NO: 609989 - DNA, 98 bp, Homo sapiens
ggcatgtcctgtgatggccccttcaagccggatcactaccgctactgagagccaggatgagtctcatgatcactcatttggaccaatgcctatatcag

SEQ ID NO: 609990 - DNA, 100 bp, Homo sapiens
ccttccagaacctgatgaaagactgtgaggccgaggtgagggccgcagcctcccacaaggtcaaagctacctccagggctggcggaagaccttgctgatc

SEQ ID NO: 609991 - DNA, 96 bp, Homo sapiens
gccggcagcatccttggggagagcagcaccgaggccagcaagacgctgcccgccatcgagagctcccagctcctccagcagccgacaggaggcccg

SEQ ID NO: 609992 - DNA, 51 bp, Homo sapiens
tccgcctgcggcctcctcgcaaaacaaggaaagaccacagcaagattcttt

SEQ ID NO: 609993 - DNA, 149 bp, Homo sapiens
ggcagggagggtgacaagcacaccctgagcaagaaggagctgaaggagctgatccagaaggagctcaccattggctcggctttttgaaagcaaagatgagcaacactcaagctgagaggtccataataggcatgatcgacatgtttcac

SEQ ID NO: 609994 - DNA, 101 bp, Homo sapiens
cataacctatgcacttgtggaatgagagaaccgaggaacgaagaaacagacattcaacatgattgcatttgaaaatgaaaatgcggttcttggggttggtg

SEQ ID NO: 609995 - DNA, 75 bp, Homo sapiens
atcttggaacagcacccccttctttaaggggctggcaaggtttaattgcttatggatgtcattcacttgtggtag

SEQ ID NO: 609996 - DNA, 100 bp, Homo sapiens
aggagagtctgtgccgacaagatggcggacggggagctgaacgtggacagcctcatcacccggctgctggagggaaaagggagcgatgttgatctcagga

SEQ ID NO: 609997 - DNA, 129 bp, Homo sapiens
tcaccggagcatctgacaaaccaggagaagtttcaaaacttgggaaaaggatgggtttcctctatctcacattttatggccactctgcccaagaactggctggctccaggattggtgccttctcttatg

SEQ ID NO: 609998 - DNA, 110 bp, Homo sapiens
cccagaccctggagcctcagttggaagcagccgatccagcctgcggagcctgtggggcagaatgtgaaaacctttgcatcttctgatagtctagccaaggtccaagaagt

SEQ ID NO: 609999 - DNA, 100 bp, Homo sapiens
cgacagcacagacagaatccctgctaccagacacagcattgttggttttgccatgtactattttacctatgacccgtggattggcaagttattgtatctt

SEQ ID NO: 610000 - DNA, 90 bp, Homo sapiens
gtttttgaacctggaggttctatgcaacaaggcatgtatactcccaaagtgaaattaaatggtggcagacatgtccaaggaatattgcgg

SEQ ID NO: 610001 - DNA, 98 bp, Homo sapiens
cgctgttcgtgctgctgggattcgcgctgctgggcacccacggagcctccggggctggataaacatcacgatgctgctcatgaaatcatcgagaccat

SEQ ID NO: 610002 - DNA, 89 bp, Homo sapiens
gaaagaagttatgcttgttggaattggtgacaaaatcagaggcatactttataggtgaatcaaaaactctggttttaagcaacctctcc

SEQ ID NO: 610003 - DNA, 75 bp, Homo sapiens
caaggaagaaattgatattttgatgaacaatattgaacgctatcttaaggaactttccgctgtactttttgccat

SEQ ID NO: 610004 - DNA, 100 bp, Homo sapiens
cgcgggcggcgagacggcggcaggacggcggcaggtctcctctgagcctccggcctccataagacccaaaacagatgacacctcttcccagtcccccgcg

SEQ ID NO: 610005 - DNA, 75 bp, Homo sapiens
gcttcccatggtttggaggatagcaacatcagtggaagccgtgaggtggtggatgaaggcttgatccctggagat

SEQ ID NO: 610006 - DNA, 96 bp, Homo sapiens
atttgaagtatttgacgaaaatagactgaacatctgctcaaattaatgaccatgggggatatgaagaccccagactttgatgacctcctggcagca

SEQ ID NO: 610007 - DNA, 100 bp, Homo sapiens
aagtctgttccttatcacgtgtgtaaggggaaaaaggtgctcagaattttgatgtcatacgactatcaacttacagaacagcctgcaaattacgatttgt

SEQ ID NO: 610008 - DNA, 75 bp, Homo sapiens
ggaatgtctttcctaccatctaaaatacgaaggtttctggctggaaagtgacttcagtgatgattttagtgatga

SEQ ID NO: 610009 - DNA, 75 bp, Homo sapiens
gcctcatggaaagcgaccccggggtcttcaccgagctcattaaaggattcggggatcatggaagctgataaagat

SEQ ID NO: 610010 - DNA, 101 bp, Homo sapiens
ctgccatattgtgtcttccccggccggtccctcgcctcccggccgagctgacgagtctctccgaggcaaagatggagctgagaagaaaagatcaatctctg

SEQ ID NO: 610011 - DNA, 95 bp, Homo sapiens
atcgggagaaaacaagtccaaggatgaatcccagtccctgttacggtccaatatcagatggaaatgatgcggagccttcgccatgtaaacattga

SEQ ID NO: 610012 - DNA, 80 bp, Homo sapiens
ccaccagggctacagcactgaggctgaagctggcagggcggagatgctggaccacgccgtcctgcttcaggtgatcaaag

SEQ ID NO: 610013 - DNA, 88 bp, Homo sapiens
cgtgtggacggcgggggccgagcccatgagtagggaggagaaacagaagcttggtgactcgatggaaacagaagaaaagacaagcagt

SEQ ID NO: 610014 - DNA, 76 bp, Homo sapiens
cggcggcctgatggagtaagaggggttggctgtgaatgtgctggagaatctggtaaaagcaccattgtgaagcaga

SEQ ID NO: 610015 - DNA, 74 bp, Homo sapiens
aaatcgcctgcaatctggcctggctggtggccaaagcctttgggacagtgacatcgatgtggcccagcagttca

SEQ ID NO: 610016 - DNA, 90 bp, Homo sapiens
gtgtgtactctggcgtgcaacctggaattggaacggagctgaactgtcccaagcaataaacagtggtacattgttatcaaaaccgtcccc

SEQ ID NO: 610017 - DNA, 101 bp, Homo sapiens
gatggtgcccggcgaggagaaccaactggtcccgaaagagatggagatggacacatggatcatttactgccaggctgtgaagataaaaattgccaaaagag

SEQ ID NO: 610018 - DNA, 141 bp, Homo sapiens
caagagatcttcgagggattgcctttgcactgaacacaaagaccagctacaccatgctgtttgactggatgaaacatgacagctgccctacaggcagctctgaagaacccccctatcaacaccaagagtcaggcagtgaag

SEQ ID NO: 610019 - DNA, 100 bp, Homo sapiens
tctaatagctcatcatgctcgaaagaatacagaactagaagagtggctaaggcaggaaatggagtgggtgcctgatagacatcctaggactatacagaag

SEQ ID NO: 610020 - DNA, 90 bp, Homo sapiens
gaggcagtatggcaccatcagccacgggatcgtggagaacactcgtgaaactgctcaggccatcaagggtatgcatatacgaaaagccac

SEQ ID NO: 610021 - DNA, 82 bp, Homo sapiens
aaatctcttgacaaagatggcactggacaaatccaggtgaacatccaggagacttcccaagtaagaagcggaagaggagccg

SEQ ID NO: 610022 - DNA, 100 bp, Homo sapiens
cgcagcccaggcgcgggggcgacgacaggaataccaaattgacatattttttgctcagacctggacagatagtcgccttcgattcaacagcacaatgaaa

SEQ ID NO: 610023 - DNA, 80 bp, Homo sapiens
gggaatatccctccacgttgccctcaaagccctgcattccagagaacccagtgacttgattgtaaaaatttacagagcgg

SEQ ID NO: 610024 - DNA, 75 bp, Homo sapiens
ctggactgcgagacggcccggctgcagcgagcgctggacggagaggaaagcgcaaactctggcctgttctattct

SEQ ID NO: 610025 - DNA, 101 bp, Homo sapiens
ccgatttaaagctgagctgcgaggaaaatggcggcgggagtaagactttgaccccgacgcaggcttcagtgattgccgcggatcagaagcctgagcacttt

SEQ ID NO: 610026 - DNA, 83 bp, Homo sapiens
agctctcaagtctgttgagactagcactacttgcattaaaagtctgtatggtgtttgatcagtatgtaaagaccagggcagag

SEQ ID NO: 610027 - DNA, 75 bp, Homo sapiens
cctggtttggtaattgacctcgagatccccgtcgaggtcaagatcaagatccaggtctatttcacgaccaagaag

SEQ ID NO: 610028 - DNA, 75 bp, Homo sapiens
ctccgacacgggctctgcgggcctcatgctcgtcgagttcttcgccccctgaatgattacggacctgaagccaaa

SEQ ID NO: 610029 - DNA, 101 bp, Homo sapiens
ggccgcgaaccgcagtatcatgctggccaagaagatcatcattaaggacggaggcacgaaattattcagcagaccattatttacaagaagcaaaaaagcta

SEQ ID NO: 610030 - DNA, 74 bp, Homo sapiens
atggggctgtttggaaagacccaggagaagccgcccaaagaactgatctattaatgagatgaagcggttggaag

SEQ ID NO: 610031 - DNA, 88 bp, Homo sapiens
attcttttcaggggtgcaagagaagttgcttgatagatttgactatgatgatgagccagaagctgtggaagaatcaaagaaagaggat

SEQ ID NO: 610032 - DNA, 100 bp, Homo sapiens
gctgcgctcctttctggccggaggagctctttgttcaatgcctagccacctattcctacagacacggcagtggaaaggaaaagaaagtactgacttacag

SEQ ID NO: 610033 - DNA, 75 bp, Homo sapiens
gtcattgcccgctaccgctaccagcaagtggtggtaggaaacgtgcagaaatgaaagctcattagcatctacact

SEQ ID NO: 610034 - DNA, 82 bp, Homo sapiens
tacgcccgcagccatggcaaaaagctaccacctgccagtctgaagcaccgagatgcagacatggccgcttaccaacaagaag

SEQ ID NO: 610035 - DNA, 98 bp, Homo sapiens
tgggtctctgacccccatccggccctcatggctttgtgtctggagctcttgaagcaatgcgcagcccagcctcgaaatgcagaacgacgccggcgagt

SEQ ID NO: 610036 - DNA, 75 bp, Homo sapiens
aagagtatcccttgcagtgttgctgcttatgtgccaagaggtagtgatgaagcttgtgagaagaatgagttgatg

SEQ ID NO: 610037 - DNA, 100 bp, Homo sapiens
gtgttccaggtgcgaaaggtgcaaggcaccaacttgggcaaaatatatgccatgaaagtcctaaggaagcctgtgccatatttcgggaggctgcaaggag

SEQ ID NO: 610038 - DNA, 75 bp, Homo sapiens
cttgtacgcctaagggatgcttggaactcatcaaagagacagtctcttcttggaaaatgtatcacaagtgaagga

SEQ ID NO: 610039 - DNA, 75 bp, Homo sapiens
ctgaaggcctccagcaggacctccgccctcctctccggctttgccatgattgagaggatccagaatccagatctc

SEQ ID NO: 610040 - DNA, 75 bp, Homo sapiens
aacaacgtgggccttatcacactggctaagcaaggatatcctgaaggatactatagttccaaaagtggatggagc

SEQ ID NO: 610041 - DNA, 75 bp, Homo sapiens
cttacgctcagggcttggcctcccctcaggtttgctgactgcgccatattgttgctgacacaactggagactgga

SEQ ID NO: 610042 - DNA, 101 bp, Homo sapiens
ctctccaagatgcagttttttgatgctgaggagctcctggtcgatgaagaggatgatgtttttggtgaagttgttgaaatggatgaaaacaacggactttt

SEQ ID NO: 610043 - DNA, 90 bp, Homo sapiens
ctgagtgccgtggatgcccattcccagatcaacatgacccactacatccagcacctgtcatttggggaggactatccaggcattgtgaac

SEQ ID NO: 610044 - DNA, 101 bp, Homo sapiens
gtcgggcggggcggcggcgctgacaggtgttgacagctcttctaccacaagcagtgcttctccaatgcccaacagttatgatgccctggaaggaggcagtt

SEQ ID NO: 610045 - DNA, 83 bp, Homo sapiens
aagacaaaagaaatagcaagaactgaggagcaccaggagacgcaactcatcgggagtggagtcaacatatcaatggagcaagt

SEQ ID NO: 610046 - DNA, 50 bp, Homo sapiens
atttcacaactaaaagtgctcagcttgtggacaaatgtataggatcaaga

SEQ ID NO: 610047 - DNA, 82 bp, Homo sapiens
gatacaaatttttggatgatgatggatccatttctcctattgaggagtcaacagttgatctctctaatgtattagatcttca

SEQ ID NO: 610048 - DNA, 82 bp, Homo sapiens
ctttggttttttcgtgtggaagatgattcttctaacagagaaaatgccattgaggatgaagaggaggaggaggaggaagatg

SEQ ID NO: 610049 - DNA, 100 bp, Homo sapiens
gaacaactaactttgaggggtttcttgcaaaacgcttctccggctgcaccctgaccgatgggaccctgagctctctttacgagaaaaggaagatcctggc

SEQ ID NO: 610050 - DNA, 90 bp, Homo sapiens
aaatcccagatctacctgacgggcctgcgagggttgaagattgtgaagcaatagcctaagggttgagctccaaagaatgaaaatttcccg

SEQ ID NO: 610051 - DNA, 100 bp, Homo sapiens
ccgagatcgagacaaggatgggcacagacgggacaaggaccgtaaacgatccagttccctgaatgtggtttctacggaatgtatgataagatcctgcttt

SEQ ID NO: 610052 - DNA, 100 bp, Homo sapiens
ggctgagcaccgtctcccagtacgaccgggacaagtactggaaccgctttcgagacagagccttcaacgccctgtgtcacagcacccacttgtacgggcg

SEQ ID NO: 610053 - DNA, 99 bp, Homo sapiens
ctggaaaagaccctcttcagacttgaacaagggaattgacataggggatagcttaactattccagatgaattcacggaagacgaaaaaaaatccggaca

SEQ ID NO: 610054 - DNA, 100 bp, Homo sapiens
cgacaggacagaaagagtgtgcagcggattaaagctaaagacatagttcctggtgatattgtagaaattgctgagcagccagcggcggacaatccttgaa

SEQ ID NO: 610055 - DNA, 50 bp, Homo sapiens
aaggattcaagggaaccttccctgatgcgaacccagcaagcgtagtcgag

SEQ ID NO: 610056 - DNA, 101 bp, Homo sapiens
tcaatattgtcttaacatgcttcaaataaatcaggttagaaaatggatttctgactggaatctcaccactgaaaaaaagcacacccttttaagactacttt

SEQ ID NO: 610057 - DNA, 74 bp, Homo sapiens
ggcagaggtggaggcgctttgaaagactctaaaatagagctcaagcttgagaagagagaaccactaaagggcag

SEQ ID NO: 610058 - DNA, 82 bp, Homo sapiens
gcagaccttcgttgccctctgtgccacagacgagccaaactcaggctgtaccttgagcagctcaagcaactggtgcccctgg

SEQ ID NO: 610059 - DNA, 100 bp, Homo sapiens
aagaacaaaattatccagctttgcttggacctgaccactacagtccagaaggctatttttatgattcccacaaatccaccaccaacattcagaaagccag

SEQ ID NO: 610060 - DNA, 82 bp, Homo sapiens
ggaagcgttcggaaatggcaacttgcgcggtggaggtgttcgggctcctggaggacgaggatttcagatgcatgccaggttt

SEQ ID NO: 610061 - DNA, 96 bp, Homo sapiens
agcaactcagtacggggctcatgagcagacgcatgcgatgtatggctaccacatactgttgattgtgatgaaatgccagttgaagcacctgtcctg

SEQ ID NO: 610062 - DNA, 74 bp, Homo sapiens
agtgccctggggatcactgtccaccaggggagaatctacgtccttgcaatgagtcggatgtggtcgagagcctg

SEQ ID NO: 610063 - DNA, 90 bp, Homo sapiens
tggacccagctgagcgggcggtcattcgcatcgcaggacatccggaacacggtgggcaacgtgcccttggagtggtacgatgacttcccc

SEQ ID NO: 610064 - DNA, 80 bp, Homo sapiens
ttgaggtgcttgtcggtctggactgatgaaaatccatatgggtaagatgatggcatgcaaacactgcagtgacattttca

SEQ ID NO: 610065 - DNA, 75 bp, Homo sapiens
ggcgacaccataccctgctcttattaagaatgtactcaagactgatcttctaagttcactggaaatgattttatc

SEQ ID NO: 610066 - DNA, 75 bp, Homo sapiens
aggattccaagtaactcttatttgactggtcaaacaaatggattttacagaggcttacgcggacacgtgctctac

SEQ ID NO: 610067 - DNA, 100 bp, Homo sapiens
gaaagctgctcatgaactcggaacagcgcatcaaccggatcatgggctttcacaggcccgggagcggcgcggggaggaatcaatgctgctctggggaaca

SEQ ID NO: 610068 - DNA, 100 bp, Homo sapiens
ctggcgcagcccacgctcatgatcgacttcctcacccgcgcctgcgacctcgagcgcatcagcgaggaggtggggctgctgcagctccttggggaccccc

SEQ ID NO: 610069 - DNA, 82 bp, Homo sapiens
tgaagacttccctgaagaaagttgtgaaggaggtccaacccagatcaaccaagtggtgagtcatccaaaccagcctctcacc

SEQ ID NO: 610070 - DNA, 115 bp, Homo sapiens
cagcggcaaaacaactttcccatgtttccctctcctaaagcctggaatttcagagggcacttttccagccattaactccaggctctcgagaatttgaagatgttgtaaatattct

SEQ ID NO: 610071 - DNA, 83 bp, Homo sapiens
ccggaggggagggccgggcgcggcggcggcggcggtggaggagccggagcataatggaagcggggaagggctcaacagcccca

SEQ ID NO: 610072 - DNA, 50 bp, Homo sapiens
ttggactgaacttaaatactgatagctctctgatgtaaaggatggagtaa

SEQ ID NO: 610073 - DNA, 50 bp, Homo sapiens
atttaatcatccatttcatcaaaaaagatgttgatgttagtgaagattca

SEQ ID NO: 610074 - DNA, 76 bp, Homo sapiens
cgcatctacaaggatggcaaggtgttgtacacaattagaggcggggtttcaccatgttgcccagactggtcttgaa

SEQ ID NO: 610075 - DNA, 75 bp, Homo sapiens
ccggagcgcttgaaggagctgcgggcccagaataaagagaccagtgttttagctgctgcaaaagtgattgacact

SEQ ID NO: 610076 - DNA, 100 bp, Homo sapiens
gtcgggctcagcctcggtgtcccccagttcggcaaagctcttatggaaggcatggcagaagatgagacagggaaagaggacagcacagagtcacagccag

SEQ ID NO: 610077 - DNA, 100 bp, Homo sapiens
gccatttagtaacttctttgcaagcgagacggtcatctgttccagccgggccactgtgatgctttatgatgatggcaacaagcgatggctccctgctggc

SEQ ID NO: 610078 - DNA, 102 bp, Homo sapiens
gccgcgaggtgctggcggacttccagcgccgcgagccctacaagttcctgcagttcgcttacttcaagtttgaaaaagtaccagaaggtcctatccctccat

SEQ ID NO: 610079 - DNA, 75 bp, Homo sapiens
tcggccctcattctgcacgacgatgaggtgacagtcacgacaggcaggattgaacccaactaccccaaggtctgc

SEQ ID NO: 610080 - DNA, 87 bp, Homo sapiens
tccactgatagaaatcatttccatcaataccgggttgtctgcattcaaaagagcattctattaaagctaccttaatttggcgcttat

SEQ ID NO: 610081 - DNA, 83 bp, Homo sapiens
gttgggtgtgctgggccccaccatcaaaggatttccatcaccaaggagtaagaagaccttcgggcagagactgttgggtatgc

SEQ ID NO: 610082 - DNA, 137 bp, Homo sapiens
gcgctgctggactacaaggacgagttctcgggcagaggcgacctccccgcgttccatgcgcacagggacagggagcgcatcagcgaggaggtggggctgctgcagctccttggggaccccccgccccagcaggtcac

SEQ ID NO: 610083 - DNA, 101 bp, Homo sapiens
ggaaagagataggcgcatctctggagttgatcgttactatgtgtcaaagggtgtgggccgaagatatgctcatgtggtgttgaggaaagcagacattgacc

SEQ ID NO: 610084 - DNA, 75 bp, Homo sapiens
ttccaacaacaattccgatggcaaagccgttgccaagtggatgacaatcgagcagcagaagaatggtgtgcctac

SEQ ID NO: 610085 - DNA, 100 bp, Homo sapiens
cggaaaaggaacagattgttcctaaaccagaagaggaggttgcccagaagaaaaagagacctcagtatgaacaacatcagtcagctgctcccgaatcccc

SEQ ID NO: 610086 - DNA, 50 bp, Homo sapiens
cgttcctcaaactccgtgaccagattgtgtcagcagctaaggtgtgtgga

SEQ ID NO: 610087 - DNA, 90 bp, Homo sapiens
ccaagactctcctctgaggtagcagcccccagagaaggttagctgttctctgatggtcctaatgccccgagccaagttccactggttctt

SEQ ID NO: 610088 - DNA, 96 bp, Homo sapiens
ctgacttggaccctggaaaacctggccctcttcaatttctgacaaaaggaaagtggagaatgaggacatgaataaagaccagatcttgctggaaaa

SEQ ID NO: 610089 - DNA, 83 bp, Homo sapiens
cgaggaaaaggaatcgtatcgtatgtccgctatccagaacctccactctttcggcggtaaccagcgtgagctcgcccgccaga

SEQ ID NO: 610090 - DNA, 100 bp, Homo sapiens
agtgtggctctggatagcaccttatggacagctggaagctctttgacatcctttggaacagaaacatcaaacagtggtaccttaccccaaagtagtgcgg

SEQ ID NO: 610091 - DNA, 100 bp, Homo sapiens
gagcccggcgcctggctgagtaatgcgagccacccctctggctgctcctgcgggttccctgtccaggaagaagcggttggagttggatgacaacttagat

SEQ ID NO: 610092 - DNA, 98 bp, Homo sapiens
ctggcggagaagactcgaacggctcccacagccgggcgttgggggaaagcagtcctgcgttaactgcggccgggaggctatgagcgagtgcaccggct

SEQ ID NO: 610093 - DNA, 74 bp, Homo sapiens
tttgcctttgtaacctttgacgaccatgactccgtggataagattgtcactgacaatggcaccatgcatctttg

SEQ ID NO: 610094 - DNA, 75 bp, Homo sapiens
agtgtgacccaaggcctgtggacaggcagcaagcatctaaagttgagaaggtgttttttaccactgcagtaccag

SEQ ID NO: 610095 - DNA, 100 bp, Homo sapiens
tcgggggactcctcgacaccaagggctacggcattggcatgccgctggtggccagacgcaccgggtctgcctcctcatctgcaactcacccccatacttg

SEQ ID NO: 610096 - DNA, 90 bp, Homo sapiens
ccgcctcctcctccccatttccgcgctcccgggaccatgtccgcgctggcgggcgcatattaaatttcctattgactacccctattcacc

SEQ ID NO: 610097 - DNA, 125 bp, Homo sapiens
ccggcccacccgcccggccgccgaggagcgggaggaggacgggaccccggcgcccccaccccatccccgggaggggcatggtctagtggcccagtcaggacgcggaaacactccctggaggttct

SEQ ID NO: 610098 - DNA, 51 bp, Homo sapiens
aaggattccaagtaactcttatttggtgtttaaaagacacaatcccagcac

SEQ ID NO: 610099 - DNA, 100 bp, Homo sapiens
ctctgccaaaacccagggctggaagatgtggcagccggccacggagcgcctgcagacctgtcatttactccatcctttatagtgatgctacaggacgaag

SEQ ID NO: 610100 - DNA, 80 bp, Homo sapiens
cgactcgctacgcgggtcttgcgagatatctggccgcctctgccgcagctggagtacaaaatggttcgttacatcagaag

SEQ ID NO: 610101 - DNA, 57 bp, Homo sapiens
cattgcgccgtacattcgagagtttgagggctccaaggtgggcaaactgaccctcaa

SEQ ID NO: 610102 - DNA, 74 bp, Homo sapiens
cttcaaacattcgtctcggaaaccccgcctcttacagtcacgagatcccaagcagtattgaagatatatttaat

SEQ ID NO: 610103 - DNA, 83 bp, Homo sapiens
ctcggaggcggcgggcggaggcggcggactcagcccacctgcacccaggtgaaataaacagctttattgctcacacgaagcct

SEQ ID NO: 610104 - DNA, 100 bp, Homo sapiens
atgaggtggatgaaaaaagagctttcaagacaaatggcaaacctgaagaaaaaaaccatgaagctggaacatcagggagttcccattagacttgaagttg

SEQ ID NO: 610105 - DNA, 50 bp, Homo sapiens
atcaccgtggctccgtaagaatctgtagagtagctgccaggaggacttgg

SEQ ID NO: 610106 - DNA, 82 bp, Homo sapiens
tcctgggatcagatgtgcattgaggtattagaaaactactcggatgctccaatgacaccaaaacagattctgcaggtcatag

SEQ ID NO: 610107 - DNA, 100 bp, Homo sapiens
cctgagacccggacagtggcagtgaaacaggttctgctccagacgagcccttaccacgttgactcactcctgcagctcagcgatgcctgccgctttcaag

SEQ ID NO: 610108 - DNA, 100 bp, Homo sapiens
acttgttgatggatgggttatctgctgaagaaaaatatggacttcatcttaataatttatgtgcacaccgagttgatctctctaatgtattagatcttca

SEQ ID NO: 610109 - DNA, 100 bp, Homo sapiens
gtggccaacacggtcttgctgaaagccagggaaggttgtaggtcataaagaaggtctggatgttatggagagagctgatcctttattccttttaattgga

SEQ ID NO: 610110 - DNA, 97 bp, Homo sapiens
gttttgaattcacgcttatggtagtggctgttcgggggtcttgtctggattttggttgcctcctccaatgttcctctacctctactacaaggatggg

SEQ ID NO: 610111 - DNA, 100 bp, Homo sapiens
gaagtccagagctgaggactgcctgtttgcagacatgaagaggagcatcggcggcgtgaggaagaaatgatccgacacagagaacaggaggaactgaggc

SEQ ID NO: 610112 - DNA, 90 bp, Homo sapiens
cttttgtgcaagatgagcctcaagtgcttctgcattacaaggaatgttacggcatccggagtcatccctcagatttctctgatcatgggc

SEQ ID NO: 610113 - DNA, 100 bp, Homo sapiens
tcgctgcgtcacagtccatggctccaatggcttgttgatcatccaattatgatgggttttgaaccccttgtgaaccagaggctacttccacctaccttcc

SEQ ID NO: 610114 - DNA, 90 bp, Homo sapiens
cggcttatcgaacagagccgggagttcaagaagaacactccagaggtgggcagtgtcaaaccgggaaatgcttatagctcaaaacagctc

SEQ ID NO: 610115 - DNA, 80 bp, Homo sapiens
ggccaaaaataggactaagtcttaaactgggtgcggccgggtgtgtggcaacattacttcatgatgcagccatgaaccct

SEQ ID NO: 610116 - DNA, 100 bp, Homo sapiens
aaacgtaatgaggatgaagattcaccaaataagctatatactttggttacctatgtacctgttaccactttcaaaaagtttgaggaagaggcaaagaacc

SEQ ID NO: 610117 - DNA, 85 bp, Homo sapiens
ggacttctcccgcagcgacgcggctggcaagactgtttgtgttgcgggggccggacttcaaggcatgttatgttacccagagaac

SEQ ID NO: 610118 - DNA, 100 bp, Homo sapiens
tctgtgaggtgtgcggcaggagcgaccgtgaggacaggcttttgctctgcgacggctgcgatgcgggacccgggaaaaggagaagatgaaggaagccaag

SEQ ID NO: 610119 - DNA, 83 bp, Homo sapiens
gcattgatcaggctgtggtcttcatcgaagatgctattcagacttcccaagtaagaagcggaagaggagccgctggaaccaag

SEQ ID NO: 610120 - DNA, 89 bp, Homo sapiens
ctggcatcctttaagaatgagggtgccgaaccagatctaatcagggctgctgcaccgagccttcagcgttgtcttgtttaacaccaaga

SEQ ID NO: 610121 - DNA, 100 bp, Homo sapiens
taaactcggagtggcagactgacaactgtgagacatgcacttgctacgaaacagaaatttcatgttgcacccttcccagttgtgacatgatggaactaag

SEQ ID NO: 610122 - DNA, 101 bp, Homo sapiens
gtggttacaagtacagactctggagccagactgcctgggtttgaattgtgcggtttcaggtttgaagatgccgcatttggattggatgaattccaaattct

SEQ ID NO: 610123 - DNA, 101 bp, Homo sapiens
agcaaaaccaacgcctggctcggagcagcagcctctgagataacgaaggaggcccaacttcattcaataaggagcctgacggatttatcccagacggtaga

SEQ ID NO: 610124 - DNA, 100 bp, Homo sapiens
attaccccactctttccgccctaatggaggtctccagtttagcacccccccaggcagcagcagcagttttcatctctggatgacaagccccagttcccag

SEQ ID NO: 610125 - DNA, 60 bp, Homo sapiens
atcatccgctatgcaattggggtgatggcccgctccctctccccacccccggagctggaa

SEQ ID NO: 610126 - DNA, 75 bp, Homo sapiens
agggaccctgtgcaggcctgctcctccgtttgcaaggaattgaatgatctggcacgggaccctccagcacagtgt

SEQ ID NO: 610127 - DNA, 75 bp, Homo sapiens
gacaagaaactagagcaaataaccgttttgaaattgcggtgcgtctttctacgtgaataggattttgtggctggc

SEQ ID NO: 610128 - DNA, 82 bp, Homo sapiens
attctggtggggagatgaacccaacctagtgggtgtaatacatcatgaactgcagggtgacatttacaaagaggaaatttgg

SEQ ID NO: 610129 - DNA, 101 bp, Homo sapiens
ctggggaatctggtcgtccagggcaaaaggtggtggtgaccaaggcggccatgattgtgaaccagctgtcgaagaaggaggcgtcgcggcgggccctgatg

SEQ ID NO: 610130 - DNA, 98 bp, Homo sapiens
ccccggagaaggatcctgcagcccgagtcccgcctcccggcatggtgctcaaggccttcttccccacgtgctgcgtctcgacggacagcgggctgctg

SEQ ID NO: 610131 - DNA, 75 bp, Homo sapiens
agatattcctgcgggacatagaacaggtgccacaggacgaggcacggatccagaaggtgaccaagcgtctgcaca

SEQ ID NO: 610132 - DNA, 100 bp, Homo sapiens
cctgcttctcgggctgctggtgctgtgcgcgaggctcctcactgcagcgaagggtgactctgacatcattagaagcatgccagaacagactggtgaaaag

SEQ ID NO: 610133 - DNA, 83 bp, Homo sapiens
agagtatttgaagtctgtgtcaaacatccatatcataagtggaattttggagatattcaaagtgctactatatcggggccaca

SEQ ID NO: 610134 - DNA, 100 bp, Homo sapiens
tctaacgctgcctttgctttaaaacagtattacttgcgatcctattgatcatcgcttcagttattgggatcattgtctataggctctcggtgttcattgt

SEQ ID NO: 610135 - DNA, 97 bp, Homo sapiens
gcgaaggtgcgggaacgtccactcccgcgcgcccctctcggggaccagggcggcctcccaggaggagcttggaaaaatcagttgctgccgtctgaca

SEQ ID NO: 610136 - DNA, 100 bp, Homo sapiens
gcagcatctggttcagctttatctatattttttgactgctctgctcctctatgctggacatcaaatttccagcaaatggttatgagccttagagtttctg

SEQ ID NO: 610137 - DNA, 126 bp, Homo sapiens
cccttggaaccatgatgcattgtcagaccctaaaggatcaaccctctgcatacagtaaagcaaatttagcgatcaacccagcggccttgctgcccacagcggcttcccagatctctgaagtaaagc

SEQ ID NO: 610138 - DNA, 100 bp, Homo sapiens
gtaatgctggtggtctgcatcaccaccggatcaacttcgacaaataagaaaaaagagtgccggcgggaccaccgcccaccgtgtgctcaggaggcgcccc

SEQ ID NO: 610139 - DNA, 75 bp, Homo sapiens
caagatacctagcgtcttctctgggcaagaatatcacggcatgggcatgagtagcttgaaactgctgaagtatgt

SEQ ID NO: 610140 - DNA, 50 bp, Homo sapiens
cttcatcctggatctgatgaacggcaggcattccagaccctccaaacatg

SEQ ID NO: 610141 - DNA, 103 bp, Homo sapiens
gaacacccaatctatggcttcccttccgttttcgcgtggttcttttgcaagagcatgcaagcggcaagatgtcctacagatgaattatctttaaccaattgtg

SEQ ID NO: 610142 - DNA, 51 bp, Homo sapiens
cagtatttaaagctattcaaccagataactctcagaaattgagcccaatgt

SEQ ID NO: 610143 - DNA, 101 bp, Homo sapiens
cttatattcaggagcatttgttacaaatttctgaagaggaggagtttcttaagcttccaaggctaaagaggcctgttttggacccgtttattggctatgat

SEQ ID NO: 610144 - DNA, 51 bp, Homo sapiens
cgacctggagctgggccaggccgtggagtacttcctcgcgtattgctaaag

SEQ ID NO: 610145 - DNA, 51 bp, Homo sapiens
tgcagaggaccatccagtgtgcaaaagggcgccctgcgtccggcagaggag

SEQ ID NO: 610146 - DNA, 50 bp, Homo sapiens
agcaaacagtctgcctctgctgtgcaggtcctactgctctgttggctcat

SEQ ID NO: 610147 - DNA, 100 bp, Homo sapiens
caccccctggttatcctcatatcccacaggcactcagcactccaggaacaacgatggcaggactatcctattaagtgtaatctcactgcttaatgagccc

SEQ ID NO: 610148 - DNA, 74 bp, Homo sapiens
tggtgctggaaggggccagtctggagacagtcaaggaagatgttaccgagtacttcagtgaattccttagtgca

SEQ ID NO: 610149 - DNA, 101 bp, Homo sapiens
taatggatgaaaggaaccgacaggcaacagcattattgagaaaagcccttacagaagagtgtggccgtaggtcagctattcacagtagtgaatcatcttgc

SEQ ID NO: 610150 - DNA, 74 bp, Homo sapiens
ggcactatcaaatctagatgcagctacttatcaggtgaaaaaccatttcgctgtgatgaatgtggtatgagatt

SEQ ID NO: 610151 - DNA, 75 bp, Homo sapiens
ctcacacctttccaaaggacgcgaccataactctaaaagtctctgctttctatccgtcaagatgataaagtcgtg

SEQ ID NO: 610152 - DNA, 50 bp, Homo sapiens
aaagtctgttcgggccatgggtccaagctcagcgccggagccgggagcag

SEQ ID NO: 610153 - DNA, 75 bp, Homo sapiens
atttaattttagggtcctttatatagaagggagagtagggcagatgattctggaccagatgaagcctgaggagcc

SEQ ID NO: 610154 - DNA, 100 bp, Homo sapiens
tcagtctccacaccagcggcagcatgcatctgatgctctctctccagtccttgctgaagagactttccgttacatgaggtgtcaaattgagaaccaggta

SEQ ID NO: 610155 - DNA, 96 bp, Homo sapiens
gtctgcgatcctgaatgggggcggcgtgcccgccggggggctagtggccacgctgcagagcctcggtgccaagtcctgccctgccaacttcttggc

SEQ ID NO: 610156 - DNA, 98 bp, Homo sapiens
gcaggctttagggacacgtatttttgctttcagatcctggattgctgcagtatgaaaacccatggacaatcccgaatatgttgtcaatgacgagaatt

SEQ ID NO: 610157 - DNA, 100 bp, Homo sapiens
acgagctcatcagatgatgatgaagaggtttcagggagcagcaagacaatcactgcagagataccagaacatctgctcaaattaatgaccatgggggata

SEQ ID NO: 610158 - DNA, 82 bp, Homo sapiens
tctttctggcctggaggctatccagcgtgaccagcgccatgtccagccaggtggtgggcattgagcctctctacatcaaggc

SEQ ID NO: 610159 - DNA, 75 bp, Homo sapiens
agctgccagaggttccctccgagccccttcctgagaagatcccagatttttacataccgttgctcaaaagagggc

SEQ ID NO: 610160 - DNA, 75 bp, Homo sapiens
aagcacctcctgctccagtaattgttcccagtgacctgacagcagaggagcgtcaagaactggagaacatccgac

SEQ ID NO: 610161 - DNA, 75 bp, Homo sapiens
ccgtatgcacatgtgggtagaggacgtgttagacaagttcatgagtaacaaatgtggcaattattttggatctat

SEQ ID NO: 610162 - DNA, 100 bp, Homo sapiens
gcgcggggtgatcaccatgaacgaggagtacgagacgaggttcctgtgcaactcttcacaggctctggaatgtttttgtcaggcagcatctgaagtaggc

SEQ ID NO: 610163 - DNA, 90 bp, Homo sapiens
gcgcgggctgcgcaccaagtgcgctgtgtccaacgacctcacccagcaggagatacggaccctggagccatctcttcctgtactctatac

SEQ ID NO: 610164 - DNA, 76 bp, Homo sapiens
gccgggtggagattctcagtgaaggaaatgaagtccgaccgtataatagacgctggccccaaaggaaactactctc

SEQ ID NO: 610165 - DNA, 97 bp, Homo sapiens
ggagaccagcagtgcagtcatgtgcctggaccttgcagcttcctggatgaagtgccccttggacagggaaaatgtttcaacgtgcgcaagagttgcg

SEQ ID NO: 610166 - DNA, 87 bp, Homo sapiens
tgtattctgaagacagcgccccagcatttgccatcttcaagtttgttcaggcctaagatctggcaaacttggtgaacagtgtgaagc

SEQ ID NO: 610167 - DNA, 88 bp, Homo sapiens
agtttacacatctcacccaattcagagacaaagcatggaggacacaagaatgggaggaaaggcggactctcaggaacttcattcttca

SEQ ID NO: 610168 - DNA, 88 bp, Homo sapiens
tcctgacgaaattgaaattacctccgagggaaacaagaaaacatcaaagaggtctagcaaagcaccaaggatgacattgatcttgatg

SEQ ID NO: 610169 - DNA, 90 bp, Homo sapiens
ctcgcctctccgccccgcgtccagctcgcccagctcgcccagcgtccgccgcgcctcggccaaggcttatttataaagctgaatcctgct

SEQ ID NO: 610170 - DNA, 80 bp, Homo sapiens
tttacagtcgaagctctgtaagaagaaaacactttgtgggccaggttattgagccacatgatatatcagtggcactcaac

SEQ ID NO: 610171 - DNA, 100 bp, Homo sapiens
acagcatcctgggcgagctcaacgggcccctgcgggagggcgtgatggtgggcatgggtcagaaggattcctatgtgggcgacgaggcccagagcaagag

SEQ ID NO: 610172 - DNA, 100 bp, Homo sapiens
ctttctcttggttttgtccgtctggtggtctcgaacctgggactcggcgaatgcggattcgatcattcacatcggatcagtttgtgtgtggagaaacagt

SEQ ID NO: 610173 - DNA, 100 bp, Homo sapiens
tggccaattgtacaggcctttgcacttgagggcattggaggggatggattttttaccatgaaatatgagaggatgtccggcttccagatcaacctcaacc

SEQ ID NO: 610174 - DNA, 100 bp, Homo sapiens
ccagagagccctgacccggggtcactccgtcgccgttctcctcttgtctacgtgctggacccggtccatgggaagtgtatgtgtaagcacaacacagcag

SEQ ID NO: 610175 - DNA, 80 bp, Homo sapiens
atgtgaagagacatgagacagtagtcaaatactcagacttaattcagtgcacaaatgagatgaatgtgaacatcccacag

SEQ ID NO: 610176 - DNA, 75 bp, Homo sapiens
tccatggcttttgtgctcattttggttctcagtttctacgagctggtgtcagcaaaccagtccagctacgggggc

SEQ ID NO: 610177 - DNA, 100 bp, Homo sapiens
ggcggctagaagcccttaggaaacaggaacatcatttacagcgagcaatttcagcacagcaagtgtttagagaaaaaaaagagagtatggtcattcctgt

SEQ ID NO: 610178 - DNA, 109 bp, Homo sapiens
tcgagatgatagtcaactaaatggagattctagtgctttgcttgctcttcgtcagattgggcagaggacgataagcactgcttcccgcaggcattttaaaaataaagtt

SEQ ID NO: 610179 - DNA, 98 bp, Homo sapiens
tcgttcatgaggcaccatctcaggagcagaagaacttggctgccattcaaatgaggaaactgaggatcagagggattaagtacttcccaaaaccatac

SEQ ID NO: 610180 - DNA, 51 bp, Homo sapiens
gggaagtgagacttgttaaacttgaaagcaattctgtggtgttcttggtca

SEQ ID NO: 610181 - DNA, 100 bp, Homo sapiens
aatttttgtagataccaacttatacttcctggcgctgaccttctttgtcgcagcgttccatggggggccctcagcctcttggccttgaacgggctgttca

SEQ ID NO: 610182 - DNA, 87 bp, Homo sapiens
ggcaccgcgcctgctgccgggttgcgctccgtgcacctcttgcggtgtttcctgaggttataggcgggtgtttgaggagtacatgcg

SEQ ID NO: 610183 - DNA, 75 bp, Homo sapiens
agaagtgtgctcaaaatgtgaagcaatttgggacggataaaagaatcagagtgtctcaacccttgacaagaggac

SEQ ID NO: 610184 - DNA, 75 bp, Homo sapiens
ctctcccaggccacaagacatttcctgctcggaaccttgtttactaattgaaaccacccctactcctaatccccc

SEQ ID NO: 610185 - DNA, 101 bp, Homo sapiens
ctcttgaacatttaccgtaaccctcaaaactcttcccagtctgctgacggtttgcgctatgaggaaaatgaagctcgggctggttaactgacttgctcagc

SEQ ID NO: 610186 - DNA, 98 bp, Homo sapiens
gaaaatttacttctggatgccaatctgaatatcaaaatagcaggttagaagtttcatgcattcaaataatggcaccatttctgtggtatctgtattgt

SEQ ID NO: 610187 - DNA, 75 bp, Homo sapiens
tgatcagtgatccttcacgttgggagatcatgaatcagacagataaaaatcaacaagaaatcccatcatacctta

SEQ ID NO: 610188 - DNA, 90 bp, Homo sapiens
ccatgcagagcagcccctcccctgctcaccctcagctcccagtcctacagacacaggaatttgatccccagcaggagcgggacttttaca

SEQ ID NO: 610189 - DNA, 83 bp, Homo sapiens
gctggatattgagatggaaggatgactatgagtatgagctattatagaaaccatgtcttattgccagcagttttgaagatgac

SEQ ID NO: 610190 - DNA, 83 bp, Homo sapiens
agctcgcccagcgtccgccgcgcctcggccaaggtgagtgaactgccttcctccgtcatccataaggatgatttagagttaaa

SEQ ID NO: 610191 - DNA, 50 bp, Homo sapiens
gccgcgcacctgccttcgctcccgcaccgattctgtttcctaaaatgcca

SEQ ID NO: 610192 - DNA, 76 bp, Homo sapiens
tgtgaggcgttatgctgttgcccggttgcgacaggccgatgatgagattcttcgctgctgctgccttaccgccgag

SEQ ID NO: 610193 - DNA, 87 bp, Homo sapiens
acttggagaagctcttgttggcaaccagcagggaactttcaggaccagcttcgaatggagggatcagccagacaaacacctatgacg

SEQ ID NO: 610194 - DNA, 75 bp, Homo sapiens
tgctctgggaccggaggagacatcggcctctgcaggcttgccgaagaagggagggctgaagaagatgcagagcag

SEQ ID NO: 610195 - DNA, 89 bp, Homo sapiens
atttctttctcgctgatcgcctaacttctactgacgaagcttggaagttgcagaaggtccctccagctacaaggtgggcaccatggcgg

SEQ ID NO: 610196 - DNA, 98 bp, Homo sapiens
ggagaattcaacacaggtgtgctgcctcctctcctgccaggtgtgtggctgcacaggagtcttgctgatggacaaggagtagatgaacctctttcaga

SEQ ID NO: 610197 - DNA, 100 bp, Homo sapiens
ccgggtcattgaggacaacgagtacacggctcgggaaggtacctgcgcgccctgtacctggggctgcagagccgctggcgcggggagcggctgcggcgcc

SEQ ID NO: 610198 - DNA, 100 bp, Homo sapiens
cgggaagtgaggagagcccccattggaccagtgtttgcttagctggacccacaaaccgtggagaccaagaactggcacacggacgtgattgagatgaacg

SEQ ID NO: 610199 - DNA, 83 bp, Homo sapiens
cgacccgcggcggaagggggacagccgagcccggagcccggagcccgggcaagagctggtccagttacaacacagggatcaca

SEQ ID NO: 610200 - DNA, 100 bp, Homo sapiens
aaagatttgagctacgcctgcgcagagggcaggaactgctgccacaacctcaggctgggcaccaaacacccgtgcccgccaatgcggcccagcccccgga

SEQ ID NO: 610201 - DNA, 88 bp, Homo sapiens
ccccaccatgtcagacgcagccgtagacaccagctccgaaatcaccaccaagattgacgagatgcctgaggctgccgtgaaatcaaca

SEQ ID NO: 610202 - DNA, 75 bp, Homo sapiens
cgcccccttggccagccaactggacagcggagcacgatgattgataggtcacccaacctgcctgcagtttaccct

SEQ ID NO: 610203 - DNA, 74 bp, Homo sapiens
tggatcgctgtgatcgtcacttggtcccagcacacctggaaagttctgcaaggcctcagctacagaaagcccag

SEQ ID NO: 610204 - DNA, 100 bp, Homo sapiens
gagtaaaccacagactacgagggagtttgacagctattaaaaccagggctccacagttaggagggtggctgaggtcctggaaggcaaaggagcagggaag

SEQ ID NO: 610205 - DNA, 90 bp, Homo sapiens
atctgttggattctaatgcagttcatcacatcattcatgattttcagattgcagcccgagagctcaatatttattgccatttagatcaca

SEQ ID NO: 610206 - DNA, 76 bp, Homo sapiens
atcttagtacaaaacgtgttaaaggatcaaggtggtcggacattgtgtggtgtaatgaggattggcctggttgcaa

SEQ ID NO: 610207 - DNA, 95 bp, Homo sapiens
aaagtgggaaacattgaaatcaagctgagatctgtatctgtggacctgaatgttgatccctcgcttcagattgacatacctgatgcgctcagtga

SEQ ID NO: 610208 - DNA, 100 bp, Homo sapiens
cggggacccaggagtttcctgtgtccagcgctgccggagccgcctgaggaacccaagccagaccgtctccttgtattgaaagtactatggaatgatttcc

SEQ ID NO: 610209 - DNA, 74 bp, Homo sapiens
ggcttaacccaggcatttggagggtttctcatttggcctgccttcaaagaaaaacctcggtatccaccaagtca

SEQ ID NO: 610210 - DNA, 100 bp, Homo sapiens
atgatgatcagccacgtgattttttcaagaagaggaatagggtgaatgaatctcatcagaaaagcagtggctttcctggagatggcatgcagcagccagc

SEQ ID NO: 610211 - DNA, 75 bp, Homo sapiens
agcctgtcctgcctccgctccctggtcctcaaagactgcaaagcccaggatgagaggttctcactcatcttcacc

SEQ ID NO: 610212 - DNA, 87 bp, Homo sapiens
ggcatgccccgctacgagctggctttaatcctgaaagccatgcagcggatccagacatttaatgtggatgcaccatgccagaccgtg

SEQ ID NO: 610213 - DNA, 100 bp, Homo sapiens
gaaagaggccctccaacatgaagaggaccttacacataggaagctcacacctggctccgccaaatccagacaagcagtttctgatctcccctcccgcctc

SEQ ID NO: 610214 - DNA, 100 bp, Homo sapiens
cttgatcagcgtcagcctctctgggaccttggccaaagtggaacaggtgaagttcgatgccacatccatgcatgtcaagcctcaggtggctgcccagcag

SEQ ID NO: 610215 - DNA, 90 bp, Homo sapiens
ggttgcttgggtgggacaacaagtccacaacctgcttctcacctacctgataggtgccgtgagcgatgtggagatgcaggaacactatga

SEQ ID NO: 610216 - DNA, 98 bp, Homo sapiens
ctggaatgtccgtaccttctttgtactcagccaggccatggatcatctgcagtcattcattgcagattgtgatcgtagaacagaagtggccaagaaaa

SEQ ID NO: 610217 - DNA, 75 bp, Homo sapiens
ctgaagagggaagacacgcggaaacagggtctccgtctctccaccgggggcttcatccttccagggaggagaaga

SEQ ID NO: 610218 - DNA, 100 bp, Homo sapiens
tctctattcctgctagataccttttcagtggagcaaagtgacaagtcaagtgcttctgctcctgatgtggatgacccagaggcattcccagctctggctt

SEQ ID NO: 610219 - DNA, 100 bp, Homo sapiens
gcagaatagacacttcattgttccagcttctcgcttcaagctcctgaaggcataaacttggaggaggcagtggagagagcatcctggtatcacagcttca

SEQ ID NO: 610220 - DNA, 100 bp, Homo sapiens
atatgaacctgagccttcagtcaagaccctccagcttgccttgaaggacgatgagaccttcgagatctccattcccttcgatgaggcaccccacctagac

SEQ ID NO: 610221 - DNA, 114 bp, Homo sapiens
caacactgggaggcttttgctcttctggatttagcatcaaccatctggatattgctccttcaggtcctgggcctatgtcaagaagtgcaaaaacaacatgtgtccaaatcgggg

SEQ ID NO: 610222 - DNA, 100 bp, Homo sapiens
ttcccctccatcggaagccagccaggccaaaacccagcaagatatgcagtccagaacgtactcaggaaaagtggggatttccaatgtgccactatttaaa

SEQ ID NO: 610223 - DNA, 74 bp, Homo sapiens
agtggtgctgtcagcgcggccgtcggagacatgggagacccggggtcggaatgggtgggaggacgctactcgct

SEQ ID NO: 610224 - DNA, 100 bp, Homo sapiens
atcccttgcctgctattggacactgcaaagctatctacccttttgatggactactgttcgaagatttttggaagaatactgagaacggcataaagtgaag

SEQ ID NO: 610225 - DNA, 100 bp, Homo sapiens
caagggcctccgtctggatttccaaggaagaatttcctctgaagcaccgtgtactaatggtcacttgatgtgcgctggctgttttatccacctactagca

SEQ ID NO: 610226 - DNA, 75 bp, Homo sapiens
cacgcacctgcagctctgctgagagagtgcaagccgtgggacctagaggatcaagacataatgggagcattttta

SEQ ID NO: 610227 - DNA, 50 bp, Homo sapiens
tatatcttccttgacagcaaaggatgttgcttcagagtgtgaagtcaaat

SEQ ID NO: 610228 - DNA, 100 bp, Homo sapiens
actcgtcatgctctttgtagcgtggtgcttctgttgctcacagatatggaatgtgcagatgtcccactattaactccaagcagcaaagaaatgatgtctc

SEQ ID NO: 610229 - DNA, 100 bp, Homo sapiens
gtccaactactaacttcagacccaagtgtatactctgaaagagcgatgcctccaggttgtccggagcctagtcaagcctgagaattacaggagactggac

SEQ ID NO: 610230 - DNA, 100 bp, Homo sapiens
ccaacggcaccagccctttgcacctcgcagctaaaaacggccacatcgacatcatcaggttcatcctcgatgactccgccttgtacctgtccgacaagtg

SEQ ID NO: 610231 - DNA, 100 bp, Homo sapiens
ttgtgaagaagaatttcgatctccgccctggggtcattgtcagtgttctaagaacggaagcatctgggctggatggaatttagcatcaagcagagtcccc

SEQ ID NO: 610232 - DNA, 100 bp, Homo sapiens
tcatgctatttccatttttactgaaggcatcttaatgatgaaaacgactttggttggcatcatcaagatgctgcagttggagaagaaacttgaacgtgaa

SEQ ID NO: 610233 - DNA, 98 bp, Homo sapiens
aagccaagtcaaaatattctccagaattactcaaataccgggattcttcagcaagcgcctgaaaggctccatcaagaggaccaaaagccagtcaaagc

SEQ ID NO: 610234 - DNA, 76 bp, Homo sapiens
agacctactggagcagtcgcagtgagtttaaaaaacttaattcagtgcacaaatgagatgaatgtgaacatcccac

SEQ ID NO: 610235 - DNA, 80 bp, Homo sapiens
aggtggagccaccagcctctccttggtatccgttacagcactgatgtgagtgtagatgaagtaaaagctttggcttctct

SEQ ID NO: 610236 - DNA, 49 bp, Homo sapiens
ctagaacaaggtcaagttgatgacaggtcttcaataaactcatcaggag

SEQ ID NO: 610237 - DNA, 99 bp, Homo sapiens
catcgtgacgggcctggtcctgcctcactttctgccatgactaagagctccctgaggcctctccagaagcagatgatgattattctccaccgtctaaga

SEQ ID NO: 610238 - DNA, 50 bp, Homo sapiens
tcaactaattggcatcatcacacttgttgaagatgcatatagactaccgg

SEQ ID NO: 610239 - DNA, 99 bp, Homo sapiens
acatgaagcgggcgcacagctatgctgaagcatcaagtgtacctgatttgtgaacctatcttgcttcagttggtttcctcctaaatattaggcagatgg

SEQ ID NO: 610240 - DNA, 95 bp, Homo sapiens
cagccaaccatgctcaacttcggtgcctctctccagcagactgcgaccatggtgaatccgggcagcagctcgcagccgcccccggtgacggccgg

SEQ ID NO: 610241 - DNA, 83 bp, Homo sapiens
ggagaagctgcggcgagtcctgagcggccaggacgacgaggagcagggcctgactgcgcagcatgcttttcacttccactgca

SEQ ID NO: 610242 - DNA, 100 bp, Homo sapiens
atttaaaagatgttttgaaggctcttggaataactgaaattttcatcaaagatgcaaatttgacaggcctctctgttgtatatgaacacagatcaagatt

SEQ ID NO: 610243 - DNA, 82 bp, Homo sapiens
cgagacctcacctgcatggacttccactatgagcgagggcggcactgctcacaggacggctacccatccgcaatggcttcta

SEQ ID NO: 610244 - DNA, 50 bp, Homo sapiens
catgaacggtggagtcttcaaaggagccaaaaacctgtatatcatctccg

SEQ ID NO: 610245 - DNA, 90 bp, Homo sapiens
ctgcaactcgagccaagaaagtgaagatggccaccaaatcatgccccgagtgcgaccaacaggcaaactaggcgtggcaactgctggctg

SEQ ID NO: 610246 - DNA, 108 bp, Homo sapiens
tctcgatgctggcctggagcagaaactgagctggaccactggagcctcggtgaggggagcatcagatccatgctgctgctgactcggagccccacagcttggcacagg

SEQ ID NO: 610247 - DNA, 75 bp, Homo sapiens
ggatgcagcccgggaaagagctagaatgtgctactcttcataatataataaaagggctacaacagaccattgaat

SEQ ID NO: 610248 - DNA, 100 bp, Homo sapiens
cagatttgcagatggctctgctgtagtacagggtatgttagagcccaccaaggaaccactgaaaccactttctgctgcagaaaaaatagcttccatcggt

SEQ ID NO: 610249 - DNA, 98 bp, Homo sapiens
cacacccctgtattctcctccgaaccccttcatgcccaaatcccggaaactccagcgtgtctccagccgtggagtcggtgatggaggcaacgagcttg

SEQ ID NO: 610250 - DNA, 98 bp, Homo sapiens
aggagctggagaagcacggagttcgggggatggcacagaatgggccattgatcttatcaacaatttgctgcaagtaaaaatgagaaagcgctacagtg

SEQ ID NO: 610251 - DNA, 100 bp, Homo sapiens
ccggccattactggtgccgggttgggcttctccagatgccggggctgggtccttcccaaggttgagccttccttgaatccagaagctggcaaacagcatc

SEQ ID NO: 610252 - DNA, 98 bp, Homo sapiens
tctcatcaattgaatgagtttttagcacagacgctccagaggattggaaccaaccagatggctgtgtgtgccaaagcacagaacaaacctttctatgt

SEQ ID NO: 610253 - DNA, 100 bp, Homo sapiens
tcagaacagccagccagtggcagtgcgaggtggaggaggcaaacaagtgtaatcgtttatacatacccacaggggggagccaaaagggtcatcatctctg

SEQ ID NO: 610254 - DNA, 90 bp, Homo sapiens
gtctggagagacacgccaggatggagagagcaaaagcaccatgactcctgtgaggatgcagcactccctggcaggtcagacctatgccgt

SEQ ID NO: 610255 - DNA, 89 bp, Homo sapiens
gctggctgaggaaatcgcctcccgagaagaagttgaggcgctatgtcaaaatgcagatcttcgtgaaaacccttaccggcaagaccatc

SEQ ID NO: 610256 - DNA, 75 bp, Homo sapiens
ctacagtttgccttgccaggtagaagaatcaggtaaagagaaatgtgtatgaccttacaagtatccccgttcgcc

SEQ ID NO: 610257 - DNA, 74 bp, Homo sapiens
aggaactcctgctgcaaaaatggaacaagttccagcacaagtggagaggagttcattacttcggaagtggtaca

SEQ ID NO: 610258 - DNA, 83 bp, Homo sapiens
ggccttccagtacacagacgagcatggggaagtggagggtctgaaagacctgctggtggggccaggagtggaactgctcttga

SEQ ID NO: 610259 - DNA, 74 bp, Homo sapiens
ggaagatggcggctgggttcaactgataccccaatgtccttctttgactttgtggttgatcctcattctttccc

SEQ ID NO: 610260 - DNA, 100 bp, Homo sapiens
cgcagaagggagaggggagcgaccctggggaccgactctggggaccctcgccgaagaggatcaggtagacagagctgataccttccctcaggtactaaaa

SEQ ID NO: 610261 - DNA, 101 bp, Homo sapiens
ccagtcctgacaatgggcagaacgaattcagtgatatcattaagtccagatctgatatggtccagacctgtacatgaataactttggttagtcagagtgaa

SEQ ID NO: 610262 - DNA, 100 bp, Homo sapiens
ggcctaccaggaggccaggggtgtcgccatggggaggaacatcatcgtgttctacggctcccagacggggactgcagaggagtttgccaaccgcctgtcc

SEQ ID NO: 610263 - DNA, 98 bp, Homo sapiens
cctggtcgagacaactatttttgaggtatctgaggctaccccacagcactctctggcattggtggatctaggatccggcttccaacatgtggcagctc

SEQ ID NO: 610264 - DNA, 90 bp, Homo sapiens
ctcatcctggtcactagcggactcttcttcgccttcgaggaagtgttcgccagttactacatgaaaagataagagatgcttatactcacc

SEQ ID NO: 610265 - DNA, 51 bp, Homo sapiens
aggctgaccagcaccagccctgatccagatgttcgacaaggactgataggc

SEQ ID NO: 610266 - DNA, 100 bp, Homo sapiens
agttagaaaagaaactcttcgactacttcaaccaggaggttttccgagacaacaacggcaccgcgggtgctgttggcccaaaggttgccctgaagccccc

SEQ ID NO: 610267 - DNA, 98 bp, Homo sapiens
ccaacgtggatgacaagaagacgtccaatctgagcgtgctgcggacggcgctgcggtacatccagggcagcgggtggcatgagacgtgggaacatggg

SEQ ID NO: 610268 - DNA, 110 bp, Homo sapiens
ttgaccggggtgtcacccacctcaacccctcttcggaaacgtcgtaaaagaaagaagaaagaagaagaaatggaaactctgggtaaagatataactcctatcaatgaaga

SEQ ID NO: 610269 - DNA, 51 bp, Homo sapiens
cgctgccgcacctccgtagctgactcgcttcagacattgtgtgctccgctt

SEQ ID NO: 610270 - DNA, 90 bp, Homo sapiens
gtcgtcatggctggctacgaatacgtgagcccggagcagctggctggctttgataagtacaagccgcggcgagtcctttgcacatgttgg

SEQ ID NO: 610271 - DNA, 96 bp, Homo sapiens
acagccagaattggacccgaaaccatgcctcactgtcctaggcaaggtttgttggcatccaaagctgttggggttgatggtgctgaaaaaaaggaa

SEQ ID NO: 610272 - DNA, 50 bp, Homo sapiens
agctgagtctccccagaagaggaagttttgcctccggagccagcgtggtg

SEQ ID NO: 610273 - DNA, 83 bp, Homo sapiens
cggacgccattatcgcatctccccgacaaacaccacgagaattccgcagcccacacggtgaaaggtgtagcagtcactcggcc

SEQ ID NO: 610274 - DNA, 75 bp, Homo sapiens
gaataaagctgttttggaactgtcaggtacctcaaagccatgtccggcatgatttcgggtggcaacaaccccttg

SEQ ID NO: 610275 - DNA, 98 bp, Homo sapiens
ttctgaacaaggccaacacctatgcagattggaactagatggaaagatgttgtctccaaatgcattcgatgccactttcagccactacttttgtttta

SEQ ID NO: 610276 - DNA, 100 bp, Homo sapiens
gaaagaagtctcatcttcctttgaccacgttatcaaggaggattccagtgagagtagctcctctgcaccagccacacagttcatcatgttgcctctgcct

SEQ ID NO: 610277 - DNA, 100 bp, Homo sapiens
ctccctcgggcacctccggtaccgctgcagccaccgcggcccccgcggattttaccaaatgttgcaagaactctggagttcttatggtagtaaaatgccg

SEQ ID NO: 610278 - DNA, 97 bp, Homo sapiens
agtggagataaggcaagatgggagccaacgtctgtcagaagcccagtggtatcctgaacatcatcttcagcgggctatttcagcacagcaggtgtat

SEQ ID NO: 610279 - DNA, 100 bp, Homo sapiens
ctttctggtgggaggcttgattgccagcacaggccagccagaagatgacactgagactacaggtttggaaggcggcgttgccatgccaggtgccgaagat

SEQ ID NO: 610280 - DNA, 90 bp, Homo sapiens
aacgcgcaggtgctagcggccccttcgccctgcagggacaagaatccttcaagaaacaggaaaaaactcctaaaacaccaaaaggaccta

SEQ ID NO: 610281 - DNA, 100 bp, Homo sapiens
gaatttatcctcaagagtcagctggcaggcagaagaattgtttttatgggttccacgaaaattgctaatgactgttgaatctgctaaaaattcagtgttg

SEQ ID NO: 610282 - DNA, 51 bp, Homo sapiens
cgtcagagctgaggtacttcgtgaagctttgacagatccaaatgcttctgc

SEQ ID NO: 610283 - DNA, 75 bp, Homo sapiens
tatgtagaatacttgggtgacatctgcctgagagatctccaagaattacagattcaggcttcttcaggagaaagc

SEQ ID NO: 610284 - DNA, 98 bp, Homo sapiens
ggacatctccagcaccctcatcgccctggccgacaagcacgcaagtggtgccgagtcccacaaaggaacctggaatccagctgagtgggcacgtgctg

SEQ ID NO: 610285 - DNA, 98 bp, Homo sapiens
cacagtcttcaagagcccacggacaccacctcaacgttggttgaatctggcgatgtggaacccatggatatggagggctgactatatacaccatgttt

SEQ ID NO: 610286 - DNA, 90 bp, Homo sapiens
cgaagaaagaagaggaacagaagtggaaatggtgctagaattggtatgaagggttaactcaagtcaaattgtacttgatcctgctgaaat

SEQ ID NO: 610287 - DNA, 74 bp, Homo sapiens
cgaggcgagccagagcctgcagtcccacacgattcaggcttcttcaggagaaagcaagtacactggtaccttgg

SEQ ID NO: 610288 - DNA, 75 bp, Homo sapiens
ctaggtgataccattactgagacagatttaaggtttcctatcctgggagcaggagagtgtgcctatttgaatgac

SEQ ID NO: 610289 - DNA, 75 bp, Homo sapiens
aggagcgaggcagctgtactaggactgggaacggacactgggtcaaggagtaagcagaggataaacaactggaag

SEQ ID NO: 610290 - DNA, 75 bp, Homo sapiens
gagaaggatgacaccggagtttgacgaagaggtggtttttgagatcactggggtgatcctgctggctgttggagt

SEQ ID NO: 610291 - DNA, 74 bp, Homo sapiens
tacgactccaacacagtgaagcagaaatatctgagctttactcctcctgcttgtagaaacttcattaaaaggag

SEQ ID NO: 610292 - DNA, 82 bp, Homo sapiens
gaagagattgaacttcatccccagttcctgtgaagctttctggatctcgtcttccaaggggggacacagcgattgccacgcg

SEQ ID NO: 610293 - DNA, 75 bp, Homo sapiens
ctgggacttcccgtccgcggcgtggagggggccagtgtcattcaaagatgtggctgtggatttcacccaggagga

SEQ ID NO: 610294 - DNA, 98 bp, Homo sapiens
gattcagccagcacactcctcgcgagcaaggtgtcatggagaaactccagctgggcccagagattctgcagcgggaaaatccaaggcttatttatgcc

SEQ ID NO: 610295 - DNA, 98 bp, Homo sapiens
cggagccggtgccgcagctgcgatggccgtggccgtggggagaccgtctgtgagcacctgcggatctgtccccagggctacacctgctgcaccagcga

SEQ ID NO: 610296 - DNA, 74 bp, Homo sapiens
gggccctgggggtcctcagcgtggtctgcctgctgcactgctttggacttgaaagaggagattgatattcgact

SEQ ID NO: 610297 - DNA, 98 bp, Homo sapiens
agcagccggccagccggggggcactgcccgcccgggctctggagatgagtatgatgtatgtgccatttgtttggatgagtatgaagatggagacaaac

SEQ ID NO: 610298 - DNA, 51 bp, Homo sapiens
gttctttcttgccagaagttatctacaagtgctgctcgatcttctgctgat

SEQ ID NO: 610299 - DNA, 100 bp, Homo sapiens
gaagaggaagggcggtccgggctccacacttagcttcgagcagtttttgcaagaaaggatcaaagtgaacggaaaagctgggaaccttggtggaggggtg

SEQ ID NO: 610300 - DNA, 98 bp, Homo sapiens
cttggtactgaccctgagcaacccccagatgtcattggagggtacaggtaatggcacaattgacttccctgaatttctgacaatgatggcaagaaaaa

SEQ ID NO: 610301 - DNA, 74 bp, Homo sapiens
cttctacagtgacggggagatcagcatttgcatggaacacatggtggccggcattcacaagaaggtggcccgga

SEQ ID NO: 610302 - DNA, 90 bp, Homo sapiens
ccctgttccgaggtcaggaggatgcaagtcctgacagattcagcaacactacaggtgcagttcaggagcagatgagatccaagggaaacc

SEQ ID NO: 610303 - DNA, 83 bp, Homo sapiens
cttagggccgaggggcactgcagctgacaagagtgcctccggagccagcgtggtggccatagacaacaagatcgaacaggcca

SEQ ID NO: 610304 - DNA, 95 bp, Homo sapiens
ccgaattctgctggaggcagcgccatatcctggaggtgaagggccaattcctgtccccccagcagcatggcatcgtgtgctgaaccctctgagcc

SEQ ID NO: 610305 - DNA, 94 bp, Homo sapiens
caaggatgctcctgggatttcggagaggccgcaggagtcatttctttgtgaatagcacaatggaagaagctggactttgtgggttaagagagaa

SEQ ID NO: 610306 - DNA, 110 bp, Homo sapiens
gccgaagaagcatcgttaaagtctctcttcaccctgccgtcatgtctaagtcagagacctgtgaccgcatcaagcagtcagcagctggcaccaagcgtcgggtgtttatc

SEQ ID NO: 610307 - DNA, 75 bp, Homo sapiens
tcagccctggctccagaggatcatggcagctcctatgaggaagaaggtagataatgactataatgcccttcgaga

SEQ ID NO: 610308 - DNA, 50 bp, Homo sapiens
ctgatggcccccttcaacatgagattatcaagaatgatctgtgggttaac

SEQ ID NO: 610309 - DNA, 83 bp, Homo sapiens
cgcagatgtccatgagccacccctacaccatgacaacgccttacccttcgctcccagcccagaattggtgctcttggaatatt

SEQ ID NO: 610310 - DNA, 100 bp, Homo sapiens
tgtggctcctggtcagtgtaattctaatctcacggatatcctctgttgggggagaagctggcagcgatcgacccttcacccttgacgatttacagtacat

SEQ ID NO: 610311 - DNA, 75 bp, Homo sapiens
gaaatagatctctcggctctgagggtgaaagaacttgtcctggacaacagtcggtcgaatgaaggcaaactcgaa

SEQ ID NO: 610312 - DNA, 100 bp, Homo sapiens
acaagcttcattgttttcagctaacagtaaccccaggctcagagcccctacctcccacacagtggaggagtagatgtccatttctcaggagcagtggact

SEQ ID NO: 610313 - DNA, 60 bp, Homo sapiens
tctaacatccagaagatcacacagtgttatgggtagcctatgaaaatcctgacttcacag

SEQ ID NO: 610314 - DNA, 100 bp, Homo sapiens
gccgtgccacctgctgcacccacgaatctgcccacccctcctgtaacccagcctgtttcacttcttggctcccctggctccagccctaaggtgctctccc

SEQ ID NO: 610315 - DNA, 98 bp, Homo sapiens
ggacctccaaggaagccacgtgcagacatctacaaccttcgatctcctgacgagaagaagaggaaaggctatgaagatgatgattacgtctcaaagaa

SEQ ID NO: 610316 - DNA, 75 bp, Homo sapiens
taacattggcagtgtggtgcagcacagtgagggggtttgctctggaattagtcacagaaaagggccatacatttg

SEQ ID NO: 610317 - DNA, 82 bp, Homo sapiens
cccgctggacctggatgtgagggtgaaggctgtgctgctgggagccacattcctcattgaaattctgaaacagccacaccta

SEQ ID NO: 610318 - DNA, 100 bp, Homo sapiens
ggctgccctttaggatttgttagaaaggagacccgactgcaactgctggattgctgcaaggctgagggacgagaacgagctgtgatgcagatccatccgc

SEQ ID NO: 610319 - DNA, 75 bp, Homo sapiens
cagagaagtgcccgaggagagttaacagaacatccagtcatggataaaaatgagctggttcagaaggccaaactg

SEQ ID NO: 610320 - DNA, 75 bp, Homo sapiens
gccgccgctcttcagtttgcccgaagcgcggacgcggtttacgcgcttctctgaagtagctttggaaagtagaga

SEQ ID NO: 610321 - DNA, 98 bp, Homo sapiens
cggagagggttggggccgtcttcctcatccttccttttctcggggctcccgtggtgtaccacatgaaggaagatggttgggtgaaagtagaaagtaca

SEQ ID NO: 610322 - DNA, 100 bp, Homo sapiens
gaggaaattgttaatgttaattgattctagcacgctagaacctaccaaatccctccacctgcatatgttaaaaacttcttcagagtcagtttcaaaaatg

SEQ ID NO: 610323 - DNA, 100 bp, Homo sapiens
tgcagtggcacctgcgcgaagctggccaaagcctgcccagacggctcacctgtgcgggatggaacaaaagattgtcctgtgaagtgaagtatgatcggac

SEQ ID NO: 610324 - DNA, 106 bp, Homo sapiens
cctgggatgtggtaaaggtggagatttgctgaaatggaaaaaaggaagaattaacaagctagtttgtactgattgcaacacctgctcggtataccgtgactttggg

SEQ ID NO: 610325 - DNA, 100 bp, Homo sapiens
ctactacatcgatcacatcaacagaatctggtggacagtaacaaactttggtgaaatttcaggaaccatagccattgaaatggataagggaacctatata

SEQ ID NO: 610326 - DNA, 96 bp, Homo sapiens
cgcggtgggtcctcgcttgcagttcagcgaccacggtgaaatgacaatggatgctctgttggctcgattgaaacttctgaatccagatgaccttag

SEQ ID NO: 610327 - DNA, 98 bp, Homo sapiens
atggtttgaaacagcttcacaagggatggatgaatgagatttacaactatgatccagaaacctaccatgcgactttgacacattcagtctttgttcga

SEQ ID NO: 610328 - DNA, 75 bp, Homo sapiens
gaaagatgacagctggctcaagggagaatttgtcacgagtaagcaggaaattcacaggaggtctgctcggctcag

SEQ ID NO: 610329 - DNA, 74 bp, Homo sapiens
aagaaattgctagagaccgagtgtcctcagtatatcaggctgcggttggatttctcacgatgtccagtgttatc

SEQ ID NO: 610330 - DNA, 80 bp, Homo sapiens
ctgcagctctgggaagagagacccggcccggtgtcacggagaaacaccatctgattcagatcacaagaagaagaaaaaga

SEQ ID NO: 610331 - DNA, 75 bp, Homo sapiens
ctataatgggtatggaggaggacctggagatccccgtcgaggtcaagatcaagatccaggtctatttcacgacca

SEQ ID NO: 610332 - DNA, 90 bp, Homo sapiens
gtgcttgatatcacagaggaaactctgcattctcgcttcctggaggctaaagtaaataatgccagcctgattggactgggttatactcag

SEQ ID NO: 610333 - DNA, 100 bp, Homo sapiens
tgtgtggccttagcgatctatattccctttccagaagatgattccaacgccaccaattccaacctgttggtgacaaagttcctgctgatataaggttaac

SEQ ID NO: 610334 - DNA, 80 bp, Homo sapiens
gagcacagagcctcgcctttgccgatccgccgcccgtccacacccgccgccagaataccctctaccatctgctttggtca

SEQ ID NO: 610335 - DNA, 90 bp, Homo sapiens
cctcaacttgcgacacaacttcatgcagttagaaagacccggaggcctcgatacactctacaagtagatgacattaatgctgataagaat

SEQ ID NO: 610336 - DNA, 82 bp, Homo sapiens
gtgccatttcgcctttatcgtggtggagtccaccctggctgtgatgcgagccacccctctggctgctcctgcgggttccctg

SEQ ID NO: 610337 - DNA, 101 bp, Homo sapiens
gagcagcggaaaatgatccagtcacagtgagggccgaggcaagttgacggtattttcagttaaagctatgttagcaaccatgtgtggtggaaaaatgctgg

SEQ ID NO: 610338 - DNA, 97 bp, Homo sapiens
taaatgcaatagcccttcagtactgttgtacgagagaactcgatgccaccgcaacggtattggcgaaccggcaggatgaaagtgagcagtccagaaa

SEQ ID NO: 610339 - DNA, 101 bp, Homo sapiens
ggatgggccccgagaacctcgaagtgactattatatggttaaaaagattttggaggaaaacagttcaggtgacttgaacataaattgcgtagatgtgcttg

SEQ ID NO: 610340 - DNA, 100 bp, Homo sapiens
gggaaaggaaaagactcatatcaacattgtcgtcattggacacgtagattcgggtttcagagcagcgatggagaaattaaatacttgcaattagcagagg

SEQ ID NO: 610341 - DNA, 75 bp, Homo sapiens
atacatcagtgtgggaagccaagcagatacaagttgatgataattagaagcatgctttccactgaacttcccgac

SEQ ID NO: 610342 - DNA, 100 bp, Homo sapiens
ccgcaccgtgacagagattgatgagaaagaatatatcagccttcggctcatcatatcagagctgaggaatcaatatgtgtccctgttacctgagaatgac

SEQ ID NO: 610343 - DNA, 100 bp, Homo sapiens
ggtttctctttctttacaaggatgtgaagggtgaagttgaacaaattgctatgatgaaaccaaaaggccagactgaacacgatgagggtatgcttgaata

SEQ ID NO: 610344 - DNA, 100 bp, Homo sapiens
gagatgaggatgaagatgaagatgagtcatcagaagaagactctgaggatgaagagccgccacctaagagaaggttatattcccagaggatgtcagtccc

SEQ ID NO: 610345 - DNA, 98 bp, Homo sapiens
cttctcggcccagtagtgacaatgcagataaggccaatgatgaggccaatcagagtgatacaagtgtctccttgtcagaacccaagagcaaaagcagc

SEQ ID NO: 610346 - DNA, 75 bp, Homo sapiens
tagcaagtggccatggggagcctcagcggtctgcgcctggcagcagtctcacagaaagttctccgctcccagaca

SEQ ID NO: 610347 - DNA, 88 bp, Homo sapiens
tttgtctccttcgacttggagtctttgtccaggacgttatggactctgtgggattcattatattgacgctggttaccttggtttcaag

SEQ ID NO: 610348 - DNA, 75 bp, Homo sapiens
cttggtgaagtcggccagcctgagcaagcggaggacctacgccggcctggtttccaggagactgacaaggcgtgg

SEQ ID NO: 610349 - DNA, 90 bp, Homo sapiens
attttgggagaaataactaaaggatgcattcagtctactagcatattcagatccctggaacagcccagttggaaatcagcttgacccgat

SEQ ID NO: 610350 - DNA, 90 bp, Homo sapiens
gggccctgctggaccagctcatgggcacggctcgggacggctgccagctgttggtatatccaggagcttttaatctgaccactggaccag

SEQ ID NO: 610351 - DNA, 80 bp, Homo sapiens
agacccaacagaatacactggacctgaaagttatgtggctcaaatgattgtgggatatgggattagaactgtttagaacc

SEQ ID NO: 610352 - DNA, 74 bp, Homo sapiens
gaagaagaatcaattaccaaaggtgatcttgaggctgtggatctttccattgatgagtccagcttgacaggtga

SEQ ID NO: 610353 - DNA, 100 bp, Homo sapiens
tgagtggttgtgtggtcgcgtctcggaaaccggtagcgcttgcagcatggcgtccgacctccgatcatgaacgggcccctgcacccgcggcccctggtgg

SEQ ID NO: 610354 - DNA, 50 bp, Homo sapiens
agaggagcgtcaacagcagcaccatgggttaaagatcgaggtccggaagc

SEQ ID NO: 610355 - DNA, 100 bp, Homo sapiens
tgattgcatactgtagaagatttgatgttcagactggttcttcttacatatactatgtttcgtctacagttggcaatgaagggctattggcctgtcagct

SEQ ID NO: 610356 - DNA, 100 bp, Homo sapiens
tttttagaactccacatttgagggttcataaattcatggaacgtgaaggtcgcagacctcgtcttcttgtagcaaaaatgggacaagatggccatgacag

SEQ ID NO: 610357 - DNA, 75 bp, Homo sapiens
cgggcagccaccgagccgcgaagcgacatggtgctgctcaaggagtaaaataccgctaccaagatgaagacacgc

SEQ ID NO: 610358 - DNA, 80 bp, Homo sapiens
cgcgcttcgaagccgagaaagcccgctgggaggccgagcgcgccgagttacagggacctcaggatggaaaccagcagcct

SEQ ID NO: 610359 - DNA, 98 bp, Homo sapiens
gagggaaaatggggaaagccctctggaactggagcagctggaccagcaccatgagatgaaggctgaactcacgggaatcaaatggcgtaggtacaatt

SEQ ID NO: 610360 - DNA, 75 bp, Homo sapiens
gggatatcaagagtataatgtctatggtgaagtcttttgtacagtggttaggccataggaaaaggatacagagta

SEQ ID NO: 610361 - DNA, 83 bp, Homo sapiens
tgcatttgtttctgctgaccgcgggccctgccctgggctggaacgaccctggctgttcggctcttgaatcccagcgatgaaac

SEQ ID NO: 610362 - DNA, 100 bp, Homo sapiens
gtcctcaattgcgtaggaccatggaagtatgcgagacttaagagctcaagtgactagtggtctcctgccatttccagaagtgactcttcaagcccttgga

SEQ ID NO: 610363 - DNA, 100 bp, Homo sapiens
gaccatctgctgggtggactgtggcttagatggaaaccatttgagattccaaaagcatctcagaagaaagtagactttgtgagtgtaagtcagtcccatc

SEQ ID NO: 610364 - DNA, 100 bp, Homo sapiens
ctacattctgggtgacacgctgggggtcggcaccttcggcaaagtgaaggtggacacgtcgatctgacaatgctaggagcgatgcaggtttccaaatatg

SEQ ID NO: 610365 - DNA, 74 bp, Homo sapiens
agatggtacaagttggactgcttcccaagctcactgcactcctaggtcttgtgataatggtcactgtatgctga

SEQ ID NO: 610366 - DNA, 100 bp, Homo sapiens
gcgcacttcgacccggaagtttacctagacaaggttcccgtgtcagtggctatgatgacacctcaagttatcactccccagcaaatgcagcagatcctcc

SEQ ID NO: 610367 - DNA, 74 bp, Homo sapiens
gcgcgcgggtctccgtggaagtccgtttcgtgagcagcgccaaggaagattcttacctctgaagacaatgttag

SEQ ID NO: 610368 - DNA, 82 bp, Homo sapiens
tgaaatgtcatgcctctgaaaatgaagatcctgatgaatttgagcgaatatatgagcctctggatgtcaaaagtaaaaagat

SEQ ID NO: 610369 - DNA, 82 bp, Homo sapiens
tctctttctggcctggaggctatccagcatattaataaggcagcggaaagaagaaatatgaatacggctccatcaagaccca

SEQ ID NO: 610370 - DNA, 90 bp, Homo sapiens
tagagaggaccccgggacatctgaaagccaggaaatggccaagactaaggggctgcagagcggggtggacattggcgtcaagtactcgga

SEQ ID NO: 610371 - DNA, 100 bp, Homo sapiens
cggcgaggaggggaatttccttgtgcctccattcccgggaggggggagcggcgttggaggccaccgtttccagcctcaaggaataggttctcctagtgtc

SEQ ID NO: 610372 - DNA, 82 bp, Homo sapiens
gatggcgcagaaaccccgttgacaaggcactgctttttcatgacgcgcccggcagaatggcgggaaggtgaggcacaagcgg

SEQ ID NO: 610373 - DNA, 98 bp, Homo sapiens
ctttggtcaccagtgagctggagaagttccaggtggagctgatcagaataatgttcagcatcaaccccctggagaacctgaaggtgtacatcagcagt

SEQ ID NO: 610374 - DNA, 98 bp, Homo sapiens
gggagccgccggccaggacgcccccgagggtgtagaccgcgcccctggaggtgaccaaaagccagccccactgtgagttgaactctttcgtgttgacc

SEQ ID NO: 610375 - DNA, 75 bp, Homo sapiens
tcagctttgaagtgggagcccagttggaagcccgggaccgtttaaaaaactggtgattgtagagaaggctccaaa

SEQ ID NO: 610376 - DNA, 82 bp, Homo sapiens
ccgctctttgccgtgacaacaccgttcccccagccgggctgggggatatgagactttctactcggaatatcctgagtgttgc

SEQ ID NO: 610377 - DNA, 75 bp, Homo sapiens
tggtcaacgtcagcatcagctggcccaacggcatctcagtggactaccaggttaacgtccctaaaacccgccgga

SEQ ID NO: 610378 - DNA, 100 bp, Homo sapiens
cggcactcacgtggcatcagtccccactgcggtccacggccaggtgaacaatggcgagcccacaccttaaccgtgctcttcatcctcacctgtacgcttg

SEQ ID NO: 610379 - DNA, 87 bp, Homo sapiens
taaccaccgccgagaacgagctgggagtggtggtagcccacagtgagtcagactttcaaacctctggttgaaagaaatatacccagt

SEQ ID NO: 610380 - DNA, 75 bp, Homo sapiens
agtgactgtcaggtcgatcatatgttctattattgtcaaggtcccatcttcacttcaagctcatttacagttatc

SEQ ID NO: 610381 - DNA, 96 bp, Homo sapiens
ccttgctgctcagacgctccgagaagcttcaggcagcataacacttacagctgctctgttaaaagcgaaaatgaaacaattgcctgcggcaacagt

SEQ ID NO: 610382 - DNA, 76 bp, Homo sapiens
ggagcgaggcagctgtactaggactgggaacgggttgctatcaagatcatagataagacccagctggatgaagaaa

SEQ ID NO: 610383 - DNA, 98 bp, Homo sapiens
cttagctcagcaattcttaccttgtactactgagcgagtgtgcttgatccagggaacggttgaagcactgaatgcagttcatggattcattgcagaaa

SEQ ID NO: 610384 - DNA, 100 bp, Homo sapiens
tggcggccccggcctcccacactcctgagccaggaacagatcaaggtggtacagaagttggtcctgccctttgggcgactgaactacctgcccctggaac

SEQ ID NO: 610385 - DNA, 100 bp, Homo sapiens
ctggagaagcacggagttcgggggatggcacagaatggggtgtccaaggcagctgcagatttgatggcctactgtgaagcacatgccaaggaagaccccc

SEQ ID NO: 610386 - DNA, 100 bp, Homo sapiens
tttcagcaagaactgcaacaacagctttgctgaatgctccagccaaggctgaagccgacgtagcttctctgaacagacgcatccagctggttgaggaaga

SEQ ID NO: 610387 - DNA, 75 bp, Homo sapiens
gccgatccagcctgcggagcctgtggggcagggtccaggtgcggaagtatggagagcagaagacgttgtttatct

SEQ ID NO: 610388 - DNA, 75 bp, Homo sapiens
ggtcgcgtctcggaaaccggtagcgcttgcagcatggcatctggccatctgaagaggttttggcttactactgcc

SEQ ID NO: 610389 - DNA, 83 bp, Homo sapiens
cgttaccttcttgctggcgttggtgggagccgtgctctacctctatccgatgggcactctggttttttaaaaatgataaaagc

SEQ ID NO: 610390 - DNA, 100 bp, Homo sapiens
ggaaagccccccaggctgagtgcggcatgatctccatcaccgaatggcagagttcgatctggggctaatgttctaatttgtggtccaaatggctgcggaa

SEQ ID NO: 610391 - DNA, 90 bp, Homo sapiens
cacttagcacagcgcctggcgcaagtaatagttatgcacgagtgcgagctgtggtgatgacccgagatgactcaagtggtggatggttac

SEQ ID NO: 610392 - DNA, 100 bp, Homo sapiens
ctacagcctgcgtccagccataacccaggagtaacatcaggtacagaggtgcagttccatggtacaccataaatcttgacttaccaccctacaaaagatg

SEQ ID NO: 610393 - DNA, 50 bp, Homo sapiens
gacgagctgctagccagcaaatgtctggagcccggcactgtggtcataac

SEQ ID NO: 610394 - DNA, 90 bp, Homo sapiens
ggcggatggaagggaggagactcctgaccctcagaatgcttattctaccagattccatgaaagtattgccagtgtacatgaattgcttgt

SEQ ID NO: 610395 - DNA, 90 bp, Homo sapiens
tgcccccagccagtacctgggtgttccccaccttgggcatcatgcaccacaacaaacaggccacacactctgcatccgacacccaccccc

SEQ ID NO: 610396 - DNA, 98 bp, Homo sapiens
aaacatgcagattatatcgcatcctatggctcaaagaaagatgattatccctactgccaataaagggaaaataagagatgctcatcgacgaattatgc

SEQ ID NO: 610397 - DNA, 74 bp, Homo sapiens
gaaggtggcgatgttggtccaagggaactgggtggtgaagaggaacaagctgaaagctggatacctaatgtcag

SEQ ID NO: 610398 - DNA, 100 bp, Homo sapiens
cagatcaaggacatggagaagatgttcaagcagagtgtggccatctggggccgtgtggtatttgccactcaggagacatgtccctatgacatagcagtgg

SEQ ID NO: 610399 - DNA, 83 bp, Homo sapiens
gcagtcggcttgtcctggctcttgccctcatcctggttctggaatcctcagttcaagacttcatcctgtgaagccaatgaatg

SEQ ID NO: 610400 - DNA, 100 bp, Homo sapiens
ggcggcggaggctttggcagctcgggactgagtgcaagggctctcacctttgtgtatccttttggtgccacattgagtgtcatgaaaccagcagtggcgg

SEQ ID NO: 610401 - DNA, 75 bp, Homo sapiens
ggagatgggaccacatcagtaattattcttggactggacctacagagacatctgggattttctgcgtcagctgtt

SEQ ID NO: 610402 - DNA, 100 bp, Homo sapiens
ccgagaccccatcaacgtggagggcctgctgtccaagccttatgcatttgatcgggtgttccagtcaagcacatctcaagagcaagtgtataatgactgt

SEQ ID NO: 610403 - DNA, 84 bp, Homo sapiens
ggtgccctcggacagcgccatcacataccgcggctccatcacccacacaatgcagatcttcgtgaagactctgactggtaagac

SEQ ID NO: 610404 - DNA, 107 bp, Homo sapiens
ggagtgtgatgcagaagtaccttgcagagagaaatgaaataacctttgacaagattttcaatcagaaaattgatatttggagttcttacaacatggcagacattgac

SEQ ID NO: 610405 - DNA, 88 bp, Homo sapiens
gccactttgcattgactggaaacaatggcatttacagaaagagtcaacagcagtggcaacagcctccacgttcctctatccagttccc

SEQ ID NO: 610406 - DNA, 100 bp, Homo sapiens
tgtctcggccacctcaaggataatcactaaattctgccgaaaggactgaggaacggtgcctggaaaaggccttagaaaatttacgtgtatacctgtgtga

SEQ ID NO: 610407 - DNA, 74 bp, Homo sapiens
gcggggaccgctgtgctctcggctgtgggtgagcgtggaggatgctcagatgcacaccgtcaccatctggctca

SEQ ID NO: 610408 - DNA, 75 bp, Homo sapiens
atcccggaagcgcgagcaaggccgccagatgtgcaggttgcacactgggccacagaggatccagcaaggatgaag

SEQ ID NO: 610409 - DNA, 88 bp, Homo sapiens
ggtggaccagaacttttggaactagtgccggcggctctccaccccccaggttgatgataattagaagcatgctttccactgaacttcc

SEQ ID NO: 610410 - DNA, 75 bp, Homo sapiens
tcaatttctggagtctgttaagagaggatgtggaagatgtcaagtttgtgatcaactatgactatccaaacagct

SEQ ID NO: 610411 - DNA, 100 bp, Homo sapiens
gctggttctgtatgagactagagctgtgggaatgagatctcgaaaccaaggtggtgaaagtgcatctgatgggcatatctcctgtcccaagccctccatc

SEQ ID NO: 610412 - DNA, 82 bp, Homo sapiens
tcggagtccttggggacggagcagcgcgtcgtggggcgagcggcagtaccatggggcgcaagttggaccctacgaaggagaa

SEQ ID NO: 610413 - DNA, 100 bp, Homo sapiens
ctcccctacgcgctacacaagtggagctccttttcctccacctaccttcccgacatcgagagtaaacatgaggttacgatcctgggaggacttaatgaat

SEQ ID NO: 610414 - DNA, 76 bp, Homo sapiens
aagataaagtgattttttgcctttgttgattaactggacaaattcagatcaaatgatgccgtttggaaaaatttcc

SEQ ID NO: 610415 - DNA, 90 bp, Homo sapiens
tggcctgcaggaacatggcaagggcgagtgaagcagtgtcacgcattttagaagaatgggcggaaggtgctctaccagcgtgcacccagg

SEQ ID NO: 610416 - DNA, 100 bp, Homo sapiens
ggacgtggtagcggcggcgggggcacagccagggccaaacgtaccaagaaagtcgggatcgtcggtaaatacgggacccgctatggggcctccctccgga

SEQ ID NO: 610417 - DNA, 90 bp, Homo sapiens
gctaaactggagccgtccataggggtgaatgggggtggagctggctctgtgggacacagcagggcaggaagactatgatcgactgcggcc

SEQ ID NO: 610418 - DNA, 97 bp, Homo sapiens
aaccccaggcccagcataccaggagccgggaaagagcagacggcaccggcgcctccggcatggcggcggccgaggggcccggctacctcgtgtctcc

SEQ ID NO: 610419 - DNA, 100 bp, Homo sapiens
gtcctctggccatggacaccccggaaaatgtccttcaagacgagttgtactgctgtcacaggaaatggacgctggattacaagcatggcagctcaggcag

SEQ ID NO: 610420 - DNA, 74 bp, Homo sapiens
tcacaggaactgacttggtggagtggcagcttagagtggaagctggaacgcagtcccaagtgtcaatggcagaa

SEQ ID NO: 610421 - DNA, 90 bp, Homo sapiens
gtaaaggcctggggatcttctcatccacgggagttttctaaggatgcaggcgaaagagatttgaaagaagccaacactaaaccacaaata

SEQ ID NO: 610422 - DNA, 74 bp, Homo sapiens
gctcggcccgcgggggagccccgggagccgcacggcctgtgattggaattgaaacagtacaactgcctccacca

SEQ ID NO: 610423 - DNA, 100 bp, Homo sapiens
cgtgattgcgttacaagctttgtctccttcgacttggagtctttgtccaggacggtacatggccacctctggcctagaccaccagctgaagatctttgac

SEQ ID NO: 610424 - DNA, 100 bp, Homo sapiens
ctacaaaagccgctcgcaagagtgcgccctctactggaggggtgaagaaacctcatcgttacaggccttattccactgctggggattgatgtgtgggagc

SEQ ID NO: 610425 - DNA, 156 bp, Homo sapiens
gcgagccgaaccaatgctggacctggaggtagtgcccgaacgctctctggggaacgagcaatgggaattcacgctggctcaagggcgcctcgagggaaacgcgctgaagctggacttgctgacttccgaccgggccctggacaccaccgctccccg

SEQ ID NO: 610426 - DNA, 74 bp, Homo sapiens
ctcgactttggagaaaccaccgtgctggaccgcttttacaatgcagatcatttgcatatcttacaattaaagac

SEQ ID NO: 610427 - DNA, 100 bp, Homo sapiens
caaaggcaggggaggaagccacctcgagggcgccaatgcttcggcattagagaaagagattggtccagaacagtttccggtcaatgagcactattttgga

SEQ ID NO: 610428 - DNA, 98 bp, Homo sapiens
tttacagatgaggacacctgaggttcagattaagaaatctgccccaaagtcttagaactgattttctgccgaggaactgagaggaatttggatctttc

SEQ ID NO: 610429 - DNA, 50 bp, Homo sapiens
aactgttctagtgttgtggaggttgctggtgtcatagatgaagattatag

SEQ ID NO: 610430 - DNA, 75 bp, Homo sapiens
aggaggaggaaggtgaagaggaggacgtgagtggagaggaggaggatggagatgaagatgaggaagctgagtcag

SEQ ID NO: 610431 - DNA, 82 bp, Homo sapiens
agcaggactgggaaaggcagggcgatgatggcagtgaagggatttttagactctgaggagcagttggagctaatccacatta

SEQ ID NO: 610432 - DNA, 58 bp, Homo sapiens
cgccgggactccctggaaacctagaaatgtaattagtgaatgccaaaggcagcaactg

SEQ ID NO: 610433 - DNA, 75 bp, Homo sapiens
gaaccaacccactttctcggcgccgcggctcttttctaaaagtacaacgtgtcctggagagacagcacaatgggc

SEQ ID NO: 610434 - DNA, 51 bp, Homo sapiens
cacatgtcaactacttcctagaccagtgcacagccagagaacaacacatca

SEQ ID NO: 610435 - DNA, 101 bp, Homo sapiens
ggcccggctctcctccgcgcccccactcgcgctgcgatgacgcgctcactgttcaagggaaacttttgggtgtgttcatcctcgaggtggtgtgattcaga

SEQ ID NO: 610436 - DNA, 82 bp, Homo sapiens
ctgcgctggccgggggcgcgggcggcggcgccggcaggaagttgcaggccccgggcattctgtctggcggacagcgatgagg

SEQ ID NO: 610437 - DNA, 96 bp, Homo sapiens
cgagaggtgctgcggcaggcgctgcgctgcactatggcacaaatacaattatgcccacctccacctcagattcccaattctcacaatatgacaacc

SEQ ID NO: 610438 - DNA, 74 bp, Homo sapiens
tttgaattcacgcttatggtagtgggaaaatgtttataggaggccttagctgggacactacaaagaaagatctg

SEQ ID NO: 610439 - DNA, 51 bp, Homo sapiens
cgggattggaccgacgcagccatggtggaagtttagctgatgctataagtg

SEQ ID NO: 610440 - DNA, 100 bp, Homo sapiens
gacatcagtggagccttctcagacccacagcttgctcatcagtttggaaggaatttggctccgtgggacgttgtaatgtgcacagacatttccaaggaaa

SEQ ID NO: 610441 - DNA, 51 bp, Homo sapiens
cctcagaggacaacgaagtgttcggatattaccttccaaatgatgatggag

SEQ ID NO: 610442 - DNA, 99 bp, Homo sapiens
gaacgctgtacagcataacccgccaggcttccctgcagccctccttggggccaccacgcctgaggatggtgcggaggtggacagctatgactcggatga

SEQ ID NO: 610443 - DNA, 98 bp, Homo sapiens
actcctttgtccttggattacttaagagttcccagaaatacatttgccaccaacagagtagggagttacccagggagattatacacctatggaagaca

SEQ ID NO: 610444 - DNA, 82 bp, Homo sapiens
ctggagagaactgctggaaggagactggatgatagaattgaaacggggtctctgggggatccagtgacgtgcccaaccacag

SEQ ID NO: 610445 - DNA, 75 bp, Homo sapiens
tacagcttacatcttgcatcctcaagcggatgtcacatgtacttcagtttgaggataaaagcagaaaagtgaaag

SEQ ID NO: 610446 - DNA, 74 bp, Homo sapiens
gcctgggcatagacttccttaagatgagggcagaagtgcagttgaccaagcaggtggtgcacagattgtaattg

SEQ ID NO: 610447 - DNA, 101 bp, Homo sapiens
agcacaagagcaccatactttgaggtgtctttggtgcaacactaacaaggcttgtctggactacccagttacaagcgtcttgccaccggcttccctttgta

SEQ ID NO: 610448 - DNA, 90 bp, Homo sapiens
gccagcgcccggagcaagcggagctcccccaagagccggaaagaaaatgcatccgatgcagatttatggctcctgaacagttgcactgta

SEQ ID NO: 610449 - DNA, 83 bp, Homo sapiens
ggaacattctggctttggcgctcacttctctcccaggtatcatgaactgatcactaaatatgggaagttggagcctttggcag

SEQ ID NO: 610450 - DNA, 98 bp, Homo sapiens
gctgaggaggaggagctcagggctgagcttaccaagtgacaggatcacagaatgtgaattttgaacagatctgaaaagttattaagttcaactccaca

SEQ ID NO: 610451 - DNA, 82 bp, Homo sapiens
agaatctcagagttcctcaaagttgcagagtcgactcctttacatctagcagcgggctacaacagagttcgaatagttcagc

SEQ ID NO: 610452 - DNA, 90 bp, Homo sapiens
aagcggcggcggcggctccagcgtcctaagagattgctatgctatgccttgtatgactaagacctcttaccaagaatacgtgtcagacca

SEQ ID NO: 610453 - DNA, 74 bp, Homo sapiens
ttttgagcagttggcactacccgtcttgaggaatacggatgtcttaaaatgggatctcatcgtctgcgcagtgg

SEQ ID NO: 610454 - DNA, 98 bp, Homo sapiens
gtctagaggctggagattcaagatctgggtgccatcattttctggttctgttgatgaccctcttccaggtttgatgtgtgaataattacattgactga

SEQ ID NO: 610455 - DNA, 74 bp, Homo sapiens
ggtgaaccacagcaagttcatggtcacggagaaggcagcctacataggctgaccccgcactacatctacccacc

SEQ ID NO: 610456 - DNA, 74 bp, Homo sapiens
aaaaagtggtgcagtttttgatgaaattgtagagaactgtggaaaagaggctgcttcaggcaccacacctcaga

SEQ ID NO: 610457 - DNA, 100 bp, Homo sapiens
agccgacaagcccgggagacacagtgtcagaattacaagggccttattggaaggagaaagtaatccagagatagtgatctgggctgagcacgttgaaaac

SEQ ID NO: 610458 - DNA, 98 bp, Homo sapiens
cgcgggccgggatgagggactgtggcggcgcggcccgcgcgcagccggccggtactccaaagattcaggtttactcacgtcatccagcagagaatgga

SEQ ID NO: 610459 - DNA, 96 bp, Homo sapiens
gccatggcagcaggctccgaggcgaccactcctgtgatcgttgcggctggggctggaggggaggaagcatctgacagatacgtctcatggtgtaag

SEQ ID NO: 610460 - DNA, 76 bp, Homo sapiens
agcgtcggcgccggggttcggtggcctctagtgagatctggaggtggggaagaaaacatgacagaaacagatgcct

SEQ ID NO: 610461 - DNA, 75 bp, Homo sapiens
ctggtggaggtgttaaatgaaaggaagtcgagataacatgagtattgtactagtttgcttttcaaatgctcccaa

SEQ ID NO: 610462 - DNA, 100 bp, Homo sapiens
ccgcaagcatgctcagaccttcattgctctgtgtgccaccggggatggagaagtttatgtttgggatgtgaactcaaggaagtgccttaacagatttgtt

SEQ ID NO: 610463 - DNA, 100 bp, Homo sapiens
cgcaggcgtcatgttgggaatcggcgggaagcaatcaattgccattgatgactgcaccttccaccagtgtgtgcgactcagcaagtttgactctgaacgc

SEQ ID NO: 610464 - DNA, 100 bp, Homo sapiens
cccgagatgagcgtctccgtgagggcagtggtggcctcttggacattacatctttcttggctctttttgacccagctgtaaagaagaaagtccagctgtt

SEQ ID NO: 610465 - DNA, 100 bp, Homo sapiens
agccacggctgggacaggaagccacagtactctgtggatatccccttggacaaaactgtcgtcaataaggatgtcttcagagatcctgctcttaaacgca

SEQ ID NO: 610466 - DNA, 51 bp, Homo sapiens
tcttcagaagctggtcgccgccggcaggcagcccctggaagagatcatcac

SEQ ID NO: 610467 - DNA, 124 bp, Homo sapiens
cggagacagtctgcgaccggacgggtctaggtgagacagaagccaaacaggaggaggaagtggagggtacccactgatggtaatgctggcctgctggctgaaccccagattgccatgttctgtg

SEQ ID NO: 610468 - DNA, 104 bp, Homo sapiens
atcaggaataataaaagttaaaacaattgctgcacgaaacactgaaattttggcagatgtattgtagaaactgaaaatttagaagaaagagtagctgtggtgag

SEQ ID NO: 610469 - DNA, 49 bp, Homo sapiens
gccgcatgctggaagccaggaagtctgctcctctgacaaacgaattgcc

SEQ ID NO: 610470 - DNA, 100 bp, Homo sapiens
ctgagaaagtgagccagaaacatgctgagcctttgacagggccgttgctccagggagaactgcaaatatcttcatccacccccacatttaaaaacgcagt

SEQ ID NO: 610471 - DNA, 90 bp, Homo sapiens
cttgttcttggactgggccaaggtgttctttggggtgactttcaagatggactctactctaacagcaagtgaaatccggcagcgatttat

SEQ ID NO: 610472 - DNA, 101 bp, Homo sapiens
taacaaatgtgatgacaagaaggagagatctctgctgcctgcattgaggggaggaatgccagctcctgagcaggcctcattggtggaggaggggcaaccac

SEQ ID NO: 610473 - DNA, 99 bp, Homo sapiens
gacttgtgcaaccagggcaactctgggtctgggatccccaaggcctgggcaggcatagacttgaaggtacaaccccaggaacccctggtgctgaaggat

SEQ ID NO: 610474 - DNA, 112 bp, Homo sapiens
gttcacgcacgggatccagagcgccgcgcacttcgtcatgttcttcgcgccctgggagtgcatccgccccaacccttttccccctcgtctcctgtgagaattccccgtcgga

SEQ ID NO: 610475 - DNA, 100 bp, Homo sapiens
gaaaaagccaagagactgcttttgagtgacatttatttagcagctagtaacttcacttatttcaggatgctaatcctgaggtgacgatgacaatgcttcg

SEQ ID NO: 610476 - DNA, 82 bp, Homo sapiens
caaagcctgcccagacggctcacctgtgcgggatggaacaaaaggtcctggacccaagccagaagcctctgcaaagcttcct

SEQ ID NO: 610477 - DNA, 113 bp, Homo sapiens
ctggaggcggcccgcttcctggaatggcaagcgcagcaacaacagagagcacgtggtgatgtgtccaatctagatcccaacttctcatttgaaggcaccaaactggatgtggg

SEQ ID NO: 610478 - DNA, 82 bp, Homo sapiens
ctaactttttacagcctttgcctgcttggcctatcaagcttccattgaagattgacatcattaaacatccaaatgaaacaga

SEQ ID NO: 610479 - DNA, 100 bp, Homo sapiens
gcgggagcccggccggagctgggtctggagacgccgtggcagcctgaacggagtgtgcgacggattgggaggtgaaagaacttgtcctggacaacagtcg

SEQ ID NO: 610480 - DNA, 50 bp, Homo sapiens
cgacgaccgacagggtggtgaaagggggtgaagccagccagttttgacaa

SEQ ID NO: 610481 - DNA, 74 bp, Homo sapiens
atcagtgattctacatctcaagctcatattttgaagtgtttacgggaatggatgtatatggctacctactggca

SEQ ID NO: 610482 - DNA, 90 bp, Homo sapiens
acagattaaggtgctggaggtgacggaggcttttccttccctccatgagaaagaagccagctctgtctgacggcagcaatcctgacggcg

SEQ ID NO: 610483 - DNA, 83 bp, Homo sapiens
gaatgtggaaaggagattgacagtcacaattttgtaataagttactatgcgagtcagaagaaaacatttgaaattaatcccag

SEQ ID NO: 610484 - DNA, 98 bp, Homo sapiens
gggatcgccgccgccttccacccgggcctcgccgccgcggcctctgccagagccagttttcggctttgtgagaaaccttaccatcaaacacgatggcc

SEQ ID NO: 610485 - DNA, 100 bp, Homo sapiens
aaggagaacaagccaggaaaaccccgaaaacgcaagaagcgtagtcagaaaagctgagtaagatgagttctctcctggaacggctccatgcaaaatttaa

SEQ ID NO: 610486 - DNA, 82 bp, Homo sapiens
caactcctgatttaggggcaatcgatggttacacatcattttggaatgactgtatatcatctggattacgtggctgtatgtt

SEQ ID NO: 610487 - DNA, 75 bp, Homo sapiens
atctgtcgagatcacaagttgcatgttgactttaggatttcaggtatgctgctgaaagtgggaatcctctacatt

SEQ ID NO: 610488 - DNA, 100 bp, Homo sapiens
ccgacatggaacagggactcactgggggaaggtgggagtcaatcattttgacaagtctcctgaaaggaacagctagcaggaactgaaacctttttccatt

SEQ ID NO: 610489 - DNA, 82 bp, Homo sapiens
tcggagtccttggggacggagcagcgcgtcgtggggcgagcggcaggttttaaaatcaaagatgggaaaatcggagaaaatt

SEQ ID NO: 610490 - DNA, 75 bp, Homo sapiens
gccagcgtagctgaatccagtaccaaaaacgtcaacaacagttttacggcttaaatgataatcccagcccctgga

SEQ ID NO: 610491 - DNA, 75 bp, Homo sapiens
tcagggactgtcagcctctgctctggaaggttccagcctgaactgtctgcccctgatctgcggcgatttatcgat

SEQ ID NO: 610492 - DNA, 75 bp, Homo sapiens
aagtgcagctgcctcagttcttagcgcagaaatcttgcagcagctccaccagcagctggttgaagctgaacgtag

SEQ ID NO: 610493 - DNA, 100 bp, Homo sapiens
tggcgcaatcgcggcacgagctcgactccaaaacacactgagattatgaggctctggcctccactggccactcactcgtgaccctttccaccacggcgga

SEQ ID NO: 610494 - DNA, 90 bp, Homo sapiens
cataagaagttacctttttcagatccctcatgtccatgatccggaaacgatcccaccccagtggcagtggtgctaagaaagaaaaggcaa

SEQ ID NO: 610495 - DNA, 100 bp, Homo sapiens
ccggccattgttcgtgccgcgcttctagcaacgccgggccggtaaccccctctccctccttgcgcgttccgggtctcgacagagcgggatgccaccagct

SEQ ID NO: 610496 - DNA, 88 bp, Homo sapiens
atgggaggccccgggaggccgaggttcggcatgcagccagtaaagatcccagagaagttcgagaagctagagatcataaggaaccaaa

SEQ ID NO: 610497 - DNA, 100 bp, Homo sapiens
acccccccctcggctcggcgccttctgcgtctcccggctggtggggaagcctctgcgccgccggcaccatgagtgatggaatggggagaagatattaaag

SEQ ID NO: 610498 - DNA, 100 bp, Homo sapiens
gctgctgcggctctcactgtgcgggctgctgctccagagggcggagctcggccatcctgatttacctgagctgtaagtaccagacgccggaccactggta

SEQ ID NO: 610499 - DNA, 75 bp, Homo sapiens
agccctgcaacgaggtcaccccgcggatctacgtgggcaacgcgctgaagtttctctttggctcatcagccaccc

SEQ ID NO: 610500 - DNA, 75 bp, Homo sapiens
gggattgtggatggcattttcacaaggttcatctacgagacggagcatcacaacgggattgctgagctcctggag

SEQ ID NO: 610501 - DNA, 100 bp, Homo sapiens
ggacgtatgtgggccccatgaccgagagcctgtttcccggttaccacaccaaggccaccctggagaaatgtgccacgtgctcccagcccatcctggaccg

SEQ ID NO: 610502 - DNA, 75 bp, Homo sapiens
ccagccacatcggaggccgtgtgcagagtgtgaaacttggcaaatgttctgaaaaagactctgcatgggaatggc

SEQ ID NO: 610503 - DNA, 100 bp, Homo sapiens
ctttgcaacagaattacagagtatgatgctcgtgaagaagaaatgactgcaaaagtaagggacctgcagactcaacttgaggagctgcagaagaaatacc

SEQ ID NO: 610504 - DNA, 80 bp, Homo sapiens
cagaccttcagcttcctctcgggcatgaccggaaaggccaagatgccgcatcctcgaaggtaccactcctcagagcgagg

SEQ ID NO: 610505 - DNA, 75 bp, Homo sapiens
atagaacactaaagtgttacatgacagatgtatgaggtatcactggacaggccatggctccacggtcccggcgac

SEQ ID NO: 610506 - DNA, 51 bp, Homo sapiens
gttatggtgaatgccaaatttgaagggaatggcatagtactgccacctaaa

SEQ ID NO: 610507 - DNA, 95 bp, Homo sapiens
aggacctgcaccgccaagccaagctcaacctcaaatcagtactgagggctgggatctagcaattgggaggcagcagacttgggtaatgaagagag

SEQ ID NO: 610508 - DNA, 75 bp, Homo sapiens
gcttcaggcgacccgtactgggcctactctgactgcagctgaatatgtaaaatctcgactcccagaggcccttaa

SEQ ID NO: 610509 - DNA, 102 bp, Homo sapiens
ataggccgtgccccgaccggactggacgcatttttatacataggcagcctcccgcgacgatgcccctcaacgttagcttcaccaacaggaactatgacctcg

SEQ ID NO: 610510 - DNA, 100 bp, Homo sapiens
gattctgagcctgttcagaaagtccttagcaacagggttcttcacacacccccattcggcgtagtacccagagagctcaagatgtgtggcagttttcgga

SEQ ID NO: 610511 - DNA, 99 bp, Homo sapiens
gaggaattttgaagtacaccgtggtgacattgtatcattggtaaagttcaggagccctggaaaggagaaggaataagacggcaggaggaagagagagag

SEQ ID NO: 610512 - DNA, 95 bp, Homo sapiens
aggcggagcagggccttggaccccgcggcgcccctcggcctcggagcaacgagcgcagcgccggttaaataggattgcgaatcaggtggccattc

SEQ ID NO: 610513 - DNA, 101 bp, Homo sapiens
cctcagagtaaacctgaagtttctgaccaggacgagaagcaccgtggctgagtctgtgagccagcagccggctcagttcggggaagctgcaggagttcggc

SEQ ID NO: 610514 - DNA, 90 bp, Homo sapiens
gaaggaggagattctgaagataaggaggcgcagttgtgtagcagttgagtaatgctggttagctgttaaggtggcgtgttgcagtgcaga

SEQ ID NO: 610515 - DNA, 95 bp, Homo sapiens
tccacctgcaaggattcaaagaagatttcaggtatgctgctgaaagtgggaatcctctacattggtgggcagctggtgaccagtggggctgtaag

SEQ ID NO: 610516 - DNA, 75 bp, Homo sapiens
cggaacttcatggtcttatgttcttccaggtttgctgtaatggcacaagagtatttgtgcagaaagaaattcttg

SEQ ID NO: 610517 - DNA, 74 bp, Homo sapiens
tgggtagcctctaggaagcgctagacacatgctttatgaaggcaaagaacagatggagtttgaagaatccatga

SEQ ID NO: 610518 - DNA, 100 bp, Homo sapiens
tacttgcagcatattacctatcaggagaggagatccggagttaggtgttggcacgctaccagaacatgacagccaggatgcagggccgattgtccccaag

SEQ ID NO: 610519 - DNA, 80 bp, Homo sapiens
aggatatcgacgtcgtgatccagaagtccagagctgaggactgcctgtttgcagatccagcacacggaagacatggagaa

SEQ ID NO: 610520 - DNA, 100 bp, Homo sapiens
ggcccacactcgcctcccctcggcacccccggccccggagctgcctggaggcggccgcactcggtttcatgatcaacatgggagactcccacgtggacac

SEQ ID NO: 610521 - DNA, 101 bp, Homo sapiens
gtcaaccccaccgtgttcttcgacattgccgtcgacggcgagcccttgggccgcgtctcctttgaggttcctggaaagcaactggtttgtgtgggtgacac

SEQ ID NO: 610522 - DNA, 101 bp, Homo sapiens
gccgagttccgagagcctctgattctcctgtgccagtgacttctgacagctctctccatggaaggaggcggcggccgcgatgagccttcagcctgccgggc

SEQ ID NO: 610523 - DNA, 75 bp, Homo sapiens
ggacttacggcagtgggggctgacaggagttaaagttcctcgtaattttcgcttgttggaagaacttgaagaagg

SEQ ID NO: 610524 - DNA, 91 bp, Homo sapiens
gcatcgcgtaccccttcaacgccaagcagcccaccgacatggcccggaggcagcagaagaggctaagaatattgtacacaaagattcttga

SEQ ID NO: 610525 - DNA, 75 bp, Homo sapiens
ggagatgctgttcataagatctacccaagtgcatatataaaggtgaaagaaaagatgttgtcccggttaagagta

SEQ ID NO: 610526 - DNA, 89 bp, Homo sapiens
ctgctcctgtcgccttcgcctcctaatccctagccactatgttccgatgaagttaaattccgtcaagatttaatgaatattgcgggcac

SEQ ID NO: 610527 - DNA, 51 bp, Homo sapiens
gggtggagtgtaggtcatatcgccgcgatgaggtttatataactttccaag

SEQ ID NO: 610528 - DNA, 100 bp, Homo sapiens
tccttctccactttcgccagcccgtgccgcgagcgcggcctgcaggaggtggtataagttgaaatccaaaccaggaaagaaggacaaggagcgaggagaa

SEQ ID NO: 610529 - DNA, 90 bp, Homo sapiens
agctgcgactcagccgaaagctagacaataaccgcccactggtggcctccatgttggtgactgtcacagactcgcgcctgcggaacagcg

SEQ ID NO: 610530 - DNA, 101 bp, Homo sapiens
ctcggcggctgagcgtggaggttcttgtctcccctggtttgtgaagtgcggaaaaccagaggggtctgctgcgagttgccttagagcgcaagggccaggcc

SEQ ID NO: 610531 - DNA, 49 bp, Homo sapiens
ccctccttgcgcctccgattcccaggctggccttgggtgaccctctctg

SEQ ID NO: 610532 - DNA, 75 bp, Homo sapiens
gagatatagcccacttagaaatcacaggttcagagatgggcagtgagaaggagcagagtccagaaccacacctgc

SEQ ID NO: 610533 - DNA, 75 bp, Homo sapiens
gtgtaactactacctgcagccagaggaagacgtgaccattggagtctggcagacaccacccatcctttaaccaag

SEQ ID NO: 610534 - DNA, 75 bp, Homo sapiens
gtcctgctgcttgctgaccaaatggaatgttacgttcataacttactaaggattagtgtatattttccaaccttg

SEQ ID NO: 610535 - DNA, 100 bp, Homo sapiens
cgagcctggtgaacgggtccacgttcgtgctacagaagaagggcatcgtgcgtgccaagcggcgagaaaaacgttgacctcttggcgagaatgcaaagaa

SEQ ID NO: 610536 - DNA, 88 bp, Homo sapiens
gcaccgcggtgcggacccagcacgcctgggccgggggctgcagcatgagacctgtcggccatggagcctaatgatagtaccagtaccg

SEQ ID NO: 610537 - DNA, 75 bp, Homo sapiens
cggggatagtggagctgcccactctagaggagctgaaagtagatgaggccgaatacatcaagcaatggtaacatc

SEQ ID NO: 610538 - DNA, 82 bp, Homo sapiens
gcccctcttctgcagcgtcctcaccaaattcgagtggtgaatgcatttcgtagttctttatatgaagggttagaaaaaccgg

SEQ ID NO: 610539 - DNA, 82 bp, Homo sapiens
cactaaaaattatccctactacaggactgcggacaagggctggcagggccgagaactactggtggcgtggccagaacacacg

SEQ ID NO: 610540 - DNA, 74 bp, Homo sapiens
aaggaataccagctttcacttttctgcttgagatttcaagaattttgaatactggcttagatatggaaactctg

SEQ ID NO: 610541 - DNA, 78 bp, Homo sapiens
atgaaggagcattcctcttgggactccctggaggaaaagcggaagcggcagcggtctgaacgcctggaacggattttc

SEQ ID NO: 610542 - DNA, 74 bp, Homo sapiens
gaatgaatgaagtgcttcagatttaaatacgatctagggcagccctgcagaggtacctgttctactgtaatcgc

SEQ ID NO: 610543 - DNA, 87 bp, Homo sapiens
cgcgaacccctctgggatccccgccgctctgtctacaacccgagaacccttaggagaaatcttgagagtggacagcaattgtgaaga

SEQ ID NO: 610544 - DNA, 100 bp, Homo sapiens
tgggaagccaacgaccacacgcagctcctggctggtgccccccgggagctcgctgtgcccgatggctacaccaaccggactggtgctgtgtacctgtgcc

SEQ ID NO: 610545 - DNA, 80 bp, Homo sapiens
ttctgggcagaaatttccgagtccgtagacaaaattttccaaggcaggaaaggtaaagagacaaagaaagtgccttgtac

SEQ ID NO: 610546 - DNA, 75 bp, Homo sapiens
ggacgttgtctaaatttcggtagccatggcacaagaatatagacaatcatatcctgattcagcccttcctccaca

SEQ ID NO: 610547 - DNA, 75 bp, Homo sapiens
ctccggcccctccagctgccccctgtgtggcaaacctttcttgagctcagacaaatttacatgtattggagacca

SEQ ID NO: 610548 - DNA, 96 bp, Homo sapiens
aggaggacgagggccggttgccgggcgcgggcgagaaagcactagaaagtttgggatttggctcttacatcagtgaagtaaaagaagtcttgcaag

SEQ ID NO: 610549 - DNA, 59 bp, Homo sapiens
gagcagagagctggcgagcaaggtctcctctgagcctccggcctccataagacccaaaa

SEQ ID NO: 610550 - DNA, 85 bp, Homo sapiens
tttacctaaaggctgaggttgctgatgaaaagctccatgtcacaggcttttgacctttatgaacaaagatatgctgctgtgaaga

SEQ ID NO: 610551 - DNA, 98 bp, Homo sapiens
ttctggtcagagatacttcttaaagttctgcacttttaaaagaaaagcaaaggcatcgattacataagttcttgtgtctcagagttggaaaaccaatg

SEQ ID NO: 610552 - DNA, 100 bp, Homo sapiens
tgtccatgagaaaaagcttggagataaagttgctttttactggtaccttaacatggggaatcttcttaaagttttgacatgcacagaccttgagcagggg

SEQ ID NO: 610553 - DNA, 83 bp, Homo sapiens
acctcttgcatcgtacacaacagaacatcttacatgaggaagaaggcaggaagagagaagggcacagttacctaagtatcaac

SEQ ID NO: 610554 - DNA, 83 bp, Homo sapiens
taaagacaaactggaacaagcccaaaatgaactgagtgcctggaagtttacgcctgataggagtatgttgcaagtgagggtga

SEQ ID NO: 610555 - DNA, 100 bp, Homo sapiens
gggacttcactgctctgctgtctcctgcaagaactggctcaagaaatttgcctcgaaaaccaaccaatcctgaggcaaaagaaacattttaattcactgc

SEQ ID NO: 610556 - DNA, 130 bp, Homo sapiens
actatgacacgtacacagcaggactgagtgaagaagaacagctcgagagagcattacaagccagcctctgggaccgagactttgtgtggacagtaatgacctcacgtttccgattgcctgctggcagaac

SEQ ID NO: 610557 - DNA, 50 bp, Homo sapiens
aacagaaattctggaacacctatatggacacagagtctgggatctaataa

SEQ ID NO: 610558 - DNA, 75 bp, Homo sapiens
cgacgtcttgcctgtgtcccacttgttcgcggcctatagggcgaagctgtgctcaggcccgggctggacgcagag

SEQ ID NO: 610559 - DNA, 100 bp, Homo sapiens
ccacgactcctgaagacacacctgcccctggctctgctcccccagactctgttggatcagaaggtcaagaccattaaaaatctcaagtgacgactttggg

SEQ ID NO: 610560 - DNA, 75 bp, Homo sapiens
attgaaatctctgaaaagtgcagaggtggtttcagacaccctcacaggttttctaccatgcagcaactgaacatg

SEQ ID NO: 610561 - DNA, 74 bp, Homo sapiens
tactattcctcaagacacactgggagttgattttgattcagaggaagaatacaagcgattgagtgaagcactag

SEQ ID NO: 610562 - DNA, 101 bp, Homo sapiens
ggggccggccttcaagcaagagcgacgcaagatggcagccaccacgggctcggcgcaatgtccctgctcttctctcgatgcaactctatcgtcacagtcaa

SEQ ID NO: 610563 - DNA, 125 bp, Homo sapiens
aaggacatcaggacaccgggagtgggagagattggactgggagactcagcagctcgatcaagtcatccgccaaagaagcctgtccagtttggaactgttcctctcctgtgcacagaaacagttaa

SEQ ID NO: 610564 - DNA, 100 bp, Homo sapiens
aggagatgcttcagagagaggaagccgaaaacaccctgcaatctttcagacagccatcactggtgcaagctatatttaacggagatcctgatgaagttcg

SEQ ID NO: 610565 - DNA, 100 bp, Homo sapiens
accttttctgggttgagcctagattatcttcaaccaatcttgtcactcctccagcagttgtcagtagtcaacctaaattgcagactccagtgacttcggg

SEQ ID NO: 610566 - DNA, 52 bp, Homo sapiens
ttcatttacagagcaacttgatgaaggtgctggagaatctggtaaaagcacc

SEQ ID NO: 610567 - DNA, 82 bp, Homo sapiens
acatcgtctcctgtgtggcgatggtcttcctgctggggctcatgtttgaggcagctgctcccaaccccagaacctttgctgt

SEQ ID NO: 610568 - DNA, 75 bp, Homo sapiens
accccaaagttgcatttcctcgtcgagcgcaacccaagtgctctacggaaacgtattcgagaggacagaaaggcc

SEQ ID NO: 610569 - DNA, 90 bp, Homo sapiens
agcgaaatatcccgacagggttccggtggaaaaggattattcatacctgaaggagatatgtgatcaccaagccgaacagctgagcagaac

SEQ ID NO: 610570 - DNA, 100 bp, Homo sapiens
tagtggattaaaatctcccaagaggaatgacaaacaaccagctcttcagaactctcttgatagagcccaagcagccaagaataaaggcaataaatatttt

SEQ ID NO: 610571 - DNA, 98 bp, Homo sapiens
ctccaagacgccgtcgcttgaggtagatatagttgtaggtactccgggaagactagatgacttggtgtcaactggaaagctgaacttatctcaagtta

SEQ ID NO: 610572 - DNA, 97 bp, Homo sapiens
ctcctgagtagctgggactgcagaaaaattgtgccgacccctgccctggaagagcacagtacctccatgcattggtgtggcgaagacgactggggat

SEQ ID NO: 610573 - DNA, 100 bp, Homo sapiens
aagtgagctcgctcacttgtgatgccctgactgagctgctggctaagatcaccaacacagacgtgacacacactgtctttgctatgacttcatcatcact

SEQ ID NO: 610574 - DNA, 100 bp, Homo sapiens
ggagatcccaggcggtgacagagtggagccatggctagagcagggtttccaggcctgaggtgcccgccctggccccaggagaatgaaccagccgcagagg

SEQ ID NO: 610575 - DNA, 97 bp, Homo sapiens
gcgcgtcaagtatggccagtgctgggtcttcgccgccgtggcctgcacaggtatcgagaaccttccctgcgaacttcagaggaacttccagctgatg

SEQ ID NO: 610576 - DNA, 100 bp, Homo sapiens
tgcagtttgtcagaaagatggatcttgggaccggccaatgcccgcgtgcagcaattctgtgtccatcttcctctcctcattgactctgcatgaaggggat

SEQ ID NO: 610577 - DNA, 90 bp, Homo sapiens
gagccagtacctggaaaaggagtcttactactttgaccgcgatgatgtggctttgaagaactttgccaaatactttcttcaccaatctca

SEQ ID NO: 610578 - DNA, 50 bp, Homo sapiens
gctcgtgcactttacacacatgaggccttctggcggccgcccctggtttc

SEQ ID NO: 610579 - DNA, 75 bp, Homo sapiens
atagcaaacatcgatggcctactggggataacattcatgcagaacatcagatcatgagcgtcttgttgttcatcg

SEQ ID NO: 610580 - DNA, 98 bp, Homo sapiens
cactgaggagctcgcctgctgccctcttgcgcgcgggaagcagcaccaagttcacggccaacgccttggcactaggattgaagaatggcggtcacgag

SEQ ID NO: 610581 - DNA, 82 bp, Homo sapiens
aatgatgcttcctacttcctttccgtgcataagaagccgaatggtcccaggtgtgacaccttcagcaggtctcagggaagat

SEQ ID NO: 610582 - DNA, 82 bp, Homo sapiens
gtcgcgagcgaacgaccaagagggtgttcgactgctagagccgagcgaagcgttccgccgagcccgtcccttggcggtggtg

SEQ ID NO: 610583 - DNA, 75 bp, Homo sapiens
cgtgcccagagtagtggccgaataccagccctatgagtttgtctctctggaatggctgcaaaagtggttggatga

SEQ ID NO: 610584 - DNA, 82 bp, Homo sapiens
caagtggagcgcccacgtcatggaggtgctggggatgttcaaaagaagtctggctaaacatgttaaaaaaggagagcagata

SEQ ID NO: 610585 - DNA, 74 bp, Homo sapiens
agtaacccgtttgccgacccggatctcaacaatcccttcaaggattaaccacaatgaacggttggaattcctgg

SEQ ID NO: 610586 - DNA, 83 bp, Homo sapiens
caggcgcaggaggacagagcaatgggtgagagaactcttcacgctgcagtgcccacaccagcgcatcagagcagagtgacgat

SEQ ID NO: 610587 - DNA, 82 bp, Homo sapiens
tggaggagctgtgcagccgcgaggaggcgcgggaggtgttcgagaacgaccccgagacgctgtttgcagacaaggtcccaaa

SEQ ID NO: 610588 - DNA, 75 bp, Homo sapiens
acagacacaggacactttttagggttgcttttgaatgtgcctgagcgggctgacgcacgaggcacacaggaagga

SEQ ID NO: 610589 - DNA, 97 bp, Homo sapiens
aagaagcctctctacagtttgttgtagaaccaagtgaagccacaaacagatcaggagaagccgtacaagtgctcagagtgcagcaaggccttcagcc

SEQ ID NO: 610590 - DNA, 98 bp, Homo sapiens
cctggcgggcctcacgcacctggcggtcatcagcaacggtatctcccagagccccagctggtgtggccaggccccaggagtaggatggggctccccct

SEQ ID NO: 610591 - DNA, 80 bp, Homo sapiens
acgccccagaggaggtggggcctcgcgaagcaggagggccaaacatgtgggctattacctctgaagaacgtactaagcat

SEQ ID NO: 610592 - DNA, 90 bp, Homo sapiens
tgacaatgcatcgggcggtgtctcccacagagcctactccgagcctacaacacagcagtcccctcaggatgagcaggaaaagctcttgga

SEQ ID NO: 610593 - DNA, 90 bp, Homo sapiens
gcgttcaagaggatttgcctttgtatattttgaaaatgtagatgatgccaaggaagggaagctggtggcagactccgccaagcacctggg

SEQ ID NO: 610594 - DNA, 100 bp, Homo sapiens
ctgagcgtatgtgccacgccgcccaggagacccctctgctgcaccacttcatgcaaaccagtccagctacgggggcccagccagccagcagctgagtggg

SEQ ID NO: 610595 - DNA, 75 bp, Homo sapiens
gagcgtcacggcgtacgccctcatggggaaaatctccccggtgactttcaggattgggactcttctttggtgaag

SEQ ID NO: 610596 - DNA, 74 bp, Homo sapiens
tctgcctgtgtccctgaccatggctccctgcagtaccctttaacggagacccggtgagcctccattgataaaag

SEQ ID NO: 610597 - DNA, 98 bp, Homo sapiens
gtccctcaaggcccccgcgtggttcagacagacgccgcagccaggatggttgagtctgcgggccaggcatcgacatccgcaacgactatcagcagctg

SEQ ID NO: 610598 - DNA, 75 bp, Homo sapiens
gaaatttgtaagtgaagatcttcatcggtgtgcacttttaacaggatttggtgctatggagaaatttttggtaga

SEQ ID NO: 610599 - DNA, 83 bp, Homo sapiens
cctagccaatggtggtcatggagtagaagggagcgatactacaggctcttgcagccaatgccggaacaggatttgctgttgct

SEQ ID NO: 610600 - DNA, 99 bp, Homo sapiens
cgcaagagcgagccgcctgccccggtgcgcagacagagctattccagcaccagcagaggcagctggctaagagtcttgggcaggctggtgaaattgagc

SEQ ID NO: 610601 - DNA, 128 bp, Homo sapiens
tcacctcgcgtcgcgcccgggaggaaggaacgaggcaaggagctaaagcagcgtgcgttcagccctgggagaatggatcttggagaatgtctgaaagtccatgacctggctttaagagcggattatga

SEQ ID NO: 610602 - DNA, 83 bp, Homo sapiens
ctcacttttcttccaaggataagttgcaagagggagtgcatccgccccaacccttttccccctcgtctcctgtgagaattccc

SEQ ID NO: 610603 - DNA, 96 bp, Homo sapiens
gaatcaaatccaaagagtgtctgacatttcttttgtgcaagatgagcctcaagtgcttctgcattacaggacaggccttcagtatttggcatcacc

SEQ ID NO: 610604 - DNA, 80 bp, Homo sapiens
ccggggcgcagttcggaggttcaggagcctgtgtgaaatgcagcaaaggggtgtttggggctggccaggcctgtcaggcc

SEQ ID NO: 610605 - DNA, 90 bp, Homo sapiens
ctggactctagggaccctgctgaatagctggggctacaggcgtgtgtcactgcgcccagaccctgctctctattccagaggtggtgaggg

SEQ ID NO: 610606 - DNA, 90 bp, Homo sapiens
cggggggcccagctcccgtagggagccgtgggcgctcggtgcccgggccgggcagatatgtgcagcgggggctacagcgagtggggctag

SEQ ID NO: 610607 - DNA, 75 bp, Homo sapiens
aaggattcttttcaatacatcctaaaacagatatgagcaagacagtgggcatgacagtggaagtgaggatgcctg

SEQ ID NO: 610608 - DNA, 74 bp, Homo sapiens
cctccacacgggcctccgaagagctgccgcgacgcccggcccgcagggcaggagctgcagaggctggagacaga

SEQ ID NO: 610609 - DNA, 102 bp, Homo sapiens
ctgaggaggggagtaaattgaaaatattggggccatttagtaacttctttgcaaggatgaaacaggcgcctatttaatcgacagagaccccacctactttgg

SEQ ID NO: 610610 - DNA, 100 bp, Homo sapiens
accagcgggagtggcggggcgcagcaaagggagctggagcgcatggctgaggtcttggtcaccggggaacagctacgcaaccatgtccaagggacctgca

SEQ ID NO: 610611 - DNA, 99 bp, Homo sapiens
ctcaaagccctgggtcgcttggaagaagccaagttgccagacttagaagacttgatgaaaagggagaaccagaagattctgactcccctggtgagcctg

SEQ ID NO: 610612 - DNA, 99 bp, Homo sapiens
ctgagacactggagcagcccagcaagcccagaggcttatgttcctgaggaagaattgaaggcagcagaaatagatgaagagcacgtggaggatgacggg

SEQ ID NO: 610613 - DNA, 75 bp, Homo sapiens
ctggtataccatcgtcaccatgacaacactaggggaacgtgctcagtcactttcaatgggcaccaggagaaaggt

SEQ ID NO: 610614 - DNA, 75 bp, Homo sapiens
caaactgctacaagacaacaccctgatctggcatggacatacaaatgctgtgcttcatgaagttaaaagagaggg

SEQ ID NO: 610615 - DNA, 100 bp, Homo sapiens
cttggatggaccctcagattgaaggacccggtggaccttgggggctctgggtttgcagagagccgaaatgaccatgactgccaacaagaattccagcatc

SEQ ID NO: 610616 - DNA, 98 bp, Homo sapiens
tggaggcagcccgcccctccggctcctggaacggagccctctgccggctgctcctgctgaccctcgcgatcttcagtcgtgctggtgaagcctgcaaa

SEQ ID NO: 610617 - DNA, 100 bp, Homo sapiens
gctgaggccctgagtgtaccaccagagcgggactctgactccgaacctactgatgatagagcggattcaccaagcacaagcagctgcagctaaagccaga

SEQ ID NO: 610618 - DNA, 90 bp, Homo sapiens
caacagtggcgcgaagacaggcagcacagcgcggcactgccccaacccccaggctggagcattggatttgctaaaggagcttaagaatat

SEQ ID NO: 610619 - DNA, 98 bp, Homo sapiens
ccacatgggtcccaaagtcttcatgaattgtgctggcttcctcaagatcgacacggcctccctgggggacagatgaccccgcatgagatcaagtttgc

SEQ ID NO: 610620 - DNA, 76 bp, Homo sapiens
cagaattgcaaagatgcatgagggaaaagtaatagaacctctgaaagattttcataaagatgaagtgagaattttg

SEQ ID NO: 610621 - DNA, 109 bp, Homo sapiens
gagctctcatgttctgcacctcaggagggaattcagcctcagtgatgtccatgagatgtctttggtggacttgggaaagaggttgctagaagcagcaagaaaaggccaa

SEQ ID NO: 610622 - DNA, 83 bp, Homo sapiens
tggcgttcctgttacctctcatcattgtgttaatggtgaagcacagcgattcccgaactgtggctgcaccatctgtcttcatc

SEQ ID NO: 610623 - DNA, 100 bp, Homo sapiens
ttcagcagtgtgctacagtttttagatgcatcaaattgcaatttggaggagaggcagcacaagcagaagcctgggcctggctagcagccaatcagctctc

SEQ ID NO: 610624 - DNA, 54 bp, Homo sapiens
cctgaatcttggtgtttggacataggagtgccgggggaagacatttccctccat

SEQ ID NO: 610625 - DNA, 83 bp, Homo sapiens
ctcctgtcgtccgttctctcaggctcccgttcaggattttttatcaagcagaaatgcatcgaacaacgagaatcaagatcact

SEQ ID NO: 610626 - DNA, 80 bp, Homo sapiens
gcgagcatgtgtcccgggcgctgtgcatccacactggacgcgagctgcgctgcaaggcagctgctggaggaggtgaagtg

SEQ ID NO: 610627 - DNA, 87 bp, Homo sapiens
aggaggatggcggagtcggggctcctgacgtggatgattcaacagccacacaaagcagcaacattttttggatgcattgggatagat

SEQ ID NO: 610628 - DNA, 90 bp, Homo sapiens
gacctcagtatgggctggaacctgacacttggcatgacagtgttaacagccaggtccttgcctgctgtgcagtctgatgaaagacttcag

SEQ ID NO: 610629 - DNA, 100 bp, Homo sapiens
gaccggttcgtcgcctccttgcccgtgaccgtcgctagaactcagttgtgcgttgcggccagtcgccactgctggaactgctcgcagaaagaagaaggtg

SEQ ID NO: 610630 - DNA, 75 bp, Homo sapiens
tgcggcgcgggccgagaaggaaggcactgtccaaaaaattgaatgacactcataatgaacttaatgacataaaac

SEQ ID NO: 610631 - DNA, 76 bp, Homo sapiens
cttcggtctcttcatgtatgccaaaaggatgcacctgctgccactcgacagcagttctacactgacatgtactgtc

SEQ ID NO: 610632 - DNA, 82 bp, Homo sapiens
tgaaccttcgaccttggacttctcagcctccagaatggctcgcttctcatatgtgcggatgaaatatcttttcttttcctgg

SEQ ID NO: 610633 - DNA, 90 bp, Homo sapiens
gggcaggtcatgagtcaccatggccaaaaggtgtgttttgctgacttcaagcatccctgctacaaaatggcctacttccatgaactgtcc

SEQ ID NO: 610634 - DNA, 90 bp, Homo sapiens
ctctgcatctccaagcccgaacgccccatgaagttcctccgggagcacttcgagaagctggagaagatggtcatcatgggccagtgctac

SEQ ID NO: 610635 - DNA, 75 bp, Homo sapiens
cgtcgccccgccgcgccgcgctccaaccgcctcctcctcctcagtaacgcgggcttaccttcaacagactcaaga

SEQ ID NO: 610636 - DNA, 100 bp, Homo sapiens
agcaagatcatgcagtaggcaactttgcttccaaaagaagttaccaacatttagaatttctacttattctgagttgctgatagtccaactccaccgccac

SEQ ID NO: 610637 - DNA, 87 bp, Homo sapiens
gtgaccgagagcgcgaatatcgtcatcgttagaaggaacgaatgcaggaatttgggaactgagctgtgcaagtgctgaagaaggaga

SEQ ID NO: 610638 - DNA, 100 bp, Homo sapiens
agcggatgtggcagccccgagccatggctctcgccgtccgagtcgtttattggagacagaggagctggaggaggagaagtcaggcctgcagaaggagatt

SEQ ID NO: 610639 - DNA, 75 bp, Homo sapiens
acctgggtgaactttcacggacaacctcagaggacaacgaagtgttcgatctttaatctcatgaagtacgacagc

SEQ ID NO: 610640 - DNA, 80 bp, Homo sapiens
ggcctgggcgctccggtggcggcggagagtgtgaacatggctacgcctcttcattcccgtccatgccgagcccccgactg

SEQ ID NO: 610641 - DNA, 100 bp, Homo sapiens
tgaaggaggatggaagggcaggacgaggtgtcggcgcgggagcagcacttccacagccaagtgcgggagtccacggtctttgactttgaactgagcagcc

SEQ ID NO: 610642 - DNA, 115 bp, Homo sapiens
agcccccacgcccaaccctcgtgcctccctgaaccactccactgcctttaaccctcagcctcagagtcagatgcaggccctaggtgatggcatcgctcctccacagaaagttctt

SEQ ID NO: 610643 - DNA, 89 bp, Homo sapiens
tccaggacacccctgaagccgagaaatgatcccatgcgaggcccaagaaaactagaagtagtggaggtcaaatctcggcaaatcactat

SEQ ID NO: 610644 - DNA, 100 bp, Homo sapiens
agggtgagcgacctgcgagactcacaagaggggaagctgacagagatacctacagacggagtgctgtgccacattgttgaacagataaatacgaaactgc

SEQ ID NO: 610645 - DNA, 76 bp, Homo sapiens
atgattgtgaggcctccccagccacgtgaaactaactgtgccgcataaatgaggatcagaaggtggccctggatct

SEQ ID NO: 610646 - DNA, 87 bp, Homo sapiens
tctgtgtacgctgaggggggagatgatgattattctccaccgtctaagagaccaaaggccaatgagctaccgcagccaccagtcccg

SEQ ID NO: 610647 - DNA, 96 bp, Homo sapiens
aaatcatgcttattgctacagtttacagacaagaggtttcagccagtgcatgaccttactattgtttggtaactctcattcgacatccatctgaac

SEQ ID NO: 610648 - DNA, 50 bp, Homo sapiens
tagtggcatggaagatccatttgaactaaagatgactcagagccatctgg

SEQ ID NO: 610649 - DNA, 80 bp, Homo sapiens
caaggtctgatggattctgtggagacccttcgcaggtgttacagtcgggtgaaagaacatggtgttgggaaaagaaagag

SEQ ID NO: 610650 - DNA, 100 bp, Homo sapiens
gcacagccaggacatcctggaacctgggaaaggatgttctcagtgcagctgagtcttggtgagcagacatgggaatccgaaggcagcagtataaagaagg

SEQ ID NO: 610651 - DNA, 90 bp, Homo sapiens
gtgaacgagcttttaagctaacccgggatgctattgagttaaatgcagccaattatacagtgtgaaaagcagcatctgttatagcaaaat

SEQ ID NO: 610652 - DNA, 75 bp, Homo sapiens
tggcatggtggtggatcgctgtggctgctcttaagttccaggtaaagacaatccttgcacaaggcttccaactcg

SEQ ID NO: 610653 - DNA, 100 bp, Homo sapiens
tcccttccagccctgggatggactagatgagcacagccaagacctgagtgggaggctgcgggccattctccagccgagagggtgacctctctgggcaagg

SEQ ID NO: 610654 - DNA, 115 bp, Homo sapiens
agtgattccagtgcctatagaggtacctcttaccagaaaggtcctccaaaagctggggaaagctgatgagacaaaagacgaacagttcgaagaatatgtccagaacttcaaacgg

SEQ ID NO: 610655 - DNA, 98 bp, Homo sapiens
aagaccacctcctgctctgggaccggaggagacatcggcctctgcaggcttgccgaagaagggagggaggaggtacaggagaactgtgtgcggtggcg

SEQ ID NO: 610656 - DNA, 100 bp, Homo sapiens
gggagccgttggctgggaccgtgcgcgtgcgcctgggggcaccgctgccgttccgagtaagactttgaccccgacgcaggcttcagtgattgccgcggat

SEQ ID NO: 610657 - DNA, 51 bp, Homo sapiens
attacatgaagtatcatgtttctgaaccataaatccatggctaaccttgac

SEQ ID NO: 610658 - DNA, 100 bp, Homo sapiens
ctagtgatcaaaatataccagtaggcatctgcaatgttaccgtggacgacttatgtcaaattatgcctgtacaggtttgcagattccgccagcagcacag

SEQ ID NO: 610659 - DNA, 82 bp, Homo sapiens
ctgaggttcttcactcgcgactgacggagctgcggtggcgtctccacacgaattcaaggaagccttctccctatttgataaa

SEQ ID NO: 610660 - DNA, 90 bp, Homo sapiens
cacgcctggcctcactcaaacagtaaacgagatttgtcccatcagatgaaaagaagaaacaaggttgtcaacgagaaaatgaaactctaa

SEQ ID NO: 610661 - DNA, 49 bp, Homo sapiens
tcgttgctgaacgtgcgcagggagcatttttgaaacgttggggttgttg

SEQ ID NO: 610662 - DNA, 100 bp, Homo sapiens
aagaaaaaagaagaagtccccgagttcaccaaaattcagacattcaaaccagtccagctacgggggcccagccagccagcagctgagtgggggttacgga

SEQ ID NO: 610663 - DNA, 75 bp, Homo sapiens
cgcagtgatttgctccccctcgtgcagcaacccccacacccagcaccaggtgtccagcacatcttcactggaagc

SEQ ID NO: 610664 - DNA, 82 bp, Homo sapiens
gcggcagccgaggccgcgaactgcatcatggagtgcacgtgccggaaggacatggtcaagatctccatggacgtgttcgtgc

SEQ ID NO: 610665 - DNA, 101 bp, Homo sapiens
ccatcattgccctttccaattacagacttcacatcaagttcaaggagtctcttgttaatgctagcttgtcactttctgcaaaggtttccctcagggagcct

SEQ ID NO: 610666 - DNA, 99 bp, Homo sapiens
accgaggctgaggatgatggtagattgccagggcgccctgcgtccggcagaggaggcgagcatcccgctcaggtgatgaggaacccctcgcgcacccag

SEQ ID NO: 610667 - DNA, 73 bp, Homo sapiens
acagaagttgctgctgacgctctgggtgaagaatggaagggtactagatggaaacttgagaaaggactgctta

SEQ ID NO: 610668 - DNA, 83 bp, Homo sapiens
cctagcaccccgagaaccgtcagtttgagccagatgagtcatcttagtgggatttggggaagcaacagggctgtgtggggtaa

SEQ ID NO: 610669 - DNA, 82 bp, Homo sapiens
gcttgggagagctcctgggccacccctcctttcaggtcaagatgaaggatttgggggcagagcacttggcaggtcatgaagg

SEQ ID NO: 610670 - DNA, 74 bp, Homo sapiens
cacgaagcttttaaaaaaacattctacccaagtctacctgggaccgagtataatgtctcaggaaggcgattatg

SEQ ID NO: 610671 - DNA, 90 bp, Homo sapiens
gtgggagtctccgcgtcccgctcgctgggagagaggtacctctccttttccctctccctttccctaagcagggagagcaacaagccccgg

SEQ ID NO: 610672 - DNA, 80 bp, Homo sapiens
aaaggcggccggcctggtgcgcaaggccccgaacaacaggtgctgccttcacctgcctggagactgccttccgcctggac

SEQ ID NO: 610673 - DNA, 96 bp, Homo sapiens
gccgatcctccaggcatgccccgctacgagctggctttaatcctgaaagccatgcagcggaaatctccaaattggacatccagagcagcattcttg

SEQ ID NO: 610674 - DNA, 74 bp, Homo sapiens
aggaggccttccccgggcggagagcccctctccagcatggagccaagttagttttgtatttgtcagagttgata

SEQ ID NO: 610675 - DNA, 101 bp, Homo sapiens
aaattttccttgacctttaggtgcttttatattcatctcaaaaacaaaattctgaactcaggacttggcaaacctgtgaccgcatcaagcagtcagcagct

SEQ ID NO: 610676 - DNA, 101 bp, Homo sapiens
gctgctgctcctgggactagaaggtcctggatgcctcatcccttagtttcaacaccagattgaaatggtttgccatctgcttcgtatgtggcgttttcttt

SEQ ID NO: 610677 - DNA, 101 bp, Homo sapiens
agcgacaagccgctggcagccgcggatctcaccgccgctcagggacggcggctccctggaccaggtgctgaaagaggccaagaggattcccgaggagatcc

SEQ ID NO: 610678 - DNA, 74 bp, Homo sapiens
aaagaattccatcggacatggtgtttcttaggacttcagaaaaagcagtagagacggggtttcgccatgttggc

SEQ ID NO: 610679 - DNA, 151 bp, Homo sapiens
cggcgcaggtcccggccgagtgtggcgcagcagtggcggcgcttcccattcgccatgcgccgggggtgggtgcccgaagtcaccattactttaagtactgcaaaatctcagcattggctctgctgaagatggtgatgcatgccagatcggg

SEQ ID NO: 610680 - DNA, 80 bp, Homo sapiens
aggcaaagttgtatccaggaaaatcattgtgttggactctggattgatgctggaagtagatacgaaaatgagaagaacaa

SEQ ID NO: 610681 - DNA, 82 bp, Homo sapiens
gacgaccccgaactccaggacagcatccaggcctcattggacagcattcgaggaggctactcacagtcgaactacaactccc

SEQ ID NO: 610682 - DNA, 100 bp, Homo sapiens
gaggagatcacaccccgacggcagtccatgacggtgaagaagggagagagctcaggccccggggcctccagcggcaccagcggagaccacggtgagctcg

SEQ ID NO: 610683 - DNA, 100 bp, Homo sapiens
atcagagattgagaatgtccatggatttgtttctcattctcatatttcaccaataaagtaccttggccatgtagaagttgatgaatcaagaggaatgcac

SEQ ID NO: 610684 - DNA, 50 bp, Homo sapiens
catggcctacccgggatacggaggagggggaaaggaaaacctcttcagcg

SEQ ID NO: 610685 - DNA, 83 bp, Homo sapiens
ttcagcagaagaaacacttcctataaatctcgcccaaacaggaaaggatcataaaaggattcctctgtactagcacactcccc

SEQ ID NO: 610686 - DNA, 50 bp, Homo sapiens
atttatccaacagctcctcccagattcaagaaatccatggtgaaaggttt

SEQ ID NO: 610687 - DNA, 97 bp, Homo sapiens
gccatcaccgacctcatcagtgagctgtccctgctggaggagcgcttccggagtgcttgtgcacagagctcgaaaactagctcaacaatactatctt

SEQ ID NO: 610688 - DNA, 51 bp, Homo sapiens
atatttggtccctggtcagtttctgctttgaaatctcctgcaaagaagctg

SEQ ID NO: 610689 - DNA, 74 bp, Homo sapiens
ctggggatggcgcatcacacaccaaagaaatgcactcggtgatggaaagagagccactattctgaagaacactt

SEQ ID NO: 610690 - DNA, 74 bp, Homo sapiens
gcggcggtcggagaagtggcctaaaacttcggcgttgggctctggagctcatgacggtgctggtgggcagcccc

SEQ ID NO: 610691 - DNA, 95 bp, Homo sapiens
aatctacgcaagaatgaactggagacagagaatagttgaggagctcaagcttgggaaaatggtgtgcattccttgtatcgtcattccagttctgc

SEQ ID NO: 610692 - DNA, 46 bp, Homo sapiens
tgacagtcacaattttgtaataaggaaagaccacagcaagattctt

SEQ ID NO: 610693 - DNA, 89 bp, Homo sapiens
gtttacatcaagaattttggagaagacatggatgatgagcgccttaaggatctctttggcaagtttggacagagcgggatgccaccagc

SEQ ID NO: 610694 - DNA, 98 bp, Homo sapiens
gatgaagattcaccaaataagctatatactttggttacctatgtacctgttaccactttcaaaagccacatctatcccaaatttctcttatatgggag

SEQ ID NO: 610695 - DNA, 101 bp, Homo sapiens
cattaaggtctggtcggatggggcaggatggctgcgttgacacgtcttatttaatccacatcataggttgaaggggcccggccaggactcggggaagggtg

SEQ ID NO: 610696 - DNA, 75 bp, Homo sapiens
agcggcgggacgccaggacgcggcgagcaaggtatgcagtggaactgatgaagaccctgatgataaaaacgcacc

SEQ ID NO: 610697 - DNA, 98 bp, Homo sapiens
gtgaatcccctgtttgagaaaaggcctaagaattttggcattgttggaggagagcagattagtgccattggaaggggcatatgtgtgttgctgggtat

SEQ ID NO: 610698 - DNA, 98 bp, Homo sapiens
cgagccgcgccgggcccctggacggcgtcgccaaggagctgggatcgcacttgctgcaggttaccttttcagccaagggcatctgacccgtgctattt

SEQ ID NO: 610699 - DNA, 100 bp, Homo sapiens
ctggaagcgcggggcggccgggagggggcagtcctcgccggcgagttcagccgaaatttgacacacatgcaagatgaagtaaatgtgaagtcacatcaga

SEQ ID NO: 610700 - DNA, 82 bp, Homo sapiens
acttggactgcagcgatggcagcgatgaggaggagtgcaaagcgaggaaaagccacagccccgtgaagcgtccgcggaaagc

SEQ ID NO: 610701 - DNA, 82 bp, Homo sapiens
aggcagctctcactcaggcaaagaggcaaatttctggagatgtgcaatgatctcttagctagagtggagccaccacttcgta

SEQ ID NO: 610702 - DNA, 90 bp, Homo sapiens
aggaagataagctgaggcacttcagggagtgcttttatattcccaaaatacaggatctgcctccagttcttcagattattaaggaatccc

SEQ ID NO: 610703 - DNA, 100 bp, Homo sapiens
tgagtttgaatctatggaatgtctacagcaagatggatcctatgtctctggagagtttgctttcagatttctcctgtcttcaccttccgccacccgcttc

SEQ ID NO: 610704 - DNA, 90 bp, Homo sapiens
atttaaagctattcaaccagatgtaatatagctgctgctggaagtgacgagaagtgcaagctggcgatgcagaggggtgcgcagtccagc

SEQ ID NO: 610705 - DNA, 76 bp, Homo sapiens
gcttcgcagtctggaaagctttaggagttcacagtatacgtcggtaacctttccagagatgtgacagaagctctaa

SEQ ID NO: 610706 - DNA, 82 bp, Homo sapiens
gcatccccgaggaggaagacgaatcgttaaacatcttaggtcagctctggatgagggggatattgccttgttgaaaacttat

SEQ ID NO: 610707 - DNA, 80 bp, Homo sapiens
aaatagtgatagctttgataagcttttaaagaagcagttttttcaccgagccctaaaagtaatgaaaatgaaatatgata

SEQ ID NO: 610708 - DNA, 90 bp, Homo sapiens
aacgacgctttcaaagatgcactgcagagagcccggcaggtggatagatacttctcaagacatcacacagcgtgagtcaatcaaggaggg

SEQ ID NO: 610709 - DNA, 78 bp, Homo sapiens
gagccgcgggcggcgcggcccagctcgttccagctggagcagatccgcagggacatccgagacttccggtctagcgcg

SEQ ID NO: 610710 - DNA, 50 bp, Homo sapiens
cttgtgaccctgcagctcctcaaaatgaagactggcccatttgcagagca

SEQ ID NO: 610711 - DNA, 95 bp, Homo sapiens
cggagtggggtgtcggcgcctcattcgggtggagctgagccggagacaggttattcagcttctcaaggctggaaaagcgaaggaagtttcctaca

SEQ ID NO: 610712 - DNA, 90 bp, Homo sapiens
gaatgacctggtgcttgtcattatcgctttagataatgataccattacttagcacaatgggaaatatatagtcttgctgtgtcgcccagg

SEQ ID NO: 610713 - DNA, 100 bp, Homo sapiens
tcatggtggtcatttcgtacatatgagagggttgccttttcgtgcaactgaaaatgacattgctaatgagaggccccctttcatccctgaaggagtggtg

SEQ ID NO: 610714 - DNA, 98 bp, Homo sapiens
aaaggaaggactggtcatctctttcatatctcaaaaccatggctcagagtaacccattagaatttaaccccgatgtcttgaagaagactgcagttcag

SEQ ID NO: 610715 - DNA, 75 bp, Homo sapiens
gggagtttgctaaatttgaaaaggagaaaatgaatgccaaatgggacacggaagagagagaaaatccttcaaaac

SEQ ID NO: 610716 - DNA, 100 bp, Homo sapiens
gcatgtcagaatacatcaccacggctctgcgtgacacccggaccaccaggccttcccttcttcttggtggtgttcttgagtaagataatctggactggcc

SEQ ID NO: 610717 - DNA, 116 bp, Homo sapiens
agtggatgaacatgtgcttggtgtcgtttttccttgagctgaacgtcttgcaacagtggccgcacgcatagccaaaactggacaagccaaggcatctgtagccaaagtaaacaaat

SEQ ID NO: 610718 - DNA, 82 bp, Homo sapiens
gacaagccgctggcagccgcggatctcaccgccgctcaggggaagcccgtcagcctgagctacagatgcccatgccgattct

SEQ ID NO: 610719 - DNA, 74 bp, Homo sapiens
gccgcggctctccaagttctaccagccctacacagaaccaatcaaactggtgttgaaccgtgttatggtgacaa

SEQ ID NO: 610720 - DNA, 96 bp, Homo sapiens
ctgcgaaggccgggacccggttccccggcccacagtgggggtgtgcaaacccgagagaactgggtagttacttttggtgacgctgtccagttccca

SEQ ID NO: 610721 - DNA, 90 bp, Homo sapiens
ctgcgttgtgaggggtgtcagctcagatgaccaggacctggatgagctccagctggagatggaggactcaaagccacaccccagtgtcca

SEQ ID NO: 610722 - DNA, 90 bp, Homo sapiens
cgtcattggcacaggaatacaagggtggctgtacttttgatgatggtccaggggcctgtgattaccaccaggatctgtatgatgactttg

SEQ ID NO: 610723 - DNA, 75 bp, Homo sapiens
gaatcatttgacaaactgctttcccatagagaacattactactggatggaaatccattccgagttcctcgagcag

SEQ ID NO: 610724 - DNA, 101 bp, Homo sapiens
gcagccagaagaggactgggaccgggacctgctcctggacccggcctgggagaagcagcagagaaagagttatggattcactaccagattctactgtatgc

SEQ ID NO: 610725 - DNA, 100 bp, Homo sapiens
gctcctgcagtctctctgtgtggctgtaacttacgtgtactttaccaacgagctgaagcagggttatatcctgtgttgtgacctcatggtttaagtggga

SEQ ID NO: 610726 - DNA, 75 bp, Homo sapiens
tggattcctccatgactcaaggcacagactctccaggtcatcatcagatttgaaatatttaaagtggatacaaaa

SEQ ID NO: 610727 - DNA, 82 bp, Homo sapiens
cttaaaacacgcctgcaaaccctccagccctcagatcatgggcatttgtctggccttcccttttactgctggctgggaagga

SEQ ID NO: 610728 - DNA, 83 bp, Homo sapiens
cgtgaccctcagcgccggtgcatgtcgattaaggtacctgccgtgggcagatctgagctttcttcttggacaccccataccca

SEQ ID NO: 610729 - DNA, 106 bp, Homo sapiens
aaaatgctgggaactgaccgttgtgttgtggaagaatggttatcagaattcaaggtgtgataaagcggaattgggaatatatatgtagccatgataaagaaaaaac

SEQ ID NO: 610730 - DNA, 100 bp, Homo sapiens
cttccagctgtttgaccgaacaggaccatcgatcgttctgtttttaaaccaattgtccaaatagcagtgattgaaaattctgaatcactggactgtcagt

SEQ ID NO: 610731 - DNA, 98 bp, Homo sapiens
gatgattttgcagttacctgggatccatggagtcctgctataaggaattagaaggtgacgaggagggagaagacgaggatgatgcggaaattaacccc

SEQ ID NO: 610732 - DNA, 97 bp, Homo sapiens
ctggaaaacttcccttccctttcggtgatgggcagaatctgtttacgaaagacgtgacagtgatcgagggagaggttgcgaccatcagttgccaagt

SEQ ID NO: 610733 - DNA, 50 bp, Homo sapiens
taaacggaacttgcctgtgaatttcgagtggaagatagatgataagcctg

SEQ ID NO: 610734 - DNA, 112 bp, Homo sapiens
cgattccggatctcattgccacgcgcccccgacgaccgcccgacgtgcattcccgacaatgcagatcttcgtgaagactctgactggtaagaccatcaccctcgaggttgag

SEQ ID NO: 610735 - DNA, 75 bp, Homo sapiens
atttctgtgccattgctaggttaattgggaccaaaacatgtagacagatcattgctgaaggtgccaatgggccaa

SEQ ID NO: 610736 - DNA, 75 bp, Homo sapiens
agtttttcaccctcacgctgatgaacttgtacttcacgcaggagaactacgatgacccgcacaaaacccctgcct

SEQ ID NO: 610737 - DNA, 100 bp, Homo sapiens
agcggaggagcctggcggccaccccctcttcctcacttccctgtactctcatcgctctcggcctccgacacgcgcgtacttgctttgtaagtgatctgaa

SEQ ID NO: 610738 - DNA, 100 bp, Homo sapiens
gctggcaggctgccttccctgacccccagttacgcctggaatatgaaggcttccccgtcccggtgctggagaatctggtaaaagcaccattgtgaagcag

SEQ ID NO: 610739 - DNA, 124 bp, Homo sapiens
gcggggtgcgccggcagaggatccagtgttcaccatcctggccccggaagctgcgccaacggaggaggctactaccactattcctactcggtggtgaggggctgcgaccgcatcgtgcccgtgg

SEQ ID NO: 610740 - DNA, 75 bp, Homo sapiens
ggccgcttttgagaggacaagcccagattccaaaacttatgtcaagttgtctgcattcaaaagagcattctatta

SEQ ID NO: 610741 - DNA, 100 bp, Homo sapiens
cgaacagataatcgtccacgtaatccaagagaggctaaaggaagaacaacagatggatcccttcaggtacgacaccgagcttctggtcaggtgatggctc

SEQ ID NO: 610742 - DNA, 100 bp, Homo sapiens
caggttctcagactgcacctcaaacgattcaggtggttatcactaggctaaaactggacaaagaccgcaaaaagatcctcgaacggaaagccaaatctcg

SEQ ID NO: 610743 - DNA, 78 bp, Homo sapiens
aagcagcaaccaatgatatatatctgtggagcaacaggtcaccttcaagccagtgtcctgacccagtgccttaaggtt

SEQ ID NO: 610744 - DNA, 75 bp, Homo sapiens
gtgcgggcgcagctggcggagctggagctggagctctcggagggatcaaaatacttgctggatggtggactcaga

SEQ ID NO: 610745 - DNA, 96 bp, Homo sapiens
gaaggagaaaagaagaccatgataaagaagattatggaagtatttgaaaaggagcagtccatctgtgctgcagaggaacagccagcagaagatggg

SEQ ID NO: 610746 - DNA, 100 bp, Homo sapiens
gcagctgcagccgcagccgcctccgaagatgggggatttctacgacccggagcacccgacccctgagtgacagaccatgccaccactgccctgctccact

SEQ ID NO: 610747 - DNA, 100 bp, Homo sapiens
aggcaagcgcagggggacggggaccagcagctgtcgccgccgctctcagaggaggaagcttgacgctgtctattactatatgcgcagtttagctgccagc

SEQ ID NO: 610748 - DNA, 51 bp, Homo sapiens
cttctttttaatgcattaaagcacatggtagtgggcagcagtcagtgacag

SEQ ID NO: 610749 - DNA, 83 bp, Homo sapiens
ccaccatcaagttcttcaggaatggagacacggcttcccccaaggaatatacaggtgcctgtggacatacgagatccagttct

SEQ ID NO: 610750 - DNA, 100 bp, Homo sapiens
cagaacaacaaggtgttgatgccgccggacggcagtggagctactgctgtggttcaggcagccctatgcaaacccaggcaagaacgtgtagcaataaaac

SEQ ID NO: 610751 - DNA, 98 bp, Homo sapiens
tggaggagctgtgcagccgcgaggaggcgcgggaggtgttcgagaacgaccccgagacggagaataaaggcagccccgttgatgactgaaaatgacaa

SEQ ID NO: 610752 - DNA, 98 bp, Homo sapiens
tgttggggaacttcacagaggccacgaccttccacaaggagcatggagatatggaccaaaaggaacgagacgtgattatgagggagtttcgttctggc

SEQ ID NO: 610753 - DNA, 100 bp, Homo sapiens
gccccaggcctcctgtgggacgccagtcaccagcaggagcagccaaccagcagcagccatcatggaggtgctggagaatctggtaaaagcaccattgtga

SEQ ID NO: 610754 - DNA, 90 bp, Homo sapiens
gaactgtcggaacagaaccaaaggctattggatcagctcagcaggggtatgttagagcccaccaaggaaccactgaaaccactttctgct

SEQ ID NO: 610755 - DNA, 58 bp, Homo sapiens
ctctacttagctcagcaattcttaccttccaagaaggatcaagaaggtggagaagaaa

SEQ ID NO: 610756 - DNA, 82 bp, Homo sapiens
aggaaggacagtggagtctggcatcttattgttcaaactggaaacaagatggatgatgtgtcaagaagactaacagctgaag

SEQ ID NO: 610757 - DNA, 93 bp, Homo sapiens
ctgcagagaacagccccaatcaccgtccttacacggcctctgatttcatagaagctcaaatctaatccaagtgaaaatgaagaaaaggaagca

SEQ ID NO: 610758 - DNA, 90 bp, Homo sapiens
atcaacatcatcattgccttcttctacccttacatggagggcgcgtccacaggtcagaatggcggcagtggagcatcgtcattcttcagg

SEQ ID NO: 610759 - DNA, 100 bp, Homo sapiens
aggtttatttccaaagttgaagaagtcttgaatgactggaaactgattggaaactctttgggaaagccactcgaaaagtgaccctggaaacagacggggg

SEQ ID NO: 610760 - DNA, 73 bp, Homo sapiens
aaggatgctcctgggatttcggagaggccgcaggagtcatttcagttgaagtattgataacaccaaggaactc

SEQ ID NO: 610761 - DNA, 100 bp, Homo sapiens
ataggagtgctctacttggttctcagaacatgggccctcgtttaaaggattgccaaggatccaagatttgaacgattaccatgtacacacaaaggaacct

SEQ ID NO: 610762 - DNA, 100 bp, Homo sapiens
cctacaaggaatctgagggtgccctcaatgagcacatgaccagcttagcttctgtcctaaagggttaaagcacgaattgggagctctcagcgacatcacc

SEQ ID NO: 610763 - DNA, 101 bp, Homo sapiens
gtggaagcagagagcccgggccctgtgccggttctttggcatggacacaagttcagtgggaggattagaattgactgatcagactcctgttttattaggga

SEQ ID NO: 610764 - DNA, 50 bp, Homo sapiens
gccgggagctggtacacagcctcaggtcaccctgctgattgccttcatct

SEQ ID NO: 610765 - DNA, 51 bp, Homo sapiens
ctccactgggccaagaacgcagagatttcacagagatgatgagagccctgg

SEQ ID NO: 610766 - DNA, 101 bp, Homo sapiens
agaagaaaaggtgtacttgcaagaaacctcaggacttgagtaacagcaacatgtgcctcactgcttccagttgctggaggatatgtggtgctgcactgaca

SEQ ID NO: 610767 - DNA, 90 bp, Homo sapiens
gcggcgagccgagcgaggcagctctgagccgcgcggtactccaaagattcaggtttactcacgtcatccagcagagaatggaaagtcaaa

SEQ ID NO: 610768 - DNA, 100 bp, Homo sapiens
ggatgattatttcagaaactggaatcccaacaagccctttgaccaagaaatgcactcggtgatggaaagagagccactattctgaagaacacttggccaa

SEQ ID NO: 610769 - DNA, 75 bp, Homo sapiens
ttcggcagtccacccaccgccgccgcctcccaggtttggggaaaggtgctgctgaagcaatggaagaaaaattaa

SEQ ID NO: 610770 - DNA, 83 bp, Homo sapiens
gcttctcagtgggacaccgggaagtgtttgtggagaaggtgctgcagagactttttcctcctgttccaagtggccaaggaaag

SEQ ID NO: 610771 - DNA, 90 bp, Homo sapiens
gctgatgagaactcaggacgtcaaatatatagaaatgaagagggttgcagaagctaagtgcctccggagccagcgtggtggccatagaca

SEQ ID NO: 610772 - DNA, 98 bp, Homo sapiens
ccttgtacagcaatctcctcctccactgccactacagggaagtgcatcacatgtcagtgaatggtagtgtctagaaagggtatgtcccttcaagagag

SEQ ID NO: 610773 - DNA, 90 bp, Homo sapiens
gaagaacatgcatatttgggtccaactgtgaagccagatgataagggcttcctcagccgccgcctcaagggctccatcaagcgcaccaag

SEQ ID NO: 610774 - DNA, 75 bp, Homo sapiens
caagctggaggtggacgccatcgtcaacgccggtgcagatcccaagtctgtagtatgtgcattcttcaagcaagg

SEQ ID NO: 610775 - DNA, 90 bp, Homo sapiens
cagagctagccggacgtcctccgactcaagatgtttctttctcagcaaaatagaggagaagcttacccctcttccagaagataatagtat

SEQ ID NO: 610776 - DNA, 100 bp, Homo sapiens
ttggtggaccagtgttcccgtggcttgtgttgggaggctatgatgatttggagcaagaggtggtggtggccttcccccgaagaaatttggtaatcctggg

SEQ ID NO: 610777 - DNA, 80 bp, Homo sapiens
aaatatcagtgcttcaccattaactagtaaagcagtacaagagatcttaaaccttactcaggcattgagagacgggaaga

SEQ ID NO: 610778 - DNA, 101 bp, Homo sapiens
tgacttccggagagttgtggactttatagatgaaggggtcaacattggcttagaggtgaagagcaagactggacccgtcgccatgggccgtgtgatccgtg

SEQ ID NO: 610779 - DNA, 100 bp, Homo sapiens
tttttcatttccatttctaccttgtatgcctcaatttgctggatttaagcactgctgcactttatgaggtgtgggaataagtatctttggaagaccaggc

SEQ ID NO: 610780 - DNA, 74 bp, Homo sapiens
aacagtacagagttgtacaggaggaaaaccagagttgtctgctggttctcagcttgaagaagattctgcagtcc

SEQ ID NO: 610781 - DNA, 101 bp, Homo sapiens
ggagtcatgagcgacagcggcgagcagaactacggcgagcgggtgccaatgggtcatgtttggttagaaggtgacaatctacagaattctacagattccag

SEQ ID NO: 610782 - DNA, 83 bp, Homo sapiens
cagaatcaccatggccagctatccttaccggcagacaatgcagatcttcgtgaagactctgactggtaagaccatcaccctcg

SEQ ID NO: 610783 - DNA, 74 bp, Homo sapiens
gttggaagcagccgatccagcctgcggagcctgtggggcaggtgtgtgtgtgcaggccacagcagcatgccctt

SEQ ID NO: 610784 - DNA, 80 bp, Homo sapiens
gcccaggcgcagatgcgggccctgctggaccagctcatgggcacggctcgggacggtgaaggacttaactaagtacttgg

SEQ ID NO: 610785 - DNA, 50 bp, Homo sapiens
gcaagaccgcgaggcgagacctcttaatgtggccccgtcccagagcacca

SEQ ID NO: 610786 - DNA, 101 bp, Homo sapiens
gctgctgatgctgaagctgtgcaccgaggtccgtgtggccaacgagctcaacgccaggcgccgctcctttacaggactcacaccacccggcaagaactgct

SEQ ID NO: 610787 - DNA, 75 bp, Homo sapiens
tgcaggacggcgcggcagagtccccgtacgcctacagtaacggaagctcttcgtgggcggtcttgactggagcac

SEQ ID NO: 610788 - DNA, 50 bp, Homo sapiens
tggggagcttgaggacacttaccacgaacttggtgatccagctatttttc

SEQ ID NO: 610789 - DNA, 82 bp, Homo sapiens
gccagagtcacacacggtcctaagagctgggcaccaggaagcgaaggctggttcttagactctgtgagtaaagacagcttca

SEQ ID NO: 610790 - DNA, 95 bp, Homo sapiens
ctgcttggacacagccaaggatgccgtcatcagcctgtgtggccacctcttctgtggaatgcagtagccctctgggcctgggatattgtggttga

SEQ ID NO: 610791 - DNA, 117 bp, Homo sapiens
gctgcccttagccagccagtgttgcccttggccccctcgtcgtctgccccagcccccaaatacatcaagatgtttgtactggatgaagctgacgaaatgttaagccgtggattcaag

SEQ ID NO: 610792 - DNA, 50 bp, Homo sapiens
gagaaaggcgggcccgggaacagagattggaaaggtgtatgagcattgtg

SEQ ID NO: 610793 - DNA, 98 bp, Homo sapiens
ggaccctggaagagaagagggtggctaatgattaaggtccctggatggccggttgcaggtgtcccatcggaaggggctccctcatgtcatctactgcc

SEQ ID NO: 610794 - DNA, 88 bp, Homo sapiens
ttccaacaaaagaatgctgccgcagacatatctgaagagatggattaagaatgctttggattaaggattgtggagcacatttcaatca

SEQ ID NO: 610795 - DNA, 98 bp, Homo sapiens
ctcggctcctcccaggtggcctcccgcgtgctggccatgaagtcttactactttgaccgcgatgatgtggctttgaagaactttgccaaatactttct

SEQ ID NO: 610796 - DNA, 83 bp, Homo sapiens
cgtggaggagctgtgcagccgcgaggaggcgcgggaggtgttcgagaacgaccccgagacgatccacctccgacccttaagcc

SEQ ID NO: 610797 - DNA, 98 bp, Homo sapiens
aatcccccactctttccgccctaatggaggtctccagtttcggtgtgatgaatgcagactctgctaccattttggctgtttggatcctcctttgaaaa

SEQ ID NO: 610798 - DNA, 100 bp, Homo sapiens
aaataccatcgtttcttgggtcgtcatttcccccgcttctatgtcctgtacacaatcttcatgaaaggtgtcatggagaaactccagctgggcccagaga

SEQ ID NO: 610799 - DNA, 82 bp, Homo sapiens
cttctggcaaacagtgtttgcctctggttcagctcatacaacagcttcttaggccgagacgcatccagagctttcgtgaccg

SEQ ID NO: 610800 - DNA, 101 bp, Homo sapiens
gatggaagcaggtttaaaattttacataagaagttacctttttcaggtgtctgatgatttgtgagcctcaagtgactactctgtggaatcatctgtccttg

SEQ ID NO: 610801 - DNA, 100 bp, Homo sapiens
ttcagcaaccgcccggtcctcatctacgagcaagtcaggctgaaggtgccgacgccaccgccgagcccatgatcctggaacagtacgtggtggtgtccaa

SEQ ID NO: 610802 - DNA, 82 bp, Homo sapiens
cgggaagcgtcgggattaggtgaaactgcctgtggaggaaccgattgtgtccacagatgaggtcatcttcccactcaccgtt

SEQ ID NO: 610803 - DNA, 100 bp, Homo sapiens
ctcctgaccctgaagaactgtgtagagatggggtttcaccatgttagccaggatggtctcgatctcctgacctcgtgatctgcctgcctcggcctcccaa

SEQ ID NO: 610804 - DNA, 75 bp, Homo sapiens
gctgacagtcctcctggaggggatctctggccaaggagtgtacggagtggaaacaaaatgtcagtcagtgtgcat

SEQ ID NO: 610805 - DNA, 50 bp, Homo sapiens
tattcctctcccactagctgttttagttcgagactataagaggcttaccc

SEQ ID NO: 610806 - DNA, 90 bp, Homo sapiens
tgaatttaacaaagcagtgatcagagtgaatgtatttcgagaacacaggcagactattcagccgagaccgacccgcccgcccgcggcccc

SEQ ID NO: 610807 - DNA, 100 bp, Homo sapiens
cgcggatgggatccagctgttagtcggattcaaccctatgaaaagataaaggccaggggcttgcctgataatatatcttccgtgttgaacaaactagtgg

SEQ ID NO: 610808 - DNA, 80 bp, Homo sapiens
gcagacttggccaaatggacgggactattaaggagccttcacgtaaatgggtccagtcatgcctcccagtaagaagccag

SEQ ID NO: 610809 - DNA, 74 bp, Homo sapiens
cgctcgctgggagagaggtacctctccttttccctctccctttccctaaggttatgaagacagtatggagtttc

SEQ ID NO: 610810 - DNA, 75 bp, Homo sapiens
gggcagcccgggaaatctccaagtcagaaaggaagcgttgggagatgttgtttattgtagtctccctgaagttgg

SEQ ID NO: 610811 - DNA, 100 bp, Homo sapiens
catgaaagccagaatggagaaggaactgttggagatgagacccttccggtcttcttttcaggttttgtagtgcatccctgagcatgagcacagaatgaag

SEQ ID NO: 610812 - DNA, 96 bp, Homo sapiens
agaaaatacaaatcacacgcataatggatgaaaggaaccgacaggtatgataagtattatcagcaacataatagttctgggcatcttcattaagta

SEQ ID NO: 610813 - DNA, 127 bp, Homo sapiens
tgatgacctcattaaccaactgacatttatcatggatgctaaccagacttacctggtgtcagaacgcctagaaaggatttgattgccttatgtgacaagcccaagatctgtgacagttggagctcaa

SEQ ID NO: 610814 - DNA, 100 bp, Homo sapiens
ccaggttatccctcgaactcctagctcatttcgacagccttgtcgggtcacaaatcttcgaagagtgacatatgttgttttagatgaagcagacagaatg

SEQ ID NO: 610815 - DNA, 74 bp, Homo sapiens
gaagcagctgctctagtgaaatggcgatgaagatgatgaagaggaagaggaaaatgaagctggtccaccggaag

SEQ ID NO: 610816 - DNA, 83 bp, Homo sapiens
ctcgggcgccccgcagccccccaacatcctgctcctgctcatggacgacatcgcaccccctccctccctggcggagcccctga

SEQ ID NO: 610817 - DNA, 80 bp, Homo sapiens
gccccagccccagccctacagaggtcagcccaaggccaaccccactgtcactctgttcccgccctcctctgaggagctcc

SEQ ID NO: 610818 - DNA, 98 bp, Homo sapiens
agcagctcctggacaggacggagaaccagatcagcagcctggaggccatggagccaaaaacctgtatatcatctccgtgaaggggatcaagggacggc

SEQ ID NO: 610819 - DNA, 100 bp, Homo sapiens
gaagaggttcagctgtcctaatcctcactgccgaaagcgcccgggggctggagaaggccaggcagcagctgcaggaggagctccggcaggtcagcggcca

SEQ ID NO: 610820 - DNA, 98 bp, Homo sapiens
ctgcggcagagcgtgtctgaggtggtgcgcggctccgtgctcctggaatcagtgacattcaaagatgtgtctgtggacttcacccaggaagaatggta

SEQ ID NO: 610821 - DNA, 74 bp, Homo sapiens
tcattaaagaaaataatgggaaggaagaagtatccaaggcatcattcttaacaaagaagttaaatattggtggg

SEQ ID NO: 610822 - DNA, 92 bp, Homo sapiens
ggaagaccgcgcgcagggcctgcagcgggagctggacggcgagcgcgagcggcgcgagaaagcgcctgtgtctggcagagctggtgtgagac

SEQ ID NO: 610823 - DNA, 75 bp, Homo sapiens
tgcagcactcaggccaggagggtcaatgagctgaaggagaaaggcaacaaggccctgagcgtgggtaacatcgat

SEQ ID NO: 610824 - DNA, 100 bp, Homo sapiens
ctttggttttagcaaaaggagcccggaggaacattccaaaggaaaaatttcagatttatgtgatcagtttggctgaaccccgtctgcccctgcagctgga

SEQ ID NO: 610825 - DNA, 98 bp, Homo sapiens
tacgatgctttggatgttgccaacaaagctgagtcatcactagagagtgggaagggcagcagcagcagagaatccaaaccctaaagctgatatcacaa

SEQ ID NO: 610826 - DNA, 101 bp, Homo sapiens
tggactctcagaataaaggaaagacctcagagtgttctcagtgtgatgaatgcagactctgctaccattttggctgtttggatcctcctttgaaaaagtct

SEQ ID NO: 610827 - DNA, 100 bp, Homo sapiens
cacctaaaaattgtataccgcagattcaggcattcctcctgaccagcagaggttgatctttgccggaaagcagctggaagatgggcgcaccctgtctgac

SEQ ID NO: 610828 - DNA, 83 bp, Homo sapiens
gtccgagccagccgctgttttgccggaggagcccctcaggccgtggaagttaaacgagctgagcctcgggacagcaagagcca

SEQ ID NO: 610829 - DNA, 100 bp, Homo sapiens
cgcacctcccaccccaggcgcagtatctgccgtcccagtcccagcagaggtaccagccgcagcagtgagtgtgtccgcttgaaaccaactgacatacagc

SEQ ID NO: 610830 - DNA, 83 bp, Homo sapiens
ccgccattttggatccgctgacaggtcacagagatgcggcggaccctgacgcctgccagctccccagtgtcctcgcccagcaa

SEQ ID NO: 610831 - DNA, 83 bp, Homo sapiens
agggcctgcagcgggagctggacggcgagcgcgagcggcgcgagaaagtcctagaccagaaggagcacaggctggatggccgt

SEQ ID NO: 610832 - DNA, 100 bp, Homo sapiens
ctgtggctcagcccgttcgctggactgcaaaccgagctcccgtctgccttgcagcattagtgccagcagtagttcccaagggctgtctcagccatccacc

SEQ ID NO: 610833 - DNA, 100 bp, Homo sapiens
atcttcatgtgtctcttctaagctgaataaagctgttttggaactgtcaggtacctcaaagcagtaaagacaagattgcatcctacagcaaaactccaaa

SEQ ID NO: 610834 - DNA, 100 bp, Homo sapiens
ccaaacagcacttcctggcaatgatagatacatcagtgtgggaagccaagcagatacaaagacaaagcatggaggacacaagaatgggaggaaaggcgga

SEQ ID NO: 610835 - DNA, 100 bp, Homo sapiens
tgaagaccatgttgcaggcccacagctgcctacagaaccgtcccaaaatatggcaaagaaacctattctgagccagaacatttgttgaacacaagtgata

SEQ ID NO: 610836 - DNA, 98 bp, Homo sapiens
ggtcctcctggctgtgctcatatacacctgaccctctttcccagctgcccgctcctcagcacccgaagattcgcctgtacaacgcagagcaggtcctg

SEQ ID NO: 610837 - DNA, 82 bp, Homo sapiens
tactacgtgcagcaggaggtcatcgtgctcttctgcgagacggtggagagaaataaggatctggcatgtcaacacaaacata

SEQ ID NO: 610838 - DNA, 75 bp, Homo sapiens
aaagaccacgaacttcaaaggggaaagcaaggccaaagacagggagaaggaaagaccacagcaagattctttcat

SEQ ID NO: 610839 - DNA, 100 bp, Homo sapiens
gccatggaggacgaggagagacagaagaagctggaggccggcaaagccaagtgatttgctgtcctctgaatacatagagagacacattgaacatggaggc

SEQ ID NO: 610840 - DNA, 75 bp, Homo sapiens
cactttcgccagcccgtgccgcgagcgcggcctgcaggagaacacgatgatgaacgcgttaatttccctcaaaga

SEQ ID NO: 610841 - DNA, 98 bp, Homo sapiens
gaaactgccacatgaaaaacaccacaatcaaccttattgtggcattgcgccgtacattcgagagtttgaggatgacgcggcatggcaagaactgcacc

SEQ ID NO: 610842 - DNA, 98 bp, Homo sapiens
agctgagatccatctgcaccacggtgctggcaatttgaatcaacccatagaagtgacagcgctgtattcatttgaaggacagcagcctggggatttga

SEQ ID NO: 610843 - DNA, 99 bp, Homo sapiens
gaaaatgtatgaaacaaacaagcaaccaggactgaaacctggccttgcaggtcgggtcggcagcggttctggtcggaacctgtgggtcagcgggctgtc

SEQ ID NO: 610844 - DNA, 100 bp, Homo sapiens
ttgcttatgactgtggcaaacaattttgttaccgacaagaactctggagaagtcatgacagtaggtgaaacgggagacattagaaccatggttttcccag

SEQ ID NO: 610845 - DNA, 83 bp, Homo sapiens
ccagcggctgggagagacgctgaatgaagaagagggaaggacggttagtcagcctactcaatttgaagacattgaggatgaag

SEQ ID NO: 610846 - DNA, 75 bp, Homo sapiens
aggtgccacagcagagacgcgaaggagaggccctagaaccgtgcttccaatagtcctggtcagcctaattctgtg

SEQ ID NO: 610847 - DNA, 98 bp, Homo sapiens
cctagagaaacgagttgtggctgaggaccccggcggcagacgcaggttcgggaccatgagctgatctcccttgagtttagaaatctggctgagaaata

SEQ ID NO: 610848 - DNA, 112 bp, Homo sapiens
ccggggcaagtgagagccggacgggcactgggcgactctgtgcctcgctgagggaccaagaatcgccttcagccctgtctggtgcatccttggcagaaagtgaggaggaaaa

SEQ ID NO: 610849 - DNA, 100 bp, Homo sapiens
aacgccctctccacttcggatgaagccagcatctagtagggtctccggccctcaagaaggttctctttgttcccagacactggtggcattacgtagaatc

SEQ ID NO: 610850 - DNA, 100 bp, Homo sapiens
cgcccagcacttcctgccggccggtcataaataaagttcatcttaaggcaaatcatgtggtcaagagagatgttgatgagcatttaagaatcaagactgt

SEQ ID NO: 610851 - DNA, 101 bp, Homo sapiens
cggaggcagcggctggaggagcgcgagcggcggtttccttgcccggggccgcgggaaggccgaccgactgccgcggaggcaaaaccttcaactgaggactt

SEQ ID NO: 610852 - DNA, 82 bp, Homo sapiens
ggaaaactggatgctgcagacactgaacgaggagccagtggactttgtgttttatgccccacgtctgagaatcaacaagcgg

SEQ ID NO: 610853 - DNA, 75 bp, Homo sapiens
ccgaattcgaatcaccctaacaagccgcaacgtaaaatccttggaaaagggttacttttcacatagaaccatata

SEQ ID NO: 610854 - DNA, 98 bp, Homo sapiens
cagacctgtatcctgtgggatgagacggatgtggctcagcgcctatcctggtggtcatggtgatcttgctcaacatcggagtcgccattctgtttatt

SEQ ID NO: 610855 - DNA, 101 bp, Homo sapiens
gactaaggcaaaggagtggaagtttgagagaagtttaagagaagaaatggacatgattgcctaaatcagccaaacacaggtttgctgaggctaaacactat

SEQ ID NO: 610856 - DNA, 88 bp, Homo sapiens
ctgacccaggttacggaccggaagtgctccagaactcaagatacttggcatatcgaaattttatgattgacacgtatcgtctaaaccc

SEQ ID NO: 610857 - DNA, 88 bp, Homo sapiens
gaaaagaagaccatctcaccagagcatgtcatacaagatcaaagaccaagctcaccaattcgacatcagggaaggaatgacgagcttg

SEQ ID NO: 610858 - DNA, 100 bp, Homo sapiens
ttagaggcatctgttctatcttcccatcataaaaaaatggaaggactggagctttgtggacaaagatgagaaggcccgtctgcagcaccaggtcactgag

SEQ ID NO: 610859 - DNA, 100 bp, Homo sapiens
cttgggactgggctcgatttgaggtcttgggcgtctttggtactggcttttttaggggtctgcctggggattacccttgctgtggatagaagcaacttta

SEQ ID NO: 610860 - DNA, 100 bp, Homo sapiens
acctgcccgctgtagatgagaaactcagccgagattcgggccctccaccctctacagtgagtgaagccgaatttgaagatatcatgaagcgaaacagagc

SEQ ID NO: 610861 - DNA, 82 bp, Homo sapiens
ctcaagaaagaggtgggcaagatcctgtgcactgactgcgattcctgtgaggtttctcgggcttatttggtggagtttctgt

SEQ ID NO: 610862 - DNA, 75 bp, Homo sapiens
ctaagagctttggtaactcattagcctcgtggctctgagctgagatctgtatctgtggacctgaatgttgatccc

SEQ ID NO: 610863 - DNA, 90 bp, Homo sapiens
gcctgacagggtatctgaagtaaaagggggtgtgttccagagaacaagccttcagacatttgctatattgacgctgagctgtcaggggac

SEQ ID NO: 610864 - DNA, 75 bp, Homo sapiens
tcaccaaagaggactttagacttgcaggttatcaatactctggctgaccatcatcatcgtgggactgactttggt

SEQ ID NO: 610865 - DNA, 75 bp, Homo sapiens
aagtttctgatataaaacgatgacattttcaggaaaatcctggacatggatttgattgacatactttggaggcaa

SEQ ID NO: 610866 - DNA, 75 bp, Homo sapiens
tcgactttggagaaaccaccgtgctggaccgcttttacaatgcaggtttgcctgtctgtcctgagctggtgaggg

SEQ ID NO: 610867 - DNA, 130 bp, Homo sapiens
accatacatggtacagccagagtaccgaatctatgagatgaacaagagactgcagtctcgcacagagggcttccgttacaagatgaggtctgtgtatgctcacttccccatcaacgttgttatccaggag

SEQ ID NO: 610868 - DNA, 100 bp, Homo sapiens
tatgtatgttgtagacacaagaccaaagaccaaactagagtcagaacgaatactagcatcagtggggaagaaacctccccaggaaattggaattaaagtg

SEQ ID NO: 610869 - DNA, 100 bp, Homo sapiens
gaacctccacagtcaagaggacggtggcagtagagaagagcatcacagaagttgctcaggagctgacagagctggtggaacatcttgtagacattgtcag

SEQ ID NO: 610870 - DNA, 117 bp, Homo sapiens
ctattccggcgcctccactccgtcccccgcgggtctgctctgtgtgccatggacgggtgagaagccctaccactgcaactgggacggctgcggctggaagtttgcgcgctcagacga

SEQ ID NO: 610871 - DNA, 88 bp, Homo sapiens
tagcttccctgtatgtgatgatgaccgtcaccaactggttcaagagtccaacctataccttctcagggaggcaaactagaaatagctg

SEQ ID NO: 610872 - DNA, 75 bp, Homo sapiens
tgcttatctgccttatgggcttgcagaaggaatctcactctcagttctcaaggcaccacaaaacaactgccagcc

SEQ ID NO: 610873 - DNA, 100 bp, Homo sapiens
cgccgggcccgggcatggtggtctggggcaacgcggaaggggttcggtccgagcccggtgggaggctcccggagcgcagcctgggcccagcccaccccgc

SEQ ID NO: 610874 - DNA, 80 bp, Homo sapiens
ctggtgcagaagccattttttaaacttaggtatttaagtactgaaagttgttacagaagatggcccagagcccaaggaca

SEQ ID NO: 610875 - DNA, 82 bp, Homo sapiens
tggaaacgcttgtagggtttcaccagtaagactttgaccccgacgcaggcttcagtgattgccgcggatcagaagcctgagc

SEQ ID NO: 610876 - DNA, 75 bp, Homo sapiens
ccgtggtcaagttcaccatgagagggtggggacccatcgtgaagatggcgtggccctgagaggcagccattctct

SEQ ID NO: 610877 - DNA, 96 bp, Homo sapiens
caacacctgcggcctcactgggacccccaggaggtgaccctgcaggcaattttatatgatgacaaaggagcatgtttggagagtctgtttcttaaa

SEQ ID NO: 610878 - DNA, 127 bp, Homo sapiens
ctcatcgtcacaaaccgaattcgcgtgaaactgcccaaagacgtggaccggacgagactggagcctcctgacagtgggcctccaccattgccaacatcctccctcccagaaggttattatgaggaag

SEQ ID NO: 610879 - DNA, 98 bp, Homo sapiens
aaagcctaggcatttctgtaacatttggggtcaccaccagctattggaccttactatgaaaaccatggataccaaccggaaaacccctatcccgcaca

SEQ ID NO: 610880 - DNA, 90 bp, Homo sapiens
acttagccaactggtcactgacttctctctcctagtgaatgttttgctgttactgctcagtgtagtcacaccttgaataagaaatggaaa

SEQ ID NO: 610881 - DNA, 100 bp, Homo sapiens
gggcggaggctgccgactgccagcccccggtccgcctccggcccccggcaggagagagggaggagccatggcaacaggtcccagaacagttttcttctgg

SEQ ID NO: 610882 - DNA, 100 bp, Homo sapiens
agcaggcacagtggatggagacagtgaaggtgctgaggatggagaagatttgatggatgagagtgtactgaaattctacactcaacaatgggaagattat

SEQ ID NO: 610883 - DNA, 74 bp, Homo sapiens
cctgctcggcgtctggtatctggtgtcgtgaaaactacccctaaaagccaaaatgggaaaggaaaagactcata

SEQ ID NO: 610884 - DNA, 75 bp, Homo sapiens
ccgacttgacacgatattttttgctaagcaggtcctggatgcctcatcccttagtttcaacaccagattgaaatg

SEQ ID NO: 610885 - DNA, 75 bp, Homo sapiens
caggtcctcgcggtgcgcaccgtttgcgacttggtgctggagaatctggtaaaagcaccattgtgaagcagatga

SEQ ID NO: 610886 - DNA, 82 bp, Homo sapiens
gcagaaggcacagaccagcacaggatagtggctacccagagacgctggtcaacctcatcgtcctgtcccagcacctgggcaa

SEQ ID NO: 610887 - DNA, 100 bp, Homo sapiens
ccggtcttggggggatggttccatcatggcgtcaatgcaggtggtcttcaagctgacagagaagctgacggaacagaaggagtggatgaagatataattg

SEQ ID NO: 610888 - DNA, 100 bp, Homo sapiens
ctgaaaggcactttattatgcaggtggtctgtgaagccacacagtgtccagatacgaggtccgcaaccatccctctgttcatgcgaaacaaagatgtcgc

SEQ ID NO: 610889 - DNA, 75 bp, Homo sapiens
cgaatatcgtcatcgttagaagaataatccagaatggctactctgatctatgttgataaggaaaatggagaacca

SEQ ID NO: 610890 - DNA, 125 bp, Homo sapiens
aaatctccaggcaacaaaggatcattggtttatgcaggaattaaatcaattgtaaagtcatcgttgggtgctggagaatctggtaaaagcaccattgtgaagcagatgaggatcctgcatgttaa

SEQ ID NO: 610891 - DNA, 100 bp, Homo sapiens
accttcaatggagaaaccatgtaatgaatttgggcatcctgaatggttagacttcccaagaaaaggaaataatgagagttaccattatgccaggcggcag

SEQ ID NO: 610892 - DNA, 80 bp, Homo sapiens
ctgtctcagcgaagtggtgaaagagcatcaggtggaggtggaggaagcgtccctgggatcgagaggatgggtcctggcat

SEQ ID NO: 610893 - DNA, 75 bp, Homo sapiens
gaaaccaacagacaatgccaatttacgtgtcattatggaactacttatgaggtgtacagagccagtgggccggat

SEQ ID NO: 610894 - DNA, 75 bp, Homo sapiens
gcagcgtctagtccctggccatagctccgccgctgcccggtgccgtgagcgatgtggagatgcaggaacactatg

SEQ ID NO: 610895 - DNA, 82 bp, Homo sapiens
ccgctgccctcagctccgagtccagggcgagcttcgagagctgtgcccaggagtgaacaaccagccctacctctgtgagagt

SEQ ID NO: 610896 - DNA, 90 bp, Homo sapiens
gacagccagtaacagcaagctgaggacctacctgcccgacttccggttcacacccttcaagcaggtggtacaggagctgcagcaggccat

SEQ ID NO: 610897 - DNA, 82 bp, Homo sapiens
gacctgcaagctctttgacacacagcagttcttgtcagggggatatgagactttctactcggaatatcctgagtgttgcgtg

SEQ ID NO: 610898 - DNA, 100 bp, Homo sapiens
tccatgtcaaatgacacgagccttcctgacaagtgtaactcattcctacacaacaaggcggagtggagaaatatcgacagtatatggcaggacttctggc

SEQ ID NO: 610899 - DNA, 75 bp, Homo sapiens
actttgagtgctgtctccatgtttgatgtatctgagcaggttaccccacagcctatccagcagctgcccctgcct

SEQ ID NO: 610900 - DNA, 100 bp, Homo sapiens
tattcgtggctgggatcggtatctgaccaaccaaaatccccagggaaaagcctttcgctctaaagtggagttgattgcgtacttcgaaaaggtaggcgac

SEQ ID NO: 610901 - DNA, 100 bp, Homo sapiens
agtctaagttaaagcagtcaaacatgctgaccgctcaagagattctacatcagtttggtttcactcagaccggacacattcagctaacgtattttagcag

SEQ ID NO: 610902 - DNA, 98 bp, Homo sapiens
tgctaaatgtagacaatggttagagaagaattttccaaatgaatttgcaaaacttactgtaggtcctatggcagcgtatacaaagctattcataaaga

SEQ ID NO: 610903 - DNA, 101 bp, Homo sapiens
aatacaagatgctttaaagaaggaagactatgaccgtctgaggcctttatcttacccaatgaccgatgtcttccttatatgcttctcggtggtaaatccag

SEQ ID NO: 610904 - DNA, 74 bp, Homo sapiens
ggatgaatgtagagagaaagtacttcaaggctcttgtcaggatggtgaagctgttcatcggaaacctgccccgg

SEQ ID NO: 610905 - DNA, 83 bp, Homo sapiens
acatcggcttctgcctggtgctctgcgtcctcatcgggcttatgttcgagctcctggggagtttgcttcacctacggcacctg

SEQ ID NO: 610906 - DNA, 95 bp, Homo sapiens
ccagaaaggattgtgacatatcgttggacccagaattgagacagcacccaagaaaacctcatttggctcgctgaaggatgaagaccggattttca

SEQ ID NO: 610907 - DNA, 90 bp, Homo sapiens
gatgcgggacttcagtcctagtggcattttcggagcgtttcaaagagaggcctaacatcgtgtcccagctcagccaagcctgcgatggag

SEQ ID NO: 610908 - DNA, 98 bp, Homo sapiens
tttgcctttctggacacagaagtatttgtgacagaacattatacatccatgggcataccaagttggatttcacagtctggcatactgcaattgaaaaa

SEQ ID NO: 610909 - DNA, 83 bp, Homo sapiens
ccggcaccacaagtcggacccctactcaaccgggaagacgagcacgccctcatccagcagtattgccaaacactcggaggaga

SEQ ID NO: 610910 - DNA, 50 bp, Homo sapiens
cctctcccaacatggcggcctcaggaaacctcgacctgtctcccagttgg

SEQ ID NO: 610911 - DNA, 127 bp, Homo sapiens
gcgaggagctcatcgggcagattagcgacatccgagtgcagaacctgcaagaaacatgccaagggacaagtgttatttgacaaagtgtgtgaacacctcaatctcttggagaaagactactttggac

SEQ ID NO: 610912 - DNA, 97 bp, Homo sapiens
taaaggtgacagtcagcctaacaaaagtatcagggatgaggagaatttctgtgccactgtgcccaaggatggacgttcctattccccaactctcttt

SEQ ID NO: 610913 - DNA, 75 bp, Homo sapiens
aggagaggagggaactgcggagcgggggcataaggaaatggtggcaggcacttcctcctaacaagaaggaagtag

SEQ ID NO: 610914 - DNA, 100 bp, Homo sapiens
agtccagagacagagcactaattagatacacgataagaatactccatggaagtctttccttgtcattgtagatggctcgcccaagaacgatgacggacac

SEQ ID NO: 610915 - DNA, 97 bp, Homo sapiens
ttccggaagtgtatagggaaacctgggggctccctggacaactccgagcagtaagcccagaggtctccaccccacgggaggaaggctgaggccaaga

SEQ ID NO: 610916 - DNA, 74 bp, Homo sapiens
gatctgagaaatgtttgtactgaagcaggaaacctgtaggaagtgtcagggactctggaaagaacataatggcc

SEQ ID NO: 610917 - DNA, 102 bp, Homo sapiens
tattaatcaaggagtttctcatgctctcacctggaagaatctgaagccccatatacaatttcacagtgtctcttaaaagtttaaagcactttgattgtaaag

SEQ ID NO: 610918 - DNA, 100 bp, Homo sapiens
cgggcacggcgaggggggcggccgcctcaccgagcttggggcttccttggtcgcacccaccacctgcctgcccactggtcagccttcagggaccctgagc

SEQ ID NO: 610919 - DNA, 75 bp, Homo sapiens
aacaaaagcctcctacaagagtcctaccaaaaagaagcatgccatagggacattgtgaatttgcaagtggagatg

SEQ ID NO: 610920 - DNA, 96 bp, Homo sapiens
gctcccaggacctccactaatcaccagaacaaaatgtgcaggtttattccctgctgtcctgaatcttgcttctaatgctcttatcacgaccaatgc

SEQ ID NO: 610921 - DNA, 100 bp, Homo sapiens
gaatgtgtacataactcccgcaggatctcagggcctgccgccccattatgatgatgtcgagaatgacccattgccaggacgcatcaaagttgactttgtg

SEQ ID NO: 610922 - DNA, 90 bp, Homo sapiens
aatgtgctcttgtcctggcattgcatccacaggaggggcaggaaattctttgaagagattgagaatttatcacaagttgatggtcctcaa

SEQ ID NO: 610923 - DNA, 85 bp, Homo sapiens
cacatctgctcaaggagatcattctggtggatgacaacagcagtaacgtttcgataatggacaaggtgacgacagttttcaacag

SEQ ID NO: 610924 - DNA, 96 bp, Homo sapiens
ctggactcatggaggctgagcatttattcaggtcatactccctgtcacaaactccagctgaactaacttggaggaggatcttccctgacagctctg

SEQ ID NO: 610925 - DNA, 75 bp, Homo sapiens
ggccgtgtccgccgcggccctgcgaggtccgagggagaggagccatcaaaactcgatcaggatgttttggccgct

SEQ ID NO: 610926 - DNA, 100 bp, Homo sapiens
gaagtttctaggaaaggccggacaccaggtactccaaagattcaggtttactcacgtcatccagcagagaatggaaagtcaaatttcctgaattgctatg

SEQ ID NO: 610927 - DNA, 51 bp, Homo sapiens
atgcgatggtagatcaacccccaggagcgagaacccgagcagcgccatgag

SEQ ID NO: 610928 - DNA, 75 bp, Homo sapiens
agtcatttctactggacttcatgcttagatacatgtataacaaggaccctgatgctcccataagacagaaaatgc

SEQ ID NO: 610929 - DNA, 100 bp, Homo sapiens
ctacaaggacagcagcgactttggggcccgtcaccctcagccagcagcgatgacatgaccctcaccagccccagcatggacaactccagcgcagagctac

SEQ ID NO: 610930 - DNA, 101 bp, Homo sapiens
ccgccggtcggtgcgcctagcggatcggagctgcgcgcggaaccgtgctgccccgccccgctccacccgtgaggcctgcttagacgcctggtgactctcat

SEQ ID NO: 610931 - DNA, 100 bp, Homo sapiens
aaacaaaaatgaatatacagaacatttctatagtgctcagcccaactgtgcagccttagattgtaagcaaaagaaatcaaggtcaagatctggaagcaag

SEQ ID NO: 610932 - DNA, 98 bp, Homo sapiens
ataattaatgtttttattaaatttggagggaagtttttgcagcctttcgcctagcgtggccttcaggtgctggagaatctggtaaaagcaccattgtg

SEQ ID NO: 610933 - DNA, 48 bp, Homo sapiens
gaaaagaagcccaaagttttaaagtgttcaaagcttctttcagacacc

SEQ ID NO: 610934 - DNA, 87 bp, Homo sapiens
gagagggggcgctgagctgttggggtatcagtttttggaagaagcttttcaaaatcagaagggtgcaattgagaatctactggcgaa

SEQ ID NO: 610935 - DNA, 100 bp, Homo sapiens
gactgttgttcccggagatgcggcgcgcagtgtcccttttgatgagaagaataagcctcattctgattcaacagcagagatcaaagaaaagacttctgtt

SEQ ID NO: 610936 - DNA, 118 bp, Homo sapiens
ggacagccgcgcgctgagggtctcggggcgggcgccgcgggacctctccgggccatgggtttggtgcacctcgatttggaggaagtagggcagggcccttatctggaaagaagtttgg

SEQ ID NO: 610937 - DNA, 100 bp, Homo sapiens
agcagctcaagcgccgctttgccattggctcccaggtgtctgagcacagcatcatcaaggacttcaccaagcaggctcagtagatgaaggcgtttctgag

SEQ ID NO: 610938 - DNA, 98 bp, Homo sapiens
ggcccaaggccatctacctggacatcgatggacgcattcagaagtattctaccttgtaaatactgttatttgtatatactgtaaatgatgacatcggt

SEQ ID NO: 610939 - DNA, 100 bp, Homo sapiens
gccacctaccacagagccatcaaaatcacagtggatgggccccgagaacctcgaagcacttcgtcttagtaacatggccatggggaagacaaccacaggc

SEQ ID NO: 610940 - DNA, 116 bp, Homo sapiens
agatggggacacacagtcagagaaaccggggcaacctggagttgagacagacgactgggatggaccagggaagagaacaccaaaggcgaaggagaagaggaacaagaaaaagaaaa

SEQ ID NO: 610941 - DNA, 100 bp, Homo sapiens
ggaatgatattcagtggtgtttttctcaggtgaaaggagcagtagatgatgatgtagcagaagaaggacagaataacgggctcccagattcacaagcccc

SEQ ID NO: 610942 - DNA, 49 bp, Homo sapiens
ctgaaattcatcctgagatgaggcatgatgggcccacctcctggtatga

SEQ ID NO: 610943 - DNA, 75 bp, Homo sapiens
cagattcgcagtggtcgcttcttctccttgagtcatgtgctgttcctggggcttggatgatgtaggggaagcaag

SEQ ID NO: 610944 - DNA, 83 bp, Homo sapiens
cccggagttccgctcctgcgggcttagcaggaaagggtgcctaaggtggatccataaagaacccagccaacccgcagagggag

SEQ ID NO: 610945 - DNA, 99 bp, Homo sapiens
cctcaatgttccctgagaatggtgtcccagatgacatgaaggagaggttcgagaccctggagcctgaaatgaacacccttgcagcacaaatcaccgcgg

SEQ ID NO: 610946 - DNA, 87 bp, Homo sapiens
acagaacaggaggtggtagagggcatggatatctctactcgctccaaaggaaggtggacttttaaatattctccactgaagcaaatg

SEQ ID NO: 610947 - DNA, 75 bp, Homo sapiens
gccctcatcctggttctggaatcctcagttcaaggccctgtttgacacacagaacgaactacgcgcacacatccc

SEQ ID NO: 610948 - DNA, 82 bp, Homo sapiens
tgcaggaacctggcctcactaggtaagagcttctgttcgtgtgcagggaaagcagctcacagacgccgttaaaaccagcttc

SEQ ID NO: 610949 - DNA, 98 bp, Homo sapiens
cgtgcagcccaacttccagcaggacaaggaaggtgctcgggtcttcggggcactgggtcccatcggtccctcctcacctgggctcaccctcgggggtc

SEQ ID NO: 610950 - DNA, 75 bp, Homo sapiens
ggacatggtcatgagctttgtgaacctggacacatgcctcactcctgtcagcagttccaccttttcatggttgag

SEQ ID NO: 610951 - DNA, 89 bp, Homo sapiens
ctcatcgtggtgtttggcggcggcaacgagggaatagtggacgaactgcacgtgtacaacacggatgccatggacaatattaccaggca

SEQ ID NO: 610952 - DNA, 147 bp, Homo sapiens
cggatgctacctctgcggcattggaagtgaaaacaacatgctgttcttaagcatgaatctgaccatctctgcagcattgcacaggagaagtcggcctgagtggtgcggcgctcgggacccaccagcaatgctgctcttcgtgctcac

SEQ ID NO: 610953 - DNA, 110 bp, Homo sapiens
ccagtgagggtgtacaaatacccctttgaattaattatggctgtccatgaaagacctcctcctccttctccacctccctctacaatatatgagtattttctccacctccc

SEQ ID NO: 610954 - DNA, 100 bp, Homo sapiens
cgccgtcccgtccgacagccaggcccgggagaagtccttattccttaaatggatacagagtgagagtatatagacaagactctgccacccagtggtttac

SEQ ID NO: 610955 - DNA, 101 bp, Homo sapiens
agagttctccaaacatgatcgtttactgcaaagtacatctccgttcatggatgcattaacagccaatgggacaaccaacatacagacatctgttacaggag

SEQ ID NO: 610956 - DNA, 83 bp, Homo sapiens
gaaatcagggagctcttaacccagtttgaaacgtaactggttccctgaccagattttgcaagaacgaggctcaaggatgtgag

SEQ ID NO: 610957 - DNA, 82 bp, Homo sapiens
ggcgtggctgaggaaggaggaggcacccacaggctgctgggaggagagcataagacctgcctagagctggaacgttacctcc

SEQ ID NO: 610958 - DNA, 49 bp, Homo sapiens
gtccctgatggcctcagaggaggagcttctccaggcagccaccaactac

SEQ ID NO: 610959 - DNA, 100 bp, Homo sapiens
gggatttcagtaggaaacattatggatctgtggagctgattcttattgccaagtcccctctggctcccttcacctcatttgtctacaccatcaaggagga

SEQ ID NO: 610960 - DNA, 75 bp, Homo sapiens
tgatccggagaatcgaggagctcaacaagggcgtctctggccgagcctctttttgtggaaaacgacagcagcagc

SEQ ID NO: 610961 - DNA, 96 bp, Homo sapiens
tgtcctacttccagaatgcacagatgtctgaggacaaccacctgagcaatactgagttcatgatcaagtgttgcccacaccaaatgcttcatccag

SEQ ID NO: 610962 - DNA, 100 bp, Homo sapiens
tgctggagaattataggaacctggtctccctgggagtctcaggagcaggggctgcggcagaggctgctggacgagcagttcgcagtgttgcggggcgctg

SEQ ID NO: 610963 - DNA, 83 bp, Homo sapiens
cagtcatggtcccagaaacgtcactatcaagaagatttcccatcagatatcgctaacaagtctctctcagagaccactgcaac

SEQ ID NO: 610964 - DNA, 100 bp, Homo sapiens
tactttgccacttcttcacggaccagtttcagttcgccgatgggaaacccggagaccaaatccttggatgtttcgtctgaactcactttctgctttggca

SEQ ID NO: 610965 - DNA, 98 bp, Homo sapiens
cgaagacataaatccctgagtgcccgggaggagccttaacaagcgcacggagccctcaagataactacgtgtctcgaggatgatctgctcagagctct

SEQ ID NO: 610966 - DNA, 75 bp, Homo sapiens
tggaagcgctttgatttacagcagctgcagacctcctgccccccgaggtctgcagtctcctgaacccagcagcca

SEQ ID NO: 610967 - DNA, 89 bp, Homo sapiens
ctggccctgagtagggtgtgacctccgcagccgcagaggaggagcgcagcccggcctcggagccgtgtaaagccagtggaatatagtca

SEQ ID NO: 610968 - DNA, 51 bp, Homo sapiens
gcaaggtctctggaggaattcaatgatgtgccctcgggaccaaggatcacg

SEQ ID NO: 610969 - DNA, 90 bp, Homo sapiens
gtgaaggtccggggcttgccctggtcttgctcggccgatgaagtgcagaggtttttttctggaccctgatgctcccataagacagaaaat

SEQ ID NO: 610970 - DNA, 83 bp, Homo sapiens
ctactctctctttctggcctggaggctatccagcctgtgagaaacgaccgaaacaagaagaagaaggaggtgcccaagcccga

SEQ ID NO: 610971 - DNA, 50 bp, Homo sapiens
gtaatcgcctgctttgattcattgaaaatttaaggaccatagtacagcta

SEQ ID NO: 610972 - DNA, 106 bp, Homo sapiens
gatacaattacctgcacgacacatggaaattggactaaattaccagaatgcagggggtaaaatccagtacaaggaatatatcattgaaggatttgaaaacatgcca

SEQ ID NO: 610973 - DNA, 100 bp, Homo sapiens
tttccataaatatagaggtagaccccaggcatcctactatgcttcctgagtgcttctttcttggagctgaccatggatggtgccatgacaatggtgtgaa

SEQ ID NO: 610974 - DNA, 83 bp, Homo sapiens
agaagtcgcgtgtctaggtgagtcgcggtgggtcctcgcttgcagttcagcgaccacggaggtgaagtgaaatctgcaagagt

SEQ ID NO: 610975 - DNA, 87 bp, Homo sapiens
cgcaggaggcgctcctccttcccaccggtggtggtcaccaatacaattccacatgaagtccagaagctccagtgccccaagattaaa

SEQ ID NO: 610976 - DNA, 100 bp, Homo sapiens
tgccttctggacaatctttccgctgcaagctttcttcctggtggcagatgacatcatggattcatcccttacccgccggggacagatctgctggtatcag

SEQ ID NO: 610977 - DNA, 82 bp, Homo sapiens
gttccacgtgaagctcaccgacagtgccctgagggccttcgagagctaccgcgccagacagacaaatttacatgtattggag

SEQ ID NO: 610978 - DNA, 87 bp, Homo sapiens
gcgcctcaggtgcctgtatcacccactcctccctaccaaagagggcatcttcctacagtctgcaaaatgaatgttcaccgtcgatgt

SEQ ID NO: 610979 - DNA, 75 bp, Homo sapiens
ggtcattctcgctaacaactgcccagctttgagatgactgtccaagtgcctccaaagtgtacaaagcatcagatt

SEQ ID NO: 610980 - DNA, 97 bp, Homo sapiens
gcatggtctggtgctcggtacggcagaaggtggccctcatggagcacagcaactgctcgtcggagcccggcttctgggcacaccctcctggggccca

SEQ ID NO: 610981 - DNA, 75 bp, Homo sapiens
cggcggcggcgccccgctccgggtgaggttgccggggccgtgcgcgctggtgctggagaatctggtaaaagcacc

SEQ ID NO: 610982 - DNA, 75 bp, Homo sapiens
cttctccggaatggaaacgtgaatcagaatcaactgctgcagtggcagcatggaacctgcatttcatagaggaga

SEQ ID NO: 610983 - DNA, 75 bp, Homo sapiens
caggtgacagtctgcatgtgcagttttcaggactgatcctttgaaatactccagccatgactaaaagagaagcag

SEQ ID NO: 610984 - DNA, 50 bp, Homo sapiens
agcaggtcctgttggagatgatagcgggtgccacgtctatgtgggcttcg

SEQ ID NO: 610985 - DNA, 95 bp, Homo sapiens
gccgccagtaccaggcgctggagaaggacgaagaggaagccttggtttccaatacttatctacaggaatcgccatgaccccagctctgagggagg

SEQ ID NO: 610986 - DNA, 98 bp, Homo sapiens
gaggagttccgcccctttctggcaaagatgagggggattcttaagtttgtgaagtgtggatatgcaggctctaactttccagaacacatcttcccagc

SEQ ID NO: 610987 - DNA, 74 bp, Homo sapiens
cgactgctacagggaccatgggacactattacgcaacagttctccaacatcttcaaataaagaagtggttatga

SEQ ID NO: 610988 - DNA, 83 bp, Homo sapiens
ccggcggctgcggggcgaggacggcggcggaccggggcagccccgcgccctggccaggctgtattcatcaccaaagaaaaaac

SEQ ID NO: 610989 - DNA, 75 bp, Homo sapiens
acctgaagaagatgaacaagcgccaggggagagaccattctaacacaggtaccgtccagacagtgcctctgagaa

SEQ ID NO: 610990 - DNA, 50 bp, Homo sapiens
gaccgtggcttcggcttcatccgcttgtgcaccgtccaggtgaggttaga

SEQ ID NO: 610991 - DNA, 99 bp, Homo sapiens
agagatgggagaagtcacagacggaatgatggatacaaaggtgagtggcagtgtgatgagtgtttatagtggagactttggcaatctggaagttaaagg

SEQ ID NO: 610992 - DNA, 75 bp, Homo sapiens
agagcttcctgttctccagggaggaggcggacacgctcaggaacttgctactaccagcaccatgccctaccaata

SEQ ID NO: 610993 - DNA, 82 bp, Homo sapiens
atctgattgaagcccaggttgggggcgagaaagacctgcgccgggccaagccacccgtgggaaactgttacaacagctgcaa

SEQ ID NO: 610994 - DNA, 80 bp, Homo sapiens
cacacacacatcaccctggacaaccgcgcggagtacgtgcggctggcgataaactatagcttaaagcttttcaagccagg

SEQ ID NO: 610995 - DNA, 82 bp, Homo sapiens
cggacgcgtcatcgagtgtgacgtggtgaaaggtgacttaagagattaaaattaatttggttgctgttggttctgaacaaat

SEQ ID NO: 610996 - DNA, 100 bp, Homo sapiens
catgatgggaaaatgctggcgtcagcatcggaagatcattttattgacattgctgaagtggagacaggtttcaagtgccccatttgctccaagtctgtgg

SEQ ID NO: 610997 - DNA, 75 bp, Homo sapiens
cagattcgcagtggtcgcttcttctccttgacccagaacgctggacaaacattcctttgctggtcaagatcctaa

SEQ ID NO: 610998 - DNA, 75 bp, Homo sapiens
cgggcagcggacaccctgaaggtcccggtgctcacttggacatggagcgagctggacgccactgtggggctctga

SEQ ID NO: 610999 - DNA, 95 bp, Homo sapiens
agtcctcggggagcagatcccccatctctggcagtgcagtgtgcctgggagctgtctggaacattccgcaagcatggccctttcggtgttggtgc

SEQ ID NO: 611000 - DNA, 100 bp, Homo sapiens
aagaagaatcctttgtatgtgccccttgaaggtgaaattttccaaagttttaacaaaaggtgtcatggagaaactccagctgggcccagagattctgcag

SEQ ID NO: 611001 - DNA, 80 bp, Homo sapiens
ccagcaggatgccgcttctgctccagggcatgcaccatgcgaaacagtgacatttaaggatgtggctgttgaccttaccc

SEQ ID NO: 611002 - DNA, 98 bp, Homo sapiens
ctgtcactctggagcagttccgggagctgctggaggctcgcggcgccggctgctctagcgagcagttcgaggaggttccagcaacagatagaaatgct

SEQ ID NO: 611003 - DNA, 75 bp, Homo sapiens
ctgccgcctcgctgtccctgcggcttctgggggtaaaatgaaaggcctggcatttattcaagatcctgatggcta

SEQ ID NO: 611004 - DNA, 98 bp, Homo sapiens
ctagcccagtggaccttctgaagcatttgacattgtgcagcaaagaaatggttatggagaagcccagtccgctgcttgtagggcgggagtttgtgagg

SEQ ID NO: 611005 - DNA, 50 bp, Homo sapiens
acccccatggaggccctggcagagcagatagtcgcagaggaccagttttg

SEQ ID NO: 611006 - DNA, 100 bp, Homo sapiens
gtgcgagtccgggccctgtatgactatgaggggcaggagcatgatgagctgagcttcaaggctggcatccgtgtcattctggaccttactcccaactacc

SEQ ID NO: 611007 - DNA, 74 bp, Homo sapiens
gcagtggtcgcttcttctccttgttgtgtggagtttgacttgaatgtaaacaatattgttggaataagaaacac

SEQ ID NO: 611008 - DNA, 100 bp, Homo sapiens
aatgagttcaccacacatattctggaagtgatcaatgcacacatggtactaagcaaagccaacagccaggagaattgctcaaacccgggaggcagaggtt

SEQ ID NO: 611009 - DNA, 98 bp, Homo sapiens
accacgctctcaacgatatgacttccatgtaaacgttcatccactctgcctgcttacaccctgccctcatgctaatgctcaggggagagagaaagccc

SEQ ID NO: 611010 - DNA, 87 bp, Homo sapiens
tatttcggacacatctggtgacttccgcaagctgatggttgccctggcaaagcaaatacttccctggacaagaaagccagatgaaac

SEQ ID NO: 611011 - DNA, 100 bp, Homo sapiens
ctctctaattaaatggatcctgattgtcaggcaggataacctagggtctcagtttagccacatgagtcttgctcgccagccatctgctgatggttctgac

SEQ ID NO: 611012 - DNA, 82 bp, Homo sapiens
gtcctcctgcaccgcacatgcagaaccagatgaacggccagatgcctgacatatctgaagagatggattaagaatgctttgg

SEQ ID NO: 611013 - DNA, 99 bp, Homo sapiens
agataaccacggacttggggaaacatcagcatatgcatgaccgagatgacctctatgctgagcagcaaaccagtccagctacgggggcccagccagcca

SEQ ID NO: 611014 - DNA, 52 bp, Homo sapiens
ccaaactcctctccaccagcgccaagagtcaggtcaattcagtgaagatatg

SEQ ID NO: 611015 - DNA, 83 bp, Homo sapiens
gttcctttgtcaagagcatactttggaccctgttttcagaaagcagaatgctgcctttttatatggtcttggtttggtctact

SEQ ID NO: 611016 - DNA, 74 bp, Homo sapiens
ggacggcggcgcggagaaggcagtcttaggaaaagtcctcagtgctgtgggcagtgcccagctactgatgtccc

SEQ ID NO: 611017 - DNA, 98 bp, Homo sapiens
gcgagctgcggctcggacgccagcggacacgcgggcgagaacgctgtaaatgtaagcctattagagctacacagaagacctatttccggaacaattac

SEQ ID NO: 611018 - DNA, 75 bp, Homo sapiens
attttggctgctgcaggagccattttagcttgccttgcgccatggactggcagccagacgagcagggcctgcagc

SEQ ID NO: 611019 - DNA, 100 bp, Homo sapiens
ggccctgcggaggtggctgggatccgcagggctcccctccttcaggaacgccaccagcccctcgggttccaagatgcagctactggagacagagttctca

SEQ ID NO: 611020 - DNA, 75 bp, Homo sapiens
tgagagcaccttgtggcgcacccagtgtaactgtgacgtctgatgatttgaagaagagaagagagcctcacatct

SEQ ID NO: 611021 - DNA, 75 bp, Homo sapiens
tgcaggacttggtccgcggcatccgtaaccacaaggaggacgaggtgatgtgtccaatctagatcccaacttctc

SEQ ID NO: 611022 - DNA, 100 bp, Homo sapiens
gtgaccgagaccgtgaccgagagcgtgaccgagagcgcgaatatcgtcatcgttagaaggcttgcacccttgctcggaggaatgcagacgtcttcctgaa

SEQ ID NO: 611023 - DNA, 51 bp, Homo sapiens
ggcggcggcaccccgggcgcgcatttttgaaacgttggggttgttggagtg

SEQ ID NO: 611024 - DNA, 82 bp, Homo sapiens
gagctccacgcagttcaacaagggcccctcgtacgggctgtcggccgaggtcaagaaccggattcctggtcgggtggcttcc

SEQ ID NO: 611025 - DNA, 75 bp, Homo sapiens
cggaggcttcgagtgacccgggtgccgaggagcgggaagagttgctggggctttcatgagaaggacaagaagcca

SEQ ID NO: 611026 - DNA, 90 bp, Homo sapiens
gcggcagcaagcgtgggaacgcgggcggcgagacggcggcaggacggcggcaggaagctcttcgtgggcggtcttgactggagcacgacc

SEQ ID NO: 611027 - DNA, 75 bp, Homo sapiens
acgatgacccagatgtcctgccagtcctgcatctccagtatggaatgtatgtttggccctgtgctgtggtcctgg

SEQ ID NO: 611028 - DNA, 100 bp, Homo sapiens
ctgatctatctactggaacatggacaggaactgtggacagtgaagagaggcctctcccaaagcacctgcgcagtactgtaagattgatgttaaaggcatg

SEQ ID NO: 611029 - DNA, 90 bp, Homo sapiens
gaacaccaaatgaggacacatggcctggagttcattctttaccacattttaagccaggcccataaaagccctggattcagccagacgagg

SEQ ID NO: 611030 - DNA, 83 bp, Homo sapiens
tgtatcaagcctaatgacttcaagttcccattcacagtgaacacaacatgctcccttggtctctgcaaccatcgattcctaac

SEQ ID NO: 611031 - DNA, 100 bp, Homo sapiens
ggcggctttagtggcagcatgaagcgcaccccgactgccgaggaacgagagcgcgaagctaagagggccaagatcagtcagggaaccaaggtcccggaag

SEQ ID NO: 611032 - DNA, 100 bp, Homo sapiens
aggatatcgacgtcgtgatccagaagtccagagctgaggactgcctgtttgcaggtgacagtatgttgactgctgtctctgtggccagagattgtggaat

SEQ ID NO: 611033 - DNA, 90 bp, Homo sapiens
ctgcagcaactgcagatggagaaggagaggctgcggctgaaacagcaagaactgcttcggcagagactaaggtgtcagtatgttcttcaa

SEQ ID NO: 611034 - DNA, 82 bp, Homo sapiens
gtgaccagagagcccaacgcctggtgctcaagactttctccgagagtttattaaccacttaacctctcagaactgaacaaag

SEQ ID NO: 611035 - DNA, 75 bp, Homo sapiens
cctcccttgcccactccgctcgggaggccgagaggaaacgtgtgagtgaagacactcaggatggctcaaggatcc

SEQ ID NO: 611036 - DNA, 100 bp, Homo sapiens
tgctcgtccatgtcctgctcatgcccagtgagttattctccccacctcagaagtaccagcttttggtgtatcatgcagattctctctttcatgataagga

SEQ ID NO: 611037 - DNA, 82 bp, Homo sapiens
aagaacgtgagcaagcccaggcacagccgacgccgcggggtttacccaaggtccagcctagcccctaggcaccatgtcggac

SEQ ID NO: 611038 - DNA, 51 bp, Homo sapiens
ctgcagacaagtggttaactggttcttgctcaagtaccaactctatggacc

SEQ ID NO: 611039 - DNA, 100 bp, Homo sapiens
acggttgttttttcatcgaaaagttgaaggatttctgacatctcaattagtaacgcatctggaatgtttgctctccagggatgaccaaggtcaaagtggg

SEQ ID NO: 611040 - DNA, 90 bp, Homo sapiens
ggaagtcatcatgggccggcctggaacagggaacttccaggcaggagaggatggtcggattctgaaacgtttctgtcagtgtgagcagcg

SEQ ID NO: 611041 - DNA, 100 bp, Homo sapiens
gctgtttccacgtgcggtgctcgtcgggagtgatcacctaccctacagggctgctaccctggaaaaggaagtggccgggttgcgggagaagatccaccac

SEQ ID NO: 611042 - DNA, 100 bp, Homo sapiens
gtcaggtggggccggtgaagcagtgcttcgtggtgactgaaaaagtaatgctacagccctttgactatgatccgaatgaaaagagtaaacacaagtttat

SEQ ID NO: 611043 - DNA, 100 bp, Homo sapiens
cgtaggaagaagggcaggacctgggcggaggccgccaagacggcaattaagttggaatatgcaaggttggttaagttggcccaagaagacaccccaccag

SEQ ID NO: 611044 - DNA, 100 bp, Homo sapiens
ggggactattgacagcacccaccttggtgatgatgaaactgaggcacaaactgcttaatgaacttgtccatggtaaagaagaaaggaccctggataagag

SEQ ID NO: 611045 - DNA, 73 bp, Homo sapiens
gacagcacgccagtgagggagatggagaccaatcacccacccagtgtgcgcgtgagtgcatctccatccacgt

SEQ ID NO: 611046 - DNA, 100 bp, Homo sapiens
aaggattccaagtaactcttatttggtacactgaggaggggacggctccgtcttcacattgtgcacagatctgaggatgggattagcgaagctgtggaga

SEQ ID NO: 611047 - DNA, 74 bp, Homo sapiens
ccgcggtcctcccgccggcgctgggtagagttggctttgtgggacacagctgggcaggaagattatgatcgcct

SEQ ID NO: 611048 - DNA, 96 bp, Homo sapiens
gtgaggaagggaaagcagcaatttcacaactcaggtgctgtccccggcataggtccatctctgcagaagccatttcaggagtacctggaggctcaa

SEQ ID NO: 611049 - DNA, 100 bp, Homo sapiens
tgaaaagcgctgattgttacaatgaaatctataacttcaaggcatgaaaacagccctggaagtctgccctggcgcctgcactgagactaatccaggtcac

SEQ ID NO: 611050 - DNA, 100 bp, Homo sapiens
acgctggggagttccagttgccctttgacccccgcaatgagatctacatcctcttcaacccctggtgcccagtggttgcagctgaccatgtttgcatgag

SEQ ID NO: 611051 - DNA, 100 bp, Homo sapiens
ggttgccggctcccctctcaggacaacccagatgtgcaacaaagtgcgatgcggacaaggagttgtgaaactggacgttcagccaaagtgcgtagccgtc

SEQ ID NO: 611052 - DNA, 98 bp, Homo sapiens
cgatgaagaggatgatgtttttggtgaagataccatgtttgtgtggaagtgccccgtgtttgctatgccgatgctgtcctagtggaaacaactccact

SEQ ID NO: 611053 - DNA, 83 bp, Homo sapiens
ctcgcctacttcctgccggcgcagggtgtcgtgaaaactacccctaaaagccaaaatgggaaaggaaaagactcatatcaaca

SEQ ID NO: 611054 - DNA, 83 bp, Homo sapiens
gtcccatcgcaaacccaaagatccccgttcctggagattctgattgaggctgaaggtgatgtggccgccctcaaccgacgcat

SEQ ID NO: 611055 - DNA, 74 bp, Homo sapiens
ggtggagtgtaggtcatatcgccgcggtatctgctgtgcgtttcagtcaacaatacagcttgtgttcgacaata

SEQ ID NO: 611056 - DNA, 101 bp, Homo sapiens
ctgacggagaagcagtggctcaaggaacttcgtttagaggattatcaggctaacaggaagggcccacagaaccaggtgggagcaggtaccacaactggctt

SEQ ID NO: 611057 - DNA, 100 bp, Homo sapiens
cggttccccggcccacagtgggggtgtgcaaacccgagagaactgggtaactatggccaagatcaatcctccatgagtagtggtggtggcagtggtggcg

SEQ ID NO: 611058 - DNA, 74 bp, Homo sapiens
ctccagtcggtgttgagcacggcgagcagtctcaggcctttagtgatgatggactcattctgaccagtttctgg

SEQ ID NO: 611059 - DNA, 100 bp, Homo sapiens
ttgtggggctgaatccgcccgggctacgctcctccatcacgtggtttctgtgtggagacagtagaatataaaaataacaccttcgctgtctgggatgttg

SEQ ID NO: 611060 - DNA, 75 bp, Homo sapiens
gtacaaacaggacctgcctaattaccttcaaacctggtattcttcagcggaaataaggaaacagtttactctccc

SEQ ID NO: 611061 - DNA, 100 bp, Homo sapiens
cccgctggcgcgcagcctcagctaggcaagccacggcctttgtccatgcctgctgatgggaactggatggggattgtggacccttttgccagacctcgag

SEQ ID NO: 611062 - DNA, 118 bp, Homo sapiens
gcatctgcctgtccagccagcatggaaccaaagcggatcagagagggctaccttgtgaagaagatcatacctcactcctgttagggatgaagagtctgaatcccaaagaaaagcaaga

SEQ ID NO: 611063 - DNA, 82 bp, Homo sapiens
cggagaggagtgggacaactcctaaagcccgtgctttgaagaagaggagcacttcaaggtgctggtgaagatgaccgcccag

SEQ ID NO: 611064 - DNA, 96 bp, Homo sapiens
tgctgaccctgtaacccaaaggaggaaacagctggctaagctcatcattgttactgagcaatgttgatcccagggatgatgtatttggatatcctc

SEQ ID NO: 611065 - DNA, 83 bp, Homo sapiens
aaaaagccctcagtaccagagacagaagcagatggattcgtccttttaggatcttcagcctgttaaacaagaaaacgaaaaac

SEQ ID NO: 611066 - DNA, 96 bp, Homo sapiens
cttcagcatcgtcacggacactcctgagctacagagactgaagaggactcaggagcaaatcagtaatgctgcctctaagaatcaaacttcactctt

SEQ ID NO: 611067 - DNA, 75 bp, Homo sapiens
cctggacctatgaatatccagtttgagccatcggatctaagatccaaaagatttgaaaaatgtgtgagtgctaag

SEQ ID NO: 611068 - DNA, 82 bp, Homo sapiens
gaggaacagctcaagacccacaagaagattatctgcctggacctgtcagaggaaatgtcactgccaaagctggagtcgttca

SEQ ID NO: 611069 - DNA, 87 bp, Homo sapiens
ccccttcggtaccggggggagactccgaaaggagaagatgagtatgccaacgttgatgccattgttgtatcagtgggtgttgatgaa

SEQ ID NO: 611070 - DNA, 126 bp, Homo sapiens
ttaatccaggtgagactttcacaataagagcagaggatggaacacttcagtgcattcaagggccgttgctccagggagaactgcaaatatcttcatccacccccacatttaaaaacgcagttggag

SEQ ID NO: 611071 - DNA, 90 bp, Homo sapiens
cggagctggaatgactggcaacccagatgatctcaatgccacccaccaacactgtgttttggccggttcacaacctcggtttagttccac

SEQ ID NO: 611072 - DNA, 59 bp, Homo sapiens
tgatgtggccaaggtcaacaccctgattcggtgatttgaagatattaaagctagaaatt

SEQ ID NO: 611073 - DNA, 82 bp, Homo sapiens
tttcaagaacaaaggccgcgacttggagatgatatcatcaagttgaatcgaaaggaagggaagaagcagaattttccaagac

SEQ ID NO: 611074 - DNA, 83 bp, Homo sapiens
cccgtggccgctgccggtctacgaggccccgtgtgggccgcggcccggccctcaccatggagtccatgttcgaggacgacatc

SEQ ID NO: 611075 - DNA, 90 bp, Homo sapiens
caatgaggcttgtggccgcctaagtggagataagattactgatctctcattacccaactatctgatggcatcttcggttggactgcttcc

SEQ ID NO: 611076 - DNA, 75 bp, Homo sapiens
gatccaaccacctctgcttctcaaagtgctaggactacagctctggcaggctgccctgagcacgctcaaccccaa

SEQ ID NO: 611077 - DNA, 101 bp, Homo sapiens
gccgattcctcctccttggtcgccgcgtccttggctggcgtaagatggcagtgaacgtatactcaacgtcagtgaccagtgataacctaagtcgacatgac

SEQ ID NO: 611078 - DNA, 100 bp, Homo sapiens
ccgccgcctctccttgctgcagccatggagtcttattagtaggtaagaaacagctgctcctccacctccaccccagccccatggagcttgctttttccag

SEQ ID NO: 611079 - DNA, 100 bp, Homo sapiens
cacgaatctgcccacccctcctgtaacccagcctgtttcacttcttgtgtgctggatcgaaggggtattttgccactggaggaaagtggaagtcgacctc

SEQ ID NO: 611080 - DNA, 100 bp, Homo sapiens
tgggattcgcgctgctgggcacccacggagcctccggggctggggacggcaaaacagaacagaaaggcggagataaaaagaggggtgttaaaagaccacg

SEQ ID NO: 611081 - DNA, 49 bp, Homo sapiens
cttggagaagctgaggacacacaggattacaggctgtgccagccctgga

SEQ ID NO: 611082 - DNA, 98 bp, Homo sapiens
gggagtcatattacaaaaccgagggcgatgaagaagcagaggaagaacaagaagagaaccttgaagcaagtgagacagtgcgcacggccacccccttc

SEQ ID NO: 611083 - DNA, 82 bp, Homo sapiens
gccggcggcaccatgaagtcagcggaggaaggttatcaatactctggctgaccatcatcatcgtgggactgactttggtgga

SEQ ID NO: 611084 - DNA, 83 bp, Homo sapiens
ctcagattgaaggacccggtggaccttggggtttggtgcacctcgatttggaggaagtagggcagggcccttatctggaaaga

SEQ ID NO: 611085 - DNA, 75 bp, Homo sapiens
agagtccttcacagctgtcatgacaactgcaatttccaagggagaaaactggttgtcctggatgtttgaaaagtt

SEQ ID NO: 611086 - DNA, 98 bp, Homo sapiens
aaattaaaagaggagcagcatggcatttcagtcactggtttgcagagtccaggagccttccttccgacctggccttcaacggggacctggctaaggca

SEQ ID NO: 611087 - DNA, 95 bp, Homo sapiens
aaggaacttgcagaaatcacattggaccctcctcccaactgtaggatgaccatgaaagctgtggttctaattctaccaaccgtagtactgctgag

SEQ ID NO: 611088 - DNA, 98 bp, Homo sapiens
gaagcagcagacagccaataaggtggaaattgagaaaattcggattcaattagcagagcctcacagacaatggccaaatgtgtcaaagctgtcacaga

SEQ ID NO: 611089 - DNA, 82 bp, Homo sapiens
aaacctccgggcccccaggcatggctagctcggaattgaatgatctggcacgggaccctccagcacagtgttcagcaggtcc

SEQ ID NO: 611090 - DNA, 97 bp, Homo sapiens
tggcgagagtttgtggaagatggcgcctgttgtgacaggacaatgcagatcttcgtgaagactctgactggtaagaccatcaccctcgaggttgagc

SEQ ID NO: 611091 - DNA, 83 bp, Homo sapiens
gtgtgtgctgcgttcacaggtgtttctgcggcagatgtgtatatctcatgattgatatggagaaactagtcatgggccaaagg

SEQ ID NO: 611092 - DNA, 100 bp, Homo sapiens
cattgctcatatagaagacccagaggacactaaccaaggtaaaagtgcagttttaaagtgtctcctggatattcacaaaatttttcaggaaaatgaccca

SEQ ID NO: 611093 - DNA, 100 bp, Homo sapiens
ggggcctcattttggatatctgtgataaagttggtcagtctcgcactggggcctcagcaaggatgtggtggttatctgacaggctcgaataatacctttg

SEQ ID NO: 611094 - DNA, 75 bp, Homo sapiens
gttcaaatccacgttgatacaatgaaggtatgttcgcaattcgtgctgatcatgattttgtagtacaggaagact

SEQ ID NO: 611095 - DNA, 100 bp, Homo sapiens
cacagacccgcgccgccgacgacccagcagccgccatggctctgctccgagtttaacggatgaagagtcccggaaaaattgggaagaatttggaaatcca

SEQ ID NO: 611096 - DNA, 75 bp, Homo sapiens
ccagaagaggatggcaaaggtggctaaggacctcaacccaggagttaaaaaggaatcctatgaggatggttgtga

SEQ ID NO: 611097 - DNA, 100 bp, Homo sapiens
cagaactcaaggaggcatcacggggggagtcatttacctccctggtctcaggtgtctctcacagtgtgtgccatatttaattgctatgggcacagaccca

SEQ ID NO: 611098 - DNA, 100 bp, Homo sapiens
ggctggaggacacacctaaacatgtggaatcccaatgccggtggtgatctttgtgaagtctgtgcagcggtgcattgccttggcccagctactagtggag

SEQ ID NO: 611099 - DNA, 93 bp, Homo sapiens
gaagctggccaaagcctgcccagacggctcacctgtgcgggatggaacaaaagttggttgaatctggcgatgtggaacccatggatatggagg

SEQ ID NO: 611100 - DNA, 75 bp, Homo sapiens
cgtcttctttgcctgcactaatgagtgtcccactggtccagacatcattccaattgtagctggtgtggttgctgg

SEQ ID NO: 611101 - DNA, 100 bp, Homo sapiens
cagcgcgggcagcgaaccgggggagcgaggcacggattgtcagtggcttcgccccgaggagagctgactgccctgggctgctgcctccggcagagctgag

SEQ ID NO: 611102 - DNA, 74 bp, Homo sapiens
cgaagcccaaaaagctgaaggtggaggcgccgcaagcgctgaggtcccaaaccagttgtcttcctgcaacatgg

SEQ ID NO: 611103 - DNA, 90 bp, Homo sapiens
ctagcctcaggcctgcccagacggtgttcagatcctttctctgctactgtagatgctgttgatgatgccattccaagcttaaatcctttc

SEQ ID NO: 611104 - DNA, 97 bp, Homo sapiens
agacgttccttccagctgtgtgggacaggtgtttgatcagtatgtaaagaccagggcagaggaagaacgcagggaaaagaaaaataaaataatgcaa

SEQ ID NO: 611105 - DNA, 90 bp, Homo sapiens
tacaatggaggaattacaggacatgaaaaagaactaatgtttgatgccaattttacatttaagacatgtcatgctgcccaaggacatagc

SEQ ID NO: 611106 - DNA, 97 bp, Homo sapiens
gccatcaaggcccttaatgctacaggacaagcaaacctcagcctggaggcacttttccagatccagaagcttggaagctgtattacagatccaggta

SEQ ID NO: 611107 - DNA, 90 bp, Homo sapiens
tgctgatgaagattcacctgtgcatgatattttagggcaagtgtggtggctcatgcctgtaatcccaatactttgagaggccgaggcagg

SEQ ID NO: 611108 - DNA, 83 bp, Homo sapiens
gcaccatgccgctcctaagcctgcacagccgcggcggcagcagcagtgagagaatcattgatcagcgattcgagaaggtttcc

SEQ ID NO: 611109 - DNA, 99 bp, Homo sapiens
agccagaaggcaacttcctttatacaaggattccagtatggttttcagtggaaacaaagggcttcacagagaaggaaatgcagataactttaattacac

SEQ ID NO: 611110 - DNA, 100 bp, Homo sapiens
gtggctcggaggatgtgtctcgggtcctcatccacgcaggaggctgcgccaacgtggttgatcattggaatgcagtagccctctgggcctgggatattgt

SEQ ID NO: 611111 - DNA, 74 bp, Homo sapiens
aacttattttagaagacacttctctctcaccgtgtcattggcacccccttctatgtgatggagtactgcccagg

SEQ ID NO: 611112 - DNA, 90 bp, Homo sapiens
ggcagccacggccgggggcgtctttcagagcattacggtagcagcagcagcagcagcagcagcagcagcagcagcagcagcagcagcagc

SEQ ID NO: 611113 - DNA, 50 bp, Homo sapiens
ggaagcatgtcgtctttatcgctcaggctggaaaccaggacaccctaaac

SEQ ID NO: 611114 - DNA, 100 bp, Homo sapiens
cagggaagaacccgagtcgaagcgggaagatggctgcagacaagcctgcaggtctgccatcatggatgttctcgcagaagcaaatggcacctttgcctta

SEQ ID NO: 611115 - DNA, 100 bp, Homo sapiens
tgagagtgggaacatgacgcaggtgcaggtgtctcttctcgccctggcggggaagcaggaggccactgtctgcagctcccgtgaagatgtccactccaga

SEQ ID NO: 611116 - DNA, 75 bp, Homo sapiens
tccagaggaggatgtagtagcaacgaatgagaatgtggtaactttattcagtgctgtcaaagggaaaacccccca

SEQ ID NO: 611117 - DNA, 75 bp, Homo sapiens
agaacgtgagcaagcccaggcacagccgacgccgcggggacgagattgaggagctgcgggccgagatgctggaga

SEQ ID NO: 611118 - DNA, 100 bp, Homo sapiens
cctcctgcctccaaatgcccccatcgctatacaaaagacatgatccacatcgcggacaccaaggtcgccaggcgttatggggatttcttcatccgtcaga

SEQ ID NO: 611119 - DNA, 82 bp, Homo sapiens
gtgagctgcggcgagcggagcttcgcggggatcctgctggactgcacgaaaaacgccgtgccgtccctgcagtgacaccgag

SEQ ID NO: 611120 - DNA, 75 bp, Homo sapiens
tcataggagtggagaacatgcacaaactttgagaatcactacaagaaaaactccttgtggtgaaggttctaagac

SEQ ID NO: 611121 - DNA, 97 bp, Homo sapiens
ttagcatcagtgactcacaaatcagcaacacagaatttctgcaagtaattgtgctcttaaagttccgtacagataaaggaagagatcccagttctga

SEQ ID NO: 611122 - DNA, 82 bp, Homo sapiens
ttaccagcgcctggctgggggcgaggagggaccgcaggcctccggtgtggctgtctctgatggtgtcatcaaggtgttcaac

SEQ ID NO: 611123 - DNA, 50 bp, Homo sapiens
gaatgggagtatatactttgaaggagtccttcaataatgttaaacagtgg

SEQ ID NO: 611124 - DNA, 80 bp, Homo sapiens
ggccggcagagccgccgagacgccgaagagcccgccgcccgcgcgagggggatatgagactttctactcggaatatcctg

SEQ ID NO: 611125 - DNA, 50 bp, Homo sapiens
taatcgcctgctttgattcattgaaagctggagcattggatttgctaaag

SEQ ID NO: 611126 - DNA, 101 bp, Homo sapiens
tgtgaaggagtggcccgggacaatcagggcagaatccctgagatggactagaggcttttaccagatttcttaaaactgaattcagtgaagaaaatattgaa

SEQ ID NO: 611127 - DNA, 96 bp, Homo sapiens
gttggacatgagaaccgtgcaaatttctgatctagagtggtccactgtaggtgtgccaagtgtttctgttatcctacaaagcgaagaataaggagg

SEQ ID NO: 611128 - DNA, 100 bp, Homo sapiens
cctgcagcgccgtgtggcacgacacaaaaatcagtagagacagggttttgccctgttggccaagctggtcttgaactcctgacctcaagtgatccacccg

SEQ ID NO: 611129 - DNA, 98 bp, Homo sapiens
gaatgagattgttacacaaattgatgcacaaaataagctggaaaaatctgagagcctggagaaagttcttgtggaattcagtcacaaggagttgtttg

SEQ ID NO: 611130 - DNA, 75 bp, Homo sapiens
tcgtgaccaacatgctgtgatgtgtgccgagggaggaattgagcaggacaggctgctttggtttgtgacctccag

SEQ ID NO: 611131 - DNA, 75 bp, Homo sapiens
gccagggtccctgaagagggaagacacgcggaaacagggctgcatttcttgacagcctcatgctccagatgccct

SEQ ID NO: 611132 - DNA, 75 bp, Homo sapiens
gtgaaagggacaggggtctcgcagccagatatttcagcagttgaatcagttgaattcacttcatcaagaaactat

SEQ ID NO: 611133 - DNA, 49 bp, Homo sapiens
cgacaggcggcgcgggcggcgattgctggactcgctgaagagagactac

SEQ ID NO: 611134 - DNA, 75 bp, Homo sapiens
tcatgactattgcaccacgcccggggggacgctcttctccaccacaccgggaggattttttatcaagcagaaatg

SEQ ID NO: 611135 - DNA, 100 bp, Homo sapiens
gaggattgtaagatactgtgcctttgctccagggcatttgtggacaattggtttggattcctgtcctgaaccacaaactcctagcagtggaattaaaatt

SEQ ID NO: 611136 - DNA, 100 bp, Homo sapiens
acccacttcgagtcctttattgtggagggtttacactgtgattttgcttgcctgatgttcaaacacctggtacacaaaccatcggaggagagagtaagag

SEQ ID NO: 611137 - DNA, 90 bp, Homo sapiens
ctagccccgctaccggactacatgtcggaggagaagctgcaggagaaaggtaaagggagaagatgaggaagagaacaatttggaagtacg

SEQ ID NO: 611138 - DNA, 75 bp, Homo sapiens
ctgggtcctcggtcggtacagtctctgcacctcgcgccccagcagctttttctaaaggctcctgtgaacactgca

SEQ ID NO: 611139 - DNA, 100 bp, Homo sapiens
tgggcaatcaagttggcaaactttatgtttgggatttagaagtagaagatcctcataaagccaacctccacagccacggggacaccctgcacctattccc

SEQ ID NO: 611140 - DNA, 98 bp, Homo sapiens
gaggggggccttagagggcctccccaggccgcctccgcccgtgaagatgtatcatgaaattatgcgtgcacttaaagctgccagcaaggatgactcaa

SEQ ID NO: 611141 - DNA, 90 bp, Homo sapiens
ctgacatcagctctcctgggaccctccaagagcactagtgtctagaaggcactaaggattacctggctggtgtttgcttgttctggagtg

SEQ ID NO: 611142 - DNA, 82 bp, Homo sapiens
tgctggtattggctggctgatcactttttgttcaaaaggaggagttgctttttaattaacacggcagatcgaataatcagag

SEQ ID NO: 611143 - DNA, 100 bp, Homo sapiens
agctgtactccagacacaacccggccatcgaggccctgctgcacgacctcagctcccagaggatcaccagcgtgggttatgaagacagtatggagtttcc

SEQ ID NO: 611144 - DNA, 75 bp, Homo sapiens
accatgtgatgcacctgctccagatcacattccagttcatagcaacattttctactctggtgcctttagtagatt

SEQ ID NO: 611145 - DNA, 82 bp, Homo sapiens
tgacacaggagagggccccagcagggccaccgggcggcaaggtggtgtttggactctagaccatgtgcctaggtagaagttt

SEQ ID NO: 611146 - DNA, 82 bp, Homo sapiens
cagatgttggatatttgcttggaaaaacgtgtgggtacgaccttgaaaaagcttgtggtgaaggggggcaaaaaaaagaagc

SEQ ID NO: 611147 - DNA, 75 bp, Homo sapiens
gtccaaggtacagtcgccgcgtgcggagcttgttactggttacttgcccagatggctacctgtatgagcgtgagg

SEQ ID NO: 611148 - DNA, 90 bp, Homo sapiens
ccagaaggaagatggcggatctggaggagcagttgtctgatgaagagaagtaataatttttcaccatgcatcggaaaaaggtggataacc

SEQ ID NO: 611149 - DNA, 100 bp, Homo sapiens
cctcatcgcaactgggcccgcgcgcagtttggcctgtcactgctcctcatcctcctgagccgtggtgaagacctacagagttcagaccctgctacagaat

SEQ ID NO: 611150 - DNA, 75 bp, Homo sapiens
tgtgttaccaagacatcttggatcccctgctacttcagtgcctggaatggggaggtggggaagacagggctccag

SEQ ID NO: 611151 - DNA, 82 bp, Homo sapiens
tgccctgaagcgggagaaggatcgtctggtacagcagcttaagcagcaggtcagcccaaggccaaccccactgtcactctgt

SEQ ID NO: 611152 - DNA, 82 bp, Homo sapiens
gcgctctcgtcttctgcggctctcggtgccctctccttttcgtttccggaaacatggaatcccttggcaccatgtcctgtgt

SEQ ID NO: 611153 - DNA, 100 bp, Homo sapiens
tcattgcctgagcgcgtcgagccagacagactgctgagcgactatattgagaaggaggtaaagaaccttctgataacttaagagagattctccaaaatgt

SEQ ID NO: 611154 - DNA, 92 bp, Homo sapiens
aacgaggcaaggagctaaagcagcgtgcgttcagccctggggcgccatgtcagaaccggctggggatgtccgtcagaacccatgcggcagca

SEQ ID NO: 611155 - DNA, 51 bp, Homo sapiens
aggcgcccgtgcggaatggcaggcctgcactgcccaaagtcttggaaactt

SEQ ID NO: 611156 - DNA, 100 bp, Homo sapiens
cctctggcagtcattggaatacactcaggattgggtgtgtcccccctgtcgtgggatctgcaattgcagctactgtcggaagcgtgacggccgctgtgcc

SEQ ID NO: 611157 - DNA, 100 bp, Homo sapiens
ggcggctcgggctcgggctccggtcagcccaagactaccccgtcggtcattctgttcctgccgtcctgtgaggagccccaagccaacaaggccacactgg

SEQ ID NO: 611158 - DNA, 80 bp, Homo sapiens
ctgtgctttgcagcaggccaacttgtaaagctgttctcaacccactttggtatggcgtcatcattgtgggcaacccgaag

SEQ ID NO: 611159 - DNA, 90 bp, Homo sapiens
tcgatttatatttggcatactttgtgcatgcagcagtttcaccagtgatcattaaagaatgggcagcttacaaaggaaagtctcctcaaa

SEQ ID NO: 611160 - DNA, 100 bp, Homo sapiens
gtgcttcaccattaactagtaaagcagtacaagagtctttctctaatacacagaattctaggaaggaggctgttcttttagccaaaatgaaacaccctaa

SEQ ID NO: 611161 - DNA, 98 bp, Homo sapiens
acaggcgatttcaccgagctgggactgccctcagaggttaagaagtttaatgactggttagtgctggaactttgcctgtcacctttcgttgcctggaa

SEQ ID NO: 611162 - DNA, 98 bp, Homo sapiens
tcttgtcctggcattgcatccacaggaggggcaggaaattctttgaagataacaacgaacttgatgcaagtgataggtttgccaaggtcagacctctc

SEQ ID NO: 611163 - DNA, 71 bp, Homo sapiens
agacgatattgatattgaagcaatgcttgaggctccttacaagaaggtggtgcagcggctgacgcggatgg

SEQ ID NO: 611164 - DNA, 83 bp, Homo sapiens
agctggagggcaaggcgggaacacacaatgcagatcttcgtgaagactctgactggtaagaccatcaccctcgaggttgagcc

SEQ ID NO: 611165 - DNA, 72 bp, Homo sapiens
acgatgttaatggggaggccaaagagacacagcccatttttttagagagaaaaggaacagttccgtaagctc

SEQ ID NO: 611166 - DNA, 82 bp, Homo sapiens
cccacttcaaacattcgtctcggaaaccccgcctcttacagtcacgagatatggctcgtggacagcagaaaattcagtctca

SEQ ID NO: 611167 - DNA, 101 bp, Homo sapiens
accgtccgagacgccaaacacaccaactttgtggagcactatgttggccatggaaatgctatcaatgagctgaaattccatccaagagatccaaatcttct

SEQ ID NO: 611168 - DNA, 106 bp, Homo sapiens
aactgttggcccagctccgaaacctggacaacgcggtcctcatcgcgagtctgacagtgacctagagcctgtgggggcgggaattcagcatctccagaagctgtcc

SEQ ID NO: 611169 - DNA, 100 bp, Homo sapiens
gttcggctccgcgcccgccgcgccgggagcagcaccgcggggccagccacttccggctcctgcgtcgctccggaagcctgcgagttccggaagccttggt

SEQ ID NO: 611170 - DNA, 75 bp, Homo sapiens
tgggggcaccgctgccgttccgagactgtgccctgtccacggtgcctcctgcatgtcctgctgccctgagctgtc

SEQ ID NO: 611171 - DNA, 101 bp, Homo sapiens
atgctgctgtgtgggaagaagatttgtaaagaaaactcttagcaacatggccaacgccctggccagcgccacttgcgagcgctgcaagggcggctttgcgc

SEQ ID NO: 611172 - DNA, 100 bp, Homo sapiens
cctgcagaatgacccaccaggatctgagtgacccagaggcaaaggtcctggactaccagacacaacagcagaaactctttcctcagctggccatcagtta

SEQ ID NO: 611173 - DNA, 87 bp, Homo sapiens
tgacccgggcttcggcccccaccagagactcgcaatggctgccatccggaagaaactggtgattgttggtgatggagcctgtggaaa

SEQ ID NO: 611174 - DNA, 50 bp, Homo sapiens
ggagaagaaatagttacctatgatcgcaatggacctcatcatgaccgttg

SEQ ID NO: 611175 - DNA, 50 bp, Homo sapiens
ctcgcgtcggacccttgccagaactgtgtcctcatgacttctcttgtgga

SEQ ID NO: 611176 - DNA, 74 bp, Homo sapiens
ttagcagcgcgcggagaagaacggggagccagtttctatgcagattttggaccgctgaacttggcaatggtgta

SEQ ID NO: 611177 - DNA, 75 bp, Homo sapiens
ctgggatccagtacgagttgaatcattgttcaaataaggtttcctatcctgggagcaggagagtgtgcctatttg

SEQ ID NO: 611178 - DNA, 100 bp, Homo sapiens
catcgtccggattggcagtggttttgacaacatcgacatcaagtcggccggggatttagttatgcaaagggtgacctggacatatcttacatcacatcca

SEQ ID NO: 611179 - DNA, 100 bp, Homo sapiens
ctcgcctggtgagcccccgggaccgcggtggcgccggaggcagcctgcgtttgaagagtgacactctgaacatcgtggcatcagatcaccggcctttcac

SEQ ID NO: 611180 - DNA, 74 bp, Homo sapiens
gccgccgtcgtctcggtagcagccttcgccacgccggggtcttcagtcacagctacttggaaggctgagatgtg

SEQ ID NO: 611181 - DNA, 100 bp, Homo sapiens
attcccatcggcattggcatttttgtcacctccaacaacatccgcgagatcgaggatgtgatcttcgtggtggaaagctaaattttaaaaccaccccaat

SEQ ID NO: 611182 - DNA, 98 bp, Homo sapiens
tccgccctgttgtgaagtgggtgtctcggtggagcagccagacacagtctccaacgccaccaaagcctccgtcgccaagcttcgagctggggctgtcc

SEQ ID NO: 611183 - DNA, 50 bp, Homo sapiens
cttttatcgaacttgtcaatgaaggaaggcgaatctttctgcattgaatt

SEQ ID NO: 611184 - DNA, 100 bp, Homo sapiens
ccagcgccggcctcctcagtgcgaagaagctgcagccgcacctggccaagggcctccccatggccacccatggaccagtcggcattcacttcctcccttc

SEQ ID NO: 611185 - DNA, 82 bp, Homo sapiens
gtgagcgcgtttcccgcctgagcgcaactagcggcgggtcgtgggcacctccagaattcagaaggagctggcggacatcact

SEQ ID NO: 611186 - DNA, 100 bp, Homo sapiens
tccagcctgcggagcctgtggggcagaatgttcgcatcttaccacatacagttctttacatggctgattcagaaactttcattagtctggaagagtgtcg

SEQ ID NO: 611187 - DNA, 90 bp, Homo sapiens
gggtgaggaagattttgaagacaatcgtcacttatacagccaaggccacctttgatgccatttctaagacctacagctacctgacccccg

SEQ ID NO: 611188 - DNA, 96 bp, Homo sapiens
cggctccctcctcggtggtcgcggcgacctccggcggcgggaggcccggcctgggcaggctccataaaaatacagactcaccagttcctgctttga

SEQ ID NO: 611189 - DNA, 95 bp, Homo sapiens
acaggccaacaaaactgcctcctcaggcagttcagacaaagacagttcagctgagagctcagcccctgaggaagctatccagtcagttcgctgct

SEQ ID NO: 611190 - DNA, 75 bp, Homo sapiens
tctggccgtctggatgctccactgtgcttgccaaggataatgaagtccctgaggttaccagaagtcgcagtccag

SEQ ID NO: 611191 - DNA, 100 bp, Homo sapiens
ggtccgccaggcgtacggtgccaagggattcagcctggcggacatcccctaccaggagatcgcagattcaaatgtaccagctgtccaggctccttcatga

SEQ ID NO: 611192 - DNA, 51 bp, Homo sapiens
caccggagcgtcccagctgcgaggagccacgaaggaagacaggaggtccga

SEQ ID NO: 611193 - DNA, 83 bp, Homo sapiens
ctggggaaacttcaccaagagcctcggcagctccagagcgacgggaaacgaaagatgatgataattccgaagaaggcttccac

SEQ ID NO: 611194 - DNA, 101 bp, Homo sapiens
cctatccagaatcccgctatacctcggattacttcattaatttaccatcatgtgactggaagatatgcagcttatcatgatcttccaatgtcttaaatcag

SEQ ID NO: 611195 - DNA, 136 bp, Homo sapiens
ttcttcgccaaattaaagttttacaagatttaacctgtcatcaagacctgggattttggtgttgctctaggtcgtaaccagcctttgaaaaaggagaaaccaaaatggaaaagcgattatcctatgacagatggac

SEQ ID NO: 611196 - DNA, 51 bp, Homo sapiens
atcctatggctcaaagaaagatgattatttttgagtatccgaggagcccag

SEQ ID NO: 611197 - DNA, 100 bp, Homo sapiens
acacttgctctttctgtggcaaagttttgcggctagttggctattcaagaaacctcgcccctctgaatgtcatactgtaatctttaaggaagaaagctac

SEQ ID NO: 611198 - DNA, 75 bp, Homo sapiens
gcagaaatgggatcagaaatcacaggttatcagtgagctgaatggaaaaaacattgaagacgtcattgcccaggg

SEQ ID NO: 611199 - DNA, 82 bp, Homo sapiens
ccccacgtcgccggcctggaggggcgaagaggacgagggggccaaggcttcctccggggaatttggataaagagagggcagt

SEQ ID NO: 611200 - DNA, 95 bp, Homo sapiens
cgcgggaggtgttcgagaacgaccccgagacggcagaagctcctcctggggtagagacagatcttattgatgttggattcacagatgatgtgaag

SEQ ID NO: 611201 - DNA, 98 bp, Homo sapiens
ctgaagatatggtcagctgaagatgctagctgcgtggtgaccttcaaaggtcacaaaggagatgctgaagaaggaagaagcaattccatggcctggaa

SEQ ID NO: 611202 - DNA, 82 bp, Homo sapiens
gaacaccccgagatgagaggagaagagcccagcacaacgaaggtggaccggctggaagtcgtgaacaaacaatctgtgcgtg

SEQ ID NO: 611203 - DNA, 109 bp, Homo sapiens
tgccttttgcctcccaccgtgattctgaggcctccccaaccatgtgcaattgtgaagccaaaaaccttccctcttacccggggccgagcaagatgagggattgctactg

SEQ ID NO: 611204 - DNA, 80 bp, Homo sapiens
ctggaagctctttgcggtggcgttggtgctgtttgcggatgctgatgcaggtctcggcgcggaagatggccggcggcgtg

SEQ ID NO: 611205 - DNA, 83 bp, Homo sapiens
cgccaggagaccccaagctgcatcgccgagtgggtgagaagccctaccactgcaactgggacggctgcggctggaagtttgcg

SEQ ID NO: 611206 - DNA, 100 bp, Homo sapiens
tgatcctggtatttcaagcattggtcttccaggtcttcctggtccaaagctgcacataaatcaactcctcctctgtaatggaacagctagtgcagctacc

SEQ ID NO: 611207 - DNA, 98 bp, Homo sapiens
ctggtgtttgtgccaagaccccaggctgcctcccaggtcctctgggacagcccctgccttctaccagggggtgatggtgggaatgggacaaaaagaca

SEQ ID NO: 611208 - DNA, 100 bp, Homo sapiens
tgtgctccttcccaaggaagtgctccagaagggccagctcttccgaggctccagcctgcttttccgccgggtgtcatcaggatcatgctttgccctggag

SEQ ID NO: 611209 - DNA, 100 bp, Homo sapiens
ggagaatcgaggaggggttcccgctatatgttctcctttcagccaagacctttcaccagtgcaggggatagaagattcattccacaaacttatactgaaa

SEQ ID NO: 611210 - DNA, 96 bp, Homo sapiens
tttgaacggaatgctggagtcagtggaagacggagctggtcggcccgaagtgcctccggagccagcgtggtggccatagacaacaagatcgaacag

SEQ ID NO: 611211 - DNA, 60 bp, Homo sapiens
cctggaggattgtcactccaacctcttttcgctgtgggtgaatttgtaagtgatgtcctg

SEQ ID NO: 611212 - DNA, 100 bp, Homo sapiens
ctattggactaccgtgaggatggtgtgaccccatatatgattttctttaaggatggtttagaaatggaaaaatgtgtcctgcatctccagtatggaatgt

SEQ ID NO: 611213 - DNA, 100 bp, Homo sapiens
gctgtgagatgaatctctaatcggtggccgccagacacccgcggcgaaggcggctcgggctcgggctccggcctcccagaagttcctgccgaatcgtctt

SEQ ID NO: 611214 - DNA, 83 bp, Homo sapiens
gcagctgcccccgagtcagagggcgcagtccgcattcaaagggggatatgagactttctactcggaatatcctgagtgttgcg

SEQ ID NO: 611215 - DNA, 73 bp, Homo sapiens
aatttccatgtcaacatagtcctggtgatgcggatgactctgaacgtaatgacctggcggcggagggagatgg

SEQ ID NO: 611216 - DNA, 83 bp, Homo sapiens
ggcaatagctgtccaatctggaacttatttcttacagcacccagtcagcttgaagagtttcaaatggaccctaccactgagaa

SEQ ID NO: 611217 - DNA, 98 bp, Homo sapiens
cgagaaccgtcagtttgagccagatggtgtcccgacccaggctaagcttgagcatggctgagcaggagcccacagccgagcagctggcccagattgca

SEQ ID NO: 611218 - DNA, 51 bp, Homo sapiens
cgcgaagctgccaaagccttagacaagtcagaatggcggcagtggagcatc

SEQ ID NO: 611219 - DNA, 95 bp, Homo sapiens
tcattttgctacaggagtatggcaccagatgggcacagatggctacatgccccgggaattggcatctatgtcacacctacgtctaccagtggccc

SEQ ID NO: 611220 - DNA, 100 bp, Homo sapiens
agttggtcagtctcgcactgggtagatcgttggccggagacaggatatgtgaagaaacttcagagaagggacaatacgttctattactacaacaaacaga

SEQ ID NO: 611221 - DNA, 98 bp, Homo sapiens
ttcgagagccctgtcatcttctaaacagagcagcagcagcagagatgataacatgtttcagagtgttgttcgctgcctgtggcatccaaagctgaacc

SEQ ID NO: 611222 - DNA, 51 bp, Homo sapiens
cgtttgtcatcagaatcagaggaagccgtcagacgttgaaagtcagagagc

SEQ ID NO: 611223 - DNA, 96 bp, Homo sapiens
tgacccactggatccaggaaggtgaagaaggccccgagcattcctctgattcagaatacactctctcagagccggactccgaagaggaagaagatg

SEQ ID NO: 611224 - DNA, 83 bp, Homo sapiens
actgtctacgtggacatgagagccctgagacacgacagggggatatgagactttctactcggaatatcctgagtgttgcgtgg

SEQ ID NO: 611225 - DNA, 115 bp, Homo sapiens
aaagaatgtcctaccttctctatcagatgctgtgtggaatcaagcaccttcattctgctggaattattcatcggggtaaacttcatgatccagaaggcatgggaattattccaag

SEQ ID NO: 611226 - DNA, 98 bp, Homo sapiens
aagacagcgaccccccgatcagcgagagcctgagcatagagaacacgctgtgggctggcactgtggtcgcatcaggtcccttcaccgatgttgtcacc

SEQ ID NO: 611227 - DNA, 100 bp, Homo sapiens
tgggtgacggcggtcggaggtgtaggagggagccgtggaggtccaggaaaaccagtagattcccagacatcgcgaagtgaatctgaaattgtgccaaaag

SEQ ID NO: 611228 - DNA, 83 bp, Homo sapiens
cttcaggggacgtggcgcagtcgagcatccgtgtcattctggaccttactcccaactaccggggtgagaactcgtggttctcc

SEQ ID NO: 611229 - DNA, 100 bp, Homo sapiens
tggttaaaacctgacacttttaacagtagtttatgccaacgtgacttcattcatacagatgaaccaaggatcgggatagcagtataaaattagaatcaag

SEQ ID NO: 611230 - DNA, 82 bp, Homo sapiens
cgaagacataaatccctgagtgcccgggaggagccttaacaagcgcacggagccctcaaggattttttatcaagcagaaatg

SEQ ID NO: 611231 - DNA, 100 bp, Homo sapiens
aaacacctaggaagggagaactgggtgaggacgcttgagcggaagttagaagcaaaaatgatcaaggaggaaagcgactaccacgacctggagtcggtgg

SEQ ID NO: 611232 - DNA, 100 bp, Homo sapiens
aacacagcaatggatgcacaggaagctttagctagaaggacattgacagtagtgataggaaaagcccaacagggcaagacacagaaatagaagatatgcc

SEQ ID NO: 611233 - DNA, 100 bp, Homo sapiens
gtaccttcttcaagagaaatggagcccttctccaaggccgcattgacaggaagattgagttccccctgcctgatgaaaagacgaagaagcgcatctttca

SEQ ID NO: 611234 - DNA, 100 bp, Homo sapiens
gcctcagtgtcttctccatgctctgctgcttctggcctctgggcatcgcagccttctacttgtcccatgagccatcatgtatgtcatgggagcacttggc

SEQ ID NO: 611235 - DNA, 50 bp, Homo sapiens
gtggcagagtgcagggatttccgctctctatgagaacatgctggtggagc

SEQ ID NO: 611236 - DNA, 75 bp, Homo sapiens
atgattactacgacaccggcgaggaacttggcaggcttatcaggagggcagacttcaaaagctactaaaaatgaa

SEQ ID NO: 611237 - DNA, 74 bp, Homo sapiens
ggacacagagagtctggcaaagagaatctgcaaagacctcgccttatgtttgatcatcggccaaggtcctggcg

SEQ ID NO: 611238 - DNA, 101 bp, Homo sapiens
caccgagcacatccccagagaacggctctgcgatgctgtggctgtgaccctgaaggaagattgggaatctgaaaaagatttatgtttagaaaatctacgca

SEQ ID NO: 611239 - DNA, 75 bp, Homo sapiens
gacctttcccgctggcgcgcagcctcagctagttttcggctttgtgagaaaccttaccatcaaacacgatggcca

SEQ ID NO: 611240 - DNA, 98 bp, Homo sapiens
tggactcttgattggaatgttctccctgcagcagtcagcccaaaggaagacttatcagatgtagacttcctagatgattcttcaacggagagtttgct

SEQ ID NO: 611241 - DNA, 75 bp, Homo sapiens
cgacctgctaacagaactggaccttttcggctccctgatggacttactcgccgaggagacatcaacctgctgatg

SEQ ID NO: 611242 - DNA, 82 bp, Homo sapiens
tcggatctgctggacgaggtcttcttcaacagcgaggtggacgagaaagtggtcctgaacgaggctgtgggggccctgatgt

SEQ ID NO: 611243 - DNA, 82 bp, Homo sapiens
ggatttctggattctctacgggatctcatagcagattcaaatccaatggttctctccataaatgaagaagggctaaggcgat

SEQ ID NO: 611244 - DNA, 82 bp, Homo sapiens
acagcctggaaagaaatatcctactgtgctgttcatatatggtggtcctcaggaattgactttaaaattaggaccatagagc

SEQ ID NO: 611245 - DNA, 90 bp, Homo sapiens
tgctgaaggacatggctgtgcggggccggctgctcactgccctggtgctccccgacctgctggtgggacagtcacttcctcctccctccc

SEQ ID NO: 611246 - DNA, 90 bp, Homo sapiens
ccctgtgacctgcagatattgggagatccacagctaagacgccgggactccctggaaacctagaaatgagctttcagcagaggccaaggc

SEQ ID NO: 611247 - DNA, 74 bp, Homo sapiens
gggcgctgagagcagcaaggccagagcaccatgtggcggagcacactgctgagagctacatgctgcagtggcag

SEQ ID NO: 611248 - DNA, 75 bp, Homo sapiens
caacttaaaagatgccacctctaagttttaaccatgctgaccaacgaaactggctttgaaatcagttcttctgat

SEQ ID NO: 611249 - DNA, 100 bp, Homo sapiens
agaaaatgaaacaagcctttgctgaattggagagctgggtgtccgcaatgttgccagtgtctgtctgcagattggctacccaactgttgcatcagtaccc

SEQ ID NO: 611250 - DNA, 117 bp, Homo sapiens
cgagaaggaggttgccgacgccatcaggctcaacgaggaactcaaagtggatgaggaaagtgatgtgtccaatctagatcccaacttctcatttgaaggcaccaaactggatgtggg

SEQ ID NO: 611251 - DNA, 75 bp, Homo sapiens
ccacagcgacgaggacgactgcctaattcgccaaaatgacgaacacaaagggaaagaggagaggcacccgatata

SEQ ID NO: 611252 - DNA, 98 bp, Homo sapiens
cttgatgtctttttacaaaaagcaattttccagattattcaaagtatcaggatgggcatgtgaagtgactgaccttaagatgtttccattctcctgtg

SEQ ID NO: 611253 - DNA, 100 bp, Homo sapiens
aaaacagtcggtgtgtgctgagcaaatggaagaacaaatatgtctgtcagtgtggcttttttaaaagaaaatatcaacaactgaacttggagagcatcag

SEQ ID NO: 611254 - DNA, 75 bp, Homo sapiens
cttttgtctctgcctttgaggttggcgggaactgaaactgttcaaagaggaaatctcccggaggtttaaggctca

SEQ ID NO: 611255 - DNA, 82 bp, Homo sapiens
aacttccagcagcccgcggacggccctgggaggagcggggacactgaggacctctctccaaattggcctctcaactcacagg

SEQ ID NO: 611256 - DNA, 83 bp, Homo sapiens
cggggcctttatttctcgtcggcggcgccctgcaccgcgcctcgcaaaagctgttgcgcagccattggtacctgtattgggga

SEQ ID NO: 611257 - DNA, 51 bp, Homo sapiens
tccttggaaacatgtgggcaattgataatgtttcaccagtgatcattaaag

SEQ ID NO: 611258 - DNA, 82 bp, Homo sapiens
gagtgtgttgcacagacatggtttcgctttttacacatgttaagcgccaaatcttaaaggcagaccacgcaaaaagaaacca

SEQ ID NO: 611259 - DNA, 100 bp, Homo sapiens
gccagcacctttcggcttctgagacggcggcagcagcggcattcagcccgcggcgccatggctcacgtcggctcccgcaagcgctcgaggagtcgcagcc

SEQ ID NO: 611260 - DNA, 76 bp, Homo sapiens
tgctgctgagtcagacaaggactctggcttttcagatgttcctcctgctgatcaagagaagctttttatccagaag

SEQ ID NO: 611261 - DNA, 82 bp, Homo sapiens
cctcctcttcatcctggagcacatcatggtggtggggaccaaggcatactgaacacattttttagcagctgggcaacaacag

SEQ ID NO: 611262 - DNA, 75 bp, Homo sapiens
aaccggcgctcctgcccccggggtgacgcgcagctcccagccgggagcagattaagcgagtaaaagactcggatg

SEQ ID NO: 611263 - DNA, 51 bp, Homo sapiens
gcggcgtttcacggtggcacatacatggttgaagaagcctcagcggaggcg

SEQ ID NO: 611264 - DNA, 80 bp, Homo sapiens
gacacgaccttcctgcccttcacgctccaggagctagccattgagacccagagcagcagttctgaagagatagtgcccag

SEQ ID NO: 611265 - DNA, 96 bp, Homo sapiens
cggggtgcgccggcagaggatccagtgttcaccatcctggccccggaagggaaattcaactactgaggaggttacggcacaaaaatgtcatccagc

SEQ ID NO: 611266 - DNA, 100 bp, Homo sapiens
ggacctctatctcgcttttcccctggccttctgtatcttcatggtgcggctcatcttcgagagatacttttctgctgtgagaatgtaagatggatccaga

SEQ ID NO: 611267 - DNA, 75 bp, Homo sapiens
gcacaggccggtggaatgggtccaggccgtggtcagccgcttcgacgagcagaactgataaatttcaaacggaag

SEQ ID NO: 611268 - DNA, 75 bp, Homo sapiens
attcaataacagttgcatttgaaaacaaaaggagctcaaaaagtgggatgagtttgaagatattttagaagagag

SEQ ID NO: 611269 - DNA, 83 bp, Homo sapiens
tatgcccccgtggccaccgcctccagcttgccaccaaagacctgcgactttgctcagggagtggggaaggccagggccagatt

SEQ ID NO: 611270 - DNA, 75 bp, Homo sapiens
ccgcagatgttgtcaaggtggcctaccaggaggccaggggtgtcgccatggtgaatcacaagcctttgagaacag

SEQ ID NO: 611271 - DNA, 90 bp, Homo sapiens
gccgccgcagcaccatggcgaccaccgtcagcactcagcgcgggccggaccgaccagctgggcatgttcacgcacaaggagtttgagcag

SEQ ID NO: 611272 - DNA, 116 bp, Homo sapiens
cggggcttgccctggtcttgctcggccgatgaagtgcagaggtttttttctgggtggttctcttcccaaagtggaagccaaattcatcaattatgtgaagaattgcttccggatga

SEQ ID NO: 611273 - DNA, 100 bp, Homo sapiens
gagagcgagctgagtggttgtgtggtcgcgtctcggaaaccggtagcgcttgcagcatggacggctgtcctcagcgaggggccgtgcacccgctcctgag

SEQ ID NO: 611274 - DNA, 117 bp, Homo sapiens
taatgcacaccttaaaatattactactgggttattaatcctgctgacagtagtggcattacacctaaaggattaggtgaccaagaatatggcccaggtgaccaaagccctggacaag

SEQ ID NO: 611275 - DNA, 100 bp, Homo sapiens
tccaagtgcgcgccctggcgggtccggaccaagaccaagatcactccatggatgaaatgacagctgtggtgaaaattgaaaaaggagttggtggcaataa

SEQ ID NO: 611276 - DNA, 100 bp, Homo sapiens
cgaagactgcatcgccaagatcatggttcaaaccttgtactactcagctgatcacaagctgcttgatgggaacctactagatggacaggctgaggtgttt

SEQ ID NO: 611277 - DNA, 75 bp, Homo sapiens
caacagctccctgctcggaggcggtggcggctatgactttgcagccgtcctggagtggttcgcggagcgtgtgga

SEQ ID NO: 611278 - DNA, 75 bp, Homo sapiens
ttacttccagaagattggtggagcttgatctgaagactaaacttcagtggctctgtgaggaactgaaagagagag

SEQ ID NO: 611279 - DNA, 100 bp, Homo sapiens
gattggctacccaggtcctcgaggagtcaaggtctgtgcagacttttgcagacaaatcaaaacaagaagctctgaagaatgacctggtggaggctttgaa

SEQ ID NO: 611280 - DNA, 100 bp, Homo sapiens
ggctgaagggttagcggagcacgggcaaggcggagagtgacggagtcggcgagcccccgcggcgacagatcagtgtgcgtgtgaccaccatggatgcaga

SEQ ID NO: 611281 - DNA, 83 bp, Homo sapiens
aagatggcggcggtagcggcagtggcggcgcgtaggaggcgagagaagtggagatcctgatgtttctcagtgccattgtgatg

SEQ ID NO: 611282 - DNA, 100 bp, Homo sapiens
caggacatgcctccgccggggggctatgggcccatcgactacaaacggaacttgccgcgtcgaggactgtcgggtgctggagaatctggtaaaagcacca

SEQ ID NO: 611283 - DNA, 75 bp, Homo sapiens
ggaaacctgtgatccattctcattaaataaatctctggctaggacttctctcaaacttgtgtgctgaggagactc

SEQ ID NO: 611284 - DNA, 80 bp, Homo sapiens
ctcaggttgtggtagaggcggaggctcaggcagcttgaggccacagaaacactattcagaatgggtgtagcaagaggaac

SEQ ID NO: 611285 - DNA, 119 bp, Homo sapiens
tttggctctcggcactcccaggctgggagctggatacctgccctggcagcatggctcagactgcatgacagaccacggagttcatcatctcggagccactggccaatatgtactcgcgt

SEQ ID NO: 611286 - DNA, 83 bp, Homo sapiens
cctacccccagcaccacctccagcccctgcgcctcgtaatagttatgcacgagtgcgagctgtggtgatgacccgagatgact

SEQ ID NO: 611287 - DNA, 96 bp, Homo sapiens
gttggcccaaccagtcccagcgctgtcgtgctcctctactcggtcaagagacaactgcctttgaaagagagtgagtgactgtttccaaaacagcaa

SEQ ID NO: 611288 - DNA, 82 bp, Homo sapiens
gccggcggatgttcatgggcagcaccatcgagccagaagcagtatttgtcctgtcattgaaattatgagactatcattcaaa

SEQ ID NO: 611289 - DNA, 99 bp, Homo sapiens
aggcagactgagcgccagagaggacgtttccaactcaaaggagaagatgtcaaccggacactagaaggtggaaggaaacctcttcattatgcagcagat

SEQ ID NO: 611290 - DNA, 82 bp, Homo sapiens
ccgacacactatgctccctccaaagcctaggagagaagtttgctgaggaatgccttcaagcacaaagtgatgaatgactgcc

SEQ ID NO: 611291 - DNA, 100 bp, Homo sapiens
cgggggcgcagggaaggagggcgtccgagtcaacaaccgcttcgagctggtcaaaatgcagatcttcgtgaaaacccttaccggcaagaccatcaccctt

SEQ ID NO: 611292 - DNA, 98 bp, Homo sapiens
ggactttgttgtcccggtcccagaccaccctcctccaccgtcgcctcccactgcaaaaaggcctggtttccacgggctcccttgctcagcagtatgcg

SEQ ID NO: 611293 - DNA, 75 bp, Homo sapiens
ccctacaaaaacggcctactaccagatgccagaattccagaaaagttcagttcgaatcaagaaccctacaagagt

SEQ ID NO: 611294 - DNA, 86 bp, Homo sapiens
ggacgaccccgaactccaggacagcatccaggcctcattggacagcattcgagacaatgcagatcttcgtgaagactctgactggt

SEQ ID NO: 611295 - DNA, 76 bp, Homo sapiens
gtgaagttgaatctgcaaaacttattcgggataaagtagcaggtggtggtgaagtttattaagaaggagaaggtct

SEQ ID NO: 611296 - DNA, 90 bp, Homo sapiens
ccactcacaatgggaacatgtacacctcatccctgtacgggtgcctggcctcgcttctgtcccacttgactgtagtagactctgatggag

SEQ ID NO: 611297 - DNA, 88 bp, Homo sapiens
caagccacacagggcgcatcggggtgtggaatgccgtcaccaagcactggcagggactcggagatcatgcagcagaagcagaaaaagg

SEQ ID NO: 611298 - DNA, 95 bp, Homo sapiens
cttggaccctgaggagagtcaggccacgcctccaggccctgccttctgcctgcacattctgccctgatttccggaacctggaagcctaggcaggc

SEQ ID NO: 611299 - DNA, 122 bp, Homo sapiens
ccatccggtctccccaggaatcagctcttctgttcattccagtccacagcccctcaacagagatgatgatgtgcctgcagatatggttgcagaagaatcaggtcctggtgcacaaaatagtc

SEQ ID NO: 611300 - DNA, 83 bp, Homo sapiens
ggtgaagcagccagcagaggtcagagagagacagctcacgttccgggagcatcagatccatgctgctgctgactcggagcccc

SEQ ID NO: 611301 - DNA, 75 bp, Homo sapiens
gggggccgaactggccctggactacctctgcagggggatatgagactttctactcggaatatcctgagtgttgcg

SEQ ID NO: 611302 - DNA, 99 bp, Homo sapiens
ctctacgccatgagggagaaggggattaacatcagcaataggaatgtatcctgtcaggtataatgtcagtgaatggcaagaaagttcttcatatggatc

SEQ ID NO: 611303 - DNA, 75 bp, Homo sapiens
gcgggctcagctctcgccgccagcgggccgcagatcgaaaagtatcctccttgcacacctcccgagttcagaggc

SEQ ID NO: 611304 - DNA, 82 bp, Homo sapiens
gtgatccagcaaggtcggcagagcaaggggcttacgcagaaggacctggccacggcatgtcgggccccaggcctgtggtgct

SEQ ID NO: 611305 - DNA, 90 bp, Homo sapiens
ggagcttacaacgccaaaatcggttacagccatgaaaatgtgtcttatacatgggaagctgttgataccaaaaataatgtactttataaa

SEQ ID NO: 611306 - DNA, 74 bp, Homo sapiens
tgctaggttttttccttgcaaaagttcacaaaattgatcctgatatcattgtgcttgaattcggagtgatttac

SEQ ID NO: 611307 - DNA, 100 bp, Homo sapiens
tagtactgccagtggcacttctgggcagagtactactgcgccaaatttggtgcctggagtaggaggaattgagttcttctcagactttatcacatgatgg

SEQ ID NO: 611308 - DNA, 87 bp, Homo sapiens
ggcgaagccttgggtttctttcttaaaggactgatttttagaactccacatttgaggttacgggtaaattccggggaggtgtgaacc

SEQ ID NO: 611309 - DNA, 103 bp, Homo sapiens
gatggtcgactacaagaagagggcggagcggagacgggagtattatgaaaagatcaaagatccccagcaggccctcaaggagctggctaagatgtgtatcctg

SEQ ID NO: 611310 - DNA, 50 bp, Homo sapiens
gcataatggatgaaaggaaccgacaggttgaagatgacagcgatgcagag

SEQ ID NO: 611311 - DNA, 99 bp, Homo sapiens
gtgcgttgcgtgccctacttcaaggataagggcgacagcaacagctctgccggctggaagaacctaatccaccaatagatcaagttatacagaaaccag

SEQ ID NO: 611312 - DNA, 73 bp, Homo sapiens
gaagtgcttcagatttaaatatatgcattgcctcaggaacaaaggtggctctgtttaatcgactacgatccca

SEQ ID NO: 611313 - DNA, 100 bp, Homo sapiens
cgcggagccgcgcagccctcggagcacggatgcagcaccgaggcttcctcctcctcaccctcctcgccctgctggcgctcacctccgcggtcgccaaaaa

SEQ ID NO: 611314 - DNA, 82 bp, Homo sapiens
gaagaggctctgggcaactcaccagaaatctaagggacactgtgttcctgaaaatgatatcatcaagttgaatcgaaaggaa

SEQ ID NO: 611315 - DNA, 83 bp, Homo sapiens
gcggcgcatggaggaggaggaggagggtgtgaagacagagaatgaccacatcaacctgaaggtggccgggcaggacggctccg

SEQ ID NO: 611316 - DNA, 73 bp, Homo sapiens
gccttccagtacacagacgagcatggggaagactggcacagcctccaggttggcgggctcatctgcgctgggg

SEQ ID NO: 611317 - DNA, 75 bp, Homo sapiens
ccgaagcaaaagtccattcagaaaagacaagagccctgtgagaacagtccaggctctgcagacagcatcccacct

SEQ ID NO: 611318 - DNA, 75 bp, Homo sapiens
atgttctcagtgtggcatcctgcttcccctgccgatcctaaatcaacatcagcaacttgagttggtggaaccaag

SEQ ID NO: 611319 - DNA, 100 bp, Homo sapiens
gtgcccaggtccggcgacagggtctacaagaacgagtgcgccttctcctacgactctcccgctcttcagcagcctcggtgagctgagctccatttcagcg

SEQ ID NO: 611320 - DNA, 98 bp, Homo sapiens
agatcctgatcctgaggttatggcaaagaaatttccatcgtgaagcctttaatcatcttacccaaggctctaacaacctgggtaaactaaagatgtga

SEQ ID NO: 611321 - DNA, 75 bp, Homo sapiens
gtgcagcaggacactatcctggccgagggccttcacttcagggccaagaccagcttcaagtctccatggtaccag

SEQ ID NO: 611322 - DNA, 100 bp, Homo sapiens
atcaaccgccagatcaacctggagctctacgcctcctacgtttacctgtccatggtcaaggaggttaaaaagactttgtcgggcttggaagtcagcatgg

SEQ ID NO: 611323 - DNA, 75 bp, Homo sapiens
aggaacctcaggccctgcttgacagtgattactcttgtctctgctgctcctgggaaagtgatttgtgaaatgaaa

SEQ ID NO: 611324 - DNA, 90 bp, Homo sapiens
gaaactgaggcatggagaggctgaagtcacacaactggagaagcgactggaggagtggttggggaggacattgcctggcagtgactggac

SEQ ID NO: 611325 - DNA, 100 bp, Homo sapiens
tggagcctgggaatcctatttcacgggagatacagatgacccaccaagaattactcagaaccctgtgatcaatgggaatgtggccctgagtgatggacac

SEQ ID NO: 611326 - DNA, 100 bp, Homo sapiens
ggcaccccagttgtctgtgccaggtggcctccttggtatgccagctgctcactcccaaagcctgacaagttgatgccactgctgtctgagggctcctctg

SEQ ID NO: 611327 - DNA, 105 bp, Homo sapiens
cttatactcctcccagtgacgggtctggagtgcgtgggggaccggctgttggcggttggaatcgaagcctcttaaaatggcagatgacttggacttcgagacagg

SEQ ID NO: 611328 - DNA, 100 bp, Homo sapiens
gtgaggagccagacgacaagcacacactatggcgctgaaacggattaataaggtcatgattgttgtgaaacagtgaaggtgcagctctgtgcttccaaag

SEQ ID NO: 611329 - DNA, 127 bp, Homo sapiens
gccggcaccatgggctgctgcaccggacgctgctcgctcatctgcctctgcgcgctgcagttgtgcatttgcacagtataacttggaccagtttactccagtaaaaattgaaggttatgaagatcag

SEQ ID NO: 611330 - DNA, 75 bp, Homo sapiens
ggacctgaaacagaaattctggaacacctatatgatggctctgagagattcctctgcgaatctgtttttagctat

SEQ ID NO: 611331 - DNA, 100 bp, Homo sapiens
aacgactaccttcagattatcacagatatacagagttgtccatggaaacggcaagcagaagaatatgcaaattttagcctctacggcagacacatgcagg

SEQ ID NO: 611332 - DNA, 74 bp, Homo sapiens
gctggagccggccctggaggacagcaggactctcctaaacgtcccaaggaggcagaaaaccctgaaggagagga

SEQ ID NO: 611333 - DNA, 100 bp, Homo sapiens
tcatcttgggagtgatttgcgccatcatcctcatcatcatcatagttgaccacggcatgtttgagaatttgaacacagccctcactccaaagctccaggc

SEQ ID NO: 611334 - DNA, 88 bp, Homo sapiens
ttttttgaaggtcctccaagtccgtgttaaggtgagagtggaggtatgcagagtgctgccagtcacctggtttcccaagatggaggga

SEQ ID NO: 611335 - DNA, 86 bp, Homo sapiens
cacagttcctgggaaggtggagccaccagcctctccttggtgacttgatggagggtgagctctattctgctctcaaggaagaagaa

SEQ ID NO: 611336 - DNA, 100 bp, Homo sapiens
gtggaagatgatcacatcccagccttcacagttgttgatcacatagcatggtcatccactcacagcttaaaaaaatacagggagcatcggagagaatggg

SEQ ID NO: 611337 - DNA, 82 bp, Homo sapiens
tgcgaggaaaatggcggcgggaggttatcaatactctggctgaccatcatcatcgtgggactgactttggtggaagtccttg

SEQ ID NO: 611338 - DNA, 105 bp, Homo sapiens
aggccactctgcatgcggctagggacaccctggccagcgtcttcagattgctgcacagcctggaccaggctaaggagatcctgtgccggtatcagaatatctgga

SEQ ID NO: 611339 - DNA, 83 bp, Homo sapiens
agtgcttcgtgtggagcggcacggctgaggcccgcaagcgcaaggcaccgtctgcgtcctgctgtccttccccttcatcttca

SEQ ID NO: 611340 - DNA, 75 bp, Homo sapiens
acgtcttgcaacagtggccgcacgcataggccctgtttgctgaaatgttggggccaaacaacttgatagagccta

SEQ ID NO: 611341 - DNA, 89 bp, Homo sapiens
tcttctctgcttatcatggttaccaacaaaatgactgctgcctttagaaaccctagtgggaaacaggatcagttcgacagcttagacaa

SEQ ID NO: 611342 - DNA, 74 bp, Homo sapiens
tgcttctccttttcatgagtgttcctgtggtctctgcacctcctttctatgggggactcaaggagatttcacca

SEQ ID NO: 611343 - DNA, 75 bp, Homo sapiens
agccgcccagcagcacaacacagggaagcttggggaggcagttccggcgaggggggagcctcagcaggattgctg

SEQ ID NO: 611344 - DNA, 78 bp, Homo sapiens
ttgaggattcgttttcctggctttgagcccctcacaccctggatccttgacctactacattcctgggagatggtcggg

SEQ ID NO: 611345 - DNA, 90 bp, Homo sapiens
ccacgggcatcggaaaagccatcgtgaaggagctcctggagctgggttattcagcttctcaaggctggaaaagcgaaggaagtttcctac

SEQ ID NO: 611346 - DNA, 50 bp, Homo sapiens
cgaataaagtttatcacgccgggcccaaaaaggtcagtggttgagtggct

SEQ ID NO: 611347 - DNA, 74 bp, Homo sapiens
ggactttggggacagctgtcagtggcctaggccgcagatgagtgaccgaggaggtggcgttcctttgaggaaaa

SEQ ID NO: 611348 - DNA, 98 bp, Homo sapiens
tataccttcacccagcatttcatccctcgtcgaaaggattggattggcatctttagagcaaatggcatcaagattgggccccaacagtcaatttcaac

SEQ ID NO: 611349 - DNA, 75 bp, Homo sapiens
gcggggttcgtcgggcctgtggaagaagcgccgcgcacggacttcggcagagtccaaggacaaaatgatgagagg

SEQ ID NO: 611350 - DNA, 100 bp, Homo sapiens
gcctccctccctgggcaggccctgggcaccactcacggggccctcagtgccaccaccatcttcaggtgacccagggcctggtcatcgggcagctgagcag

SEQ ID NO: 611351 - DNA, 80 bp, Homo sapiens
acatcccagagtctgggaaatgtcccaggggcagccactggcctcccagcccccggtcgtcgacccctacgacatgccgg

SEQ ID NO: 611352 - DNA, 129 bp, Homo sapiens
tggaggtcgacgactccgtcgcagactacggacctgtctgggtctcagccgccaaagaccccgtccgtttctaataagtgaccgtgacccacagtgcaacctccactgctccaggactcaacccaaacc

SEQ ID NO: 611353 - DNA, 100 bp, Homo sapiens
gctttaaagaatacacttcaatgatcgtaaacttgttgataaagaagatatcgacactagcagcaaaggaggctgtgtccaacaggctactggctggagg

SEQ ID NO: 611354 - DNA, 100 bp, Homo sapiens
cgcaaccattgacgccatgtcgggttattcgagtgaccgagaccgcggccgggaccgaggggggcccaggcagtgccacttctgatctggggatggcatg

SEQ ID NO: 611355 - DNA, 82 bp, Homo sapiens
agagaaacccggagggcgccggggtttattcactggatctctgaatacccaggccccctccaccatggccagccggggtggg

SEQ ID NO: 611356 - DNA, 96 bp, Homo sapiens
ttcatgcagtctctcattggcttctttgagactgaaatggcaggggctggtggcagcagcgtcgtcataggtaatattggtgccctgatgggctac

SEQ ID NO: 611357 - DNA, 75 bp, Homo sapiens
ttgacatttaattttagggtcctttatatagaagggagagtagtttgtgaagtgtggatatgcaggctctaactt

SEQ ID NO: 611358 - DNA, 75 bp, Homo sapiens
ccgcattgatccttttgtgaggaccttcctgaagaagaaaggtaatctgtaagtcagatgctccaacaggggatg

SEQ ID NO: 611359 - DNA, 75 bp, Homo sapiens
tctactactcggacaagtacttcgacgaacactacgagtaccggtttctgctttgggacaaccatacatctaatt

SEQ ID NO: 611360 - DNA, 88 bp, Homo sapiens
gccgccgccgccgccgccgcgccgagcggaggaggaggaggaggcgaggaggagagactctcttccaccaaagccacctaagccaatg

SEQ ID NO: 611361 - DNA, 100 bp, Homo sapiens
ctgcgttgtaccatccgcctgtgggacacctaccaggtgaacccgtgagcaactgtggtacctccacctgtcccacaacctacaactcagcagtaccaag

SEQ ID NO: 611362 - DNA, 98 bp, Homo sapiens
agtgtcattcttccacttcctcagaatgtgaaggattatttactcgatgatggaactctggtggtttcaggaaggcttgcagccctgagtgatcgaga

SEQ ID NO: 611363 - DNA, 75 bp, Homo sapiens
aggagaacgaacatcttctggacctttgtccagatggagtgaaggtacctgagcgcaggaaccatggtcttcatt

SEQ ID NO: 611364 - DNA, 100 bp, Homo sapiens
atggatctcttcaggcacactacagaactaaatatgcatgggttcaacagaaatatttggtggttacctgcaactatgaagctaggaaacttggagttaa

SEQ ID NO: 611365 - DNA, 74 bp, Homo sapiens
cacggcactctcaccatatcccacagcaatttctgggttacagaagctccaccatgaggcgaggtggatggagg

SEQ ID NO: 611366 - DNA, 100 bp, Homo sapiens
attctctcccaggccacaagacatttcctgctcggaaccttgtttactaattggggatatgagactttctactcggaatatcctgagtgttgcgtggatg

SEQ ID NO: 611367 - DNA, 51 bp, Homo sapiens
acaagcctttgctgaattggagagctgggtctgggggtggtggcatctccc

SEQ ID NO: 611368 - DNA, 75 bp, Homo sapiens
gaaaatacaaatcacacgcataatggatgaaaggaaccgacagagtcaagcaaagcattgtattcctgagaaaaa

SEQ ID NO: 611369 - DNA, 117 bp, Homo sapiens
gttctctgtagtgtttgccaatgttggagccgtctgcaaagtgtccccggcaagaagatatgcacccaatgtccagggagcgtgcaaaatttgtcaaaagtggccttttattgtaaa

SEQ ID NO: 611370 - DNA, 75 bp, Homo sapiens
ataggaggtgtggccactctcctcctcatccttgtcatcattgtaccttggccatgtagaagttgatgaatcaag

SEQ ID NO: 611371 - DNA, 87 bp, Homo sapiens
tcgaccgcgcggagcaggcggaggcggataagaaagccgctgaggacaagtgcaagcaggattactacagcatcccatttcccacac

SEQ ID NO: 611372 - DNA, 103 bp, Homo sapiens
ttcctgtacagcctgcagaactagaaacagcacccaggactatcttccaaagagttctggatatcctaaagaaatcttctcatgctgttgagcttgcctgcag

SEQ ID NO: 611373 - DNA, 74 bp, Homo sapiens
tggccatgaatgcccaacaagataatggaaagccagagagctgtgcagttactcctcgatttcccaaatcaaaa

SEQ ID NO: 611374 - DNA, 74 bp, Homo sapiens
gaagactgaaggttcaagatcagatgactaagcagcatcaaaccagattagataaaatatttacaccagcagct

SEQ ID NO: 611375 - DNA, 75 bp, Homo sapiens
atgtgatcgtcatcacagtcaactatcgacttggagtactcggtctcgctctgccacccaggctaggagtgcagt

SEQ ID NO: 611376 - DNA, 111 bp, Homo sapiens
ccagcggtctgacatcgcgacgctgctcaaaacctcgctccggaaaggggacacctgcaaaagcagacatgtgtcaatttaaattctacatctatgtatttggtaagcgga

SEQ ID NO: 611377 - DNA, 96 bp, Homo sapiens
cctgaaagcattaccgggttcgctaggctcacagtggctgagaagaccaaagagcaagtgacaaatgttggaggagcagtggtgacgggtgtgaca

SEQ ID NO: 611378 - DNA, 100 bp, Homo sapiens
tggcactgactgtgttgctaaagaggccacagaggcagccaagtgtaacctgctggcagaaaaggttggatggcaagcatgtggtgtttggcaaagtgaa

SEQ ID NO: 611379 - DNA, 100 bp, Homo sapiens
ctcctgctgtccctctctgagctgaagacatttcggtttaagtttttgaaactgaagtaggcctacacagtaggaactcatgtcatttcttgtaagtaaa

SEQ ID NO: 611380 - DNA, 101 bp, Homo sapiens
caaggcaatatactgttacgatccagttgaagattactggatgcacgtacagaatacattcagccgtcaggaattgaatgatctggcacgggaccctccag

SEQ ID NO: 611381 - DNA, 50 bp, Homo sapiens
ccgcattgcaggttgaacagaaagagattgaaagtgaagagtatgaggaa

SEQ ID NO: 611382 - DNA, 50 bp, Homo sapiens
cggagctcgtccagctgcgtgcctaggtcatctccgcggtgtcgaggctc

SEQ ID NO: 611383 - DNA, 75 bp, Homo sapiens
ccaagatggtgaagcagatcgagagcaaggcagaaaaggctggcatggttcatttgttggatttcctaggtatga

SEQ ID NO: 611384 - DNA, 82 bp, Homo sapiens
gaaattcccacctgtcaaagagggtcatcgagcagctcggtgggaagcagctggtcatgaaccacatgcatcatgaagacca

SEQ ID NO: 611385 - DNA, 100 bp, Homo sapiens
ctgggaggagactggagcccggttaggaagaatggagttggcgactcgctaccaggttttggcacaaataccagtgggaatagtatttttggaagtaaac

SEQ ID NO: 611386 - DNA, 89 bp, Homo sapiens
gaaaacttttaaatgcaaaacactcagagaaatcaccaccttctacagatcacttgaaaaactgactgttgatgggaatgaactgagtt

SEQ ID NO: 611387 - DNA, 75 bp, Homo sapiens
gcggagcggagacgggagtattatgaaaagatccagtcctgcgttaactgcggccgggaggctatgagcgagtgc

SEQ ID NO: 611388 - DNA, 75 bp, Homo sapiens
aagcaagctgttttgaaagtgtctaatattggctgatgtagagctatagcgccaaatcttaaaggcagaccacgc

SEQ ID NO: 611389 - DNA, 100 bp, Homo sapiens
tgtctaccttcttctgatccagacagctctcctcggccctgctgtttgatgctgtctatgctgtggtgactgcggtgcaggaactgaaccggagccaaga

SEQ ID NO: 611390 - DNA, 117 bp, Homo sapiens
cgtgcctgtcttcagatcttcacagcacagttcctgggaaggtggagccaccagcctctccttgcccagcgacttctccgtgtcccttaaagcgtcagggaagaacaaacacttcaa

SEQ ID NO: 611391 - DNA, 100 bp, Homo sapiens
ggaggccttcaccctctgctctgggtaaagatgtcaccgggtgcgcatcaatgtacctccacacagagggcttctctgggccctctccaggtgacggggc

SEQ ID NO: 611392 - DNA, 80 bp, Homo sapiens
cggtgctgcagacggcgagacctcctgcacaggttaattatagaaaatgccaagtaggaaatttgccgatggtgaagtgg

SEQ ID NO: 611393 - DNA, 75 bp, Homo sapiens
aagatatttgacctttccgacccgcggttttcttctccgcctccccatggccacccatggaccagtcggcattca

SEQ ID NO: 611394 - DNA, 75 bp, Homo sapiens
actgagcgccagagaggacgtttccaactcaaagtatctcagatgaagacatcatcaacattactcttcctactg

SEQ ID NO: 611395 - DNA, 82 bp, Homo sapiens
gccagcaatgccaagatctgttgtgataggatcacgagaccattcaaatctctccattccttcaagagctcctcttcctgct

SEQ ID NO: 611396 - DNA, 101 bp, Homo sapiens
gctaatggagcaatacgtttccattgtgatcccaccttctgggcaaagaatgtagtcaatttaggaatggtcgttggagatcagagtggaagttcaccatc

SEQ ID NO: 611397 - DNA, 87 bp, Homo sapiens
atatgaataacgacccatacatgtcaaatggatctctttctccacccatcccgagaacagtgacgcatccaaagaagacattgacac

SEQ ID NO: 611398 - DNA, 100 bp, Homo sapiens
catgaacctattaataaaccattcatgcttcccagtttggcagatgtgagcaaactatgtataggaattccaaagatcaatgtccgagttaccaccatgg

SEQ ID NO: 611399 - DNA, 100 bp, Homo sapiens
atgaacctgggcggatgtcagaccagagaagagcacagaatgtaccagagagacaccattcgcttttcacccaagatgatttgatgtcttataaaactct

SEQ ID NO: 611400 - DNA, 82 bp, Homo sapiens
gtcgctggagcgggcggagctgtgcgagagcctcctcacttgggccaagtcctgtatctgccatgtctgtggcgtccacctc

SEQ ID NO: 611401 - DNA, 75 bp, Homo sapiens
caggagttgcagaaagcatccacctgtgggaggagacgcaggtgcccgcgctgctggaggccggcttccggaggg

SEQ ID NO: 611402 - DNA, 100 bp, Homo sapiens
gtgaccgagagcgtgaccgagagcgcgaatatcgtcatcgttagaagaatacataaaccagtccgttcccaaaaggcccgctggctctgtgcagaatcct

SEQ ID NO: 611403 - DNA, 100 bp, Homo sapiens
gggagtcaccactggacctccaaggaagccacgtgcagacatctacaaccttcgatctcctgacgagcaaatgttctgaaaaagactctgcatgggaatg

SEQ ID NO: 611404 - DNA, 96 bp, Homo sapiens
agacaaaagaagagcagtcacagatcaccagccagacaatgcctgtggaagacaagtcagaccccccagaggggtctgaggaagccgcagagcccc

SEQ ID NO: 611405 - DNA, 88 bp, Homo sapiens
tatggccggcctgcggaacgaaagtgaacaggagccgctcttaggcgacacacctggaagcaggcttatgcaagcaaagatctggagg

SEQ ID NO: 611406 - DNA, 98 bp, Homo sapiens
gtccagaagtgtccaaaccacaagttctcaaaactctctgaaaaatggctccctccgagttaaggaatactcccccagttgcaagaggcgcaggaccg

SEQ ID NO: 611407 - DNA, 75 bp, Homo sapiens
aatttattagatggtgacactgcagttgcagccaacagggaagagtgtcgcacccaggagaaagttaatgcaaca

SEQ ID NO: 611408 - DNA, 108 bp, Homo sapiens
cccctcttctacagggacccgctcaagaccatctcagatccctacgcgtgcattccaacaaggcgtgcaggtattttgatgaaggacgtgggagctgcccatttggag

SEQ ID NO: 611409 - DNA, 89 bp, Homo sapiens
caaatggtcaatatgtaaagcagggcaaatttggtgctgcagttctggggaaccacacagccagagagcggggatctgatgagcttctt

SEQ ID NO: 611410 - DNA, 100 bp, Homo sapiens
gcgtcggctgcggttctctctcgaccccttctgcccggcgcttcggcccgggccgctcaggtgcaggtgtgaccatgaagctcatggatgaggtcgccgg

SEQ ID NO: 611411 - DNA, 90 bp, Homo sapiens
actcgcaacttctcttccattttccccaatggcgcatgtcttacaaaagtttggcagttctctaccagtggaccaatcttttcatccccg

SEQ ID NO: 611412 - DNA, 100 bp, Homo sapiens
catcctaagactcgaaggcagcacaggacctggaaaaattacatcctcttagcaaatatccggctgtgatcaatgatatttcattctggttgccctctga

SEQ ID NO: 611413 - DNA, 83 bp, Homo sapiens
atgaggctccctgctcagctcctggggctgctaatgctctgggtctctggtacaatgactcttcttgcttttcacctaagttg

SEQ ID NO: 611414 - DNA, 100 bp, Homo sapiens
tgatgtggatgatgccaaagttttattagttactggctgaccaacaaagttcctatcaaaagacccagcacaggtcttctcatgtatacacttgccacaa

SEQ ID NO: 611415 - DNA, 73 bp, Homo sapiens
aaaaaccttcgactatgcagagacatgagatggtagccaacccctcaggaattagatacacttcaacaacaat

SEQ ID NO: 611416 - DNA, 88 bp, Homo sapiens
aaaaaaacaaaagcagcccaatttttgcattccaggagaagatgcaagtggaccaggaggaaccacatgttgaagagcaacagcagca

SEQ ID NO: 611417 - DNA, 108 bp, Homo sapiens
atgacgtgttgccttggagaaggacagcagagaataagctggacaccaaatacccgtacgatccagctatgggacacagcaggacaagaacgattcagaaagagcatg

SEQ ID NO: 611418 - DNA, 90 bp, Homo sapiens
cgagatctagggctccttacccaagtacatatcctgtaagaccagaattgcaaggccaggaaacttacatgcttgctgtaactttggatg

SEQ ID NO: 611419 - DNA, 108 bp, Homo sapiens
ggggtgcacctcagcactatcccaagactgctggcaacaggcggcttacagggagaacacagttggcctccaccgtttctgccccacagaaaacgtagcaaagatcaa

SEQ ID NO: 611420 - DNA, 82 bp, Homo sapiens
gccggtgaaggaccgcgaggccttccagaggctcaacttcctgtaccaggtaccagcctccgaacctcgccatctctaccct

SEQ ID NO: 611421 - DNA, 82 bp, Homo sapiens
gaaacaagagtgcttatcccagctaagctccaggcttcaatatccgtacattccccacaaaaaagcactaaaaatcatgcct

SEQ ID NO: 611422 - DNA, 75 bp, Homo sapiens
gacttgcatcaggagtagcaaaatgatatggaacctagcaaagctgttccactgaatgcatctaagcaagatgga

SEQ ID NO: 611423 - DNA, 87 bp, Homo sapiens
tcggtcccgcgctgcgcatccccgcggacgccacagcgctcccgtggaccgggagcccgtggaccgggagccggtggtgtgccaccc

SEQ ID NO: 611424 - DNA, 100 bp, Homo sapiens
gaggaagaggatggagatgaagatgaggaagctgagtcagctacgggcaagcgggcagctgaagatgatgaggatgtgactaaagcagttgacataacta

SEQ ID NO: 611425 - DNA, 75 bp, Homo sapiens
ggggtttggtgggcggcccaccgggactcgccgttggaagaaggtagataatgactataatgcccttcgagaaag

SEQ ID NO: 611426 - DNA, 82 bp, Homo sapiens
tgggcgctccggtggcggcggagatcctgggaaaagtctattccgttctcagtgacagagaacagagagcagtgtacgatga

SEQ ID NO: 611427 - DNA, 82 bp, Homo sapiens
ccttgaaaaagctgccctgagacggtgtcccgccgaaaggtcaaaatgcagatcttcgtgaaaacccttaccggcaagacca

SEQ ID NO: 611428 - DNA, 75 bp, Homo sapiens
caagtccccagggaatgccacagcatcctccagcacctcaggagggagcaaaggagtttgctgctgctctcaccg

SEQ ID NO: 611429 - DNA, 100 bp, Homo sapiens
ctggccgctggggcccagactgtatagtgtggctggtaaagaggataatacagacactgaccaagagaagaaagaagaaaagggtgtttcggaaagagaa

SEQ ID NO: 611430 - DNA, 82 bp, Homo sapiens
ctccttggtcgccgcgtccttggctggcgtgcccactgctcagtggagcgtggaggacgaggaggaggccgtccacgagcaa

SEQ ID NO: 611431 - DNA, 100 bp, Homo sapiens
gtgcagccgcaccacattggcgtggccgtcaaggagctggacctctacctggcctacttcgtgcgtgagcgagtagccacgatggaggtgatgaacctga

SEQ ID NO: 611432 - DNA, 75 bp, Homo sapiens
ctgaactgcagtgggagaggagaagagatgctggcgtgaagggtatcctagaaggaaaacatcaccatggctaca

SEQ ID NO: 611433 - DNA, 51 bp, Homo sapiens
caggatattcctcatgacattgctgtctgacctgattcctcagacctctgc

SEQ ID NO: 611434 - DNA, 101 bp, Homo sapiens
caaacgttgaaacacccacagactgccaagtgggacaactttctggcttttgaaaggctccttcttcaggagtccaaaactacttacctggaagaccttcc

SEQ ID NO: 611435 - DNA, 75 bp, Homo sapiens
ggcttggacgaagatggggagaaggaagcgagactcatacgcaacctcaatggtgttggggatgtcctttgcact

SEQ ID NO: 611436 - DNA, 75 bp, Homo sapiens
atgttggaaatgcacaagctggagcccaactgataatccttgaacatgtggcctcggaggcctttgaagatgaca

SEQ ID NO: 611437 - DNA, 100 bp, Homo sapiens
acagagagaggctattcctttgtgaccacagtggaccgcatcgtgggcctggaccagatggccaagatgacggagagctcgctgcccagcgcctccaaga

SEQ ID NO: 611438 - DNA, 100 bp, Homo sapiens
gggtgaactctagcaattacaagactttgtgtggacagtaatgacctcacgtttccgattgcctgctggcagaacctacaatgtacgagcatcagagttg

SEQ ID NO: 611439 - DNA, 99 bp, Homo sapiens
cttggacaacatgtcccaacattacatcccagcattgatcaatatgacagagatagcatcataaatgactttaagaatgggacctgcaaacttcttgtg

SEQ ID NO: 611440 - DNA, 100 bp, Homo sapiens
tgctcctgctggtgaccagcgtcacgctgctggtggcccgggtcttccagaaggctgtagaccagagtatcgagaaggatgacagtgatgggattccgtg

SEQ ID NO: 611441 - DNA, 100 bp, Homo sapiens
tggcggatgccctgcagtacctgcagaaggtctctggagacatcttcagcagtgttctaagaacggaagcatctgggctggatggaatttagcatcaagc

SEQ ID NO: 611442 - DNA, 75 bp, Homo sapiens
agaacagagagtcctggggacagagctgaagaagcaggtggagagtgccgagctgaagaaccagcggctcaagga

SEQ ID NO: 611443 - DNA, 100 bp, Homo sapiens
cgtggaggtggccgtggaggcagaggtggcatgggtgggaagccgtgtccgccttttaagattgtgattctggatgaagcagattctatgacctcagctg

SEQ ID NO: 611444 - DNA, 50 bp, Homo sapiens
cgcaaccccagatccatttacactttacactagtgagacctgcaacgact

SEQ ID NO: 611445 - DNA, 80 bp, Homo sapiens
ccagcccgggtccccgcgttcacagccccagcgcagggaagatcagttttcctgccatccaggctgctccctccttcagc

SEQ ID NO: 611446 - DNA, 100 bp, Homo sapiens
aagtactgagcctgttggaggaactggcccggaaacaggaggacatgggggctccggaggtggcgcccaggctctgagctaccctaggtctgcagactag

SEQ ID NO: 611447 - DNA, 83 bp, Homo sapiens
ttcagcagctgctgcaggccgagaagcgggcagccgagaaggtgtccgaggcccgcaaaagctgaccccgcactacatctacc

SEQ ID NO: 611448 - DNA, 96 bp, Homo sapiens
taaagttcataccgtagtagcatcaaacaatgggtcagtgttctcggtttggcaaacatcgaaaagatgacaagattgagaaaacgggtaaaataa

SEQ ID NO: 611449 - DNA, 137 bp, Homo sapiens
tgatgagggcgtgtatgggatcttcaactcagtcctgtttgacaacatctgccctacccccatcctgcagaaggatggccgagcctcgatttaacaacccctacttctggccccctcctcccaccatgcccagccag

SEQ ID NO: 611450 - DNA, 100 bp, Homo sapiens
acaaatttatcattttccctggcaagtggattaaagtctggtatgatcgactgaccttgctggcattacttgatcgttcttcaccaaaggacatggatga

SEQ ID NO: 611451 - DNA, 83 bp, Homo sapiens
atcatttttgcttatctgccttatgggcttgcagaaggaatctcactctcaggaagtgcttcgggagatccaggatgcagtgg

SEQ ID NO: 611452 - DNA, 98 bp, Homo sapiens
aggtgactgtcccagaagtgaatcgcaggccaaacttccagatctgcaaccatttccttctccagatggtgatacagtgacccaacatgaggaactgg

SEQ ID NO: 611453 - DNA, 51 bp, Homo sapiens
taacactgtacaagctttcaaagtcaatctgcacatcattgactcctgggc

SEQ ID NO: 611454 - DNA, 50 bp, Homo sapiens
caggggccactcagagtcgcccgagaagaggcatacacggaatacctgag

SEQ ID NO: 611455 - DNA, 87 bp, Homo sapiens
acaatcacagtggtggtggtgggggtagcaggtgttggagcgggccggagagaagtagagtgggctgcgaggagaaggaaacaggcc

SEQ ID NO: 611456 - DNA, 75 bp, Homo sapiens
acgaaggactgcagcgaagtgaactagcgatggataagtacagacagaatgttgctgcgggatgtaaaagctctt

SEQ ID NO: 611457 - DNA, 95 bp, Homo sapiens
gcctcaccgttctgcccccagaactagatatggctcgtggacagcagaaaattcagtctcagcagaaaaatgccaaaaagcaagctggacaaaag

SEQ ID NO: 611458 - DNA, 100 bp, Homo sapiens
cttattgcctgttcagtactgtgggtgatatttgcctttagtgcactcttctccttcacagtaaagtggctggttcaccaatttttaaaatccaaatata

SEQ ID NO: 611459 - DNA, 100 bp, Homo sapiens
tataaaggaatatcggattcctctgccaatgaccgtggaggagtaccgcatcgcccagctgtacatgatacaggctctgtgtgctccgggatggagcagg

SEQ ID NO: 611460 - DNA, 75 bp, Homo sapiens
gtggagctccgccgccccgaaactttcaccgcgagcgggctggagcattggatttgctaaaggagcttaagaata

SEQ ID NO: 611461 - DNA, 73 bp, Homo sapiens
gaaagtcaggaccgcgacggcagcagagcagtctatcatttggcaagtgtacgcttacgtgatctatgtctaa

SEQ ID NO: 611462 - DNA, 82 bp, Homo sapiens
gccgtctcgctctgggtctccaggcccgcgaccgtccgccagtcgtcccgagcaagagtgagccatggagctacgtgtgggg

SEQ ID NO: 611463 - DNA, 75 bp, Homo sapiens
cccaaagacgctaaacgtgccctactctgccccgggggagagccgcttacaaacacgcagatggcaagaagattg

SEQ ID NO: 611464 - DNA, 96 bp, Homo sapiens
agagggaagagattcagccagcacactcctcgcgagcaagccttatgccagcctggaccatcttggaggcagtgtaggatcatggaagaactttga

SEQ ID NO: 611465 - DNA, 50 bp, Homo sapiens
acacattgctgagcttgaaatccagggttttttatcagcaattggacacc

SEQ ID NO: 611466 - DNA, 83 bp, Homo sapiens
cgctcatcacgaacatcatcgtctgatgaagaagaggagaggactttcaagtagaggtactagtggaatatcctttacgttgt

SEQ ID NO: 611467 - DNA, 96 bp, Homo sapiens
tttcatgcctgtagaaatgagaatgacagctgtgataaaaaaaaaattcatctgggcggtatctggaacttggtttcaagacaacagatgaattgt

SEQ ID NO: 611468 - DNA, 100 bp, Homo sapiens
ggcttggtccagtaccagatggcacagctgctccgggaccgtggcccggtggttctgggaagcgtacttccagtcaattaaagccattgccctggccacc

SEQ ID NO: 611469 - DNA, 90 bp, Homo sapiens
gaagtccagagctgagaaggactgcctgtttgcagtgttttagagcactttgctgcaagggaccaccacctgcacgaccagaatatgacc

SEQ ID NO: 611470 - DNA, 95 bp, Homo sapiens
ggaagaaaaagcttgtattctggttgatcatcttagggagccattgtatataaagattattcttggagaaaccctgtctgtttactgtaaccttt

SEQ ID NO: 611471 - DNA, 100 bp, Homo sapiens
ctccctttcatcagtcttcccgcgtccgccgattcctcctccttggtcgccgcgtccttggctggcgtgctgaaggggatgctaagggagataaagcaaa

SEQ ID NO: 611472 - DNA, 80 bp, Homo sapiens
tctaaagcccttcacagcaagacccaggaagccgcgggcaaactcagactcgaagaagccgggagcatcctgatctgccg

SEQ ID NO: 611473 - DNA, 113 bp, Homo sapiens
caaagcccatgtgttcgagtgtaatttagagagcagcgtggagagtatcatctcaccaaaggttccagcaacagatagaaatgctttaagttcactctggggaaagctggcct

SEQ ID NO: 611474 - DNA, 83 bp, Homo sapiens
gcgcggcggggctgaggcggccgcggggcccgagcgcagagacaagaggagcagcagcggcaccgcccctcaccctggagggt

SEQ ID NO: 611475 - DNA, 97 bp, Homo sapiens
ggatcccccggagaatggagagggagagaagtcttttttcctccagccaggagagcagctggaacaaggcatccaggatgtgtatgtgctgtcggag

SEQ ID NO: 611476 - DNA, 95 bp, Homo sapiens
gtgggtgagcggcgcagcggcggcagcggagagcgagagaggggagcaggtgtagaatgagccaaggagactcaaacccagcagctattccgcat

SEQ ID NO: 611477 - DNA, 75 bp, Homo sapiens
ctagtctctcgtatcccaattattataccctaatgactggtgctggagaatctggtaaaagcaccattgtgaagc

SEQ ID NO: 611478 - DNA, 96 bp, Homo sapiens
tgaacttctcagcctccagaacggatgtgggctaccagtacgggaaggcggtgtttggaggctggagccgtggcaacgtcattgagaaaatgctca

SEQ ID NO: 611479 - DNA, 98 bp, Homo sapiens
tggaattgagcaagggagtgatgccggttatctctgtgaatctcaggccttttcagatattaatggcaaagttcagaccattgttttgacatctggta

SEQ ID NO: 611480 - DNA, 73 bp, Homo sapiens
cagagccaaggaggaagggttgtccgggcttattgtgtaacagaacctggagcaggctctgatgtagctggta

SEQ ID NO: 611481 - DNA, 100 bp, Homo sapiens
ccctgggttctgtacgcactgaattcatgaacccccacctcatcagtggccctcatggagcacagcaactgctcgtcggagcccggcttctgggcacacc

SEQ ID NO: 611482 - DNA, 83 bp, Homo sapiens
gtcccaaggaacacctgggcaacagaatattggtcaagttgctgaccttgaaagattttgattcgctttccaaggacaatgtc

SEQ ID NO: 611483 - DNA, 98 bp, Homo sapiens
gagccgcaggagagacacgctgggccgaccccagagcggcgctggacaggatccagtgctgcctccttgtaccctgtgctcaactttctactctacgt

SEQ ID NO: 611484 - DNA, 141 bp, Homo sapiens
ctggagcctgagctgcctgcggcccgcgcctcccctccggccctcagctgctctctgctacaaggagggcattttggaagtgtcaaaggccagggacatccctgttgtcatcgacgcggtgagttgacttctctcctcctg

SEQ ID NO: 611485 - DNA, 75 bp, Homo sapiens
ttcaagccctggctcaaaatatgaaaatgcctcgtgtaaaagcagctcaagctggaagacagagctctgcaaaga

SEQ ID NO: 611486 - DNA, 75 bp, Homo sapiens
ctctgactgtgatgaaacattcaactactgggagccagaattagtatccgataccaatcaacatgtcaaatcggc

SEQ ID NO: 611487 - DNA, 75 bp, Homo sapiens
gcagcgggagctggacggcgagcgcgagcggcgcgagaaaatataattggtgattacaactttcctctataaatt

SEQ ID NO: 611488 - DNA, 50 bp, Homo sapiens
gctcgagtgcctgcaggatgtgagggaggcaacagcattattgagaaaag

SEQ ID NO: 611489 - DNA, 82 bp, Homo sapiens
ccacgcagaacgtcaacaccaagtgcatcaccatccccaggtacagacagtgtttgtgtgttcctgttgtggctaactttaa

SEQ ID NO: 611490 - DNA, 100 bp, Homo sapiens
tattctgttacatcaatcaaaagcctgcctagggtagttaaaagacgagtgaatgctctcaaaaacctgcaagttaaatgtgcacagatagaagccaaat

SEQ ID NO: 611491 - DNA, 100 bp, Homo sapiens
ttgctggtgtctacagagctgagtccattcacactggtttggaagttgcaatcaaaatggaaagatcgtcctacttggagtaccaaaaagtaatgagaga

SEQ ID NO: 611492 - DNA, 100 bp, Homo sapiens
ccgtcgccggtggcatgttggatcggatccttctggagtccgtgtgccagcaacagagctgggtccgggtgtacgatttctgagagagcagacaccatct

SEQ ID NO: 611493 - DNA, 75 bp, Homo sapiens
ctcaatttaagcctgatctaacccctagaaacagggagcagattttaagagtaaaagaagatgagaatgttccat

SEQ ID NO: 611494 - DNA, 89 bp, Homo sapiens
cggaccaattcgggaacaaatactactacatcccgcagtacaagaactggagaggtggacacctgcgcaggtgtgtgccctccggcccc

SEQ ID NO: 611495 - DNA, 98 bp, Homo sapiens
aactcggagtggcagactgacaactgtgagacatgcacttgctacgaaacagaaatttcatgttgcaccctgtgaagtaacatctggaactctgagga

SEQ ID NO: 611496 - DNA, 50 bp, Homo sapiens
ggaagcatcccagacaccgggaaggtgtcatcaatcttacagaagaagtg

SEQ ID NO: 611497 - DNA, 72 bp, Homo sapiens
gtattgtgctttccaaccctgaccgaccatgtcaccaggtacttctcccagcagctggtctcttacagttac

SEQ ID NO: 611498 - DNA, 101 bp, Homo sapiens
acaagatttacatccagaggcacgacaatgtgagggaagagaacaccaaaggcgaaggagaagaggaacaagaaaaagaaaaggaagctgatagaaagggc

SEQ ID NO: 611499 - DNA, 83 bp, Homo sapiens
acttcatcatcatctacttcacaggaattgccatttgatattcaccttgcgaaacgtttttatgacatggcagctgaagccag

SEQ ID NO: 611500 - DNA, 73 bp, Homo sapiens
cccaactaaagccccacatttgcagctcattgaaggaaagacaaagaaacagccttggtataatagcacgtta

SEQ ID NO: 611501 - DNA, 75 bp, Homo sapiens
aaacctcaacatccagctcaagtggaagagacccccagagaatgcccagagcctgaccacctgcgaggtctgcgg

SEQ ID NO: 611502 - DNA, 98 bp, Homo sapiens
cctcaggaagctggcagagagggtggacgaccccgaactccaggacagcatccaggcctcattggacagcattcgagtcaggatggctaaaggtgacc

SEQ ID NO: 611503 - DNA, 89 bp, Homo sapiens
gttcagaatcctccaaaaccagtcatgaccactagacccacagctgttaaagcaacaggtgtgaacttcaacccggagcactgcagccc

SEQ ID NO: 611504 - DNA, 100 bp, Homo sapiens
aaagccctccagcagttcccgtgccctccctcccactggctcttcgggcacatccaggaggtctcctctgagcctccggcctccataagacccaaaacag

SEQ ID NO: 611505 - DNA, 100 bp, Homo sapiens
gacagtttgattgctgctactcgtgcacaactggcaaagaatgcaaaaaccagcagcaatggccactgcagaacaaattagacttgcacagatgatttcg

SEQ ID NO: 611506 - DNA, 83 bp, Homo sapiens
ctgacaccttccgttctgagtggagtgacttgttgagtgacctccagaaagcaggccgactcgcgggccgctgcacccaccgc

SEQ ID NO: 611507 - DNA, 98 bp, Homo sapiens
ccgccgccgccgcccctgttgcgatggcgcagaaaccccgttgacaaggcactgctttttcatgacggtcatattgaacattccagatacctatcatt

SEQ ID NO: 611508 - DNA, 90 bp, Homo sapiens
caactgtagaagttctagaaagtatagataaggctatcacagagctccagaagaatggaatgaatatgagtttttcgtttttgaattatg

SEQ ID NO: 611509 - DNA, 100 bp, Homo sapiens
ccaagctgcctggagtcaaggaagatcaacctctccacttctcctacacctgcacagttaataagccgttcccaggcttccagttctaccagcggcagta

SEQ ID NO: 611510 - DNA, 97 bp, Homo sapiens
gccttgtgaagatcattaatgaagtaaagcccacagagatctacaaccttggagcccagagccacgtcaaagattaacacagattcctcagatccag

SEQ ID NO: 611511 - DNA, 95 bp, Homo sapiens
tagctggttcataagggcaaacccaggcgaaatcattactataagatacttggtgcttgaaaaactgaagaaggaagacgctgaccgaattcata

SEQ ID NO: 611512 - DNA, 82 bp, Homo sapiens
gccagcgcaccggtcccccagcggcagccgagcccgcccgcgcgccgataagaccatcatcatgtggaaactgaccagggat

SEQ ID NO: 611513 - DNA, 100 bp, Homo sapiens
gcggacgggaaggcgggagacgagaagcctgaaaagtcgcagcgagctggagccgccggaggcgcctgtgtctggcagagctggtgtgagacgagacaat

SEQ ID NO: 611514 - DNA, 82 bp, Homo sapiens
gcaggaggaggtggcggcggcgggaagatataaacttctgcactggaggggcctctcctcccctcgttctgcacatggagct

SEQ ID NO: 611515 - DNA, 75 bp, Homo sapiens
gttgcgccggggaacttgtgagcctgcggtgaaaggtgaactgcgccaggccactgtggccatgatgaacaggaa

SEQ ID NO: 611516 - DNA, 100 bp, Homo sapiens
cgtgatcgtgcccaaagaggagggcgtcatcagcgtctccgaggacagaaaatatttacaccagcagctccagttcataccaataaagaagatcctgcta

SEQ ID NO: 611517 - DNA, 95 bp, Homo sapiens
ttatctcctgaagaagattccactcgtggtatgagagtggataatataatcaactcctctgcctggtcggattgtttgtgctgaacgaactgtcc

SEQ ID NO: 611518 - DNA, 75 bp, Homo sapiens
ccccgcttcccttccgcgggagggagagttagattaagatgttctacgaggagcatttgcacttggacgatgaga

SEQ ID NO: 611519 - DNA, 97 bp, Homo sapiens
tcgcggctgctttacggcaacagagtgaaggatttggttcacagagaagcagacgagttcactagacaaggctacagagtgcggtggcgccagcaca

SEQ ID NO: 611520 - DNA, 101 bp, Homo sapiens
aacttcaggatgttcagctcacagagatcaaaccacttctaaatgataagctttggacatcagacagtgcaggagaagaatgtgatgcggcagaaggggct

SEQ ID NO: 611521 - DNA, 90 bp, Homo sapiens
ctggaagggaaggaaaaacctgtatgtggaaccacctgtcctcaaaggcttcccttccctactggttacaaaaggcagcgagaatatgaa

SEQ ID NO: 611522 - DNA, 107 bp, Homo sapiens
ctggaaaatgagctggatgagctggaccctgatagctctgaggaacatgaatacagtgatgaagctcctcaggaagatgagggctttatgggcatgtcccctctctt

SEQ ID NO: 611523 - DNA, 90 bp, Homo sapiens
aagcctgttcattttaacgttacctggagatattagaacattaaccaggtggtatttgttggaaatttcttgagaattaatacgatcgcc

SEQ ID NO: 611524 - DNA, 100 bp, Homo sapiens
ctcttcaagtacatcataatcggcgacacagtgtccgagctgcaggaggagggaatgaacgccatcaacctgcccctcagcccaattccctttgagctgg

SEQ ID NO: 611525 - DNA, 74 bp, Homo sapiens
ttctgcaagcaggcaacctgaatacagggatgaggagaatttctgtgccactgtgcccaaggatggacgttcct

SEQ ID NO: 611526 - DNA, 80 bp, Homo sapiens
cgacgcggacctgcggactagcgaacccggaggtttttagaacttcagccataaaaatgggcagaattttccttgatcat

SEQ ID NO: 611527 - DNA, 102 bp, Homo sapiens
ggagctgaaggtgctgaagaagtctgcctacctgtcagccgtgggcaccttcacctgggtctgcacgccctttctgttgaggagctcaagcttgggaaaatg

SEQ ID NO: 611528 - DNA, 98 bp, Homo sapiens
ttggtaaggcagcttctgtttttttacaaacaaaatgaagactcaaaacgtttgcacttggttaatgaatggttaagtgagaagaatgagaagacagg

SEQ ID NO: 611529 - DNA, 83 bp, Homo sapiens
ctctggctgtgctgcgcggcccccgcgcatgatgaggacggggacttggttgccttttccagtgacgaggaattgacaatggc

SEQ ID NO: 611530 - DNA, 101 bp, Homo sapiens
gggcgtccggggctggagtcgcgcagtaatatatttggtctgcggcctgtcgattatacagatgatgaaagtatgaaatcgctattgctgctaccagagaa

SEQ ID NO: 611531 - DNA, 76 bp, Homo sapiens
cgctgttccacctcattcaacttcaggagcacgtgaattgcctctgcttacgttcaggccctgtcctaaacccagc

SEQ ID NO: 611532 - DNA, 105 bp, Homo sapiens
tggtcctgtaattgcacgtaaataacgtttcctgcacgctctcctcttcagctggaaagcgctccctgaaaccacccctactcctaatcccccgactacagaaga

SEQ ID NO: 611533 - DNA, 75 bp, Homo sapiens
gcctcagcctccaaagtagctgagactacaggaggagatgaccgccgggttctgctatggcacatggaacaagcc

SEQ ID NO: 611534 - DNA, 78 bp, Homo sapiens
tcaagtccctgatggcctcagaggaggagaaatctcccaagcctaagaagaagaagcacaggaaggagaaggaggagc

SEQ ID NO: 611535 - DNA, 51 bp, Homo sapiens
ggccggcaaccagctgtaagcgagtgagaaagatcagtctaaagaaaagga

SEQ ID NO: 611536 - DNA, 89 bp, Homo sapiens
agacactcctgcaacccagttttccagccaccagtgggatgatggctgataatcggaagagatataaagaagaaaataatgatcatctc

SEQ ID NO: 611537 - DNA, 146 bp, Homo sapiens
gaataattcatgaagaaggggctggatccgtgggtcagagaacacaggaccagtttgccatcccaaggccgaagactctaaaggggaacctcttcacattattaactcttctaatgtgactgacgaaccccttctgaaaatgttac

SEQ ID NO: 611538 - DNA, 100 bp, Homo sapiens
ggcctcactcaaacagtaaacgaggccctcagtaccgcctggagaagcagagcgagcccaatgtcgccgttgacctggacagcactttggagagccagag

SEQ ID NO: 611539 - DNA, 83 bp, Homo sapiens
ccactggcggagtctctctttccggattctgcctccctccgctaacctccggtcaaaatgcagatcttcgtgaaaacccttac

SEQ ID NO: 611540 - DNA, 75 bp, Homo sapiens
tcacctgtgcgggatggaacaaaagagaggacatgtactcccaggattccatagatctccttgctaactcaggac

SEQ ID NO: 611541 - DNA, 101 bp, Homo sapiens
acactctttaatggaccagatcaggatttgagcggaagaacgaatgtaactttaaggtcatctcgatgcactcctgaggggcttggttctgggaaaactag

SEQ ID NO: 611542 - DNA, 98 bp, Homo sapiens
acaaacatgaggataacagaagaagttgggcaagcccggtttatacagaagcagatggaacattttcaagggcaaacgagccccattcacaaattttg

SEQ ID NO: 611543 - DNA, 97 bp, Homo sapiens
ctgtccagcatcaacgaggacatcgacccccgccggactgcagtgacaacgcccaagggggaggagagtgtgcaactggccagccaatttcccggag

SEQ ID NO: 611544 - DNA, 100 bp, Homo sapiens
ttactgaaagcaaatgtgaaaatcttcaaatcccagggtgcagccttagataaatacgccaagaagtcagttaagatggataatcaaatagtggtttctg

SEQ ID NO: 611545 - DNA, 74 bp, Homo sapiens
cgtggactacgagttggcgcccaagtccagaatccgcgcgcaccgcgctccctgtgctgtcaggaatctacagg

SEQ ID NO: 611546 - DNA, 74 bp, Homo sapiens
ggggcctggagtcaggtggcggtgcagaaggtcaacgccgcaggcacaggtctgagaaagaaccccagtttaag

SEQ ID NO: 611547 - DNA, 51 bp, Homo sapiens
cgctgaggggcttgcctgaagcgagggagcctggagacacaggccccatcc

SEQ ID NO: 611548 - DNA, 75 bp, Homo sapiens
cgccctcaccacccctatccagacggctgcccttcaagtaccattattagaggaagtaacacaaggggatatgag

SEQ ID NO: 611549 - DNA, 96 bp, Homo sapiens
gtatggagtggaaacgcttgtagggtttcaccagttcctctgtgacgagggtgcaggtatctctggggactacatcgatcgcgtggacgagccctt

SEQ ID NO: 611550 - DNA, 110 bp, Homo sapiens
tcttctcggcgacaactgccctgctcttcatcccaggaagatgaagtcctcagtacattctgaagaagatgattttgttccagagctacatagaaatgtacaccctcgag

SEQ ID NO: 611551 - DNA, 75 bp, Homo sapiens
cttgtattgatgcactggagggataggatgggcattgctcaaaaagaggtgaagctcgtgtgtggagtgccacgg

SEQ ID NO: 611552 - DNA, 75 bp, Homo sapiens
ccggcctgcagcacccgccaccgtcgccggccgcccgcacgtccgtccggtacagtagcagagggagctcccatt

SEQ ID NO: 611553 - DNA, 82 bp, Homo sapiens
cagcaagatcggcaggcgagattgcctgacccaggcctgctcggccctcacagggcttgggcactgtttaaaggaaagttcc

SEQ ID NO: 611554 - DNA, 132 bp, Homo sapiens
agaggtcaaagacaggcaggggagagcctcggacgtggtgcttggcttcgccgagttggaagcgtgtctaaacaacattcagttgttccaagtcaaatatttgagctggaggatggtaccagcagctacaaa

SEQ ID NO: 611555 - DNA, 100 bp, Homo sapiens
caaacttcaacagaatgtggcaaccaggtcagaatggcggcagtggagcatcgtcattcttcaggattgccctactggccctacctcacagctgaaactt

SEQ ID NO: 611556 - DNA, 112 bp, Homo sapiens
cacaggccggagagagccgtaggcaggaccccgggacaccctggaagccaggaaatggtgctggagaatctggtaaaagcaccattgtgaagcagatgaggatcctgcatgt

SEQ ID NO: 611557 - DNA, 51 bp, Homo sapiens
agtgccagcccggttcccggacaggaagccatcttcgacaagagcacaggg

SEQ ID NO: 611558 - DNA, 50 bp, Homo sapiens
ggaccctcgccagtgctctgcgcagctggcagccaggaggcaggagcagc

SEQ ID NO: 611559 - DNA, 100 bp, Homo sapiens
tcagcctcctgagtagctgcgattacagttggaagctgaaggtgttcctgaagtatctgaaaaatatgaaattagctctgttcccacttttctgtttttc

SEQ ID NO: 611560 - DNA, 75 bp, Homo sapiens
gaaaatcaaagggaacaatatgagcgatgtcttgatgaggagtatgctgctgctgttccgctttgcgtcctcgct

SEQ ID NO: 611561 - DNA, 74 bp, Homo sapiens
gcctctacagccggttcaccagcctggacaaaggagagaatgggactctcagatgcttgaagaattctcactgg

SEQ ID NO: 611562 - DNA, 100 bp, Homo sapiens
cccaccacgcctctgtgacctggccttcctctgccaggacaagtttgtcgtctgctctgagctatcaagccccttaggagacctaggacccagctgggtc

SEQ ID NO: 611563 - DNA, 83 bp, Homo sapiens
tgagctacatggccccctggtttagggaggggtgatacaattctggagactggagaagtaattccaccaatgaaagaatttcc

SEQ ID NO: 611564 - DNA, 100 bp, Homo sapiens
gcgactcatccacctccggctgaagctccaggagctgaaggtctctgtcccacctggtgctctggactgctgggtgtttctgagctgtctggaggtgttg

SEQ ID NO: 611565 - DNA, 100 bp, Homo sapiens
gtgctaggggatgatccgcaactgatgaaggagtcgttcacgcctactgaggagcatgtgttggtggtgcgcctgctgctgaagcacctgcacgcctttg

SEQ ID NO: 611566 - DNA, 100 bp, Homo sapiens
tcacaccaagccaggatccgcgcactcctggtgggtcagagtggagagagagtaaagtccatggttccctggcccgtgctggaaaagtgagaggtcagac

SEQ ID NO: 611567 - DNA, 78 bp, Homo sapiens
tcaagcaatgcattttgctgaaaagcacttggaaatttcaagagagatgaaccagaaactcgagatgcatggtgggca

SEQ ID NO: 611568 - DNA, 98 bp, Homo sapiens
gcgaccaagcgaggcggaccctgaagcggaccccgaggaagtgttctaagaacggaagcatctgggctggatggaatttagcatcaagcagagtcccc

SEQ ID NO: 611569 - DNA, 88 bp, Homo sapiens
ctcaggcctccaaagaccaagcgagcgttacatccttactattcaaagtgccatccacagacctgctgatgggcagcatgagcatcac

SEQ ID NO: 611570 - DNA, 82 bp, Homo sapiens
gcgggacagaaacctccgagaccatgacgtttgatgcaaatgatttgtatcaggggcagaattttaacaaggtcctcagttc

SEQ ID NO: 611571 - DNA, 101 bp, Homo sapiens
cgggccgagatgtctcgctccgtggccttagctgtgctcgcgctactctctctttctggcctggaggctatccagcgaggattctctatgggaggatgcat

SEQ ID NO: 611572 - DNA, 82 bp, Homo sapiens
gcttaccccggggtctatggaagtaatggaaggacccctcaacctgacagctttattaaaccgcctggagcgaattttcgaa

SEQ ID NO: 611573 - DNA, 84 bp, Homo sapiens
caggccatcgaccggagcttgctggaatgttcggccgaggagattgcggggtgcctggatcaaagtggaacagctgaagccata

SEQ ID NO: 611574 - DNA, 100 bp, Homo sapiens
gctggggtcccttttgcctcagatactattttgaaggaccgccgggagagcctgcccacctccccaccctggacgccgggcgcgtcccggccccccagca

SEQ ID NO: 611575 - DNA, 74 bp, Homo sapiens
ggctggggccgtcccagttcgcaatgagaaaggaccatggccaacctggagcgcaccttcatcgccatcaagcc

SEQ ID NO: 611576 - DNA, 99 bp, Homo sapiens
tgtgcaggacaccgacatggaacagggactcactggggcgagcttgacatgatttccacaagggtgatggacattaagcttcgggaggctgcagaaggc

SEQ ID NO: 611577 - DNA, 95 bp, Homo sapiens
cgaagtcagttccttgtggagccggagctgggcgcggattcgccgaggcaccgaggcactcagaggaggttatgaagacagtatggagtttccag

SEQ ID NO: 611578 - DNA, 74 bp, Homo sapiens
ccgggtggtgggcgcatatcctgggtagcctctaggaagcgctagacacatcctcctgacaaggtgatccgggc

SEQ ID NO: 611579 - DNA, 74 bp, Homo sapiens
caaagccattcgggttggagtaattggcctgctgcgggtcatctcaggggttcttcagctcggcaacatcgtct

SEQ ID NO: 611580 - DNA, 75 bp, Homo sapiens
caggattcgttggctgccgtccccgctgctgtgcattgggaccagactctggctgaactgcagaacaacatggtg

SEQ ID NO: 611581 - DNA, 100 bp, Homo sapiens
cagattcgcagtggtcgcttcttctccttgaagctgggtcttggtggatcatcagtataatatctacctctatagagagggtgtgcttcggactgcttca

SEQ ID NO: 611582 - DNA, 80 bp, Homo sapiens
agctatgactacgacctgcaggaacagcctgctataactgcggtagaggtggccacattgccaaggactgcaaggagccc

SEQ ID NO: 611583 - DNA, 75 bp, Homo sapiens
cggacggcgcctctcgaacgagtgtgggcgcgaggcaggggtcgggccccggctcagtggtcccaggcagctcgg

SEQ ID NO: 611584 - DNA, 75 bp, Homo sapiens
acgaggccgagctgctgcggcgccgcaactttaaagtcatgatctaccaggttgatgacaacaagaaactaggag

SEQ ID NO: 611585 - DNA, 75 bp, Homo sapiens
atttccactttgtaattccagcgagtcgacttcccatcctgagttgatacttggtgcttgaaaaactgaagaagg

SEQ ID NO: 611586 - DNA, 100 bp, Homo sapiens
ctctaaccttattgtgcttcacctcagaaaggtggaagaaggaaaactaggaatctatgatgctgatggtgatggagattttgatgtggatgatgccaaa

SEQ ID NO: 611587 - DNA, 82 bp, Homo sapiens
cagcaagaacagagagagaggtggacagatctgagagatactgagaaccaaaaacttttgctagaaaatcagcttttacgag

SEQ ID NO: 611588 - DNA, 100 bp, Homo sapiens
gcgcccgccagttgcttgatcaggtggaacagattcagaaggagcaggattaccaaaggggtcctatcggtggtgctaatagagatatttctattctcca

SEQ ID NO: 611589 - DNA, 98 bp, Homo sapiens
tcctggtaacgtttttatccatggatgacttgcttgggaaagcagatggtggagctgaatatgccacttaccagactaaatcaaccactccagcagag

SEQ ID NO: 611590 - DNA, 98 bp, Homo sapiens
ctgccgccgccgccgcgttggcctcgccgcccctgctcggtctggggagcagggaggagccctgtgccctgtcccaggatccatgggtaggaacacca

SEQ ID NO: 611591 - DNA, 75 bp, Homo sapiens
tttctagctatgaacaatttttagacgttgactttgaaaagctgcctaccaggcatccgtgtacaagatttgcag

SEQ ID NO: 611592 - DNA, 88 bp, Homo sapiens
tgcgccgggcactggaggagggctcggttatattcccagaggatgtcagtcccaaggaccagtagctgccatcagtttggattctgaa

SEQ ID NO: 611593 - DNA, 74 bp, Homo sapiens
ttttactgaaaattccttatggatctctgagaaggcgcagcgttgaaaggaccagaccagctttctccatgcag

SEQ ID NO: 611594 - DNA, 76 bp, Homo sapiens
ggaacacggtgtatgctgtgaagaggctgaaggagctgcacgagaagtttgaccgtctgaagaaactgcaccagga

SEQ ID NO: 611595 - DNA, 101 bp, Homo sapiens
agcttttctatgatcatgcaggagattttaacagggccgttgctccagggagaactgcaaatatcttcatccacccccacatttaaaaacgcagttggaga

SEQ ID NO: 611596 - DNA, 100 bp, Homo sapiens
aggaccctacagaagatgctgaagctgaggacacacccaggaaaagactcaggacggacaagcacagtcttcggaaggacttggatgttgtgggtgatgg

SEQ ID NO: 611597 - DNA, 100 bp, Homo sapiens
cgaacagcgggcggtgttcccggctccgtggggccgtcttcccggcgagtccgcgacggtcgccgcccacggcgagagccaggctttcgaggactgactc

SEQ ID NO: 611598 - DNA, 75 bp, Homo sapiens
gaccgtccgaggtaattgtctgccacgagtgcacattctgaaaacaggtcatcagaagattgagagaaagaggag

SEQ ID NO: 611599 - DNA, 100 bp, Homo sapiens
gtttgtaactacctggcattgccttttgttgagggatctgctggaggaaggaaaggccacggttccctgcctggcagaaaaacttaccagcgagctcatc

SEQ ID NO: 611600 - DNA, 100 bp, Homo sapiens
ccgtgaccgagagcgtgaccgagagcgcgaatatcgtcatcgttagaaggctactgtggagccgatatcaaggccctgtgcactgaagccgccctgattg

SEQ ID NO: 611601 - DNA, 51 bp, Homo sapiens
gcaggagggagaacgccgactccgtggcagaagccctacaggtggcaacta

SEQ ID NO: 611602 - DNA, 75 bp, Homo sapiens
cagcagcaaaggatgagcggaaccttggaaaaggcctgttgattgcatactgtagaagatttgatgttcagactg

SEQ ID NO: 611603 - DNA, 100 bp, Homo sapiens
gcctgaaaaaacgccagccaagaagcatgtgcgactgcaggagagacaggttctcactatgttgcccacgctggtctcaaattccttggctcaagtgatc

SEQ ID NO: 611604 - DNA, 100 bp, Homo sapiens
aaaggctgaggatgaacaggaagaggggcagcctgtgaggatggccacctttccaggcccagatatgtcttgtcgttcaagacttgcaacactaaacgag

SEQ ID NO: 611605 - DNA, 75 bp, Homo sapiens
agaaaacatcaaagaggtctagcaaaggctattcaagatctctggcagtggaggaagtctctttaagaaaatagt

SEQ ID NO: 611606 - DNA, 75 bp, Homo sapiens
gccatcgtggccacgcttctcatcctggacatctggaccttctggaccctgcacggtggcggatgctgatccagc

SEQ ID NO: 611607 - DNA, 75 bp, Homo sapiens
ctttgatgaatcaggtcccgaaagtgctaaaaagtgtgtatgtacagagaaccatcgctacatgaaattggagaa

SEQ ID NO: 611608 - DNA, 111 bp, Homo sapiens
gaccattcttccctgggctggtgaagtacatgaactcagggccggttgtggccatgagtacaggggctcaggtccaggtggcaggggatatgctacccaactcaactgagc

SEQ ID NO: 611609 - DNA, 75 bp, Homo sapiens
agacaactggaagagtatcaggggatcttgctggcaagaatggagatttacagacagtcatctgggtggaggaca

SEQ ID NO: 611610 - DNA, 97 bp, Homo sapiens
tgcgccgccggccatcgactttcccgccgagggcccggaccccgaatatgacgtgttcgtcacaaaaggattatgtgattcttgccactagaacgcc

SEQ ID NO: 611611 - DNA, 75 bp, Homo sapiens
agagaaactacagactgatcaggccgaggcttctaaaccaacttacagaatgtctgaaggggacagtgtgggaga

SEQ ID NO: 611612 - DNA, 83 bp, Homo sapiens
cgtggaccacatagacatttacgcggatgtcggcgaagagttcaaccagcaagagtgagccatggagctacgtgtggggaaca

SEQ ID NO: 611613 - DNA, 98 bp, Homo sapiens
gaaaagctgtggcaaccgaaatgagactccctcagatccagtgataattgacaggtcccaaaggcaagcagttagaaggaactgaatgtccactccat

SEQ ID NO: 611614 - DNA, 100 bp, Homo sapiens
cgcggggcatgttcccgaggctgtcaccaggtactctgtggatatccccttggacaaaactgtcgtcaataaggatgtcttcagagatcctgctcttaaa

SEQ ID NO: 611615 - DNA, 101 bp, Homo sapiens
gattttctttaaggatggtttagaaatggaaaaatgtgtgtcatttactttgaatgaggatcttgcaaatattcatgatattggtggaaaaccagcttcag

SEQ ID NO: 611616 - DNA, 75 bp, Homo sapiens
cagagcagcagcagcagagatgataacatgtttcagctcctacagaagaagggaaaaaagagctgctgttcctaa

SEQ ID NO: 611617 - DNA, 73 bp, Homo sapiens
cgacatcatagaggtggtaggagagagacatcatttcagctttccatccatttttatttatggacatactgct

SEQ ID NO: 611618 - DNA, 50 bp, Homo sapiens
cgggtgtggatttgtcttgacggaggagatgttaaagtaacccatcttgc

SEQ ID NO: 611619 - DNA, 100 bp, Homo sapiens
cagcactcagaatgctccaggcagtgtaatctcattccatcttcattcatgactccagacaggcctgatcacttgaacggacatatcaagcaggtgcaca

SEQ ID NO: 611620 - DNA, 98 bp, Homo sapiens
cgggggcgtctttcagagcattacgctgtgattgggttattatacccctgcattgacagacatctaggagaaccacataaatttaaaagagagtggtc

SEQ ID NO: 611621 - DNA, 96 bp, Homo sapiens
gaggaggcagctgcggtggcagctgctgagttctcggtgaagactgatgctgagaagcactcacaggtggagaggaattccctgtggtctggtgat

SEQ ID NO: 611622 - DNA, 96 bp, Homo sapiens
gtgtcccagccacttttcccctggtcttcaatgccagaatggtgtttgaaaagattttgcctgcctgagctcctctagtagtggccacaattgcca

SEQ ID NO: 611623 - DNA, 100 bp, Homo sapiens
atggcattagatttagaacaacttctaaatcatcgtgagctggacaaatttgccagcataagaattccagggagcaagaaagagagacctccacttccca

SEQ ID NO: 611624 - DNA, 114 bp, Homo sapiens
tgctggtggcggcggcgctttcggcgcgggcccgggccccgagcgcccgaacagacaatgcagatcttcgtgaagactctgactggtaagaccatcaccctcgaggttgagccc

SEQ ID NO: 611625 - DNA, 75 bp, Homo sapiens
cttcggagcgggagtgttcgttgtgccagcgactaaaaagaggttgaatcctgttccctgaaaaagacgtattcg

SEQ ID NO: 611626 - DNA, 82 bp, Homo sapiens
tcatcagtggctggctcttcttccgatacctggctatcggagagctctgcgtgcctcttgctgtgccctacctggacaaacc

SEQ ID NO: 611627 - DNA, 75 bp, Homo sapiens
ctccaactggacgctggtgatggagggcgagtggatgctgaaattgtggacatgttgagtgaaattaacattgct

SEQ ID NO: 611628 - DNA, 74 bp, Homo sapiens
gtcacggccccccagggagccacagacaggtttttagaacttcagccataaaaatgggcagaattttccttgat

SEQ ID NO: 611629 - DNA, 83 bp, Homo sapiens
ctaatgtacaggcagaaaacgagaggctcaccgcagtcgtgcaggatctgaaggaggtctcggcgcggaagatggccggcggc

SEQ ID NO: 611630 - DNA, 51 bp, Homo sapiens
gtggtgacattgtatcattggtggcctgcagttgccatcacccactgcaac

SEQ ID NO: 611631 - DNA, 100 bp, Homo sapiens
ccagctcgcccacgagtagcagccgcaactggacggaggacatggaaggagaaatgagccgtcagactgctacagcattacctaccggtacctcgaagtg

SEQ ID NO: 611632 - DNA, 100 bp, Homo sapiens
gtggaaaataaagaagagaaatgagaaccatgtttgtattggctgtctataaaataagagctgtgcctttggctgcaacaagtatgttgattactcaagg

SEQ ID NO: 611633 - DNA, 82 bp, Homo sapiens
ggggaaggcgcctgaagaggacgaaggttatcaatactctggctgaccatcatcatcgtgggactgactttggtggaagtcc

SEQ ID NO: 611634 - DNA, 74 bp, Homo sapiens
cgagtccgcgacggtcgccgcccacggcgagcaccgtaagacctacagtacggaggagtaccaccacaggctgc

SEQ ID NO: 611635 - DNA, 75 bp, Homo sapiens
gggtgcccttgtggccagtaggcaatcacctgaaggatctgacttccagaaggtcgatggccaggtggtcttcat

SEQ ID NO: 611636 - DNA, 74 bp, Homo sapiens
ttcctgtacagcctgcagaactgataatagccaaggttctggaggacaacaagctgcctggtgcaatttgttcc

SEQ ID NO: 611637 - DNA, 74 bp, Homo sapiens
agaaaggctaccatcaccgcactgagatcaacaagaaggctccacataaacacggtttccttgaaggccgccat

SEQ ID NO: 611638 - DNA, 100 bp, Homo sapiens
tctggagcaaggaaaaaaacctctgaccgtgaagagacatgagatgattgccaaacccccagctgtgagtaccagagtgcccactggttccaacagttct

SEQ ID NO: 611639 - DNA, 74 bp, Homo sapiens
gccatcgcagtgctgcacgaggagcgattcctcaagaacagagcaactttcagccagaggcatggatgcttctc

SEQ ID NO: 611640 - DNA, 99 bp, Homo sapiens
cagccatctttagttcgtctttcctagagagaataatccagaatggctactctgatctatgttgataaggaaaatggagaaccaggcacccgtgtggtt

SEQ ID NO: 611641 - DNA, 75 bp, Homo sapiens
gaaaaagcagaaagtagatgaagatgagattcagaagatgcagagtaaacatggaagtactaacttcattccaga

SEQ ID NO: 611642 - DNA, 100 bp, Homo sapiens
tttttattgcaagagcccgacttgaagtggaaaatcaagctaagcgcctactagagcagggtttggagactcaggtaaaagtcttgcagtgaaaaacccg

SEQ ID NO: 611643 - DNA, 99 bp, Homo sapiens
ggaagatggcgggacggctgccggcctgtgtggtggactgtggcacgggatctccagcaccctgccggtggcactactgagagacgaggtgccagggtg

SEQ ID NO: 611644 - DNA, 75 bp, Homo sapiens
tctttcctctgcattgctgatcttgtacttggattcagcaaggaaccttccggcttcagggatgacttcttaggg

SEQ ID NO: 611645 - DNA, 150 bp, Homo sapiens
aggcaccgggatcgtgaccgagaccgtgaccgagagcgtgaccgagagcgcgaatatcgtcatcgttagaagatgttccatttaagcagacctcttccatagctgtagctggagcggtaattggagctgttcttgcccttttcatcattg

SEQ ID NO: 611646 - DNA, 100 bp, Homo sapiens
ggagaagcatgggaaggaggccgagccgggatctcaggtcctcgggggcggcggccacgccaaggacggatgttcccttcggagaggcagctccttcaca

SEQ ID NO: 611647 - DNA, 100 bp, Homo sapiens
cgagagaggcaccgggatcgtgaccgagaccgtgaccgagagcgtgaccgagagcgcgaatatcgtcatcgttagaagcaaagtggaagatgctttctac

SEQ ID NO: 611648 - DNA, 83 bp, Homo sapiens
ctattctagtgataggattcacagcttgagctcaaataagacctgcctagagctggaacgttacctccagagcgagccctgct

SEQ ID NO: 611649 - DNA, 80 bp, Homo sapiens
tcaggatgctggtttataccaaggacaggtgagaatgagatggtgatcatgagacctggaaacaaatatgagtacaagtt

SEQ ID NO: 611650 - DNA, 83 bp, Homo sapiens
cgtgggagattggcttcggggcgtctaccgctttgccactgataggaatgacttccggaggtctccatcatcaccagttccag

SEQ ID NO: 611651 - DNA, 82 bp, Homo sapiens
gttttcttggatgaattgcttgctttggaggtactccaaagattcaggtttactcacgtcatccagcagagaatggaaagtc

SEQ ID NO: 611652 - DNA, 76 bp, Homo sapiens
caccacagcgttgctgggccaggagtgtcacactgagtccccgccagggcctcccgaggatcccactaaggggcat

SEQ ID NO: 611653 - DNA, 75 bp, Homo sapiens
attcttcagattggaaaataccacaggatggagactacgagtttgaacaagatcactcaaggtgaaggataatct

SEQ ID NO: 611654 - DNA, 90 bp, Homo sapiens
ggccccgataacgggccgcccccacagcaccccgggctggcgtgagcttcatcactggtccagctgtaataccagggtacttctccgttg

SEQ ID NO: 611655 - DNA, 112 bp, Homo sapiens
accgctcgatcttgggacccaccgctgccctcagctccgagtccagggcgaggtgagaagccctaccactgcaactgggacggctgcggctggaagtttgcgcgctcagacg

SEQ ID NO: 611656 - DNA, 78 bp, Homo sapiens
gtggaggttcgagcgctgttctcgctccggagccgctgcacatttcggatgaccagtgtcccagtgaaggaacgagtg

SEQ ID NO: 611657 - DNA, 101 bp, Homo sapiens
tgcagaactgtctgtgaaagcaggctttccaaagggggtcatcaacatcattccaggctcagactgaaactgttgaggagcccatggaggaagaagaagca

SEQ ID NO: 611658 - DNA, 96 bp, Homo sapiens
gccggcggttctcggagcacaaactctgcgcggacgacgaatgcagcatgggtaattccagaattgattggccataccattgtcactgtattactg

SEQ ID NO: 611659 - DNA, 82 bp, Homo sapiens
ccaccgcgccgggccccggacgccgcgcggaaaagggggatatgagactttctactcggaatatcctgagtgttgcgtggat

SEQ ID NO: 611660 - DNA, 95 bp, Homo sapiens
aacttctgtttacatggaactcagacatctgcaaatcatgtcctgaggctttctaccaatgcaggccagtggaaggaagcagctagcaaggtgac

SEQ ID NO: 611661 - DNA, 74 bp, Homo sapiens
aggaagccacgtgcagacatctacaaccttcgatctcctgacgaatctttgaacaggtactaagtgaactggag

SEQ ID NO: 611662 - DNA, 90 bp, Homo sapiens
gttgtgtttgtgaaacagagaaagataggcggccatggtccaaccttgaaggtgctggagaatctggtaaaagcaccattgtgaagcaga

SEQ ID NO: 611663 - DNA, 75 bp, Homo sapiens
ggtcagctgccttgaggtccctgcctgctaacctgacgtgagaaggcaaccaaagtgcaggacatcaaaaacaac

SEQ ID NO: 611664 - DNA, 75 bp, Homo sapiens
acggcagggagtgcatcaaaggtgtgaacacaggcatcggctcaggccaggctcctctagcccagtgtgtggccc

SEQ ID NO: 611665 - DNA, 98 bp, Homo sapiens
atggcctctgtctccgagctcgcctgcatctactcggccctcattctgcacgacgatgaggtgacagtcacgatctttgtagaatttgatggctgtaa

SEQ ID NO: 611666 - DNA, 100 bp, Homo sapiens
tggttgccggctcccctctcaggacaacccagatgtgcaacaaagtgcgatggaaatctggcattttttaaagtttgcgccccacaaagaggaaatattc

SEQ ID NO: 611667 - DNA, 100 bp, Homo sapiens
ccgccacacccatcagcgcggctacctgctgacacggaaccctcacctcaacaagatgtctcagagcatgtcttcagtatcttcaaggcattctgaaaag

SEQ ID NO: 611668 - DNA, 50 bp, Homo sapiens
catgaggagctgaaggccatcgtatggggatagctgggagtatggccacc

SEQ ID NO: 611669 - DNA, 75 bp, Homo sapiens
cccgccctcccgccgccgccctaagctcttgcagaccattttctacggggtcacctgcctggatgatgtgctgaa

SEQ ID NO: 611670 - DNA, 50 bp, Homo sapiens
ctccttatgctgatatacatccaatgaggagatggggtttcgccatgttg

SEQ ID NO: 611671 - DNA, 75 bp, Homo sapiens
tcaaaacagagcttttggaatctgaacaaggggttttcaaatggaacattttgatgcatcacttagtacctattt

SEQ ID NO: 611672 - DNA, 103 bp, Homo sapiens
accccgcggctgggcgttcatctaccacgctttcgtgtctatgaaaattatcctacttatgatttaactgaaagaaaagatttcataaaaacaactgtaaaag

SEQ ID NO: 611673 - DNA, 75 bp, Homo sapiens
tttggtctgagtaaggagtttgtggctgatgaaggttattttggagctgttggagcactccttgagctgttgaag

SEQ ID NO: 611674 - DNA, 100 bp, Homo sapiens
atccctgatgcccccgttgtcaccaacgtgactgtgaaggcacgagtgtggaacagcaccttcatcgagtctattatcctcccagtccacaacgctgaac

SEQ ID NO: 611675 - DNA, 100 bp, Homo sapiens
tatcatgcttccagtctactgtaaagattgctacgctttacatatggtccttcatttcctgcatttaaagttcccgatgaagatgccagtctgatccctc

SEQ ID NO: 611676 - DNA, 80 bp, Homo sapiens
aactaacaagagagatgggagcctggctgcagtgaaaattctggatccagtcagtatccgagctggatccagagttgcat

SEQ ID NO: 611677 - DNA, 100 bp, Homo sapiens
gccgcggggaccagcgcggacggcggcgacggaggagagcagctcctcactgtcaagcacgagctgcggactgcaatcatcctcttccagtggtagcgtg

SEQ ID NO: 611678 - DNA, 152 bp, Homo sapiens
cggagccaggggcccgagggcggggaccggcggcgctggaggagcgaggcagctgtactaggactgggaacgggtgtctgtgggaggttatgtttatttgagacttctccatcgggatcgcctggtgtcaccaagtgtccactggtactgag

SEQ ID NO: 611679 - DNA, 98 bp, Homo sapiens
tcctttccgtgcccactgacccttgagtgggcctttgagctgctgactttcagctggaacttgaaggccatggttgcttgttatccgggcaatggaac

SEQ ID NO: 611680 - DNA, 98 bp, Homo sapiens
agaaaacgagaggctcaccgcagtcgtgcaggatctgaaggagagtcagaggttccggttgagatcaagttgggagacacacccttgttcattctcct

SEQ ID NO: 611681 - DNA, 100 bp, Homo sapiens
ctgaagtactactactgggcagtgaatcctcaggatcgaagtggtatcaccccaaaaggattagcggccctccaggcactgaagcgtaagaagaggtatg

SEQ ID NO: 611682 - DNA, 100 bp, Homo sapiens
gtgatgtctcttcttctattagcacttactgggattggtcagatagcgagtttgaatggcaggtgttacagaacatcctggacactgaaaaagaatatgc

SEQ ID NO: 611683 - DNA, 75 bp, Homo sapiens
tgtacacatcttcagtatatggttcccttgcatctgttctagcacagttgcacataggcaaaggtgtgcagttgg

SEQ ID NO: 611684 - DNA, 98 bp, Homo sapiens
tcaaggatatgcacagaccacccaggtagacgggaaagtcagtgtgaatggagagacggttcatagagaggaggagaaggaaagagagtgtcccacgg

SEQ ID NO: 611685 - DNA, 82 bp, Homo sapiens
agctcaagggactgtgtccaccctcagtaagactttgaccccgacgcaggcttcagtgattgccgcggatcagaagcctgag

SEQ ID NO: 611686 - DNA, 75 bp, Homo sapiens
ggtccctgaagagggaagacacgcggaaacagccttgatgacttacaagccctcaaggggaagcattttctcctg

SEQ ID NO: 611687 - DNA, 90 bp, Homo sapiens
aaccatgtcttccatatagatgagtcaaccaggcataatgtactctacagaataagaaaactttagaaactgttcctttggagaggaaaa

SEQ ID NO: 611688 - DNA, 75 bp, Homo sapiens
atgagttaagaaacatatttctacaggcagatgatgttgagggcaaaattagacaaatcattccacctggatttt

SEQ ID NO: 611689 - DNA, 100 bp, Homo sapiens
taccggagctgtgtggtgtgtggacgctgactggcttggcaactcttgtgaaatttcatagatctcgtcgcttactgggagtctgctatattgttgttaa

SEQ ID NO: 611690 - DNA, 100 bp, Homo sapiens
tgctccatcccactactctcaagatacgccaatgcgctcaaaggcaaaaaggcttacctgttgattcggtggtaattacagaatctgatgcacagagaac

SEQ ID NO: 611691 - DNA, 83 bp, Homo sapiens
catcagcctcccgaatagctgcgattacaggtgtggtggacacaggcctattcatcaacatggctgagagagtctactttggg

SEQ ID NO: 611692 - DNA, 51 bp, Homo sapiens
cccgtgggtgatgcagacgcaagcgtgatggcccgctccctctccccaccc

SEQ ID NO: 611693 - DNA, 100 bp, Homo sapiens
ctgtcccaatgccatccagagctgtgcctcccagcaccacagtccttctgcagtccctcgtccagccacccccaggtatcactggacaggccatggctcc

SEQ ID NO: 611694 - DNA, 100 bp, Homo sapiens
ctgccctggaggccaaaatctgtcatcaaattgagtcattgaagtcaacaagagagacatagtcttcctggtggatggctcatctgcactgggactggcc

SEQ ID NO: 611695 - DNA, 50 bp, Homo sapiens
ccatatgctgctttctgtgggctgcttgcacccagaggcctccattcagg

SEQ ID NO: 611696 - DNA, 100 bp, Homo sapiens
gtagactttgctatggatgtatacaaaaacctttattctgatgatattcctcatgcattacagacatctttagttttttccagagatttcggtttgcttg

SEQ ID NO: 611697 - DNA, 75 bp, Homo sapiens
tgcaccgtataagcaacagctgcagttcaacttgcagaatgttgttcctccaaaagagtggaagccacgagcatc

SEQ ID NO: 611698 - DNA, 100 bp, Homo sapiens
acttcaaccccacatctgcttgacaagaattaactcaaatatctcttcttaacacctacctgattctggcatacaggtatgcagaagttggctagtcaat

SEQ ID NO: 611699 - DNA, 98 bp, Homo sapiens
cgccgtgcagctgcccatcgaccagattcctctctttggtgctgacactattggccagagaagtcctgatggaccggtactgagcaaagctgaatttg

SEQ ID NO: 611700 - DNA, 90 bp, Homo sapiens
gccggtcatgcccaacatggtcttcattggaggtatcaactgtaagaagaggaaagacttgtctcaggcagtgaaatcaactgtgcagac

SEQ ID NO: 611701 - DNA, 75 bp, Homo sapiens
atccagaagcgagtccccaatgcctacgacaagacagccttggctttggagaactttcacgatggccgtaaagca

SEQ ID NO: 611702 - DNA, 100 bp, Homo sapiens
cccgccagcaggagaagcacttcgaggtgctcatcagctaccaggaggtggctggtgagcgttacgtgtacaagtttgtgtgtgagcccgaggccctctt

SEQ ID NO: 611703 - DNA, 51 bp, Homo sapiens
tcactgggagtcgagacaaaaaggtggaggatgcgctatcttatcttgacc

SEQ ID NO: 611704 - DNA, 50 bp, Homo sapiens
caacagttgaatcaaagtatggacacagtttccgttactatggcaatgac

SEQ ID NO: 611705 - DNA, 50 bp, Homo sapiens
tattaatcaagcggtcaggataccggagatgctgttcagttaaatgtgat

SEQ ID NO: 611706 - DNA, 100 bp, Homo sapiens
gctgatgacccatggcgtgctagaggaatgggacgtgaagcgcttgcagacgcactgctacaaggtccatgaccggtctgggggtggtggcatctcccct

SEQ ID NO: 611707 - DNA, 88 bp, Homo sapiens
gagggttgaagattgtgaagcaatagcctaaggtttgaaagattagaagtcctggctgtatttgcctccacagtcttggcacagttgg

SEQ ID NO: 611708 - DNA, 91 bp, Homo sapiens
ctggagcctcagttggaagcagccgatccagcctgcggagcctgtggggcaggttgaaaggattgttgacaaaaggaaaaataaaaaaggg

SEQ ID NO: 611709 - DNA, 101 bp, Homo sapiens
gaaatttgatatgatcaaggatcaatttttaaaggttcaaaccttgtactactcagctgatcacaagctgcttgatgggaacctactagatggacaggctg

SEQ ID NO: 611710 - DNA, 101 bp, Homo sapiens
ggagtacaaaaacggcccttggatgatggagcctcctctcaagtcctcactgccatctcttccaaacactttctgatgactgccaacggtgaacaaacccg

SEQ ID NO: 611711 - DNA, 74 bp, Homo sapiens
gatcaacttgaacgaatatttctggacacagcattgttggttttgccatgtactattttacctatgacccgtgg

SEQ ID NO: 611712 - DNA, 100 bp, Homo sapiens
gaagggcgagggtcttcagctgatgaatctcatgctcagcattcctctgaatattgatttgctgaatagcccagacttattggaagcaacgattggtgat

SEQ ID NO: 611713 - DNA, 83 bp, Homo sapiens
caaaggaaaagaggactggagtggtttgtctgtgatggctggaagttcctctgtaccaggctttatcctgtggataaacgcag

SEQ ID NO: 611714 - DNA, 140 bp, Homo sapiens
cttatatcaaagcagatgatccttcctcctacatggaagttgttcaggctgccaatactagtgggtccacatatagcctcagttacattagctgcttatgaatgcaattcagttaattttcccgaaccaccctatcctga

SEQ ID NO: 611715 - DNA, 90 bp, Homo sapiens
gtggaaaatggctcttcagatgagtgaagcagccgacacgagtcgttgttcataaaacagcttttgaaagttgagagcacacccctggag

SEQ ID NO: 611716 - DNA, 75 bp, Homo sapiens
cgtgggggaccggctgttggcggagcaccaagctatggatcatcatggagtacctgggcggcggctcagcactgg

SEQ ID NO: 611717 - DNA, 100 bp, Homo sapiens
gccagacccgaggcgctagggaagatcgcaccgcggacgcccgctgagcttggcgcacgggccgaccagatgtgaagttcatttccaatccgccctccat

SEQ ID NO: 611718 - DNA, 82 bp, Homo sapiens
ccgtgctatgtggacgacgtgactcctcctattttgaggacttctccaacatctccatcttctcctcgtccgtggactccct

SEQ ID NO: 611719 - DNA, 76 bp, Homo sapiens
cagaggtgggggtgtttgtccagcgactccggggcctgatgaatgacatcgtagagatgaggtttctccatgttgg

SEQ ID NO: 611720 - DNA, 90 bp, Homo sapiens
cgaggggccttcgccaccacgcactgggtcgtcacggaggacgggaaaatccagcagcaggaagagttgggctgtggaaggacatcttca

SEQ ID NO: 611721 - DNA, 83 bp, Homo sapiens
cagaggaacctatacaaagaagtgatgctggaaaatctcaggaatctggtctcattgggtattaatctctggagaagacacat

SEQ ID NO: 611722 - DNA, 96 bp, Homo sapiens
cttgaaggacactgccccggtgctggagggcttgaaggagagaaggatattcctggactgactgatactacagtgcctcgccgcctgggccccaaa

SEQ ID NO: 611723 - DNA, 75 bp, Homo sapiens
agaggagctcaaaatggagttgccggagagacagcccaggtcacctcaaggagcctgagcacccgtccatgtggg

SEQ ID NO: 611724 - DNA, 50 bp, Homo sapiens
cctctcctaaccgttaagtgcgctaaggacttaaccaccaccatgtcgag

SEQ ID NO: 611725 - DNA, 75 bp, Homo sapiens
tcatcgcctcctgcgtcatcaacttaggcgcagagacccccatcgaggagttcacgcccacgccagccttcccgg

SEQ ID NO: 611726 - DNA, 83 bp, Homo sapiens
cacaccctggccttgagggtgggagagagccagctcctcctgcagagcccccagggagaggagtggaagaccttctggtgtgg

SEQ ID NO: 611727 - DNA, 100 bp, Homo sapiens
ctgttgcagcaaggagaagatccctgggaggtggagaaagacggttctggcgtctcctctctaggacaccgagtttccaggtgtggttgcaagacccatt

SEQ ID NO: 611728 - DNA, 90 bp, Homo sapiens
aaaaatttagtggaactggcagagttagaactgaagcatgcaaagaatgtactcaagactgatcttctaagttcactggaaatgatttta

SEQ ID NO: 611729 - DNA, 100 bp, Homo sapiens
cggcgatgtgccaccgaggctgaggatgatggtagattgccaggtggtctttgggaagaagcttcctgcctttgccaccatccccatccaccagctgcag

SEQ ID NO: 611730 - DNA, 101 bp, Homo sapiens
gacggcacggacgacagaagcgactttggtgagactctgggcttcctgaggctgcggtggtcacgcttcgcccgtgtcctcctcacccgctcctgcgccat

SEQ ID NO: 611731 - DNA, 90 bp, Homo sapiens
atttttgagtatttcaacactgctcctcttgcacatgacctgacatttagaggtcaaagaaggctcttccaagaaacatgtagaagagaa

SEQ ID NO: 611732 - DNA, 75 bp, Homo sapiens
ccagaagaggcgttcgctgcgcgtgcacattccggtgcgtatagcagcaaaattcatcattcatgcccctcctgg

SEQ ID NO: 611733 - DNA, 110 bp, Homo sapiens
gcttggagaagcccaaataccgctgtccagcctgccgcgtgccctagtggtggctaatgccgtagcggcattatctgaaatcagtgagtctcacccaaacagcaacttac

SEQ ID NO: 611734 - DNA, 75 bp, Homo sapiens
cgacatgttgcttttcgtggaggtaatacctagcaaatacagaaagagagataaagcaagcaagctgttttgaaa

SEQ ID NO: 611735 - DNA, 50 bp, Homo sapiens
ggaaaaagcagtaaagccagaggaagggagcatcgagtacagctgtccgg

SEQ ID NO: 611736 - DNA, 101 bp, Homo sapiens
tgcacttctatgagcttgtggaagacacaaaagatggcatctggctggttcaggtttctgagtcccttcaacatgatcctgggaggaatcgtggtggtgct

SEQ ID NO: 611737 - DNA, 50 bp, Homo sapiens
cggaaaactcccaacttcctgatcaatgcaatgtcccggaatggcttcca

SEQ ID NO: 611738 - DNA, 75 bp, Homo sapiens
aagagcagaggatggaacacttcagtgcattcaaggagcatattaatgaaaagtgccataaactgaaaaaccaaa

SEQ ID NO: 611739 - DNA, 75 bp, Homo sapiens
cggacctccagtggccggctccggaggcttggtgactccagtggcccaggtgctggagaatctggtaaaagcacc

SEQ ID NO: 611740 - DNA, 83 bp, Homo sapiens
ggcagaaggaggagggcagaatcatcacgaagggttgtgagtcccggcccagcccctccacccccctgcccccccgatgcgac

SEQ ID NO: 611741 - DNA, 100 bp, Homo sapiens
aaccagggtaatcttggggagtcttgccaggtcaaaatgtgggtacagctcctgattcccaggatagaagatggaaacaactttggggtgtccattcagg

SEQ ID NO: 611742 - DNA, 83 bp, Homo sapiens
gtggggctcatcgtgatcccggcgacatactacctctggccccgagatcagaatgccggagaacatattgtgatgttcgtgcc

SEQ ID NO: 611743 - DNA, 82 bp, Homo sapiens
cctggagcgcgggccctggggccgcaacccgcgccgggcgagatcatggaagggaagtggttgctgtgtatgttactggtgc

SEQ ID NO: 611744 - DNA, 74 bp, Homo sapiens
gtcctgttgccatggaaacaccctcctggctgttcgattgagaaagatcagtctaaagaaaaggagaagaaagt

SEQ ID NO: 611745 - DNA, 82 bp, Homo sapiens
ccaaaacgaggatttgtgttgtgagacctgcctagagctggaacgttacctccagagcgagccctgctatgtttcagcctca

SEQ ID NO: 611746 - DNA, 100 bp, Homo sapiens
aatatatgcctgatgttgctaaatgtagacaatggttagagaagaattttccaaatgaatttgcaaaacttactgtagatctacggaatccagaggcagc

SEQ ID NO: 611747 - DNA, 96 bp, Homo sapiens
caatcccccactctttccgccctaatggaggtctccagtttcggtatatgaatgacctaaaggtacaaataaagacggagagagaacagtgccaac

SEQ ID NO: 611748 - DNA, 90 bp, Homo sapiens
caggaggttgctaacccagaacactatattaaacatcccctacagaacagacttaattcagtgcacaaatgagatgaatgtgaacatccc

SEQ ID NO: 611749 - DNA, 100 bp, Homo sapiens
cacagtcaccgtgaccaccatcagtgacctggacctctcgggggcccggctgctcgggctgaccccacctgaggactttgctataaaacacgtgacccta

SEQ ID NO: 611750 - DNA, 82 bp, Homo sapiens
gacgaaggggccgacctcctagggtcggcactcttcaccctcccgagccctgcccgtctcggccccatgcccccaccagtca

SEQ ID NO: 611751 - DNA, 140 bp, Homo sapiens
ctttgctcttgaagaagattttgatattttatcagtttacgatggacagcctcaacaagggaatttaaaagtgagtaaattcctcatctatgcctgtctgctgctgttctctgtgctgctggcccttcgtttggatggca

SEQ ID NO: 611752 - DNA, 82 bp, Homo sapiens
gtcgtagcggtcgaggcttttgcggctccggcgtgccggaaaacaatgcagatcttcgtgaagactctgactggtaagacca

SEQ ID NO: 611753 - DNA, 75 bp, Homo sapiens
tcaacgccaggcgccgctcctttacagggttactggacctggaggacgatggggacttgatcaccgtggagtttg

SEQ ID NO: 611754 - DNA, 75 bp, Homo sapiens
gccaagaagggccttactccttcacagatcgcttcccatcgacggtcagtgcgcacgttgtaatcagctgaggcc

SEQ ID NO: 611755 - DNA, 98 bp, Homo sapiens
tcctttctcagggctgagatgccgtcgaggatgtaccgaatttgtttgtcaattcgttctgaagaggtgtgcgatgactgtgtggtgttgcgtagtaa

SEQ ID NO: 611756 - DNA, 100 bp, Homo sapiens
ggcgccgcccgggtgtccccgcggcgcaggaggcggtggagcgcagagcgggcgagcgcgctgtgttctcatttcacccaagacctttggctagatcaga

SEQ ID NO: 611757 - DNA, 75 bp, Homo sapiens
aacatcgcggtcatcaagtactccttttccccacgactctgaaagaggacagcgttcccaatgtcccagtttaag

SEQ ID NO: 611758 - DNA, 90 bp, Homo sapiens
ctgctccccaattacagcccacctcttgcatcgtcacctacagttactaaaagatgtaactgaactgcagatccttggtgaaatatcttt

SEQ ID NO: 611759 - DNA, 90 bp, Homo sapiens
catcactggctctccggtctccatcgccctggcccagtacctcatcactgcctgggggtccactggacggggcctgagctacaacttcac

SEQ ID NO: 611760 - DNA, 75 bp, Homo sapiens
cagagaaagtcctcgctcgtcaccagcaagcttgcgggggagaccaaattttgaggaaggtggaccaacatcagt

SEQ ID NO: 611761 - DNA, 75 bp, Homo sapiens
aaaagaccgtttgtgttttgtgatggaatatgttaatgggggcgagggaaacatgcacaattcttggattacaac

SEQ ID NO: 611762 - DNA, 113 bp, Homo sapiens
aaacgatccagacggcagggagtgcatcaaaggtgtgaacacaggattgatttccagagacttatgttacttgaggaagacaccaagaaggcaaagaaaaggagccagggatg

SEQ ID NO: 611763 - DNA, 76 bp, Homo sapiens
ggcccagcctctcgaatgggcacacctgtgtagagttgatctctctaatgtattagatcttcatgcctttgatagt

SEQ ID NO: 611764 - DNA, 100 bp, Homo sapiens
aaagtggctgacatggccaccaacacacgtgtcgtgagatggagaataaagaaactctcaaagggttgcacaagatggatgatcgtccagaggaacgaat

SEQ ID NO: 611765 - DNA, 75 bp, Homo sapiens
cactgtaaaaaacccagctgaagaccactttagaaactcaattaagatgatgacctggaagaaggtgaagtgaag

SEQ ID NO: 611766 - DNA, 100 bp, Homo sapiens
caacaagtgtctttggttataaattatgatctacctaccaatcgtgaaaactatattcacagggctgtacaaaaggtagacataatagtgagaagccacc

SEQ ID NO: 611767 - DNA, 82 bp, Homo sapiens
cgcatggagaagttgaaccagctgtgggagaaggcccagcgatgcccatgacgcttccggagacaaccctggaaacactgaa

SEQ ID NO: 611768 - DNA, 100 bp, Homo sapiens
tggtgacagcaaaaatgacccaccaatggaagcagctggcttcactgctcaggttacttcctcagaatgttggcctcctgtatgttggaggttatgaaag

SEQ ID NO: 611769 - DNA, 74 bp, Homo sapiens
aaaatacgaaggtttctggctgggtattattctcactaaggttggttactatactattccatctatggatgacc

SEQ ID NO: 611770 - DNA, 75 bp, Homo sapiens
agtgtccatagaagctttggggctcttcctctaatcaggagaaagctggaactgtggctgcaccatctgtcttca

SEQ ID NO: 611771 - DNA, 82 bp, Homo sapiens
gcccgtgccgcgagcgcggcctgcaggaggtgaccagaagtcagcagcttcccagaagccccgaagccggggcatcctccac

SEQ ID NO: 611772 - DNA, 74 bp, Homo sapiens
gagcctgagggaggggaaaggcgcaggatctcatcctggccttgggtgtcctggcccaaagccggccggtgtcc

SEQ ID NO: 611773 - DNA, 100 bp, Homo sapiens
cttggaacagggctgcacacctttctgctttatctgcggaatggccaaagactatgacgggtcttcctagcacatcagggacaactgccagtgtggtcat

SEQ ID NO: 611774 - DNA, 83 bp, Homo sapiens
ctattggatatggagcctttggtgttgtctgatttccatcgttgcatttacaactgctacaaaaatgccagcactccatcgac

SEQ ID NO: 611775 - DNA, 100 bp, Homo sapiens
ccatactgacggcttacatgtgcgctctggtggaagtaggatgtttggtggcagcaggagcaaaatcaactctggagagaaatatgagttggagggaagg

SEQ ID NO: 611776 - DNA, 100 bp, Homo sapiens
ccatgtccagcgctcggacccccctacccacgctgaacgagagggacacggagcagcatcacctgaaaaagctggaaggccgccgcctggattacgatta

SEQ ID NO: 611777 - DNA, 86 bp, Homo sapiens
tcgccattgacctggcctataacttgcacagtgcccaccagaagtatgtccgacaagcctggcagaaggcagacatcaatacaaaa

SEQ ID NO: 611778 - DNA, 89 bp, Homo sapiens
agaaattgagagagtcagagacttctgtgacaacaggtatgatctcgtgaaatcttgagagaaactgaatgacgaatgaaactattgtt

SEQ ID NO: 611779 - DNA, 75 bp, Homo sapiens
aaggtcctagaactcaggaagagtgatgtggttttggataagggttattttggagctgttggagcactccttgag

SEQ ID NO: 611780 - DNA, 80 bp, Homo sapiens
gaaatgagcaaacctctcggattgggtgtcaagggtttgccttcccggattgggcctacaagccagagtcgtcccctggc

SEQ ID NO: 611781 - DNA, 75 bp, Homo sapiens
tggaaattaagcagtggtcacaaacttgggggcaattgaaggaacagactaaaaatcgtgtcctggaaggaaact

SEQ ID NO: 611782 - DNA, 100 bp, Homo sapiens
ctccattgcacaatggccagccctgggtaaaatccagtacaaggaatatatcattgaaggatttgaaaacatgccagctgcatttatgggaatgctgaaa

SEQ ID NO: 611783 - DNA, 82 bp, Homo sapiens
tgagttccgtgtgcagttccaggacatgtgtgcaaccattggcgtggatccgctggcctggaagcagagactttcaaggaac

SEQ ID NO: 611784 - DNA, 75 bp, Homo sapiens
ccgtccttctccactttcgccagcccgtgccgcgagcgcggcctgcaggagggacgactggagtgagcactggcc

SEQ ID NO: 611785 - DNA, 100 bp, Homo sapiens
ttttgtttgactccagtgttaagagaagaaatgaggacatatcagtatcgatttcctcctctgatgctcctcttcagcctttggtatcctctccttctct

SEQ ID NO: 611786 - DNA, 100 bp, Homo sapiens
agtggaccacgtggagaaggcacgagatgaaacgaaaaaagctgtgaaataccagagtcaggcccggaaggatacaagaccctcctgaaaggaatttccg

SEQ ID NO: 611787 - DNA, 97 bp, Homo sapiens
cctcccgaatagctgggattacagagatgtgtgcacagacccaggccatgcagatactggtgcctctaacttcgtcagcccagaacacctcacctct

SEQ ID NO: 611788 - DNA, 89 bp, Homo sapiens
cgggccgggcgggccgcgggagccgcacgcggcgatatggaagaggagggcaagaagggcaagaaggagaaccactgtcgccgcatcaa

SEQ ID NO: 611789 - DNA, 75 bp, Homo sapiens
gaccttggcaacagaccccacagatggaagcattttgaatggcattgtgcccatcgtggagcctgagatcctccc

SEQ ID NO: 611790 - DNA, 51 bp, Homo sapiens
gtgaccagtaatggcactttacactcgaattcaaagaagctttttcactat

SEQ ID NO: 611791 - DNA, 101 bp, Homo sapiens
cctgcttgggacgggaacggacgcgcgctgctgccgggttcacacgacgcgctgctgccgcgattacccgggtctcctctgagcctccggcctccataaga

SEQ ID NO: 611792 - DNA, 95 bp, Homo sapiens
cctaccttcagattcttgaccaaaatgtggcaccccaacatttatgaggattgagtcatcgggctccaatgcgtggggatgtttaccgccgttta

SEQ ID NO: 611793 - DNA, 90 bp, Homo sapiens
gtaattttgacccagaggagcaatgatgtagccacctcctaaccttcccttcttgaacccccagagttgtggaaagtaaaaatgtagccc

SEQ ID NO: 611794 - DNA, 100 bp, Homo sapiens
cgcgacggacgcaagatggcgacggcgaccatagctctcgtttggaaggcgctttgagtccccgctgctgtggcagagcgccatcatgatcctgaccatg

SEQ ID NO: 611795 - DNA, 82 bp, Homo sapiens
aatggtctcaatctctggaaaaacttcttgccaaccaaactcgagagtcaggatgtctcagatttaacaacagttgaaaggg

SEQ ID NO: 611796 - DNA, 75 bp, Homo sapiens
ctgggaatgggcgcccagactcagggacgcactctctgagatattttcgcctgggcgtttcggatcccatccatg

SEQ ID NO: 611797 - DNA, 100 bp, Homo sapiens
tttcacatctctcctgaatggatcacagcgtcgcagatgtctttgagcagccatcagcagggaccctttctacgaaatgctcgcagcacggaaaaagaag

SEQ ID NO: 611798 - DNA, 137 bp, Homo sapiens
tttcttttcgctcctctttctgggcatgttcctctctggcatggtggctcaaattgatgctaactggaacttcctggctgctgatactttggctgtgaggcaaaaaaggagaatttatgatatcaccaatgtcttag

SEQ ID NO: 611799 - DNA, 83 bp, Homo sapiens
tgccaagggagcttctgtcccgaggaccaggggatgcgaaggaacaatcccgaagagatgacttggagtctctgggctacgtg

SEQ ID NO: 611800 - DNA, 98 bp, Homo sapiens
gaatttcttaatgcatccaaagccttctggcaaaaatgacgtggccgcacttctgaaacccatatcggaaaagattcaggaaatccaaactttcagag

SEQ ID NO: 611801 - DNA, 96 bp, Homo sapiens
tgggattcgcgctgctgggcacccacggagcctccggggctgatgcggaggtggtggagaagccggccaaggaggaaacggtggtggagaacgcca

SEQ ID NO: 611802 - DNA, 73 bp, Homo sapiens
ggtgccaaagtcttcctcatctacgaggtgctgtctggatgcggagtctacgatgggaccgagatccacgagg

SEQ ID NO: 611803 - DNA, 74 bp, Homo sapiens
ccccgggagaatatcctggtttcacttggagctgtggcttcgtgctctgtctgatgatggagtatctgatcttg

SEQ ID NO: 611804 - DNA, 74 bp, Homo sapiens
caccgcactcgaccaggaccacagcggcaaggtctccaagtcccagctcaagtaatctatgccagcaattatga

SEQ ID NO: 611805 - DNA, 100 bp, Homo sapiens
gccttcctcgggtcagactaccggcggcgacgaccacaggagggaactctaatgatccaggacaaagaagttaccctggagtatgtatcaagcctggatt

SEQ ID NO: 611806 - DNA, 83 bp, Homo sapiens
gggaccacggtcaccgtctcctcagccactcatctctgcccagctgctgccctccccaggaggcctccatggcttcacctacc

SEQ ID NO: 611807 - DNA, 100 bp, Homo sapiens
gtaacccgacacgaagcagatagcagtcctaggggtgcagcctgccttggcctcccaaagtgccgagattgcagcctctgcccggccgccaccccgtctg

SEQ ID NO: 611808 - DNA, 100 bp, Homo sapiens
gttcttgaaaaccacctgctatttagtcattgacaagtttggatcagacatcataaaactgcagtaccaagaagcaagagagacctatcttgatctggat

SEQ ID NO: 611809 - DNA, 78 bp, Homo sapiens
cgtgctgaacaagagcaacgaggaaggaggacacagcagagcttggggttcatctggtgaactccctcgtggaccacg

SEQ ID NO: 611810 - DNA, 90 bp, Homo sapiens
gccaggtgagcgcgctccctggcaccgttggcccccggagggtcgggcccagttgcggcgagcggcttcgagagctgtgcccaggagtga

SEQ ID NO: 611811 - DNA, 102 bp, Homo sapiens
tttatctcatctggcttggcgcctgaggttctcccattaggacacattcagctaacgtattttagcaggtggagtgaggttgaagattcctgtgacagcgat

SEQ ID NO: 611812 - DNA, 98 bp, Homo sapiens
aagttgggtgactcccacgacctgcagcgcttccttagcgatttccgtgaaaattctcgactggctgctgaggtttacaaagacatgccggaaaccag

SEQ ID NO: 611813 - DNA, 101 bp, Homo sapiens
gtgtgccatgactacgacatccacttctaccccaccttccgggtcgcaatggaagaagagatcgccgcgctggtcattgacaatggctccggcatgtgcaa

SEQ ID NO: 611814 - DNA, 76 bp, Homo sapiens
gagagaccctgatgcccacagcccccagcatgtaatgaatttactacacatgtgatgaaccttctccgagaacaga

SEQ ID NO: 611815 - DNA, 100 bp, Homo sapiens
gctgcggctgctgctctccggcctcgtcctcggcgccgccctgcgtggagccgccgccggccacccggactccgccgtggtcatggaggagggaagtccg

SEQ ID NO: 611816 - DNA, 90 bp, Homo sapiens
ggaatcaaggggtgtggaattaccttcactctgggaaaaggcactgaagttggtgccacacctccctggatgatccaagatgaagaatac

SEQ ID NO: 611817 - DNA, 75 bp, Homo sapiens
tgaagagaggttttgaattcacgcttatggtagtggagtaaagccaatcccagctgaaggaatcaagtcaaatcc

SEQ ID NO: 611818 - DNA, 96 bp, Homo sapiens
ggaggccgtgggcacgctctttactccatgtgtgggacattcattgcggaataacatcggaggagaagttgcctttccccatcttcctggttctgc

SEQ ID NO: 611819 - DNA, 83 bp, Homo sapiens
aggattccaacaacaattccgatggcaaagccgttgccaaggtgtgtgtggtttcagcgcagcatggctgtggtcatccgttt

SEQ ID NO: 611820 - DNA, 100 bp, Homo sapiens
gacaaaggtggcagctttggagcaagtggagagccagaaaaggatccagaactggagtggaaggttactataacaacagtaccaaggtggctgtgaaaac

SEQ ID NO: 611821 - DNA, 75 bp, Homo sapiens
aagagagattggcctggagtaaaagctgatgatcggaatgattacagccaggcccagacatgtccgtccttgtaa

SEQ ID NO: 611822 - DNA, 98 bp, Homo sapiens
ctgaggttgcagttggcgtgaaggtacaaacacaagtgcgccttgcaaaaaaaaactttgacaaattgaagatggatgtttgtcaaaaagtggatctt

SEQ ID NO: 611823 - DNA, 90 bp, Homo sapiens
catattcccgctgtcatgcagcacattataccttttaggacctatgttattagtgggacaattgatgactgtgagttggtggaagggctg

SEQ ID NO: 611824 - DNA, 83 bp, Homo sapiens
tcaaagaagttcccctgggacttttccagcttgattgcctccggagccagcgtggtggccatagacaacaagatcgaacaggc

SEQ ID NO: 611825 - DNA, 81 bp, Homo sapiens
tggaacccgaagaagaaaggattcgttacagccagagattggtctacaggtccaactgctgccactggcagtaatcgaaga

SEQ ID NO: 611826 - DNA, 97 bp, Homo sapiens
ggcagtgaatgcgttgggaacaatatggaaaactgggagctgccttggaatctacagggccgggccctgggcagtgacggggttcgggtgaccatgg

SEQ ID NO: 611827 - DNA, 85 bp, Homo sapiens
ctccagcaccctcatcgccctggccgacaagcacgcaagttttaaaatcaaagatgggaaaatcggagaaaattgcccttcccca

SEQ ID NO: 611828 - DNA, 100 bp, Homo sapiens
ctccttcgtgtcgtacgtacgccctgagttctggagaccagaaggccaaaatcaaaagtatgggcaggcttgatttctttagaagactccagcggagaac

SEQ ID NO: 611829 - DNA, 98 bp, Homo sapiens
ccgaagtgacccccacaacgatgcgtctcctggatgggttgatgataattagaagcatgctttccactgaacttcccgacaacatttgttatgcagaa

SEQ ID NO: 611830 - DNA, 82 bp, Homo sapiens
cctagggggaagaaagccatgctgcccagccggagccttcacgtaaatgggtccagtcatgcctcccagtaagaagccagaa

SEQ ID NO: 611831 - DNA, 100 bp, Homo sapiens
atgaaaacaggtttgaagagggaatttgatgaagtttttacaaagaaaatgattgagtctatgggtactgaagatgcactgttaaaaaaccaaagacggg

SEQ ID NO: 611832 - DNA, 75 bp, Homo sapiens
ggctgatcctgcaccacaaggtgtacgatttgaccaaatttctggaagaggatcaaaatacttgctggatggtgg

SEQ ID NO: 611833 - DNA, 83 bp, Homo sapiens
cacaacatagccgactacatgacagccaagaacaacgtcgtcatcaactataagagcactgcagtttcctcctgaaggctggc

SEQ ID NO: 611834 - DNA, 75 bp, Homo sapiens
gcctcaggccagtcgcctccaggccaagagggatccttcacccgtgtctgacgttggtgatcaaagtgtccggtg

SEQ ID NO: 611835 - DNA, 83 bp, Homo sapiens
gccatcccaccagagcacggcaagcgcctggagcggctggccatcgaacaccttccaccatgaccacctcagcaagttcccac

SEQ ID NO: 611836 - DNA, 100 bp, Homo sapiens
gggaagattttgaaccctttgtagaagatgacattccttttgagaagcatgtagcttccctctgtgtgaggaaaggatagaaatgttcaggacatcatca

SEQ ID NO: 611837 - DNA, 100 bp, Homo sapiens
ggctgcgccaacctggtagagagcatgtgcgcactgagttgcctgcagagcatgcccagtgtcagatgtctccagggacaagaatccttcaagaaacagg

SEQ ID NO: 611838 - DNA, 60 bp, Homo sapiens
atccccgaccgccctcttctgtcttgaatgcagagagcagtttgcagcagaagaatgaag

SEQ ID NO: 611839 - DNA, 88 bp, Homo sapiens
tggcattgacatttaattttagggtcctttatatagaagggagagtagccgtggtccttcagcatatctctgtgctgcagacaacaca

SEQ ID NO: 611840 - DNA, 100 bp, Homo sapiens
tcttggctcaaggactcatactacactttcttggtagagatgaccttgaatgatgccatgaggaacaaggcaaggctgtcaattacaggaagtactggag

SEQ ID NO: 611841 - DNA, 74 bp, Homo sapiens
gcgcggcagcggagggacggcagtctcgcgcggtggacgccctgcttcatctggcccgccagaatcgggctgtg

SEQ ID NO: 611842 - DNA, 73 bp, Homo sapiens
ttctgcagtccctcgtccagccacccccagattcttaatgcttttcggactcctgatggcatgcctgtaaaga

SEQ ID NO: 611843 - DNA, 100 bp, Homo sapiens
gaccagaaccttagtcccgggaaagatggtgaccctgataactatattgcttattatcggagggctactgtctttttagctatgggcaaatcaaaagctg

SEQ ID NO: 611844 - DNA, 100 bp, Homo sapiens
ctccggccctggccccgatggctctgtgcaacggagactccaaggccaagtcctgtatctgccatgtctgtggcgtccacctcaacaggctgcattcctg

SEQ ID NO: 611845 - DNA, 98 bp, Homo sapiens
tagtcgggaaaaactatggatttgtatggaatactgtggtggcggatcacttcaagatatttaccatgagttaatgttctcctcagaggtggaagaat

SEQ ID NO: 611846 - DNA, 100 bp, Homo sapiens
tcaagatataatcttcacttccgggggcactgaggcagcctggcatcctcgctacaacctcattgttgtgggccgatacccagatcctaatttcaaaagt

SEQ ID NO: 611847 - DNA, 75 bp, Homo sapiens
cgcttcagcctgctgcccacggagcagccccggctacgggtgcctggttgaccggccagaatttagcttcacttg

SEQ ID NO: 611848 - DNA, 98 bp, Homo sapiens
ttcagaaggcttgaagagaggaacactcatccagttctccgggagatgttgcataaccactccttcgtgggctgtgtgaatcctcagtgggccttggc

SEQ ID NO: 611849 - DNA, 75 bp, Homo sapiens
aggaaccttgatccccgtgctccggacaccccgggcctcgccatgagtatggtgtttgcgaaaacttgcggaagc

SEQ ID NO: 611850 - DNA, 76 bp, Homo sapiens
ccgaaaggactgaggaacggtgcctggaaaagcagaaatgatggaagaattgcatagcctggacccacgacggcag

SEQ ID NO: 611851 - DNA, 90 bp, Homo sapiens
gaaaatgagcaacctggaatcatgggagaaaaccagacctccacttccaaggatatagagcagagactaatagacaagtcacgagttacc

SEQ ID NO: 611852 - DNA, 100 bp, Homo sapiens
ttccagagttccctgcaacccgtgcttatgcagatagttactattatgaagatggaggaacacatgattctgtgcagatttgcagaccagacagctgtcc

SEQ ID NO: 611853 - DNA, 75 bp, Homo sapiens
gcggggcccgccatggctgcgtcggagctctacacaaaggctcttgtcaggatggtgaagctgttcatcggaaac

SEQ ID NO: 611854 - DNA, 48 bp, Homo sapiens
aagcagactgacaacgtttctaggtgatgagacaaaccatgcttctgc

SEQ ID NO: 611855 - DNA, 98 bp, Homo sapiens
ccagattagaaaacgcatcgtacttgaaaagttgagtaaagtatggaggagatgtataagaaagctcatgctgctatacgagagaatccagtctatga

SEQ ID NO: 611856 - DNA, 75 bp, Homo sapiens
tctgcatgaacatctccagccaggggtactggaagatgaaagagactatacaagggaccgggtcctgggggcctg

SEQ ID NO: 611857 - DNA, 100 bp, Homo sapiens
cgtaactatcgcctgacagggtatctgaagtaaaaggggataacgaaggaggcccaacttcattcaataaggagcctgacggatttatcccagacggtag

SEQ ID NO: 611858 - DNA, 90 bp, Homo sapiens
aaacaggagctggagcagctcaaagagactattgcccagaagaaaagatgtttggttttcacaagccaaagatgtaccgaagtatagagg

SEQ ID NO: 611859 - DNA, 75 bp, Homo sapiens
acggcggcctgcctccgggcacacccggctccccggacgcctcgcgtcgagggcgaggcccccagcagtgagact

SEQ ID NO: 611860 - DNA, 86 bp, Homo sapiens
atggcgtggagatatggcgcaactgcggcgcgtacaccaggggttggaaaaaccacactaggcaaagaacttgcgtcaaaatcagg

SEQ ID NO: 611861 - DNA, 100 bp, Homo sapiens
cagaatcggagccccaaccgcgctgccggttcaaatggtgaaagacgatgacccctcctggaagcccacttttatcgtgaaacctgatggtggttgtcag

SEQ ID NO: 611862 - DNA, 74 bp, Homo sapiens
tccacaccttcatccggcacaagcggaccatggtcaagctcctggagattcaggccgattaccatcgcaggtca

SEQ ID NO: 611863 - DNA, 100 bp, Homo sapiens
agcaactgaagattcatacgcagctggcagatattatcatagttgctgcaggaataagacgagttggaagaagacctgatcaacaacttcagggtgaagg

SEQ ID NO: 611864 - DNA, 88 bp, Homo sapiens
cgaagacgcggagaaaaaagttctcggtctgcggatcaatggagagctaatcactgcctacccacaagtggtggtagtcagagtacca

SEQ ID NO: 611865 - DNA, 83 bp, Homo sapiens
ccagcctgcggagcctgtggggcagtgagaagcgccaccttcaagtgaacgtcaccaacccagtacagtgcagcctgcacggg

SEQ ID NO: 611866 - DNA, 83 bp, Homo sapiens
ccgcagctgcgggtccgggattcccagccatggcagattcctccgggcagcagggtttttagaacttcagccataaaaatggg

SEQ ID NO: 611867 - DNA, 75 bp, Homo sapiens
tgccaccaagtatggcaacatgacagaggaccatgtgatgcacctgctccaggatagagacctaggagatgaata

SEQ ID NO: 611868 - DNA, 74 bp, Homo sapiens
agaatccccccgaaaggaccccccagggagttgaccacatttggccatttcccagaagggccccaccccaaggg

SEQ ID NO: 611869 - DNA, 75 bp, Homo sapiens
ccaaccatcgttgggaaatcatctctaaatcccatcctctttcgaggtgttgggagacagcaatatgttgggaag

SEQ ID NO: 611870 - DNA, 82 bp, Homo sapiens
tgctcgttgtcgccgcggtcctgctgttggggcagaggaaggagctctcggggccagagggaaagcagagccggccctgcat

SEQ ID NO: 611871 - DNA, 100 bp, Homo sapiens
gatcaggagatggctcgagacctcgtagggcgggttcccgcagtggcagtggctccccatcgccggacacctactccctctattgctacccatgcacctg

SEQ ID NO: 611872 - DNA, 50 bp, Homo sapiens
ggactttgggcgtcccattgccatggtctgcaattaaggccttacgtcct

SEQ ID NO: 611873 - DNA, 98 bp, Homo sapiens
gatgaaccatgtgatactgttgatttgcttggaacggtagaagaaatccttccaagcctctcagaaaatatcagtgtttgggggatgaaagattctgt

SEQ ID NO: 611874 - DNA, 83 bp, Homo sapiens
acgagctgtttctcatctttatactcttccagcatccgcagtgtcatgcagaagtacctggaggaccggggcgaggtgacctt

SEQ ID NO: 611875 - DNA, 100 bp, Homo sapiens
atcgccgtgttatccttgagtaaagggctgtgcttcctggaagtggtattatccatttcattatgcaccatttgcttcagactttgaaggcattgcagac

SEQ ID NO: 611876 - DNA, 75 bp, Homo sapiens
ggagtaattggagccaagaaatgagtataggttatgatgtgattgctcaagcccaatctgggactgggaaaacgg

SEQ ID NO: 611877 - DNA, 82 bp, Homo sapiens
caggatccacccgatgaatgtgggaagactgaggtgacttaagagattaaaattaatttggttgctgttggttctgaacaaa

SEQ ID NO: 611878 - DNA, 100 bp, Homo sapiens
ggagcttctcagaagacagagggttttcttttgagcgctatcacacacctccaagatcaagatcctgttctgagtcagatgatgatgacagcagtgaaac

SEQ ID NO: 611879 - DNA, 82 bp, Homo sapiens
tgtgaatgtgtttgctctcatgaacatgcaatgagaagactgatcaatctggaattgaatgatctggcacgggaccctccag

SEQ ID NO: 611880 - DNA, 100 bp, Homo sapiens
ggagcgccggccgcaccaccgccctctggccgttgcctcaccgggcaacggggtggtcatccacttgccaggcttgtttgaggaagcagagaagaatgaa

SEQ ID NO: 611881 - DNA, 75 bp, Homo sapiens
gagctttagccgagagtacacagctgctgtagaagccaaacaagtggcacctgaactcctggggggaccgtcagt

SEQ ID NO: 611882 - DNA, 100 bp, Homo sapiens
agccatcagcagtgccatccagcttctagaagacccattacagagggtattgcactatgtggagaaacccagcacatttatcagtgacatcatcaactgc

SEQ ID NO: 611883 - DNA, 82 bp, Homo sapiens
cacgagcacatcatcaagtacaagggctgctgcgaggaccaagtggaaggagaacatgaatctctcagaggcccaagtacag

SEQ ID NO: 611884 - DNA, 100 bp, Homo sapiens
tacactcaagctgtgggtcccttaccccagccttgagatcccaggaaggcctgcagcctgaaacgggccttgaaagagacggggtttcgccatgttggcc

SEQ ID NO: 611885 - DNA, 50 bp, Homo sapiens
aagaaatctattcactgtcaagatattgcggtggtggagatgagcgatgc

SEQ ID NO: 611886 - DNA, 75 bp, Homo sapiens
ttgcacaagctgtggaagagatggattggctgctatcacagagctccagaagaatggaatgaatatgagtttttc

SEQ ID NO: 611887 - DNA, 100 bp, Homo sapiens
atgttcaaatccatcaaatcttctagaactttacacacaggcacagactgccaaggctgggggcaacatatctgtatcaaaagaggaagcttggaaaccg

SEQ ID NO: 611888 - DNA, 98 bp, Homo sapiens
taccgcaagagctggagtaccgccacctccccgctgggtggggagaggcccttcaggcaagaagttatgaaatggaatggatggggatataatgattc

SEQ ID NO: 611889 - DNA, 95 bp, Homo sapiens
cccgagcacggccgcccggccacgggcatccgtttccgaggctttagtatccctgaatgccagaaactgctacccaaggctaagggtggggaaga

SEQ ID NO: 611890 - DNA, 89 bp, Homo sapiens
catccgagcgaaagagaaagagaatttctacaagtgtgaaagaattagaaaacttcaggaacttgttacagaatattcattaaagaaaa

SEQ ID NO: 611891 - DNA, 101 bp, Homo sapiens
gggactaggcgttagcatggtggagtatgtgttgagctcatccccgggcgattcctgtctaagaaaaggaggatttaaaatcgcgctgcaactcaaagcca

SEQ ID NO: 611892 - DNA, 50 bp, Homo sapiens
tcgcggagcgactggagagccagagggcctcctcccaaggagaacatgag

SEQ ID NO: 611893 - DNA, 98 bp, Homo sapiens
actacaacatcaaccagagcagattccagcctccacatgtacatatgaacttagtgatttggcccgtgaccctccagcacaatgttctgcaggtccag

SEQ ID NO: 611894 - DNA, 77 bp, Homo sapiens
ccgccgagctggacccggaccggttttgggtgatctgtgaaaatggttcgctattcacttgacccggagaaccccac

SEQ ID NO: 611895 - DNA, 100 bp, Homo sapiens
gtctggtcagattggatgctcggctacccggacacctggaatcctcctcccacatccctggatctgccctcgcattgtccagtggagccccaaaatagaa

SEQ ID NO: 611896 - DNA, 100 bp, Homo sapiens
accggggctcgcaactcggcagcctccacccaccggcccaccctacatttagcgcatcatgtgatccggcttgttctcagaacacaaacaaaacctgtga

SEQ ID NO: 611897 - DNA, 100 bp, Homo sapiens
ttgacagagaatttggtggcattaaaagagatccgattggaacatgaagaaggtgcaccctgcacagctataagagaagatccagaatatagaaagtttt

SEQ ID NO: 611898 - DNA, 100 bp, Homo sapiens
tattccactggattgggaaagaccatggcagtatatcaagctgtcttccattaaagtggacacgcggtacaccaccacccagcaggttgtgaagctcatt

SEQ ID NO: 611899 - DNA, 74 bp, Homo sapiens
gaccacggtcaccgtctcctcaggtggactgggtggttatggatcaggagacagtgaagatgagaggagtgaca

SEQ ID NO: 611900 - DNA, 90 bp, Homo sapiens
aggagcgtcaacagcagcaccatgggagtctcgctctcagtcaaaatctccaacgggaactcctgctcgtgtaaaatcggagagcaggtc

SEQ ID NO: 611901 - DNA, 74 bp, Homo sapiens
gagtccgggccctcgtgtcaccgctctgaagtcaaggaggaggatcccttttcccccagaaattactcaatgct

SEQ ID NO: 611902 - DNA, 100 bp, Homo sapiens
ctgaggacttcatccggtcaccatctacctattcttcaaatggtagctacagcaagctgggtagcaggcagatccaaaggatatcatgaagtttccaggg

SEQ ID NO: 611903 - DNA, 100 bp, Homo sapiens
ctggggcagaagagatccgatagctatgttctgctggagcattctgtgaagaaggcagtacattttgggttaccggacctgatcccaaccttgaagaaag

SEQ ID NO: 611904 - DNA, 99 bp, Homo sapiens
cctcggaaagtgctcctgcggctgtatggagcgattttgcagatgttttctggatatgccgcagaaggatccgtgccagaagcaagcctgtgagataca

SEQ ID NO: 611905 - DNA, 100 bp, Homo sapiens
cctctcaacctccaaggtagctgagactacagatgcatggagtcatctcccacatttctctagccctgacctggttaataaatatgctatagtggaacgt

SEQ ID NO: 611906 - DNA, 100 bp, Homo sapiens
cacctgaaatgtaaacgtgaccctcatgttaagatagaagggaaggacactgatgactggctgtgcgtggattttggttttacagacatttcaccagagg

SEQ ID NO: 611907 - DNA, 75 bp, Homo sapiens
catggacgggccgcgcctgctgctgttgctgcttctgggggctcttgtcaggatggtgaagctgttcatcggaaa

SEQ ID NO: 611908 - DNA, 90 bp, Homo sapiens
ctcgagaatgtgtccgtggcgctcgagttcctggaccgtgagagcatcaagctcgtgtccatcggctgtaccagtgcaggtcctcacttt

SEQ ID NO: 611909 - DNA, 75 bp, Homo sapiens
tcatcctgctcctgggtgccgtggcatgtcgatttgtccttcactacagggacaagaatccttcaagaaacagga

SEQ ID NO: 611910 - DNA, 96 bp, Homo sapiens
ccatgagccggaggccattgagctgtgcacgaccacaccgctgatgaagacaaggactcacagtggctgcaagcactcctgtaggaggcctgctga

SEQ ID NO: 611911 - DNA, 90 bp, Homo sapiens
acaagacatggaaggaaatgagggcaacttctgaagacttcaacaaggactcagcccaggagagtgttattactcgagatattcatcgta

SEQ ID NO: 611912 - DNA, 117 bp, Homo sapiens
agctggcagacgagcaggacaaggagacggtcagagtccaaggtccgggtatcttaccagcccctcatatggaaaatttgaaatgcagaggggaaacagtagcaaaggagatcagtg

SEQ ID NO: 611913 - DNA, 100 bp, Homo sapiens
cccaatccccggcagctctctcaggtgtgttccagagaacaagccttcagacatttgctatattgacgctgagctgtcaggggactcaggcttatgagga

SEQ ID NO: 611914 - DNA, 76 bp, Homo sapiens
aagcagtctaaacctgtgaccacccctgaagaaattgcacaggatagcagcatcaaggagcattgtgtacatgcag

SEQ ID NO: 611915 - DNA, 75 bp, Homo sapiens
taaggacaaaagccaagaggaggacagttcgctacacagcaatgcatcgagaggcgccctcgcccccgccgcccg

SEQ ID NO: 611916 - DNA, 100 bp, Homo sapiens
ctcaagttaaattatactactgaagaatgtgacatgaaaaaaatgcattatgtggaccctgaccatgtaaagagcagagaggagccttcaggggaagtag

SEQ ID NO: 611917 - DNA, 82 bp, Homo sapiens
ggaagttcccgccccggagagcggcgaggcggcagccacaggttattcagcttctcaaggctggaaaagcgaaggaagtttc

SEQ ID NO: 611918 - DNA, 92 bp, Homo sapiens
ggagatgggcagacggattcatttagagctgcggaacaggacgccctctgatatgccttcaattaagttgcagagttctgatggagagatat

SEQ ID NO: 611919 - DNA, 76 bp, Homo sapiens
aaaggaaacacatttcatatactgcaggacattctgagcatgtgagacctgaggactgcaaacagctataagaggc

SEQ ID NO: 611920 - DNA, 88 bp, Homo sapiens
agctcaccctcccgagttgaaaaagagtctactcttcatcttgtgttgagacttcgtggtggtgctaagaaaaggaagaagaagtctt

SEQ ID NO: 611921 - DNA, 75 bp, Homo sapiens
cctcatgttgttaaagtaccagcttcacaggttgatactgcctctccaagcccaatggaaacatctggatgtgcc

SEQ ID NO: 611922 - DNA, 100 bp, Homo sapiens
actccagcgagatccgggccgtgaacgaaagcagtgacggaggagcttgtaccaccgctgggatctagcaattgggaggcagcagacttgggtaatgaag

SEQ ID NO: 611923 - DNA, 50 bp, Homo sapiens
gtccgaagaacagatcccaaatgtcttggattcatgcagaacctggcaga

SEQ ID NO: 611924 - DNA, 75 bp, Homo sapiens
caccaccccgacggagacttgtgacgtgctcctcgtcttcctttgcctgggggtcttccttctatggaagaactg

SEQ ID NO: 611925 - DNA, 100 bp, Homo sapiens
catttcctctagtttctggataatgagcaggcacacagagcttcctgcggctgagggagggatgaaacaagtacccatgtgaccaccaccactgggactg

SEQ ID NO: 611926 - DNA, 83 bp, Homo sapiens
gtttaaagaagaaaatgaaagttccatatttaagtagtctgcttcagcctttttcaggacatggatttgattgacatactttg

SEQ ID NO: 611927 - DNA, 100 bp, Homo sapiens
ggaataattctcttcttatgaagtatgatgaattagttcccgcttctctaacaacaaaatatggaggcttttatatcaacactggcactctacagtttcg

SEQ ID NO: 611928 - DNA, 100 bp, Homo sapiens
aagcaatccagaaaagagtaccctgtgcttatgacaagactgccttggcattagaggagcttgaagaaatccgcaaatgtgggatgaaaaacttccgtaa

SEQ ID NO: 611929 - DNA, 50 bp, Homo sapiens
cacgacctgacggacaccacccgggcggtctatccttcactggagtctga

SEQ ID NO: 611930 - DNA, 90 bp, Homo sapiens
tttctaaagttctcctctccatctgctcacttcttacagattgcaaccctggggctcacaacgaagtaagacagtagatgacaattctgc

SEQ ID NO: 611931 - DNA, 97 bp, Homo sapiens
tgcattggtaactggtggagaccaaattttgaacctcctcagcaatacctgaacaccttctatggctgccccaaggagagctgcaacctgtttgtgc

SEQ ID NO: 611932 - DNA, 98 bp, Homo sapiens
ccaagtctgtgagtgaagacgtccacgtgcactccctgcactgctactttgttcgggcaggactacgccgacacagagctcctgctttcccgagaaaa

SEQ ID NO: 611933 - DNA, 100 bp, Homo sapiens
gcttctaccgcgtgctcacctgtatcagctggcccctgtcgacgaaatctcacaaaactgtcccttatcttcagtcacatgctggcagaaatcaaagcaa

SEQ ID NO: 611934 - DNA, 82 bp, Homo sapiens
aactgtgtgtctagatgtaattaatcaaacttggacagctctctatgaaggatgccctgcagtggtctcgccatccagctac

SEQ ID NO: 611935 - DNA, 74 bp, Homo sapiens
acattaccactattaaacttctcaatgaaactagagacatgttggaaaggaggctgagccagaggcccacaact

SEQ ID NO: 611936 - DNA, 96 bp, Homo sapiens
gaccttgagctccaggagttcgtctcttacgtctgcggaagtgcagctgcctcagttcttagcgcaggtaccccctgtaccggctgggtggcccac

SEQ ID NO: 611937 - DNA, 101 bp, Homo sapiens
agcattttcagaatacacacagaaacaggcaacatttggacacatctcttagaaaaatggagtgctggcatacattgggaattttcgcctgcttgcagagc

SEQ ID NO: 611938 - DNA, 50 bp, Homo sapiens
tcgttgccttgtatttccagagaacaggaaacctgtccagtttaagtcgt

SEQ ID NO: 611939 - DNA, 99 bp, Homo sapiens
gtcccgcgtcgccatggccgcggttcccgagttgctgcagcagcaggaggaggaccgcagcaagtgccggtggtggtgtgcacattgagccccggtata

SEQ ID NO: 611940 - DNA, 75 bp, Homo sapiens
gaaggattatgaggggttgaagagggtgctccgttccttacagaacactatgtggctgccgtgtaagagtggaac

SEQ ID NO: 611941 - DNA, 101 bp, Homo sapiens
tttgccttatgttatgggctatttgtgtagcagaaggagtacaagatcctcagcatgagagaattattactgtgtctactaatggaagtattcacagccca

SEQ ID NO: 611942 - DNA, 75 bp, Homo sapiens
ctgaatcatgattttcaagcacttgctctggagggaagagcgatgggagaggacactcctgggtttattgtgaac

SEQ ID NO: 611943 - DNA, 100 bp, Homo sapiens
gccatggtcactgctgactccaagtactgctacggcccccaaggcagctgtaagaaaagcctggagtgcacgaagttgtgcctaccccagattgagaatg

SEQ ID NO: 611944 - DNA, 100 bp, Homo sapiens
taggagcctggggttcggcgctatggaggagctcgatggcgagccaacagtcacttgtggacaacagtgagtatatgcggaatggagacttcttacccac

SEQ ID NO: 611945 - DNA, 103 bp, Homo sapiens
cgaccctcgaggcctcctgcactccgcccggacccccggccccgccgtggggtttaaccaaagagggtgagaagaccagctatgtcctgactgacaggctggg

SEQ ID NO: 611946 - DNA, 51 bp, Homo sapiens
cctagcgtcctggaattacttcaatcaagaagaattgtatttgcaacgggt

SEQ ID NO: 611947 - DNA, 75 bp, Homo sapiens
ctggaagttacttgtggacatgatcaccggcgtaatcaacccagcgttggacaaatactttccgtcagactctgg

SEQ ID NO: 611948 - DNA, 75 bp, Homo sapiens
accattacaccagtgaagatgaggaagtctgggggccgagaccacacaggtaacctggatgaggacatcattgca

SEQ ID NO: 611949 - DNA, 95 bp, Homo sapiens
tgaccccagtgctgcctgcattcgcggggcatgttcccgaggctgtcaccagggaacctcgagtggttggataagagcaagtccagcttcctgat

SEQ ID NO: 611950 - DNA, 100 bp, Homo sapiens
ttgtaaatgcaccaatcagcatgctgtgtctagctcaaggaacgaatgcaggaatttgggaactgagctgtgcaagtgctgaagaaggagatttgtttgg

SEQ ID NO: 611951 - DNA, 75 bp, Homo sapiens
ttcctgtcagttggggaagcgttaagattcctattgcccaaggactccagatactccaaataatgaccctcgttg

SEQ ID NO: 611952 - DNA, 83 bp, Homo sapiens
ttgaaaaagaaggaatccacgttctaccggctgatcatgggcacccaccgggacctggaagctttcaagcgccttaactaccg

SEQ ID NO: 611953 - DNA, 85 bp, Homo sapiens
gcccaacaacctttccctggtggtgcacggaccgggggacttgcgcctgattgatgctttgacagaagtggtggctgctgtaaag

SEQ ID NO: 611954 - DNA, 75 bp, Homo sapiens
cagcaaagatatgaagagagatttgtatatcgttgcccatgtgatccgaatagataaggaaattgagatttggag

SEQ ID NO: 611955 - DNA, 85 bp, Homo sapiens
ggccctggcggtggacgagcaggaagctgcggctgagtcgagtacccaaaggcaagtggaacagctctaatggggttgaagaaaa

SEQ ID NO: 611956 - DNA, 75 bp, Homo sapiens
gcgggctggagacatggaccgcggcgagcaagccgcttacaaacacgcagatggcaagaagattgatggcaggag

SEQ ID NO: 611957 - DNA, 75 bp, Homo sapiens
gcccagttccccagttctggcagattctggaaactgtacattgaagcagagtataggcagatctctccctcatat

SEQ ID NO: 611958 - DNA, 82 bp, Homo sapiens
ggcaagggttcggccgtgccctccgacagccaggcccgcgagaaggactggtgattgcagctggaagtgcccatgaccgagc

SEQ ID NO: 611959 - DNA, 75 bp, Homo sapiens
cttctgcccaacgacatcgatggcctggagaaggtcacaaacagaattatatttcaaatttagaagatacggtat

SEQ ID NO: 611960 - DNA, 83 bp, Homo sapiens
gtgaacaacaaccagcagaatgccgcggtgctcttacagcctgttccaagtgtggcttaatccgtctccaccaccagatcttt

SEQ ID NO: 611961 - DNA, 100 bp, Homo sapiens
gtgtttccaggattcttgatgtttcttctgagctccagggtcaggcagtatgattgaagtttctaagccaggatttttcaagccacattcaattgatagg

SEQ ID NO: 611962 - DNA, 83 bp, Homo sapiens
cagccacctctgaagttgccaggcttcccaacattcttgtctgtggttgactatagtcaatggggccaatggagccaagtgta

SEQ ID NO: 611963 - DNA, 102 bp, Homo sapiens
tgatgacacaaaatcccagatctacctgacgggcctgcgagggttgaagattgtgaagcaatagcctaagttttacacctgcagcagaagtcaaggaaaaag

SEQ ID NO: 611964 - DNA, 100 bp, Homo sapiens
caaagaatataaaattgatgagaaaaactttgtggtggttatggtgaccaaactgaagaaaaggtgactggtctcatgagccctgaagaatgaactcaga

SEQ ID NO: 611965 - DNA, 98 bp, Homo sapiens
aggcgttggttcccctctttgacctgggggacttgatctcatcttcatgccaggccttgggtttgacaaacatggcaaccgactggggaggggcaagg

SEQ ID NO: 611966 - DNA, 112 bp, Homo sapiens
gaaaaattcaagaagttgaaaaacgcttttcacgtcacctggagagatgcacagttttagaaagagcgttttcgctacgtaaagcacattcgataaaggatatggaaaatac

SEQ ID NO: 611967 - DNA, 105 bp, Homo sapiens
aaggatgttcgtcgtggcaacgttgctggtgacagcaaaaatgacccaccaatggaagcagctggcttcactgctcaggccggatcacctcaacagtcacgtcag

SEQ ID NO: 611968 - DNA, 74 bp, Homo sapiens
cagaggccagatttgattccaactgtatcacaccagggtttcctatcgctgaagtgttcacgctgaagcccctg

SEQ ID NO: 611969 - DNA, 100 bp, Homo sapiens
gacggggcggccgggggctcagagatccaagtgcgcgccctggcgggtccggaccaaggaagatgatccctatgatcttgaagatgtttctgcacagaaa

SEQ ID NO: 611970 - DNA, 100 bp, Homo sapiens
gggtcatccttgcccttgtcctcccctttcatccctatgtggaaaacggacacattcagctaacgtattttagcaggtggagtgaggttgaagattcctg

SEQ ID NO: 611971 - DNA, 76 bp, Homo sapiens
gcgagaccctagaggcctgcggcctgcgttcactgagacttttttgacggagagggacaaacaatccaagtggagt

SEQ ID NO: 611972 - DNA, 75 bp, Homo sapiens
gaaggaacgaggcaaggagctaaagcagcgtgcgttcagccctggggcccagcgcttgagaagtcggaggccaag

SEQ ID NO: 611973 - DNA, 75 bp, Homo sapiens
caacacctggacaccttgttagatggaacctacaagcagagaattcggtcaacagtggatgaaaaagaacaaaaa

SEQ ID NO: 611974 - DNA, 96 bp, Homo sapiens
gaagcgtcgagtctgcagtcgcccgggcgacggcggggtccgcgcggccaggtaagaatgattgatgttggctgatattggagtgctcattcacat

SEQ ID NO: 611975 - DNA, 100 bp, Homo sapiens
gagatccatctgcaccacggtgctggtactttagattgattgccgagcggggcagttttgtgagccttcatctgaagccttcagttcacccctctgcaca

SEQ ID NO: 611976 - DNA, 82 bp, Homo sapiens
tcccgagccactggcaggttccgcggcaccgagcccgagccccgagacggtcagcccaaggccaaccccactgtcactctgt

SEQ ID NO: 611977 - DNA, 74 bp, Homo sapiens
tgggatcccgctgtggtacttctcgcagtccccgcgcgtggtcatccagtaatagctcttcaagtctgcaataa

SEQ ID NO: 611978 - DNA, 50 bp, Homo sapiens
aatctggtccttaaggatatgtcagatggccggaaggtggtggtcgtacg

SEQ ID NO: 611979 - DNA, 90 bp, Homo sapiens
acagccagtgccagagccagatttgccctgtgatctgagacatttgaacactgagccaatggaaagctcgtttctggcgctggagacatc

SEQ ID NO: 611980 - DNA, 98 bp, Homo sapiens
atgtggtgctgcccgagaaggtggacgtgctggtgtctgagtggatggggacctgcctgctgatggagtctggctctgtcgcccaggctgcaatgcag

SEQ ID NO: 611981 - DNA, 51 bp, Homo sapiens
gattgtagccataagtggacttgaacgaatgatcacacactttgaaaggtc

SEQ ID NO: 611982 - DNA, 83 bp, Homo sapiens
taaggattccaagtaactcttatttgatattcatgatcagaacagtaagaagcccgtcatggtctatatccatgggggatctt

SEQ ID NO: 611983 - DNA, 90 bp, Homo sapiens
cgccctgcccagctgcctgcccccggaggtgcccacgcagctgcctggacaaacaatgcagatcttcgtgaagactctgactggtaagac

SEQ ID NO: 611984 - DNA, 100 bp, Homo sapiens
aagctggccaaagcctgcccagacggctcacctgtgcgggatggaacaaaagacagcacccaagaaaacctcatttggctcgctgaaggatgaagaccgg

SEQ ID NO: 611985 - DNA, 100 bp, Homo sapiens
cgagatttgtctcacaaggagaaactctacctgagagagctaaatgtcattactgaaactcagtgcactctaggctacccacctttctgttctgagaccc

SEQ ID NO: 611986 - DNA, 89 bp, Homo sapiens
gtccactgcgggccggcgaaagctgaaagtttcctacactactgaggtttaggggcactgtgaagcaaaagccacgcctcagaatccca

SEQ ID NO: 611987 - DNA, 100 bp, Homo sapiens
gcgtatccgcactgtccagcccaagcctgactatggtgaggtccagagatatatccagagaggagtggaagggctcggagacctacagccccaatactgc

SEQ ID NO: 611988 - DNA, 74 bp, Homo sapiens
gacagacttggacaacatgtcccaacattacatcccagacgggctctacgagtgcattctctgtgcctgctgta

SEQ ID NO: 611989 - DNA, 83 bp, Homo sapiens
ctagcgaatttttggagcatctccacccaggaacctcgccatccagaataatagctcttcaagtctgcaataaaaaatggcct

SEQ ID NO: 611990 - DNA, 101 bp, Homo sapiens
ttggctctgagctatgacaagagaggaaacaaaaagttaaacaagcaagcctgccataagtgagaagagcatctgctgcacccaagcctgagccggttcct

SEQ ID NO: 611991 - DNA, 75 bp, Homo sapiens
cgcgatgtcagctcagtgctgtgcgggccagacactttttcaaaaatggcaatggtatcagaattcctcaagcag

SEQ ID NO: 611992 - DNA, 75 bp, Homo sapiens
tcaccgcaacattccttatccaatcccttaccggttttgctgttactgctcagtgtagtcacaccttgaataaga

SEQ ID NO: 611993 - DNA, 90 bp, Homo sapiens
agaagatccagctttgttgaaaagcgaagccgttagtcccttaatacaaagggacagtcggcccaatatgtcaagacctctgatcactag

SEQ ID NO: 611994 - DNA, 100 bp, Homo sapiens
aagaaaatttttgtcttggggcccaaatacagtcctcttgagtttttacgaagggccctggattattgtcacagcatgggaattatgcacagagatgtca

SEQ ID NO: 611995 - DNA, 90 bp, Homo sapiens
gacattagaggtcatccaaagcagccgtcccctctgcagcctctctgacaagtgagcatgcaagcggcaagatgtcctacagatgaatta

SEQ ID NO: 611996 - DNA, 89 bp, Homo sapiens
gctgcggttgcttgggtgggacaacaagtccacaacctgcttctcacctacctgataggctccctgactggcagtcctcacctttccga

SEQ ID NO: 611997 - DNA, 83 bp, Homo sapiens
tttcatccctcgtcgaaaggattggattggcatctttagagaccaaatggctcgaaatccagctgctattgacatgtttatta

SEQ ID NO: 611998 - DNA, 75 bp, Homo sapiens
accgaatttggaaatactgtgaatgatggctttctccatatttacgtgcttgtaactctggcatgacctttgctc

SEQ ID NO: 611999 - DNA, 96 bp, Homo sapiens
tgggcgctcagcccccggatcagcctgcctctgggaacaactatgacctaggaccagggccttcaggaatcttcacccctaacttgaacttcataa

SEQ ID NO: 612000 - DNA, 74 bp, Homo sapiens
gcggctggagcgctcggccggcgtgggagcgccaaggccgcagagagaaaaggaacagttccgtaagctcttta

SEQ ID NO: 612001 - DNA, 50 bp, Homo sapiens
tccttgactgttactacagaaaaaatatcagaaaaccaggactctgcaga

SEQ ID NO: 612002 - DNA, 100 bp, Homo sapiens
agccgtgtgacagtaactgaacattggtctaaagtctttccaaaaggtcaaggttcacaaggtttggaaagaaatcccggcctgcaatgtatgatgtgag

SEQ ID NO: 612003 - DNA, 75 bp, Homo sapiens
acagcctctcagtcaacatctccttcgcagccgcgcaaaaaaagacctgaaggagaagaaggagaaggtggagga

SEQ ID NO: 612004 - DNA, 75 bp, Homo sapiens
cccatcatcactgccactggctactcagagtcagataccatggcctgggagaccatcctgatggatacactggag

SEQ ID NO: 612005 - DNA, 87 bp, Homo sapiens
cacaatgaagcagtcggacgcgtctccccaagaaaggtcaccagtgaaaagttgtgcagagcccaacatgagcttcatttccaagct

SEQ ID NO: 612006 - DNA, 75 bp, Homo sapiens
ctattccattgtctagactttgtgttccaagatcagagagccctatgagtttgtctctctggaatggctgcaaaa

SEQ ID NO: 612007 - DNA, 75 bp, Homo sapiens
cagatgtctgacagccctgtgtgacaccaagataagtaacatgtgtcttgctgaatcagggctctcttatccctg

SEQ ID NO: 612008 - DNA, 97 bp, Homo sapiens
agatggcggacggcgtggaccacatagacatttacgcggatgtcggcgaagagttcaaccaggaaacctcgacctgtctcccagttggttgcacagc

SEQ ID NO: 612009 - DNA, 101 bp, Homo sapiens
tccaaagagatacagggcagaggaaaatgcaagaagactgatggagcaggcttgcaatattaaagacccagatgatgtggtaccagttggccaaagaagag

SEQ ID NO: 612010 - DNA, 97 bp, Homo sapiens
ggctgtcaagaatgatcatgattttcttgaaaaggaccttgtagaacctctttgcaggtcttcaaagcttcacctttctccaaaggcagatgtgaag

SEQ ID NO: 612011 - DNA, 83 bp, Homo sapiens
ctcgctctcggcttgaccgcattcttcctcccagattaactgctgaagtactgatcgagttctgcatttcttcaatgaggaac

SEQ ID NO: 612012 - DNA, 100 bp, Homo sapiens
ccgagctggacccggaccggttttgggaaggaacatctgccatggaaaatctaaatgaaatgcagtgtatgtggtttcagacagaatgcatttcagctta

SEQ ID NO: 612013 - DNA, 100 bp, Homo sapiens
ccgttttcgtttcacagtaaccgacgtctcaagtcaggtgtcaggcccttgaaaggaaaaattctgcaattccatcagagttgaatgaaaagcaagagct

SEQ ID NO: 612014 - DNA, 118 bp, Homo sapiens
ggacgagctggagaaggccatcaccacgcagaacgtcaacaccaagtgcatcaccatccccaggaccaacttggaggccttgcagaagaagctggaggagctagagcttgatgagcag

SEQ ID NO: 612015 - DNA, 82 bp, Homo sapiens
cagaagctgaattgcaggatatgatcaatgaagtggatgctgatgaaaacatccagtacagacctttctgatatccctgctc

SEQ ID NO: 612016 - DNA, 72 bp, Homo sapiens
caccatgctgatcatgcagcgcctggaggctgaacgaagagcgaggtactatactggcaattgctggagaag

SEQ ID NO: 612017 - DNA, 82 bp, Homo sapiens
tgcagattttggcagattatggctttgtccccacccagcactgatgatattataaaaatcttcctaaatactatgacaattg

SEQ ID NO: 612018 - DNA, 96 bp, Homo sapiens
tgttgcccagttccccagttctggcagattctggaaactgtacattgaagcagagtttgcaatggattttggataaacaagatctgttgaaggagc

SEQ ID NO: 612019 - DNA, 90 bp, Homo sapiens
aattacggaagatcatttatatacacatgtgcacttacatttcaatcgaccaagttccaaggacctatgccataatgataagcagacccg

SEQ ID NO: 612020 - DNA, 74 bp, Homo sapiens
cttgaagtttgtggatgaaaattgggaaggttccctcaagtccaaggtttcccaaaccactccttatgatccag

SEQ ID NO: 612021 - DNA, 75 bp, Homo sapiens
gaatgtcctggacacctcgtggcccacgcccccacctgccctgcgtgaggctacctccgggatgtgacaggcaac

SEQ ID NO: 612022 - DNA, 95 bp, Homo sapiens
acctttgccaggaactggggggccgactatatcctggaaggaaaatcacctcggcagtgtttgaaggaaggatactgcaactctttgaagtacgc

SEQ ID NO: 612023 - DNA, 80 bp, Homo sapiens
caaaaaatgcagtcccctcatgccaagctggcccgagataacttcttccgctgtggtgtgctgtatgaggactccctgtc

SEQ ID NO: 612024 - DNA, 51 bp, Homo sapiens
agttgatgggcacctcccgggacgattggagcatatgatcaacaaatatgg

SEQ ID NO: 612025 - DNA, 48 bp, Homo sapiens
acatggaacagggactcactggggtttcatcaggctggggagaaatgc

SEQ ID NO: 612026 - DNA, 98 bp, Homo sapiens
ccaggtcatgtgatactggagcagtatcaggctaattttgggaatacctgctactgcaattcagttcttcaagcactttatttttgtcgtccatttcg

SEQ ID NO: 612027 - DNA, 100 bp, Homo sapiens
cggcgttggaggccaccgtttccagtgagggagactctgatgtggactcggagctggaggaccgtgttgacggggtcaagtcctggttgtcaaaaaacaa

SEQ ID NO: 612028 - DNA, 98 bp, Homo sapiens
taatgaaagtgcttctaccatggagatcttagctgtgcttaaagcctgggcagagagggtgtggcctgcttctcagcgagacgtattatatctttctg

SEQ ID NO: 612029 - DNA, 82 bp, Homo sapiens
tgggaaatcagggctccttcttaactaaagcccaagaagatgaaaggattgttcttgttgacaacaaatgtaagtgtgcccg

SEQ ID NO: 612030 - DNA, 49 bp, Homo sapiens
ataagaagcttgggttcattgtcttagtggtgcaatggctagtataagc

SEQ ID NO: 612031 - DNA, 75 bp, Homo sapiens
tttccttctggaacaccagcaggtgtttgccagcttcccagtaaaaatgatgaaaaagaatatccacacagaaga

SEQ ID NO: 612032 - DNA, 100 bp, Homo sapiens
tctgtctgagagagcaaaggatgaagtcagagctcctacagaagaagggaaaaaagagctgctgttcctaagtaacgcgaacccctcgctgctggagcgg

SEQ ID NO: 612033 - DNA, 75 bp, Homo sapiens
aactgttgaaactagcaacatctataagtgaaaccttggaagagaaggctaacagagaccctgatgctggaattg

SEQ ID NO: 612034 - DNA, 100 bp, Homo sapiens
ttatcttttaagaggttatcttaggtcttgcgtggagtctaggatgatagcactgatggtggcaggttatggaggttttgatgactatggtggctataat

SEQ ID NO: 612035 - DNA, 75 bp, Homo sapiens
ggaacatactctcaaaatatttacttatatcaattcctggacacagagggcaattgaaggaacagactaaaaatc

SEQ ID NO: 612036 - DNA, 89 bp, Homo sapiens
tgcgtatttcacaggagatgcacaaaaggatggagaacctaataaggggaaggaatcccccgcaataccagagaagtccttgtaaagag

SEQ ID NO: 612037 - DNA, 89 bp, Homo sapiens
cctggctgtagcgactggttgcgggaggctggactctggtgactgttgttctaagaacggaagcatctgggctggatggaatttagcat

SEQ ID NO: 612038 - DNA, 101 bp, Homo sapiens
ggaaacatcttttgacaagatgtcacctgaaagtggtcacagccgcatctttgaagagtgggaaaccacccatcaatgatatgttcacagacctcaaagat

SEQ ID NO: 612039 - DNA, 75 bp, Homo sapiens
ctgaatgcaaagctcctacagcaaatccagggcaagtgaaccggagcaaacgacttccgatccagtctgcgctgt

SEQ ID NO: 612040 - DNA, 90 bp, Homo sapiens
agctgctaaaaccacctttgtcaccagaatgaatgaagtgcttcagatttaaatacctgtggacatctctacagcaatgagtgaacgggc

SEQ ID NO: 612041 - DNA, 100 bp, Homo sapiens
cgggagcccaggagcctgccccgccctggggacgaagagctgcagctcctcctgtgcggagctcccagctcctccagcagccgacaggaggcccgtcaag

SEQ ID NO: 612042 - DNA, 100 bp, Homo sapiens
atcaggacgggcgcccgggggcccccagcaccctccagctccctacccatccgccaggagccctcttccttcagggctctgccagcagacagccttggca

SEQ ID NO: 612043 - DNA, 74 bp, Homo sapiens
gtggtggtggccgtctctgtcaagcctggagacgcgctcaaatctaatccaagtgaaaatgaagaaaaggaagc

SEQ ID NO: 612044 - DNA, 82 bp, Homo sapiens
tggaggaatacacttatttatgaaacctgcctagagctggaacgttacctccagagcgagccctgctatgtttcagcctcag

SEQ ID NO: 612045 - DNA, 82 bp, Homo sapiens
tacggccctgtgggcctgggagctgcctctgaggaacacgccgcagctgcatcttcctcccgtgaggctggccgagctccac

SEQ ID NO: 612046 - DNA, 82 bp, Homo sapiens
cacgcctttcagccaaatgccagactgattgtcatgctcagggaccctgtggagaggagcagggaaaacctgaggtgcttgg

SEQ ID NO: 612047 - DNA, 83 bp, Homo sapiens
ccgggatgttggaccctcccttcgttccagacgatgctcgtcagaagttccgctctgttctggttgaagcaacggtgaaactg

SEQ ID NO: 612048 - DNA, 100 bp, Homo sapiens
tcatcctcactggacgccacaggggcaaggaatgaatagaatgcttccaatgagagaacgttccaaaacagaggaagacattctacgggcagcacttaag

SEQ ID NO: 612049 - DNA, 100 bp, Homo sapiens
gctggggaggaaagactgttttgcaggcagccctcggagtgaaacatggagttcttctgactgaaggctgagactcgggctgagtttgcggagaggtcag

SEQ ID NO: 612050 - DNA, 100 bp, Homo sapiens
cgagcgctgcatcccctctgtgtggagatgcgacgaggacgatgactgcttagaccacagcgacgaggacgactgccgccactcttcacctccaccatga

SEQ ID NO: 612051 - DNA, 90 bp, Homo sapiens
cggagatcatcacgtttgccgagtcagagtgtgaacatggctacgcctcttcattcccgtccatgccgagcccccgactgcagcattcaa

SEQ ID NO: 612052 - DNA, 100 bp, Homo sapiens
gggactttgtcattatgcaggccaaagagcagtacagagatggaaaataatgtcctgcaagatgaggattgaacagttaaaacaaacaatatgtaaagga

SEQ ID NO: 612053 - DNA, 100 bp, Homo sapiens
tttacccgtgctttcccaagcctggaagaactcgtcatgctctttgtagcgtggtgcttctgttgctcacaggtgtggtgtcagcacagcggcaggtcac

SEQ ID NO: 612054 - DNA, 74 bp, Homo sapiens
ccagaactacctgtaaattatgtgaaacctccaaatgtggggaggcagcagatggctgaaattctgatccgatg

SEQ ID NO: 612055 - DNA, 100 bp, Homo sapiens
gtcctcgacgaggccttccagcgctatcgtgacctgcttttcggttccgggtcttggccccgtccttacctcacaggagcctgtgtgaaatgcagcaaag

SEQ ID NO: 612056 - DNA, 83 bp, Homo sapiens
cgcgccgacgcggggcccatggccaggaccaccagccagctgccttatgccagcctggaccatcttggaggcagtgtaggatc

SEQ ID NO: 612057 - DNA, 100 bp, Homo sapiens
attttggtggggtgaagaccccagttttgctgaccttattcaccatgacttatcaggggatggagaagtttatgtttgggatgtgaactcaaggaagtgc

SEQ ID NO: 612058 - DNA, 90 bp, Homo sapiens
gactgacaaggaaatggagtcaccagaatgtatgaaaaggattaaagttcaggaacaagactgccaatggagactgccgcagagaccccc

SEQ ID NO: 612059 - DNA, 100 bp, Homo sapiens
ttccaagacgtggaggacatgcctgacagatgtgccttggaagagtctgagagtccagccagaagatacctgaaattcctgcagatgttgtgggtgccct

SEQ ID NO: 612060 - DNA, 97 bp, Homo sapiens
ggacaagctggaagaggaaattaaccggagaatggcagacgacaataagctcttcagggaggaattcaacatttggtgcttccagatgtgagttatc

SEQ ID NO: 612061 - DNA, 87 bp, Homo sapiens
ccagaagcctacaatgaagaactgaagaagctggagttgctcagacagagagttggaaactcaactattggaacaatgtactgttga

SEQ ID NO: 612062 - DNA, 80 bp, Homo sapiens
aaacaagagatttccacagaaggctgctgatactttggctgtgaggcaaaaaaggagaatttatgatatcaccaatgtct

SEQ ID NO: 612063 - DNA, 101 bp, Homo sapiens
tcaacatttcatgagagaagaaatacaggatgcctctcagctgccacctgcctttgacctttttgaagcctttgcaaaaggtccagtcgtcgaccatcgag

SEQ ID NO: 612064 - DNA, 100 bp, Homo sapiens
agcggggtcgacggtccccactttcccctgagcctcagcacctgcttgtttggaagtatcaccttttgccatgatagcatttctttcattggacagttcc

SEQ ID NO: 612065 - DNA, 99 bp, Homo sapiens
tcctggatattaagatccgactggagaatgaaattcaaacctaccgcagcctgctagaaggagagggaagttgacacttactttgacaaaggcaaattt

SEQ ID NO: 612066 - DNA, 100 bp, Homo sapiens
tcaccatcaacaaagaagaccacacactgggaaacatcattaaatcagctgtaggtaaaacttgcctactgatcagttacacaaccaatgcatttcctgg

SEQ ID NO: 612067 - DNA, 82 bp, Homo sapiens
ccgctgccgggcaccgaggaccagctcaatgacaggagtacttcttgcaagcagagctgacaagcaacgtcttaaaaacagg

SEQ ID NO: 612068 - DNA, 74 bp, Homo sapiens
cgccgccgcagcgcgaacatggacgccgtcaacgccttcaaccaggaggcagtatttggcagtcgtattcagag

SEQ ID NO: 612069 - DNA, 82 bp, Homo sapiens
ttttggaagctgctaaagaatggccagacatggatttgattgacatactttggaggcaagatatagatcttggagtaagtcg

SEQ ID NO: 612070 - DNA, 75 bp, Homo sapiens
ctgcagaagaagcacacctgaaacatgaatttgatgcagacttacaggtccataacttagtggcaattgaactgg

SEQ ID NO: 612071 - DNA, 82 bp, Homo sapiens
ctgctgggcctccagtcaccctcgtcttgcattttcccgcgtgcgtgtggcaacaggtttgtctatgctggctctaactcgg

SEQ ID NO: 612072 - DNA, 100 bp, Homo sapiens
gcggctcgtggtggatggcatggggcgctttggcaggtacaacaactatgaccgggctgtcatcaataccgttccttatgatgtcgtccatcgctggtat

SEQ ID NO: 612073 - DNA, 51 bp, Homo sapiens
gcgcgcggagccggccatgggcaagtcagtgacaaccatgagtggaaaaaa

SEQ ID NO: 612074 - DNA, 100 bp, Homo sapiens
ctaaagaaatactcagaaatgcagaggaagaggaaagccgggtacgagcacatgatgggagctcggaatgtctgagctctgcagagcagatggagtccga

SEQ ID NO: 612075 - DNA, 101 bp, Homo sapiens
cgggagatcagctatgccattaagaacatccatggagtcaggtattacacaatggcctcgttatggagatggagcatccaactgtggggaagatttccgtc

SEQ ID NO: 612076 - DNA, 76 bp, Homo sapiens
agccgatccagcctgcggagcctgtggggcagtggctttcctggagatggcatgcagcagccagcatacacacagc

SEQ ID NO: 612077 - DNA, 75 bp, Homo sapiens
ccggatcgggggcaagcggaaggtgatgcccaagatggaccagaaatgagccgtcagactgctacagcattacct

SEQ ID NO: 612078 - DNA, 101 bp, Homo sapiens
tgaagggaaggaaatcatgtcaagcgaagccttgaaaaagctgccctgagacggtgtcccgccgaaagatgtgaatttcttcggagtaagaaatcctcaga

SEQ ID NO: 612079 - DNA, 98 bp, Homo sapiens
agtgaggaaaggaggtactgtaggccatgtttttggtatactgtgcactggagaaagaacctgtgccaatgtccttgcctccagccttggtgccacca

SEQ ID NO: 612080 - DNA, 100 bp, Homo sapiens
tgacctcgtgaacatctcccatttgaatctcgtggctttccaagaagaagtggccaagtactatactggcaattgctggagaagattttgcaattgttgc

SEQ ID NO: 612081 - DNA, 90 bp, Homo sapiens
ggggaagcgggacaatcgggtgtcgaaatcagctgtccgccctgcctgcctgcctgtgtggtctgcctctcaaagtcttaatcgcaagta

SEQ ID NO: 612082 - DNA, 100 bp, Homo sapiens
ctccacgccctgctgggtcctacctgtcagagccccaaggcccgatgagagaaagggaaagttaaggatgctggagcagaacaatggatttctctttctc

SEQ ID NO: 612083 - DNA, 133 bp, Homo sapiens
gtcaggcaatataaaggaagaatccaaatctcaaaacagcaaagacagagtgatttgtgagttaagagcagagatactaggggcaaacgagacagagaaaaggactcaagagaagaacgagaatatgaacagg

SEQ ID NO: 612084 - DNA, 97 bp, Homo sapiens
tcagtactctttgccgtacccaccggagcctggcgcagcctccctctattaccagagcactacaaacaccactggtttcccgaaaagccgtccaagg

SEQ ID NO: 612085 - DNA, 88 bp, Homo sapiens
gagcgcccgggatgcaggaggagagcctgcagggtactccaaagattcaggtttactcacgtcatccagcagagaatggaaagtcaaa

SEQ ID NO: 612086 - DNA, 100 bp, Homo sapiens
ccagtgggtagatgtcgttctgaaacgcagagagttgtcatcgaaaataacaagactattctggatatgagtaacactgaggaataagatactaagccat

SEQ ID NO: 612087 - DNA, 74 bp, Homo sapiens
gagacggcggcagcagcggcattcaggaactctattttaagaacctctcaaaacgaaacaagcaaatcatggag

SEQ ID NO: 612088 - DNA, 51 bp, Homo sapiens
tctccagctccttcattccccagcaggtggctacagtttcagaaaagtcac

SEQ ID NO: 612089 - DNA, 96 bp, Homo sapiens
tctggatgccaaacgagattggggccatgccaaggactatgtggaggttgcacactgggccacagaggatccagcaaggatgaagaaatggagcag

SEQ ID NO: 612090 - DNA, 75 bp, Homo sapiens
ggtggtggtcacgtggcccagatttatgttccagggtctccctccactgctgtagtaacccgggtccggggcctc

SEQ ID NO: 612091 - DNA, 100 bp, Homo sapiens
gggatccacacagctcagaacagttggatcttgctcagtctctgtcagaggaagatcccttgaactacctgaagaagcaggtcacacccctcttcattca

SEQ ID NO: 612092 - DNA, 96 bp, Homo sapiens
ctggagcactcgctggccgactgcgccgagctgcacgtcctcgaacgcgaggccaacagccccggtaccagcatcaagatgatttatggtaataag

SEQ ID NO: 612093 - DNA, 75 bp, Homo sapiens
cgcgtttccacttcagagatctggacttttcccatgctaaacagctctttgctgcttgtttggagttggtaacag

SEQ ID NO: 612094 - DNA, 100 bp, Homo sapiens
ctataggccgcgaacaagtgggacacaggcaagacgtcgaggttctggctccttggcagcaatggctgtatttgaagataagtttaggccagacatggag

SEQ ID NO: 612095 - DNA, 75 bp, Homo sapiens
caactgtaaagaaggtggtggaagagactaaggtgtcagtatgttcttcaagctgctctgctcctgggcccaagc

SEQ ID NO: 612096 - DNA, 90 bp, Homo sapiens
ggatgagtatgcggaggacagctctgatgaggagggagacattacctcatccctcaagattgctcgctgcaaacacaacgctgagaaatg

SEQ ID NO: 612097 - DNA, 87 bp, Homo sapiens
gcttggggatggagtgcctccaaaggttgctgagcagccagactgccttccgggtcactgccatggaggagccgcagtcagatccta

SEQ ID NO: 612098 - DNA, 97 bp, Homo sapiens
ggtaccgagcccctgaactacttcttggagcaaggcattataccaaagctattgaaactatgttccaacttcctgtcaacaatcttggcagtttaag

SEQ ID NO: 612099 - DNA, 100 bp, Homo sapiens
agatgaccttcagtgtgctgctcaaaaacagtacctggagtagaacagaaaaattattatgtctgtgttcccttgggactcattggaaattgtacagtga

SEQ ID NO: 612100 - DNA, 100 bp, Homo sapiens
gaagatatgctcatgtggtgttgaggaaagcagacattgacctcaccaagagggcgggagaactcactgaggatgaggatgacgatgtcgataccaagaa

SEQ ID NO: 612101 - DNA, 98 bp, Homo sapiens
aggcatgatcacatctcactgcagccttgtcctcctaggctcagcgacatggtatgcttaagcaacaggatctaagtattgccatggtggtgacatca

SEQ ID NO: 612102 - DNA, 103 bp, Homo sapiens
ctccagcgccgcgggatgtagcgcgggggaccgcggcccccagcagagcccgcctgcccggctatggactagaggcttttaccagatttcttaaaactgaatt

SEQ ID NO: 612103 - DNA, 100 bp, Homo sapiens
gaagaaaattttccttgacctttaggtgcttttatattcatctcaaaaacaaaattctgaactcaggacttggcaaattacgtgtgaaaatgaacttgtg

SEQ ID NO: 612104 - DNA, 82 bp, Homo sapiens
ggctgtggcaggagggcggcggcggcggctgcggtcgaagaaggggacgccgacaagaaactggcgatggaatatgagagga

SEQ ID NO: 612105 - DNA, 75 bp, Homo sapiens
tatgctgccaaaattatcaacaccaaaaagctttctgctaggggcagccctgcaagttgggggccatggagagag

SEQ ID NO: 612106 - DNA, 100 bp, Homo sapiens
cccacctcctggccttctccctcctctgcctcctctcaaaggatccaaactactggatacaggtgcatcgcttggaacatggagatggaggaatactaga

SEQ ID NO: 612107 - DNA, 100 bp, Homo sapiens
ctattggaaagtttttttaatgtggttggaacaactgagccttcaacctggactactacacagaggttctggacctctcctacctgcttgaccacctggc

SEQ ID NO: 612108 - DNA, 95 bp, Homo sapiens
acttggtccgcggcatccgtaaccacaaggaggacgaggttttccagcttgcagctcatctggtgtactggggcaaggccatcatcatctacccg

SEQ ID NO: 612109 - DNA, 100 bp, Homo sapiens
cgtgccgagcggcaacggggctccgggccctaaggggtactaccgtggtgcagtgggcgccctgctggtgtacgacatcgccaagcacctgacctatgag

SEQ ID NO: 612110 - DNA, 100 bp, Homo sapiens
gaacttggaaatgacattggcatccagattatccactgcaaggcgccctcgcccccgccgcccgcagaggccccgaaggagccgctgcagcccgagcccg

SEQ ID NO: 612111 - DNA, 100 bp, Homo sapiens
tcctgggagaggaagcacaaggcagcccgcacgatatcatcagaataggtgtccctggccagtgtccttccacctgtccacaagcatggggaacatcttc

SEQ ID NO: 612112 - DNA, 100 bp, Homo sapiens
ctcagctccacattgagagcaaaatctacaagatgatgcagggaggagatgaagacagtcagtgttgccttagttttgtgcctgaatgttggtgtggacc

SEQ ID NO: 612113 - DNA, 83 bp, Homo sapiens
ctttctttgtttatgtcagtaatttcacctggcccatcaaaattcaggttaatgactccagagagtaagatcagattcgtcca

SEQ ID NO: 612114 - DNA, 83 bp, Homo sapiens
cgtgaccgagagcgcgaatatcgtcatcgttagaagtttttcagaagaagtgaagtcaagatgaagaaccatttgcttttctg

SEQ ID NO: 612115 - DNA, 75 bp, Homo sapiens
ggtgcttggcaaaatcgagcgggccattgacaggccgacggtcgcaaggtcctacggtcaagcatccgggagttt

SEQ ID NO: 612116 - DNA, 83 bp, Homo sapiens
ctgtgcggtgccaggagaggcggggtcggcgggagccagcgagccacgggagcgagccagacaatgcagatcttcgtgaagac

SEQ ID NO: 612117 - DNA, 88 bp, Homo sapiens
agagaagtgcccgaggagagttaacaggtctgccatcatggatgttctcgcagaagcaaatggcacctttgccttaaaccttttgaaa

SEQ ID NO: 612118 - DNA, 49 bp, Homo sapiens
actgctttttgagataatagagggagttcccattagacttgaagttggg

SEQ ID NO: 612119 - DNA, 75 bp, Homo sapiens
gcgctcgcgctcgcgctggtggcggtcgcctgggtccgcgccgagagaccatcatgcagacatcagagactgggt

SEQ ID NO: 612120 - DNA, 130 bp, Homo sapiens
cctgcctccactcactcgcctggagaagtatgctttcagcgagaacaccttcaaccggtatgggctacgtgagttcgtggtgattgcccctgctgcacacagtgacgctgttctcagcgaatctaagtgc

SEQ ID NO: 612121 - DNA, 96 bp, Homo sapiens
aaaatcctacctaggtaatgtgtagttctcaatgcatcatgtcaggcagcttatgatgccaatttgtcccatgggcttttttccagacttcaagct

SEQ ID NO: 612122 - DNA, 101 bp, Homo sapiens
gcgcccgtcaacttctgcgacgaagaaaaaaagagcgacgagtgcaagaaacttggggactgtggcagccatggagccagtgtagtgccacatgtggggat

SEQ ID NO: 612123 - DNA, 100 bp, Homo sapiens
atcccactgatgaggatcagcccatggtgtgatgaatgcagactctgctaccattttggctgtttggatcctcctttgaaaaagtctcctaaacagacag

SEQ ID NO: 612124 - DNA, 75 bp, Homo sapiens
aaacgccgctggagaaggatggcatcaccgttgtgtgtactaatggtcacttgatgtgcgctggctgttttatcc

SEQ ID NO: 612125 - DNA, 50 bp, Homo sapiens
cccagaaagtccaagctcgtgggaattcggcaccggttgagaggtagtgc

SEQ ID NO: 612126 - DNA, 75 bp, Homo sapiens
ccaagtggcagattatggaatagttgcagatttatttaaggacaatgatttcttgcggaacacagtgcacaggca

SEQ ID NO: 612127 - DNA, 75 bp, Homo sapiens
gggcgccaatggggagcagaaggactcggacacaggggacaccgtggtgtttaaggatggccagtactggatccg

SEQ ID NO: 612128 - DNA, 100 bp, Homo sapiens
ctcagatgctgccagggtccctgaagagggaagacacgcggaaacaggagtgaaaaggctctcagtgtctgagttaaatgaaatcctggaagaaattgag

SEQ ID NO: 612129 - DNA, 100 bp, Homo sapiens
actgtggcaaggcttttgcttccaaatacaagctgtatagggttgaaaaatataggccagtaaagctgaatgaaattgtcgggaatgaagacaccgtgag

SEQ ID NO: 612130 - DNA, 75 bp, Homo sapiens
accagctggaaggtatgctgaagatgcttcgggaagatttgaagaaggactccttctcctcccccacgtcggcgc

SEQ ID NO: 612131 - DNA, 98 bp, Homo sapiens
tcggcaccgtcctttcctttctccctcgcgttagctgagctgactgctgcccactttggaggaggcggtgggctccttcacaagaagactcaacagga

SEQ ID NO: 612132 - DNA, 100 bp, Homo sapiens
acagccactgttgctgagcagggagaggatattacctccaaaaaagacaggggagtattaaagaggcggggtttcaccatgttgcccagactggtcttga

SEQ ID NO: 612133 - DNA, 83 bp, Homo sapiens
aagatggttatgaagaagaagaagatgagaacagtagacagtcggcaggtaaagtgaggaaacatgcaactgaacaggaaaaa

SEQ ID NO: 612134 - DNA, 100 bp, Homo sapiens
ttaaagcagctgtcagtgacttggacaaactccttgatgattttgaacagaacccaggtttggaattcacccagttgcaggccgaatgcctggtcagctt

SEQ ID NO: 612135 - DNA, 83 bp, Homo sapiens
cgcagaagtcgcgtgtctaggtgagtcgcggtgggtcctcgcttgcagttcagcgaccacggaatgtatcctgtcaggtataa

SEQ ID NO: 612136 - DNA, 83 bp, Homo sapiens
ctgtgctgtttgatgcagttgatcactgatattccactcttatggagattgtaaaaaacttacctcagaaatatttgcagaga

SEQ ID NO: 612137 - DNA, 82 bp, Homo sapiens
ggggctgctggtgggccgcgtcgaagacatggaccagggctacggaggacggggaggtttactgcatcgacgcgcggttcta

SEQ ID NO: 612138 - DNA, 75 bp, Homo sapiens
ccgagatgccgggggagcggggccttccacaccccctccgtgggtgtgtggatgaagtgacacccccagctacat

SEQ ID NO: 612139 - DNA, 75 bp, Homo sapiens
aagtgataaaataatatgggaaaaacatcaaattcttgaccaatctagggcctaaacggcagcggcaaaacaact

SEQ ID NO: 612140 - DNA, 75 bp, Homo sapiens
tagaagagccatccagatatgtggccgctgttcctccaactccccagcctttagctcctacaccttcagcaccct

SEQ ID NO: 612141 - DNA, 100 bp, Homo sapiens
cgccaggtgacctgcacctgggcaccgccatcggcttcgcaggggccatctggaggagtcgactccgccgtggtcatggaggagggaagtccgggcgagg

SEQ ID NO: 612142 - DNA, 90 bp, Homo sapiens
tcttcgtagacattgtctcccaagacaacttcctcaccagcaccttacaggccatcaccatcgaggctgagccaagagctgatggcagcc

SEQ ID NO: 612143 - DNA, 98 bp, Homo sapiens
tgtctgcctgtatccttcgatttggcaccaggtctctctgcaactccatcatctccttgaacactacaattaggtacctaagttggagctgatgcccc

SEQ ID NO: 612144 - DNA, 95 bp, Homo sapiens
agagcagaggtcaaacctgaaagaccccagttatggatgggagagcttactcacatagcatattggtatatcaaaatgaaatgcaaggaaccaaa

SEQ ID NO: 612145 - DNA, 90 bp, Homo sapiens
agccgccaaagtggagagtgcgattgcagaagggggtgcttctcgtttcaggtgaacaaatagaagctgagggtgaaggacctacagctg

SEQ ID NO: 612146 - DNA, 100 bp, Homo sapiens
actaaacagatgaagtttgcagcctcaggcggctttctccaccacatgaccgagaaggacatcctgctgcgacctgagctggaggaactcaggaacaaac

SEQ ID NO: 612147 - DNA, 89 bp, Homo sapiens
ccagcctgcgccaccacgtcacgcacacgctcggcgctgcgatccgcgcatataacgatcccatacagtggtccacagaccaagtcctg

SEQ ID NO: 612148 - DNA, 100 bp, Homo sapiens
ttctgcacccaaaccaggacctctaaaaaaggcacctgctgctaaggagctcgaggccatgagcagatataccagcccagtgaacccagctgtcttcccc

SEQ ID NO: 612149 - DNA, 75 bp, Homo sapiens
catgggagagtacatgagacgatgaagcaaagattttaccaaatgttgcaagaactctggagttcttatggtagt

SEQ ID NO: 612150 - DNA, 105 bp, Homo sapiens
gaagaggattccggcgggaactcgactcttggcgccaccgcctcatgcactgtgtaggtgtcgtgaaaactacccctaaaagccaaaatgggaaaggaaaagact

SEQ ID NO: 612151 - DNA, 75 bp, Homo sapiens
ggcgtcggggactgccagggagtggaggggagccaggcggccgcctcagcgcaaatctgtccaaggctgcctggg

SEQ ID NO: 612152 - DNA, 78 bp, Homo sapiens
ttttctagaagcctgtcgaaaaatgggggtgcctgaggtgagaagccctaccactgcaactgggacggctgcggctgg

SEQ ID NO: 612153 - DNA, 100 bp, Homo sapiens
ccacagcggcagctccagcccggcccggcagcgacatggaagaatttttccctagattggtgtaaacagccagacgtgggccttcccaaacccgacctgg

SEQ ID NO: 612154 - DNA, 74 bp, Homo sapiens
tatgttcaaactcagacacgaaaaccagaactgcatcagatgtcatcgcaacagataaagaagacgttgccttc

SEQ ID NO: 612155 - DNA, 50 bp, Homo sapiens
ttccactggagtgaccgggcagagatccacatctcaaagaagtggggctt

SEQ ID NO: 612156 - DNA, 82 bp, Homo sapiens
ctgctctactacctgagggccagcggtttgctgtgtttcaaagaagggtgctgaccacagtagtgctcccccagcagatgga

SEQ ID NO: 612157 - DNA, 100 bp, Homo sapiens
tggtcatgaaagagattccttgcagagacagctcaacacggcacttccacaggaggatttgacagctaaggatattgaagaaattattgatgagctcaag

SEQ ID NO: 612158 - DNA, 131 bp, Homo sapiens
ctgcaacatgaccacgtcgttccgcgacggcctggctttctgcgccatcctgcaccgccaccggcccgacctcattgacatattcgatgccatgttccctgtcactcacatcgctggggagactgttatac

SEQ ID NO: 612159 - DNA, 98 bp, Homo sapiens
aggtggaccggagctcgtccagctgcgtgcctaggcgcttgaagaggctcagaaagctatccaacaactctttggcaaaatcaaagatatcaaagaca

SEQ ID NO: 612160 - DNA, 107 bp, Homo sapiens
ggacctggaggaggaccacgcctgcatccccatcaagcggccagtttgcgatcgtgcggaagtgccggcagaagggcacgggcaaggagtacgcagccaagttcatc

SEQ ID NO: 612161 - DNA, 83 bp, Homo sapiens
gagttaacttcctgacccaggaagtggcagcaacagaggggactagcagcgaatatggagcgggaacgccgagagaaggagag

SEQ ID NO: 612162 - DNA, 50 bp, Homo sapiens
cccccagcggaggaggagctctcaaaagacctaatctgggagcctgcaag

SEQ ID NO: 612163 - DNA, 93 bp, Homo sapiens
cggctgttgatttcatcaggacacttttagttaagaaacctgagttcagcagctggacatggagaaccaacgctcatcacctctgtcgttccc

SEQ ID NO: 612164 - DNA, 74 bp, Homo sapiens
ctttgcccgagcatatgcacagggtatcagccgaaccaagtactgggaggatgaggagaacaatccccttgaga

SEQ ID NO: 612165 - DNA, 50 bp, Homo sapiens
ggaatcgatctgacaccgagcagatgacccagcagatggctgggatgaac

SEQ ID NO: 612166 - DNA, 100 bp, Homo sapiens
atgctgacgaggagttcaaccagaagctgagctcttcaggaaaattcgcatccaaatgagagccctggacatgctccagatggcctcttcccctatcgcc

SEQ ID NO: 612167 - DNA, 75 bp, Homo sapiens
aaattctgaactcaggacttggcaagtattggatcaggagtcaattttcagttgaacaaccaacataaattcaac

SEQ ID NO: 612168 - DNA, 90 bp, Homo sapiens
gggtcagtacggcccctgggtccacgtggcgcgaaagtaggaggtttcaggcacagaactgtatatccaataatagtgaaatggatccca

SEQ ID NO: 612169 - DNA, 78 bp, Homo sapiens
cgcagcaaagcgcccagcctgccgcctcgctgtccctgcggcttctgggggatgatgatgctgaagctatccttgctg

SEQ ID NO: 612170 - DNA, 75 bp, Homo sapiens
ccctttttctgctcttctgcaacaatctgaggcagcttcaaaagatggtccatgatattaaaaacaatgaaggtg

SEQ ID NO: 612171 - DNA, 82 bp, Homo sapiens
ctttgctggcaagcagctggaagatggacgtactttgtctgactacaatattcaaaagatcaccggcgtaatcaacccagcg

SEQ ID NO: 612172 - DNA, 88 bp, Homo sapiens
agttcgccaaagcgacaggagctaaaaagcttgtggtgaaggggggcaaaaaaaagaagcaagttctgaagttcactcttgattgcac

SEQ ID NO: 612173 - DNA, 100 bp, Homo sapiens
aggaaatcccaggcggagtccgggggaggcagcacggcatcccagcctcagggctgcccggacggtgttggttgggaggaattaatcaagcaatggtcaa

SEQ ID NO: 612174 - DNA, 100 bp, Homo sapiens
ccggctcacggaaaatgtctataaggtcgcaatggaagaagagatcgccgcgctggtcattgacaatggctccggcatgtgcaaagctggttttgctggg

SEQ ID NO: 612175 - DNA, 87 bp, Homo sapiens
gggagtgtctgctgatcacttggagtgctgtcccttggaacaggaggagtaagattgagtctgctccatctggacacaagcatctga

SEQ ID NO: 612176 - DNA, 115 bp, Homo sapiens
acaatgagaacagctctgcgcggctttttgagcggtcccgcatcaaggctctggcagggttgttacaagttgagttgaaaacaagaaaaacttgcttttggcgccatcaaaaagg

SEQ ID NO: 612177 - DNA, 90 bp, Homo sapiens
ccctggagttgctcagaggtctggaggagaaaggcatagagaagaggtgtggtggaaaggtcttccagaaccagaggctaagcacacagc

SEQ ID NO: 612178 - DNA, 135 bp, Homo sapiens
ggctacagcaagacccccctggatgtgggtgctctgtgctctgatcacagccttgcttctgggggtcacagacatcaaggagggacctgtgccctgctccacatcctcccacctgccgcccgcagagcctgcagg

SEQ ID NO: 612179 - DNA, 50 bp, Homo sapiens
ctgaaagtggaggctgcgaaaatagtcactcagcctctgaagaagcttcg

SEQ ID NO: 612180 - DNA, 88 bp, Homo sapiens
gggccctggatgagggggaagggcctcaaagccagaaggaaggtgggagtcaatcattttgacaagtctcctgaaaggaacagctagc

SEQ ID NO: 612181 - DNA, 103 bp, Homo sapiens
tggttcgtaagctaaaagctgaaaaatcccctaaggctctcaaaattagagagatgtgtaattgtccaccactgtctaatccagaccctcgattactattcaa

SEQ ID NO: 612182 - DNA, 75 bp, Homo sapiens
atcgtctcgtagtccgacgcctggggcgatggatccgtttacggaggtgactccccggacagctcaacaccaaag

SEQ ID NO: 612183 - DNA, 100 bp, Homo sapiens
cttctgaaaacatttttgaaaagacaagccatcaaaactgccttcagaagcaaaagacttataagctagcaattacagatttaactacagctatcagcat

SEQ ID NO: 612184 - DNA, 98 bp, Homo sapiens
ccttctctactcactgtactgctttgaatatcgttggttcaataaaggatctagtttgaagcactaagaagaataagacatcagtttgaaaagaggct

SEQ ID NO: 612185 - DNA, 83 bp, Homo sapiens
ctgcctcccccaccaccgcctcatctgtatcctaatacacagctggttatattctgggcactaaatgaaggcgtttctaggca

SEQ ID NO: 612186 - DNA, 100 bp, Homo sapiens
ttccgtgcagctcacggagaagcgaatggacaaaggaccccctcccaggcctcagctccgggcgacgtggagtggggcggtcctggcgggccgagatgcc

SEQ ID NO: 612187 - DNA, 87 bp, Homo sapiens
gcgtcccgccaccggccgcttctgtcctcgatgccttcaattaagttgcagagttctgatggagagatatttgaagttgatgtggaa

SEQ ID NO: 612188 - DNA, 83 bp, Homo sapiens
ttcctacttcctttccgtgcataagaagccgaatggggacatcacccagaagggctatgaaaagaaaaggtccaaactcctat

SEQ ID NO: 612189 - DNA, 82 bp, Homo sapiens
gaagaagattttaatattgcactaggagtttttgctttagctggactaacagatttgaacatccagtcatggataaaaatga

SEQ ID NO: 612190 - DNA, 75 bp, Homo sapiens
cagcagagacggtcaccaagccccagggaccgcctggcccggtgcaccatgcattgcaacgacaaagccaaagat

SEQ ID NO: 612191 - DNA, 83 bp, Homo sapiens
cgaaaggaagcaagcagttcagaagagccaaggaataaacatgcaatgaacccaaaaggcttgttatcactggaatcaaaggg

SEQ ID NO: 612192 - DNA, 90 bp, Homo sapiens
gtccgggccagcataggtgctgggttcatttaccctttggtcggaacgcaatcagccatgactgcctttgcactgtccatgctctcagcc

SEQ ID NO: 612193 - DNA, 85 bp, Homo sapiens
atctatcccattgatcttaggaggaggtgatgtacttatgttacaaggagaacatcatgcgcctctccagccttcacaaggaccg

SEQ ID NO: 612194 - DNA, 96 bp, Homo sapiens
gaggttctctggatcaagtcctgaagaaagctggaagaattcctgaacaaattttaggaaaagttagcattgctgaccgagcacatagaattgggc

SEQ ID NO: 612195 - DNA, 102 bp, Homo sapiens
ttgtctcttatattgaaatatataataattacatatatgatctattggaagaggtgccgtttgatcccataaaacccaactggtgccgacaagaaagccgag

SEQ ID NO: 612196 - DNA, 82 bp, Homo sapiens
ggaacacgagcgagattcctctggttctggtgggaacccagggtttgatctgtggatgaaatgaatcatgattttcaagctc

SEQ ID NO: 612197 - DNA, 82 bp, Homo sapiens
ttgaagtgaagattgtcagcaaaggaagagatggagtaatcaagtcagaggattatatgacttttatctgcctagagaagaa

SEQ ID NO: 612198 - DNA, 110 bp, Homo sapiens
ctctgtgtgagggaaagaaaacaatttctcctgctctgcagcttctgttcagcctttgtttagtaccagtcactcttttactttccaattgttctaaggctgatgtagat

SEQ ID NO: 612199 - DNA, 74 bp, Homo sapiens
tgtcaaccgattctattcagtaccaccttcagatggaggataagaatggacgggactttgaacatgtcggggat

SEQ ID NO: 612200 - DNA, 100 bp, Homo sapiens
caccatgagctggggcaccgagctctggtttctgtgtttgaagaacatacgcaccttcctgaaagtctgccacgataaatttggattaaggaacagcgag

SEQ ID NO: 612201 - DNA, 74 bp, Homo sapiens
gcgaacagtctcgttgctgcctctgtgtacgctgaggggggagctacaccaaaattgcattgagccaaacttgc

SEQ ID NO: 612202 - DNA, 90 bp, Homo sapiens
agcagatttcccaagagcagcggaaaatgatccagtcacaggtgcagtcagcctcagtttccaaagccggaaaaggatcctctagtagcc

SEQ ID NO: 612203 - DNA, 75 bp, Homo sapiens
gaagcccctggtgctggagatgctgaaggtctggggagtaaaatacaatggaaatggttcaaaaattgtgtctgt

SEQ ID NO: 612204 - DNA, 90 bp, Homo sapiens
gggagagcgagaaagagcgcgagcgagcgaggcctgggccttgcctgagctttgggacccccgcccctggcttctcctccatgctgtatg

SEQ ID NO: 612205 - DNA, 75 bp, Homo sapiens
caaaaccagttaccactaatcttaagaagagttatagatagtagtatgaaaaacttcaaagcattttttcggtgg

SEQ ID NO: 612206 - DNA, 50 bp, Homo sapiens
gccaggctctctggaggccaggagatggtcagcccaaggccaaccccact

SEQ ID NO: 612207 - DNA, 82 bp, Homo sapiens
gagaaattccagtccaagtatgagccccggagccacatgatggacgtccaggttggcaaggccacaggcttcctcaagaact

SEQ ID NO: 612208 - DNA, 80 bp, Homo sapiens
ggacatcagccccaaacaggacgaaggcgtgctgaaggtcgcctgcgaggccgctggccaggcctgagcctctgccacca

SEQ ID NO: 612209 - DNA, 96 bp, Homo sapiens
ctgtgagtcttctggcaaacagtgtttgcctctggttcagctcatacaacagcttcttaggcaccgcctagaatccttcgatctcgcttcaggaag

SEQ ID NO: 612210 - DNA, 95 bp, Homo sapiens
tgtatgtccaccacagttactttatcccttcatctgtggatgggcaggttgagcaatgtttaaagcgtttgaaaaacatgaatttggagggctca

SEQ ID NO: 612211 - DNA, 75 bp, Homo sapiens
gccaagttccccaacggctccccgtcgtcctggtgctgcagcggaccgcagctgaatgcacagctagaaggttgg

SEQ ID NO: 612212 - DNA, 50 bp, Homo sapiens
atcgagccaggagatatgttgttacagacgcaaacatgcagatctttgtg

SEQ ID NO: 612213 - DNA, 74 bp, Homo sapiens
ggagcctgagcgggaggtgcgagatgtctctgcccacccacgcaacccagactatgaagagtccggtgaaagca

SEQ ID NO: 612214 - DNA, 83 bp, Homo sapiens
agggacagcacctcatcccctggatgggggaccacaagatcctcatcgacagccatccgggtgacctgcataggttcctgcgg

SEQ ID NO: 612215 - DNA, 100 bp, Homo sapiens
gatcggtgggtttatctcaaggcctgagtagccggtaacaaacgagggttcccgggattggaccgacgcagccatggtgctttactccatgaactgtcta

SEQ ID NO: 612216 - DNA, 98 bp, Homo sapiens
accgactgggggcaacttggcacttagaaccgcagcagggacgtcggtttgctatcgggactcggcgaggacgctgagcttcagtcattgtctattcc

SEQ ID NO: 612217 - DNA, 98 bp, Homo sapiens
gcagatgtccttcctcttccgcctcatcaacatcatccacgtgcagacgctgacccaggcaccacctgtaatctactatgtccctgacttcatctcca

SEQ ID NO: 612218 - DNA, 50 bp, Homo sapiens
gccgccgcccgccgcacccatgagaactcccccactggaaaggattctga

SEQ ID NO: 612219 - DNA, 100 bp, Homo sapiens
agagtgtgccagacgttcctgtaaaagaggacaccaacagtgtggtggagaaagcaatggatgaaatcaaatcccaagcaaagccttctagacaagctca

SEQ ID NO: 612220 - DNA, 90 bp, Homo sapiens
tgcgttccctgtgcgccggaagtgatcccctgcgtggctgggctgctcgggttagatcgtcaggtttatgatgataaagactacaggaga

SEQ ID NO: 612221 - DNA, 90 bp, Homo sapiens
cggtggtaacgacggcctcagcaggcggggaagatgaaagggttgctcaagaaacagatgtgagagcccagattcgtctgcaatttcgtg

SEQ ID NO: 612222 - DNA, 100 bp, Homo sapiens
ccaaagcagtcgtaagaagaggtcccaatcccccactctttccgccctaatggaggtctccagtttcgaacaagaggaaagtatggggaaggagccaagc

SEQ ID NO: 612223 - DNA, 100 bp, Homo sapiens
cctaccgtgggcgtggcatcgccaagcaccttgccaagggtgagcttgtcggccacagactgctacattgtgcatgagatctacaatggggagaatgccc

SEQ ID NO: 612224 - DNA, 100 bp, Homo sapiens
gacgggtttagcggcagcctcttcggttggtcaaagaaaaagtgatgtatgaaaaagaggcaaaacaacaagaagaaaagattgaaaaaatgagagctga

SEQ ID NO: 612225 - DNA, 75 bp, Homo sapiens
caatgaggcagccagcggatcttggggtggcattgtgtgtcccagagtgccggagcgagtcccagaagagaggcg

SEQ ID NO: 612226 - DNA, 50 bp, Homo sapiens
gccacttacctgactggggaactgacgggaaatgggtcctgatgaatatg

SEQ ID NO: 612227 - DNA, 100 bp, Homo sapiens
caggaaaatttgaccctgctaaattggatcaaatagagagcgttatcacggcgacttcggtcgcgatgagggcccagcgagcgagccggacgaggcgctg

SEQ ID NO: 612228 - DNA, 100 bp, Homo sapiens
gatctggcccaacgatggcgagggcgccttccatggagacgcagatgatgggaaatattgcagcagttgcagcttcctgtgccaataatgttccagctcc

SEQ ID NO: 612229 - DNA, 75 bp, Homo sapiens
cgcctggcctgcgcgccgctgcccgcgccacagtgtactaatggtcacttgatgtgcgctggctgttttatccac

SEQ ID NO: 612230 - DNA, 100 bp, Homo sapiens
ggcggcggcgctttcggcgcgggcccgggccccgagcgcccgaacagggcagctgcaatgactctccgcacggtattattgtcattgcaagcactattgg

SEQ ID NO: 612231 - DNA, 97 bp, Homo sapiens
ctccgtcgccgccgtcagagccgccctatcaggtccttttggtgtgaaccatggggtggaacttcactcagatgtgatagagtatgcaaagcagaaa

SEQ ID NO: 612232 - DNA, 100 bp, Homo sapiens
ttctagggctggttcccgtcatcttcgggagccgtggagtttcatccaggatcgagcagggcgaatggggggggaggcacccgagctggccctggacccg

SEQ ID NO: 612233 - DNA, 82 bp, Homo sapiens
ccccgccccgccccggcctcggcccgccgggcccgcagtgtgacggagtctggctctgtcaccctgtctggagtgcggtaac

SEQ ID NO: 612234 - DNA, 75 bp, Homo sapiens
ccacaatgtgcctttgcaggggagcctgagagccacagtttaaagttcctgctgcaacaagtgcaattattacca

SEQ ID NO: 612235 - DNA, 75 bp, Homo sapiens
caattgatcccaagttgtcgacgaccgacagggtggtgaaagtttcaacgaaccaaacttttaaatggaccggga

SEQ ID NO: 612236 - DNA, 82 bp, Homo sapiens
tggctgcggccgccctgggccgggccccaccggacggagccttcacgtaaatgggtccagtcatgcctcccagtaagaagcc

SEQ ID NO: 612237 - DNA, 90 bp, Homo sapiens
gcccaggcccatcttttcccagctgtacctggaagctgagcagcagcttgccgctctagaagggatacagcaggccaggagcgatttcac

SEQ ID NO: 612238 - DNA, 90 bp, Homo sapiens
acagcaagacccctgaggagagcaatggccaatgtacatggtggactatgccggcctgaacgtgcagctcccgggacctcttaattacta

SEQ ID NO: 612239 - DNA, 98 bp, Homo sapiens
agacccgacagaggctgctacgcaccgtcaagaaggagaaataacatctgctttgctgccgagctcagaggagaccccagacccctcccgcagccaga

SEQ ID NO: 612240 - DNA, 90 bp, Homo sapiens
cggctgcagcctggatgggaagttcaagtttactgcgaagtccacccagcgttccggaggggacggcaaaacagaacagaaaggcggaga

SEQ ID NO: 612241 - DNA, 101 bp, Homo sapiens
gcacatttgacttggaagcaatgtttgaacaaactcgaagaacagctgtggaaagaagttgcaaaacactgggttttgaacgaagaatgtgatcagaactg

SEQ ID NO: 612242 - DNA, 100 bp, Homo sapiens
ccaggaaggggtggccatcactttctgcctcaaggaattccggtacttcatcctgctcctcatcatctttctgctggagatcatcgctggtatcctcgcc

SEQ ID NO: 612243 - DNA, 89 bp, Homo sapiens
cttttaccatgaatagttctactccttctacagatcacgagctgctcaggcaagagctgaacacgcggtttctggtgcagagcgccgag

SEQ ID NO: 612244 - DNA, 100 bp, Homo sapiens
tctgcatgtcatctggtcctacctaattgcacggattgctttgaaagccttgatcaggggaaagtctcttgcatggcaccaagaatgttaccaattcaag

SEQ ID NO: 612245 - DNA, 100 bp, Homo sapiens
ccggcccgggcgagcgggtgcgtctgccgcagagtcggcacctgaaggacatggaggcctgaccttcataagaagacccagagtaaacacagcctcgctg

SEQ ID NO: 612246 - DNA, 100 bp, Homo sapiens
tgagcgacgcagaagacgggtgatttctgcatttccatctgagcacaatcctggaggaagagaaggctcagcaagaagagcgcatgaggatggagtccag

SEQ ID NO: 612247 - DNA, 90 bp, Homo sapiens
gcagcccccagcaccaccagcgcccccccgcttcctccacggaatgttggcaaagacatgccttgaattggaacgctacctacagacgga

SEQ ID NO: 612248 - DNA, 88 bp, Homo sapiens
gaggatcctgtcattaaaagattcctggcctgggacaaagatctgagggtgtcggacaagtatctcctggctatggtcatagcgtatt

SEQ ID NO: 612249 - DNA, 83 bp, Homo sapiens
cagaaatcacccaggataacccctccagcggcaaagccaggctctccccagcatggacaccacgttgctgaaaacatgctttg

SEQ ID NO: 612250 - DNA, 82 bp, Homo sapiens
aaaaactccaggctcagagaggttaaggaactcgtcctacgtaacacagccagttaggtgcccgtggttgacacgagctgtg

SEQ ID NO: 612251 - DNA, 89 bp, Homo sapiens
gaagaggagagctggcctggggggcagcatgaggtgctggagaatctggtaaaagcaccattgtgaagcagatgaggatcctgcatgtt

SEQ ID NO: 612252 - DNA, 75 bp, Homo sapiens
tgaatacccggaggtcttcccaagcagggacccaatgattctcgcatgctggttgctttaggagaatgttacgag

SEQ ID NO: 612253 - DNA, 149 bp, Homo sapiens
agtacccacttatgaaacagatatatcctctacacaacttcagagcatatataagagagagaaactctatgaatatttggattcaagatgtgaaataatcagcgatgggaaaatgcagctttataggaaacactcatgtgttactctcc

SEQ ID NO: 612254 - DNA, 75 bp, Homo sapiens
tgcatgggtcggtgggcggggcccagatgtgagaagggtgttatgtctctagtgaatgtcaggaactgtattcgc

SEQ ID NO: 612255 - DNA, 74 bp, Homo sapiens
ccaccacggagttccggtacaagctcctgcgggccggcgggggcgaagctgtgctcaggcccgggctggacgca

SEQ ID NO: 612256 - DNA, 51 bp, Homo sapiens
ccatgcttcccgtacagctgtggaaccgaatccatgggaaagagctatgat

SEQ ID NO: 612257 - DNA, 101 bp, Homo sapiens
ctccaaagtagctgagactacagatctttaatctcatgaagtacgacagctacagccgcttcttaaagtctgacttgtttttaaaacacaagcgaaccgag

SEQ ID NO: 612258 - DNA, 75 bp, Homo sapiens
aaagtggaacagctttgttcagacacagacagcaattctgaggattctgggaatccatcaacaactaggtttaca

SEQ ID NO: 612259 - DNA, 75 bp, Homo sapiens
cttttgtggtagaccgtctaagagaagagcccagcattacatcaacatgcccgtgcagttcaaaccgaagtccgc

SEQ ID NO: 612260 - DNA, 88 bp, Homo sapiens
gacgaagaggagaaacaagctatgtactctagcactgacacgtttacccacttgaaacagtgcagtgcaaagccaagtttcatgcccc

SEQ ID NO: 612261 - DNA, 95 bp, Homo sapiens
atccagttgcaagcagtttgtgaccggagggaagaagatgacaagagcacctcaaaggcagcagcctcaaggagcagccatggccccagacttgt

SEQ ID NO: 612262 - DNA, 100 bp, Homo sapiens
cgcctcaactgccgcctcgcctactcactctggagccggctggctgctggcgggatggacaccctggaggaggtgacttgggccaatgggagcacagcgc

SEQ ID NO: 612263 - DNA, 98 bp, Homo sapiens
ttgattgatatatatgctgacgaggagttcaaccagatagtcaaagaggttggtcaactggcagaaacccaacgcttcgaatgcaccacgcaccagcc

SEQ ID NO: 612264 - DNA, 100 bp, Homo sapiens
gccacattccagcttccagggcaccagatcctttctctgctactgtagatgctgttgatgatgccattccaagcttaaatcctttcctcacaaaaagtag

SEQ ID NO: 612265 - DNA, 75 bp, Homo sapiens
caacatggcggaacgcaggagacacaagaagcggatccagctttctcctctaaatcttggtctcttgtttggaag

SEQ ID NO: 612266 - DNA, 100 bp, Homo sapiens
cgcttgtccactgtccgccagacctgctgctgcttcaatgtccgcatcgcaaccaccgccctggccatctaccatgtgggaacccgagcgtcatgttagg

SEQ ID NO: 612267 - DNA, 90 bp, Homo sapiens
cggagtctgaggggttcgggcttgtcaggttctagattattcttggagaaaccctgtctgtttactgtaaccttttgcactcaaattcct

SEQ ID NO: 612268 - DNA, 82 bp, Homo sapiens
tgaccatggctccctgcagtaccctttaacgacctagaggatcaagacataatgggagcatttttagacaagccaaagatgg

SEQ ID NO: 612269 - DNA, 100 bp, Homo sapiens
ctcacccgcggccaaggcgcctgcgtgcaggagtctgacgcctccgctccccatgctgcaggtcctggtgaacgccatcatcaacagtggtccccgggag

SEQ ID NO: 612270 - DNA, 75 bp, Homo sapiens
atggcatccctgagaggtggtgactgagactagatgcgggtgcagagagctcagaaatatgctcagcaagtcttg

SEQ ID NO: 612271 - DNA, 82 bp, Homo sapiens
gccaggaaggactcaccgaggcgcaggggctggaggtggtgctggggcagcccctgtcaaagggaacaggaagcagtccacg

SEQ ID NO: 612272 - DNA, 76 bp, Homo sapiens
ggctgagggactcacagctgatgacctgctgctcgtgctgatctcaggaagttcatcagcagaggaaatggtcact

SEQ ID NO: 612273 - DNA, 75 bp, Homo sapiens
gcagacgaggcctgaggcggcggcgcgaggcaggcagtttcccagctacctcgagacggtgacaaaggacatcct

SEQ ID NO: 612274 - DNA, 83 bp, Homo sapiens
gggccatcgctgccgtctttcacacactgatagacactggccaaaagaagaccctagacaagaaagatggaagacgaatgtct

SEQ ID NO: 612275 - DNA, 75 bp, Homo sapiens
tttcacagcagtcttaaagtttgcagcagaagaacttcttcatgactggttacctccctttgggttttgaatttg

SEQ ID NO: 612276 - DNA, 82 bp, Homo sapiens
agccacctcgcgcgcgcctccaggagcaaggatggagaggctgggaaagaatcatgtgatgtacagctttatataaagagac

SEQ ID NO: 612277 - DNA, 100 bp, Homo sapiens
ctcatccgtggttgtatcaggacttatggaggagatgttaaagtaacccatcttgcaggacgacattgaagattggtcttctgttgatctaagatgatta

SEQ ID NO: 612278 - DNA, 75 bp, Homo sapiens
cattagtgcctgtagtagaaagccttgtctatcttcagacacaaaaggatttgaatttgttgaaatgagcagtcg

SEQ ID NO: 612279 - DNA, 100 bp, Homo sapiens
caggctggtacggaggagactgcatgccagcaaaccctctgctttgctccaccgcccgctaccactgcaagaacggcctctgtattgacaagagcttcat

SEQ ID NO: 612280 - DNA, 89 bp, Homo sapiens
tcagttccttgtggagccggagctgggcgcggattcgccgaggcaccgaggcactcagaggagctgaccacagtggccgagaagtcgcg

SEQ ID NO: 612281 - DNA, 130 bp, Homo sapiens
agcgcgggtcggagtctgggggttcgcgcccgccgacccgcgccctgctccctctcagcacctgggcggacgacaatgcagatcttcgtgaagactctgactggtaagaccatcaccctcgaggttgagc

SEQ ID NO: 612282 - DNA, 74 bp, Homo sapiens
ctacagcgccgcggggcccaggccgggagccgaccggcacagcagggctcattgtcatccccaagccaggccag

SEQ ID NO: 612283 - DNA, 101 bp, Homo sapiens
aaccagaatctctccaaagaaattcctcaaacagaatttcacacagggtattccatggagaatgagtgcaccaattccagctggacatcactgtgaaaatg

SEQ ID NO: 612284 - DNA, 95 bp, Homo sapiens
gaaaatttcgatattgaagtgtcaaaatccatagatggaaaagatgggtggttctcttcccaaagtggaagccaaattcatcaattatgtgaaga

SEQ ID NO: 612285 - DNA, 100 bp, Homo sapiens
aaatgaactagttaaacatggtctgcgtgccttaagagagacgcttcctgcagaacaggacctgactacaaagtctattatcctcccagtccacaacgct

SEQ ID NO: 612286 - DNA, 74 bp, Homo sapiens
gttggttgagaacttcagtaactttaccaacagaatgggtgctgataagactgtgaaaggcccagatggactga

SEQ ID NO: 612287 - DNA, 100 bp, Homo sapiens
atctcccacaggaagtgtcacacagcagtcaagtatgtcccaaacgtctgctgagggtaaaaagctgggattggtaggctgggtccagaacactgaccgg

SEQ ID NO: 612288 - DNA, 82 bp, Homo sapiens
tctgcagctgtcaggagcgggtcaggtttctgagtcccttcaacatgatcctgggaggaatcgtggtggtgctggtgttcac

SEQ ID NO: 612289 - DNA, 100 bp, Homo sapiens
ggcttcctagtgagtcggcggctgatttagaaggaggttcaggctacggtgagccgaaggtgttgctgcctatgttggctggcaaagctcctcaattctc

SEQ ID NO: 612290 - DNA, 113 bp, Homo sapiens
tggataagcacaaagtcaagagacagcgattggacagaatttgtgaagtgtggtttattgacaatcatttacaatgccgaagagtgctgtagtgagccagcacagtgggtaac

SEQ ID NO: 612291 - DNA, 75 bp, Homo sapiens
ctttgaagtgggagcccagttggaagcccgggaccgtttaaaaaactgatcatggaagggaagtggttgctgtgt

SEQ ID NO: 612292 - DNA, 82 bp, Homo sapiens
tccgttgcctgctcccggagggagacgcgctgccgaggagaacccagcgggtttactcctggcttgggggcattaggaagca

SEQ ID NO: 612293 - DNA, 100 bp, Homo sapiens
cgtcgacatgagtgatgtggaggaaaacaacttcgagggcagagtgttttattccaaacgtctatgctgctttgttcactgcagctcttgttcctttgac

SEQ ID NO: 612294 - DNA, 50 bp, Homo sapiens
acacgagaacccccataaataatcttcgtcctcagaatggttggaatgac

SEQ ID NO: 612295 - DNA, 100 bp, Homo sapiens
cataatatggaatgttcttaacccagaagtagctgaatgtgttactccattgctgaggagtggccgcagctttgctggggccgtgagcccccaggaggag

SEQ ID NO: 612296 - DNA, 83 bp, Homo sapiens
cgaggctatggaccctgccactgtcgagcagagtctcactgtcgcccaggctgcagtgcagtggtgccatcacgcgtcactgc

SEQ ID NO: 612297 - DNA, 50 bp, Homo sapiens
ggttaccagaggaagagctaagcagatcagccagtagacatgatgagcat

SEQ ID NO: 612298 - DNA, 100 bp, Homo sapiens
cccagccaccatgagcaccaagcagatcacttgcagcttatcaaatatggagttattagcactaacgttctgattgaagatctcctcaactggaataact

SEQ ID NO: 612299 - DNA, 90 bp, Homo sapiens
ggaataaaaacagagtccgatgaaaggaatgggtctgggaccttaacagggagccatgatagcagtcctttcccctcatcaattccacat

SEQ ID NO: 612300 - DNA, 90 bp, Homo sapiens
atcaacttttcaactgtcaactcttctgcaggcttcagatccaagcagttggttaataataaaggcaaactgtccttggaagaattcatc

SEQ ID NO: 612301 - DNA, 76 bp, Homo sapiens
gctctggctgtgctgcgcgacccccgcgcatggttgaagctccattcataccaaagtttagaggctctggagatac

SEQ ID NO: 612302 - DNA, 101 bp, Homo sapiens
acttctgttgggacaggccttgcatcctgtgctgccaactccatcaatcaggtccttatcttgcttccctgccattggacagctctctactttcccagcca

SEQ ID NO: 612303 - DNA, 98 bp, Homo sapiens
gaagtgccctggggagaagagagaagacgccggccaggcccctgtgcagccactgtatgatgctgcttaccttacaatgtacaatatctgcttcacat

SEQ ID NO: 612304 - DNA, 75 bp, Homo sapiens
cgcggacgggttgtgcctggaggtggaggggaaggaagaattcctttggctaccggaagaaaagggaggagaagt

SEQ ID NO: 612305 - DNA, 110 bp, Homo sapiens
tgctggaagaagtctcaaaaagctcccgactaggtcttcatcctccaggtccacctttagcaagacctattctcccccgagaacgaggtgctttggatagaattgttgaa

SEQ ID NO: 612306 - DNA, 75 bp, Homo sapiens
cccaggtctccgtgcagcccaacttccagcaggacaaggtcaagggattggttccaaaataatcaaaaaggtggc

SEQ ID NO: 612307 - DNA, 78 bp, Homo sapiens
tatttatgaccttttctatggaaaggaaacacttcaagttgaagaagatgatcgacctgagttaccatggtggaaatg

SEQ ID NO: 612308 - DNA, 100 bp, Homo sapiens
agcgggagccgtccggaggacctgggacaccgcggaagtcgggaaatggtcagggaagtcaaagatgcatccctgagttcttcctagcaggcaagcagcc

SEQ ID NO: 612309 - DNA, 90 bp, Homo sapiens
gctgcttcgacttgcgtgtgatgttgatcaggtgacataccgcgtagtccaggtgactgatggtcagctggacggccagggcgacacagc

SEQ ID NO: 612310 - DNA, 100 bp, Homo sapiens
atgccgtgggcatgggccgcgctgagcaggtcatctttgtccgagctgctggaaacgcgttctgccaggctgcacagctgcacctgcagctccagagcaa

SEQ ID NO: 612311 - DNA, 50 bp, Homo sapiens
caaacatcgacgccatcgacaagcgctgtcaaagctcgaaaaacagcagc

SEQ ID NO: 612312 - DNA, 98 bp, Homo sapiens
atgaagagatgttacccagtatcttggtgttgctgaagagcttgatcatgatttaaaacatgctcacgaactccgccaggctgcattcaagctctatg

SEQ ID NO: 612313 - DNA, 102 bp, Homo sapiens
ccgcgcgtgcgggattccggcgccgctctccgagctcgatccgctgctcgcacgggagccagctgggtggtacctggaatggaaacacaaaagtagccataa

SEQ ID NO: 612314 - DNA, 102 bp, Homo sapiens
cagcgagactccgtgggcgtaggaccctccgagccagagggagacgatggactgagctgatccgcaccatggagtctcgggtcttactgagaacattctgtt

SEQ ID NO: 612315 - DNA, 99 bp, Homo sapiens
gtcccagctcttcgcgcccctgggagggaggtgggaggctctaggctccaagacgccgtcgcttgaggtagctacagcaagctgggtagcaggcagatc

SEQ ID NO: 612316 - DNA, 98 bp, Homo sapiens
ctttgaagagatcgactacaaggagatcgaggtggaagagctatttgaactgctgggacctgaaggacttgaacttattgagaaactcctccagaaca

SEQ ID NO: 612317 - DNA, 75 bp, Homo sapiens
cgacatgtatgggccagaaaaggccctgaagcgccagagctcgttgggcctttccttctttaacagcatcttggc

SEQ ID NO: 612318 - DNA, 98 bp, Homo sapiens
gggaaggaagatccggcgcggggcacaggatccggagctggagcccccagcccgagaccgaggacgagaagaagcgctttgaggaaggcaaagggcgg

SEQ ID NO: 612319 - DNA, 83 bp, Homo sapiens
ctaaagaggatcctgccaacattttacaggtgtgagttcttgatacgaatgaaaggccaagagtttgttgatgagattcaagg

SEQ ID NO: 612320 - DNA, 75 bp, Homo sapiens
agggcctgcagcgggagctggacggcgagcgcgagcggcgcgagaaagccaacgtggaacctgttgtgccgtcag

SEQ ID NO: 612321 - DNA, 75 bp, Homo sapiens
tttgcatttcgttagctttctggattatatcaatgactgcaagcacctattatgtctgatcccccaggaaagcag

SEQ ID NO: 612322 - DNA, 75 bp, Homo sapiens
gtgctgtgcgcgaggctcctcactgcagcgaaggaatggcttcctttgggtggaagaggaaaattggtgagaagg

SEQ ID NO: 612323 - DNA, 50 bp, Homo sapiens
caatccccctgcctgacagccacagtagagacggggtttcaccatgttag

SEQ ID NO: 612324 - DNA, 82 bp, Homo sapiens
ggcgaacatgcgcttttgacacattggaggatgaccgagtgggagacagcagcaccagcggtggcagagaccccagacatca

SEQ ID NO: 612325 - DNA, 75 bp, Homo sapiens
ccgcagccaggagatggttcgggcctagcggagccgggactggagatgccatggacaatattaccaggcagaacc

SEQ ID NO: 612326 - DNA, 75 bp, Homo sapiens
tgtactactataatgggaaagcgcaaatctcctgttcccgttaactctgatgatagtcctcaacaaacttcaagg

SEQ ID NO: 612327 - DNA, 82 bp, Homo sapiens
gaagaggcgagtccggtctcaaaatggaggccaccagcttgggctccccacggagggcagcaagtgggacttggggaacccg

SEQ ID NO: 612328 - DNA, 83 bp, Homo sapiens
ctgagactttctccttcaagtacttggcagatcactctcttagcaggtggcaaagaaacacagcatgatgtttggaaatataa

SEQ ID NO: 612329 - DNA, 76 bp, Homo sapiens
caggtccagggcagaggaccaacatgggcattttgtttatgagcaagttttgggaggtgatcagcgatgagcacgg

SEQ ID NO: 612330 - DNA, 50 bp, Homo sapiens
attcgcctccatctgtaccatgggctaatttcatataccgagtatctttt

SEQ ID NO: 612331 - DNA, 90 bp, Homo sapiens
gaggaatatttggtccctggtcagtttctgctttgatcttggagaaattcattcaaggcttttggatcacagaccagttattcaaggtga

SEQ ID NO: 612332 - DNA, 100 bp, Homo sapiens
cgagttttgagcagcctcgggtttcccaccacctccaaatcatggaagacacacggcctgtccccaggcgcggctgccggccatgccctctgtctgcctc

SEQ ID NO: 612333 - DNA, 75 bp, Homo sapiens
ctcaagtcctggctcagcaagactctcgagcccatgctaatagctcgtcagcttgctaaaatccatgctattcat

SEQ ID NO: 612334 - DNA, 100 bp, Homo sapiens
cagcaatattcagtttccagaatcagcagctccggcagcagtgtcctgtgctgatggtgttggcaggaatacctccacgggcccattcccgagattctag

SEQ ID NO: 612335 - DNA, 90 bp, Homo sapiens
gccaacattccttctgtgtccctgtccaagcgagaggaaccctcaaaggctgagagtatcccacccacttcacagatgaagcaaactgag

SEQ ID NO: 612336 - DNA, 82 bp, Homo sapiens
caggcagagtgctgatgtgaaaaataccacgacaaaaccaccctagctgcttctgatgcttggaagatatcctctcagccac

SEQ ID NO: 612337 - DNA, 83 bp, Homo sapiens
cggggcccacgagccgtccttaccagaacatggtccaagacaattcctgggaaagttcagttcttctcaagtgagggttctga

SEQ ID NO: 612338 - DNA, 100 bp, Homo sapiens
tgtatggatcctgtacggcagcagtctgggaatgccaacacagaaaccttgccatcaggaatggctattcaagtggacaagttcaactttgagagtttcc

SEQ ID NO: 612339 - DNA, 49 bp, Homo sapiens
ggagctccggcagccgccctgatgccttcaattaagttgcagagttctg

SEQ ID NO: 612340 - DNA, 98 bp, Homo sapiens
ggaatttgtggctggctggatctctggtgagacatttttcttccttctgtcacatcacacccaatgttctgtggctcctgatggatctgagaagatgg

SEQ ID NO: 612341 - DNA, 100 bp, Homo sapiens
aaggatgatccagttggaccttttggacaggaaagtgtaacatcagttacagagatgccaaccctgtggtaattgagccatcatctgttttgaatggagg

SEQ ID NO: 612342 - DNA, 131 bp, Homo sapiens
gattgcagggaggagcatctgaggtggtcacggggtttgcccagctcacaccaactgcagaaatgtgatacctcaaagcacaaagtgctggtagtgtctgtgtgtcctcaatctttgccttattttgctgc

SEQ ID NO: 612343 - DNA, 83 bp, Homo sapiens
agcattagaagggctacccctaataaagcgactcattgagcagattggaattccaccagcccctcgtggagttcctcagattg

SEQ ID NO: 612344 - DNA, 98 bp, Homo sapiens
gtcagccgatgcaccgagtccagcccaggaaaatggagaggtctccattttgtcagcaatggagctcatctggaacctgtgtgagattctttttattg

SEQ ID NO: 612345 - DNA, 100 bp, Homo sapiens
gtggagagcgacccgtggccttgtgtttcagggagttgaccacatttggccatttcccagaagggccccaccccaagggtgagtggccaatggggagctg

SEQ ID NO: 612346 - DNA, 99 bp, Homo sapiens
agccatttcggtgtagaagtggcagcacggcaggtttgtggagaaaaacagcgctttgagaagttgatggaacatttcaggaatgaagacaataacata

SEQ ID NO: 612347 - DNA, 75 bp, Homo sapiens
tgtcaccttggctctcccacccaatggagatggctctaatggtttactggactcatgcgggtggtagacacgcat

SEQ ID NO: 612348 - DNA, 90 bp, Homo sapiens
agggtgattctgaagagggtctggaggagccttctcaagaacagagggaatgacagaggaagaggaagacaaacttctggcactgaaaga

SEQ ID NO: 612349 - DNA, 83 bp, Homo sapiens
caacgcctggctcggagcagcagcctctgagaatgttgtaccatctttgggtaggcagacttccctgacgacatcagtgatac

SEQ ID NO: 612350 - DNA, 88 bp, Homo sapiens
atttttcttaacagcaattgctttgaacatctcatacgactgctacagaactgcaagaattggcagagggggtcgatttgggaggaaa

SEQ ID NO: 612351 - DNA, 100 bp, Homo sapiens
ctcaccgcaacctccacctcccagggtagggctctacttcactgggcctgtgatcgaggacataaggaactagtcacagtgttgctgcaacatagagctg

SEQ ID NO: 612352 - DNA, 74 bp, Homo sapiens
gggtgctgggacttcccgtccgcggcgtggagggacctatatccagactttgcctgacactgcagggtccaaga

SEQ ID NO: 612353 - DNA, 90 bp, Homo sapiens
gaaaagcgagaccgcgtgcgaggaccggttgcttatggaaccacagagaacagtcccgtgacattcgcgcacttccctgaggacactgtg

SEQ ID NO: 612354 - DNA, 100 bp, Homo sapiens
ctttactttgcctcatttgaggagtgggaacaggcttcggcgaacacaaaggacccagatgatgtggtaccagttggccaaagaagagcctggtgttggt

SEQ ID NO: 612355 - DNA, 96 bp, Homo sapiens
tgggtgaatgtgacgtgaatcacgctacactggcggagaacgggctcgcacaacattctgaaattttttggttattgtaatgatgttgatcgggag

SEQ ID NO: 612356 - DNA, 100 bp, Homo sapiens
ggacggctgcgtcgcccgaggcgaggaggagcgctggcggactcacaccacccggcaagaactgctcactacggctccctgccccagaagtcacacggcc

SEQ ID NO: 612357 - DNA, 119 bp, Homo sapiens
gctgcagccccacactccgccgccaaactggaggagcgacggaagccagaccccaggagatgatcacagtcgtgttaaactgcaaaatgctgagaatgattatattaatgccagtttag

SEQ ID NO: 612358 - DNA, 90 bp, Homo sapiens
gcagagaggaaaaaacggctatctataataggtacatcaggaacgtctctatcaagaatacaatttcagcaaggctgagggccatctgaa

SEQ ID NO: 612359 - DNA, 101 bp, Homo sapiens
aggagttcccgtgcctgggtcaggagggcctggacaagatcctagaggccctagcacaaaacacagatcttaaagaacgcttacgcagaatccatgccgag

SEQ ID NO: 612360 - DNA, 75 bp, Homo sapiens
caaggagctaaagcagcgtgcgttcagccctgggatcttcgtgaagactctgactggtaagaccatcaccctcga

SEQ ID NO: 612361 - DNA, 80 bp, Homo sapiens
agcctcccgagcagctgggactacaggtgcccgccaccacacccaggtaaggggcctggataccaagaagtgactgctca

SEQ ID NO: 612362 - DNA, 100 bp, Homo sapiens
aagagggtctggaggagccttctcaagaacagaggagtgtacctcacagccttctaggatctccagagtggacaggaatctcacttggagggaccatgga

SEQ ID NO: 612363 - DNA, 101 bp, Homo sapiens
gggaatcaagagacccggtttctaatccctgctctgtcactaacaagctgcgtgatcttcgagacggtctcgccacattgcccagactggtctgaaagtct

SEQ ID NO: 612364 - DNA, 100 bp, Homo sapiens
aaatcatgtcaagcgaagccttgaaaaagctgccctgagacggtgtcccgccgaaagctgggcagatgctcaaactcaaatccaaaacattgctgcatct

SEQ ID NO: 612365 - DNA, 121 bp, Homo sapiens
gtgacctggccgatgaggaagtactgagcctgttggaggaactggcccggaaacaggaggacggggggccctcagcctcttggccttgaacgggctgttcatcttgattcacaaacacaac

SEQ ID NO: 612366 - DNA, 100 bp, Homo sapiens
aatctaatcaggaggttgctaacccagaacactatattaaacatcccctacagaacagtttccagagatgaatgatatgctgagagaaaaggtaactgga

SEQ ID NO: 612367 - DNA, 90 bp, Homo sapiens
ttttttattggctcattagaagctgcttttcaagaggccttctatgtgaaagcccgagatcaattcacagaagctgtgagtccttcagtg

SEQ ID NO: 612368 - DNA, 50 bp, Homo sapiens
ctcggattctcgtagctgtgccggccaatttaattcaggagatgaattct

SEQ ID NO: 612369 - DNA, 75 bp, Homo sapiens
cttctgccagctgatcctggaccccatcttcaaggtgccaagtcctgccctgccaacttcttggcagctgccgac

SEQ ID NO: 612370 - DNA, 50 bp, Homo sapiens
ccgccatacgcgctctccctgtttaggcgtgcaatggaattgagttttgc

SEQ ID NO: 612371 - DNA, 74 bp, Homo sapiens
agtgatggggaggcaccggcagctgtgacctctgcccaggtggttgacagagattctgaagaagccgagatcat

SEQ ID NO: 612372 - DNA, 100 bp, Homo sapiens
ttccggagaaggtgatccaagtagcctgtggtggagagcatactgtggttctcacggggtttctatcttactaaaggatatttcagaaaatctatattca

SEQ ID NO: 612373 - DNA, 100 bp, Homo sapiens
gaagttcacctgcacatcttgttttccctaacatcaagaatggtgtcatggagaaactccagctgggcccagagattctgcagcgggaaaatccaaggct

SEQ ID NO: 612374 - DNA, 82 bp, Homo sapiens
tttaaaggagcagccctggtgtcacctatcagtaaaagggggatatgagactttctactcggaatatcctgagtgttgcgtg

SEQ ID NO: 612375 - DNA, 100 bp, Homo sapiens
gctgatggtgatggagattttgatgtggatgatgccaaagttttattaggggcttgcttctgacatgtctgatgagcgcattcctgctgttgctcctggc

SEQ ID NO: 612376 - DNA, 85 bp, Homo sapiens
ctgtgaatgggaagttacgcgaagtccacccagcgtttctgaggtatctagaagagcagaagacagagaatggaaaagataagga

SEQ ID NO: 612377 - DNA, 100 bp, Homo sapiens
gtagaagaaatacgccacatttattctaccggggaagacagtgggtcttaggggaaaagccagagcttccagatggaggtgatgatgatgacattatagc

SEQ ID NO: 612378 - DNA, 50 bp, Homo sapiens
ccctagcatctaaacttaacaagcttggaatacacgaagactctcaaaat

SEQ ID NO: 612379 - DNA, 101 bp, Homo sapiens
ctgcgcgcggaaccgtgctgccccgccccgctccacccgtgagggtactccaaagattcaggtttactcacgtcatccagcagagaatggaaagtcaaatt

SEQ ID NO: 612380 - DNA, 75 bp, Homo sapiens
aggagattcaggatgaagttgctctctccttcctgcttcctccttgctgtggtggctgggatgcttcttccatga

SEQ ID NO: 612381 - DNA, 83 bp, Homo sapiens
atcaacgtagatggaaatgcaatttgtgctatagagtaaacgatgtatatgaaaatgatgatcagctcctgtgggaccctgag

SEQ ID NO: 612382 - DNA, 74 bp, Homo sapiens
cagcttctgcacacatgaccggaacaccatgaagaagacttctttctctacattgcctacagtgacgaaagtgt

SEQ ID NO: 612383 - DNA, 90 bp, Homo sapiens
ccgattcatcaaccatagctgtgacccaaattgtgaaatgcagaaatggtgctgttgatgggtaaaagtgggtctggtaagaccagcatg

SEQ ID NO: 612384 - DNA, 99 bp, Homo sapiens
cgttgctgaccgccgactgtcaatggagctggaaaacatcgtggccaacacggtcttgctgaaagccagggaagtttgcagaaaaaacttcagcatgtg

SEQ ID NO: 612385 - DNA, 101 bp, Homo sapiens
agcctcccgagtacctgagattagcccagccgtgttgaaatccttgtctcctgtagacccagtggaacccataagtaattcagaaccatcaatgaattcag

SEQ ID NO: 612386 - DNA, 75 bp, Homo sapiens
cgatgctggaggagctggagtgcggggcgcccggcgccaggggagccgccacagagagtggtttttcctcctgtc

SEQ ID NO: 612387 - DNA, 87 bp, Homo sapiens
accaggcgaagctggccgagcaggctgagcgatacgacggcgtctacggtgacgtgcagcgcgtgaagatcctgttcaataagaagg

SEQ ID NO: 612388 - DNA, 100 bp, Homo sapiens
gcggctgcagatggagatgaaggaggacgacgtttcttttctcatggcatatctcacagatttcctctgccagtttgctcagcagccctgctacataatg

SEQ ID NO: 612389 - DNA, 100 bp, Homo sapiens
taatggcaaaccagattctgtgggactccgaagagagaagggcacagttacctaagtatcaacgtaatcttcctcggccaggacaggcccccatcggtaa

SEQ ID NO: 612390 - DNA, 90 bp, Homo sapiens
cgctactggctgtgtgctgccacaggccccagcatcaagatctggttaagtgggcagaccaacatccacctcagcaaaaacttcttcctg

SEQ ID NO: 612391 - DNA, 100 bp, Homo sapiens
cggagtcaaaacaactcagtttgttccaaaacaatcttcctacatgccaggcatgccaggtggaatctctccatacccatccggataccctcccaatccc

SEQ ID NO: 612392 - DNA, 98 bp, Homo sapiens
caaaattctacgttagagagactgaaaagacatctaatttcattgctcggcaggagttaaagttcctcgtaattttcgcttgttggaagaacttgaag

SEQ ID NO: 612393 - DNA, 100 bp, Homo sapiens
ggagtctggttcttccgggccttctccagggacagctggtggagccatcgaagcccccacccacaggctgacagaggcaccgttcaccagagggctcaac

SEQ ID NO: 612394 - DNA, 96 bp, Homo sapiens
agtgtcgagaagaggtgctcaacatcacggccacagcagccagtgttggggctgctggcatcccccaggcgggtctggtcaccatggtcattgtgc

SEQ ID NO: 612395 - DNA, 75 bp, Homo sapiens
caagccagcacttcacctaccaggcaacatcgaaaccaaccataacctgccaccgtcgcacaaatctcgaaacaa

SEQ ID NO: 612396 - DNA, 83 bp, Homo sapiens
gctccggctccggcttctgctgttgctcttctccgccgcggcactgatccccacagtgaatttgctggacacgtcgaccatcc

SEQ ID NO: 612397 - DNA, 101 bp, Homo sapiens
aatggaaaaagatgaacttctgagttacataaagaagacctaaaactgatggctactaaaaagcagagcatttctggttgctgctgactcagccattctag

SEQ ID NO: 612398 - DNA, 74 bp, Homo sapiens
gggagatccacagctaagacgccaggacccactggaagcctagaaatggagcccagcagccggggccgccctat

SEQ ID NO: 612399 - DNA, 143 bp, Homo sapiens
tacattccaattcaagaggaggagaggggttgttttataaactgcctggccgaatcagccttttcacgctcaaggattggttgccgtggtctttactgcttttctccctgatgtgtgaaacaagcgccttctatgtgcctggg

SEQ ID NO: 612400 - DNA, 75 bp, Homo sapiens
tttttcttctagaagagtccaggtggacagtattggtaaaggttttcaaggtgtcatgaaaagatggggatttaa

SEQ ID NO: 612401 - DNA, 88 bp, Homo sapiens
gtccgcggcatccgtaaccacaaggaggacgagcagggagagcaacaagccccggccctcagagctcagccggatgagcgcagcccag

SEQ ID NO: 612402 - DNA, 82 bp, Homo sapiens
tgaaaaatacgaggaacttcttcagagtccttaaatgcactggaagaccaagatttagatgctctcatggcagatctggtag

SEQ ID NO: 612403 - DNA, 75 bp, Homo sapiens
ttgtgtccacccaagcccagggctgtgaacgtggctttcctcggctgccctttgacctttggacgccacctgtaa

SEQ ID NO: 612404 - DNA, 135 bp, Homo sapiens
aggtgatctggggaaccaaagactctgggactcttggtgccaacagagttactctccgtggatacagaaatctctgcaggcaagttgctccagagcatattgcaggacaagcctgtaacgaatagttaaattcac

SEQ ID NO: 612405 - DNA, 97 bp, Homo sapiens
atagtggagatgatccatttcaaggacttgctgctgcacgagcccgcgatgctcccagcccggtgagacctgcctgaatggcgggaagtgtgaagcg

SEQ ID NO: 612406 - DNA, 136 bp, Homo sapiens
ccattcacaaggcagctcgctctgggagcctagaatgcatcagtgcccttgtggcgaatggggctcacgtcgagtggataatattaatgcagctgtgatggatttgaaaaaaaagaagatccgcagtctaagtgaa

SEQ ID NO: 612407 - DNA, 83 bp, Homo sapiens
cgatgtttcccttggtcaaaagcgcactaaatcgtctccaaggcagttgtgaaaaacttcaggacaaaaatgtttcatttaag

SEQ ID NO: 612408 - DNA, 100 bp, Homo sapiens
ggaagctgctcagaatggtgcagatgagggaactgctctacattaatcatactcctccaccactgtccaagagtaaggagagagaaatggacaagaaaga

SEQ ID NO: 612409 - DNA, 99 bp, Homo sapiens
ccggctctgcgggcgccgccaggcccagaccaagaaaagaggcacagttagatgaagaaggacagtttcttgtcagaataatatatgatgactccaaaa

SEQ ID NO: 612410 - DNA, 97 bp, Homo sapiens
cggcgccaggagcccgtgcgcggcccgggcagccgcgctttcccagttggaattgtacagtatggagaaaacgtgacccatgagttcaacctcaata

SEQ ID NO: 612411 - DNA, 100 bp, Homo sapiens
cggggaaggagggaaagagctcccgcggttgccccattgcaaagtggatgctgaagttccgaacagtccatgggggcctgaggctcctgggaatccgccg

SEQ ID NO: 612412 - DNA, 75 bp, Homo sapiens
gtggaggtctggaaccagctgctaagccagaagcgcgtagacactatggacagcgtgaagcagagcgcggccctg

SEQ ID NO: 612413 - DNA, 98 bp, Homo sapiens
agttatccaggagccacaaagtgaggtggtaaattcactccagcagcaacctcaggctgcatccccttcagtaccagagccccactctttgactccag

SEQ ID NO: 612414 - DNA, 75 bp, Homo sapiens
tttgcctccacttagtgagcggaagaatggaactaagcgtcttgtagaaggaactattaatccaggagaaacctg

SEQ ID NO: 612415 - DNA, 100 bp, Homo sapiens
cttcaatactacctttatttccaccatagatccatatcatagattttgacgatgaaaacaacattataaataaaaatgtcctcctccatcaagcgggtga

SEQ ID NO: 612416 - DNA, 87 bp, Homo sapiens
tgtcggcttcaaagagaaaaggcaacatcctgtcacaggccatgctctggcaaaaacgagccaaccccctgcagaggaatgaaatgg

SEQ ID NO: 612417 - DNA, 100 bp, Homo sapiens
tgaagatcctggtgtcgccatgggccgccgccccgcccgttgccccacaccagtgagaagcatcagcaccgtgaacttgtctgagaatagcagtgttgtc

SEQ ID NO: 612418 - DNA, 75 bp, Homo sapiens
aaagaactggaaccagaagctgcagaagaagccctggagaatggaccaaaaggtcaaggtcagcatctcctcgac

SEQ ID NO: 612419 - DNA, 74 bp, Homo sapiens
atatgttcatgtatttccttcgaggcagcctcccctggcaaggactcaagatgtgtcgtggaggccgaatgttt

SEQ ID NO: 612420 - DNA, 83 bp, Homo sapiens
aaataaggacaaaagccaagaggaggacagttcgctacacagcaatgcatcgagaggtcatggaagaagtgacaacatgctcc

SEQ ID NO: 612421 - DNA, 128 bp, Homo sapiens
caggacttccccacctttactgagtgcttttgaagaagtaggacctgccctgctccgctacagaactactggacaggaactctcctgatgaatgcagtgtggccaaaggcgggaagatggtgggcagc

SEQ ID NO: 612422 - DNA, 98 bp, Homo sapiens
ttgagtcataatttgatgttgaatcagagagaacaactgtttgggcttatttgcctcagagtcaatgctgaggatcctcctatggttgtggtccgaaa

SEQ ID NO: 612423 - DNA, 98 bp, Homo sapiens
tatcctaccacattccttttcttgtaagttcaattgaagattttaaggatcacattccaagggaaactgatatgaagatcacattccagttcatagca

SEQ ID NO: 612424 - DNA, 100 bp, Homo sapiens
tttcccccctctggagacgggccggaacctcaagaaggaggtcagccgggtgctgtgcaagcggtgcgggcatccgcttcgatcctgaaattccgcaaac

SEQ ID NO: 612425 - DNA, 75 bp, Homo sapiens
gcctgggaagccaacgaccacacgcagccactcttcacctccaccatgagcctggacatccagagcctggacatc

SEQ ID NO: 612426 - DNA, 74 bp, Homo sapiens
gggatggacctccagatttccttactggttgacatcatggacatatgtgagtccatcctggagaggaagcggca

SEQ ID NO: 612427 - DNA, 90 bp, Homo sapiens
cagcagaccatagagctgaaggaagagtgcaaagactttgtggacacctctcttctagatcaagtcatgtgacaagttcttgccaatgaa

SEQ ID NO: 612428 - DNA, 100 bp, Homo sapiens
ctatccagacgctctggtcatactaaagaacacatctggaaggattatagctgagaaggtaaaggacgttctgtttatccgaccccggaagtatattcac

SEQ ID NO: 612429 - DNA, 109 bp, Homo sapiens
tgcggacgctcggtcccgcgctgcgcatccccgcggacgccacagcgctgttcatgatcaagagggcccaaggacggaagcgctttgggatgaagaattttaagaagag

SEQ ID NO: 612430 - DNA, 75 bp, Homo sapiens
gaagcctggaaacgaggcactcagttggaagagtccagcaagaaagaatcttcaagagggagacatagggaaaag

SEQ ID NO: 612431 - DNA, 109 bp, Homo sapiens
gaggacgcggcagcccgtggagtcggctgagggaaaagcgaggcaaggcaggcggttcaactagagagaaattgagaagaagcatccactgaagtatcacatggcttct

SEQ ID NO: 612432 - DNA, 100 bp, Homo sapiens
gagtgggcgcggaggcgaccgccatggcgttcctcaaactccgtgaccaggcacaacccgatctcccagagaaggagaagtgcctggcgtggactataac

SEQ ID NO: 612433 - DNA, 97 bp, Homo sapiens
ctcaagtcgacaggggatgggaccctaggtggtggagacactgccacttgctgtgccaaatggaacacggaggataaagtcagccatgtgagcactg

SEQ ID NO: 612434 - DNA, 100 bp, Homo sapiens
tggccccgagcgagcaaattcctactgtccggctgcgcggctaccgtggccgagctagatcttccatggtggcttattctaattcggcagaaagcattgg

SEQ ID NO: 612435 - DNA, 141 bp, Homo sapiens
accggcacaccgtggtgaagctggcccacacctatcaaagccccctgctctactgtgacctggagggcggcgactggcggcgcgatggacctgaccgggctcctgctggacgaagaaggcaccttctccctcgccggcttc

SEQ ID NO: 612436 - DNA, 88 bp, Homo sapiens
ggccaggaagtcggagtttgagccccggaggcagagcggctgccatgacatgtcatgctgcccaaggacatagccaagctggtcccta

SEQ ID NO: 612437 - DNA, 96 bp, Homo sapiens
ctggagctgtgagctctgctacttcaagtaccaggtcctggcgatcagcaccaagaacccactgcagccagaagtcattggatctgtgtcactttc

SEQ ID NO: 612438 - DNA, 76 bp, Homo sapiens
cacgacttggctgaggaactgctgttgtgaaccttttgccctggtgggattattgctgagtcatcactagagagtg

SEQ ID NO: 612439 - DNA, 74 bp, Homo sapiens
gcggcccctggagatgattgagccgcgcacgctacagtacaaggttgaaaaacattttagagacgtggaaagcc

SEQ ID NO: 612440 - DNA, 74 bp, Homo sapiens
ccgaccccaagtgcggggacctccggcgaataaagccaagggaagagatggtgttgagtggaaaatacaaatct

SEQ ID NO: 612441 - DNA, 100 bp, Homo sapiens
tggaaaaatggaaacctacatcaaattggaaaagcttggagagtgtttggtgtataaaacagaccaagctcaagatgtaaagaagattgagaaattccac

SEQ ID NO: 612442 - DNA, 75 bp, Homo sapiens
ctcctcgccagcagccgtccggagccagccaacgagcgtgcacttgccggcggtcccaacccagcaggagaagtg

SEQ ID NO: 612443 - DNA, 90 bp, Homo sapiens
cagggaggagaccggcacccagacaggtggcgacggcagaggagagtacgaccccagcaaagcgacctttgtgaaggtggtgccaacccc

SEQ ID NO: 612444 - DNA, 74 bp, Homo sapiens
ttacaagaggctaccaaagaattccaggatgaccggaaagaagggatgaccgcgtttgtggaaaagagaaaggc

SEQ ID NO: 612445 - DNA, 75 bp, Homo sapiens
ggcgatcaaggccaagtatccgccagtcaataggaagtacgagtatctacggaatccagaggcagcattgtctcc

SEQ ID NO: 612446 - DNA, 86 bp, Homo sapiens
ccgctgcatctgtgaggtccaggaggaaaatgacttcatgattcagtcccttaagctcctaggatttttagatgttgaaaatactc

SEQ ID NO: 612447 - DNA, 82 bp, Homo sapiens
tcaaagaagaaagcactgacttggccaggtcaaggtgtatattatgatgtaatcatagcctcctggtgtcgcacatccatgg

SEQ ID NO: 612448 - DNA, 75 bp, Homo sapiens
tgcttcctgctgctctgtctcagcgccgcctccctgcttcttaacagagatgcccgagtggtaaaagacatggca

SEQ ID NO: 612449 - DNA, 90 bp, Homo sapiens
gtaccgggcgcgggcagagcgcggcggcgcgggtggttgctgtatatggaactttatctgatttgctttctgtggccagcagtaaactcg

SEQ ID NO: 612450 - DNA, 73 bp, Homo sapiens
cctgactaaagcttgaaatgctacatttccaaggttcgagcacttggagggctgctgaagttcctgggtcgaa

SEQ ID NO: 612451 - DNA, 73 bp, Homo sapiens
ccatgaatgaggagtacgacgtgatcgtgctgggcaccggcctgacggtttaactatagatcaacacatcatc

SEQ ID NO: 612452 - DNA, 75 bp, Homo sapiens
agcgcttcctgcagaaggccgagaagctctacccactgccctcggcccgcgaacattgacatcaccaatttcagc

SEQ ID NO: 612453 - DNA, 100 bp, Homo sapiens
gtgtttgataaacatccagggatctatttgtttttagtccatcccaatgaaatggtgctgattggacatatctcaaagaagatgaacaaacagactttcc

SEQ ID NO: 612454 - DNA, 100 bp, Homo sapiens
cagcactttgtggagaaagtcgtcttccacttgcacgaaagctttcctaggccaaaaagagacaatgcagatcttcgtgaagactctgactggtaagacc

SEQ ID NO: 612455 - DNA, 90 bp, Homo sapiens
ctcgttgggcgccggtgtcctggcctcttcctcagagaatggggagaaggaacccccgacaacactactctgggttcagtatttcctggc

SEQ ID NO: 612456 - DNA, 75 bp, Homo sapiens
ttgggatcctttatcctggtcatcttctatttccaaaggaaggatggagacgctgaaggataagaccctgcagga

SEQ ID NO: 612457 - DNA, 51 bp, Homo sapiens
acaggagaggctgcttcttgtagagtggacagaggactgcagaaaatcaac

SEQ ID NO: 612458 - DNA, 98 bp, Homo sapiens
tgaaatcagagatccttcggaagcggcagctggtggaggacaggaacctgctggtgaatgtgaaagatgttgcagaagtgttccagaagtggctgaag

SEQ ID NO: 612459 - DNA, 100 bp, Homo sapiens
aacagcccaatctcctttctgggcaaacgttccaagccaaaagaatgcaatggtgtaaagattccagttgatgccagtaaacctaatccaaatgatgtgg

SEQ ID NO: 612460 - DNA, 100 bp, Homo sapiens
ggaatatgccaaggaaaaactggagagcttcatcaaaaatagtgatagctttgataaaacggaaagatgctgaaggatgggagaccgttcagagaggaag

SEQ ID NO: 612461 - DNA, 100 bp, Homo sapiens
agcggctacgacctgaaactctacgaggataaccagacagtccctgacaggctggatgaaatgagatccccatgtagcaattgccatggaaacctgtgac

SEQ ID NO: 612462 - DNA, 80 bp, Homo sapiens
ctggcgagacctcacctgcatggacttccactatgagaatattatccagcaatgcaaatgaacaaactataactacacac

SEQ ID NO: 612463 - DNA, 83 bp, Homo sapiens
gagaacagttcattgaagctatcactgtcagtgctgtgaggacccttggagggctgctaaaatgatcaagggttacatgcagc

SEQ ID NO: 612464 - DNA, 95 bp, Homo sapiens
atggacccgccaaatccagaggaggtgaaaacgcctgaagaagagatggagtttcactgtgtcagccaggatggtctcgatctcctgacctcgtg

SEQ ID NO: 612465 - DNA, 90 bp, Homo sapiens
gtgcctacactacttaagtatggaacagacatgaaagatcagatgtcaacttcatctgtgcaggcattagctgaaagaaaaaatagacag

SEQ ID NO: 612466 - DNA, 51 bp, Homo sapiens
ccgagaggaaataggcccggcaggtctgtaaccagtgatgaaggatccatg

SEQ ID NO: 612467 - DNA, 90 bp, Homo sapiens
cagcaatggcggaaggagaagatgtgccgccgctgccaacgtcgagcggcgacggctgtgggaaagaagcctaaggaataaagtcatctc

SEQ ID NO: 612468 - DNA, 98 bp, Homo sapiens
ttctgcttccagaacctcggaggcggggtcatattgaacattccagatacctatcattactcgatgctgttgataacagcaagatggctttgaactca

SEQ ID NO: 612469 - DNA, 90 bp, Homo sapiens
gttgagattgcccgagaagtgaccccagcaaaagaaaaatattgctgtacctaaattcaagtggtcttcaagctgacagagaagctgacg

SEQ ID NO: 612470 - DNA, 100 bp, Homo sapiens
ctgccacaatgggacatgtgcaagacatccaggcctgctcggccgcctggaaggctgacggcgtgtgctccaccgtggccggcagtcggccagagaacgt

SEQ ID NO: 612471 - DNA, 75 bp, Homo sapiens
ggagtcagaggcctgggcgcagctctggactctgcgtataacaacattcactactttcactgcctaagaatcctg

SEQ ID NO: 612472 - DNA, 98 bp, Homo sapiens
acagtaaatacccactatttctccatcgatgaggagctggtctatgaaaaatccccttggaaaggacttccagaactgaccaatgagaatgcccagta

SEQ ID NO: 612473 - DNA, 50 bp, Homo sapiens
agctggacgtttgccgtccactctgaggaatcagagatcattgatttctt

SEQ ID NO: 612474 - DNA, 73 bp, Homo sapiens
aggagtccacagaagcctacttcgaagttcccggggcttccaggggaggagaaatacgaatgtgctttaaagc

SEQ ID NO: 612475 - DNA, 75 bp, Homo sapiens
tggagaagaggctgttaaagaagcatgagggtgtgctggagtatctgtctgccttcgatgaagaaaccacggaag

SEQ ID NO: 612476 - DNA, 100 bp, Homo sapiens
ggattttgctcttcacattatttttgcaacaggagccttgttagatgacttggataaagaactaaacaactacattatgcgatgtagagaatggtatggc

SEQ ID NO: 612477 - DNA, 100 bp, Homo sapiens
tttggaccatggagattctgcagttgttgctctaggagctgaaaccagtgggtagatgtcgttctgaaacgcagggccgttgctccagggagaactgcaa

SEQ ID NO: 612478 - DNA, 90 bp, Homo sapiens
agtgctacttcatgacatcatccataccaaggagacgctgacacttgtgtttgaatatgtgactctccagaaagagcaacagtaatggag

SEQ ID NO: 612479 - DNA, 82 bp, Homo sapiens
caagaagacgtccaatctgagcgtgctgcggacggcgctgcggtacatccaggctgaccaactgactgaagagcagattgca

SEQ ID NO: 612480 - DNA, 73 bp, Homo sapiens
gaaagctgatgccacttcttcccaagacagtgaattagaaactgacgacaacagtggagacttggacccagga

SEQ ID NO: 612481 - DNA, 100 bp, Homo sapiens
tgtagaattggcaaagttattgccagcttcctggatgaagcctgctgggagcgtgaatgacatggccctggatgccttcgacttggaccggatgaagcag

SEQ ID NO: 612482 - DNA, 75 bp, Homo sapiens
gaagaggtcccaatcccccactctttccgccctaatggaggtctccagtttcgttcaggacaaagaggtgtgggc

SEQ ID NO: 612483 - DNA, 75 bp, Homo sapiens
acccaacagagatctcttctgttctccactgctaggttgtctatcaaaaagaatgtcgtatgagctattgagaaa

SEQ ID NO: 612484 - DNA, 50 bp, Homo sapiens
cgccgcgctccggtacacacagggtcagaaaggggctccaggacccaaag

SEQ ID NO: 612485 - DNA, 98 bp, Homo sapiens
aggtcctgctgctcattagtttccgcctcgagccgggcacgatggcagtggcagcaccatgatgcaaaccaagaccttctcctcttcctcctcatcca

SEQ ID NO: 612486 - DNA, 76 bp, Homo sapiens
aggaattacgggaacagaaagaaaagtccgaaagagctgaacccagtgacttgattgtaaaaatttacagagcgga

SEQ ID NO: 612487 - DNA, 75 bp, Homo sapiens
agaaagctcttgagtttattccttcagaccagcaggtaattttggtagctggcagtgttgtgatggcttttgaag

SEQ ID NO: 612488 - DNA, 82 bp, Homo sapiens
atcgggtggagtgtaggtcatatcgccgcgcagcccctgtcaaagggaacaggaagcagtccacggagggtgacgccctaga

SEQ ID NO: 612489 - DNA, 90 bp, Homo sapiens
ccctggctccctcattaccgtcgccagcggagcgaacccgagagcgtggagcgggctgggccagtattggtaaaggttttcaaggtgtca

SEQ ID NO: 612490 - DNA, 90 bp, Homo sapiens
atgaggctgtaggctccttcaacccgtggctgatagctgaaagcatcttcatgatacagttaagaggaatcttgacagcgccacttcccc

SEQ ID NO: 612491 - DNA, 100 bp, Homo sapiens
gctaagtgttcgctacgcggggctaccggatcggtcggaaatgaattttgatttggctgctgggctgctaccttgaaatccaagccctaaaaatgccagc

SEQ ID NO: 612492 - DNA, 100 bp, Homo sapiens
gccgcccaaaggaaaaagtggttctggaaaagcggggaaagcatgcaactgccacggccatgccagcaactgttactatgatccagatgttgagcggcag

SEQ ID NO: 612493 - DNA, 122 bp, Homo sapiens
tgtattgcaatcatggtgcagaaataccagtccccagtgagggtgtacaaatacccctttgaattaattatggctgaatccaggtaaaaatggcttgtctaatagctgcattttgttagata

SEQ ID NO: 612494 - DNA, 100 bp, Homo sapiens
gcctggtctgcatgggcagccgaccaaggggactatgactgtccaagtgcctccaaagtgtacaaagcatcagattcagcagaagcaattgaggcttttc

SEQ ID NO: 612495 - DNA, 75 bp, Homo sapiens
gcccttggcctcctcctgctgctactgtgtccagcgcaggaggctgaaccgtctgagcccagaagtgctgaggtg

SEQ ID NO: 612496 - DNA, 98 bp, Homo sapiens
cagcgtcgccaaggagagtatcccgctgttcacctacgggcctgatcaaacttgccttcctgttctccaagaccagatcttagcaaagcaatgtctca

SEQ ID NO: 612497 - DNA, 83 bp, Homo sapiens
gccgcagcctctcggcgctgctgctgctgctgcagacggccgaagccctgcagcccacgctacagccggagatgcagctcgag

SEQ ID NO: 612498 - DNA, 75 bp, Homo sapiens
cagacagaacagttaatcctcaatttaagcctgatctaacccctagaaacaggggcgagaggtcaatgatcttaa

SEQ ID NO: 612499 - DNA, 50 bp, Homo sapiens
tctaccatggcctttcctggccccaggccccggagaggcccctggtgggt

SEQ ID NO: 612500 - DNA, 50 bp, Homo sapiens
tgtccacccgccggccggaccaggattcactccttctccagttgcacagc

SEQ ID NO: 612501 - DNA, 75 bp, Homo sapiens
agaggcagcaggtgtaggagggaaagaacttgtattccaaacagctgcactgggtgttcaacagccatcactcct

SEQ ID NO: 612502 - DNA, 88 bp, Homo sapiens
cctgcgcggccccgctgagcctcggtgcggcggcgagcgcggtcgagatcgccatgcctacccactattcagactatgaagacagttc

SEQ ID NO: 612503 - DNA, 50 bp, Homo sapiens
caatgctgatatagtcacctttgcacagccagagaacaacacatcacaca

SEQ ID NO: 612504 - DNA, 100 bp, Homo sapiens
caacaatgctggcttggcccggcctgacaccctgctctcaggcagcaccagtggttggaaggacatgttcaatatggactctcgtcctgtcacccaggct

SEQ ID NO: 612505 - DNA, 51 bp, Homo sapiens
aggttattctgggccggtaccaggagtctcgctctcagtcaaaatctccaa

SEQ ID NO: 612506 - DNA, 97 bp, Homo sapiens
cctgcacctggtcaatgagttcctttatgttctcatcgtgctcatgaagcacctgagccagtggaggtaccccctgaactatgtcatgggattcaag

SEQ ID NO: 612507 - DNA, 83 bp, Homo sapiens
aaggagctgcagcagcatgtaaagtcagtgacagccccatgtgtatgcaacagcgttattgcaacaggctaacgaaaacagac

SEQ ID NO: 612508 - DNA, 75 bp, Homo sapiens
taccattgctggaagcgtgctaggtgcatacatttcttttggggtacaaatctattgtcaagtacaagacagctt

SEQ ID NO: 612509 - DNA, 89 bp, Homo sapiens
gggaggtctgggccgcagcgggaccccagttcctccgccaagcgcggccgccgcccccgcctcagaattcctagaggacctgtgcaaca

SEQ ID NO: 612510 - DNA, 90 bp, Homo sapiens
gtgacccgcttcatgatcgagtgtgacatgtgccaggactggtttcatggcaggaggcaagtgaggcctatctggttggcctttttgaag

SEQ ID NO: 612511 - DNA, 100 bp, Homo sapiens
cggccacctctgagaagggagacgacgctgctgggtccgctgagcggggcgacccgagcgaatgctgatgtcttaaaggcgatggtagcagataacagcc

SEQ ID NO: 612512 - DNA, 83 bp, Homo sapiens
cgcttctctcctgcagtccgcctctgggccctgccgacatggaagagaaggtgagaagttgtgaaacgctgaggctccagccc

SEQ ID NO: 612513 - DNA, 102 bp, Homo sapiens
gaaaacctaaccatgaagacttgaacttaatacagcaagaaagaccatcaagtttaccagttggcagtggcaatgacccctggtcagcctggagtgcctcca

SEQ ID NO: 612514 - DNA, 100 bp, Homo sapiens
ctgcaagaccgcgaggcgagacctcttttacagaatgtctgaaggggacagtgtgggagaatccgtccatgggaaaccttcggtggtgtacagatttttc

SEQ ID NO: 612515 - DNA, 83 bp, Homo sapiens
ccatatcataagtggaattttggagatattcaaaggactgccctacatttggcctgtgccactggccaaccggaaatggtaca

SEQ ID NO: 612516 - DNA, 50 bp, Homo sapiens
acctttccctttatttccggaggtcagtcatatcatttggatcaaaaaat

SEQ ID NO: 612517 - DNA, 96 bp, Homo sapiens
gagcaaaatgatttatgccagctccaaggacgccatcaagaagaagctgacagggattgtcaatgaggcagatcagattccgatttgacgggcaac

SEQ ID NO: 612518 - DNA, 74 bp, Homo sapiens
cggcggaagcgagggcctgtggagtcggatcctcttcggggtgagccagcttttcctccgcaaccatgtctgac

SEQ ID NO: 612519 - DNA, 100 bp, Homo sapiens
aggaggtgcagctcaacttctaccagttcctcggggtgcagcaggtaaaataccatgaagattttgaaaaaacaaaggggagaggctttactcccgtcgt

SEQ ID NO: 612520 - DNA, 98 bp, Homo sapiens
cagatatgcctgctaacatggataagcatgccctgaaaaagtatcgtcgagaagcctatcatcgattccggtctggacctcctggagaagaggcccaa

SEQ ID NO: 612521 - DNA, 100 bp, Homo sapiens
cttgtgcctggtcacttccgctcccaggatccttgagatgcatcctttcctgagccagtcacctaaggtcctgcgagtacaagggtcgacccccaaaggc

SEQ ID NO: 612522 - DNA, 98 bp, Homo sapiens
gaacctgcccgtctcccctcctccatcagacacacctgcctaggaaacagagttcacatgagactctgaatatagtggaggagaagaagcgggcagag

SEQ ID NO: 612523 - DNA, 76 bp, Homo sapiens
gtcagtcctgcaactggcctgtctgaagtaccctcacctcatcaccaagggctctacggtatttaatggggcccag

SEQ ID NO: 612524 - DNA, 75 bp, Homo sapiens
ggaagctctagaggcgttttttggccaagggacccaacatgagtgaagtttcctgcaagaaacgggacgactatt

SEQ ID NO: 612525 - DNA, 51 bp, Homo sapiens
cagcagccgtccggagccagccaacgagcgatgtcatggcacccccagtac

SEQ ID NO: 612526 - DNA, 102 bp, Homo sapiens
atctccatcacccaccaacaacaccacaataatccacagccaaggaacaagttccagttccagtctaccacccaacacctagccagactcggctagcaactc

SEQ ID NO: 612527 - DNA, 98 bp, Homo sapiens
ccaggacatcctggaagctgggaaaagggatcgcccggagcccacacccgtcctccgctctgcatttccctacgacgtccatcctaccccagacggcc

SEQ ID NO: 612528 - DNA, 50 bp, Homo sapiens
aaagattttgcatctagaggaattgaaagagtgaacatggaaaggtttgc

SEQ ID NO: 612529 - DNA, 51 bp, Homo sapiens
ctgccttccattgtgaagtctatcttggcatatacagaagggctgcatgga

SEQ ID NO: 612530 - DNA, 87 bp, Homo sapiens
agaaacctaagaaggaagcaaatcaggccccgagtctgggaggggctgaacgtggtgaagacaggccgagtgatgcttggggagacc

SEQ ID NO: 612531 - DNA, 83 bp, Homo sapiens
tggttttacacatgatgatggatacatgatctgttgtgacaaatgcaggtaagaccatgaattatggcatttcttaaatgaag

SEQ ID NO: 612532 - DNA, 75 bp, Homo sapiens
caagaatctccagtttttgacgggggccattcagcaactgggtggggtgtcaccacagtgatggcagtggaggac

SEQ ID NO: 612533 - DNA, 75 bp, Homo sapiens
gagtggggtgtcggcgcctcattcgggtggagctgagccggagacagcctttatcctcctcttctacctcgtttt

SEQ ID NO: 612534 - DNA, 75 bp, Homo sapiens
accattcttcagagggcaatgaaggcacagaaatggaagtaccagcagaaggttcggatctgaagctcctgcctt

SEQ ID NO: 612535 - DNA, 98 bp, Homo sapiens
ggtttgagtccgcatcgccacagctgaaggctgcgagggactaagagcagaaacaaaatccagtctcatagcagaggagaatataatgtttacagcac

SEQ ID NO: 612536 - DNA, 100 bp, Homo sapiens
gaagggatacccttccatttcaaagaacagaatgctaaggaagctgtggcaaagaactcaatttcctgtatctactgagtctcaaaaaccccggcagaaa

SEQ ID NO: 612537 - DNA, 82 bp, Homo sapiens
cctccccttggaccgagccgatcgccgcggggcagttcgggccggctgtcctggcgcggagtcctggcaaaataagcatgca

SEQ ID NO: 612538 - DNA, 100 bp, Homo sapiens
ccatcaccactgtaacggtgccaactccaatttaccaaactagcagtggacagtataatatgaagagaaggctactaaagacttggaacgatacaatagt

SEQ ID NO: 612539 - DNA, 83 bp, Homo sapiens
gtgggacgccagtcaccagcaggagcagccaaccagcagcagccatcatggaggcgcatattaaatttcctattgactacccc

SEQ ID NO: 612540 - DNA, 50 bp, Homo sapiens
gtgttcagtctgacactcatacagcggccaagaaggcagtgtggctggag

SEQ ID NO: 612541 - DNA, 75 bp, Homo sapiens
gcctgaaaagtcgcagcgagctggagccgccggagaatgtagaagcgaggcctggaggtgaagcagccatcttcc

SEQ ID NO: 612542 - DNA, 74 bp, Homo sapiens
ggctgcccgggtcttctacctgctcctggaggctccaggaagaaaagcgccagcgagacctggactgggaccgg

SEQ ID NO: 612543 - DNA, 110 bp, Homo sapiens
ctagtcactctttccagtggagacatgcgtagggctctgaacattttgcagaatatgcttttaaggctattaaccagggtggccttacatcagtagctgtcagagggaaa

SEQ ID NO: 612544 - DNA, 89 bp, Homo sapiens
cttggtgcggcgagccgagcgaggcagctctgagccgcgcggctctgacgcccgctctgcggcttcggtgtttgaacaggccacagtcc

SEQ ID NO: 612545 - DNA, 98 bp, Homo sapiens
aaatctcgcccaaacaggaaagcaactgcatgtccagccagacgaagaacgtggtcagcggcgtgctgtttggcaccggcctgtgggtggccctcatc

SEQ ID NO: 612546 - DNA, 100 bp, Homo sapiens
gagcaggagcgattccgtcgccaaacaggagattcctgtcaacgtccgattctgcctcgaaggcatggaggagtcaggctctgagggcctagacgagctg

SEQ ID NO: 612547 - DNA, 75 bp, Homo sapiens
gaaaaactgattgactgggctggcgttaactgtgcggaggcaggcaagctctttttggagaccatgttaagaaac

SEQ ID NO: 612548 - DNA, 50 bp, Homo sapiens
gagaaacctggatctgcgatctgtttgtgttgtggaagctgatcgaggaa

SEQ ID NO: 612549 - DNA, 110 bp, Homo sapiens
gagcccagtatgggaaagatctaccttctggaagctactactacgtggtgcttggaaagcaaaatgatgcttcaacacccaggccaggtctctgcctcggaagtgagtgc

SEQ ID NO: 612550 - DNA, 104 bp, Homo sapiens
tgaaaatgctgttcgccaaaatggacagctggtcagaaatgattctctgcgaggattaaatccaccacacagggtgaaatctatctccatgacaacattcacac

SEQ ID NO: 612551 - DNA, 75 bp, Homo sapiens
ccaccattcttcagagggcaatgaaggcacagaaatggaagtaccagcagaagatcaccgcacagcagatcacca

SEQ ID NO: 612552 - DNA, 100 bp, Homo sapiens
cgcccagttgtctggcatctcttcactgaaactattacagttagatctcatctctatgggtggaagttgctgccaaacaaggtgaatccgacccagagag

SEQ ID NO: 612553 - DNA, 100 bp, Homo sapiens
agccgtcaacagcctggtcaatttgtacctgcaggcctcctacacctacctctctctggtctcctctgagcctccggcctccataagacccaaaacagat

SEQ ID NO: 612554 - DNA, 82 bp, Homo sapiens
cgatgactgtgaaggagttcaggcagctggccaacagtggcaagtggataatattaatgcagctgtgatggatttgaaaaaa

SEQ ID NO: 612555 - DNA, 100 bp, Homo sapiens
cggagtgggccgcttcaagaccaagaatcagagatcattgatttcttcctgggggcctctctcaaggatgaggttttgaagattatgccagtgcagaagc

SEQ ID NO: 612556 - DNA, 100 bp, Homo sapiens
cagttgtatgtgtagaaagtgaaatcagaggagatgtaactatcggcctcccagaagttcctgccgaatcgtcttcgtcacccccggggtccgaggtagc

SEQ ID NO: 612557 - DNA, 83 bp, Homo sapiens
ttcttcatgacgctgacagcaacgatctgaaagtcattatcatctcggacaatgcagatcttcgtgaagactctgactggtaa

SEQ ID NO: 612558 - DNA, 100 bp, Homo sapiens
aggaaaaactggagagcttcatcaaaaatagtgatagctttgataagtttcagcagagcagctttaccatttgggctggtgaggcgagaattatcctgtg

SEQ ID NO: 612559 - DNA, 75 bp, Homo sapiens
taccggcttctgctttacgacaggtgccttagctggaccaattattgtggagccacatgtcacagcagtatgggg

SEQ ID NO: 612560 - DNA, 82 bp, Homo sapiens
agcgcccaccatgccccggcagctcagcgcggcggccgcgctcttcgcgtccctggccggctttggtatcaggatgatgctg

SEQ ID NO: 612561 - DNA, 98 bp, Homo sapiens
cctacgtgaaacacttggtaaaactggttctgggaaatctttctggggtgttatatgaacttcccaccaacacacagtggtgcttcgatattcagtgg

SEQ ID NO: 612562 - DNA, 100 bp, Homo sapiens
cgaaacctggaggcccggggggcccagctcccgtagggagccgtgggcgctcggtgcccgggccgggcagccaccccacgtcatgctgcagcgccgcaga

SEQ ID NO: 612563 - DNA, 100 bp, Homo sapiens
tctgacacgttctcacctcgcgggatggcagctgctgatttgtcccatgggcaccagtgtcttgtcacctggactccacataggactaattattatactg

SEQ ID NO: 612564 - DNA, 96 bp, Homo sapiens
acaaaagatggctacgagggtaacatgttcgccttccttgaatccagaagctggcaaacagcatcagccatgcagacctattgggacaccttctgg

SEQ ID NO: 612565 - DNA, 75 bp, Homo sapiens
caaaggtggctaaggacctcaacccaggagttaaaaaggtcgccactgggacactgtgaaccaggagtgagtcgg

SEQ ID NO: 612566 - DNA, 100 bp, Homo sapiens
cagattcgcagtggtcgcttcttctccttgacttctgcctggtgtcgaaggtggtgggcagatgccgggcctccatgcctaggtggtggtacaatgtcac

SEQ ID NO: 612567 - DNA, 75 bp, Homo sapiens
gttttgaagagttctgcgttttgccagtcacctctcaactgtgtgccaaaggttctaaatgagaagaaacttcaa

SEQ ID NO: 612568 - DNA, 100 bp, Homo sapiens
cacaacccggccatcgaggccctgctgcacgacctcagctcccagaggatcaccagcgtgggaggcctagaaggagagccagagtgcgatcagaaaacca

SEQ ID NO: 612569 - DNA, 90 bp, Homo sapiens
gtacgatgaacagggggcagaatacatcgattgcatcagcaatgtggcgcacgtatttgataggtacaagagttacagcccttatgacat

SEQ ID NO: 612570 - DNA, 112 bp, Homo sapiens
cgcctctcagcgccccgcccttccccctgtctctgccctcctggcgggcccggcggctctcactatccaggtgcaactgacatgggtgaaccccagggatccatgcggattc

SEQ ID NO: 612571 - DNA, 75 bp, Homo sapiens
cccgtacgtcactaccactgtctctgctcacagtgccaaggtgtgacactggctacattgggaaaaactgtgagt

SEQ ID NO: 612572 - DNA, 100 bp, Homo sapiens
tactgtattatcaccaccccagatgacctggaggggaaaaatgaggactcagtggaactgctggtgttggatgcctgtgaggagccaccaacatttgaag

SEQ ID NO: 612573 - DNA, 95 bp, Homo sapiens
tttaggatccttttccactgtatttggagaagaatggaaagagaagactgatagagacttcgttaaggtcactgatatgatgcttcaggacaaac

SEQ ID NO: 612574 - DNA, 83 bp, Homo sapiens
caaacactaacttgtttccctgggaatttggaggtgggttcgaaaaagtgatttgaagatattaaagctagaaattggaacta

SEQ ID NO: 612575 - DNA, 83 bp, Homo sapiens
ggtgggtactacacaaccgtctccagccttggtctgagtggactgtcctgcagtgcctccggagccagcgtggtggccataga

SEQ ID NO: 612576 - DNA, 82 bp, Homo sapiens
cacggaggtcagaggggaggaggactctggagctgacagcgcgcacttcacccgcagttgggttttggccaaattgggcgag

SEQ ID NO: 612577 - DNA, 98 bp, Homo sapiens
tctcccctcctctcacggcacctcccaccatgaaggtaaatattgcagattttcaagagaatcagtgggtgacttgtttccaggagtctgctgaagct

SEQ ID NO: 612578 - DNA, 83 bp, Homo sapiens
agaacctggaagacagaggctggagagccaatgaagagattgctcaggttcgaacaaaagcaaaggctgagagtgcagctctc

SEQ ID NO: 612579 - DNA, 75 bp, Homo sapiens
tggggcagcatgaagtgcctggtcacgggcggcaacgtgaagggttgcctgcaggagggaaggcggtgaacacag

SEQ ID NO: 612580 - DNA, 75 bp, Homo sapiens
acctccggtacaatagaattaaagcgcttccttctgggattggagctcaccagagtcgtaagaaagcagtgggag

SEQ ID NO: 612581 - DNA, 90 bp, Homo sapiens
gattttgacaacttcatcagctgcttggtcaggctggacgccatgttccgtggtggtgctcaccaacacccccctggaggaccagctgcg

SEQ ID NO: 612582 - DNA, 97 bp, Homo sapiens
ttgagatgatggacgccaaggcgaggcaggactgtgtcaaggagatcggcctcttgaagctatcagttgagggatttgcagttgataaaatggctgg

SEQ ID NO: 612583 - DNA, 100 bp, Homo sapiens
acagagtgaaagtgatccataaacttacgtagtttattcgatcaacatgattggcccgccagccccggttttttgtagcatcagatccaacagttaaaac

SEQ ID NO: 612584 - DNA, 75 bp, Homo sapiens
tatgcttgttggaattggtgacaaaatcagaggcatactttatagggtgttgatgatgccttctatacattagtt

SEQ ID NO: 612585 - DNA, 51 bp, Homo sapiens
gtcactcctggtgaccagcattcaagagcagctgcaggagccccaagtcac

SEQ ID NO: 612586 - DNA, 90 bp, Homo sapiens
gttgaagatataaataaggataaaaacctggttcctgaagatgaggcaaatataggggcatcagcactgatagccattgggcgatacagc

SEQ ID NO: 612587 - DNA, 75 bp, Homo sapiens
aaatatcccgagatggacttggataagtgtttcctggctcagcccgtaacccttctggacatctatacacactgg

SEQ ID NO: 612588 - DNA, 75 bp, Homo sapiens
ggcaccaagtggaatattacaggtatgcggtgctttgtggtcagctggctgagcatgagagcatccagaggcgca

SEQ ID NO: 612589 - DNA, 100 bp, Homo sapiens
gtttcttggccgccatctgccaaggacctggttccagcccactcttctccctgctgcctgggtatcgtggccaccccagtttccagtccttggtgagcaa

SEQ ID NO: 612590 - DNA, 100 bp, Homo sapiens
ctgcctctcgcccatcagcgcggcgctggccgagagccgcggctccgtgtttctggaaagtgacagcagccaaaagaatgcaatggtgtaaagattccag

SEQ ID NO: 612591 - DNA, 74 bp, Homo sapiens
ctgggactacaggcgtgcaccaccatccccagttgactgaaacctcctcccgttacgccaggaagatctccggt

SEQ ID NO: 612592 - DNA, 98 bp, Homo sapiens
tgggcagatgtaaagagaccggcaaagttcacgtgactgtggatctcaagtactaccggccaactgaagtgcctcatattcctgaagcccaacctgga

SEQ ID NO: 612593 - DNA, 96 bp, Homo sapiens
tttgttgatctgttcaccactcatttgcaacttatatcgccagtccagcagctaaggatattttgtgcaggttatgcaatggtctctgcaagatgg

SEQ ID NO: 612594 - DNA, 89 bp, Homo sapiens
ccggctcctgcctccaggccgctccccacggtggtgttagcacctcagcccatcccaggtgaaaggtgtagcagtcactcggcctacac

SEQ ID NO: 612595 - DNA, 75 bp, Homo sapiens
ggagaactcaaggtcttcatagaccagaaccttagtcccgggaaaggttgcccgaagctcagcagagagtcggag

SEQ ID NO: 612596 - DNA, 75 bp, Homo sapiens
attccggacacataacaagcagcagtgaggacaccaaaggctgaccaactgactgaagagcagattgcaggtgag

SEQ ID NO: 612597 - DNA, 73 bp, Homo sapiens
tccaatcttcgtgttcactttaagaagctgtctgtgggcaccctgaagaagctggggctagaacagtcgaagg

SEQ ID NO: 612598 - DNA, 149 bp, Homo sapiens
ggaggctgggcctctccaccctgggggagctgaaacagaacctgtccaggagctggcatgacgtgcaggtctctagcgcagtctgtagaagaggcgacaccagggcttccaaatgaacaaccgaaaggaagatatggaaatcacgtccc

SEQ ID NO: 612599 - DNA, 100 bp, Homo sapiens
gggaaagttcatgttgctgaaagctgtttggaagaaacaggtggcctgggagtagatattgtcctagatgctggaggttttaggagaagttttagcacaa

SEQ ID NO: 612600 - DNA, 96 bp, Homo sapiens
ccgccacccaaaccagtcaaaccagataggggccctgaaggactactaccacttctaccatagcaggacgattaaaaggtcagttatctcgagcag

SEQ ID NO: 612601 - DNA, 75 bp, Homo sapiens
cttccacgtcatccgcatcaacaagatgttgtcctgtgctggggctgacagaattggcagagggggtcgatttgg

SEQ ID NO: 612602 - DNA, 75 bp, Homo sapiens
cgctagtctgaccctccgccaggcaaaaggaaggacttgcaccttcgagatcccctgtgtttacccagctggagg

SEQ ID NO: 612603 - DNA, 100 bp, Homo sapiens
acagtcaacaaatggcacgcatgcgtcctatggacccttctacctggaatactctcttcttgcagaattgcttgcttccggcgtcatggctcaaagggcc

SEQ ID NO: 612604 - DNA, 75 bp, Homo sapiens
cctagaccggtttttagtccattgactatgcagcctaatgttgttgacctcctgtactggagagacattaagaag

SEQ ID NO: 612605 - DNA, 123 bp, Homo sapiens
tggaagaagctggggatgaaattgtgagcaatgccatctcctacgctctatacaaaggtgtcatggagaaactccagctgggcccagagattctgcagcgggaaaatccaaggcttatttatg

SEQ ID NO: 612606 - DNA, 73 bp, Homo sapiens
tcccacctggcgactcctatgggatgcagggcagcgtggaggaggaggatgaagaaggttataacgatggaga

SEQ ID NO: 612607 - DNA, 100 bp, Homo sapiens
ggggctcctggggctcctgagcctgctgcactcggccttcttcggggaccaggttgaagaagcctcagcggaggcgatacggcctcctcgccaacactga

SEQ ID NO: 612608 - DNA, 73 bp, Homo sapiens
aagtggctgtgtcctctcagtggcaagaaattcaaggtgagtgatgaaatggtagtggagctcattgagaaga

SEQ ID NO: 612609 - DNA, 100 bp, Homo sapiens
ggaaaagagccctggaatatgaagagacatgcgatggtagatcaacccccaggatttttacctcctataactccaccagaaaagttttttctttcccagc

SEQ ID NO: 612610 - DNA, 50 bp, Homo sapiens
ctcaacatctctcagagacgaaagagatggagtttcaccatgttggccag

SEQ ID NO: 612611 - DNA, 105 bp, Homo sapiens
cacggtggaagacgcgtgccgcggcgcctggttgcctgcagcggcccggacccgagaggtggtatggtcaggaaaaagactacaatgtactagtcatggatcttc

SEQ ID NO: 612612 - DNA, 100 bp, Homo sapiens
ccttcctcgaggcggtgtcccacctgccgcccttcttcgcaagacagatcggcttgccaaaggatcagaatgttaccaaaagagccttagtttaaatcct

SEQ ID NO: 612613 - DNA, 100 bp, Homo sapiens
aagatgccaccaatgtgggggatgaaggcgggtttgctcccaacatcctggagaataaagaaggaaatgctgacttttaacccacacaagcgaatctctg

SEQ ID NO: 612614 - DNA, 100 bp, Homo sapiens
aagccattgctccacaggttggcaatgtattggatacaaatgaccgatttctacgaaaaataaccatcgggcagggaaacacagagaagggccattaccg

SEQ ID NO: 612615 - DNA, 100 bp, Homo sapiens
ctgattggctcttcctcaatgcttgtgtgggtacttcgtactggatttcgaggctggcatcctgcagtattttgtgaatgagcaaagcaaacaccagaag

SEQ ID NO: 612616 - DNA, 100 bp, Homo sapiens
gttcccggacatgatcctctccgcctctcgaggccctccctatcctgaagacattagctgagagtctggcaccttttaaaggtctgatcatcaattgtct

SEQ ID NO: 612617 - DNA, 82 bp, Homo sapiens
aaaaagcagaaagtagatgaagatgagattcagaagatgcagtggagataagtaattaacatttcgaaacaggaaatgaaag

SEQ ID NO: 612618 - DNA, 90 bp, Homo sapiens
cgcggtggcctgagcccggccgccatcgatgaccccggtcgcggacttgcttcaggctggccaccccccttacatccggtgatcaaggct

SEQ ID NO: 612619 - DNA, 100 bp, Homo sapiens
ttatattccatctactgtctttttcttcaatgggcagcatatgaaagtggattatgggttacttcctcagaatgttggcctcctgtatgttggaggttat

SEQ ID NO: 612620 - DNA, 49 bp, Homo sapiens
ccacccctgggaggcagaagccagcccatcctgagcccttctatcctag

SEQ ID NO: 612621 - DNA, 129 bp, Homo sapiens
gacaatggcagcatctacaaccctgaagtgcttgatatcacagaggaaactctgcattctcgcttcctggaggagatgccccttgtccaggagttgccactgctgaagcttggggtgaattaccttccg

SEQ ID NO: 612622 - DNA, 80 bp, Homo sapiens
cggagacacattcccgtcagctggctgatccgcgctgaatgtatcctgtcaggtataatgtcagtgaatggcaagaaagt

SEQ ID NO: 612623 - DNA, 97 bp, Homo sapiens
actggcagccatggccaaagactcagaatctcggaggatgctcagaggggaccaacaaggcaccatggcgcagaagggccaactcagtgacgatgag

SEQ ID NO: 612624 - DNA, 74 bp, Homo sapiens
gagcgtcccggtgcggctgcacgtctcgcggatcatgctactgtatgaaaacaagggagaggctgacttcgtgg

SEQ ID NO: 612625 - DNA, 100 bp, Homo sapiens
gatgacatttttgagccagtccttattcctgaacccaacaagagtgagccatggagctacgtgtggggaacaagtaccgcctgggacggaagatcgggag

SEQ ID NO: 612626 - DNA, 95 bp, Homo sapiens
cattcttcaggagagagataaaaaggagacccctcttccgctcctgttttatactgcttccatatttacagtgcaatgattctggactgagacgc

SEQ ID NO: 612627 - DNA, 83 bp, Homo sapiens
ctcatttggcctgagcagctcagagtcaggaagtcagagcgcagatgtcatgtggcctgtgttttggaccgtggttcgtacct

SEQ ID NO: 612628 - DNA, 100 bp, Homo sapiens
ggagttcgtctcttacgtctgcggaagtgcagctgcctcagttcttagcgcaggtgttacacataatattgcattacttcgagaggtgataatcaactca

SEQ ID NO: 612629 - DNA, 101 bp, Homo sapiens
aatttatatagagatgtgatgttggagaactacagaaacctcgtctccctgggttgctgcgtggttaaaaaaaatatttggagatcatcctattccacagt

SEQ ID NO: 612630 - DNA, 98 bp, Homo sapiens
agcgggcggcgcgagcgggaggcggcggcgcaggctgttactgaggcggagacacgggtgatgattggctttctggggagagaggaagtcctgtgatt

SEQ ID NO: 612631 - DNA, 51 bp, Homo sapiens
cgcagtggtcgcttcttctccttgctggaaccctacatggatgagaacttc

SEQ ID NO: 612632 - DNA, 100 bp, Homo sapiens
cttttggaccaaaggcctgtgtgctgcagaacccccagaccatcatgttgggcccgaaggcatcctgcagaacggggctgtggacgacagtgtagccaag

SEQ ID NO: 612633 - DNA, 74 bp, Homo sapiens
cagcgcggagcagaaagcagaacccgcaggatttacggaaggctgcagtccttatctttgcaaataaacaggat

SEQ ID NO: 612634 - DNA, 100 bp, Homo sapiens
ggcagtttgataaaacatggtggagacagcggctgaaatggaagcatatgttctagaagacattcttgagcagacaatatgaaacaccctttgaaggcaa

SEQ ID NO: 612635 - DNA, 74 bp, Homo sapiens
catttggctttgcctttctggacacagaagtatttgtgacaggctttggggtgagcctgttaatctgcgtgaac

SEQ ID NO: 612636 - DNA, 90 bp, Homo sapiens
cggggcgctcatctggctctgctacgacgcgctggtgcacttcgcgctggcttgagtttgaagaaacagaagaacctgattttactgcat

SEQ ID NO: 612637 - DNA, 75 bp, Homo sapiens
caaggacctgaagcatctcatctattatcgtttcaacacggtcgccccacggctgaattctcggtgataaaggcg

SEQ ID NO: 612638 - DNA, 100 bp, Homo sapiens
acccgactctttgggccgttatctcacattttaggtgatgggcaagtcagaaagtcagatggatataactgatatcaacactccaaagccaaagaagaaa

SEQ ID NO: 612639 - DNA, 89 bp, Homo sapiens
gaaccagcaggctctgtggttcaggactcccgacttgacacgatattttttgctaagcagagcagcccgacggccatggaggctgaaga

SEQ ID NO: 612640 - DNA, 75 bp, Homo sapiens
ggcggggctgcagcgagagtgcatgagcccgaggaggcagggtctgatggggttgctccttcaggctggctacga

SEQ ID NO: 612641 - DNA, 100 bp, Homo sapiens
aagatgtcactttacagaaacagtgtgtaccattccgacgttacaatggtggagttggcaggtgtgcgcaggatctcaaagatttcatgagacaagctgg

SEQ ID NO: 612642 - DNA, 100 bp, Homo sapiens
cgtccagcagatggcggatgccctgcagtacctgcagaaggtctctggagacatcttcagcagcacctgggctgtcccccatgcagaccctgaaggtttc

SEQ ID NO: 612643 - DNA, 100 bp, Homo sapiens
atgatggaagtgtcttggcaagttatggcaatgtgatcgtcatcacagtcaactatcgacttggagtactcgtttctctgcaggtggatattgttcccag

SEQ ID NO: 612644 - DNA, 100 bp, Homo sapiens
cctgaagaagtgtgagcatgacccccatgtgctcctggccgtggccaactggacccacaaaccgtggagaccaagaactggcacacggacgtgattgaga

SEQ ID NO: 612645 - DNA, 89 bp, Homo sapiens
atgctggatgaagctgttttccaagtgttcaagctctgtggcactctgtaagctgctccagcatggcatcaatgcagatgacaaacggc

SEQ ID NO: 612646 - DNA, 100 bp, Homo sapiens
agtaaccctgccaaatacatcagcttgtaggagacagaggaaattggatacactcacatgaaaatagcggaaggagtgaactctcttttgcagatggcag

SEQ ID NO: 612647 - DNA, 51 bp, Homo sapiens
acgcagagtgggcggcggtggtgaaatacaggtatcaggatgaagatacac

SEQ ID NO: 612648 - DNA, 75 bp, Homo sapiens
gctgagtccaagcaggcgtttgctgacgggaccagcacctacaagcagcactgcaggacaccctcctcctccagc

SEQ ID NO: 612649 - DNA, 58 bp, Homo sapiens
ccttggttaccatgtggtcacctttgactacagaggtccggtgtctaaaagactatgg

SEQ ID NO: 612650 - DNA, 100 bp, Homo sapiens
gatctccaacatggcagccttttccttagaacaccaaagattgtctctggcaaaggtgcacaaatggagtccagaggaggctgtaagagccatcgccaag

SEQ ID NO: 612651 - DNA, 100 bp, Homo sapiens
gcagcttgaccccatccagagggaacctgtgtgtgctgccctcaacagcgccattttaggtatcgagaaccttccctgcgaacttcagaggaacttccag

SEQ ID NO: 612652 - DNA, 100 bp, Homo sapiens
cccacctccagctccgccactgccaggctctggaccctggactctgcagaaggcggccgcccgccttggcccgtctctggagtgctgggcagccgggtct

SEQ ID NO: 612653 - DNA, 152 bp, Homo sapiens
ttggggagaagaggattggaggtgtcagtgttaaaggaacctctacaacgaaggtgaagccacggaagataagacatccacgacagcgatggcagttccagcagcagccaccagagcctcaagagcacagccaaatgggcggcatccctgga

SEQ ID NO: 612654 - DNA, 100 bp, Homo sapiens
acagtttgcgggactcagtcccatcactccaaggagagaagatccagacatttaatgtggatgcaccatgccagaccgtggaagatttaacgaatggggt

SEQ ID NO: 612655 - DNA, 98 bp, Homo sapiens
ttctgttgggcttggaacagggctgcacacctttctgctttatctggtggcagtagagaagagcatcacagaagttgctcaggagctgacagagctgg

SEQ ID NO: 612656 - DNA, 96 bp, Homo sapiens
aagcacaggaatctcactctgttaaagctggtctgttctaactgaggcctccccatggccacccatggaccagtcggcattcacttcctcccttct

SEQ ID NO: 612657 - DNA, 75 bp, Homo sapiens
tgataacctcaaaccttcaggaggttacataacaggctctcccctggacaagttggtgtccagcacatcagacct

SEQ ID NO: 612658 - DNA, 80 bp, Homo sapiens
ttcatctgcccggcgctgatctacaagaaaatccacaagaacgcactttcctcccaggttccagatgcgacatccagatg

SEQ ID NO: 612659 - DNA, 111 bp, Homo sapiens
gttcgtcatggggctgtttggaaagacccaggagaagccgcccaaagaactggaggaggaagccaagaatctggtgagcgaagccatcgcagctggcatcttcaacgacct

SEQ ID NO: 612660 - DNA, 75 bp, Homo sapiens
tcctgtaactgccaaacccaagttggttggagatgtggattttgaaggtgactctgacatcattagaagcatgcc

SEQ ID NO: 612661 - DNA, 101 bp, Homo sapiens
gcgaaaacgtggttgtagagttccgtgactcccagtgtactatgaggggctgcaggacaagctggcacagatccgcgatgcccggggggcgctgagtgccc

SEQ ID NO: 612662 - DNA, 83 bp, Homo sapiens
atgcttagcattcgagagaacaaaattaaacaactacctgctgaaattgtactgccaaatctgtcgaaagggagataatgaag

SEQ ID NO: 612663 - DNA, 100 bp, Homo sapiens
cgagactttcaaagatggaatcacaaacggcgcacattggtatgatgtggaaggaagctattttgccagccacttcattatgggaggagagaagtttgac

SEQ ID NO: 612664 - DNA, 75 bp, Homo sapiens
aaaaggaaaagctggaaaaagttcaaaataaagcagcatcacttattcagattttatttggagagaagcaagcat

SEQ ID NO: 612665 - DNA, 83 bp, Homo sapiens
gtaaacttgacctaaagaccattgcacttcgtgcccgaaacgccgaatataatcccaagaaaggacctaagtgtgaaataccc

SEQ ID NO: 612666 - DNA, 98 bp, Homo sapiens
gacttcggaatgcactacaacaggaaaatcatattatagatggagtaaaggtggccaccgagtactaaattcacttgggaataaaagaaaaacataag

SEQ ID NO: 612667 - DNA, 100 bp, Homo sapiens
ttcctcagcccactcaacatgaagatgacaaggatgaagacctttatgatgatccattcccacttactgaatagttctctttgtaaagaatccttttctg

SEQ ID NO: 612668 - DNA, 100 bp, Homo sapiens
ctgtttcctgatgatgaagtgatttgcaatagtatgggggagcatctcttcagcatggcctgtatgagaagaaaaagacctcaagaaagcaacgaaagga

SEQ ID NO: 612669 - DNA, 146 bp, Homo sapiens
cttgttggtgggcagaaggaaggagcccgaggttttatgttttttatcattaatgtggacttgaccgaggaaggattatatcctgataacttaagtgactctctcttttccggtgatgaagaaaatgctgggactgaggaaataaa

SEQ ID NO: 612670 - DNA, 100 bp, Homo sapiens
cgcagtggtcgcttcttctccttggcaaatctgagtagcctccaagaggcacacaagcagaggatgggctgtgttgccctgactgccagccccaggcaca

SEQ ID NO: 612671 - DNA, 80 bp, Homo sapiens
gagcagggctgagatgggcaccgcggatctggggccgtcctcagatgtgctggtggacggacagccatgtgaccgcgagg

SEQ ID NO: 612672 - DNA, 142 bp, Homo sapiens
ctgtaatgttccaggacacctgccatcatggagggttatccagcacctggaggatacctgctacctgtgctcaaaaagggccggtgtgccgcagtgagtgccagtttgaatgaaggaagcatgcgtggcctgaagcctcacc

SEQ ID NO: 612673 - DNA, 102 bp, Homo sapiens
tgctgcaacatagagctgacattaactgtcagagagtcccacgaactggctgggtatacagaaatgtccagaggccggagagcgtttcagatcacatgtacc

SEQ ID NO: 612674 - DNA, 90 bp, Homo sapiens
ctccagcagctgattgtaatgaatttgcccaatgttttgatgattggcagagacccactgtctgattccttggtgttactcagttttcgc

SEQ ID NO: 612675 - DNA, 106 bp, Homo sapiens
cgcggaggcggctagaaggtgaccgcggatcccagcttcctgcagccaggtgtccctggccagtgtccttccacctgtccacaagcatggggaacatcttcgccaa

SEQ ID NO: 612676 - DNA, 83 bp, Homo sapiens
cgccaccgcaggtcgaggacggtcggactcccgcggcgggaggagcctgttcccctgagagttcctgagttggaggtagaaga

SEQ ID NO: 612677 - DNA, 103 bp, Homo sapiens
gcggtaggctgggaccataacacaaggaaactgttaaggcagcaataatagaagagcagaaacgaagtgaaaaggctgtggaagaggcagtgaaaagaacaag

SEQ ID NO: 612678 - DNA, 97 bp, Homo sapiens
acaactacagacagaagatcacctcctggatggagccgatagtcaagttcccgggggccgtggaccccatggaccaagcttctctcaaaaacagcga

SEQ ID NO: 612679 - DNA, 89 bp, Homo sapiens
aagaaaatgaagaattgcaccaagagttaaataagagtagtgctgttaccagtgaggaatggtctccaccagctcctggccgggttcga

SEQ ID NO: 612680 - DNA, 100 bp, Homo sapiens
gacacagccgcgcccgtgccgcagaaggatttagaaatcttcaagaatttctgaggacgagctcacatctggaaggggccttggacaagttgttactgac

SEQ ID NO: 612681 - DNA, 100 bp, Homo sapiens
tcctgatacagcaggcgctcaccatgttccctggaggtgatggtaatgcccgaaggagcagacacggtgtccaggcccagtcccgactaccccatgttac

SEQ ID NO: 612682 - DNA, 106 bp, Homo sapiens
catgaagatggacgaggtcctgtacagcatcgccgagaaggtggatgaagacctgatcattgaagttcaccagttatttttctcaagaatgtgaataacaatggga

SEQ ID NO: 612683 - DNA, 75 bp, Homo sapiens
aggacctgagggaacagattttacgggttaaggacacggaagatgtggataattactgtaccttcctcatggaaa

SEQ ID NO: 612684 - DNA, 75 bp, Homo sapiens
ccacctgccactccaagactgcccatctggatgaggagcagagagagatcatcattgcctgaatttagctttgtg

SEQ ID NO: 612685 - DNA, 87 bp, Homo sapiens
gacaggctcagccaaagtaaatccatgatcctcaccgatgtcgggaaggtcactgaacctgtgcaatggatgagcttcatagtctgg

SEQ ID NO: 612686 - DNA, 50 bp, Homo sapiens
ggactgtgagcgtcgtctatatctttggaatgggtaccacagaccatgtc

SEQ ID NO: 612687 - DNA, 83 bp, Homo sapiens
ctccactccgtcccccgcgggtctgctctgtgtgccatggacggggtgagaactctgtctcagtcgacgggaagtgcagtgac

SEQ ID NO: 612688 - DNA, 74 bp, Homo sapiens
aagacccatctttatgcaaagccagcgttacagtaatgttccagacaaatttacatgtattggagaccagacca

SEQ ID NO: 612689 - DNA, 97 bp, Homo sapiens
cgtgctttgcccaaggagatggtctcattaagggttttacatatgtggctccatctgtacttgaaagtgtgaaagaaaagttttcctttgaaccaaa

SEQ ID NO: 612690 - DNA, 83 bp, Homo sapiens
gcgcgcggcgctctggctctggctgtgcgcgctggcgctgagcctgcagccggccctgccgacccctgtcggatagtaaatcc

SEQ ID NO: 612691 - DNA, 125 bp, Homo sapiens
aaacagtccagcatgacggtgatggaagctcaggagagcccgctcttcaacaacgtcaagctacagcctctgtgacctgcctgctgcctccctcaacgaccagttgccccaacatacatttcgcg

SEQ ID NO: 612692 - DNA, 100 bp, Homo sapiens
cagagcgggactccattccaaaaaaataagaaaaacagaaaaataataattacatctgcaaagaccttatttccagtacagaacctgctaaggccatcaa

SEQ ID NO: 612693 - DNA, 101 bp, Homo sapiens
tggtgacacgttattacagagcccctgaggtcatcctggggatgggctacaaggagaacgagaaagtttcattgtgcaaatctaacttcatggcctcgctg

SEQ ID NO: 612694 - DNA, 80 bp, Homo sapiens
ggttccgcgccgggcgtggacggtgtggggcggtcccggccccgcagaggttttatacacctgaaagaagagaatgtcaa

SEQ ID NO: 612695 - DNA, 75 bp, Homo sapiens
gtttaccagtgcagaatgggattgatgcagacgtcaaagattttaggcactggtgccatcacacagtgacacgga

SEQ ID NO: 612696 - DNA, 100 bp, Homo sapiens
tggccatggggagcctcagcggtctgcgcctggcagcagggggaggcccccgctgagatgggggcgctgctgctggagaaggaaaccagaggagccaccg

SEQ ID NO: 612697 - DNA, 90 bp, Homo sapiens
cgaggccagaaggctagaagaatcagacgtgctccaggaggccagaaggaaatacgcctaaatgtgcacagcatgctcaagcaccagacg

SEQ ID NO: 612698 - DNA, 83 bp, Homo sapiens
aggagagtaaagtcagcatgagcaaaaactccaaactcctctccaccagcgccaagaggtgacttaagagattaaaattaatt

SEQ ID NO: 612699 - DNA, 100 bp, Homo sapiens
gtccttgtaccctacacctcggagcatgtgcccagatgcagctgtcttctcctcagtgctggcgctctgactacccttcccaaagaaccacggccctctc

SEQ ID NO: 612700 - DNA, 130 bp, Homo sapiens
cagatggaacctgacaatgtgaatgccctgaaagatcgagcagaggcctatttgatagaggaaatgtatgatgaaggttatatacaggcatgtagaggacttatgatcgctgctgtcagcctgggcttct

SEQ ID NO: 612701 - DNA, 51 bp, Homo sapiens
aagagaacaagacgtgtgaagactcagattgccagtagaaagccaacagac

SEQ ID NO: 612702 - DNA, 82 bp, Homo sapiens
cgcgctatggctgcgttcggccgtcaggtatcgagaaccttccctgcgaacttcagaggaacttccagctgatgcgagagct

SEQ ID NO: 612703 - DNA, 101 bp, Homo sapiens
gtggcaagtattgctgtgggtgctgggacttcccgtccgcggcgtggaggtttctctgcaggtggatattgttcccagccagggggagatcagcgttggag

SEQ ID NO: 612704 - DNA, 101 bp, Homo sapiens
ttaccatcaatactatggaatgcattttgaaacttaaggatgggatacagaccaaatacacgctgatcgatgagcaggacatcccgctggtggagagctac

SEQ ID NO: 612705 - DNA, 75 bp, Homo sapiens
aaggaggccttccagctgtttgaccgaacagggacgactatgacaagaaggtgaagcaggcggccaaggagaagg

SEQ ID NO: 612706 - DNA, 100 bp, Homo sapiens
atcgacttcggtttcagttggagttggaatttgtgcaatgtttagccaacccaaattaccttaattgaatgaatctgaagtctgctgcagtaaaacacag

SEQ ID NO: 612707 - DNA, 75 bp, Homo sapiens
agaggtcccaatcccccactctttccgccctaatggaggtctccagtttcgactctatgtttgggaatgggaaag

SEQ ID NO: 612708 - DNA, 100 bp, Homo sapiens
ccagtaccaaaaacgtcaacaacagttttacggttttgcagcatttggacaaacaaagccagtagtaaccccttttggtcaagttgcagctgctggagta

SEQ ID NO: 612709 - DNA, 96 bp, Homo sapiens
cggggccgcgggaaggccgaccgactgccgcggccacaagggcagccattactcagcactgcactgaccttgggaatttgctgggcaaggaaaatg

SEQ ID NO: 612710 - DNA, 101 bp, Homo sapiens
ggacaaaaaaattcctggaaaaagaagtccaagaagcaaaaaagggactgctaagaagataccaccaggatctagtgaaaagccatttgatgtatgcggtc

SEQ ID NO: 612711 - DNA, 75 bp, Homo sapiens
tgctacagatgaatgctttgccttggagaatattggcaactttattaaagctattcaggcttatggtatgaagcc

SEQ ID NO: 612712 - DNA, 50 bp, Homo sapiens
cctgtacagcctgcagaactgtaatgaatttgggcatcctgaatggttag

SEQ ID NO: 612713 - DNA, 100 bp, Homo sapiens
ccgtgtccggtgcccagccggtgggtagagaggaagggtgttttgaatgctgtatcaaatgcctggggggcattccctatgcctctctgattgccaccat

SEQ ID NO: 612714 - DNA, 50 bp, Homo sapiens
aaagtcctattccaacagtcatgaggctggtgcagcatggaaacacggat

SEQ ID NO: 612715 - DNA, 100 bp, Homo sapiens
ctttttagagatcgttttgatggatatatcttccttgacagcaaaggcatttccctggaaatggcagctgtgacagtaaaggaagaatcagaagatcctg

SEQ ID NO: 612716 - DNA, 90 bp, Homo sapiens
aagaatggcaagaaaatcacagcctttgtacccaatgacggttgcttgaactttattgagaccccagagtcagaaggagtgagaaccctg

SEQ ID NO: 612717 - DNA, 75 bp, Homo sapiens
tgagagaagtcatatgcccggcacagttattcttggacagtataattggctttcctatgaagatgtctttgttcg

SEQ ID NO: 612718 - DNA, 100 bp, Homo sapiens
tcggtgacagtgtggagatccctgccctcaagacagctctggctctggctattgctcaggagctgggtagtaaggtccccttctgcccaatggtggggag

SEQ ID NO: 612719 - DNA, 98 bp, Homo sapiens
attggttgttttttcctgtatgaagcggttggcaccactgaagtgaccgaatgaggtatcagccagttccaaagaaccagccatgtcaatgaattcag

SEQ ID NO: 612720 - DNA, 100 bp, Homo sapiens
cctccctcgttccctccccggcgcaacatggctgcggccgccgcctccgcctcccaggatgagctgaagtggccaaatcaatgaaggtccctgtatatga

SEQ ID NO: 612721 - DNA, 96 bp, Homo sapiens
aagaaaatacaaatcacacgcataatggatgaaaggaaccgacaggtcaaaatgcagatcttcgtgaaaacccttaccggcaagaccatcaccctt

SEQ ID NO: 612722 - DNA, 82 bp, Homo sapiens
ttccagaaggctgtagaccagagtatcgagaaggctatgtggttgatgttgcagaatgatgagccggaggacttcgttatag

SEQ ID NO: 612723 - DNA, 74 bp, Homo sapiens
aagaatctcgtgctcaccggtttctcccacatcgacctggtacatcaggaacgtctctatcaagaatacaattt

SEQ ID NO: 612724 - DNA, 100 bp, Homo sapiens
ggcccgggctgtagtgccggcgccgccgcgtcttcccggtctcctttcccggccgcacagggttctgtggatggagttataaaggaagtgaatgtgagcc

SEQ ID NO: 612725 - DNA, 75 bp, Homo sapiens
cctggctgggcctgcccaacaacgccgagagagtcctccttaccacacagggcgcagttgtgtagcagttgagta

SEQ ID NO: 612726 - DNA, 100 bp, Homo sapiens
agaccccgaaaacggaagcgcagggagaaggaagaggtgtttgaaaagcctgattacatcaaccccagagccgtgcagctgggctcccttctcgtccgcg

SEQ ID NO: 612727 - DNA, 82 bp, Homo sapiens
atctgggcgccaagccgcggagcctccagacggcacttgcacctcctgcgccgccgccccccatccaaggatatgccttcaa

SEQ ID NO: 612728 - DNA, 100 bp, Homo sapiens
cggaggcgcgtcctgcatcgtctgccgctttggggggaggcccccgctgagatgggggcgctgctgctggagaaggaaaccagaggagccaccgagagag

SEQ ID NO: 612729 - DNA, 101 bp, Homo sapiens
tcgcacaaacaaatttactattcggacaaatacgacgacgaggagtttgagtatcgcaatgaggtcttactgtgtagcccaggctgctctggaactcctgg

SEQ ID NO: 612730 - DNA, 75 bp, Homo sapiens
ttaaacttaaggaaagagtgggaaagtgaggcattaacacccttgtgaagatcagcaaaagtgcaggagccatgt

SEQ ID NO: 612731 - DNA, 100 bp, Homo sapiens
ccgagctgctaataaagttgcagcgaggagaagcgcagcgacggcgtcgggagagcgcgcctagccggctcgcgagtgtgccggcatgtgaagaatgggg

SEQ ID NO: 612732 - DNA, 100 bp, Homo sapiens
tgctgcttcagcttctgcagctccctagtggtcccacagctgcggccgccgccttcttcctccatggagatcatgaatcagacagataaaaatcaacaag

SEQ ID NO: 612733 - DNA, 99 bp, Homo sapiens
gctccggcgaggcaaggctgagctggaggagcagaagcgtttgctggacaggactgtggaccgactgaacaaggaggggaccccgcggcagccgtgcgc

SEQ ID NO: 612734 - DNA, 80 bp, Homo sapiens
ccgctctttgccgtgacaacaccgttcccccagccgggctggactccatgttttcgttggccctgaaatgccttatcagt

SEQ ID NO: 612735 - DNA, 75 bp, Homo sapiens
tgttcagctgtcatggaccccaggcgatgacaacaatagccccattacaagcacttctgtctcctgctgccatgt

SEQ ID NO: 612736 - DNA, 75 bp, Homo sapiens
gtcaccgagaagtccccgaccgactggaccatggccaacctggagcgcaccttcatcgccatcaagccggacggc

SEQ ID NO: 612737 - DNA, 90 bp, Homo sapiens
ctctacgcctccatccacaagattgaggagggccatctggctgtgtactacaggactccttctaatggagctgaagggctgactccccgg

SEQ ID NO: 612738 - DNA, 100 bp, Homo sapiens
ctggatcccagaaggtcgcgaaggcagtaccgtttcctcagcggcggtgaatcatcctctacaatttcatctaaccagagtcaggagtctggttatcaga

SEQ ID NO: 612739 - DNA, 101 bp, Homo sapiens
gcctgaccagtacaagattgtagaaacgctcatccagcacatcatgtttgagaccttcaacaccccagccatgtacgttgctatccaggctgtgctatccc

SEQ ID NO: 612740 - DNA, 75 bp, Homo sapiens
ccagacctcggtgtccacgctgtccccgcagcccggcagcggcaatggacctcatcatgaccgttgctgtactta

SEQ ID NO: 612741 - DNA, 100 bp, Homo sapiens
ggaacactgggattatgatgctctgtttgagacacagccgggaggagctgtgcagtgagaagcaaagcaggaaacaagcctattacaaatcaacttggat

SEQ ID NO: 612742 - DNA, 85 bp, Homo sapiens
gctcacctggcggtgcccgaggagtagtcgctggagtccgcgcctccctgggtcaaaatgcagatcttcgtgaaaacccttaccg

SEQ ID NO: 612743 - DNA, 83 bp, Homo sapiens
gtaaagccaatgacccccaaggtggtcactctctggtcagcccaaggctgccccctcggtcactctgttcccgccctcctctg

SEQ ID NO: 612744 - DNA, 100 bp, Homo sapiens
gacgcagtcagctgcgtgattcccgtgattgcgttacaagctttgtctccttcgacttggagtctttgtccaggacggttttgacacaagggcgcatatc

SEQ ID NO: 612745 - DNA, 75 bp, Homo sapiens
ttccgaggtgaaggcgccgcgccaggccgggcgggcggtgaattttgaagtcttcatcagtatatccatattaaa

SEQ ID NO: 612746 - DNA, 82 bp, Homo sapiens
aaagatgagatttacctgtgagatgtttcatcccaacagtttcaccaaaactcatgccaatgcagcagatcgcaaattgaaa

SEQ ID NO: 612747 - DNA, 98 bp, Homo sapiens
ctggagacacacaggcagacccatactggtgagatttgtggatttaaaattcacgggcagaatgtcccctttgatgcagtggtagtggataaatccac

SEQ ID NO: 612748 - DNA, 88 bp, Homo sapiens
cgcgcattcggccccggacgaaggtactcgcagcacttggagcgcagaaccggccgcgcccgacctagaggatcaagacataatggga

SEQ ID NO: 612749 - DNA, 74 bp, Homo sapiens
ttttggtagaagatgtggtacacactcagttaattaatctgatcccagatgcagtgactggttactacctgaac

SEQ ID NO: 612750 - DNA, 75 bp, Homo sapiens
taatagcaaacatcgatggcctactggggataacattcatgcagaacatcaggcattattcagtggaagagaggg

SEQ ID NO: 612751 - DNA, 75 bp, Homo sapiens
ttcacgactttttgtaaagaaaacaatagtagtgggcaatgtgtccaaggaaagaatcatgtgatgtacagcttt

SEQ ID NO: 612752 - DNA, 82 bp, Homo sapiens
tggagatacgcggtgcagctgccgacaccccagcctgttgctgacactagtgtaattttttctgcaggatgaattaagagaa

SEQ ID NO: 612753 - DNA, 100 bp, Homo sapiens
ttcccagtgctcctgggatgtttataactggagccctgtatcaaatcagtcacttttatcagaatctgtagcatcttctcaattggacagtacatctgtg

SEQ ID NO: 612754 - DNA, 75 bp, Homo sapiens
cagaacaagaatcgcatctcttgggtcggagaagccgtcaaggccttcccttcttcttggtggtgttcttgagta

SEQ ID NO: 612755 - DNA, 76 bp, Homo sapiens
ctgcctacaaattcaagagtgaccagggatgagacgagttgtactgctgtcacaggaaatggacgctggattacaa

SEQ ID NO: 612756 - DNA, 100 bp, Homo sapiens
gcccaaactggaacttatgctgtagacatttctttgtggtttatctaaaaaccaaagaacggaaagatgctgaaggatgggagaccgttcagagaggaag

SEQ ID NO: 612757 - DNA, 100 bp, Homo sapiens
ccaagtcaggattgttacccccaccacctgcgctccctccaagaccttgtccatcacagccgtctccaacctggacatagagagtaagctgagtgtgtac

SEQ ID NO: 612758 - DNA, 74 bp, Homo sapiens
atacataagccattttccgaatatacagaaaatggtgtgaatggaacattaacttcaaatgtagcagactctcc

SEQ ID NO: 612759 - DNA, 90 bp, Homo sapiens
ccttgggaaccgctcgagcctaccaggactggggttttaaggggtgtggcaggaggttttggactcgatgagtttccaccgaaatgtcgg

SEQ ID NO: 612760 - DNA, 97 bp, Homo sapiens
aaacagccaccttcagtatctcagtcctccagtgtttggatattcaggttgagacggaagctagaaaaaaatgtttctgtgatgacgatgatcttca

SEQ ID NO: 612761 - DNA, 90 bp, Homo sapiens
atgaggacaagcagacccgggagcagctgcatagcatcagcgactctgtgttgtttctgcaggtctgctcaccaggtggccagataccgc

SEQ ID NO: 612762 - DNA, 96 bp, Homo sapiens
tactgaagaaatgcagggatttggtgtaatgcagaagacttgttccatgaaagtacattggggcacgttggtcaaagaaaaagtgatgtatgaaaa

SEQ ID NO: 612763 - DNA, 75 bp, Homo sapiens
ccagtgtgaatttggaagggatcgtgtggcatgaaacagaagaagattaactgctgaagtactgatcgagttctg

SEQ ID NO: 612764 - DNA, 50 bp, Homo sapiens
ctgggatcccggccaccagcaattgtccgagactctccaacatgtgcctt

SEQ ID NO: 612765 - DNA, 90 bp, Homo sapiens
accatggcgaggagtctctgtccgggggcctggctaaggaaaccctattacctccaggggtctctctttttggcatgtcggccctgttac

SEQ ID NO: 612766 - DNA, 98 bp, Homo sapiens
ccagctccccagaaatgaacctgcccacggtgtccgcgctcagggagagtggaattcgtgacctgataccaggttctgtcattgatgccacaatgttc

SEQ ID NO: 612767 - DNA, 75 bp, Homo sapiens
ccgaagagattcttttacatctggaggaaactgatgaaaattttcacaagaaaaccagtagattcccagacatcg

SEQ ID NO: 612768 - DNA, 100 bp, Homo sapiens
agccacacccttatttggtctttacaaacgatggcaacaacgggaagctgccttacaagcacaaaaggtcatctaatacatgggagaaacatggattttg

SEQ ID NO: 612769 - DNA, 120 bp, Homo sapiens
gctaaagagccgagcacgcgggtctgtcatcatgtcgcgttacgggcggtacggaggagacaatgcagatcttcgtgaagactctgactggtaagaccatcaccctcgaggttgagccca

SEQ ID NO: 612770 - DNA, 90 bp, Homo sapiens
gtcggtcggcgcctgttctcgggctgtttggcggacgtccctggcaactgttcagaaaacccctgtcagaacggaggcacttgtgtgccg

SEQ ID NO: 612771 - DNA, 82 bp, Homo sapiens
gaggcctccccaaccatgtgcaattacctgcctgaccagtgcacgcccaacccctgcgataggaaggggacccaagcctgcc

SEQ ID NO: 612772 - DNA, 100 bp, Homo sapiens
cactggctctgctgaccttgtgccttgcgaggaagaaaggacccggtttcaggagctgctggccagtccggcctacagagccagccccctggtggccatc

SEQ ID NO: 612773 - DNA, 75 bp, Homo sapiens
ctcagctctagctgatactacagacagtacaacaggctggtaatcctggtggacctggacctggtggtcgaggaa

SEQ ID NO: 612774 - DNA, 75 bp, Homo sapiens
ggcaaacagctgtataaactcttgtaaacagataggaaccaaggctttagccttctcaactcattgactggaaca

SEQ ID NO: 612775 - DNA, 100 bp, Homo sapiens
tgcggacgccattttcttctgcacttctgtctggagaggtgagaagccctaccactgcaactgggacggctgcggctggaagtttgcgcgctcagacgag

SEQ ID NO: 612776 - DNA, 96 bp, Homo sapiens
cgcgcagcgccccgcagggcgatggacggccgaaccccgcgcccgcaggacgccccagccagacctgtcatttactccatcctttatagtgatgct

SEQ ID NO: 612777 - DNA, 56 bp, Homo sapiens
accacacgactgggtatatttcctctctggcccacagcagcagaacttttaaaatg

SEQ ID NO: 612778 - DNA, 100 bp, Homo sapiens
gaaagaccctgtcttgtacatgtaccaactcttagatgattacaaagaaggcgaccttcgcattatgcctgattccagagttgtaagacgttcatcgccg

SEQ ID NO: 612779 - DNA, 50 bp, Homo sapiens
gagccagtgatttacaatagagcaagttatttctcaaactctgaggctgc

SEQ ID NO: 612780 - DNA, 50 bp, Homo sapiens
tacaggagtcctccacttgccactgggcctgacctctcgggacacaccca

SEQ ID NO: 612781 - DNA, 87 bp, Homo sapiens
atttgatgtcttagagaaacttggagaaggaaacattgctgaggctcttgtcagcaaaggtctagccacagtgatcagataccggca

SEQ ID NO: 612782 - DNA, 100 bp, Homo sapiens
acactcctcacttcttccccagatgggatgtggcatggtgaatttgcccagcagcagcctcctgttgttcaagactcacctaaccatgggagtgggtctg

SEQ ID NO: 612783 - DNA, 83 bp, Homo sapiens
cgggcccgggctgcggcgtgtgcgcgcccgccagctgctccggagatacgatggctatatgcatccagttcatcctcatgtag

SEQ ID NO: 612784 - DNA, 75 bp, Homo sapiens
aggatcgaggaacgttgtctgatcctgggtttgagcagtttaaaatgtcagaaagattgcatgggaactggatca

SEQ ID NO: 612785 - DNA, 100 bp, Homo sapiens
cgctggcgaaggtggcccctacggctgcaaggacgctctgcgccagcagctccgctcggcgcgagagagccagagcccagaggtggagcagttagggagg

SEQ ID NO: 612786 - DNA, 82 bp, Homo sapiens
acagagcctcgcctttgccgatccgccgcccgtccacacccgccgccaggaaagatgaatgggagggctgattttcgagagc

SEQ ID NO: 612787 - DNA, 100 bp, Homo sapiens
cagaagactatgatgttgtaaaagttattggaagaggtgcttttggtgaagtgcagttggctgctctttggcgtaaattgcaatcgattagggatcgttt

SEQ ID NO: 612788 - DNA, 51 bp, Homo sapiens
ggaagcttcaggtggagacagcccgaagaacatgaacgattggatgcccat

SEQ ID NO: 612789 - DNA, 133 bp, Homo sapiens
ggaacaccaccactctcattagtgagaatggtcatgctgccgacaccctgacggccacgaacttccgagtggttcttcgtgccatgaaggaggacagtgaaaaagttccgagcttgttaactgattatattct

SEQ ID NO: 612790 - DNA, 98 bp, Homo sapiens
agagcctggagtctgcgaaggccgggacccggttccccggcccacagtgggggtgtgcaaacccgagagaactggatctgttcgcagttgagtaccag

SEQ ID NO: 612791 - DNA, 76 bp, Homo sapiens
aaagaagtggagcgtgtcctgaaggagttccaccaggccgggaagcccatcgggcctatgaaggggtgctgcagct

SEQ ID NO: 612792 - DNA, 96 bp, Homo sapiens
gaaccatgcaaaaaatgtggccttccaaaccatcctgagctaatattggctccaataattgtggatactatgacttacaagcagtactaacacacc

SEQ ID NO: 612793 - DNA, 100 bp, Homo sapiens
caaatattcctttgggatgtgaatactctaacagcattgactgcctcaaataacactgtcacaagaaatcatcagatatgccgactggtcaaccagcagc

SEQ ID NO: 612794 - DNA, 100 bp, Homo sapiens
agcgcatggacagccagaccagcctcgatctgcgcgctacatcctgaaggactatgtcagtgctaacagagaccctgatgctggaattgatgaagctcaa

SEQ ID NO: 612795 - DNA, 88 bp, Homo sapiens
caaatgcaaatacttgtgcactgggagagtgtggcaaaggagcagagaactttgacaagttcttcacacgaggacagcccgtcttaac

SEQ ID NO: 612796 - DNA, 101 bp, Homo sapiens
ggactcccgacagcagaatcccaggtgtgtttccattgtagaaaacctggtcatggaattgcagattgccccgccgcccttgaaaatcaagacatgggcac

SEQ ID NO: 612797 - DNA, 110 bp, Homo sapiens
agcctcggcgagccctctgcagcggagccccctgcccatttggttttggatgatatcatcaagttgaatcgaaaggaagggaagaagcagaattttccaagactaaatag

SEQ ID NO: 612798 - DNA, 100 bp, Homo sapiens
gcgggcaccataggccgaagcacccgggcacctctcccagacacctaccggggcccctaccgggaggaccaccccaacccagctatggcctatgccaacg

SEQ ID NO: 612799 - DNA, 100 bp, Homo sapiens
gcttccgacggggcggccgggggctcagagatccaagtgcgcgccctggcgggtccggaccaaggtatctttcagatgaaggcattgaagcttgcacaag

SEQ ID NO: 612800 - DNA, 82 bp, Homo sapiens
caaaattaagccatcataccagtgccttatctgttgtgctactacccacagatggcatgatccgaaaacactctcatgtcaa

SEQ ID NO: 612801 - DNA, 96 bp, Homo sapiens
atccagcttctagaagacccattacagagggttaatttggagtggcccctggagtcagtttcctacaccatccgaggccccacccagcacgagcta

SEQ ID NO: 612802 - DNA, 100 bp, Homo sapiens
cagcactgtggtcctccaggccttcggcaagtaccgggatggggactttgagtacaaagaacggcaccaggtgcagttgttagggcgaggcttcattgca

SEQ ID NO: 612803 - DNA, 108 bp, Homo sapiens
taagatcgtcgagatgtctacttcgaagactggcaagcacggccacgccaagctggactgtgctgctgccatctcggctcactgcaacctccctgcctgattctcctg

SEQ ID NO: 612804 - DNA, 83 bp, Homo sapiens
atgccgctcctaagcctgcacagccgcggcggcagcagcagtgagagagacctgtcggccatggagcctaatgatagtaccag

SEQ ID NO: 612805 - DNA, 100 bp, Homo sapiens
gtctccagcatttttacggacccaatcatgagcactgctttaatagggaactggtgaaacagaaggtgaaacgtcagttgacaaaacagcaaaaatcagc

SEQ ID NO: 612806 - DNA, 74 bp, Homo sapiens
ttctacatctcaagctcatattttgaagtgtttacggggcagctgcaatgactctccgcacggtattattgtca

SEQ ID NO: 612807 - DNA, 75 bp, Homo sapiens
tcctctattgctgcaaaaaatgcagaactagaacaggagcttatggactcaaatggatagtgaagtccaaaacgg

SEQ ID NO: 612808 - DNA, 78 bp, Homo sapiens
gtgcgctgtcctgggcggcagcgactccgagaagtgctcctactctcaggcaagtgaacaagatatccttaaatatct

SEQ ID NO: 612809 - DNA, 74 bp, Homo sapiens
gccaggaagcggagggcgcgcgagggatgatcctttcaaaaataaagccttgttatttagcaacaacacgcaag

SEQ ID NO: 612810 - DNA, 75 bp, Homo sapiens
agacccgccccggcccttcgacccacacgacttgtattgtccagaacatcgtgggcacagctctgatgattttag

SEQ ID NO: 612811 - DNA, 97 bp, Homo sapiens
ctggaagttcacatcccgtcggtggggcccgaggccgaggggcccaggcagagcccggagaaaagccacatggatgcaatgcagtatgcttctgaat

SEQ ID NO: 612812 - DNA, 99 bp, Homo sapiens
gacgaaataccaccggaactggtcgaatgaggcacctaaaaattgtataccgcagattcagacttatccactgaaaagtcctggaagcattaaataaaa

SEQ ID NO: 612813 - DNA, 100 bp, Homo sapiens
tcgggctctggaggaaaagaaaggctgccttggagttttcataagaaattgtccctggaggtgttggatgatcacagcttccttggagcattgcagttgc

SEQ ID NO: 612814 - DNA, 106 bp, Homo sapiens
gccagcgtcttggagcagctgaacgtcattaacggcatcctcttcattcctctcagaaagtttcctacactactgaggtttaggggcactgtgaagcaaaagccac

SEQ ID NO: 612815 - DNA, 99 bp, Homo sapiens
gataccttgaggttggtgaaggtgaacaggtgaccataactctgccaaatatagaagcagtcactgaggagaatattgcttctttgcagaagagagtgg

SEQ ID NO: 612816 - DNA, 50 bp, Homo sapiens
cgtgtccctgcagcgaaggatcctgcttcgagagctgtgcccaggagtga

SEQ ID NO: 612817 - DNA, 85 bp, Homo sapiens
ggccaacaagcagaccatggaggagctgaaggacctgctgaagcaattctgtggtgttcttggtcacacatttatggagtttctg

SEQ ID NO: 612818 - DNA, 100 bp, Homo sapiens
cctgaagataaaaagctttgaaaagtcgaattcatggtcgtggaagctgagcccatattaagagatgtcagaaaaatggctacaaacttcctagcacatg

SEQ ID NO: 612819 - DNA, 100 bp, Homo sapiens
cgggccctgtgttggtgcactgcaggatgaccggaaagaagggatgaccgcgtttgtggaaaagagaaaggccaacttcaaagaccagtgagaaccagct

SEQ ID NO: 612820 - DNA, 100 bp, Homo sapiens
gggagctgtggccctcagaatttaaacttaaggaaagagtgggaaagtgaggataatcagggaggctatggatcagttggaagaatgggaatggggaaca

SEQ ID NO: 612821 - DNA, 90 bp, Homo sapiens
atactcgagtatatatctgggatccacataatggagacattctgatggaatttgggactggctttaattttgggataatcacaccaacac

SEQ ID NO: 612822 - DNA, 75 bp, Homo sapiens
ggcccgcatccgtggggagacgctgggcctcattggctttgtgctgaacaaggacatcgcggcctgccgcactgc

SEQ ID NO: 612823 - DNA, 98 bp, Homo sapiens
aatgaaggtcgaattgctcagccccaccatggtgtgccatatttcaggaggactttcgactgcattttagaaatatttcaagaattatggattgtgtt

SEQ ID NO: 612824 - DNA, 82 bp, Homo sapiens
accccgccgagtcctagcgcctggcctgcgcgccgctgcccgcgccacaggtatgctggtatcctcctgggcatcacaaata

SEQ ID NO: 612825 - DNA, 98 bp, Homo sapiens
taccccagaccactggtcctgcctcaagtgatggacataaccctctcctaggacatacatccagtcccacagaaccaaggtcctcaccatccccaccc

SEQ ID NO: 612826 - DNA, 82 bp, Homo sapiens
aggcgtctgggatggtgtgggaccggtcctcctgcatatgcccaagaggattgggagtggaatggacaccagcagaagcacc

SEQ ID NO: 612827 - DNA, 82 bp, Homo sapiens
cgcgaagacggtaacccgtgtgactttgactgggttggacgtgataagtatgagcctgcagctgtttcagaacaaggtgata

SEQ ID NO: 612828 - DNA, 97 bp, Homo sapiens
agacacgcttcttctggaagaccagccaacaggagtccttcaataatgttaaacagtggctgcaggaaatagatcgttatgccagtgaaaatgtcaa

SEQ ID NO: 612829 - DNA, 100 bp, Homo sapiens
gcatgttgcacatgttttaaatgacgaaactcagcggaaatatattcagtgacagctggagtatcagccttggaagtatatacgccaaaagaaatcttcg

SEQ ID NO: 612830 - DNA, 100 bp, Homo sapiens
agtctttaaagcacggacttacacctattggacaggcgacactaacaggtgaagatctcgggagaccatgactaagaaaagaattgctgtgattggggga

SEQ ID NO: 612831 - DNA, 90 bp, Homo sapiens
tcccaaagtgctggtattacagcctatatatgcaaacagatttgcagtaccaacctatgcagccaagcaacctcagcagttcccatcaag

SEQ ID NO: 612832 - DNA, 98 bp, Homo sapiens
acagaagtgtgcatcccaaccttccttctgacaagtcccagaacaccttccaccatgaccacctcagcaagttcccacttaaataaaggcatcaagca

SEQ ID NO: 612833 - DNA, 100 bp, Homo sapiens
tgtcacctactgtttattcacaccagcagcttatagatgcacaattcaactttcagaatgcagagacacagcattgttggttttgccatgtactatttta

SEQ ID NO: 612834 - DNA, 74 bp, Homo sapiens
gcatctcaaccctgtggaatcttttaactcccaaggtcacaaggcacttaaagcattgttgaggtcattggtag

SEQ ID NO: 612835 - DNA, 50 bp, Homo sapiens
caggactccaaaatggcgtcagttgtggctgtaaacctagctgaagacac

SEQ ID NO: 612836 - DNA, 75 bp, Homo sapiens
ggaaaatttcgatattgaagtgtcaaaatccatagatggaaaagatgggatagctgggagtatggccaccctgct

SEQ ID NO: 612837 - DNA, 74 bp, Homo sapiens
gcccccgggactccctgtgccttgcttggagctgacgccgacggagagctagcaatctagagaatagtacctat

SEQ ID NO: 612838 - DNA, 75 bp, Homo sapiens
tcgggactgaaccgagaggtgccgaaggaaccggcgggccgcttgatcccgtaaactgtcttgagccccaccctc

SEQ ID NO: 612839 - DNA, 75 bp, Homo sapiens
cgccctgcgcttcgtgcaccggggcggtccgttgccaaagccagtattgactcggagacaaaaagaggccaagac

SEQ ID NO: 612840 - DNA, 83 bp, Homo sapiens
cacctactattacccccagtatctgcaagccaaggagtggagtcaacatatcaatggagcaagtcacagtcgtcgatgccagc

SEQ ID NO: 612841 - DNA, 85 bp, Homo sapiens
atggagaatagaccctctgtccaggcagcattaaaacttaagcaggacttggactaaagtctgatgaacttcccaatcagatgag

SEQ ID NO: 612842 - DNA, 74 bp, Homo sapiens
ccgaccttgaggctgccgccgcgagtctgccatcgtccaaggaggtggcaggaagctcttcgtgggcggtcttg

SEQ ID NO: 612843 - DNA, 100 bp, Homo sapiens
attcgaaaagctaaagaggcaccattcgtacccgttgatcctctccttcatcctgcacacaatcgtgcgaggattcatccactccgctgtcgggggcctg

SEQ ID NO: 612844 - DNA, 74 bp, Homo sapiens
ttttccctctccctttccctaagaaaatggacccaagtggggtcaaagtgctggaaacagcagaggacatccag

SEQ ID NO: 612845 - DNA, 113 bp, Homo sapiens
catccgcctcaccacgagctacctgaagatgcgcgccgtcttccccgaagctgccagagggatgctaacaccgcccacgtgctgcagcaggactttggaaggggaaccagcac

SEQ ID NO: 612846 - DNA, 90 bp, Homo sapiens
cttaagaacattaactaccttctcatcttctacctcagtttctcactgcttatctacataaaaatgagcagtgtccatccagcatccacg

SEQ ID NO: 612847 - DNA, 75 bp, Homo sapiens
gattggcttttctgaaacagccaaatgtcaggccatgaagaaggaccgtataatagacgctggccccaaaggaaa

SEQ ID NO: 612848 - DNA, 100 bp, Homo sapiens
caagattgccacggcaaacctaggcaagctctcctatgtggacgccgagggcaaccctgtgggtgtggtacagatgaccttcctgcggctgctgagcgcc

SEQ ID NO: 612849 - DNA, 50 bp, Homo sapiens
ggagctaagatcatgtagagagattgtcctgggtcacataatgccagctg

SEQ ID NO: 612850 - DNA, 75 bp, Homo sapiens
gagcattcgaagtgacctcagcagggcatccaggtgtttgtaaaatgtatgaagaacatctgaaaagaatgaatc

SEQ ID NO: 612851 - DNA, 75 bp, Homo sapiens
gacggaaactgccatagtcaagttgacattcgtgaaattaaggagatccgcccagggaagacctcacgggacttt

SEQ ID NO: 612852 - DNA, 100 bp, Homo sapiens
gaccatcggcacggactccgccctgcacaggatcatcgaggtcgtcgacgccatcatgaccacggcccagagctgcaattagaagtggatcggttggaag

SEQ ID NO: 612853 - DNA, 75 bp, Homo sapiens
aattgtttcgtagcagagaacagctctttgcatccggagagtggacaagaaagagttaacagagcagtttcataa

SEQ ID NO: 612854 - DNA, 75 bp, Homo sapiens
ttgactccgctgctcgccatgctacaccaaaattgcattgagccaaacttgccaccaagagcccaacaatcacca

SEQ ID NO: 612855 - DNA, 50 bp, Homo sapiens
ctgctggcctcggcctctcaagggagatgcgctggaacaagggcaccatc

SEQ ID NO: 612856 - DNA, 82 bp, Homo sapiens
tggataacattttggattctctggacaaaaaggaaccatggacactgaatctaaaaaggaccctgaaggttgtgacaaaagt

SEQ ID NO: 612857 - DNA, 112 bp, Homo sapiens
gacaaaagaaccattgaaaaatttgagaaggaggctgctgagatggctcagcagtctgcaggtggacgagatactcggtttttacgtaatgaaatttgccaacttgaaaaac

SEQ ID NO: 612858 - DNA, 96 bp, Homo sapiens
cggcgagtgcggctgccgcagtcagccggggacctcgtccgagcccacccgcctttggaggtactccaaagattcaggtttactcacgtcatccag

SEQ ID NO: 612859 - DNA, 58 bp, Homo sapiens
caagcaccttcattctgctggaattattcatcgggtatctactgagcgtttcagtcaa

SEQ ID NO: 612860 - DNA, 50 bp, Homo sapiens
agaagctgcagcggaggaaggcgaggtttttgacaactatgcagtcacag

SEQ ID NO: 612861 - DNA, 76 bp, Homo sapiens
agaaatttctacacctacccattggtctaaacttgatccaaagacaatgaagatactggatgatgaagctgcgcaa

SEQ ID NO: 612862 - DNA, 100 bp, Homo sapiens
ccgcgaagtcatggggctctgtcgggaagtacctcctaaatggctctactttgaacctgctgggcaaggaagagattttcaaggaaaccatctaccgtgt

SEQ ID NO: 612863 - DNA, 90 bp, Homo sapiens
ggaagggggcagaagacttcaagccccctctttcctagcctggacaggtctgcgcaggcatggcactaagtgtcccatggcacatttggc

SEQ ID NO: 612864 - DNA, 98 bp, Homo sapiens
aagcctcgaggccgtggcccagaggctggagctgcgggagctgtgatgcagatccatccgccctagcaaaatatgttctggctttggtaaagaaagac

SEQ ID NO: 612865 - DNA, 74 bp, Homo sapiens
taattcccggcttctcgagaagacactacagcctcaaggagttaattggccttggtcctcacagctccaaaaag

SEQ ID NO: 612866 - DNA, 100 bp, Homo sapiens
tggagaaaacaagacaagcccattcattcatttgagcatagcaaaaggagcttaattccgtcgcttctgagctgtctgcacggcaggaggagagtgaaca

SEQ ID NO: 612867 - DNA, 100 bp, Homo sapiens
ccgacgccgcctggacggccgcactctccctgcccgagacccggcgcagttgtgtagcagttgagtaatgctggttagctgttaaggtggcgtgttgcag

SEQ ID NO: 612868 - DNA, 87 bp, Homo sapiens
gattacaggcgtgcaccaccatgcccagactgaaccggccgctgacactctcggagaagattgtgtatggacacctggatgaccccg

SEQ ID NO: 612869 - DNA, 100 bp, Homo sapiens
ggataaggcggcgctgaacgcactgcagcctcctgagttcaggcctacaagactatgaaagaggatgaaaaaagatacaatgaaagaatttcagggttag

SEQ ID NO: 612870 - DNA, 100 bp, Homo sapiens
catgtgcttggtgtcgtttttccttgagctgaacgtcttgcaacagtggccgcacgcatagggcatcttctctgcattcagtttcatccaagtcattccg

SEQ ID NO: 612871 - DNA, 82 bp, Homo sapiens
ccggaacatggctgcgtccggtctgcccccttacccaggaatggaacaacctccacaccatccttactatcagcaccatgct

SEQ ID NO: 612872 - DNA, 98 bp, Homo sapiens
tgtacctcaacacccccgacaagatgagctctgcgtgcctcttgctgtgccctacctggacaaacccccaactccgctccacttctaccgggactggg

SEQ ID NO: 612873 - DNA, 75 bp, Homo sapiens
gacctgctgctggacccggcctgggagaagcagcagcgcaagcgtatctggtgcaggccgtgagagcagcgggca

SEQ ID NO: 612874 - DNA, 100 bp, Homo sapiens
aaggcaatgatttataccatgaaatgattgaatctggtgttatcaacttaaaagatgccacctctaaggcagaagctcctcctggggtagagacagatct

SEQ ID NO: 612875 - DNA, 82 bp, Homo sapiens
ggacccggcgaagacgcgaccgcggcgcgagtcaccatggtgtggacactgccagcggctgcagccgacttggaatgacctg

SEQ ID NO: 612876 - DNA, 82 bp, Homo sapiens
aggagctaaagcagcgtgcgttcagccctggggagtcatactccatgggtttatgtgataaatgatcttggcatagaagaga

SEQ ID NO: 612877 - DNA, 80 bp, Homo sapiens
gggtggcgacttcctccccgcgccccctccccctcgccatgaagatcatcaatgctgtggtactgttgattttattgagt

SEQ ID NO: 612878 - DNA, 75 bp, Homo sapiens
tgcaggcacagggcccgatgagccagagaagcttggtgctggagaatctggtaaaagcaccattgtgaagcagat

SEQ ID NO: 612879 - DNA, 100 bp, Homo sapiens
ggcccatggatcctgctctccgatgacaagggagaccatcccccacccccggagtccaaaatacagagtttgggattggcccgggcctggcggcccccgg

SEQ ID NO: 612880 - DNA, 50 bp, Homo sapiens
tccgccaccgtgcacatccgaatgggtgaatggaagagaatccgaagaag

SEQ ID NO: 612881 - DNA, 88 bp, Homo sapiens
gggacccagtgcgcccgcatcgtcgaggagtctcgctgtgtcacccaggctggagtgcagtggtgtgatcttggcttactgcaacctc

SEQ ID NO: 612882 - DNA, 100 bp, Homo sapiens
gtgctgaaagtccacggatgctatccctggtcaaatcagagtttcaccagtgatcattaaagaatgggcagcttacaaaggaaagtctcctcaaaccccg

SEQ ID NO: 612883 - DNA, 75 bp, Homo sapiens
tgccctcaactacagcctccggcagcgcatggacatcctggatgctgtctgtccccagaccccagagcacgtccg

SEQ ID NO: 612884 - DNA, 100 bp, Homo sapiens
cagggccttgcctagtgggccttccttcccagttttttgctccactcaagcctgttagaatcaccatggaatacagctccagtgggaaggccactggaga

SEQ ID NO: 612885 - DNA, 82 bp, Homo sapiens
aaaatgcgctcgggctggaccagcaggtgacttaagagattaaaattaatttggttgctgttggttctgaacaaataatgag

SEQ ID NO: 612886 - DNA, 100 bp, Homo sapiens
agcctgggaggccggccggtgccagcacctttcggcttctgagacggcggcagcagcggcattcagggataaacacacttgttacctatgatatggttcc

SEQ ID NO: 612887 - DNA, 78 bp, Homo sapiens
ccggcgaaaggagctggtgcctgtgcaagttgttgaggaagctatgaagcagataacccagctcctaccagaggacct

SEQ ID NO: 612888 - DNA, 100 bp, Homo sapiens
cctcgcccgcctgtcttcgccggcgctggtctcccgcacccgggtctgcagtccctccgccatctcgcagtgtcctgttggataaacgttttcgagctga

SEQ ID NO: 612889 - DNA, 78 bp, Homo sapiens
gagaccctcacggagctgggcgacgagctgaccctgggagacatcgacggcatgtcgggccccaggcctgtggtgctg

SEQ ID NO: 612890 - DNA, 82 bp, Homo sapiens
ccggtgtgtggcgcgcccagagccccgcgtttcagccctagggaaggtggccatggctaccgggcaggtgttgttccagcgg

SEQ ID NO: 612891 - DNA, 100 bp, Homo sapiens
ccggcccgcctccctggccggggcgcagttcggaggttcaggtcaaaatgcagatcttcgtgaaaacccttaccggcaagaccatcacccttgaggtgga

SEQ ID NO: 612892 - DNA, 75 bp, Homo sapiens
aaggccgctggcgccgcctcggccagcccttcccgcgcggataagttctgaacgtcgaaaagaaaagtctcgaga

SEQ ID NO: 612893 - DNA, 100 bp, Homo sapiens
cctggacttcaacatgaatatgcagctcctgctgaaacaaaatgtgcatgtcttcaactgacagcaaggaatgccaaaacttcccccttgtcaagtgaca

SEQ ID NO: 612894 - DNA, 82 bp, Homo sapiens
gacagtgtagtcctgcaaaacattttgaggtcacggtctagatcacattctcgatccagaggaaggcgatactctcgctcac

SEQ ID NO: 612895 - DNA, 51 bp, Homo sapiens
ggcagcccacgaacacctgtcagcgaagctgccgcccatgctgtcgccacc

SEQ ID NO: 612896 - DNA, 74 bp, Homo sapiens
ctatgcagtatttctttggcatcactgcagctagtaatttgccttctggattttttttgtagcatcagatccaa

SEQ ID NO: 612897 - DNA, 83 bp, Homo sapiens
tgtgaccattgagagggaaaagagacagggcagggcattgttcatgcactgaccgacctcagcagccccggcatgacctcagg

SEQ ID NO: 612898 - DNA, 83 bp, Homo sapiens
cggcgtgtgcctggtgttcgtcggtcaccctctggacacggtcaagcatcgatttcttccctgtgaaaacaagagcaaggccg

SEQ ID NO: 612899 - DNA, 98 bp, Homo sapiens
gacaaccaggcaatgctggatagataccgaattcttatcacaaagaccatcatcaaagaggggatgctgaccaaacagaacaattcattccagcgatc

SEQ ID NO: 612900 - DNA, 98 bp, Homo sapiens
agaccatggccacgttagcccggctgcaagctaggtcgtcgactgtaggaaatcagtactactttaggaacagctatcatggtgaacttacttcagat

SEQ ID NO: 612901 - DNA, 106 bp, Homo sapiens
ccacgctcagcagcatcagacacatgatccgcaagaacaagtaccgccccgacctgcgcatgccccttgccaggccttggttagcatcggggaccttcaggccacc

SEQ ID NO: 612902 - DNA, 98 bp, Homo sapiens
aggacttcaacagggccctcagatggagcagcgtggaggatccctccccgcggcggcgatggcccgagccatgagagtgaggactttccgcgcccatt

SEQ ID NO: 612903 - DNA, 80 bp, Homo sapiens
acccaactaccaacgggatcctgtttcagggcaattaagttggaatatgcaaggttggttaagttggcccaagaagacac

SEQ ID NO: 612904 - DNA, 51 bp, Homo sapiens
cgcgagcgtctgggcgggtggtagttggaatcgaagcctcttaaaatggca

SEQ ID NO: 612905 - DNA, 98 bp, Homo sapiens
tgtcgtttcttcccctggagcaccagtgaggacaggccccagctgggagccaggcaaggaaagcaatctcccgggcaggcctccagcatctggctcct

SEQ ID NO: 612906 - DNA, 100 bp, Homo sapiens
gagtttcttaatgcaattttcccaagacacagcattgttggttttgccatgtactattttacctatgacccgtggattggcaagttattgtatcttgagg

SEQ ID NO: 612907 - DNA, 153 bp, Homo sapiens
ggagcctttgctgagtccagggagagaggcgtcccccaccgtgccgctgcagctcgggcagagccgccaagctttgggagatgtggtatggtgtattcctgtgggcactggtgtcttctctcttctttcatgtccctgctggattactggccc

SEQ ID NO: 612908 - DNA, 50 bp, Homo sapiens
aatgcttgacagagatgagtttgcagttgagtccaatgtgctgattgctg

SEQ ID NO: 612909 - DNA, 82 bp, Homo sapiens
cccgagtccgcgggaagatggcggcgccgctcatccccctctcccagcagaccatggtgaatccgggcagcagctcgcagcc

SEQ ID NO: 612910 - DNA, 95 bp, Homo sapiens
ttaaagccgaatcccggctccaagaaaccggtcagtcattggcaccatgaactggaataaaggtggtcctggcactaagcgaggatttggctttg

SEQ ID NO: 612911 - DNA, 90 bp, Homo sapiens
aaaagacagtgttctgctttcatggagttcacagaagagtcgaggaggtgcagcttcaagcttaggaccacccaccatgcctatccaggt

SEQ ID NO: 612912 - DNA, 98 bp, Homo sapiens
aaggaacccatggctttagccggctgcccagattcctttttgcaccatccgtactaccagccggaagaattaacctcgagtctgcacgcttttaagaa

SEQ ID NO: 612913 - DNA, 83 bp, Homo sapiens
tgtagctgccctttccgtttccagggttccgaccaggtggtataagttgaaatccaaaccaggaaagaaggacaaggagcgag

SEQ ID NO: 612914 - DNA, 100 bp, Homo sapiens
cacattgaatgggccaaggaaaaatcgagcagaaagaatgtctttcagagggtcctccgcggaagggcagctgaatggactccagagcagccttaaccct

SEQ ID NO: 612915 - DNA, 98 bp, Homo sapiens
cgggccggcccagagctcccgggtcgtctttcgtgtggccgcgagtgaacagcagagctgaaatggaaattggcaggtaccactggatgtacccaggc

SEQ ID NO: 612916 - DNA, 82 bp, Homo sapiens
tacaaagtcagatactgcaacaggaacatcatttacagcgagcaatttcagcacagcaagtgtttagagaaaaaaaagagag

SEQ ID NO: 612917 - DNA, 75 bp, Homo sapiens
agaaattgctgacaccatggtacaaatattcaaaggacttcaagaaaggcttccaaggaatgccaagtgctatac

SEQ ID NO: 612918 - DNA, 75 bp, Homo sapiens
tggagagcggcccgcgtgcggagctgggggcgggcgcacccccagagtgatcagcagctggactgtgccttggac

SEQ ID NO: 612919 - DNA, 83 bp, Homo sapiens
gtctgtctgtgcaggtggtcaactgcagccgtgtattcagccttagaactcccccactggaaaggattctgaaagaaatgaag

SEQ ID NO: 612920 - DNA, 98 bp, Homo sapiens
tgcaaacaaaaagacttctatttccagcttcaaggacaccacccccgacgagcttctctcggcagtcatgaccgcggttctcaaggacgtgaatctga

SEQ ID NO: 612921 - DNA, 90 bp, Homo sapiens
ggcggcgcgatggagcagcgaaaacgtggttgtagagttccgtgactcccagggccatgatccaaaggaaccagagcagttgagaaaact

SEQ ID NO: 612922 - DNA, 83 bp, Homo sapiens
ccaggacctggcctgaagacatttcctctcctcccctctggatttctcagagtgaggagctggtttcacctgaggacctgctg

SEQ ID NO: 612923 - DNA, 95 bp, Homo sapiens
ttcttatgctgggatgtgccttagaggattatgggctcacttatctaaagaatatgaggaggctaatttcagagctatatgtgcgagataactgc

SEQ ID NO: 612924 - DNA, 51 bp, Homo sapiens
ccatccaggacatctctgtggaagagacctcggccaaggaagggctccttc

SEQ ID NO: 612925 - DNA, 100 bp, Homo sapiens
ccttggccatttaagcactattattcatgaggcaaatgaggaacagggcaatagtatgatggtttctatgatcagagatattcgagagagggagattcgg

SEQ ID NO: 612926 - DNA, 100 bp, Homo sapiens
gtctgtgcggcccgctgttgtctgcccgcacccgggcccgcaggccaggtctcctctgagcctccggcctccataagacccaaaacagatgacacctctt

SEQ ID NO: 612927 - DNA, 98 bp, Homo sapiens
gaaaatgcagaggtgcacgttcagcaagcaaatcagcagctgtcaagggcagcagattatcagctgctggccttcctgcaaggactcttcactttcta

SEQ ID NO: 612928 - DNA, 90 bp, Homo sapiens
ctcggccgatgaagtgcagaggtttttttctgttaaacaggtgttcaaggagctggagtttctgggttggtataccacaggggggccacc

SEQ ID NO: 612929 - DNA, 50 bp, Homo sapiens
ttaaaacagaatatcctgagaaagaggacacagcattgttggttttgcca

SEQ ID NO: 612930 - DNA, 100 bp, Homo sapiens
cttgcagctgctgtcagcatggcccaggctcctgctgacccgggcagagaaggtgtggaggcacagttggtgctattttcacttgtccactagaagtcat

SEQ ID NO: 612931 - DNA, 75 bp, Homo sapiens
tttcagcaagctgtgaggactagtcatggcagaagacctccaaaattccagtggatctatccaacacagaaactg

SEQ ID NO: 612932 - DNA, 75 bp, Homo sapiens
cttctgccatgattgtgaggcctccccagccacgtgaaactgggaatccgtaccagagtaccagatggcttttca

SEQ ID NO: 612933 - DNA, 97 bp, Homo sapiens
tgggggcccgagaagcttcctctcagatatgagccccagactgacatcccgcctgacgtggatactgaacaggaccgagttttcttcattaaggcaa

SEQ ID NO: 612934 - DNA, 105 bp, Homo sapiens
cggctccttaccagctcacctctcaccgcgcatgtttggaggtgaatctggattgggaaagtcgacattaatcaactcattattcctcacagatttgtattctcc

SEQ ID NO: 612935 - DNA, 100 bp, Homo sapiens
taggagactcagaatcgaatctcttctccctccccttcttgatgaataatacggcagctagtccaatgtctactgcaacttcaagtagtggaaggagtac

SEQ ID NO: 612936 - DNA, 50 bp, Homo sapiens
ggacagtggacctacatacaatgaggaatactgcaatttgaaaatgtttc

SEQ ID NO: 612937 - DNA, 90 bp, Homo sapiens
ccagtgtcagaaaatggacatccctttccttggggaaatgcccgcagaggggctcaagttccagggttttaaggtgcttggaactcccag

SEQ ID NO: 612938 - DNA, 75 bp, Homo sapiens
cagaggaggccagggaagctctagaggcgttttttggccaaggggctactgcagcactggggtgtcagttgttgg

SEQ ID NO: 612939 - DNA, 90 bp, Homo sapiens
ccccagcttggcgtcctgagaaatggcctgtttaaagaagaaaacccgtatgctagatttgaaaacaactaaagcgctccagcacatcag

SEQ ID NO: 612940 - DNA, 75 bp, Homo sapiens
tcactgggtttggctcaatggaggaattggtgctcctattgtacagcttcctgcctgacacagctcacttcaaga

SEQ ID NO: 612941 - DNA, 75 bp, Homo sapiens
gagtcatttctgttccgcacaggcctgctgaactgggtgctttatatagggtgtcattccacacatccacaaatc

SEQ ID NO: 612942 - DNA, 51 bp, Homo sapiens
agcaaaggagactgcaccatccgtatgcttgtgaccacaccagaaaaatgg

SEQ ID NO: 612943 - DNA, 80 bp, Homo sapiens
agcccccgccgtagccgcctccgagcccgccgccacatcctctgagctacgagttccagggagctctgtcctggtgaccg

SEQ ID NO: 612944 - DNA, 100 bp, Homo sapiens
cagacccactggatgagggcccgaaaatggtttcagcacctgtgtcagcttcctccatacagtggaacagttctgtgtggcacacaggctgtggataaac

SEQ ID NO: 612945 - DNA, 80 bp, Homo sapiens
acattcctatactctacagaacagattttgaagatgtaactgagtttctggaagaggtcattgaagccttgatattggat

SEQ ID NO: 612946 - DNA, 100 bp, Homo sapiens
gtggaatggatagacgtcagaacacatacattatggacaaaggcttcaaaggtgccagcgagatttcagattcctgtaaacctctaaagaaaaggagtcg

SEQ ID NO: 612947 - DNA, 98 bp, Homo sapiens
gaaaaggaggaattcgccgtgcccgagaatagctccgtccagcaggtgtcccgacccaggctaagcttgagcatggctgagcaggagcccacagccga

SEQ ID NO: 612948 - DNA, 75 bp, Homo sapiens
gatccctggttaccctcaggcaaagttgtatccaggaaaatcattgtatatttggagtctgggagtgatcctttt

SEQ ID NO: 612949 - DNA, 100 bp, Homo sapiens
gaagaaccttttccctaatacgtacctcattgtgggagatgacttcctgaagccacagatcatcacccagccagaaaccaccatggctatggtgggcaag

SEQ ID NO: 612950 - DNA, 80 bp, Homo sapiens
catcaacctgaaggagatcaacctgaggccgcagatgtcccaggtgagcgtcctgaccaccctggagcgtaggttcaacc

SEQ ID NO: 612951 - DNA, 75 bp, Homo sapiens
aagagaaaggcccggagactgagcttctggaagaggtgaagaaggaattgcagaaagtgaaagaggaaatcattg

SEQ ID NO: 612952 - DNA, 90 bp, Homo sapiens
atcttcaaagcacataaaaacactttctgaagctcatgaagactgtgtaaataatatcagattgtcagcagcctgctgcctccgtaccgc

SEQ ID NO: 612953 - DNA, 76 bp, Homo sapiens
gacctccgtgaaggcgtccgtcctgcgcatcgcatttatctggaagaatgtgaactggctaaacagctttatccaa

SEQ ID NO: 612954 - DNA, 74 bp, Homo sapiens
ccttcgcgagcgtctgggcgggtggtagatgaagactcttaagatgacagaaggtgatttttctggtgatcgag

SEQ ID NO: 612955 - DNA, 100 bp, Homo sapiens
ccagaatcgcgtctggccggtgggaagccgggaactccagccccctgtaggagaggagaaaggagcgagattccagttcttcagacaaacaatggtccaa

SEQ ID NO: 612956 - DNA, 100 bp, Homo sapiens
tcctccccacgccttcggcccacccctctgtggtcatggtgtattttgattacatgagaagctggatccaaatgctacagcaattacctcaagcatcgca

SEQ ID NO: 612957 - DNA, 80 bp, Homo sapiens
ctaatttgaaccatgtttggattgaagccgcctctgtattacttaccaggggtgagcccctccagactccgaataggaga

SEQ ID NO: 612958 - DNA, 83 bp, Homo sapiens
gggaactgcggacggtggcgggcgagcggctcctctgccagaggtcctgggaactccaacaagggagcaaatcagagaaatga

SEQ ID NO: 612959 - DNA, 82 bp, Homo sapiens
gcaggcgccgcacggagttgcgtcccggggacttggggccgcagggaggatgatcggctgaatgtaacagaggaactaacgt

SEQ ID NO: 612960 - DNA, 100 bp, Homo sapiens
gggaatgtggccctgagtgatggacacaacaccgcggaggaggacatggaggatgggagagcttatggatggagaccaaacatccagatctggagtgccg

SEQ ID NO: 612961 - DNA, 90 bp, Homo sapiens
gatgccctgcagtacctgcagaaggtctctggagacatcttcagcagggccaaagcacgttgttgttaagtttgtggtgaaattctttcc

SEQ ID NO: 612962 - DNA, 132 bp, Homo sapiens
agctggaggagctgatagacatggctgtgctggaggaaattcaacaggagctgatcaaccaaggttcaaaccttgtactactcagctgatcacaagctgcttgatgggaacctactagatggacaggctgag

SEQ ID NO: 612963 - DNA, 83 bp, Homo sapiens
agaatttgattcatggagatttcagactagataacatagttttccaccctaaagagcacttattttagaggagattgcaattg

SEQ ID NO: 612964 - DNA, 75 bp, Homo sapiens
cgacgctaagttgctgatcgtggcggatggatagaatgacagaagatgctcttcgcttgaatctgttgaagcgga

SEQ ID NO: 612965 - DNA, 87 bp, Homo sapiens
tacagaggaatagtctacaaaggaagacttgtaacctggagaagaggtgcagtctttgcaagccacatttggaacttttgagtccat

SEQ ID NO: 612966 - DNA, 100 bp, Homo sapiens
gacatcccatgcggctactcctgcccagcgtggtggggcagcagaagctccagagcccagacttgcagggtggatgtgaacactgaccggaagatcagtg

SEQ ID NO: 612967 - DNA, 100 bp, Homo sapiens
ccattgtatgttctcggcacctttgtctaaatctgacactggaggagcctttaaaggttttaaaggtttggtggtaccttctggaggaggacgcttttct

SEQ ID NO: 612968 - DNA, 75 bp, Homo sapiens
tgtctcgaccgcgtcttctgagtcagaatagcctaacatggcagaccagagacagcgctcactgtctacctctgg

SEQ ID NO: 612969 - DNA, 100 bp, Homo sapiens
ctgcaaacctgggttctggggactgagccccagcaaccccgagggctgtacccataaatcttgcttccagccactgtttcagttcgaggacatgcaggaa

SEQ ID NO: 612970 - DNA, 90 bp, Homo sapiens
gtctgttgtaccccactgctggggtggtggttccaatgagacagggcacaccaaactccatctgatgaggacggggacttggttgccttt

SEQ ID NO: 612971 - DNA, 100 bp, Homo sapiens
ctatgatagaattacttctctacaggtattgaagcccctgggtgataatttgatggaggaaaacataaggcagtctgtaacaaactctatcaaagcaggc

SEQ ID NO: 612972 - DNA, 75 bp, Homo sapiens
catgcaaggaaacataagttggaggttctggaatctcaggctaaaataaatgaagctgtagaatgcttactgtcc

SEQ ID NO: 612973 - DNA, 105 bp, Homo sapiens
tcagcctcctgagtagccgggactacagattggacgactgattattggacagaatggcgtcttgtcgacacctgcggtctcctgcattatcaggaagatcaaggc

SEQ ID NO: 612974 - DNA, 89 bp, Homo sapiens
gtcggaggggccgcgggagcccgaaagcgagaagttttcagcaaactcggattatctcgatcgtgcaatcaggcctcacagaggagctg

SEQ ID NO: 612975 - DNA, 100 bp, Homo sapiens
tcaaaggcacttcgtggggtcacagaatttaacttgggtcgtctacagatttccaaagaattagtaaatgatgtcattctcccgaaatgggctaaatcag

SEQ ID NO: 612976 - DNA, 87 bp, Homo sapiens
gccgccttgctgctgctcaaagctgctgccgccccttgggctaaaaggccaagtcctgtatctgccatgtctgtggcgtccacctca

SEQ ID NO: 612977 - DNA, 51 bp, Homo sapiens
ggtgtctgtctgctgcaaggagaggatatgacctgtcagcctctacattct

SEQ ID NO: 612978 - DNA, 82 bp, Homo sapiens
gacgggacggacggtgatggtggtcgccgcggcggcgtgtgcgcccctcaggtttggtgcacctcgatttggaggaagtagg

SEQ ID NO: 612979 - DNA, 75 bp, Homo sapiens
ggtgacttcacttttgagtgcaactgccttccagggtatgttggagctagaggctgagcatgaccaggacctgag

SEQ ID NO: 612980 - DNA, 100 bp, Homo sapiens
acagtgttgctgcaacatagagctgacattaactgtcaggttcttcacacacccccattcggcgtagtacccagagagctcaagatgtgtggcagttttc

SEQ ID NO: 612981 - DNA, 87 bp, Homo sapiens
tacagcaaggtttactctgaatcccaatcctacaggagttcaaaacccacacatactggccttatgggtttctagaaggaaaatcac

SEQ ID NO: 612982 - DNA, 91 bp, Homo sapiens
acatgtaggagaagctggagaacatagacagggatgaggagccttggtcatcatttgatatatacacccggaaagggccgctggaaaaccc

SEQ ID NO: 612983 - DNA, 75 bp, Homo sapiens
attgctacagtttacagacaagaggtttcagccagtgcatgaccttactattgatccctgcatgtcactgagtcc

SEQ ID NO: 612984 - DNA, 75 bp, Homo sapiens
aaagaaccagatgtcaaaactgatttcagaaatgcatagttttatccagattatgactgtacccaatgaccctta

SEQ ID NO: 612985 - DNA, 50 bp, Homo sapiens
gcgaatatcgtcatcgttagaagagctgctgcaaccattgacagcttagc

SEQ ID NO: 612986 - DNA, 100 bp, Homo sapiens
tcgagtgtacacactgcgagctactttctgactgcccgcctggcactgaagccgagctcaaagatatttggcatgatcttcagtatgatcttgtgctgtg

SEQ ID NO: 612987 - DNA, 100 bp, Homo sapiens
atgtctctgatgcccctgggccaggctaatggtgcccgggaaacatttgagaattactaccgaaaacagaggcgaaaacaggctcgtttggtacttcaac

SEQ ID NO: 612988 - DNA, 75 bp, Homo sapiens
cctctcgtacatcggcgagggcgcctacggcatggtgtggcaactcagctgagcgagcgcccggcctgtgtgaag

SEQ ID NO: 612989 - DNA, 78 bp, Homo sapiens
agattctctgaagttacacccatcacagaattttcatagagctggactattggaaggctgcatgttaaatggccaaga

SEQ ID NO: 612990 - DNA, 75 bp, Homo sapiens
ccagtggatctccagacactttactaccatcagtccatggtggggtctgacatcgctgagctgctaatgcaagac

SEQ ID NO: 612991 - DNA, 74 bp, Homo sapiens
cggaggtttgcaggggtgcagtgtgtctggtcttatgaggccaactgtgatttgagacggcagattgatgaaca

SEQ ID NO: 612992 - DNA, 100 bp, Homo sapiens
ttcattgcaaatctgcaaggggtaaatgagggtgttgatttctccaaggatctgctgaaaagacaaagcatggaggacacaagaatgggaggaaaggcgg

SEQ ID NO: 612993 - DNA, 97 bp, Homo sapiens
cgagcggaccaaggagcagatggataggtcctcagcccaggtggtggccgaaatgttattttaacgaggtgttggctgaactcaacgccatgcttgg

SEQ ID NO: 612994 - DNA, 75 bp, Homo sapiens
gaggaccaccagctaccatagttgctattgatgaagaaagtcggaatggtccaatgatgcatcagcagcctcctt

SEQ ID NO: 612995 - DNA, 83 bp, Homo sapiens
cggtcagctcctagggggaagaaagccatgctgcccagccggggcagaaccccttcgagctggccttctccctagaccagccc

SEQ ID NO: 612996 - DNA, 73 bp, Homo sapiens
gcgagggcatggacgagatggagttcaccgaggccaaacgtaccaagaaagtcgggatcgtcggtaaatacgg

SEQ ID NO: 612997 - DNA, 98 bp, Homo sapiens
gtgcagatcagcgcaaggcaaagttgggtgactcccacgacctgcagcgcttccttagcgatttccggtggcttctggcacagcagcttaattgaccg

SEQ ID NO: 612998 - DNA, 100 bp, Homo sapiens
ctgccgagaatgctaggcttctggcccagaaaagaggagctttgcagggctctgcatggcaggttagctcagattgttgccagcaaaggaggttttgaaa

SEQ ID NO: 612999 - DNA, 83 bp, Homo sapiens
acctgctaacagaactggaccttttcgcctctgcctgtgagtttctggatattgtagagctgctgctccagtctggtgctgac

SEQ ID NO: 613000 - DNA, 97 bp, Homo sapiens
cttggtcgccgcgtccttggctggcgtttctgtggctcctgatggatctgagaagatggacgtggaggatgaaaatctgtctgattattttgaactg

SEQ ID NO: 613001 - DNA, 100 bp, Homo sapiens
tgccttgttgccatgggatacctgttcatgtgttttggaggcaccgtctctccctgggaccagagtgaccgtctccttatcaagggaggcagaatcgtca

SEQ ID NO: 613002 - DNA, 90 bp, Homo sapiens
aaaattctgaactcaggacttggcaagtgcacatgaacttgaacagatgcagctgattttagaatctattcctgttgtacatgaggaaga

SEQ ID NO: 613003 - DNA, 100 bp, Homo sapiens
gcccgccctgcgccccgctctgctgtgggcgctgctggcgctctggctgtgctgcgcggcccccgcgcatgagccatccaaaactctgtttgtcaaaggc

SEQ ID NO: 613004 - DNA, 130 bp, Homo sapiens
cacgggcatccttgactccatcgggcgcttctttggcggtgacaggggtgcgcccaagcggggctctggcaagtctcaaaccatgaattatgtgggacagctggctgggcaggtgattgtcactgtgaag

SEQ ID NO: 613005 - DNA, 50 bp, Homo sapiens
cctaaagatagacagctcaaatgaattggcagagtctcgctctgttgccc

SEQ ID NO: 613006 - DNA, 50 bp, Homo sapiens
cccagagcaaattgagacgtccgggcttttgcagaaatgctgaaagtgaa

SEQ ID NO: 613007 - DNA, 100 bp, Homo sapiens
ctctcagtaaaattgcatgataaagttcataccgtagtagcatcaaacaatgggtcagtgttctcgatgcaccagcaaggaatactgaagaccgatgatc

SEQ ID NO: 613008 - DNA, 100 bp, Homo sapiens
gtgcaacgacatgcagcagtcgggcagctgtccccgaggacccttctgcgcctttgcccacgtagaaccctcgtgtgcatcaccggggccagtggggagg

SEQ ID NO: 613009 - DNA, 75 bp, Homo sapiens
tcttgatcctgtatatgatgtaatttggagattgttcagattccattctgtggggaaattgactgtgaggactgg

SEQ ID NO: 613010 - DNA, 100 bp, Homo sapiens
cgaacagcgggcggtgttcccggctccgtggggccgtcttcccggcgagtccgcgacggtcgccgcccacggcgaggaggctgatccgatagagtaatac

SEQ ID NO: 613011 - DNA, 101 bp, Homo sapiens
agtgaggaggaaaacacccccatttgaactttgaggcgctgatcatcaccatgtcggtagtcgggggaaccctcctcctgggcattgccatctgctgctgc

SEQ ID NO: 613012 - DNA, 100 bp, Homo sapiens
ggagaggaggcagtggccctggtggaagacttgcagaaagaacctggaagacagaggctggagtcggatgcctcctccctgtagtgattcctgtgacttt

SEQ ID NO: 613013 - DNA, 76 bp, Homo sapiens
gccgcagctccgtgggcaacggagacaaggagaaggccttaggatctactgggggagtccggaggagcagtctctt

SEQ ID NO: 613014 - DNA, 87 bp, Homo sapiens
tctgtttgcaaagcacctgaactgggatgataccggggactctccagagccatgactagatccaatggattctgcgatgctgtctgg

SEQ ID NO: 613015 - DNA, 75 bp, Homo sapiens
ctgaggaccggcaacatggtgcggtcggggaataaggacccattccaacaatctcgtaaaacatggtggattact

SEQ ID NO: 613016 - DNA, 82 bp, Homo sapiens
tgggttctggactttgggcgtcccattgccatggtcaaaatgcagatcttcgtgaaaacccttaccggcaagaccatcaccc

SEQ ID NO: 613017 - DNA, 90 bp, Homo sapiens
ccggcgggcgcaggccactgcacaagaccctgtctttcagaagctgaaaggccagttcacgacgggttcagcactcctgcagaaactgat

SEQ ID NO: 613018 - DNA, 98 bp, Homo sapiens
ctcctatggtatcaccacctccagactatcctggagaattttttaaagacttcattagaggggtggtagactcggaggatctccctctaaacatatcc

SEQ ID NO: 613019 - DNA, 76 bp, Homo sapiens
aaaagggccatacatttgccgaagagcttcagaaacttaattggcttagtgtcgacttcaataattggaaagactg

SEQ ID NO: 613020 - DNA, 100 bp, Homo sapiens
acaagttatcacagaaactgcaaagaagatttcaactccttattctaccttgtaaatactgttatttgtatatactgtaaatgatgacatcggtgggcac

SEQ ID NO: 613021 - DNA, 75 bp, Homo sapiens
cgctgcagtctataagaagtagcctactgctaggcttcaggagtcataccctaatgatcccagcaagataatgtc

SEQ ID NO: 613022 - DNA, 100 bp, Homo sapiens
tgctcctctctccttggcctctcctgggatcggcccaaggccagttctccgcagggtagatacaacaagaattgaatactccattcctttaagagaaaac

SEQ ID NO: 613023 - DNA, 99 bp, Homo sapiens
aaactcagtgagacacaatttatcattgaataagtgttttaagaaagtggacaaagagaggagtcaggtgtcatggagaaactccagctgggcccagag

SEQ ID NO: 613024 - DNA, 90 bp, Homo sapiens
agaaagacatcctgagaggacttggcagggtaaaccagacttgaatacaacattgccaattagacaaacagcatcaattttcaaacaacc

SEQ ID NO: 613025 - DNA, 75 bp, Homo sapiens
aagtttttggcaccatatactactttttccagaattcatacaaagagtgaacagatggagtcggataactgttca

SEQ ID NO: 613026 - DNA, 78 bp, Homo sapiens
aactcattctcaccaataatagtctcgtggaactggaatggaagttggatacactttgtgacttgtacgagacactga

SEQ ID NO: 613027 - DNA, 100 bp, Homo sapiens
aagtctgccaagcatacaaggcaccacgttcacatcactgcagaaagtgtaacaggctcaggcagctgtccaaggacctgttggtacagatttcaaaccc

SEQ ID NO: 613028 - DNA, 100 bp, Homo sapiens
gctggctctgctgctgccgccggcgaaggaggaggcgttgccggaaatacaggtatcaggatgaagatacacctcctcaagagcatatttccccacaaat

SEQ ID NO: 613029 - DNA, 98 bp, Homo sapiens
atccccaaaattgacatctatcattatgaattggatatcaagccagagaagtgcccgaggagagttaacagccagagagatgacacgggggaaattcc

SEQ ID NO: 613030 - DNA, 111 bp, Homo sapiens
tgtgcagccgcgaggaggcgcgggaggtgttcgagaacgaccccgagacgaccatggtgaatccgggcagcagctcgcagccgcccccggtgacggccggctccctctcct

SEQ ID NO: 613031 - DNA, 100 bp, Homo sapiens
atattgagtcggaaacggggtccactggtgccctggagacccgcagcctcaaggatcacaaaggagaggcgggagatttttgagcagcacctgaagagcc

SEQ ID NO: 613032 - DNA, 100 bp, Homo sapiens
tggagacaggtgctctcggttgcacaataaaccgacgtttagccagtgtgctggaattgatgttcgtctgtgtgatgttggtgaggccatccaagaagtt

SEQ ID NO: 613033 - DNA, 82 bp, Homo sapiens
cgacctgcagtccatgcaccagtttcgccaggacacagacaatgcagatcttcgtgaagactctgactggtaagaccatcac

SEQ ID NO: 613034 - DNA, 102 bp, Homo sapiens
tgtgacttgaagtggatacatataataatttttcaccatgcatcggaaaaaggtggataaccgaatccggattctcattgagaatggagtagctgagcggca

SEQ ID NO: 613035 - DNA, 73 bp, Homo sapiens
tgcatggggttttcctttaccatgcaatcaagcacttttctgtagaaggtcagttggaattcagggcattgct

SEQ ID NO: 613036 - DNA, 89 bp, Homo sapiens
caggacttcatccaggcctacgaggaggtgcgcgagaagtacaaagaggtccagttccggccgtaccgcacagacgacttcatcacgcg

SEQ ID NO: 613037 - DNA, 74 bp, Homo sapiens
tgaccgagagcgtgaccgagagcgcgaatatcgtcatcgttagaaggctagacagcaacaagcagaattggccc

SEQ ID NO: 613038 - DNA, 100 bp, Homo sapiens
gcagtttccgtgggtctgtgaagaggtcggcggcccctgcgggcgccagtcaggttatgagaagacagatgatgtttcagagaagacctcactggctgac

SEQ ID NO: 613039 - DNA, 83 bp, Homo sapiens
cgaaaactccaccgtagcccttgccaaaggccaccagggaagcttctgcatgctgtgtgtcatgcagaaccacattgtccagg

SEQ ID NO: 613040 - DNA, 100 bp, Homo sapiens
gagtccggacatctgaaacttgatatgaagatcaatgatgcagactgatggttttgatgaagctgggcatttataactagattcattaaggaatacaaag

SEQ ID NO: 613041 - DNA, 90 bp, Homo sapiens
atgaagagttagcctggcctggcataatggaaggccaatgatgaggccaatcagagtgatacaagtgtctccttgtcagaacccaagagc

SEQ ID NO: 613042 - DNA, 98 bp, Homo sapiens
ccacagcagcaacacggataacattccacctgaaaggaccgagatctcactcagcagacagcagcagcccgggagcctgagctcaggaggaactctta

SEQ ID NO: 613043 - DNA, 90 bp, Homo sapiens
aggactacgtgcggacaggcacctaccagcgcgccatcctgcaaaaccacaccgacttcaaggacaaggaggccactgtctgcagctccc

SEQ ID NO: 613044 - DNA, 83 bp, Homo sapiens
ctgcggtcgctggaatgtgtgtctcacgaggtttatcatttaaaagtgcctgtgtgaagtcacttttgctggaaaactgcagc

SEQ ID NO: 613045 - DNA, 100 bp, Homo sapiens
agagcgctcccaggagaaacaagatattagaaatggctactccccagtcaattttcatctttgcaatctgcattttaatgataacagaattaattctggc

SEQ ID NO: 613046 - DNA, 82 bp, Homo sapiens
gcttgggagagctcctgggccacccctcctttcaggtcaagaaaggaaggaggagacctgaacagtacatccggagaatcca

SEQ ID NO: 613047 - DNA, 100 bp, Homo sapiens
tgggtcccgcagtcgcccgcaaccggggcgaatcatggcggccgccaagggggaaatttgcagtggtgagaaaatgtataaagaaagattctgggaaaga

SEQ ID NO: 613048 - DNA, 90 bp, Homo sapiens
cgaccatttggtttggtcatcaatctgaactacaaagatttgaaccgctctactagccgacagtttgttgatggtccccctggacctgta

SEQ ID NO: 613049 - DNA, 74 bp, Homo sapiens
aaatattggaaagacgctcgtcaccaggacccaaggaaccagaactgtggctgcaccatctgtcttcatcttcc

SEQ ID NO: 613050 - DNA, 99 bp, Homo sapiens
gcagccgcaagacattgtttctctccctctgcccccccttccccacgcaaccccagatccatttacactttacaatgaaggatttgggggcagagcact

SEQ ID NO: 613051 - DNA, 79 bp, Homo sapiens
ggaagccacgtgcagacatctacaaccttcgatctcctgacgagaaaatgtttcaacgtgcgcaagagttgcggtggcg

SEQ ID NO: 613052 - DNA, 100 bp, Homo sapiens
gctcttgccctcatcctggttctggaatcctcagttcaaggtcaataagcatgcgttttctggagggagagacaccatcgaggagcacaggcagtttggg

SEQ ID NO: 613053 - DNA, 96 bp, Homo sapiens
aaggagggtcctctcagtgattaagctttttctaaaggctcctgtgaacactgcagaactaacagatctcttaattcaacagaaccatattgggag

SEQ ID NO: 613054 - DNA, 100 bp, Homo sapiens
aggcggcggaccgtcccgcgcggggcacgatgttgaacatgtggaaggtgcgcgagctggtggacaaagccttcaccagcctccaccaagacgggacaag

SEQ ID NO: 613055 - DNA, 98 bp, Homo sapiens
ctactaactttgaaatggaataaggtcagcctgccagtatactggggggcagccatagtgaaggactgttgcagatagcatcagggcctcagccagga

SEQ ID NO: 613056 - DNA, 51 bp, Homo sapiens
gctttgatttacagcagctgcaggatgatcggctgaatgtaacagaggaac

SEQ ID NO: 613057 - DNA, 82 bp, Homo sapiens
aaacttaggtatttaagtactgaaagttaatatgatcctctgttgaagcaagaagacaaactgtatggtggagaaagaagtg

SEQ ID NO: 613058 - DNA, 82 bp, Homo sapiens
taaccagttagtggtgctcaacgtgtacgacatggaccctgatgctcccataagacagaaaatgccccttgatgatctggat

SEQ ID NO: 613059 - DNA, 75 bp, Homo sapiens
gtaaatactgtttcctgccttgccgtttcccaaagttgtgcgggttgaagcccttgatgagcctccctatttgac

SEQ ID NO: 613060 - DNA, 90 bp, Homo sapiens
ggaaaatgtagcttcccggttaagatcatgatcagaagcatcttcctgttcttggaccgcacctatgtgctgcagaactccacgctgccc

SEQ ID NO: 613061 - DNA, 100 bp, Homo sapiens
ggcctctcctgggatcggcccaaggccagttctccgcagatggcaatcaggaattgtttccctgtgaagtctgtggaagacgttttgcagcagatgttct

SEQ ID NO: 613062 - DNA, 99 bp, Homo sapiens
tgcttcaaagcatggggctaactccagaatcccccattgtattgacttgaagctgaaagaaaagccttagttggccatgctggaagaagaggatgcttt

SEQ ID NO: 613063 - DNA, 89 bp, Homo sapiens
atataggtcattaacccttggctatatggcagaagcgtttggtgttggtgtggaattcattgatcaacatatctgaagagatggattaa

SEQ ID NO: 613064 - DNA, 100 bp, Homo sapiens
gtgagttcctgctcagcctcacactccccggggctcctggggcccagattgtgcactcccaggtggaggagctgtggttgggtcggccgtagccccggga

SEQ ID NO: 613065 - DNA, 82 bp, Homo sapiens
cccagaccctggagcctcagttggaagcagccgatccagcctgcggagcctgtggggcagctggttggtggagaatttgaac

SEQ ID NO: 613066 - DNA, 100 bp, Homo sapiens
ttaaaagcaagctggttctctgggatataaataaggtgggtttggaggatttgggacaacatctacaactgcaggttctgcattcagcttttctgcccca

SEQ ID NO: 613067 - DNA, 50 bp, Homo sapiens
cggagcgcgagagcttcgagcggactcagattctccctgactctgctcat

SEQ ID NO: 613068 - DNA, 75 bp, Homo sapiens
caacaaccatgctgggcatctggaccctcctacctctgcagtgcctgatttgagatggggtcccaggtctcggtg

SEQ ID NO: 613069 - DNA, 100 bp, Homo sapiens
gaaaaggcaacatcctgtcacaggccatgctctggcaaaaacggaatagaacgtgtccgggctgtggccaagcggattggtgaggtccaggtggcttgtg

SEQ ID NO: 613070 - DNA, 98 bp, Homo sapiens
acaaccttggtttgcccttatcttgtagacactggcatgttcagaggctgccgaatcagcttagcagtgtctgcaaaaacgaatcttttcctacaacc

SEQ ID NO: 613071 - DNA, 75 bp, Homo sapiens
cacgctactacctggtgcagggcctgattgaggactgccagctggcgctgcagggaccatgcctggccggatgct

SEQ ID NO: 613072 - DNA, 99 bp, Homo sapiens
ccgggagggccggggccgcgctcagcggcagtacatacctgtgaaaatgaagagcaaagccttctggatcttttcttgggagtatgccatgatgtatgt

SEQ ID NO: 613073 - DNA, 100 bp, Homo sapiens
ccgagatgtctcgctccgtggccttagctgtgctcgcgctactctctctttctggcctggaggctatccagcaacgtgctggccaaagcgctctatgaca

SEQ ID NO: 613074 - DNA, 100 bp, Homo sapiens
gataaaattgccctgaaactggttggtgaagaaggatttgtagatctctttaaggaagttgcagggccaacagaaatgtgtgaccagaggcagctgggcc

SEQ ID NO: 613075 - DNA, 100 bp, Homo sapiens
gtgagtagcgggcgaaggcggggcctgaggaggactgagctggggcgggacccaggaatggaagttggatacactttgtgacttgtacgagacactgacc

SEQ ID NO: 613076 - DNA, 80 bp, Homo sapiens
gtggcctgaggcttggataagtgggacaagttggatggcttgaggactggtactaaaaggaaacgtgactgggaggccat

SEQ ID NO: 613077 - DNA, 100 bp, Homo sapiens
gtgcgcgaagatgcgaaaggtggttttgatcaccggggctagcagtgtttatgaacctcagttgcagcaccatgtggctcaaaagaagattccttatgtg

SEQ ID NO: 613078 - DNA, 74 bp, Homo sapiens
gcaacctcaacactgagcctccttatggtgtgtggggtcctgattctggatgggttgttgttgtcccagagtcg

SEQ ID NO: 613079 - DNA, 100 bp, Homo sapiens
gcagacagatgggaaaaatatttgatcaaggatgcatctctcatggttgaagaagtggtggaggatggcatgggaaagagtgcctgaggatccttgcctg

SEQ ID NO: 613080 - DNA, 100 bp, Homo sapiens
gcaaaggcctgcaaggtgctggtggagaaatgaggtaggatttcactctgtcacccaggcgggagtgcagtggtgcgatcatagcggggactacaagtgt

SEQ ID NO: 613081 - DNA, 90 bp, Homo sapiens
gtctgcgaccgctgccttctcggggtccagtcgtcgaccatcgagctgctttgaagaccctgcggaggttccgtcgctgcttgaacacag

SEQ ID NO: 613082 - DNA, 83 bp, Homo sapiens
cactttcgccagcccgtgccgcgagcgcggcctgcaggaggtgttgttagagatacaaaaggaattattagactacaaaggag

SEQ ID NO: 613083 - DNA, 49 bp, Homo sapiens
ctggcatggtactggatatagtacaggaatctgaattagagcctatgaa

SEQ ID NO: 613084 - DNA, 75 bp, Homo sapiens
tgttgctatataccattgaaaagccttcagagctgagagtgatatggagaatgcagaaaacattctcacagtgat

SEQ ID NO: 613085 - DNA, 100 bp, Homo sapiens
agagactacgcgctctggaagacattgaacgggaaatcggcgccatccttcagaatgcagggcagctttggaagaagtagaaggtgatgtggcagaattg

SEQ ID NO: 613086 - DNA, 51 bp, Homo sapiens
ggaacaggaggagtaagattgagtgtcaacctaagaaaaagtctacgccac

SEQ ID NO: 613087 - DNA, 100 bp, Homo sapiens
gctggatttaagcactgctgcactttatgagaaggacagaataacgggctcccagattcacaagccccaccaagaggatcaccccaggaacgcttggagg

SEQ ID NO: 613088 - DNA, 99 bp, Homo sapiens
gccgcggggcccgccgccgctcaccgcagccccctcctggcgacccgcaagtgagaagccctaccactgcaactgggacggctgcggctggaagtttgc

SEQ ID NO: 613089 - DNA, 75 bp, Homo sapiens
gatcaaggttcggaattactggacagctgatggcataaggagggttcctgcccccaggtgaacattaactttccc

SEQ ID NO: 613090 - DNA, 100 bp, Homo sapiens
ccagtccccacaggagtgggaggcgatccaggccttgacgatgatgaggagtctgatgaggaagctgtgaagaaaaccaacaaatgtgtactagtctggg

SEQ ID NO: 613091 - DNA, 75 bp, Homo sapiens
gaggcacagggcgtcggacctgcacgagctgtctggccagaagcggactcctagaagaggggagcagcaaggatg

SEQ ID NO: 613092 - DNA, 50 bp, Homo sapiens
gggtttatttgatgtccacaatgagcaccatcactcctgtagtgggtaag

SEQ ID NO: 613093 - DNA, 100 bp, Homo sapiens
cgcgagtcggcgcccggccgaggggctgcgtaggccccgcccggccaggcccagccgggccctggacagatttctccacccaggtgaactcctccctcac

SEQ ID NO: 613094 - DNA, 99 bp, Homo sapiens
gtcactgcctgcgcagctccggccgcctggctccccatactagtcgccgtgtaaacaggaacatcgataagtagtgtaaaaacttgcacaatgaaatcc

SEQ ID NO: 613095 - DNA, 100 bp, Homo sapiens
ccgcctgagccggggaagatgcttcatctgcccctgcccagatccggaagaacggtgaatttcccccgcagcaatatgttaaggatacctgtaagaaagg

SEQ ID NO: 613096 - DNA, 98 bp, Homo sapiens
tggaccacatagacatttacgcggatgtcggcgaagagttcaaccagaacaatgagatggtggagctacagagaatacggatgaaggatgaaatccga

SEQ ID NO: 613097 - DNA, 96 bp, Homo sapiens
gcagcaaaagaaggagggtcctctcagtgattaaggatgaacatggtttcatctccagggagttccacaggaaataccggatcccagctgatgtag

SEQ ID NO: 613098 - DNA, 100 bp, Homo sapiens
ctgagggtgaagtggcaggaggaggaggaggggctccggctggtctgtggtgaggcctaaatgtgcacagcatgctcaagcaccagacgctggtcctgac

SEQ ID NO: 613099 - DNA, 50 bp, Homo sapiens
acctgctatgcagcccacccaggatgcagcagtctcggccctggctgctc

SEQ ID NO: 613100 - DNA, 100 bp, Homo sapiens
cagttcgaggagctcgaggtggactatgaggctatccgcagcgagatggagcagctcaaggaggtctctcggctgctgggggcattccacaacccaaaac

SEQ ID NO: 613101 - DNA, 100 bp, Homo sapiens
aagaccaaggtcaacaaggacaacaatgagatcgtggacaagatcatgggcaaaggacagatccagcgtctgttcctcacacaccccgcccaaggacgtg

SEQ ID NO: 613102 - DNA, 100 bp, Homo sapiens
gataatggagaaagatcacagcagtgttccaagttctaaagaggctaccaaagtgacagcagatggcgagcagaccggacaggatgctgagaggaccaac

SEQ ID NO: 613103 - DNA, 82 bp, Homo sapiens
tccagcggcgcccgggccagcagcgattgtttttcagtttccaagatggaatagttatagtgcatatcttcctcatggttgt

SEQ ID NO: 613104 - DNA, 90 bp, Homo sapiens
cttcggagcaggaagctaaagctgtttctgaatgagacccaaacgcagggtgtcgtttcagtcagatgttgcatccaatttttgaggaag

SEQ ID NO: 613105 - DNA, 90 bp, Homo sapiens
ctgagcgatttcttcgaggtggagtcggagctgggacgtgaatgtggtggaggcacttcaggaattctggcagatgaagcagtcccgtgg

SEQ ID NO: 613106 - DNA, 100 bp, Homo sapiens
gtcaacaaccgtggctcacaagatgaaagagcacatatggcataatccacgctggtggggtagggaaatatctcagtgactggatcctgcatggagaacc

SEQ ID NO: 613107 - DNA, 50 bp, Homo sapiens
catagccggacggggatctgagctggcagagctgaaatatgctaataccg

SEQ ID NO: 613108 - DNA, 75 bp, Homo sapiens
cggcgagcagtctcaggcctttagtgatgatgtctctgcgatatgataccagctattttgtggagtattttgcct

SEQ ID NO: 613109 - DNA, 76 bp, Homo sapiens
caagagacagcgattggacagaatttgtgaagggttctccaaaaaatgtggaatcctttgcatctatgctgagaca

SEQ ID NO: 613110 - DNA, 95 bp, Homo sapiens
gcggcgggacgcgagcggcgagccggagcgcggagcccggctcccgcaccatggaggaggacgacagctacgacaggaacagggttccagtcaga

SEQ ID NO: 613111 - DNA, 46 bp, Homo sapiens
gaggagccggtctaggacgcagcagacaatgcagatcttcgtgaag

SEQ ID NO: 613112 - DNA, 50 bp, Homo sapiens
gcaccattgtgaagcagatgaagtcagttctcctcgggtctcggggactt

SEQ ID NO: 613113 - DNA, 147 bp, Homo sapiens
gcaagaagctcatgactgtgcgcatcgtcaagcatgccttcgagatcatacacctgctcacaggcgagactcctgaggaagaagagattttaaacaaaaaacgatctaaaaaaattcagaagaaatatgatgaaaggaaaaagaatg

SEQ ID NO: 613114 - DNA, 87 bp, Homo sapiens
gcggagtttcgtgagtttttactgactcgagttgttgacctcctgtactggagagacattaagaagactggagtggtgtttggtgcc

SEQ ID NO: 613115 - DNA, 75 bp, Homo sapiens
aaaagtttgcctatgtgccatttggagctggaattctcacactcaagaaagcaaatgaacttcttctgagcacag

SEQ ID NO: 613116 - DNA, 100 bp, Homo sapiens
agctgcttagcttttcagccgcaactttgtttctcaaaccatgaattatgtgggacagctggctgggcaggtgattgtcactgtgaaggaactctacaag

SEQ ID NO: 613117 - DNA, 76 bp, Homo sapiens
caagtcctatgagctcatccggaagattgaggcctacatggaagaaggacagaataacgggctcccagattcacaa

SEQ ID NO: 613118 - DNA, 74 bp, Homo sapiens
tggcctcctgtgatgggccttcgcactcccaggaatcagagatcattgatttcttcctgggggcctctctcaag

SEQ ID NO: 613119 - DNA, 90 bp, Homo sapiens
gttgtaccgagactataaccacggtgtgctgaagataaccatctgtcttccttggaaatcattgactagcatcattgaatattattacat

SEQ ID NO: 613120 - DNA, 82 bp, Homo sapiens
aatgagttcaccagaaaccaacaggcagcacaggaggaagccagcagacctgcagaacttggctcccgggacccacccacca

SEQ ID NO: 613121 - DNA, 139 bp, Homo sapiens
ctcagatgcttgtgggagattcttttgccagacattactacttcctaggcagaatgcttggaaagccagtgcggattttccatataatccaggacaaggccaagctataagaaatggagtcaacagaaactcggctatc

SEQ ID NO: 613122 - DNA, 75 bp, Homo sapiens
cgtccaccatcttcctcttgctgccagtggtagcgctcgtctggcggagctgggctcgggttatgtatgattttg

SEQ ID NO: 613123 - DNA, 90 bp, Homo sapiens
gcattgctgaccagatcactctgctcaaagctgcctgcctagatatcctggtattggttgctctggcatctgaagaacttgccaaaggct

SEQ ID NO: 613124 - DNA, 100 bp, Homo sapiens
caacagaataatgctacaaagacatttcgagaattttgtggacctgctgatcctggattgcaataaagttcaagaaaaaagaggtgctgtctatgaacga

SEQ ID NO: 613125 - DNA, 50 bp, Homo sapiens
atgaatccttctagagacgtccacgttctccaaggagaagtacatcctgg

SEQ ID NO: 613126 - DNA, 52 bp, Homo sapiens
caacagaattacagagtatgatgtaatttcatctgtgccaaagcctccagag

SEQ ID NO: 613127 - DNA, 97 bp, Homo sapiens
ccctggacctggtcagagcgcggatggccgtaaccccgaaggaaataccagtgtgcttttcttggagaaagaagaaaagaagaaagaaggaagaaga

SEQ ID NO: 613128 - DNA, 49 bp, Homo sapiens
cagattcccaccagctggagatcagacggggtctcactctgtcgcccag

SEQ ID NO: 613129 - DNA, 96 bp, Homo sapiens
ccagctcccccgcctcggggagggcaccagaatgtgaaggctgtgtctgagactcctgcagtgccaccagtttcagaagatgaggatgatgatgat

SEQ ID NO: 613130 - DNA, 90 bp, Homo sapiens
gccgcggcctctgagctgggatgagccgtgctcccggtggaagcaagggagcccagccggagccatggagctatgaagacatgattggtg

SEQ ID NO: 613131 - DNA, 75 bp, Homo sapiens
gcagaaaccccgttgacaaggcactgctttttcatgacggctttatcctgtggataaacgcagagtgaacgagtt

SEQ ID NO: 613132 - DNA, 100 bp, Homo sapiens
cgacttcgatgatttactgaaatttgatgacctagatggaacacatgctctgatgatatgtcttgtcgttcaagacttgcaacactaaacgagaaattga

SEQ ID NO: 613133 - DNA, 78 bp, Homo sapiens
cgtccacgtgaaggggcccttctcggtggaggccgacccatccagcctctgaagagccaatccattcaggatgggaaa

SEQ ID NO: 613134 - DNA, 75 bp, Homo sapiens
ctccaccagccccgtgtccttcattgccacgtacagaaatactacccgccggactttgacccatcaaagatcccc

SEQ ID NO: 613135 - DNA, 74 bp, Homo sapiens
caaaattctgaactcaggacttggcaagtgacaaccaaagccaagcaactgaaggattcagtgacctgctcccc

SEQ ID NO: 613136 - DNA, 89 bp, Homo sapiens
tctgaaagagtcttgagggaaaaccagtgtgcctacatcaatggttgttgaactcagtagctgtgaagaaactcaagcattagcactgc

SEQ ID NO: 613137 - DNA, 100 bp, Homo sapiens
ctgggcagccctgtgtcttcatcaagatgaaccgggatacgcagctccacctggatgatgccctccggggccaggaggacctgaaggagcagctggcgat

SEQ ID NO: 613138 - DNA, 74 bp, Homo sapiens
gggggagagtgacccagcctaccagcaataccaggatgccgggaagaaggagaaagggccaacccctgaagaag

SEQ ID NO: 613139 - DNA, 83 bp, Homo sapiens
cggcgagccggagcgcggagcccggctcccgcaccatggaggaggacgacagctacgttgtatcacggactgattcaccgagc

SEQ ID NO: 613140 - DNA, 100 bp, Homo sapiens
acctgcccaggccgccgctcaggaatgaattcaggctagagtaccgtggcacaatctcagctcattgcaacctctgcttcctgggctcaagcactctgcc

SEQ ID NO: 613141 - DNA, 90 bp, Homo sapiens
tactacctgcactcccttcaaatcgcccactttgatcttaagataatgagtgtgtatatggcaactaccctgaaatacctttggaagaaa

SEQ ID NO: 613142 - DNA, 100 bp, Homo sapiens
gcccctcgtgaaggagtatgctgcgtttgtgctgggcgctgccttttccaggtggcagcacaccctgggccccccactccccgccgcaagtcctgaggat

SEQ ID NO: 613143 - DNA, 75 bp, Homo sapiens
ggtcttggccccgtccttacctcacaggtggtgatctttgtgaagtctgtgcagcggtgcattgccttggcccag

SEQ ID NO: 613144 - DNA, 74 bp, Homo sapiens
ggtcctggagtacaatgccattggaggtgatctgtgaaaatggttcgctattcacttgacccggagaaccccac

SEQ ID NO: 613145 - DNA, 98 bp, Homo sapiens
tgatgatcatgctgggagccatctgtgccatcatcgtggtagttattgtaaccccctctgcagctcttcatgggggtccactcaagtcagaagccaca

SEQ ID NO: 613146 - DNA, 82 bp, Homo sapiens
caggaaccagaacccaggcccacggaggaagagccgggcagtccctggagcgggccagacgttggacctctcgaacaaccag

SEQ ID NO: 613147 - DNA, 99 bp, Homo sapiens
cctcaggaatttatggtcgcctttttgaatgagttatggctgcagcttcgattgccaatattgtaaaaagttctcttggtccagttggcttggataaaa

SEQ ID NO: 613148 - DNA, 75 bp, Homo sapiens
tactcctttttacctttggttcacaacatcatcaaatggggcctttacaacaactaaacggacaggcattccagc

SEQ ID NO: 613149 - DNA, 98 bp, Homo sapiens
ggggccccagcagcccccgaaggccctatcaggacatggagtatgaaagacggcaattattacagtttacgttctcagcatgagaaagcagccttata

SEQ ID NO: 613150 - DNA, 50 bp, Homo sapiens
gagaccgcggccgggaccgaggggcaacaggtttgtctatgctggctcta

SEQ ID NO: 613151 - DNA, 75 bp, Homo sapiens
aggacaccgattatggattggcaacctggaccccaaaattaccgagctgaccggttccctgatgtgttacctgct

SEQ ID NO: 613152 - DNA, 75 bp, Homo sapiens
tgcccttcacgctccaggagctaggttcgtgctggccgtgggcagcgccgtctttgatgccatgttcaacggggg

SEQ ID NO: 613153 - DNA, 115 bp, Homo sapiens
cagagatcggcggagaccctcgaagtgcgcaaacttgacactcaccctgaccgtgaagctgtggtctaccaatctagacaactcagtggcaagcattgaggcaaaggctaatgtg

SEQ ID NO: 613154 - DNA, 74 bp, Homo sapiens
ctctgttcgttttcactgcaggaccaggcacgaaagattgcagtaacggatgctccgcagagtgtaccggagaa

SEQ ID NO: 613155 - DNA, 75 bp, Homo sapiens
cccaatgcctacgacaagacagccttggctttggagcccatgaaacccctgaaggccaccgccaccacctcccag

SEQ ID NO: 613156 - DNA, 50 bp, Homo sapiens
cagcggagctgacacagccaaattctcgctgaagtctgttaattctactt

SEQ ID NO: 613157 - DNA, 75 bp, Homo sapiens
gcaggagaagctgagcctttctggacagaccaacctgtcagtgctgcaagagaggccattcccctggtactggcc

SEQ ID NO: 613158 - DNA, 75 bp, Homo sapiens
gcatgcttcagttcatgatgttggagactatttccccacccttgcggaaaaaccatccctcttcatcgagtccaa

SEQ ID NO: 613159 - DNA, 75 bp, Homo sapiens
ccctggctgcgaacccaggctccctccagagatgatttacacaatgaagaaagtacatgcactttgggcttctgt

SEQ ID NO: 613160 - DNA, 100 bp, Homo sapiens
cggtgacagcgtgagaggttcgcagatggccataaaatgcagtaaaaacaaatccagttcccaagaagctgtacaaatgctttcttctgttcgactcaat

SEQ ID NO: 613161 - DNA, 100 bp, Homo sapiens
ggaccctggagtcagccactggtggtctcttctcatgaccgtgcagatctcttctataggattcaccttggctgataaagtggatggtccattcttcctg

SEQ ID NO: 613162 - DNA, 100 bp, Homo sapiens
cgtctgccacacgctgatggtgcagcaccgcatgatggtacccaaagtcagggcttcataaacttcacttaccaaatacttcaagggattcagaaacagc

SEQ ID NO: 613163 - DNA, 100 bp, Homo sapiens
cttgggccgccgagctggacccggaccggttttggggtacctgctcttccgagacttctgcctgaaccacctggaggaggccaggcccttggtggaattc

SEQ ID NO: 613164 - DNA, 75 bp, Homo sapiens
ctaccatctaaaatacgaaggtttctggctggtgagacggtttaagcggaagcatcttactgccattgactgcca

SEQ ID NO: 613165 - DNA, 74 bp, Homo sapiens
agaacgaattcagtgatatcattaagtccagatctgcttctcggacaaactatttagtggaaaaggcttacatt

SEQ ID NO: 613166 - DNA, 75 bp, Homo sapiens
agcagctgcaggcctgtctgctaccctatatccggggaagagccagaaacttttccttccctccatgagaaagaa

SEQ ID NO: 613167 - DNA, 80 bp, Homo sapiens
aaggactgcatccgctactacaacagagtgccggtggagaagccgagatgccctgtatccaagcccaatatgggacacca

SEQ ID NO: 613168 - DNA, 82 bp, Homo sapiens
ttactcggggtgcgccagtggaagcgggaggcagttgcagctttcagctgtttgcagacaaggtcccaaagacagcaggttg

SEQ ID NO: 613169 - DNA, 87 bp, Homo sapiens
gacgaacccccaatgctgaccaaggaggagcctgttccagaactgctggaagctgagctgccactgcagagccccgccatggaagac

SEQ ID NO: 613170 - DNA, 90 bp, Homo sapiens
tacaatggcaaatcacatcaaaagagattaaaacaactcagcaatgggacgctgaaaaatgacaatggttcaaaccttgtactactcagc

SEQ ID NO: 613171 - DNA, 76 bp, Homo sapiens
tgggctttagctgtgccaacaagaaagttcaggagccctggaaaggagaaggaataagacggcaggaggaagagag

SEQ ID NO: 613172 - DNA, 100 bp, Homo sapiens
ctggggtataccgttttagtcttgggggtagagtgactgcttgcgaaccagttcagcagtgcctcagagtcactcaagggaaaggattaatgccagatgg

SEQ ID NO: 613173 - DNA, 74 bp, Homo sapiens
ccaccccgaggccagatccagctttgatgagatgcttccaggaacccggcgatatggctgccgctgtgccccgc

SEQ ID NO: 613174 - DNA, 108 bp, Homo sapiens
tgcttttaggcttgctggcccgcggggctgtccaggcacgcgaggcccctcaggctctgtgtgctccgggatggagcaggtgtgcagagggtgagaacccagctctgg

SEQ ID NO: 613175 - DNA, 102 bp, Homo sapiens
ctctgtggacatgtttgatcagcttttgcaagcagggccatgctatgatagtggaagcttatccaaaataatagatccagaagaagtgacctgaagtttctg

SEQ ID NO: 613176 - DNA, 90 bp, Homo sapiens
atccgcctcaagcccaaggtcctcctcaaccacttcatgctgtgcatcaggttttgggatttgagattgacgcggtgaactctgtccagt

SEQ ID NO: 613177 - DNA, 51 bp, Homo sapiens
ctccccagccctgcggaactgttgaaaggattgtagacaagaggaagaaca

SEQ ID NO: 613178 - DNA, 88 bp, Homo sapiens
ggctcaccgcagtctcgactttcctgggctcaggtgctggagaatctggtaaaagcaccattgtgaagcagatgaggatcctgcatgt

SEQ ID NO: 613179 - DNA, 75 bp, Homo sapiens
atcccaaggactaatctgatcgggtcttccttcataactttacttcatatcaacttcttggcacctttatttatg

SEQ ID NO: 613180 - DNA, 100 bp, Homo sapiens
gctggttgttccgttgcgagctgcagctgcgatctctgtggtaggcccagaaggtagaagatagcaccatgccgattcgtcgaactgtgaattctacccg

SEQ ID NO: 613181 - DNA, 90 bp, Homo sapiens
gtttctagtgacagacagcggcaggacagtcatcctctataagttccagtctcatcagattttccatgtcctggtggtggcagcagcctt

SEQ ID NO: 613182 - DNA, 89 bp, Homo sapiens
gagaaaaagaacattactgtcttggtgccattgagaaacagaaattggtgtatattttgaacagagatgctgcagcccgacttaccatt

SEQ ID NO: 613183 - DNA, 75 bp, Homo sapiens
ctgctttccactcggctcctgtcgtccgttctctcaggctcccgttcagaatgccagaggattcaacatgagcat

SEQ ID NO: 613184 - DNA, 83 bp, Homo sapiens
aggcagcaaaatgagctcttcagaagaggttatcggcattggagcaggacagcagtctcgtatacactgcactcgccttgcag

SEQ ID NO: 613185 - DNA, 101 bp, Homo sapiens
gcctgaggttgtccgaaggatgccgaggaaaaggatatcaggactggaatggctcttacagcaagatccttggccacggacagagcgaaggggagaggatg

SEQ ID NO: 613186 - DNA, 101 bp, Homo sapiens
ccagggtctgcagggcctgggccgccgctgctacctgcagcgccgtgtggcacgacacaaaaatcagggtcgagctgtgcagttttagcgggtacaagatc

SEQ ID NO: 613187 - DNA, 77 bp, Homo sapiens
gatgctaatttgggaaaaagctccaggattctgacagggatgttgcgaagccaattgcatgatttctggcgtttgga

SEQ ID NO: 613188 - DNA, 101 bp, Homo sapiens
tgtttggcagggagttctgttacgccatggaaaccgctctggtcacaccaatactgttgcagattgcagttggaattgatcacaccttttcagttgtactt

SEQ ID NO: 613189 - DNA, 83 bp, Homo sapiens
gcgcgcccgccagctgctccggagatacgcaatgtctcaggctgtgcagacaaacggaactcaaccattaagcaaaacatggg

SEQ ID NO: 613190 - DNA, 112 bp, Homo sapiens
ccgggatcgtgaccgagaccgtgaccgagagcgtgaccgagagcgcgaatatcgtcatcgttagaagaagatgcagatgcctccagctattacgagtcccatggcaacaagg

SEQ ID NO: 613191 - DNA, 100 bp, Homo sapiens
gccctggatgcggctctggccagcctgcgcaacctcaacaagaacgatgtgaccgagcaagctgcctcgtacccagccagacggcaccagcgtccctgga

SEQ ID NO: 613192 - DNA, 119 bp, Homo sapiens
gagagcgtgaccgagagcgcgaatatcgtcatcgttagaaggtttgggtacccagaccccacctacctgacccgggtgcaagaggagctgagagcgaagggtatcacagatgactgaag

SEQ ID NO: 613193 - DNA, 75 bp, Homo sapiens
accccgccatggaggcttcattctggacgaggctggctccaactattatgtgcgcatcctgagcaccatcgatcg

SEQ ID NO: 613194 - DNA, 80 bp, Homo sapiens
cgctccctcacacaccggcctcagcccgcaccggttatcaatactctggctgaccatcatcatcgtgggactgactttgg

SEQ ID NO: 613195 - DNA, 100 bp, Homo sapiens
aacagatgccattccctctcacccaagagctgcacatcattgactcctgggcccaactgtgaccgatttaaactgcacataccatatgctggagagacat

SEQ ID NO: 613196 - DNA, 83 bp, Homo sapiens
agcagctgcggatctttgaccccagaacaaagccgcgggcctctcaggactggaatgtcacgtggaataccagcaaccccgac

SEQ ID NO: 613197 - DNA, 100 bp, Homo sapiens
tgtttttccagaggtgccctgaggagcagggaagcatggctattgtggatgtaaaagccatgttcaagatttggagtccaggaatgagactaagcattta

SEQ ID NO: 613198 - DNA, 83 bp, Homo sapiens
atcgccgtggccaacgcgcaggagctgctgcagggttcagccgactcctacaccagccgcccatctctggactcagacgtctc

SEQ ID NO: 613199 - DNA, 100 bp, Homo sapiens
cgacagtcctagctaaacttcgccaactccgctgcctttgccgccaccatgcccaaaacggtgggccgtaccttgtctaaggtccaacaagtgctgagct

SEQ ID NO: 613200 - DNA, 100 bp, Homo sapiens
caagaagggccttactccttcacagatcgataagaccatcatcatgtggaaactgaccagggatgagaccaactatggaattccacagcgtgctctgcgg

SEQ ID NO: 613201 - DNA, 90 bp, Homo sapiens
gaaaaaatggttgacctcacccaggtgagaaaactgatgcttggagatgtgatcactgcccagggtcacccaatgataacatgcatgcat

SEQ ID NO: 613202 - DNA, 100 bp, Homo sapiens
gtggccgttttacattggctgttttcctcacattcctcaagcagggctctaattcggccacttccaagtcaacaaatgtttgaacatatgcagaagagac

SEQ ID NO: 613203 - DNA, 76 bp, Homo sapiens
ctttgaactactgccggagcttctgccagttcacacaaaagatgttggacaatttctacaattttgcttcatcatt

SEQ ID NO: 613204 - DNA, 75 bp, Homo sapiens
agcgtgaacgggcccctggtggtgctggaccgggtcaagaagctgcagttcatcatctgctgtgatagttccaca

SEQ ID NO: 613205 - DNA, 88 bp, Homo sapiens
ggcgacaagggtgttcccgaactagagtgggcaagaaactatattcagtctttgactcagatgccgaagatgaactttgcgaatgtat

SEQ ID NO: 613206 - DNA, 75 bp, Homo sapiens
catggaggctgaggagctggagcaggagcgagagcaggtggcggcagagcgacgggccagcgaggaagaagaaaa

SEQ ID NO: 613207 - DNA, 148 bp, Homo sapiens
tcatccagagggtccaggccatgaagagtcctgaccacaatggggaggacaacttcgcccgggacttcatggcccgagtgccaggcatggacggggacgctgctgctgggcacatgccttctgtactgcgcccgctccagcatgccca

SEQ ID NO: 613208 - DNA, 82 bp, Homo sapiens
ggaaaatgcaagaagactgatggagcaggcttgcaatattaaatttaatggatcgagaagtggcgttgcttgctgaaatgga

SEQ ID NO: 613209 - DNA, 100 bp, Homo sapiens
gactctgctgggggagatggaggcgaagacaagagagctcattggagccagcaccgctctttgaccttgccatgcttgccttagatagtccagagagtgg

SEQ ID NO: 613210 - DNA, 98 bp, Homo sapiens
aacggtcaggagtccactcctggaattgttccagatgcttgaacatgcgaaagtgacacagacagagttgatgcgtgagtcatttagacagaaacaag

SEQ ID NO: 613211 - DNA, 90 bp, Homo sapiens
ggagtttttcctggtgggacaagacaacgggccggtggaggtgtccacattgcagtaccaaaccctgctgcagctgcaattcctcgaacg

SEQ ID NO: 613212 - DNA, 76 bp, Homo sapiens
cgagatgtggacctcaatggggatggacgagtggactttgaagagtttgtacaaatgatgacagcaaagtgaagac

SEQ ID NO: 613213 - DNA, 95 bp, Homo sapiens
ttccgggtctgtgccagcgacacatcctcagacagattctaagcctcctgagggattgttaggattccacacagactggctgacattaaatgttg

SEQ ID NO: 613214 - DNA, 73 bp, Homo sapiens
ctgctggactagagagagagcggaagatgctggaaaaggagaagcattagggtgtccgactacgtgggtttca

SEQ ID NO: 613215 - DNA, 75 bp, Homo sapiens
tatgacttttaaaagagagagcttgtgaaactgagggaataggttgaccccctgtttacagtgccagcgccacca

SEQ ID NO: 613216 - DNA, 74 bp, Homo sapiens
ctccactccgtcccccgcgggtctgctctgtgtgccatggacgggtcagtttacgttgcgagacatgtatgagc

SEQ ID NO: 613217 - DNA, 83 bp, Homo sapiens
atttcatcgtttaccttcgaattaaatcggatttctttgaactattatctaatcatcacttggacagtcagtctcgatggagc

SEQ ID NO: 613218 - DNA, 100 bp, Homo sapiens
ctttttgagccttacggagccgtctaccagatcaacgtcctccgggaccggagtcagaaccctccgcagagtaaagacatcaactagtcaggcagtcttc

SEQ ID NO: 613219 - DNA, 75 bp, Homo sapiens
ggatgctgcagacactgaacgaggagccagtgaaaaatcgttgcttatatgtatttggtggccagcgatcaaaga

SEQ ID NO: 613220 - DNA, 78 bp, Homo sapiens
ccagatcaacctggagctctacgcctcctacgtttacctgtccatggttcggagcgaccttggccgttggcctgacca

SEQ ID NO: 613221 - DNA, 100 bp, Homo sapiens
ttggggctggccaggcctgtcaggccatggggaacctctaccatgacacatgcttcacctgtgcagcttgcacaattgaaacacagagcaccagctctga

SEQ ID NO: 613222 - DNA, 74 bp, Homo sapiens
ggctggagcggatcccacacctccggaccgagggacgcgggaaatttggtgagcggcctccacctaaacgactt

SEQ ID NO: 613223 - DNA, 89 bp, Homo sapiens
gaaatggctcaagagctcttcccttcaagactttgatattcgagcaatcccagtggtagctattatggccactggtggtgggatccggg

SEQ ID NO: 613224 - DNA, 75 bp, Homo sapiens
accgtggacggaccccgggagcccagacatgccatggacaatattaccaggcagaaccaattctacgatacccaa

SEQ ID NO: 613225 - DNA, 76 bp, Homo sapiens
ctctataggattcggaaggacgttggaacgaatgatcacacactttgaaaggtccaaaatggagtaaggaatggga

SEQ ID NO: 613226 - DNA, 83 bp, Homo sapiens
aagtggaattttggagatattcaaagaatccacattcatctcaatggaaggatcctgccttaagtcaacttatttgtttttgc

SEQ ID NO: 613227 - DNA, 97 bp, Homo sapiens
ggtgatgtgacctgttcacgcaggggaaacttgaacattcgcaggataacgagaactcagcgcccatcttgaacatgtcttcatcttctggaagctc

SEQ ID NO: 613228 - DNA, 101 bp, Homo sapiens
catggtggtcatcgaggtgttcacccccgtggtgcagcgaatcctcaagcataacatggatctagtgaaaagccatttgatgtatgcggtcagagaagaag

SEQ ID NO: 613229 - DNA, 89 bp, Homo sapiens
aagctaccatggcggccgagcgaaagacaaggttgtccaagaatctactgcgcatgaagggcaaatttattcggatcaactttgatgta

SEQ ID NO: 613230 - DNA, 83 bp, Homo sapiens
agagtcctcaatccaacagcccagtgcttctgtctcgactgcactttgagaagatgcagacagacatgctgaactatctggaa

SEQ ID NO: 613231 - DNA, 51 bp, Homo sapiens
gaacgagctgagctggcagagtcatacatgtcctgaaactgaacaaaatgg

SEQ ID NO: 613232 - DNA, 74 bp, Homo sapiens
cgaacatttctgggtgacactcaacaggattcccggaaaaattgaggcttcagaaattgtccagtctctccaga

SEQ ID NO: 613233 - DNA, 82 bp, Homo sapiens
caacgagccgcatgagagccggacaaactcagacatcgtggaggctcttctcaaccatctgtgagtccaggggaaccgtctc

SEQ ID NO: 613234 - DNA, 96 bp, Homo sapiens
tagcgttgcaaatccttaaaagagtcttaacggtccagtggcattgcagagcacggatggttgcaggagccaacttttacattgttggacgagacc

SEQ ID NO: 613235 - DNA, 88 bp, Homo sapiens
tggaactggaggaaaaatgtcagggctcagcccagaaattgctgcaggtgtctttcctgaagactatcttcccgtctcaaaatggaca

SEQ ID NO: 613236 - DNA, 82 bp, Homo sapiens
tttctgtgacgggagcaatgctgacctcggtttcctggacccattccgactcagcttaaagcttttcaagccaggccaagaa

SEQ ID NO: 613237 - DNA, 87 bp, Homo sapiens
gagctccggcccgggcgagcgggtgcgtctgccgcagagtcggcacctgaaggacatggaggttcaatacttcttcaagatcttgga

SEQ ID NO: 613238 - DNA, 51 bp, Homo sapiens
aaagaaaatagttagttaccagaataatcatgggccagactgggaagaaat

SEQ ID NO: 613239 - DNA, 100 bp, Homo sapiens
gggtcggcgctgggctggaggcggcggagcgcgagagcttcgagcggactcaggacactcatgaggaccatgatacttccactgagaatacagacgagtc

SEQ ID NO: 613240 - DNA, 75 bp, Homo sapiens
cccacaccaccgaccaggacctggtgaagctctgtcaaccgtaagccaagatgggtgcatacaagtacatccagg

SEQ ID NO: 613241 - DNA, 50 bp, Homo sapiens
tcctctagggagactgcaaacccctaaacctgctagagtgtgtccctgac

SEQ ID NO: 613242 - DNA, 74 bp, Homo sapiens
gctaggcaagcaggaggtgatccgaggctgggaagaaggggttgcccagattgaggtggtgccttctgcctctg

SEQ ID NO: 613243 - DNA, 76 bp, Homo sapiens
ccagccccgagcgggacagcgcggcggggagcgacgaggattttatattggaagacatggatcttgctgccaacga

SEQ ID NO: 613244 - DNA, 83 bp, Homo sapiens
caagccgccctggatggagactcccagggcagctgcaatgactctccgcacggtattattgtcattgcaagcactattggcag

SEQ ID NO: 613245 - DNA, 83 bp, Homo sapiens
ggaggcaagatgatccaccagcggttccatcctacacttgggtgtcttcaaaaacaaacatatttaaaagattttacttctca

SEQ ID NO: 613246 - DNA, 100 bp, Homo sapiens
cagcccccagaaaggattgtgacatatcgttggacccagaattgaggttttagctaaagaagatactgaggcagctattcaatcaatattatacaaagaa

SEQ ID NO: 613247 - DNA, 75 bp, Homo sapiens
tgagctgcagctgaatcacacagaatttaaatgtgcctgattcatctctccctgctgaaaatgaagccactggcc

SEQ ID NO: 613248 - DNA, 100 bp, Homo sapiens
ggctataatgggtatggaggaggacctggagatcccaccaaatattttggttgtgagctgggagcacagacccagtttgatgttaagaatgaccgttaca

SEQ ID NO: 613249 - DNA, 100 bp, Homo sapiens
aagaataccatgaggtcaaaaaggaaatcaccctgcttgagcaaaggaagcatagaatgtcaagctaaccaggcgtccgctacttcagaagagtgtactg

SEQ ID NO: 613250 - DNA, 100 bp, Homo sapiens
cagtgggggtgtgcaaacccgagagaactgggctaccaagcagtttctcgaagagattaacaagtggacagttcagtacaatgtttccccgctgtcttgg

SEQ ID NO: 613251 - DNA, 130 bp, Homo sapiens
cctctcgaaaggaagggctctgctctacacactggtgtctcctgcggaagggcagctgggcacgccttccagaccgagttgcagatctgatctcttctgaacacctcatcgtgtctccatccctgggaat

SEQ ID NO: 613252 - DNA, 100 bp, Homo sapiens
gctggtgacaggactatacacatctacaagtgttcaggcatcacagagcattggaggttccagtgctttcggatttggtgaatctggattgggaaagtcg

SEQ ID NO: 613253 - DNA, 75 bp, Homo sapiens
ctggcttgagtcctgcattgtgggctggcgctgccgcgtgggtcagtgggcattttgggcccctggagatgctgg

SEQ ID NO: 613254 - DNA, 75 bp, Homo sapiens
acaagaatcattcttgcagcatttcgtgcttgaagccacagtgcatggccagaaccagccagacctttggagttc

SEQ ID NO: 613255 - DNA, 98 bp, Homo sapiens
ttcctctgtatagagcaactgttgaactcagctgcctgtaggtgtcagttgtacccgaggcgttctcagcagcagcaagtacctgtggtggatttcca

SEQ ID NO: 613256 - DNA, 100 bp, Homo sapiens
gtcgctgcccccagctcagctcttactgcgggccgctccgacggcggtccatcctgaattacctctctgaacaggactttgtgtctgtgtttggcatcac

SEQ ID NO: 613257 - DNA, 100 bp, Homo sapiens
ggcaagagaaagaggagcagctccagccctcgagagtttgaggagacaatggatgcactccaggctgacatcgaccagctggaggcagagaaggcagaac

SEQ ID NO: 613258 - DNA, 88 bp, Homo sapiens
gaaggcatcgtcgtcttccggacagactatggtcaggggtgttgggctcttcattggtgtggatctgatcaaagatgaggccacaagg

SEQ ID NO: 613259 - DNA, 100 bp, Homo sapiens
tacaggactcctaaggcttgcaacaagtgttgttaaacacaaaccaccctttaaattttcaagggaaggacaggacgaaaaggaggttgtgctaaaggga

SEQ ID NO: 613260 - DNA, 83 bp, Homo sapiens
cttcaatgagtaaacatattcctgctaccggctctctgaccagttccacgacatcctcattcgaaagtttgacaggcagggac

SEQ ID NO: 613261 - DNA, 101 bp, Homo sapiens
ttgggccagagcaaggcgcagacccggggcgcccatggagttggcgtcggagcaacagctgcgcgggcggagcagagatgcctggagagaatgagaaacag

SEQ ID NO: 613262 - DNA, 50 bp, Homo sapiens
ggagcttccgggagggcggctcgcagagttcaagctgaagaagatgtgga

SEQ ID NO: 613263 - DNA, 100 bp, Homo sapiens
ggccgggggctcagagatccaagtgcgcgccctggcgggtccggaccaagctccaccgggggacggctacgtgcaggcggacgcccggggccccccggac

SEQ ID NO: 613264 - DNA, 87 bp, Homo sapiens
tgcccacccctcctgtaacccagcctgtttcacttcttgatctccagcaccctgccggtggcactactgagagacgaggtgccaggg

SEQ ID NO: 613265 - DNA, 100 bp, Homo sapiens
gccatggatgaaggacaatatgatggcaaagtagatgtgtggtctcttggaataacatgtattgaactaggaggcagacagtggggaggaagaatgccgg

SEQ ID NO: 613266 - DNA, 82 bp, Homo sapiens
ctcaaggacacggtctacaccgacttcgacggaagcggggagaggtggtgagagatgacccctgttgaggatttcattggtg

SEQ ID NO: 613267 - DNA, 100 bp, Homo sapiens
gttggtggcttcctgccagccatgaaacagattggcaatgtggcagccctgcctggaattgttcatgacatgatccacatcgcggacaccaaggtcgcca

SEQ ID NO: 613268 - DNA, 90 bp, Homo sapiens
gggggattttgggctggcagcccggttggagcctccggagcagaggaagaaactggcaagcgtgtgggcaaggtactgcatgcctccttg

SEQ ID NO: 613269 - DNA, 100 bp, Homo sapiens
tagatccttaccagcacattatagtactaggttttgacaagcttgcatcatgcgtgagtataagctagtcgttcttggctcaggaggcgttggaaagtct

SEQ ID NO: 613270 - DNA, 98 bp, Homo sapiens
ttgtgatggagtactatcccaatgaattcgaatttagagtttaatttctcagagcattctctccaggaagaatttttacagtatctcaaagacttcac

SEQ ID NO: 613271 - DNA, 100 bp, Homo sapiens
cagaggccgccatcaaccgccagatcaacctggagctctacgcctcctacgtttacctgtccatggtccatctgggaagcgggatttgggttgatgagga

SEQ ID NO: 613272 - DNA, 90 bp, Homo sapiens
atttgaggagctgctgctgcaggaggtcacaagccccaaagtggacgtgttcaatgctaacagcaacctcagttctgggcctctgcccat

SEQ ID NO: 613273 - DNA, 100 bp, Homo sapiens
gctgcgcccgctgccagcacacgactacttcgagttcttcgccgccgacctgaggcctctctgctgatggtggtgccaagcgccaggagcacctatcccg

SEQ ID NO: 613274 - DNA, 75 bp, Homo sapiens
tcacattggaccctcctcccaactgtaggtcacagccaggggctttgggccgctgttacagtttgcctacactgc

SEQ ID NO: 613275 - DNA, 75 bp, Homo sapiens
tctataatgctggagatgaaagggaagaaggagaaagggccaacccctgaagaagcaatacagaaactgaaggag

SEQ ID NO: 613276 - DNA, 85 bp, Homo sapiens
acagtgtcggaccccaggactcaccccaagggctacaccgagtacaaagtaaccgcgcagaaacgggctgtaaaggcagaaaacc

SEQ ID NO: 613277 - DNA, 82 bp, Homo sapiens
gcctccatgtacagccgctccatccagggccaccatgtctgcctcctggtgaaaaaggccctgtttgtgctcttcgtcctgg

SEQ ID NO: 613278 - DNA, 98 bp, Homo sapiens
gtttgatcttcctctgacttggtactattctctctcccaggtgctggagaatctggtaaaagcaccattgtgaagcagatgaggatcctgcatgttaa

SEQ ID NO: 613279 - DNA, 80 bp, Homo sapiens
cccatctgaagggaggaaatagtggcaggtgacagtctgcatgtgcagttttcagagttgatctctctaatgtattagat

SEQ ID NO: 613280 - DNA, 50 bp, Homo sapiens
agcacattggagttggaatgtatcaggactccctggaggaaaagcggaag

SEQ ID NO: 613281 - DNA, 100 bp, Homo sapiens
agagagcaagtggtggaaaactctgagagaaaaaatgaagagcaatgaagctgcatccaaggtgcctcgagtctttattggtaaagattgtataggcgga

SEQ ID NO: 613282 - DNA, 100 bp, Homo sapiens
tctggccggccccttggcactcgcctcggatttgggggcttcctcactcgtggctttccgaaggctgctggtagtagattccatggatgcattagataaa

SEQ ID NO: 613283 - DNA, 75 bp, Homo sapiens
gtgctcgccgtcctgcggaaccgctggctgtcagacagcttcaaggagacgcgctggccgcgcgccgaacccgag

SEQ ID NO: 613284 - DNA, 80 bp, Homo sapiens
ctgccaccgaggccccctcttcgcctcctccagtattgactcggagacaaaaagaggccaagaccaagagtgacagtggg

SEQ ID NO: 613285 - DNA, 100 bp, Homo sapiens
aatccattgaaaaaatcagcaaggtggagtgcggatttgcaacattaagtgggcagaccaacatccacctcagcaaaaacttcttcctgacgaatcgcgc

SEQ ID NO: 613286 - DNA, 97 bp, Homo sapiens
gagcgcggctgcccaggttgacctttctgcgggagttcatggcctcccacgggaacgacgccgcgagagccaggtttgagtccaaagtaccctcctt

SEQ ID NO: 613287 - DNA, 100 bp, Homo sapiens
tttggctctgcgtgagtgtggtctacgagctgtttctcatctttatactcttccagaaaaggagaacaacttcccgccactgcccaagttcatccctgtg

SEQ ID NO: 613288 - DNA, 83 bp, Homo sapiens
ctctgggatcccggccaccagcaattgtccgcaccacaccccactctggccggagcacgccaagcagctccccatcgctccgg

SEQ ID NO: 613289 - DNA, 100 bp, Homo sapiens
gaaatccaaaggtgaatcttttggttggtgattttgatgatagccacaaagcaagcaggatgctgggctcttgcactgtttggtggaaatggtgagacag

SEQ ID NO: 613290 - DNA, 100 bp, Homo sapiens
gtaccagtctggaggagtcaacatgcaaaccagtccagctacgggggcccagccagccagcagctgagtgggggttacggaggcggctacggtggccaga

SEQ ID NO: 613291 - DNA, 74 bp, Homo sapiens
gaccctgagccctgggacctctgaagtgaacactgcagggccatttggtacctactgtcaacaacgggaagtgg

SEQ ID NO: 613292 - DNA, 100 bp, Homo sapiens
ttcttcactgcctctggcatggatgaggaccctgatgctcccataagacagaaaatgccccttgatgatctggatagagaagatgaagttagattactca

SEQ ID NO: 613293 - DNA, 111 bp, Homo sapiens
gtgaagcgtgaggccggcatcgtctttccgtcctctgaggcgacggccgcggctgcacaggctattgagggcacctacattgacaagaaatgccccttcactggtaatgtg

SEQ ID NO: 613294 - DNA, 50 bp, Homo sapiens
aagaagaagcagctgaagccgtggtgctgattatggcgatgagatcgcca

SEQ ID NO: 613295 - DNA, 100 bp, Homo sapiens
aaggagcagcgactcccggaccgagtcgcgagtgtgcgccgtccgccgcccgccggatcccccggaccccccgaccggccaattcctgtccccccagcag

SEQ ID NO: 613296 - DNA, 80 bp, Homo sapiens
atctcacctcccatgaagggaacggtcttctaaatgcaggtacaaatcaagacctaccagctcctacattccatctttca

SEQ ID NO: 613297 - DNA, 75 bp, Homo sapiens
aaggattccaagtaactcttatttgagtcaacctatttgatttcttgacaagaccacaatctgatcccaaagatg

SEQ ID NO: 613298 - DNA, 90 bp, Homo sapiens
ggccttcgagagctaccgcgccagacaggtttattcttcagtccaaggaagcaattcacagtcagctgttagagaagcagaaaatagcag

SEQ ID NO: 613299 - DNA, 74 bp, Homo sapiens
ttacggcaacagcagaggatttggtggaggagtatgctgctgctgttccgctttgcgtcctcgctacaaacgcc

SEQ ID NO: 613300 - DNA, 100 bp, Homo sapiens
attggcaggagattatagctctgtatgagaaggacaacacctacttaggtcaccaagatcttccagaagaagaagaactcggtgacgtacagcttccgac

SEQ ID NO: 613301 - DNA, 126 bp, Homo sapiens
ttcaaaattaaaagaggagcagcatggcatttcagtcactggtttgcagagtccagaattacggatccagatcaggagatttgaggagctgctgccccaagtgtgttggctggtgatggagaattt

SEQ ID NO: 613302 - DNA, 75 bp, Homo sapiens
cgcagcccgggcccaggccccggcagcgcctgggacaagagaagcctgtgtctcccaaatcaggaacactgaaga

SEQ ID NO: 613303 - DNA, 123 bp, Homo sapiens
cactgattggcatagtttgtggtgttttctatcccagttctttggcttttactaaaaatggacgcctggcaaccaagtgatttggattgtgaaacctgtaccataacacggagtggactgact

SEQ ID NO: 613304 - DNA, 100 bp, Homo sapiens
tatgctctccgctgtgtccacagcgttcaagaaaccagcctggacaccaagtctgtgtcagaaggccacctcaagaggaacatcgtggtgaagaccgtgg

SEQ ID NO: 613305 - DNA, 75 bp, Homo sapiens
agcacctcatgcaagcgagggacctgggactgctcacagccagggaggaataagtttttttcatctgtaatttgg

SEQ ID NO: 613306 - DNA, 98 bp, Homo sapiens
ttctctaggccttttagaaaacatgattccgagtccgaaaggtccctgagtagattggaagcagtgacagcacgctcctttgaagaggaaggagagca

SEQ ID NO: 613307 - DNA, 100 bp, Homo sapiens
tgacagcagccagctggtcagtgcacggaagaagctcagaaagactgctgaaggtttgcagaggaggagagccaagaaggatcaagaaggtggagaagaa

SEQ ID NO: 613308 - DNA, 75 bp, Homo sapiens
gggattctcgacctgctaacagaactggaccttttcggaccaagaatcgccttcagccctgtctggtgcatcctt

SEQ ID NO: 613309 - DNA, 75 bp, Homo sapiens
gccatggatgccaccaagctgatcctgcagctcctgaaaggcaagctggtggtgggtcatgacctgaagcacgac

SEQ ID NO: 613310 - DNA, 75 bp, Homo sapiens
gaaaaccttcgcctcaagcaacagagtgagctccagagtcagaccatccttggagaaacacaggaggaggaggat

SEQ ID NO: 613311 - DNA, 50 bp, Homo sapiens
gtggatggagacagtgaaggtgctgaggtgtactctcgacccagcagcct

SEQ ID NO: 613312 - DNA, 100 bp, Homo sapiens
gaaaaacctgacttttatcatcatattgataatctcaggagaactctatgcagaagggaaaggaaaacctcttcagcgcaaggtgaaaccacctaagaag

SEQ ID NO: 613313 - DNA, 100 bp, Homo sapiens
accagcagcaaggccaaggtggagtctgaagagccacaggacaatgacttcctcagttgcatgtcccgacttgtcagcttgtgggaaagtgacatcagcg

SEQ ID NO: 613314 - DNA, 75 bp, Homo sapiens
tgagctggcatcagaagacctacgccttcaggatgttttagaagaatgtatgtctcttcccaagctatcttctta

SEQ ID NO: 613315 - DNA, 90 bp, Homo sapiens
gccaccaggggccaattaagccttaccagcaggggcgacaacagcatcaggacaccagcagtgaaaacactgtggttcctccagaaacat

SEQ ID NO: 613316 - DNA, 100 bp, Homo sapiens
gagaaaaagaacattactgtcttgaaatgagccgtcagactgctacagcattacctaccggtacctcgaagtgtccaccatcccagagggtgcctgccct

SEQ ID NO: 613317 - DNA, 83 bp, Homo sapiens
cagcggggcgctccaggaggcactcacagtacctggagtagaacagaaaaattattatgtctgtgttcccttgggactcattg

SEQ ID NO: 613318 - DNA, 116 bp, Homo sapiens
ctgtgagatccagagctaagactccacgacatcccggaagccgaaaaatggcacgtctgagaatggtggatgtggtggagaaagaagatgtgaatgaagccatcaggctaatggag

SEQ ID NO: 613319 - DNA, 100 bp, Homo sapiens
gtccatggccagaaaacttttgggggcaggagcgatttggcaacatgacccgagtatactacaaggaagctgttggtgcttttgtagtctttgatatatc

SEQ ID NO: 613320 - DNA, 95 bp, Homo sapiens
tggccgccgcgccaccatctttcgggctgccgagggtgttcttgacgattaatcaacaggcattatattgtacttctagcaagtgcaccaacaga

SEQ ID NO: 613321 - DNA, 96 bp, Homo sapiens
gctgaggaagtgggaaatctgtggctggagctcagcagtggttccccctggaagtcctgggcccattactcgacatgggtcttacgacagtttagc

SEQ ID NO: 613322 - DNA, 100 bp, Homo sapiens
cagaatcgaatctcttctccctccccttcttgttaacagccaggtccttgcctgctgtgcagtctgatgaaagacttcagcctctgctcaatcacctcag

SEQ ID NO: 613323 - DNA, 97 bp, Homo sapiens
gtgtgtgtggtgggcttcgacctggagctgggccaggccgtggagagattgccttgcaacaggtttccatgttcttccgatcagaaccaaagtggga

SEQ ID NO: 613324 - DNA, 101 bp, Homo sapiens
gagagaaccagcacttctgggacgcacagagaccgtgaagattccaagttcaggagaactcgaccggttgcagtattttacagagctagcccaaggcacaa

SEQ ID NO: 613325 - DNA, 100 bp, Homo sapiens
cctcagaatgttggcctcctgtatgttggaggttatgaaagaccctttgcacaaatcaagaaccagaggcaggagaagtgtcccctccagtcggtgcggg

SEQ ID NO: 613326 - DNA, 80 bp, Homo sapiens
cctgggctccgtggtcttcatccaccgccagactccatcaagaatgctggaggaagggtgtttgtccactgccaggcagg

SEQ ID NO: 613327 - DNA, 90 bp, Homo sapiens
ggaccttgtggtggcagcccagaattttttctgtgccggctgtggaactccagtagagcctagcagcagataatggcagctttaaactcc

SEQ ID NO: 613328 - DNA, 74 bp, Homo sapiens
aaatccagagaccccctgaagattcgtttgtgaagtgtggatatgcaggctctaactttccagaacacatcttc

SEQ ID NO: 613329 - DNA, 95 bp, Homo sapiens
accatccagacccaggcccagcgggaggatggccacaggtaaagcagctgagcagccattttcagatttaccccttctcattgaggaaaccaaac

SEQ ID NO: 613330 - DNA, 100 bp, Homo sapiens
cgacaactctggagatgtcttccatgctcacagttcggtcctcaactttgccactaacaggtgataacgtggtgctggaccagacctacctgtggcaggg

SEQ ID NO: 613331 - DNA, 90 bp, Homo sapiens
ggtcggaaaggagtggagggggcctgcggaggctctggattactgccacagcaagggaatcatgcacagggatgtgaaacctcacaatgt

SEQ ID NO: 613332 - DNA, 74 bp, Homo sapiens
cgcgccgagccggaggctgcaggatggtgatgctgacgttagaggacaaggacatgaagggattctcctgggcc

SEQ ID NO: 613333 - DNA, 107 bp, Homo sapiens
ggagcccggccggagctgggtctggagacgccgtggcagcctgaacggagtgtgcgacggattgggagatgccttcaattaagttgcagagttctgatggagagata

SEQ ID NO: 613334 - DNA, 102 bp, Homo sapiens
atcaaggtgaacgggcggcccctggagatgattgagccgcgcacgctacagtacaaggtggcagatcatattggaagtgaacattatgaagtcctttttaac

SEQ ID NO: 613335 - DNA, 74 bp, Homo sapiens
tgcagccggagcctgggagacgccatccatttcaaggccaatactcagtatcagacatgaagttaaggttctca

SEQ ID NO: 613336 - DNA, 74 bp, Homo sapiens
ctggctcgcgcctctcccaggacccgcctggctgcgagatatatccctgcatgtcactgagtccaccatgcttt

SEQ ID NO: 613337 - DNA, 144 bp, Homo sapiens
tgccgcccagagcgagcgggtggaggctctcaatgccgctgccctgcgcttctcccagctgcagggcatccgtgtcattctggaccttactcccaactaccggggtgagaactcgtggttctccactcaggttgacactgtggc

SEQ ID NO: 613338 - DNA, 100 bp, Homo sapiens
tgaaaattcttcttgatcgtccaaaagctagaaatgaggtggactggctgacggagaaaatgagggaagccaacttcactgtatcctcaatgcatggaga

SEQ ID NO: 613339 - DNA, 75 bp, Homo sapiens
cacacagccatcatggaacccaaacctcagaagagtccaggtcacagtcaaagtgcctcagaagaactcataaga

SEQ ID NO: 613340 - DNA, 58 bp, Homo sapiens
agtatctgcacagtttcagtcgtcaaaggccaagcagatgtgacttacttaacagaag

SEQ ID NO: 613341 - DNA, 98 bp, Homo sapiens
gagtcctgccgcctcccgggagtgccgtgcgccgcagcccgggcccaggccccggcagcgcctgggacaagttccctgtattgaacactgatatacaa

SEQ ID NO: 613342 - DNA, 74 bp, Homo sapiens
gattcaaacaataatgttcccagctattcccttcagcaagctcaagctttttatacgtttccatttcaacaact

SEQ ID NO: 613343 - DNA, 100 bp, Homo sapiens
ctgcggaagtgcagctgcctcagttcttagcgcaggttaatgttcgtgaagaaattgaagagttttttccaagaatgtggaagataaatcaagataaaag

SEQ ID NO: 613344 - DNA, 74 bp, Homo sapiens
gatgtggtggaccagtgcctcgtctgcctcaaggaggagtggatgaagttggatggcaagcatgtggtgtttgg

SEQ ID NO: 613345 - DNA, 90 bp, Homo sapiens
gtgcggactaaagcagacagtgttccaggcacttacagaaaaggtaaatgagctggatggtatcccgttgatcctggacaactgcaacat

SEQ ID NO: 613346 - DNA, 100 bp, Homo sapiens
cttggtcaccggggaacagctacggtgatttgatgaaggctgctgcaggagagttcgcagatgatccctgctcttctgtgaagcgaggcaacatggttcg

SEQ ID NO: 613347 - DNA, 100 bp, Homo sapiens
ccaccctgtacactaaagctaatcttatcctttgtcgcagagactatctgaggaaactgttaaggcagcaataatagaagagcagaaacgaagtgaaaag

SEQ ID NO: 613348 - DNA, 103 bp, Homo sapiens
tgtccggaggctccagacagcatgaggctccctcgaaccgccccctgaatgagttgctaaccccccagggtcccaggcccaccgtttccatggtcgaaggtca

SEQ ID NO: 613349 - DNA, 100 bp, Homo sapiens
tgccctcaacatctctcagagacgaaagaaatacaggtatcaggatgaagatacacctcctcaagagcatatttccccacaaatcacaaatgaagtgata

SEQ ID NO: 613350 - DNA, 90 bp, Homo sapiens
gaagcttctgaaaacatttttgaaaagacaagccatcaaaactgccttcagaagcaaaagctgcacagaagagatcacagaaggagtctg

SEQ ID NO: 613351 - DNA, 82 bp, Homo sapiens
tgatggccagcatggtgggatttatgtggaaggaatgcagctcatttcagaaaagcctgagacggaagctgtggtgaaggag

SEQ ID NO: 613352 - DNA, 100 bp, Homo sapiens
ctgttgacatctgtctgtctcagctgccgacgatcatcgaggaaggcactgcgtttcgggcacaccctctggaagcgggtccaaggtgctgtcacccctc

SEQ ID NO: 613353 - DNA, 75 bp, Homo sapiens
ctgcgcggcgggaagcggcggcggcggctccagcgtcctaagaggtctccagaaatgctttgggttcatctttca

SEQ ID NO: 613354 - DNA, 124 bp, Homo sapiens
agcttagaaggaagccaagacttaaagtttcctagatcccagcttcaggagcagctccatatgtgcaggcatttgactcgctgcttgctggtcctgtggcagagtacttgaagatcagtaaaga

SEQ ID NO: 613355 - DNA, 83 bp, Homo sapiens
tgaactgaatcagcctgctgaacttttacctcagttttctagcattgaatatgtagttctgagctggactggccattatggag

SEQ ID NO: 613356 - DNA, 90 bp, Homo sapiens
gctgcagactgtggagccgggagccggcaggcctttccgttccgaacgtccacggcgccctggcccccctggccatcccctcggcggcgg

SEQ ID NO: 613357 - DNA, 82 bp, Homo sapiens
ggggagcgactcatggagctgccgtaaggtacttacaatttcatcagaaattcctaaaagaattcgaagtgccttaaaaaat

SEQ ID NO: 613358 - DNA, 82 bp, Homo sapiens
atttgaaaaggagaaaatgaatgccaaatgggacacggaagagcattaagaagttggttttgaagaaccttaataatagcaa

SEQ ID NO: 613359 - DNA, 98 bp, Homo sapiens
ctggggctgcctgccgggcggccgggcgcggcgagcccagcccactgtttgtaacatggaagattggtcgagacaaaagattacgtggatgcataggt

SEQ ID NO: 613360 - DNA, 83 bp, Homo sapiens
atcctgggcagcctccagcagggacctgtgacagttcaaatctgaacatcaatgatgtactagggaactactcattgactctt

SEQ ID NO: 613361 - DNA, 75 bp, Homo sapiens
gctgggtgcagatgcagtgtggctctggatagcaccttatggacaggtgtggatgaggtcaccattgtcaacatt

SEQ ID NO: 613362 - DNA, 100 bp, Homo sapiens
tcatcgccaccatctttgtctttgcagtggtcatctatttccagaagaagcctgtgaggaggagatatgagccgtatgggatgtattctgacgatgatgc

SEQ ID NO: 613363 - DNA, 100 bp, Homo sapiens
cccaccctcctgggcaccatggccctcctccaatggccgccaggcccccagcactgagctcagtaccagtggcagctcccactccaagtcctgtgaccag

SEQ ID NO: 613364 - DNA, 98 bp, Homo sapiens
ccagccctgacgggacagagccagggcactcaccaggctgcaagaacagtgctgggaaacccaaacctgcctcagtggatgccaacaccaagctgacg

SEQ ID NO: 613365 - DNA, 101 bp, Homo sapiens
aatggacatgattgcctaaatcagccaaacacagggaagaggcagaaatccaggcagaacttgaacgtttggaaagagtcagaaatcttcacatacgtgag

SEQ ID NO: 613366 - DNA, 50 bp, Homo sapiens
gaacagtcgttcccgcctcacaacctgatgcctgaggaagtgcaccatgg

SEQ ID NO: 613367 - DNA, 74 bp, Homo sapiens
ccttcgcgttgttgctcaggagatatgagggaaggcaccattggagatatggctatcctgggtataacagaaag

SEQ ID NO: 613368 - DNA, 98 bp, Homo sapiens
gccggcctcctaggcgcgctgcacctggtgatgaccctcgtagtggctgcggcgcgggccgagaaggaagtttcaatagtcatgggcattcccacagt

SEQ ID NO: 613369 - DNA, 90 bp, Homo sapiens
cgagcccagcgaagtcttcatcaaccgggaccgtggcttcggcttcatccgcttgaagcagcgatcggagatggatgtctctctttgccc

SEQ ID NO: 613370 - DNA, 100 bp, Homo sapiens
gttcttcctgcaatacagtggatacaatttgtcatggctactctgaggagttgtatcccgcattttgtattcacaacggaggctccgaccttgagcggct

SEQ ID NO: 613371 - DNA, 74 bp, Homo sapiens
tcagggcatcgctaagctgtaccataaagtgagccagtgtttgatatcagctgctaccaggaatccctggcacc

SEQ ID NO: 613372 - DNA, 87 bp, Homo sapiens
agcgcgcctctttttggcttggggagctgcagcgttcggagctgggctggtgatgaaggtcaagcaggagaagccggagcggctgct

SEQ ID NO: 613373 - DNA, 75 bp, Homo sapiens
gaagggtccaacagtcctggtcattcagactgcagttccccagagccagctctcccaggcgctgaacggactgtc

SEQ ID NO: 613374 - DNA, 75 bp, Homo sapiens
cttcaactctcaaagtagaaccctgcctcaagtactacagccttccagcagccttcccagacccacagatcacac

SEQ ID NO: 613375 - DNA, 100 bp, Homo sapiens
gtcctgcacaccattggcaaaactgtggagtatctgcactcacaggggtctcacacaggtcccacagcacagaacccggcttggtgctgacactaggcca

SEQ ID NO: 613376 - DNA, 82 bp, Homo sapiens
atcaaccgccttgaggatctttctgcccgcctgagtgatcttgaaatgaataggattttttatcaagcagaaatgcatcgaa

SEQ ID NO: 613377 - DNA, 82 bp, Homo sapiens
atttctccgcctcagcccaacggggaggaagcaggagctggccaacagctcggatgcgaccctcccagaccggccgctctcc

SEQ ID NO: 613378 - DNA, 82 bp, Homo sapiens
ggctgactacctgctgtacaccctcaacaaacaccagcgctttgggcagcagcccagacgcggcacagagagggcctgggag

SEQ ID NO: 613379 - DNA, 100 bp, Homo sapiens
tttgcccattctcaggaagagcttgaaaagtctgtccagggttttggtggctggcgaagctgagggcgtgtcagcaggcctttcgatccctgggaccaac

SEQ ID NO: 613380 - DNA, 82 bp, Homo sapiens
tttcctggcacagctgtggagagtgtgacggattccagcagagtattgggaaagggtcgttgtggtgcatagacccagagta

SEQ ID NO: 613381 - DNA, 80 bp, Homo sapiens
ttacctaggaatgagagggacaggagtatctgaggatggagaactcagcaatttgtccagtcattgtgccacaacattca

SEQ ID NO: 613382 - DNA, 74 bp, Homo sapiens
caaaagctgctacttatggaagatacaaaggctctattaccaggttttaaacttcgccatgatcgtgtcttctg

SEQ ID NO: 613383 - DNA, 75 bp, Homo sapiens
tgacaggggggcctggccgcgcagccgacctgcctagagctggaacgttacctccagagcgagccctgctatgtt

SEQ ID NO: 613384 - DNA, 100 bp, Homo sapiens
ccagaagaagaaaaaagtctaccatacaaaccagaccaccttcataattggagaaacaccaaaaggaatccgcagtacttggggtgcattgaagttctgc

SEQ ID NO: 613385 - DNA, 83 bp, Homo sapiens
aacgcccctgacctctatatccccaattgtcttcgcagttttaccgacttagaagaacttgatgagacagagttatatatgtg

SEQ ID NO: 613386 - DNA, 100 bp, Homo sapiens
tcagccatgtgagcactgggggtggtgccagtttggagctcctggaagattgttcagattccattctgtggggaaattgactgtgaggactggatcaaaa

SEQ ID NO: 613387 - DNA, 74 bp, Homo sapiens
cgtgcgcggcacctgcgaagatgcttccctgtgcaagaggtttttagaacttcagccataaaaatgggcagaat

SEQ ID NO: 613388 - DNA, 80 bp, Homo sapiens
agaccgtacaggttgagggatgggactggaaatcaaatgttacagatgtgttcagagcaacattgttttgttgacacaag

SEQ ID NO: 613389 - DNA, 89 bp, Homo sapiens
tgcgactcgcgggtgtgacgttgaagatgtcggccttctgagccgactgcggtggtcaagaggctttcatctgagtggcacagtaactg

SEQ ID NO: 613390 - DNA, 100 bp, Homo sapiens
cgagtccggaccggagactttggggcctaactaggtccgtaaaagccctgggctcagccagagcagggcagaggatgacgggatgaccagctgcagagag

SEQ ID NO: 613391 - DNA, 119 bp, Homo sapiens
tgatggtacaggaagggaacgtggaaagcgcatacaggaccctaaacagatgtcgaactctctcaggttcacccagaccaaagaattttaagaagattcattttatcaagaacatgcgg

SEQ ID NO: 613392 - DNA, 100 bp, Homo sapiens
gttccaggaagatgcctttgggaagcatgtcaccaacccggccttcaccaaactccctgacccagatgatgtggtaccagttggccaaagaagagcctgg

SEQ ID NO: 613393 - DNA, 75 bp, Homo sapiens
gtcacctttgctgcaaaaaattacggggtatatttacttctggcacatgggaagagaaatcagatgaaatttcct

SEQ ID NO: 613394 - DNA, 98 bp, Homo sapiens
tttctcacgtactctttttacattgcaatggccacagaaagcgaggctggtgatatggacctgagtgggttgccagaaacagcagtggattccgaaga

SEQ ID NO: 613395 - DNA, 80 bp, Homo sapiens
tcgaggatgacatcatctacactcaggacttcacggtgcccgggtttgccttcccggattgggcctacaagccagagtcg

SEQ ID NO: 613396 - DNA, 100 bp, Homo sapiens
aagagacaggaggcagtagccaaacacccagggcacacgtgtttcacgttgacaggtttgcttgggacgctagtaaccatgggcttgctgacttagccaa

SEQ ID NO: 613397 - DNA, 75 bp, Homo sapiens
taatttgatggatcctaaactcttggcttcaggttctgatgatgcaaaagatgtgaaaggaccacccacccaccg

SEQ ID NO: 613398 - DNA, 90 bp, Homo sapiens
tgagcctcagcctgcagttctgcagtctgggctcttggcaacattgctggagatagtaccatgtgcagggactatgtcttagactgcaat

SEQ ID NO: 613399 - DNA, 89 bp, Homo sapiens
tgatgttggagaactacagaaacctggtctccctaggacacaactcagatgggaagttcatcgcccgggcacagcggatagagtacgac

SEQ ID NO: 613400 - DNA, 75 bp, Homo sapiens
gtgtggacaaaattcctgataaaggcctccccaaagccagtcctgtgtcaccaatcaaaggaaaggaagccgtca

SEQ ID NO: 613401 - DNA, 97 bp, Homo sapiens
tgtcaggaagctctggatataagtttggtgttcttgctaagattgtgaattacatgaaggttaccttgtatgaatgtcattcacaaggagaaatccg

SEQ ID NO: 613402 - DNA, 73 bp, Homo sapiens
ggcagagggctgacgaggatgtggaggcttccgaggaggcagaggaggaggaggtgaccacaagccacaagga

SEQ ID NO: 613403 - DNA, 75 bp, Homo sapiens
ttcctcattagggacagcgagtcctcggattggattcagcatcaaaatacatctactcatattgagagctgtcga

SEQ ID NO: 613404 - DNA, 82 bp, Homo sapiens
gatttaaaagacagtcctcgtcagcactgactttcagctatggaatcgaacccagtgacttgattgtaaaaatttacagagc

SEQ ID NO: 613405 - DNA, 80 bp, Homo sapiens
gcctgcacaccaagggcgcccttcccctggatacggtcactttctacaaggcccgggtcctttttgtgctgattgtgctg

SEQ ID NO: 613406 - DNA, 74 bp, Homo sapiens
tcccgccacagcacaacacaggtctgggagggatccctgtagcagtgtgctggagccccaaaggaaagcagctg

SEQ ID NO: 613407 - DNA, 51 bp, Homo sapiens
catcatctgtgtgttctcacactgccactgcagagccccgccatggaagac

SEQ ID NO: 613408 - DNA, 83 bp, Homo sapiens
ttccagtcatgatagaaatgaaccatttgtctttagtcttggcaaagggattgtcaatgaggcagatcagattccgatttgac

SEQ ID NO: 613409 - DNA, 102 bp, Homo sapiens
cgggcgccccgcagccccccaacatcctgctcctgctcatggacgactgtgccgtgcaggtgaagctggagctggggcaccgcgcccaggtgaggaaaaaac

SEQ ID NO: 613410 - DNA, 75 bp, Homo sapiens
acaaaagcagatgctgctgaattctggagaaagttttttggagacaagatcggaaactccatggtacagctcagc

SEQ ID NO: 613411 - DNA, 50 bp, Homo sapiens
ccctgagcaaggaaaatctgaggaacaaatcattcacatgtactttgttc

SEQ ID NO: 613412 - DNA, 90 bp, Homo sapiens
catcttggctgaccttgagtgcagctccccctataagcctcggcctccacagatgtgtcagaagaattggatacaaaactccctcttgat

SEQ ID NO: 613413 - DNA, 100 bp, Homo sapiens
ctgaactcctaatatcaccaattcttctaagttcctggacattgatccggaggaggattcgcagttcaacatcaagagtgaagtcaccctgctgagaaat

SEQ ID NO: 613414 - DNA, 100 bp, Homo sapiens
gagacttgtctcttatttagttctggggagcgcctcgtcgacatgagtgatgtggaggaaaacaacttcgagggcagaatgttgaaacatttgtagcaga

SEQ ID NO: 613415 - DNA, 120 bp, Homo sapiens
ctcacttgcatgtatttggaacaaaaaaaggagatgcctggcagccccgctctctgcaacaatgcagatcttcgtgaagactctgactggtaagaccatcaccctcgaggttgagcccag

SEQ ID NO: 613416 - DNA, 75 bp, Homo sapiens
ctttgctgagcacatcagtgatgaatgcaagaggcgtttctataagaattggcaacatgaagaagcgcctcttga

SEQ ID NO: 613417 - DNA, 100 bp, Homo sapiens
tatagaggtagaccccaggcatcctactatgcttcctgagtgcttctttcttggagctgaccatgctatcagttgagggatttgcagttgataaaatggc

SEQ ID NO: 613418 - DNA, 130 bp, Homo sapiens
gccctgtgatccctcaagactggtccacggagtgtatgaccacaaacagccatcaagcttacctgttgattcggtggtaattacagaatctgatgcacagagaacaatgtaccctggaagttgtgtgaaa

SEQ ID NO: 613419 - DNA, 83 bp, Homo sapiens
cacctggaaggttgctcacctgaagggggatatgagactttctactcggaatatcctgagtgttgcgtggatgtaaaacccat

SEQ ID NO: 613420 - DNA, 75 bp, Homo sapiens
ggcactctacttaaaaccactaagtggaggtaaaggaagaaaatgctggccttgagatagatagctcttcagagg

SEQ ID NO: 613421 - DNA, 75 bp, Homo sapiens
agagactttcttcatgagattgaaacaggctttcaaggggggctgcaaagctcctcatgctatgatatcttcttg

SEQ ID NO: 613422 - DNA, 75 bp, Homo sapiens
tgatgccattccagcactggactcatggaggctgagcatttattcagaatacagattctgttcatcttgctctga

SEQ ID NO: 613423 - DNA, 75 bp, Homo sapiens
gttctggctgctccagccccaggaaggacccaggacacccggaagccggaaatgatggagcttcactcttgttgc

SEQ ID NO: 613424 - DNA, 100 bp, Homo sapiens
ccagaacaccccgcagaaagtgcctgtgcatcagtctgatcccccaggaaagcagctggaaaacaagagcatgtgaaggaagcgcagcagctcctcgcca

SEQ ID NO: 613425 - DNA, 100 bp, Homo sapiens
gcttcattcagatgtggtggaatatgccaaggaaaaactggagagcttcatcaaaaatagtgatagctttgataagctttggaactgcgacataactagc

SEQ ID NO: 613426 - DNA, 75 bp, Homo sapiens
gagcacatgaccagcttagcttctgtcctaaaggaagtcctgacggccacgctggatctggaggacgtccggagc

SEQ ID NO: 613427 - DNA, 82 bp, Homo sapiens
gaagatgacgattcagagactgaaaaacctgaggctgatgacccaaaggaatgggcaaagaagtggggaatctgctactgga

SEQ ID NO: 613428 - DNA, 51 bp, Homo sapiens
gagccgtgttcggggagtctttcaggtaacaaacctgaatttggcaactgg

SEQ ID NO: 613429 - DNA, 100 bp, Homo sapiens
ttagaaactcactgcagaatctttcacagcctcctgacaaggtgatccgggcgggccccgcaggaattttatcccctcaccggcctcacactagtatcgc

SEQ ID NO: 613430 - DNA, 100 bp, Homo sapiens
agaaggtggacgtgctggtgtctgagtggatggggacctgcctgctgggaactctaatgatccaggacaaagaagttaccctggagtatgtatcaagcct

SEQ ID NO: 613431 - DNA, 95 bp, Homo sapiens
cgcgatttaaaaccagctcaggagacgccaaggaaagatgggacctcccggcccaggatcataaaaggattcctctgtactagcacactccccta

SEQ ID NO: 613432 - DNA, 97 bp, Homo sapiens
caaccataatagaatgtctacattcctaaaaaggagaagcgggctctagggaactggaagttgctggccaaaggtctgctcatcagggagaggctga

SEQ ID NO: 613433 - DNA, 78 bp, Homo sapiens
gggtgggagtgacccgattttccagagtacatcaagatggcggatcattacgtccccgtcccaggagggcccaataac

SEQ ID NO: 613434 - DNA, 96 bp, Homo sapiens
ggagccgcgccccaccccgccagctccagagccacgtacgtggccagtttgccatcgtgaagaagtgccgggagaagagcacggggcttgagtatg

SEQ ID NO: 613435 - DNA, 83 bp, Homo sapiens
ccgagcgggcggcttcctggcctgggcgctccggtggcggcggagtaccatggggcgcaagttggaccctacgaaggagaagc

SEQ ID NO: 613436 - DNA, 78 bp, Homo sapiens
agtggagttcagcccactactctgaaccaggctggtgtgtgacagctctgtgctgctgtgcctcaagaagagatttca

SEQ ID NO: 613437 - DNA, 100 bp, Homo sapiens
ttttgaaagccacagaaaaaaaagaattcttggagccagatagctgggagaatgccctggctaaagctactgtgaaagaacttgcctcactgcacggcac

SEQ ID NO: 613438 - DNA, 97 bp, Homo sapiens
tgggctccctcctctatcagctcagcgggggaccccctcgcttcctgctcgacctgcggcagtacttgggaaccctcttcataaatcaaactcagaa

SEQ ID NO: 613439 - DNA, 75 bp, Homo sapiens
ccaccctgaaggacaagcgcgggacccgctatgagggctgcccaggagctgcaggacaagcaccaggagcccctc

SEQ ID NO: 613440 - DNA, 90 bp, Homo sapiens
aagctgaaccggcggctctcccaccctggacacttctggaagtcagctgaaacgtgaagctcttggagcaatttgtctgcgcccacacgg

SEQ ID NO: 613441 - DNA, 101 bp, Homo sapiens
actggtggagaccaaattttgaacctcctcagctgtgttggggtggaagaggaggaggcgcccgacatcgacatataccactgcccaaactgtgagaaaac

SEQ ID NO: 613442 - DNA, 75 bp, Homo sapiens
agaaatgccctccgggtcacaggataaggataagaagccagccctcgggaaccaccacgacccggcagtgccccg

SEQ ID NO: 613443 - DNA, 50 bp, Homo sapiens
ctcactgcaagctctgcctcccagagatggagtttcaccatgttggccag

SEQ ID NO: 613444 - DNA, 75 bp, Homo sapiens
cctcttcttagttgatgatttagttgattctctgaaggcaccatatctggaaatcaagaagcaaatggataaaca

SEQ ID NO: 613445 - DNA, 107 bp, Homo sapiens
ggacctgctcctggacccggcctgggagaagcagcagagaaagttctctcctgcgctatggtggaaacctgtccctccaaagtgccatgagtgtacgattcaacagc

SEQ ID NO: 613446 - DNA, 88 bp, Homo sapiens
caccaaagggggctgctgaccgagagagctcactcagccaggggcctttatcatctgctggactcctggattggttttgttacttcta

SEQ ID NO: 613447 - DNA, 90 bp, Homo sapiens
tgaatatgaccctatggaagcagaagaagctgaggatgaagaagatgcttggatcctagcatgactatacattgtgacatggtcattaca

SEQ ID NO: 613448 - DNA, 97 bp, Homo sapiens
ctgatgcttattagtcatcaccgttattcctactaacgtcctgtgtcactgaggtatcattggaacatttcaagatcatcaaatcaaattccacagg

SEQ ID NO: 613449 - DNA, 80 bp, Homo sapiens
tcagggctccttcttaactaaagaccattactgggacttccacccccaccacgtgcacagcgagttcgagagcttcgccg

SEQ ID NO: 613450 - DNA, 100 bp, Homo sapiens
caagtcttctcatttaaaagctcacctgaggactcacactggagtctcaggagcaggggctgcggcagaggctgctggacgagcagttcgcagtgttgcg

SEQ ID NO: 613451 - DNA, 100 bp, Homo sapiens
tgatgcatttccaagtagaataagagacaggctcttgccatgttgcccgggctggtcctgaactgctgaattcaagtgatcctcccaccttggcctccag

SEQ ID NO: 613452 - DNA, 98 bp, Homo sapiens
acagaaataattgagattcctgatgaagatgatgatgtcctcagtattgattcagtggacatatcaggccatggtccacgaactactaggcataaaca

SEQ ID NO: 613453 - DNA, 96 bp, Homo sapiens
gggcacaggatccggagctggagcccccagccgcggcccatggagcccgccggcccggcccccggccgcctcgggccgctgctctgcctgctgctc

SEQ ID NO: 613454 - DNA, 98 bp, Homo sapiens
gcggctacatcaacaatctgccagaatatttctcttagaagatgacatccatgtttcctgatgcttgttttattcatacaagattggatttgagaccc

SEQ ID NO: 613455 - DNA, 90 bp, Homo sapiens
gctgggctgatgaaacggatgacctggaaggagatggttagaaaatggatttctgactggaatctcaccactgaaaaaaagcacaccctt

SEQ ID NO: 613456 - DNA, 90 bp, Homo sapiens
aaggaagaagtttaagcggcctccacagaggctgtttgatgctgagaagatcagttggactaaatgctcttccttcagaggattatccgg

SEQ ID NO: 613457 - DNA, 100 bp, Homo sapiens
catacaactgctccgcctggtggaatctgaggaccgcaagtacactctaaccatggaggacttgacccctgccctcagcgagtatggcatcaatgtgaag

SEQ ID NO: 613458 - DNA, 90 bp, Homo sapiens
cttgagtctactctgtcgctcttgtgccctagcaccccgagaaccgtcagtttgagccagatgaatgaaaaatccccagggcgatctgca

SEQ ID NO: 613459 - DNA, 100 bp, Homo sapiens
cccagaacagttttcttctgggctccaattatgaaatgggtgtctccagtgaaaatctgtgactttgacttgggcagtgggatgaaactgaacaactcct

SEQ ID NO: 613460 - DNA, 98 bp, Homo sapiens
ggaccggaagtgctccagaactcaaggagggctccccgaggactttctgaactccctggagaagatggaggacggcaagttgaaggtcaccctcaagt

SEQ ID NO: 613461 - DNA, 100 bp, Homo sapiens
ccccaaacaagtgctcctacattctggtacaagaagaacttgaaggccctctacgtggtgcaccccaccagcttcatcaaggtcctgtggaacatcttga

SEQ ID NO: 613462 - DNA, 88 bp, Homo sapiens
aggaagccttgaggacctactcacagataggaattgaagaaatgggacgtcggtcatcagatactgaagaagaaagcagaagcaagag

SEQ ID NO: 613463 - DNA, 100 bp, Homo sapiens
tgtctgctctccaaatatgcagaatgcaaatggctgttttcagaagatgcagggggaggcacaccctagtgcttcccttattgacagaaccatcaagatg

SEQ ID NO: 613464 - DNA, 78 bp, Homo sapiens
cccgtcctccgttagctaattaaaacatttttcagggacgtagccatccagaggttttgcgtgtgaagctgtgtggaa

SEQ ID NO: 613465 - DNA, 98 bp, Homo sapiens
tcaaagaactcatgcaagtggaacttacagcttccttgatcggactcagcattcagacaggaagatgtcacccaagcgcatagctaaaagaaggtccc

SEQ ID NO: 613466 - DNA, 126 bp, Homo sapiens
cggcgggcggcgggcggcaaaggagcagccatgagggccgggcccagtcaccgaccgtgtcaagctagggatgcggtccattcccattgccactgcttgcaccatttaccataagttcttttgcga

SEQ ID NO: 613467 - DNA, 100 bp, Homo sapiens
cgggcaggatgaaggcagagcgtgtggcatctccacctcaagggtttttagaacttcagccataaaaatgggcagaattttccttgatcatatcggtggt

SEQ ID NO: 613468 - DNA, 87 bp, Homo sapiens
agctgcttatggctataaaattacaggtggacgtgggcgtggtgcacttcactcccttgatacagcccaagatagagcagccattca

SEQ ID NO: 613469 - DNA, 85 bp, Homo sapiens
ccaatacagacgacaaaaccagcagtcttcatctgggtgtgggccgaagatatgctcatgtggtgttgaggaaagcagacattga

SEQ ID NO: 613470 - DNA, 80 bp, Homo sapiens
tggcagcagctgcctcaagaggagcagcacctgaactcctggggggaccgtcagtcttcctcttccccccaaaacccaag

SEQ ID NO: 613471 - DNA, 75 bp, Homo sapiens
tgtcctggctcttgccctcatcctggttctggaatcctcagttcaagcgagacggtcatctgttccagccgggcc

SEQ ID NO: 613472 - DNA, 75 bp, Homo sapiens
aagataaatccaaatactgcatatcagaaacaacagttgatgcggatgaaattaaaaggctaggaaagagattta

SEQ ID NO: 613473 - DNA, 74 bp, Homo sapiens
accatttagtaagaagaattccagtcttataaagcaagacatctgtatagattctgcttcatccgtgagagaga

SEQ ID NO: 613474 - DNA, 100 bp, Homo sapiens
ccctcaggactttattgattgcttcctgatgaaaatggagaaggtgcagcagctggtgccaaaacgggaccatgccctcctggaggagcagagcaagcag

SEQ ID NO: 613475 - DNA, 100 bp, Homo sapiens
gtggcaataatattgaactgggcacagcatgcggaaaatactacagagtgtgcacactggctatcattgatccagaataatgcatatactgccatgtcag

SEQ ID NO: 613476 - DNA, 78 bp, Homo sapiens
accgaagttggaagtgtctcttagcagcgcgcggagaagaacggggagccaggttaaacccatccagagtaatggctg

SEQ ID NO: 613477 - DNA, 75 bp, Homo sapiens
cacggatgcccagctgaagagcctgctgatgtcagtgggacccattcagaaccccgaccaagaacagatgccggg

SEQ ID NO: 613478 - DNA, 83 bp, Homo sapiens
ctgtaaccacctcacagattccagcttcggaacaagagaccctgatatctctgcgactttacctactacacctctttgtacca

SEQ ID NO: 613479 - DNA, 83 bp, Homo sapiens
gaggactctggagctgacagcgcgcacttcacccgcagttgccattggatttaatgtagagacggtgacgtacaaaaacctta

SEQ ID NO: 613480 - DNA, 51 bp, Homo sapiens
ctccagctctgtctatcctaccaagcctgctatgggatggatgaagaagag

SEQ ID NO: 613481 - DNA, 99 bp, Homo sapiens
gctgcagccgcacctggccaaggatgaagggcgccctaatggagatcatccagctcgccagcctcgactcggacccctgggtgctcatggtcgccgaca

SEQ ID NO: 613482 - DNA, 49 bp, Homo sapiens
ctcaaacgagagtcagcctttaacgggcaatggagatcttaaaagaaag

SEQ ID NO: 613483 - DNA, 75 bp, Homo sapiens
gttaaacccaggaagctttggatcagacttttgtgttgcagttcggcctccatccctgtgagatcactgccctga

SEQ ID NO: 613484 - DNA, 108 bp, Homo sapiens
ggagtacaacctgaacttctcaggaagcagtactattcaagaggaacaagttccagttccagtctaccacccaacacctagccagactcggctagcaactcagctgac

SEQ ID NO: 613485 - DNA, 100 bp, Homo sapiens
tgtggttggaagtccagagatagttgtgcttttacacggttttccaacatccagctacgactggtacaagccgtgctggtatagaggactctaagaagtg

SEQ ID NO: 613486 - DNA, 99 bp, Homo sapiens
gccggcagtatgccacgcttgacgtctacaacccttttgagacccgggagttccaagatgagatgggattctccaacatggaagatgatggcccagaag

SEQ ID NO: 613487 - DNA, 74 bp, Homo sapiens
tcctcatgacattgctgtctgtatgccgagattttgctgtcctggaggaccacaccctggctcacagcctgcag

SEQ ID NO: 613488 - DNA, 74 bp, Homo sapiens
tcattgaagtgcttggagtgcagaactgaaagaggttggtcaaagaaaaagtgatgtatgaaaaagaggcaaaa

SEQ ID NO: 613489 - DNA, 98 bp, Homo sapiens
cagtatgacaacaatgcacactgtgtgtggatcatcacagcactcaacccctccaagctcagcgatgagttgaaccagcagctggaggccgtgtgcgg

SEQ ID NO: 613490 - DNA, 75 bp, Homo sapiens
gacaatggacctgcctgggcatagacttccttaaggagcatagtggccaccgatcatgaaccaacagatgccagg

SEQ ID NO: 613491 - DNA, 75 bp, Homo sapiens
cgaagctgctgcggttcctgagccggagtcttccgtgtgtgctaagatcgtgcagctcctggggcagaatgaggt

SEQ ID NO: 613492 - DNA, 75 bp, Homo sapiens
cagttgctggcttccacttcgggcttcctttccacagagttcgcagtatgtgcagtgcgtggccgggtgtttgca

SEQ ID NO: 613493 - DNA, 90 bp, Homo sapiens
cctgcaaccaccgctgtactttctgtctctatgaacttgactactctagacacctcatctggacagtgccacatcgcttatccaggcagc

SEQ ID NO: 613494 - DNA, 82 bp, Homo sapiens
agaggatctggtgtaccaggcgaagctggccgagcaggctgagcgatacgacggggacggcaaaacagaacagaaaggcgga

SEQ ID NO: 613495 - DNA, 97 bp, Homo sapiens
aggcgacggcgcgcgccgctcaccagcccgggccccagatccaaggaggaggggcagcggcgcggggaccctgtggcgttcaatgtcatcaatggcg

SEQ ID NO: 613496 - DNA, 90 bp, Homo sapiens
ggcagacatcaccgacttgttaaaagaagcttcggaaccaaaaagaagcttcccagagccggggccaggagccccaagcgccctctagca

SEQ ID NO: 613497 - DNA, 100 bp, Homo sapiens
cctagaccctgcccaacagaatttatatagagatgtgatgttggagaactacagaaacctcgtctccctgggtggataagattgtggaccagctgcagca

SEQ ID NO: 613498 - DNA, 101 bp, Homo sapiens
gcaaaggcaaacttggaaagagcaagatcggcagccctaaacttggaagctcgaagtctggctgtggccatgggagatacagtagtggagcctgccccctt

SEQ ID NO: 613499 - DNA, 100 bp, Homo sapiens
tcaggacacggttccagcgcagtgcgcgttagccatgtctcagcggacggaatagacctcagcagcggcgtggtgaggacttagctgggacctggaatcg

SEQ ID NO: 613500 - DNA, 100 bp, Homo sapiens
tgtggtcaagatcaaggagacttatggggacaccgaagccatctgccggcgcctcaaaacctcacctgttgaagatctgaacagaattaagacgaacgag

SEQ ID NO: 613501 - DNA, 82 bp, Homo sapiens
ggagctctcagaggctaagaaggtggagaccggagaagctgtgaggttgttctcttagaagcacaagatatggcagtgagag

SEQ ID NO: 613502 - DNA, 74 bp, Homo sapiens
ccgagttcaacatcctcctggccaccgactcctacaaggtaaagcttcagcgactgaaggagtgtggacttttt

SEQ ID NO: 613503 - DNA, 82 bp, Homo sapiens
gcgacgctaagttgctgatcgtggcgacctcctgccccccgaggtctgcagtctcctgaacccagcagccatctacgccaac

SEQ ID NO: 613504 - DNA, 75 bp, Homo sapiens
ggccaggaagccagtacagatctttgagaggtctgtgtacagtgacagctatgacttcacacctatggattcttc

SEQ ID NO: 613505 - DNA, 117 bp, Homo sapiens
ccgaggggccagacttggaatcctcagatgagactgatcacagcagcaagcctttagaagaagccacactctctgaattaaaaactgtcctcaagagcttcctaagtcaaggccaag

SEQ ID NO: 613506 - DNA, 74 bp, Homo sapiens
ggggctgtgctgggtgtcttctccctcgccagctggcattttgaaagcgaagcagaagccgtagaatcagcggc

SEQ ID NO: 613507 - DNA, 75 bp, Homo sapiens
cccactaaagcccagaagaatgtggctaccagcgaagatgatagtatttctgctgcaagtacttctgatgttcaa

SEQ ID NO: 613508 - DNA, 82 bp, Homo sapiens
gagagaactcctcatgctcttctgggcacaccccacccacctgtggccagtgcctccggagccagcgtggtggccatagaca

SEQ ID NO: 613509 - DNA, 95 bp, Homo sapiens
atttctccgttggcccaaccagtcccagcgctgtcgtgctcctctactcgagagatgcaggtcagctcctccagtaccacaacttctgagagtca

SEQ ID NO: 613510 - DNA, 74 bp, Homo sapiens
cgagactacggtgtgctgttagaaggttctggtcttgcactaagaatagctgaaacctttggacttcaagaaaa

SEQ ID NO: 613511 - DNA, 110 bp, Homo sapiens
agatcgccggggaggcagcgcgggatcccagcctcaggcgtgcgcggacggtgtgcggcagccgtaccctcaagaactgcaccttccaaccacccttatatgagcctgct

SEQ ID NO: 613512 - DNA, 75 bp, Homo sapiens
gggaagggcctcggcactggtaccctttacatcgctgagaggaaggctgaagttacattggatggagtttggcca

SEQ ID NO: 613513 - DNA, 50 bp, Homo sapiens
gggacaccgcggaagtcgggaaatgcatcaagatggtgctcatgtggacc

SEQ ID NO: 613514 - DNA, 100 bp, Homo sapiens
ccaaaaatattactatccttgagctccccgatgaagtgctggagaatctggtaaaagcaccattgtgaagcagatgaggatcctgcatgttaatgggttt

SEQ ID NO: 613515 - DNA, 100 bp, Homo sapiens
cccaccttgatccagcggacttacgggaactgagtatctaccaagatcaggaacaaaggatcttaaagttcctggaagagcttggggaagggaaggccac

SEQ ID NO: 613516 - DNA, 75 bp, Homo sapiens
ttctgcatatttattatcagaacagcattgacgacaaacacaagtgagatcagagcctagcaacatgcagttttt

SEQ ID NO: 613517 - DNA, 75 bp, Homo sapiens
gcgccgtgtaactgtgaatctttcaaaggtcacgagaagagaatgccttctagatgcaaaatcacctccaaacca

SEQ ID NO: 613518 - DNA, 101 bp, Homo sapiens
gacctgctttgccctgggaaatagtaaccctgccaaatacatcagcttgtaggagacagagtcactcaagactgcttgcaactgattgcagacagtgaaac

SEQ ID NO: 613519 - DNA, 100 bp, Homo sapiens
cttgccgttcgttcgtttccagcctcaggaatttatggtcgcctttttgaatgaggatgccaaagaagagtgaatggcccacaaagagcctggtagcaca

SEQ ID NO: 613520 - DNA, 112 bp, Homo sapiens
gcctcccacgagatctggaggtcagaaactctgctccagtccttcaaagaaaagaatgcagaatgttaccaatacagcaattgctttaagttttctcatttattttatatct

SEQ ID NO: 613521 - DNA, 100 bp, Homo sapiens
gtattcagctgctggttcaggatctggatgctgcctgtgatcctgccctgactgccatgagcaagcgtactgtaagaactctgtggacggcctctggtac

SEQ ID NO: 613522 - DNA, 98 bp, Homo sapiens
tatggtttctgcattttgttaagaagcacctcatgcaagcgagggacctgggactgctcacagccaggtttgttaacactttgcataaagatgtcaac

SEQ ID NO: 613523 - DNA, 100 bp, Homo sapiens
gtcagacagggccaaagaagccaaggagtttctggtacagctgcgcaacatggtccagcagatccagacggagtcttgctccatcgccaggctggagtgc

SEQ ID NO: 613524 - DNA, 75 bp, Homo sapiens
gcgcctgggggcaccgctgccgttccgagtgacatattcgatgccatgttccctgtcactcacatcgctggggag

SEQ ID NO: 613525 - DNA, 82 bp, Homo sapiens
tatccattggtagcgctattgaccttagctgatgaggatgaccgggaaatttatgatattatgagtgatgtgtctgcaggag

SEQ ID NO: 613526 - DNA, 89 bp, Homo sapiens
ccgcggggcgcgggcggcggacagattgaccttcagagcgaggtctacagcagctctgagttcctggccgtccagcccactcctacctt

SEQ ID NO: 613527 - DNA, 82 bp, Homo sapiens
aggaaagatcaaaacgatgcactgcaagaaggagctggcaaacagccctgactgtccccagatgtgtgcctataagctggtg

SEQ ID NO: 613528 - DNA, 98 bp, Homo sapiens
ctcaaagctgcacggcagtctgtttatgaggtggtgaagcagtattttccaatttgaagattcatttgaaggtggctcctgccacctgctaatagcag

SEQ ID NO: 613529 - DNA, 119 bp, Homo sapiens
cccgggaggaaggaacgaggcaaggagctaaagcagcgtgcgttcagccctggggagtgtggccatctggggccgtgtggtatttgccactcaggagacatgtccctatgacatagcag

SEQ ID NO: 613530 - DNA, 75 bp, Homo sapiens
ctcaccaatagccatgatggactggatggtgactggacctacagagacatctgggattttctgcgtcagctgttt

SEQ ID NO: 613531 - DNA, 112 bp, Homo sapiens
ccagagtcagctcccctttctcgcccagcgcccccaggccgctcccggggctcacggtaccgatatggccaattaattgaaataaacagccacagcctcttttctaagtggt

SEQ ID NO: 613532 - DNA, 100 bp, Homo sapiens
ggccgatgaagtgcagaggtttttttctggtcatctcgatgcactcctgaggggcttggttctgggaaaactaggaaaagcaggacataaggcaacgtta

SEQ ID NO: 613533 - DNA, 75 bp, Homo sapiens
ggggctgctcccatcattgatgtggtgcgatcgagctgtaggtaaaacttgcctactgatcagttacacaaccaa

SEQ ID NO: 613534 - DNA, 100 bp, Homo sapiens
gcacatgacgtatttgagttgaagcagttttctcagctgcctgctaacatagctgtttgcagttctaagagtccctgtgaagcaggaagagtgagggcag

SEQ ID NO: 613535 - DNA, 100 bp, Homo sapiens
cgagtactacccgcacgtgtaccctgggcgcagggttgtcatttacgtgctgaagcatattgacttgaggaaaacgccttccttggagtttggcatgatg

SEQ ID NO: 613536 - DNA, 100 bp, Homo sapiens
gttgttctctgacctgcttggagggactcagaggctgtggaggactatctgctgccaaactcttgactgaatatggcgttagtgttttggttttagaagc

SEQ ID NO: 613537 - DNA, 133 bp, Homo sapiens
gtagggcaaattttaaatgggtattatttttcatcttcaaacaggcagacctgttatcctaaactaggtttctaagcatgaattgaggaacagaagaagcagagcagatgatcggagcagcatttgtttctcc

SEQ ID NO: 613538 - DNA, 82 bp, Homo sapiens
caaatacctgctgttcggatttaacttcatcttctggacaatgcagatcttcgtgaagactctgactggtaagaccatcacc

SEQ ID NO: 613539 - DNA, 51 bp, Homo sapiens
gcaaacttgacactcaccctgaccgggaaagtacggtggccagactttaac

SEQ ID NO: 613540 - DNA, 90 bp, Homo sapiens
cgactctcatagaaaacgagagtatatgcgatgagtttggcattgacaaaggatccccaggattaccctgataaaaaaagcctacctcat

SEQ ID NO: 613541 - DNA, 100 bp, Homo sapiens
ggttcctcgcctggagcacgttccccgccttcaaccggctgcaaggggatcgcctgcgcgtcccgctcgtttcggttgagagcaccattggatgcttact

SEQ ID NO: 613542 - DNA, 50 bp, Homo sapiens
cgcgaatatcgtcatcgttagaagactacatttggtcaattttgtggaac

SEQ ID NO: 613543 - DNA, 83 bp, Homo sapiens
tgatgcaagctctcgagagtctcacggagacgcaggctgagtttgagaaagctgcagaggaggttaggcaccttaagaccaag

SEQ ID NO: 613544 - DNA, 75 bp, Homo sapiens
ttgaacaccagcaagaatggcatatcagatgggaaactcttgtctagtgatgtgactcattacgtgatcccagac

SEQ ID NO: 613545 - DNA, 76 bp, Homo sapiens
gaaccaattccggacacataacaagcagcagtgaggacaccaaaggcagaatccagagaccacatttgaagtatat

SEQ ID NO: 613546 - DNA, 100 bp, Homo sapiens
tggtgaaggtccggggcttgccctggtcttgctcggccgatgaagtgcagaggtttttttctggccacctggttcttagtcccccacctccgcacacggg

SEQ ID NO: 613547 - DNA, 75 bp, Homo sapiens
aggaaatctggccgccgccgccgcgagcgctcccggatcaactcactatcctgaaggtccattctcccaagaaga

SEQ ID NO: 613548 - DNA, 75 bp, Homo sapiens
cgtggatcatgcggccactcatattaccaaccgcagagagaacaaaatccagtctcatagcagaggagaatataa

SEQ ID NO: 613549 - DNA, 100 bp, Homo sapiens
aaacttccagaacatctgggagaatatttaatggaaaatcgcttggttaaaacctgacacttttaacaggtggtcttcaagctgacagagaagctgacgg

SEQ ID NO: 613550 - DNA, 95 bp, Homo sapiens
cggcgcgcccggcgtgccgagcggcaacggggctccgggccctaagggtgccggtggtggtgtgcacattgagccccggtatagacagttccccc

SEQ ID NO: 613551 - DNA, 100 bp, Homo sapiens
agttcgtctgcccacagccctccactcaacacaggaagggcatcattcagaagatagtggacagtcacaaagtaaagcatgtggcctgctatggattccg

SEQ ID NO: 613552 - DNA, 100 bp, Homo sapiens
tggggaggacaacttcgcccgggacttcatgatgttgctatcggagctccacaagaagatgacttgcaaggtgctatttatatttacaatggccgtgcag

SEQ ID NO: 613553 - DNA, 100 bp, Homo sapiens
aggctccgggctgaagattgcttctcttctctcctccaaggttaaaatcctgcaagctactgggttgccacagcatctgtcccactttgtgttctgcaaa

SEQ ID NO: 613554 - DNA, 83 bp, Homo sapiens
gagcatctccacccaggaacctcgccatccagaagtcaaaatgcagatcttcgtgaaaacccttaccggcaagaccatcaccc

SEQ ID NO: 613555 - DNA, 100 bp, Homo sapiens
gcactttaactccaatggcctggaacccaaagaaattccgggtagatatgcctggctcaggcagtgcattcatccccaccatcaacgccatcacgaccag

SEQ ID NO: 613556 - DNA, 75 bp, Homo sapiens
cccggagtttgaaaatgaagaattggccctggccaacgtcaacattgggagcctcatctgcaatgtaggggccgg

SEQ ID NO: 613557 - DNA, 82 bp, Homo sapiens
cacctgctcatgggtctggcaggaggcaagctgatcctgtctctggaggcatcacgttgggtggtttccatttagaccgagg

SEQ ID NO: 613558 - DNA, 98 bp, Homo sapiens
gagaaccgaggaacgaagaaacagacattcaacatgattgcatttgaaccccatctgctttgatatgattgaagaagcatacatgacaaaatgtggcc

SEQ ID NO: 613559 - DNA, 98 bp, Homo sapiens
cagtcatgtgaaaactcatcaccttaaggtgttaagtgtaaggatcttcatgatgaaatttctgtaaatgaaacaatcccagtatcatcctctacaga

SEQ ID NO: 613560 - DNA, 51 bp, Homo sapiens
cctcaaccggctgtacggaatccaaggggactcattctcacagttccggtt

SEQ ID NO: 613561 - DNA, 90 bp, Homo sapiens
gtttcagagcgtttgggtcctctgaggccccttgaccagcgggtcctcctcgccctggtatgatgccagcaccccatatggggggccctc

SEQ ID NO: 613562 - DNA, 100 bp, Homo sapiens
agtgaccgagaccgcggccgggaccgagggacctatatccagactttgcctgacactgcagggtccaagagaattaaagaaatatggaatgacatgaaga

SEQ ID NO: 613563 - DNA, 83 bp, Homo sapiens
gagcgccgcgcacttcgtcatgttcttcgcgccctggcgtccgagctgggccacagcctgaacgagaacgtcctcaagcctgc

SEQ ID NO: 613564 - DNA, 51 bp, Homo sapiens
cggccgggccctcgagacggggacgaacttccttcacaagtgggacccccg

SEQ ID NO: 613565 - DNA, 50 bp, Homo sapiens
cccgtctgtgggacaacgctctggagcctgtgtgaaatgcagcaaagggg

SEQ ID NO: 613566 - DNA, 82 bp, Homo sapiens
cctcgcctcactatggcagcagcacggcacagcacgctcgacttcatgctcggcgccaaagataacgaaggaggcccaactt

SEQ ID NO: 613567 - DNA, 75 bp, Homo sapiens
atagtagggggtggagaatacaaacctgacaagggtaaaggagcagcatttctttctattactactatctatgct

SEQ ID NO: 613568 - DNA, 76 bp, Homo sapiens
cagcaagtgcgcggttggggccactgcgaggccgttttagactgttaccaatgctgtggtcacagtgccagcttac

SEQ ID NO: 613569 - DNA, 58 bp, Homo sapiens
cccgactgctgcaggccggctacgagcccgagaggaccgtataatagacgctggcccc

SEQ ID NO: 613570 - DNA, 100 bp, Homo sapiens
gcagtaccctgatggagtcccttgcaggagctctgtgtgtcgtctgagcagtcgcgagaagatttccctccaggacttgtccaaggagcgccggcctggt

SEQ ID NO: 613571 - DNA, 126 bp, Homo sapiens
atttattaacacctcttgccactcagctgacatatgaaggactcattgatgaaatttatggcattcagaacatgcatattgggtacttccagaagtatgaattcagtgatgcaaaggacaggcggg

SEQ ID NO: 613572 - DNA, 93 bp, Homo sapiens
gtggagccggagctgggcgcggattcgccgaggcaccgaggcactcagaggaggtaactaggatttctacctcaaccgcgagacctatgcaag

SEQ ID NO: 613573 - DNA, 75 bp, Homo sapiens
gcctcagcaccgacagccgacgcgcagatagcagagccatccttgggcctggctttggcccttcaaagagactgt

SEQ ID NO: 613574 - DNA, 80 bp, Homo sapiens
tcgagtgaccgagaccgcggccgggaccgaggcggctggactctattacctggcagaactgatagaagaatacacagtgg

SEQ ID NO: 613575 - DNA, 75 bp, Homo sapiens
aaccacctcacagattccagcttcggaacaagagaccctgaatttatccagttggcgaaggactttgaggatttc

SEQ ID NO: 613576 - DNA, 74 bp, Homo sapiens
caaagagttgtggatcctgaacaggtaccgaaagcacagtaatcactggtgtcgatattgtcatgaaccatcac

SEQ ID NO: 613577 - DNA, 76 bp, Homo sapiens
gtttaaggttccatacccatgccaccctggagaaatgtgccacgtgctcccagcccatcctggaccggatcctgcg

SEQ ID NO: 613578 - DNA, 75 bp, Homo sapiens
gaccatccaagaaaacagcaaaacttcacgtagcggtgaagatgcttgtttgctactgatgggtgtgagcaagtt

SEQ ID NO: 613579 - DNA, 88 bp, Homo sapiens
gcatctaccagatgtacttgtgcttcctgctggccgtgctgctgcaggtcgaactggaagagcagggaataagggaaaagcaattaca

SEQ ID NO: 613580 - DNA, 100 bp, Homo sapiens
cacaccctgtcctatgtggacgttggcactgggaaggttggatttggtctagggagtcccagaaagaagtagaaaaagagagagaagcctaccgtcggag

SEQ ID NO: 613581 - DNA, 91 bp, Homo sapiens
ggagctggacggcgagcgcgagcggcgcgagaaaaaactagatgatggccatttaaacaactctttgagctctccagttcaagcggacgtg

SEQ ID NO: 613582 - DNA, 98 bp, Homo sapiens
aagagcacaatcatacaaaagaaaacaccatccggaccacgaccagggctccttggtaatgaccagtctaagggattaggaccagcatcagaacagtc

SEQ ID NO: 613583 - DNA, 100 bp, Homo sapiens
cgtctcgctcaagtgatctttgataagaatgattcagattttgaagctaaagttaagcaggaaagtaatggtccaacagacagttatgcagctatttcac

SEQ ID NO: 613584 - DNA, 80 bp, Homo sapiens
cgttgtgtttgtgaaacagagaaagataggcggccatggtccaaccttgaaggtcagaagccaatgacctggccctgagg

SEQ ID NO: 613585 - DNA, 90 bp, Homo sapiens
cgatctcttgagaaaggaaagacttctgtgctcccgagaacttcctatcagggatgcttgaagatggaaagaaatttgattcctcccggg

SEQ ID NO: 613586 - DNA, 100 bp, Homo sapiens
gccacagtcgtcttgctgtcgagtggacaatatcactgaccagttctgcaatgcttcaggctttcccttcagcaggcctttctgggcccctcaagcgcac

SEQ ID NO: 613587 - DNA, 98 bp, Homo sapiens
ctcaccgttctgcccccagaactagtatgtaaagaattcttgaaccgattctacaagtcactgatagacagaggagttaacttttcgctggacactat

SEQ ID NO: 613588 - DNA, 88 bp, Homo sapiens
ccgtcaggcagttggttgggacccgctccaaccctcggtgcagctgacgagatcatgttgccttgtgaattttgtgaggagctctacc

SEQ ID NO: 613589 - DNA, 75 bp, Homo sapiens
cagagaagtgcccgaggagagttaacaggagcatggggaagtgattgactgtgtgcaggagctgagccactccgt

SEQ ID NO: 613590 - DNA, 100 bp, Homo sapiens
cggctgaggagcgccgctgcctcgcctcggagctgcagaggctggagacagagttgggccaacccgctgagcgctggaaggacacctgggaccgggtgaa

SEQ ID NO: 613591 - DNA, 90 bp, Homo sapiens
atctccatttcatgatattccaatttatgcagataaggtatacctaaaggcacttttattgagaatgagaagaactttagatgatgatgt

SEQ ID NO: 613592 - DNA, 100 bp, Homo sapiens
gcgcgggatcccagcctcaggcgtgcgcggacggtgtgcgggcaatctgaatatggcggtgtagtgtttggtggttgggcgcgaatggcccagcccattg

SEQ ID NO: 613593 - DNA, 74 bp, Homo sapiens
aagcactttatatcatcgcaaaactcctggatgtgattgatctcactggagatgataaagatgatcttcagaga

SEQ ID NO: 613594 - DNA, 100 bp, Homo sapiens
tgatgaggatttcgaggaggaacccacatcccccataggtcactgtgtggccatctaccactttgaaggtgtctttcctgaagactatcttcccgtctca

SEQ ID NO: 613595 - DNA, 100 bp, Homo sapiens
gttcgcccaggctttggcccggcttccggagctgctggagccagttctgcttctcggcaaggagcgatttgctggtgtagacatccgtgtccgtgtaaag

SEQ ID NO: 613596 - DNA, 75 bp, Homo sapiens
gcgagatgtcgaagccgccacccaaaccagtcaaaccagagatatgcagcccctactcagtgccctgccaaatgt

SEQ ID NO: 613597 - DNA, 50 bp, Homo sapiens
gcgcgcctttgtgcgcgcgccgagcttcttccagaccagctggtcttgct

SEQ ID NO: 613598 - DNA, 98 bp, Homo sapiens
ggagaaaatgactgcggagacaactctgatgaattagattgtaaaggacacattcagctaacgtattttagcaggtggagtgaggttgaagattcctg

SEQ ID NO: 613599 - DNA, 100 bp, Homo sapiens
ctgccgggcaccgaggaccagctcaatgacaggtaattcatttgcacacctgttagcaagaaacagaagttgaaggactggaacaagtgaactaggaaag

SEQ ID NO: 613600 - DNA, 80 bp, Homo sapiens
acaaactggccaagaagggccttactccttcacagatcgcagaaagactattctagttttctatcaagaaaaagcaagat

SEQ ID NO: 613601 - DNA, 51 bp, Homo sapiens
ctgtggcagagttgaaggctgtaattcgccaaaatgacgaacacaaaggga

SEQ ID NO: 613602 - DNA, 100 bp, Homo sapiens
aaggagcaggtccgccacttctactaccgcacctggcacaagatcaccaagtacatcgactttgatcatgtcaccacgttctgcgcttttccgagtcgga

SEQ ID NO: 613603 - DNA, 83 bp, Homo sapiens
ctgggaaggcgaggacgaggacgaggacgtcaagattaacagccatgcaacagaatggagtcccagccacccaggagaggatg

SEQ ID NO: 613604 - DNA, 80 bp, Homo sapiens
ttacaagccagcctctgggaccgaggtgaaagaaaagatgttgtcccggttaagagtagtttccaccacttgtactttgg

SEQ ID NO: 613605 - DNA, 90 bp, Homo sapiens
cacagaagctcatccgcaaggtgtccacgtcgggtcagatccgacagaaggactttgtgttttatgccccacgtctgagaatcaacaagc

SEQ ID NO: 613606 - DNA, 96 bp, Homo sapiens
gtgctatcggataaaatctctaagagctacattacagattttttcaacaggaagtatcacagtaacagggaaaagaagatctcccggagcagtgcc

SEQ ID NO: 613607 - DNA, 75 bp, Homo sapiens
cagtgggctaccataaacacatcaccttgatttttaatcccacggaacaggaggcacgtcctgtacccataaaaa

SEQ ID NO: 613608 - DNA, 100 bp, Homo sapiens
cagatcacatatcttattcatcagtactctttccattccttaccccagtttttgaagcattaaatgtctctctgtttccaaaagataccataaatttttt

SEQ ID NO: 613609 - DNA, 90 bp, Homo sapiens
cccagcaggaaggtctcacctgaggtgaaccttcgaccttggacttctcagcctccagaatgacaggggcaagtgtccgagtggtgaatc

SEQ ID NO: 613610 - DNA, 88 bp, Homo sapiens
tagaactgcagttgggaaagacagtgattgttataatcaaaggtggattacaggaggtggcagaacagttagagctggaacggatagg

SEQ ID NO: 613611 - DNA, 100 bp, Homo sapiens
cattgacgagtgcaccgtgctccgggggcctgacggcagcagcaaaggcttgtctcgaacttctgggctcaagtgacccacctgccttggcctcctaaag

SEQ ID NO: 613612 - DNA, 78 bp, Homo sapiens
aaaaaattaatttgtcatcagatcaaaataagtctgtttctgaaagggaagccgtggcggacggagcagacggaggac

SEQ ID NO: 613613 - DNA, 100 bp, Homo sapiens
cgctagacctggacaagtatgtggaaatagcgcggctgtgcaagtacctgccagagaacgacctgaaggtatacccgaaatcttgtggatcaaggaaatg

SEQ ID NO: 613614 - DNA, 83 bp, Homo sapiens
gccgccgctgccgctgccgctgccgcacctccgtagctgactcgtgtcaacagcatctccaccctggagcctgtgagccggtg

SEQ ID NO: 613615 - DNA, 100 bp, Homo sapiens
gtttacatacaggaaaaactttccagccattgaggactactgagcccagccaggctgtatgccattgctgccaaagaaaaagatattcaagaggagtcca

SEQ ID NO: 613616 - DNA, 75 bp, Homo sapiens
ctgcgaccctgcgccgggtgttcgtggtgggggttggcatgaccaaggaggaagaaggcacctacgatcaaactc

SEQ ID NO: 613617 - DNA, 87 bp, Homo sapiens
tttatcgtagaccatatgaaaagggtcgcctaatcatcgaatttaaggcatccgtgtcattctggaccttactcccaactaccgggg

SEQ ID NO: 613618 - DNA, 75 bp, Homo sapiens
atttacttgatgtccaggggaacatcactcagaagtttgatgtagtgaatggaggcattgagaacacattagaga

SEQ ID NO: 613619 - DNA, 100 bp, Homo sapiens
gtatccaccccatttggcgtggcggccatctggatcctggactccgtcgggctccgtgcggcggaacagcagcagtattggtatcgacagcacttgctta

SEQ ID NO: 613620 - DNA, 137 bp, Homo sapiens
aacagtttctgctgcagcggctggcagacggggccatcgacctctatgccatggtggtggttctctcgagggctataccaagtccatcgacatctggtctgtgggctgcattctggctgagatgctctctaaccggc

SEQ ID NO: 613621 - DNA, 90 bp, Homo sapiens
gagcgtgaccgagagcgcgaatatcgtcatcgttagaagatcttggcatatacagaagggctgcatggaaaatggctgttcacagagata

SEQ ID NO: 613622 - DNA, 100 bp, Homo sapiens
aagctgccgccgttgcctccgccgccaagagtgagcgagcggacccgcgatggccgacatcggcctggctgcctggggacgcaaggccctggacattgct

SEQ ID NO: 613623 - DNA, 51 bp, Homo sapiens
gaggaagatcttcaaatgggcattcacaagatcatcaatgctgtggtactg

SEQ ID NO: 613624 - DNA, 96 bp, Homo sapiens
cagctccggcgccgcggcgagacggagacggaccgagccacgggcccccgcggccgcagcatctcggaggaatgccttcaattaagttgcagagtt

SEQ ID NO: 613625 - DNA, 75 bp, Homo sapiens
ggcgcagatgcgggccctgctggaccagctcatgggcacggctcgggacggtcttttccaatggtcaccttggaa

SEQ ID NO: 613626 - DNA, 83 bp, Homo sapiens
gcgttgtaccatccgcctgtgggacacctaccagggaaagcaggcaggatgggagagtcgccgatagaaccacctcttccctg

SEQ ID NO: 613627 - DNA, 80 bp, Homo sapiens
ccctggatgggggaccacaagatcctcatcgacaggcttgttagcagtggcacaagatcttacagaggatgaagaaacag

SEQ ID NO: 613628 - DNA, 75 bp, Homo sapiens
cgaggctgaggatgatggtagattgccagacatatctgaagagatggattaagaatgctttggattaaggattgt

SEQ ID NO: 613629 - DNA, 98 bp, Homo sapiens
ctccgaccggctgaggcggcgcggcagcggagggacggcagtctcgcgcgatcagcttgaacgggtctttttacgacttggccatgctgaaacagatg

SEQ ID NO: 613630 - DNA, 75 bp, Homo sapiens
gaccgggcgagcagagtaagaagcaggagaagaatttggattggtttcctcggatgcgagccatgtccctcgtta

SEQ ID NO: 613631 - DNA, 75 bp, Homo sapiens
acactaggtcgggcgccacagtgccacccaaggagaagaaggtgttggggatgtcctttgcactgaccctgaact

SEQ ID NO: 613632 - DNA, 99 bp, Homo sapiens
atcttcttccttaggaaaccaatgagaactggactgatgaccaactgcttggttttaaaccatgcaatgaaaaccttattgctggctgcaatataatca

SEQ ID NO: 613633 - DNA, 100 bp, Homo sapiens
ggataccattgtcaagatccctccacatgtactgagtgttctctgtcttcatcagaagaagaaagatttatttccatcaggagacctaaaacaccagcct

SEQ ID NO: 613634 - DNA, 76 bp, Homo sapiens
ctggaggcggtggctgcggttgcgggaccgctcttcatcacggtcatggacaagctgcgcctggagatccgcgcca

SEQ ID NO: 613635 - DNA, 90 bp, Homo sapiens
tgtgggacaagcgcacgggcctcgccgccagaacggttcagaaaagagaccctcgtgactggactgcacagttcatggaggctgcagatg

SEQ ID NO: 613636 - DNA, 82 bp, Homo sapiens
atgagtatgacatgaccaagatgcccgagtgctacttctactccaagttcgcttcagataaaccagtcgatcattttctgta

SEQ ID NO: 613637 - DNA, 83 bp, Homo sapiens
cctcgacccagggcccgcgggccaggagagcgctcggcggcgggctgacgcacgaggcacacaggaaggaggtggagcaggtg

SEQ ID NO: 613638 - DNA, 51 bp, Homo sapiens
tctggacactgactccagagggcaagattgctttcacaacaaaaatttacc

SEQ ID NO: 613639 - DNA, 100 bp, Homo sapiens
ttcgtatcacaaaagcagatgctgctgaattctggagaaagttttttggagacaaatgtctagagtttctgcttcaaaatgatgcaaatccatctatccg

SEQ ID NO: 613640 - DNA, 100 bp, Homo sapiens
cgacaccatggtggaggagcagtacggccagatgtacatcaaggcctccggcagctatgcagatccaggtcactgggatcgttaccactacagtgctaga

SEQ ID NO: 613641 - DNA, 83 bp, Homo sapiens
ggggtggtcctcttccctttgtcggactatgatttaatctccaaagaaccaaagccttttgtatttgagggaaaagtacgtgg

SEQ ID NO: 613642 - DNA, 50 bp, Homo sapiens
cttgtttagatataatgattgagcatcaacaacagcaacttgtgattggc

SEQ ID NO: 613643 - DNA, 83 bp, Homo sapiens
caccaagtacaccagctcgaagattttttatcaagcagaaatgcatcgaacaacgagaatcaagatcactgagctaaatcccc

SEQ ID NO: 613644 - DNA, 98 bp, Homo sapiens
caggcaattattcaatagtcatgacaaaactatgagtggacacttaacagccagagactgctgctactttgaaacgtacgatagaggccctgatggac

SEQ ID NO: 613645 - DNA, 100 bp, Homo sapiens
ccaccgtcaacccgctcgggaagcagctcttgccaaaaacctttggacagtccaatgtcaacattgcccagcaagtggtgtacctccttatactgagtgt

SEQ ID NO: 613646 - DNA, 82 bp, Homo sapiens
tcatctgcaccataaagacagactggttggattatctcaagatgcccaggatcaaatgagaaagatgctttgccaaaaagaa

SEQ ID NO: 613647 - DNA, 50 bp, Homo sapiens
tgactggagagcaggctggatagcaaatgaagctcgtgaccgagaacctg

SEQ ID NO: 613648 - DNA, 98 bp, Homo sapiens
gtgtctcgccgcagcctccggagaggaacagaccctcactctctctgtcagaaaaatgttttgggatttgagattgacgcggtgaactctgtccagtt

SEQ ID NO: 613649 - DNA, 75 bp, Homo sapiens
acaaatcaaattagtggttttgaatggtgcccctcggagtttgcgtgctgccctgtggaggtttgctgagctggc

SEQ ID NO: 613650 - DNA, 100 bp, Homo sapiens
ctgctgtgaaccagcagaatttttgaacagttcctgctcattttccacaaggccgcggcaggggagctgcaggaggacagtgggctgatggcgctggcaa

SEQ ID NO: 613651 - DNA, 104 bp, Homo sapiens
ctcacttgcatgtatttggaacaaaaaaaggagatgcctggcagccccgctctctgcataacagtgtgaagaaatcccagccagacttgcccatctccaagatt

SEQ ID NO: 613652 - DNA, 100 bp, Homo sapiens
ctggccctggtggggattgacagccacgggaaggaggcatacacggaatacctgaggagcatccactatatctcccaggtgttactagaagaagtggaaa

SEQ ID NO: 613653 - DNA, 100 bp, Homo sapiens
gctgtgctgcgcgacccccgcgcatgtgtggacaacagtgagtatatgcggaatggagacttcttacccaccaggctgcaggcccagcaggatgctgtca

SEQ ID NO: 613654 - DNA, 75 bp, Homo sapiens
cgctggctcagccgcaagtacccgtccatcatagtcaactgcgtggaagagaagagaggatctgacgaactactc

SEQ ID NO: 613655 - DNA, 83 bp, Homo sapiens
cagactgctgagcgactatattgagaaggaggtaaaggaatcccagtcagaagttccagcctgccactgttctctgatgccat

SEQ ID NO: 613656 - DNA, 100 bp, Homo sapiens
ttcttccaaggaaccagtgcgaagccccaaagtggaactcacccaaatgtctatcgtctgctgaatggataagagaatatgtgatgtctccatacggtgg

SEQ ID NO: 613657 - DNA, 100 bp, Homo sapiens
tggctatggacagcaggaccgtggaggcgaactcggcgaaggtgcaggaggacctcgaagcagagttccagtccctcttctccctcctggaggagctgaa

SEQ ID NO: 613658 - DNA, 108 bp, Homo sapiens
cgctgctctgtggggctctggccgcgcctggcctggccgggaccatgttccagagaggtggatcgcatggtctccacgcccatcggaggcctcagctacgttcagggg

SEQ ID NO: 613659 - DNA, 99 bp, Homo sapiens
atccaggaccagctaaagaagcgctttgcttacctgtccgcctggagatttgaaaaagagaattgaatctctgatagacagagactatatggagagaga

SEQ ID NO: 613660 - DNA, 94 bp, Homo sapiens
gtcgtggaggtggccgtggaggcagaggtggcatggggcggaaggtgctctaccagcgtgcacccaggaatatccaccgccatgtgatcctctc

SEQ ID NO: 613661 - DNA, 74 bp, Homo sapiens
atttcctacaagcagtgtggcaaggcactgcaggaaaggaaaaggaaaattttggacgaagctgtggaattaag

SEQ ID NO: 613662 - DNA, 100 bp, Homo sapiens
cccagagacctgagcagctctgcaaggttctaacagtatcctaagaaatccggtaaccaataagaagcattacagattgtatgtgatttataaagttccg

SEQ ID NO: 613663 - DNA, 140 bp, Homo sapiens
agaggggctcctggagctgtgagctctgctacttcaagtaccaggtcctggcgatcagcaccaagaacccactgcaggacatgaagaatgcaaccctctccctgaattctaatgacagtgagccaaaatattaccctata

SEQ ID NO: 613664 - DNA, 75 bp, Homo sapiens
ctgtggaaatcgatgatgcattgtataggacttccaatagtagtcagacattatcatcctgtcatactatggagc

SEQ ID NO: 613665 - DNA, 75 bp, Homo sapiens
gggcagccctggaggcttactgcaagaagtatgagcagctcaagggtttgccttcccggattgggcctacaagcc

SEQ ID NO: 613666 - DNA, 99 bp, Homo sapiens
cgcattaagaaagacccggtgccttacatctgtgccgagcccctcccttcgaatattctcgagtgaatgtgtgaatgacaactactggtttgggaggga

SEQ ID NO: 613667 - DNA, 80 bp, Homo sapiens
aaaatggacgctgacatcaatgtcacaaaagcggatgttgaaaagggtaagaaggtggatggctctgtaaatgcctatgc

SEQ ID NO: 613668 - DNA, 90 bp, Homo sapiens
ggaagccttgaggacctactcacagataggaattgaagccctttctcccaggtttccatgctgagctcctgcccatcttcagtcctgaac

SEQ ID NO: 613669 - DNA, 75 bp, Homo sapiens
gagctttgccaagttcagcaaatttggagatggtcagcccaaggctgccccctcggtcactctgttcccgccctc

SEQ ID NO: 613670 - DNA, 100 bp, Homo sapiens
cgagaagttgtgaacagactcgatcgttagggaatgggccactgtttgtggaagatataatgacaatggtgctgtgtaaacccaaacttttacccttaaa

SEQ ID NO: 613671 - DNA, 88 bp, Homo sapiens
ggatggaaggccacatgcattggaaataatagcgctcacaagctccgggtggataaggcagctgctgcagcagcggcactacaagcca

SEQ ID NO: 613672 - DNA, 99 bp, Homo sapiens
gcaaggtcaagctggcacctgagaggattgccgatggcaccatgggatttagtgcaagaagaagaacagttgatggaagaaaagaaaaagaaaaaagac

SEQ ID NO: 613673 - DNA, 75 bp, Homo sapiens
ctcgagagctcgccccgaacgggggtcttcctcctccgccgttgacaggtcatcatcagatttgaaatatttaaa

SEQ ID NO: 613674 - DNA, 100 bp, Homo sapiens
tgcaacctccgcctcccgggttcaagcaattctcctgcctcagcctcctaagtagctgggactacagaacattgatgatggcacctcagatcgcccctac

SEQ ID NO: 613675 - DNA, 82 bp, Homo sapiens
ctcattaccgtcgccagcggagcgaacccgagagcgtggagcgggctgggccagcacgagtacacgagacaggattgagaaa

SEQ ID NO: 613676 - DNA, 75 bp, Homo sapiens
ggatggccgggacgaggccaattgccacaaaaagccttggcatccacgggaggaagaagtgttcaggcagcatgt

SEQ ID NO: 613677 - DNA, 75 bp, Homo sapiens
tgcgccccgcacccctccgagcagcccggggatccagcacgcagcctggaattgtctcgccatttaaacgagtat

SEQ ID NO: 613678 - DNA, 100 bp, Homo sapiens
ccaccaagccccgctaggagccacctagactggatgcagagcatgggcttgctctcaattttgcgcaagttgaaaagtgcaccagaccaggaggtgagaa

SEQ ID NO: 613679 - DNA, 88 bp, Homo sapiens
ctggacttcgcctttcccgagccctggaggtggggagaaaaggcattgggatcccgtggcagttgcagcactgaagtggagaaggaga

SEQ ID NO: 613680 - DNA, 100 bp, Homo sapiens
gcttgcctgaatattttgcaccctatcaagcagagcggtttcgaagacttggttctgaatgacatcatctccaccatgttcaatagaaagtttatggagg

SEQ ID NO: 613681 - DNA, 50 bp, Homo sapiens
gttacttccaagtcatcaccagaaaggattaattggaattcttcaaaatg

SEQ ID NO: 613682 - DNA, 75 bp, Homo sapiens
agttgattgggagccactcgggggtgaagctttgcaggtggacaaaggagctgcatgctgtttcccttgaacaac

SEQ ID NO: 613683 - DNA, 100 bp, Homo sapiens
caatgcacggcgtgtacatgagccagccggcccctgccgctggcccctaccccagcatgcccagcactgcggctggtgtcccgacccaggctaagcttga

SEQ ID NO: 613684 - DNA, 100 bp, Homo sapiens
gggatcctggatgcagctcctcacaagtattgggcaggagctgctgcaggaggagaaccggcagaagctgagcctgagcaccaagctcaagcaggtggag

SEQ ID NO: 613685 - DNA, 85 bp, Homo sapiens
tcgcctcgggtctcgggggccgctctgggatcccggccaccagcaattgtccgaatagcctaacatggcagaccagagacagcgc

SEQ ID NO: 613686 - DNA, 82 bp, Homo sapiens
ttcttggcagtcatggacaagagctattgatagaaggctgcagttcatggagctcgtttcaaagggcaagatctaaaactgg

SEQ ID NO: 613687 - DNA, 100 bp, Homo sapiens
cctccccagcaaatcgagaaaaacctcagcgacctgatcgacctgtctcaaatatctatcagtgtagaagagtgggaagacaccaaagactccaaagaac

SEQ ID NO: 613688 - DNA, 73 bp, Homo sapiens
ggctgctggtgggccgcgtcgaagacatggaccagggctacggaggaatttgatccccagcaggagcgggact

SEQ ID NO: 613689 - DNA, 83 bp, Homo sapiens
cggccagagcgccggcaagagctcggtgctggagaacttcgtgggccgccaagacaatgcaaactccagtgaacattcccgtg

SEQ ID NO: 613690 - DNA, 100 bp, Homo sapiens
ggacctattgttcagttacaagagaaactttatgtgcctgtaaaagaatacccagatgacaaggacacactcagcattcactacctcatgctgccccgtg

SEQ ID NO: 613691 - DNA, 51 bp, Homo sapiens
gagaagtaatcgctgtttatcaagcaattgctggctactttgatatatatt

SEQ ID NO: 613692 - DNA, 96 bp, Homo sapiens
ggaatgcttactgttgcgtggttcgttattaacaggaacaagtgtcattcaaggatgtatgtgtggacttcactcaggaagagtggtatctgctgg

SEQ ID NO: 613693 - DNA, 90 bp, Homo sapiens
agtgagtcgaaatgcgtctctggaagtggcatgcatcctggagataacatcagtagaaatcggagttgttgccgtcaaagccattaacag

SEQ ID NO: 613694 - DNA, 98 bp, Homo sapiens
gatcgccgcttcttccccatctccaaggaccagcctcggtacctggttgactgtgatgaagtgatcttcatgaaagagggctgtattacggaaagagg

SEQ ID NO: 613695 - DNA, 90 bp, Homo sapiens
gttgtctgccccctacatgagaagcatgatgcagtcactaagccagaatcctgaccttgctgcacagggtctttttggagttcctgagct

SEQ ID NO: 613696 - DNA, 98 bp, Homo sapiens
tacctcacagcagggatgctggaccaacctggctttcccgactgctccatcgaggcagccatggtgaaggttccgaggattctgaagacgacggggag

SEQ ID NO: 613697 - DNA, 82 bp, Homo sapiens
tgagcaaccgacagcagagttactgttactgtggtggccctggggagggaggagccccagccccgcgacgaggaggaagcgg

SEQ ID NO: 613698 - DNA, 100 bp, Homo sapiens
gacctttacctgtggaggcaacactggccaagaagaggaaaggatcaccccttctgtgtcattctctgaggaaaacaagttcttctcaaggaggaaagtc

SEQ ID NO: 613699 - DNA, 50 bp, Homo sapiens
cgagggacatgcagacagacacgcagggtctctaattaacagaagatggc

SEQ ID NO: 613700 - DNA, 96 bp, Homo sapiens
cagaaacacagttcaccagtggtgaaaaggagcaggtagatgagtggacagttgaaacggttgagggtggtgacttcacacgccataatggcactg

SEQ ID NO: 613701 - DNA, 83 bp, Homo sapiens
gcaagagaatgtctgtggcccacatgagcttgcaagctgccgctgccctcctcaagatgggaaagcagtgcaggtggaccccc

SEQ ID NO: 613702 - DNA, 100 bp, Homo sapiens
ccaccccaaactggatcctacagccaagctccaagtcaatatagccaacagagcagcagctacgggcagcagagtgtgatccctcacatccacaaatctc

SEQ ID NO: 613703 - DNA, 105 bp, Homo sapiens
gtcccagaagtgcctgcagttcagacccttctctcccctccactttctcccgggtactccaaagattcaggtttactcacgtcatccagcagagaatggaaagtc

SEQ ID NO: 613704 - DNA, 50 bp, Homo sapiens
tgcaaccccaccatactgcacgtgacgctgttggaagctctgactgtggc

SEQ ID NO: 613705 - DNA, 100 bp, Homo sapiens
aaccggacaagctgcacatccagatgaatgatgtcatcaccgtcatcgagggaaggtgagcacctgcggatctgtccccagggctacacctgctgcacca

SEQ ID NO: 613706 - DNA, 98 bp, Homo sapiens
ccggccaacgggctgcgcagagccgcggcgccggagagtatgatttcatccattgtaaatagcacatattatgccaatgtgtcagcaaccaagtgcca

SEQ ID NO: 613707 - DNA, 88 bp, Homo sapiens
tggccagggaactcaaacagcagatgcagattttaggtgatgggcaagtcagaaagtcagatggatataactgatatcaacactccaa

SEQ ID NO: 613708 - DNA, 100 bp, Homo sapiens
gagaagaaccaggccgtgtgccatgactacgacatccacttctaccccaccttccggtctctgaaagccactcggaatttctccatctcagattggagca

SEQ ID NO: 613709 - DNA, 100 bp, Homo sapiens
ccaggagccaggggcccagaagccaggtttcccaggatgccctgaggagaaccatcttccctctggggggattaacgaaagagtttgtaaagaaaatcgc

SEQ ID NO: 613710 - DNA, 82 bp, Homo sapiens
cccgctcccggagttccgggatcctggagattgatccaaatcctgatcagtcagcagatgatagaccatcctgcccctctcg

SEQ ID NO: 613711 - DNA, 100 bp, Homo sapiens
cccagatccatttacactttacaggagagatgacatgctggacgtggagaccgatgcctacatccactgcgtcagtgccttcgtcaagctggcgcagagc

SEQ ID NO: 613712 - DNA, 100 bp, Homo sapiens
ggctgacggccgtgcccgaggggctcagcgccttcacccaagcgctgaatgctgtctctgcaatttgagaggaggtgctcttaagcaaacgaagaacaat

SEQ ID NO: 613713 - DNA, 100 bp, Homo sapiens
ttcttctacaccctgttaatgttgatattttgacctccttccatgaatcacaaatgttcttaatggcatctagaatgcaaaagctggcaggctgacagag

SEQ ID NO: 613714 - DNA, 136 bp, Homo sapiens
ctgattcttctgccctcacacatgtatgatactaccaactacaaaagctattggttaggaaactcattatctgcaatattagagggagaagcacggttaactttcttgaatagaggtgaagattatgtaatgacaa

SEQ ID NO: 613715 - DNA, 82 bp, Homo sapiens
ggatggactgcagatctccagatggaagcggggcatggccaggccagatctattccagaggggagcttcaccacttcattga

SEQ ID NO: 613716 - DNA, 97 bp, Homo sapiens
agcagccgtctgtggagggtgccgcggccctgcgcagctgccccatgtgccagaaggagttcgcccccagatagctgatcagcttccttgggttttg

SEQ ID NO: 613717 - DNA, 90 bp, Homo sapiens
cttggaggagggtcactatgtcattgggccaaagatagagattccggtacattatgcaggtatccagtcggaattctttattaacaccac

SEQ ID NO: 613718 - DNA, 90 bp, Homo sapiens
cctcgtcagcactgactttcagctatggaatcgcttgagtgtgcgtcagaatcccctgaagagcttgttaaaacacaaggtgctggcccc

SEQ ID NO: 613719 - DNA, 98 bp, Homo sapiens
cggcctgcgcagccacctcaaggttaatttggagtggcccctggagtcagtttcctacaccatccgaggccccacccagcacgagctacagcctccac

SEQ ID NO: 613720 - DNA, 100 bp, Homo sapiens
aggagaccaagtttcagatgttccagctaattgacattgcccggcagacggctcagggaatggaagtgacctccattgcagacaggctgaatgtggactt

SEQ ID NO: 613721 - DNA, 75 bp, Homo sapiens
gtaaagtggttggttgcagttgtgtagtagttaaggtgaagcgacttccagtcatttggaaaggatgggatgaaa

SEQ ID NO: 613722 - DNA, 101 bp, Homo sapiens
atcacgaggccacccagtcccacttcaaacattcgtctcggaaaccccgcctcttacagtcacgaggcaggtccaaaatgtggctgcttttaacaatggca

SEQ ID NO: 613723 - DNA, 76 bp, Homo sapiens
cggcgtctggcgtccccggtgcccagcattctgcggggcaggcgtgctggtcccaaaggcgataacatctatgaat

SEQ ID NO: 613724 - DNA, 139 bp, Homo sapiens
cacagtaattcacggcggagtcctttggtcccaggcatcatcacagttattgacaccgaaaccgttggagagggccagatcccagatgcagtgactggttactacctgaaccgtgctggctttgaggcctcagacccac

SEQ ID NO: 613725 - DNA, 97 bp, Homo sapiens
gatagcaccgaggccaggagaaagggaacgtaaccccatgcatcccagctcaaggtggtcagagctagaccttcttattctgttggggacggcgggc

SEQ ID NO: 613726 - DNA, 50 bp, Homo sapiens
aaggacaattgcatgcacttacagaggaaaatatgttgtgttcttctttt

SEQ ID NO: 613727 - DNA, 75 bp, Homo sapiens
cgggcagaggcgacctccccgcgttccatgcgcacagggacaggggagtccacaaattggccttcaacaaattga

SEQ ID NO: 613728 - DNA, 100 bp, Homo sapiens
ccccagtacttccgtcagggacacaactgccacaagccggacacgtgtgaaagaacttgtcctggacaacagtcggtcgaatgaaggcaaactcgaaggc

SEQ ID NO: 613729 - DNA, 98 bp, Homo sapiens
gccatgatttacactcggtatgtcctcagtcttctgctgcatgacagctatgactacgacctgcaggaacagtgctgaagctgctgaaagatggcaga

SEQ ID NO: 613730 - DNA, 110 bp, Homo sapiens
ctcggattaaggaataatttatgaagctccgttgactaccgtggagagatcataatttggggttcaagattccagttacatggacacagaacagtatgaagaagcagtac

SEQ ID NO: 613731 - DNA, 75 bp, Homo sapiens
ccacttctatggataaaactttcaagcttgcccagttattggcggaattgaactcgatgccagatttcttcccag

SEQ ID NO: 613732 - DNA, 75 bp, Homo sapiens
gtccctgaagagggaagacacgcggaaacaggttctgcggcatgaggaatttgaagaaggctgcaaagctgcctg

SEQ ID NO: 613733 - DNA, 90 bp, Homo sapiens
gaaaatgcagtttcagggcatatacagcttataattcctggagaatctgcttgttttgcggttgaaggggcccggccaggactcggggaa

SEQ ID NO: 613734 - DNA, 100 bp, Homo sapiens
ccccgcaagatggacggtttcgccggcagtctcgagctgtaggtaaaacttgcctactgatcagttacacaaccaatgcatttcctggagaatatatccc

SEQ ID NO: 613735 - DNA, 113 bp, Homo sapiens
gccatttcgaatcacttaaaggagtggacattgctagcaatgagctcccaaagccatccagacctgcctagagctggaacgttacctccagagcgagccctgctatgtttcag

SEQ ID NO: 613736 - DNA, 100 bp, Homo sapiens
tgttgggcccctcttttcagagccagcattctttccagcccctggagcccaaaccagacctcacttcatccacagtttctcccactactaagggcagcaa

SEQ ID NO: 613737 - DNA, 83 bp, Homo sapiens
gtcaaatactttgcacaggaagctataagtggtgcagaccatgaattacgtggggcagttagccggccaggtgtttgtcaccg

SEQ ID NO: 613738 - DNA, 75 bp, Homo sapiens
tggaggcggaggtcgataagctggaactgatggccccttcccagctgcctgcctgccctagccagctcccaggtg

SEQ ID NO: 613739 - DNA, 124 bp, Homo sapiens
attcaatgttgctctgaaatagcatctctgtttttgaatgataaagagccaacaccactatctgaggcgcagtcatgcaggaaaacctcagatttgcttcatcaggagatgatattaaaatatg

SEQ ID NO: 613740 - DNA, 50 bp, Homo sapiens
cagcaatatctctgggctttcacagagcaagctggctcggccgccccgtc

SEQ ID NO: 613741 - DNA, 100 bp, Homo sapiens
gggaaccctcgctcatagctgcacagttcaatcaggatcacagaagtgaggccaagatgcccatgtcaccagagccagaagaaaggctcctaccaaagaa

SEQ ID NO: 613742 - DNA, 100 bp, Homo sapiens
gaccacggtcaccgtctcctcagatgttgctatcggagctccacaagaagatgacttgcaaggtgctatttatatttacaatggccgtgcagatgggatc

SEQ ID NO: 613743 - DNA, 83 bp, Homo sapiens
caaaatcaaccgggaccccagcttttcagaactgcagggaaacagccatcatgaggaaataatgcaaaaggtgtcccaaggct

SEQ ID NO: 613744 - DNA, 74 bp, Homo sapiens
gccatgccaagccctttcagtgaggcttatgtagacatgaggaagattggcagtagccggggaatggtttctgc

SEQ ID NO: 613745 - DNA, 100 bp, Homo sapiens
tgccctgagacggtgtcccgccgaaagccagcagccagcttcgggtgtagcctattctcatccaactacagttgctagctacactgtccatcaggctcca

SEQ ID NO: 613746 - DNA, 100 bp, Homo sapiens
ctcggaggaaccggctccttgcgtcccgcctccctgggagctccgcacggaactgataaatttcaaacggaagagagtggcagcatttagaaagaatcta

SEQ ID NO: 613747 - DNA, 83 bp, Homo sapiens
aaagaatatttagaatgcaggatggagaggagggtgtgaagacagagaatgaccacatcaacctgaaggtggccgggcaggac

SEQ ID NO: 613748 - DNA, 83 bp, Homo sapiens
agcaggaggagggctggttccggctgcagcccgaccagtccaagagccggcggcatgacgaggatctgggcccccagagccgg

SEQ ID NO: 613749 - DNA, 80 bp, Homo sapiens
aggagcagggcctgactgcgcaggcttgggcactgtttaaaggaaagttccgagaaggcatcgacaagccggaccctccc

SEQ ID NO: 613750 - DNA, 90 bp, Homo sapiens
aagcggggcccgaggaggccaaggcgccagtgagaggcgaatctacctgttactcgtattttggacaatcttatggagatgaagtcaaac

SEQ ID NO: 613751 - DNA, 82 bp, Homo sapiens
ggactcttaggtgttctgcggttaaatcttgctgacagtgaagatagtactgtgtccatccagataaaattagaaaatgaag

SEQ ID NO: 613752 - DNA, 100 bp, Homo sapiens
acagaatcatgtctttcagagcagcatgatcagcatgtttataaagctgcctccctccacttcaatgtctataccaattgctggtgaatctgaatctttg

SEQ ID NO: 613753 - DNA, 140 bp, Homo sapiens
agaggagagcacagcaactcaaaggctgttatttcagcagttggtaagcaggctgactgctgaagagttacacctgtttaccaagtactggacagaatcaaatggggtggaatctaaatcattaactccagccttatgca

SEQ ID NO: 613754 - DNA, 75 bp, Homo sapiens
tggaggcctcgctgaggaacgacgccgaggaagtgccgcagaatggaattcggcattgttcctacacagcttctc

SEQ ID NO: 613755 - DNA, 75 bp, Homo sapiens
gcgggctgtgccactacctacaacaagcacattaacatcagcttccacaggcaactgactctgcttgtggctagt

SEQ ID NO: 613756 - DNA, 82 bp, Homo sapiens
gctgtacgaagagaaaaatctctccccaggcttcaacttcaggtgtgggcaagagcagtttactgttgcgttttgcagacaa

SEQ ID NO: 613757 - DNA, 74 bp, Homo sapiens
ccccgggcccagatatggacgcagcagagccggataagaccatcatcatgtggaaactgaccagggatgagacc

SEQ ID NO: 613758 - DNA, 75 bp, Homo sapiens
tcgtggcccggcaccgttccgcggacgtgctcgcccctggactgatgagtttgctgtatcaacctgtaaggagaa

SEQ ID NO: 613759 - DNA, 75 bp, Homo sapiens
gaataggaacctctacttccccaccaaaaagtggcacacactggagagatatcacattcttcaggtcatctgaac

SEQ ID NO: 613760 - DNA, 83 bp, Homo sapiens
cttagctgtgctcgcgctactctctctttctggcctggaggctatccagctgtccttgaatccgacccctactttgggtttga

SEQ ID NO: 613761 - DNA, 75 bp, Homo sapiens
ctcgccagcagccgtccggagccagccaacgagcggactcaagcacagagggttcggaaaccgcgttgctgcacg

SEQ ID NO: 613762 - DNA, 100 bp, Homo sapiens
cagaaagacttgaaggcgtatacaggaacaatattgatgatgtagtaagggaatctgactaagcacatgaagtcgaaggcccacagcaaaaagtgccaag

SEQ ID NO: 613763 - DNA, 90 bp, Homo sapiens
gacaccgacaagatggcagcagaatttattcagcaattcaacaaccaggccttctcagtgggacaacagttccatgccattgcagtgtca

SEQ ID NO: 613764 - DNA, 75 bp, Homo sapiens
ccgcgagcgcggcctgcaggagccatcctggaagacgccggtgccgacgtcctgatggaggccctggaggccctg

SEQ ID NO: 613765 - DNA, 75 bp, Homo sapiens
gcagacaaacccatcagccatgactctggccatctatgaccggtttggccggttgatgtatggacaggaagatgt

SEQ ID NO: 613766 - DNA, 127 bp, Homo sapiens
ttgagaccaaatttgagatgatcaaacttatagatattgcacgacagactgcacagggcatggagcaccagttggagatgccaggacattactctcatctggctgccttctatgaggacaaaaaggg

SEQ ID NO: 613767 - DNA, 75 bp, Homo sapiens
agagaccctaccctcactttccgtctgcttggctcccccagtccccatgtgagagcagcagaggcggtcttcaac

SEQ ID NO: 613768 - DNA, 50 bp, Homo sapiens
agcctggtgctcctctatctgtgattccttcaacacccagaatgagccag

SEQ ID NO: 613769 - DNA, 99 bp, Homo sapiens
cgaggatgcaccttcccctgccttggaaagggctttgttcgcgggggtcacagctctcatggctgcagctagcgtgaccccccctggctccctggagtt

SEQ ID NO: 613770 - DNA, 74 bp, Homo sapiens
gcacacaggagagccaggattcatgctctacatccccatagaggaccgtataatagacgctggccccaaaggaa

SEQ ID NO: 613771 - DNA, 100 bp, Homo sapiens
cagcaacatccccaaacagcggcgtttcacggtggcacatacatgggcggcgactggcggcgcgatggacctgaccgggctcctgctggacgaagaaggc

SEQ ID NO: 613772 - DNA, 76 bp, Homo sapiens
agtacaacctgaacttctcaggaagcagtactattcaagaggttgcagaagaaaaccccagccaagtccccaggga

SEQ ID NO: 613773 - DNA, 75 bp, Homo sapiens
tctaggcgacatggagccattgaagggaacaacacccttgatgatcccacttccagccgggcccctcatgtatcc

SEQ ID NO: 613774 - DNA, 110 bp, Homo sapiens
cgcagagccgagtgcagaagatctgggtgcccgtggaccacaggccctcgttgcccagatttgatattcactgatggactccaaagaatcattaactcctggtagagaag

SEQ ID NO: 613775 - DNA, 100 bp, Homo sapiens
gtgactccccagaatacaccttgcttctgtagaccagctccaacaggattccatggtagctgggatgttagggctcaggctgattcaccccaagagtggc

SEQ ID NO: 613776 - DNA, 80 bp, Homo sapiens
aaaccggtagcgcttgcagcatggatagaccctttttccggtaactaaacttcttgcgggcagacacagcgtttgagttt

SEQ ID NO: 613777 - DNA, 88 bp, Homo sapiens
ggccagagcgcagcgccgagcgcggcccgggcgccatcgagccttggcggcggacgtgcaggtgcaactgacatgggtgaaccccagg

SEQ ID NO: 613778 - DNA, 100 bp, Homo sapiens
caactatcttacaaagcacaggaaagcaccacacactggaagcagacgctgttcatgatggacgacccagtccctgtccatacaggagacgtggtcacgg

SEQ ID NO: 613779 - DNA, 90 bp, Homo sapiens
cgctatccactggcggagtctctctttccggattctgcctccctccgctaacctccgatttggagcaagaggtggtggtggccttccccc

SEQ ID NO: 613780 - DNA, 83 bp, Homo sapiens
cgccgggaccctcgcgcgcgaccgccgaatcgctcctgcagcagaggaagcagttcaggtacttttgaagcattctgcagatg

SEQ ID NO: 613781 - DNA, 85 bp, Homo sapiens
ctacaggcacatcttaaagttcacacagcactggccatggcccaaaaggaagatatggaagagagaatcactactcttgaaaaac

SEQ ID NO: 613782 - DNA, 74 bp, Homo sapiens
cgggagaacctgcggcggccggagcggaaagatgaatgggagggctgattttcgagagccgaatgcagaggttc

SEQ ID NO: 613783 - DNA, 100 bp, Homo sapiens
ccactgcgtcgggctggtgcagccccgggccaggccgcggccggggcaggagcgcaggtgcgtatagcagcaaaattcatcattcatgcccctcctggag

SEQ ID NO: 613784 - DNA, 75 bp, Homo sapiens
taaaattggactcagagtttccattgacactgatatggaatttgcaggtgaagacacttctgatttgtttttgga

SEQ ID NO: 613785 - DNA, 87 bp, Homo sapiens
cgaaaaagagaagacgctttacccgactctttgggccgttatctcacggactttgaacatgtcggggatcgccctcagcagactcgc

SEQ ID NO: 613786 - DNA, 75 bp, Homo sapiens
aaacaatttctcctgctctgcagcttctgttcagatcagtgtgcgtgtgaccaccatggatgcagagctggagtt

SEQ ID NO: 613787 - DNA, 76 bp, Homo sapiens
agtccagagctgaggactgcctgtttgcaggagttggtgtcctgcctgcgctcaggatgagggggaatctggccct

SEQ ID NO: 613788 - DNA, 82 bp, Homo sapiens
gaaggcactgtcacaggagaactacacaatggtttactcctggcttgggggcattaggaagcactggaggctcttcgggaac

SEQ ID NO: 613789 - DNA, 75 bp, Homo sapiens
gaggagaaggcattctaatttagtgctacagctagaatgaagcacatcaacctatcatttgcagcgtgtggattt

SEQ ID NO: 613790 - DNA, 100 bp, Homo sapiens
ggtgctgttgctggagaagaaccgctcgctgcagtccgagaacgccgcgctgcgcatctccaacagcgacctgagcgagtatctgactgtcttctctcag

SEQ ID NO: 613791 - DNA, 75 bp, Homo sapiens
atcacattccatgtccatatcagtgttctaagaacggaagcatctgggctggatggaatttagcatcaagcagag

SEQ ID NO: 613792 - DNA, 100 bp, Homo sapiens
gctctcggccccagatagctcaaatgtcactttatgaacgacaagcagtgcaggtgtgattgctgctgtggccatcgtcctagtctccctcctcttcgtc

SEQ ID NO: 613793 - DNA, 100 bp, Homo sapiens
ttgaaagaagctgcagcggaggaaggcgaggttatcaatactctggctgaccatcatcatcgtgggactgactttggtggaagtccttggttacatgtca

SEQ ID NO: 613794 - DNA, 83 bp, Homo sapiens
tacctcatcagcaagcgactcaagagcagatgtggaagatgtgaaatttgtcatcaattatgactaccctaactcctcagagg

SEQ ID NO: 613795 - DNA, 83 bp, Homo sapiens
ccacagtacggctggcagggtggacctcaggagcctcctaaaaccacaggttgattcctgtgttagtgaatggcatgaagtac

SEQ ID NO: 613796 - DNA, 75 bp, Homo sapiens
ctcaggcaaggtggggactgggcacatcatcaatacgagctccttaataagcatttatagtcagtttttggcagc

SEQ ID NO: 613797 - DNA, 98 bp, Homo sapiens
ccggatcgtggcctctcgagagcaaggttcaggagctccatgaggaggaggcacagtgggtgaactatgatgaggatgagttgtgtgtgaaaatgcag

SEQ ID NO: 613798 - DNA, 75 bp, Homo sapiens
gtaaaagttattggaagaggtgcttttggtgaagtgcagttgagccagcccctgggcaacaaagtggaaatggag

SEQ ID NO: 613799 - DNA, 90 bp, Homo sapiens
gccagatctacgagctagagttgccatttcgctgggatttttgggtggtgcaaagtgatgagttggaacaattcatggaaaatcaaggtg

SEQ ID NO: 613800 - DNA, 100 bp, Homo sapiens
agacaagatggacaccgcggaggaaggtttggacatatttgactcttttccccccaggttgaattgaccaaagcaatggtgatggagaagcctagtcccc

SEQ ID NO: 613801 - DNA, 60 bp, Homo sapiens
acccaggcctgctcggccctcacaggattgtgttcagtgtggacccctccgagggcagcc

SEQ ID NO: 613802 - DNA, 82 bp, Homo sapiens
cagcgctgcagccgcagccgcagccgccgccggccagggcgtctctggccgagcctctttttgtggaaaacgacagcagcag

SEQ ID NO: 613803 - DNA, 101 bp, Homo sapiens
ccctttccaaacctcgcacgcccaggaggagcaagtccgatggagaggctaagcctctagaggacaaaatcccagtccttggcacaaactcaggaaatgga

SEQ ID NO: 613804 - DNA, 83 bp, Homo sapiens
ctgcggcagaagccgagttcaacatcctcctggccaccgactcctacaagaaaccgaccagagggcaaagtgttggagacagt

SEQ ID NO: 613805 - DNA, 100 bp, Homo sapiens
ttcagctcttgggtttagcaaaagttcatctccttctgcatccttaactgagaatgagacatatctgaagagatggattaagaatgctttggattaagga

SEQ ID NO: 613806 - DNA, 103 bp, Homo sapiens
ggccagccatgtaacgcctgtggtgaccagtgccctgggttcgccttgcataaatggagctgtgagtaccagagtgcccactggttccaacagttcttctcag

SEQ ID NO: 613807 - DNA, 140 bp, Homo sapiens
tataatctctcctctgctatctgtgaaggagctaagagacatgggaatcactctgcatctcttggatcctagcatgactatacattgtgacatggtcattacatatggattagaccaactggagaattgccagacttgtg

SEQ ID NO: 613808 - DNA, 78 bp, Homo sapiens
ttggactgatggcagcacactggagtacttcttgcaagcagagctgacaagcaacgtcttaaaaacaggcgtggtgcg

SEQ ID NO: 613809 - DNA, 98 bp, Homo sapiens
gttcagaggaatttataggggggttcaaaagcatcaagttgctgatgattcctctgatcatgtcagtactttatgtctgggcccagctgaacagagac

SEQ ID NO: 613810 - DNA, 139 bp, Homo sapiens
tccatggaaaaatctctcgggaagaatctgagcaaattgtcctgataggatcaaagacaaatggaaagttcctgcaaagcacccctgagtcctgcaattacggccttcccacccccaagctgaaaaacctgattttctt

SEQ ID NO: 613811 - DNA, 100 bp, Homo sapiens
aatgactacaatccaatctatgatatcgaggacagtcattttgtttactcattcagccctgttgcaggtcccaataaactcttcataaggttgacagaag

SEQ ID NO: 613812 - DNA, 75 bp, Homo sapiens
tgccagtctcccttccaagagggatgccagagccttctgcttgatggtgtcaggctatgctgtgactggggctgt

SEQ ID NO: 613813 - DNA, 100 bp, Homo sapiens
gaggaggcagtggccctggtggaagacttgcagaaagaacctggaagacagaggctggaggttcaaaccttgtactactcagctgatcacaagctgcttg

SEQ ID NO: 613814 - DNA, 75 bp, Homo sapiens
ctcaggtccggatagggggcaaggactcagcccaggagagtgttattactcgagatattcatcgtacatttcccg

SEQ ID NO: 613815 - DNA, 121 bp, Homo sapiens
ccgacccctgccggccggtgtccccaccgccatccctgacccatggcgctgaagaggattcagaaagtagtaacactctggtacagatctccagaagtattgctggggtcagctcgttact

SEQ ID NO: 613816 - DNA, 82 bp, Homo sapiens
tttatcctggtcatcttctatttccaaagtatgttgcacccagaacacaccacagccatcagcactggaatgcaaagaccag

SEQ ID NO: 613817 - DNA, 75 bp, Homo sapiens
ctgacccaggcctgctcggccctcacaggcaaattgtggctactaatttgccccctgaagatcaagatggctctg

SEQ ID NO: 613818 - DNA, 80 bp, Homo sapiens
gtggagacagggacagcgacttccttgcagcctcttctccggggtggcccggtggaaatcctgccctttctgtacctggg

SEQ ID NO: 613819 - DNA, 82 bp, Homo sapiens
gatcccggcgacatactacctctggccccgagatcagaatgccgaatgttgtaccatctttgggtaggcagacttccctgac

SEQ ID NO: 613820 - DNA, 90 bp, Homo sapiens
cttgacagtttaaaagccttggcagtcaagagaatggatcttggagaatgtctgaaagtccatgacctggctttaagagcggattatgaa

SEQ ID NO: 613821 - DNA, 100 bp, Homo sapiens
actgtacagttcctcaaccgcttttctacagtttgtgaggagaatatgtttcgacagcaacaaaagattcttcaacaatctagaattgttcagagccaga

SEQ ID NO: 613822 - DNA, 83 bp, Homo sapiens
gtgcgcgcccgccagctgctccggagatacggatggaggtttgcttctgaataacccttcggcattagctatgcatgagtgta

SEQ ID NO: 613823 - DNA, 80 bp, Homo sapiens
cgctctcgctctggccgacgagtggagaaaccggcacagtcttcactaccgtagaagaccttggctccaagatactcctc

SEQ ID NO: 613824 - DNA, 96 bp, Homo sapiens
tgctttttacaaatttggattcatcccaaatccattgttcttcaaaggcaggaaaagatcaagcttctgaaattcaggtgacaatgatgctcactg

SEQ ID NO: 613825 - DNA, 100 bp, Homo sapiens
gctgccctttttctaccacggggaaatggctcatccacaccaagaatcagccacagacggaacaagcatgcagcttcaaaaagccgactccaaaaccgcc

SEQ ID NO: 613826 - DNA, 100 bp, Homo sapiens
caccgtgcaccttcgcaagaagcaccagttcaagtggccctcagggcatccccgttttcggtgctggagaatctggtaaaagcaccattgtgaagcagat

SEQ ID NO: 613827 - DNA, 83 bp, Homo sapiens
ggcgacttcgcgggaccgtggcgcatgccgctacatctgttacttttgttggtgttatgggaatgagatcctactactatgga

SEQ ID NO: 613828 - DNA, 75 bp, Homo sapiens
ataaaacccagaagcagaacttgaaggttaaaccactagcccatttcacaggggcaagattcttgccaagagaat

SEQ ID NO: 613829 - DNA, 97 bp, Homo sapiens
attttgatctgccgtgatcaatatcaggaaaggccccatcttcccttcacacctgtgagaaagatcagtctaaagaaaaggagaagaaagtgaaaaa

SEQ ID NO: 613830 - DNA, 73 bp, Homo sapiens
agaatttgtgatgatgagctgatcttaatcaaaaaatcccgcccaatgacccccgcatcaagaaccaagccga

SEQ ID NO: 613831 - DNA, 90 bp, Homo sapiens
gtaaaattaaaagtcgtcttggagacaaggaagcagttctcaacaggtcctctccatctgtcccaaggacatgagagctgatatctgtgt

SEQ ID NO: 613832 - DNA, 90 bp, Homo sapiens
agcggagctcccccaagagccggaaaggtgacggtgacgttgtaaataatatgtatgagcccaaccgggacctgctggccagccacagcg

SEQ ID NO: 613833 - DNA, 100 bp, Homo sapiens
ttcaagagcccacggacaccacctcaacggtctcttgcagctgaatggggtaaatatggaatgcgattcaatgtgattcaaccagggcctataaaaacca

SEQ ID NO: 613834 - DNA, 100 bp, Homo sapiens
agggagtcatgctttcaaggacctcatgtcagataccaggcccaggttccatgatgcccgggcagcacatgccaggccgcatgattcccactgttgcagc

SEQ ID NO: 613835 - DNA, 83 bp, Homo sapiens
ctggatgggggaccacaagatcctcatcgacagttccagggtctccctccactgctgtagtaacccgggtccggggcctcggt

SEQ ID NO: 613836 - DNA, 74 bp, Homo sapiens
tagttttcctaacctccatttttgttaaggctgctggcaaaggggacgtcccaacgaagagaccacctgtcctt

SEQ ID NO: 613837 - DNA, 50 bp, Homo sapiens
tccaagagaatagttcggatcattcaggtctccggataactgtgctcctg

SEQ ID NO: 613838 - DNA, 51 bp, Homo sapiens
atctgaattggctcaatgatgaggaccgtataatagacgctggccccaaag

SEQ ID NO: 613839 - DNA, 100 bp, Homo sapiens
ggagcctcttcaacagtatccaccaggcgaagcatgaagcggaaggcactattcacctgccccttcaacggggactgccgcatcaccaaggacaaccgac

SEQ ID NO: 613840 - DNA, 100 bp, Homo sapiens
gtatggacaggcttgtccatctgtaacttcattaagtgccggtggtggtgtgcacattgagccccggtatagacagttcccccagctgaccagatcccag

SEQ ID NO: 613841 - DNA, 99 bp, Homo sapiens
ctagaatgcatcagtgcccttgtggcgaatggggctcacgtcgacctatttgatggctttgcagatggactaggagttgctgaagctatttcatatgtg

SEQ ID NO: 613842 - DNA, 93 bp, Homo sapiens
ctacgaagaagtgcttcagcgggccaggaagcgcatccaggaggtctatcagccacagtctctgcaagtttccaagagcagcagaaaatgaac

SEQ ID NO: 613843 - DNA, 94 bp, Homo sapiens
tgctggaccagctcatgggcacggctcgggacggtgagaagccctaccactgcaactgggacggctgcggctggaagtttgcgcgctcagacga

SEQ ID NO: 613844 - DNA, 102 bp, Homo sapiens
catctcctttcaggtctgcggtgacagctcttcttcagagagaaggacaacaaggtcccagtggcccctcctcagggggtcctgatgacaacttaattgaag

SEQ ID NO: 613845 - DNA, 80 bp, Homo sapiens
ctgaggaatgactggactgtgcagatgctgatggaaagttaagcgtgaaatttggggtcctcttccgtgatgataaatgt

SEQ ID NO: 613846 - DNA, 100 bp, Homo sapiens
ccgacgtctgttcaggtcacaatttctacagcagagaccttgagggatatctttcttcactcctcttcacttcttcagctcctcctgctggaccctccag

SEQ ID NO: 613847 - DNA, 100 bp, Homo sapiens
caatggcagcagcggcgggggctatggcgccagtaagaagaaaaaagcgtccgcttccagctttgcgcagttacagaatgtctgaaggggacagtgtggg

SEQ ID NO: 613848 - DNA, 96 bp, Homo sapiens
gaaaggaacaaagacattgcttttctagaagcccagatctatgaatatgtagagattctcgggctggtggagatcattctgttctgcttgctgctc

SEQ ID NO: 613849 - DNA, 90 bp, Homo sapiens
aatttacctccagaccatcttgtggaagtcagagaacaagttaaggtgaactgcacagctgaagtactttacccttcaacgggacaagaa

SEQ ID NO: 613850 - DNA, 75 bp, Homo sapiens
gaaggggaaggcgcctgaagaggacgaagaaactggcgatggaatatgagaggagccctctggaaagaaaaggac

SEQ ID NO: 613851 - DNA, 100 bp, Homo sapiens
gcagaacaaggatttgaagctggcagtctggttccagtatgttggtgagagtgaacgtgctgtgcgacaagtttttcaacgagccaagaactcagcaccc

SEQ ID NO: 613852 - DNA, 74 bp, Homo sapiens
tgggttcagccgcatgagcgagcggcagctggctctctggaatccgacaatgcagatcttcgtgaagactctga

SEQ ID NO: 613853 - DNA, 49 bp, Homo sapiens
ctgtatgccagctgcagctgcaaggcagttccacagaggacgtccccca

SEQ ID NO: 613854 - DNA, 99 bp, Homo sapiens
caaatacctgaaagattgggcaagagaagaattcagaagaaacaaaagtgccaccgaagagacctgggaaagaattctgaatataattcaagtaactgc

SEQ ID NO: 613855 - DNA, 100 bp, Homo sapiens
cagtatgcttgggagtcttctgctggaggttccttcactgtgcgtgctgaccatggtgagccctattcccagaggcaggtggtgctgaccctgtaaccca

SEQ ID NO: 613856 - DNA, 95 bp, Homo sapiens
ctcaacatcaacctcaactcggacaagctcgtcttccccgcagtgaccatctgcaccctcaatccctacaggtttcattgaaaacagatcctgca

SEQ ID NO: 613857 - DNA, 100 bp, Homo sapiens
tcaagcaggacaatcgcactttataccacctgcgattactgcatttctcattgcaattgtggtaccagatgttgagacattatgttcctgggcccaaaag

SEQ ID NO: 613858 - DNA, 101 bp, Homo sapiens
cagcgggcagtgtggctcataagccacgaaccgggaactccactttgtggcaccgtgagattctccagtgggaaagctcatggagcttcatggtgaaggca

SEQ ID NO: 613859 - DNA, 100 bp, Homo sapiens
cggtgatggagggcttctacgtcatcttcgacagagcccagaagagggtgggcttcgcagcgagcccctgtgcaggtgctggagaatctggtaaaagcac

SEQ ID NO: 613860 - DNA, 83 bp, Homo sapiens
tcattcccctcgggaatcaggagtgacctggagcactgtggactactgttcgaagatttttggaagaatactgagaacggcat

SEQ ID NO: 613861 - DNA, 98 bp, Homo sapiens
gcgatctggacgcggcgctgctgaccgacatcgaaggtgctggagaatctggtaaaagcaccattgtgaagcagatgaggatcctgcatgttaatggg

SEQ ID NO: 613862 - DNA, 100 bp, Homo sapiens
gcaagggcaacttcgctgtggtgaagctggggcggcaccggatcaccaagacggaggtatgctgccccacaaaaccaagcgaggccaggccgctctggac

SEQ ID NO: 613863 - DNA, 75 bp, Homo sapiens
gtaaacccatctaatcacagactcctatttgaagtatttgacgaaaatagactgaggatggttagaacgagagag

SEQ ID NO: 613864 - DNA, 96 bp, Homo sapiens
ggagccggcagcggcgcgggaggccgtgcggtttccacgggctcccttgctcagcagtatgcgcaccctaacgctaccctgcacccacatactcca

SEQ ID NO: 613865 - DNA, 97 bp, Homo sapiens
aactgaaagatacatggcttgcaaaaagtaaaccacgatcgttatgctgatatcctagaaggaaaacatcaccatggctacagaaattggttctcct

SEQ ID NO: 613866 - DNA, 100 bp, Homo sapiens
gagcacataacggggttcgggtgtctcgtgtgtgaacatcacaggacacaactcagatgggaagttcatcgcccgggcacagcggatagagtacgactgt

SEQ ID NO: 613867 - DNA, 74 bp, Homo sapiens
gatccgcacgcagcagcactactacgagcgcgaccccaagatgccgctcctacgaggactgctgtggctccagg

SEQ ID NO: 613868 - DNA, 75 bp, Homo sapiens
gtactatgtcaacacgaccaccaatggaaagaaccggaggctgaagcaggccaaagaagaagctcaggctgaaat

SEQ ID NO: 613869 - DNA, 100 bp, Homo sapiens
atgaagtgggagaaagaatgtatttgctcccattcatgctgaggctccagagttcatggaaatgagtgttgagcaggaaattctggtgactggtatcaag

SEQ ID NO: 613870 - DNA, 90 bp, Homo sapiens
ctactcatattgagagctgtcgacagttacgtcaacacccacaccagttatcctattgaaagaggggactgatagctcccaaggcatccc

SEQ ID NO: 613871 - DNA, 98 bp, Homo sapiens
tgacgctctgggtgaagaatggaagctccatgatgcgttatctgggtctggaaacccaaaccctcaaggatggcctggcgcatgggggaaccagcctg

SEQ ID NO: 613872 - DNA, 75 bp, Homo sapiens
tttatgagattattgataattctcaaggattctacgtataacaacgaacttgatgcaagtgataggtttgccaag

SEQ ID NO: 613873 - DNA, 96 bp, Homo sapiens
attcgagccccgtggaatcccgcggcccccagccagagccagcatgcagaacatttttggctttcacccccaaccagtgaccaaagacttgaccac

SEQ ID NO: 613874 - DNA, 96 bp, Homo sapiens
gacgggttcagttcgtcatggggctgtttggaaagacccaggagaagccgcccaaagaactgagcttttatctcagttatcaggagtgagacgttc

SEQ ID NO: 613875 - DNA, 100 bp, Homo sapiens
gccggcaagagctcggtgctggagaacttcgtgggccgcaggaggccactgtctgcagctcccgtgaagatgtccactccagacccacccctgggcggaa

SEQ ID NO: 613876 - DNA, 101 bp, Homo sapiens
gccattttaccaagaaagttgggtttcttttactggcaaatagtacttcaagagcacagtcttatgtaaggtcctggctataagtcaccatggcacagcaa

SEQ ID NO: 613877 - DNA, 75 bp, Homo sapiens
tctggacgatgctctcgtgagacaggatgcccaggtggtttgctctgttagaggttcagatgtgtattattttaa

SEQ ID NO: 613878 - DNA, 98 bp, Homo sapiens
tgggcgagtttcctgtgaccaacagtcgagcgcgaaaggagctgcgggcgtctttggagacacagcgtgctcagagcagtcgactctgcgtggcactg

SEQ ID NO: 613879 - DNA, 82 bp, Homo sapiens
cagctataagttcttcttcaagtctatggacgacgatttcggatcaggatcctcatgaccagccaaagagaagaagaattag

SEQ ID NO: 613880 - DNA, 90 bp, Homo sapiens
caggcagcttatgatgccaatttgtcccatgtttccccctcactgtgctggagggagaagaccctgggatttctgagcgaggcccgtgga

SEQ ID NO: 613881 - DNA, 100 bp, Homo sapiens
atggcaaaagtctatcaaacagcaagcactgacaagcagcacattctcaagagcacacaggcttgagaaagagatccaagatcttgaaaaagctgaactg

SEQ ID NO: 613882 - DNA, 136 bp, Homo sapiens
ctgagattgactccttgaccagcatcttggctgaccttgagtgcagctccccctataagcctcggcctccacagattactttctatgaagacaaaaattttcaaggccgtcgctatgactgtgattgcgactgtgc

SEQ ID NO: 613883 - DNA, 100 bp, Homo sapiens
gacagtttgtcggcagatgttctgggcagtgagaatccaagcaaacatgacagcttctggaacttgaagtcacctgcaccggtgcccgtgacgtacgagc

SEQ ID NO: 613884 - DNA, 98 bp, Homo sapiens
gcggccggggcgggaggctccgcggagccgaggcgtggaggttggcgtgcagtggtgtgatctcagctcattgcaacctctgcctcccggactcaagc

SEQ ID NO: 613885 - DNA, 90 bp, Homo sapiens
ggcccatttccctttcatctggaaagaagccctcgtggatggaggaagaagatttatcttttctctacaagagcagcccaggaagaaagc

SEQ ID NO: 613886 - DNA, 96 bp, Homo sapiens
ggggagcaggacaagccaagcagaaaaagcgagtgatgatccctgtgcctgcaggaaaccactgattgcttgtgtggagaaacagctattaggaga

SEQ ID NO: 613887 - DNA, 51 bp, Homo sapiens
gttccagactggagtgatcctcctcagattccaaatggaaatacatcagag

SEQ ID NO: 613888 - DNA, 76 bp, Homo sapiens
agcacgtttaaagtactttcaacaaagaatgctgaccccctgaaggtgtacccgccactgaaggggagcttcccgg

SEQ ID NO: 613889 - DNA, 104 bp, Homo sapiens
gatgcttacttcaagaagaagaagctgcggaagcccagacaccaggaaggtgagatcttcgacacagaaaaagaggaaaccagtcggggaagaatgtgatggtg

SEQ ID NO: 613890 - DNA, 100 bp, Homo sapiens
attttcagtgtcaacatcacagaccagtctggcaactactcccaggagtgtggcagctttctcctggctgagagcatgagaaagatcagtctaaagaaaa

SEQ ID NO: 613891 - DNA, 83 bp, Homo sapiens
tttgtccaacaaacaatttctggcttggggaggagtccctctaggtagaacacatcacattgcttccatgctgtcaagccaag

SEQ ID NO: 613892 - DNA, 100 bp, Homo sapiens
ctggagacatgagcaagaaaagcctctgggagcagaagggaggctccaagacctcatcaacaattaagattacgtgtgaaaatgaacttgtgcaaaccca

SEQ ID NO: 613893 - DNA, 98 bp, Homo sapiens
tgccattgcccggagatggccggcagagccgccgagacgccgaagagcccgccgcccgcgcgaggaacccaagtctttcaacggatccttgaagaatg

SEQ ID NO: 613894 - DNA, 88 bp, Homo sapiens
ggaaaccggtagcgcttgcagcatgattggcggcagtaagcacacaatgaatgatcacctgcatgtcggcagccacgctcacggacag

SEQ ID NO: 613895 - DNA, 101 bp, Homo sapiens
agtggtttggattttacagaagtggccaagccaaggaaaccattcccttacaggagacctccctgtacacacagatcaatgaactgagccatgttcaaatc

SEQ ID NO: 613896 - DNA, 100 bp, Homo sapiens
gcagctagtaatttgccttctggattgaatcctttgtgcattgaagactttagattcctctctgcggtagacgtgcacttataagtatttgatggggtgg

SEQ ID NO: 613897 - DNA, 98 bp, Homo sapiens
taccgtgctgcagatgaaatagaaaaggagaaagaattgcttatacatgaaagaggggcatcagtttgcctgagaatacagatcaacccacagaacaa

SEQ ID NO: 613898 - DNA, 76 bp, Homo sapiens
gggggccgagggcttccgcaagcgaggcccctcggtgacggccaaggctgctttgtaccgcctcagtggagactgg

SEQ ID NO: 613899 - DNA, 83 bp, Homo sapiens
aaggagcagatttacaaactggccaagaagggccttactccttcacagatcgataatcttgtgccgtggaaatcagaagggca

SEQ ID NO: 613900 - DNA, 100 bp, Homo sapiens
gtggtctctgaggcggcggcggcggcggggatcgtctccggcaatgcctgtgaggagccaccaacatttgaagctatggagctcattggtaaaccaaaac

SEQ ID NO: 613901 - DNA, 83 bp, Homo sapiens
ctttggtgctaacatctgatggagagggcactgtgtttagtcttgagtcagaggaggaggaataccctggaatcactgcagaa

SEQ ID NO: 613902 - DNA, 90 bp, Homo sapiens
cttacaactacaaccagctggaaggcagattcaagcagctgcaagcagatataatttctacagtagaatttaatcattctggagaattac

SEQ ID NO: 613903 - DNA, 75 bp, Homo sapiens
gatgtaccctcagtacgccacctactattacccccagtatctgcaagccaaggttctctacttaaaagacaatga

SEQ ID NO: 613904 - DNA, 100 bp, Homo sapiens
gaggaattacgggaacagaaagaaaagtccgaaagagctggtctgatagctgttgtgatttttatcttgctttgcatcactgccatagctgttcgcattt

SEQ ID NO: 613905 - DNA, 75 bp, Homo sapiens
ccagggagcattgcattcagtttacctcaggaggtacagaaacattctgtacacacccttgtgttcaggtcgttg

SEQ ID NO: 613906 - DNA, 82 bp, Homo sapiens
tttgcagagagaacggttgcaaaactggaaaagacaattgatgacctggaagataatcttgtgccgtggaaatcagaagggc

SEQ ID NO: 613907 - DNA, 100 bp, Homo sapiens
catagaaaaaccctggaaggccatacaacaatatatatagagtgatcgtctctgcttgctgagctaacaggtacagtatatcagaagtatgagccgatct

SEQ ID NO: 613908 - DNA, 75 bp, Homo sapiens
acaccccctccgtgggtgtgtggttaacacagaaatctgcctcctgggccatgccgcttctaaggcctgtttctt

SEQ ID NO: 613909 - DNA, 74 bp, Homo sapiens
caaagaaactctgtgttatgtgtaaaaacggagtttaagagagctgtgaaagtagcaacaggacaagaactctc

SEQ ID NO: 613910 - DNA, 100 bp, Homo sapiens
ctgcaggcgttggttcccctctttgacctggtaaatgcaggcttttatgcgagagatgcctggaatgatgtcgtcagtaatgcctggaatgatgatgtct

SEQ ID NO: 613911 - DNA, 51 bp, Homo sapiens
gaaatgctaaagcgattccaaggagccaaaaacctgtatatcatctccgtg

SEQ ID NO: 613912 - DNA, 75 bp, Homo sapiens
gtcctgaaagccaagaggaggctgctgatgggaagacaccctctctggacccccatcagaccaaagagcagaaga

SEQ ID NO: 613913 - DNA, 98 bp, Homo sapiens
taaaacaggagcttgcagatttggagataggtgagtggcagtgtgatgagtgtttatagtggagactttggcaatctggaagttaaaggaaatattca

SEQ ID NO: 613914 - DNA, 77 bp, Homo sapiens
ttgacgccatgtcgggttattcgagtgaccgagaccgcggccgggaccgaggctcttggagtttgacaaggagttgt

SEQ ID NO: 613915 - DNA, 80 bp, Homo sapiens
gtgaatgtctctagtcgtatggacagcacgggggtccccgaccgaatccaggaaagtctttgggttcggaggattccaga

SEQ ID NO: 613916 - DNA, 90 bp, Homo sapiens
caggcagagcgggacagccaggaggaagggcagcttggcagagcctcaggttatgatgtgattgctcaagcccaatctgggactgggaaa

SEQ ID NO: 613917 - DNA, 82 bp, Homo sapiens
ccggactacaaggtcgcctacgtgcagctgttgagcagctgaacagaggccatgccggggcactccgaggcctgagacgacc

SEQ ID NO: 613918 - DNA, 105 bp, Homo sapiens
agggccatggagaagctgcggcgagtcctgagcggccaggacgacgaggagcagggcctgactgcgcaggtcagaagacatgtcttcatctacatggcatctttc

SEQ ID NO: 613919 - DNA, 83 bp, Homo sapiens
acctgccaagagagcccaggccgagttccccacctgcgattgcgtcgattgtcactgctgttccaagggcacacgcagaggga

SEQ ID NO: 613920 - DNA, 83 bp, Homo sapiens
cgcccgccagctgctccggagatacggtgtacaagggagaagaagccacattccaaatctcaggcctccagaccaacacagac

SEQ ID NO: 613921 - DNA, 74 bp, Homo sapiens
gccagctggacgagggcaagtgcgcttacatccgagtattaagggacatcagcgagagaggcagggatcttgag

SEQ ID NO: 613922 - DNA, 82 bp, Homo sapiens
gagccagtgtcaaccgagtagtgtctcccggacctcttcattgcctaaaggggtcctggtcttcatgatccttgtgagcgag

SEQ ID NO: 613923 - DNA, 100 bp, Homo sapiens
cgcccaggcggcccagcagctgcagtacggaggcgcagtgggcaccgtgggccgactgaacatcacggtggtacaggcccagggccccggccagtgccca

SEQ ID NO: 613924 - DNA, 74 bp, Homo sapiens
tgtgtaaaacaaaaatattatggtctttgtgcacatttacatcaagatggagtttgacgagaaggacttacgac

SEQ ID NO: 613925 - DNA, 100 bp, Homo sapiens
tcaaccttgtcctatgttaggcagctggaggcaagagtaagacagctggaggaagaaaatcgcatgctgccccagtaatcctaaattggagagtcagaga

SEQ ID NO: 613926 - DNA, 50 bp, Homo sapiens
ggcagccatttatttgtcccgtgggcaggattcatcaaattgaatatgca

SEQ ID NO: 613927 - DNA, 153 bp, Homo sapiens
gggacggccggggcagcgctcctggcgctgctggctgcgctctgcccggcgagtcgggctctggaggaaaagaaaggcaaatgtgcaataccaacatgtctgtacctactgatggtgctgtaaccacctcacagattccagcttcggaacaag

SEQ ID NO: 613928 - DNA, 83 bp, Homo sapiens
gttggagccgtctgcaaagtgtccccggcaagaagaggctgggaggcggcagaatgcagccagaggagggcacaggctggctg

SEQ ID NO: 613929 - DNA, 101 bp, Homo sapiens
agcagatggcggatgccctgcagtacctgcagaaggtctctggagacatcttcagcaggaagatgcccaggaagaatttggctggaaacttgttcatggtg

SEQ ID NO: 613930 - DNA, 100 bp, Homo sapiens
aagtgccagatatttccttcaaaacctgtctcaagagaagaccaatgttcatataaatggtggcagaaataccagaaggggcaaatcgaagtagagagcg

SEQ ID NO: 613931 - DNA, 74 bp, Homo sapiens
caaaacccttttagagaaacccaaactcttcttcattcagatgcaagtgctgctggaccaggcgggctgctgta

SEQ ID NO: 613932 - DNA, 50 bp, Homo sapiens
ctggaggtggctctcaccctggatcagttccatgacaagaccccttatac

SEQ ID NO: 613933 - DNA, 50 bp, Homo sapiens
agtgaccccatggatcaggtggctatggagttactagtagagaaagcaat

SEQ ID NO: 613934 - DNA, 100 bp, Homo sapiens
ggatggattgccagggcttcctggcccgaaaggagagcctggaagacaaaggcgctttggctaagctggtggaagctatcaggaccaattacaatgacag

SEQ ID NO: 613935 - DNA, 100 bp, Homo sapiens
ggtggccgccagacacccgcggcgaaggcggctcgggctcgggctccggagaaaaggaaaatgcctggagttccaaatggaaatgtttgccacatagaac

SEQ ID NO: 613936 - DNA, 75 bp, Homo sapiens
cttcgccacccactattggaccagaataccaagctgctattttacacttgaagagggagcacaaagaagaaattg

SEQ ID NO: 613937 - DNA, 75 bp, Homo sapiens
ggaacacaaaactgcggcccttgtctgcaaacagtggtatcgacttatcaaaggagccaaaaacctgtatatcat

SEQ ID NO: 613938 - DNA, 75 bp, Homo sapiens
tggaattttctgtaaacttatcactattagatttcattagcatctggaatcaagagacccatggcatctgaggtg

SEQ ID NO: 613939 - DNA, 100 bp, Homo sapiens
ggtccccgaggtcccccaggtccccctggaaagaatggagatgatataatcgcttatcagccgtatggaaaatctgtggactggtgggcctatggcgtcc

SEQ ID NO: 613940 - DNA, 75 bp, Homo sapiens
cttttgtgctgctcacagtcaccgctgtcattgtgggtcggattgtttgtgctgaacgaactgtcctcttgcttc

SEQ ID NO: 613941 - DNA, 88 bp, Homo sapiens
aaacagaaattctggaacacctatatgatggtggagccagggcaagatttactgcttgctgctttgagtgagagtggaattagtccga

SEQ ID NO: 613942 - DNA, 83 bp, Homo sapiens
gataatgaggaagatcttcaaatgggcattcacaagattggagcatatgatcaacaaatatgggaaaaatctgttgaacagag

SEQ ID NO: 613943 - DNA, 98 bp, Homo sapiens
ccaccgccgctgccccggctgcctcctccctgaggccaccaccacctatcatgacagatggtgaagatgcggattacactcattttacaaaccagcag

SEQ ID NO: 613944 - DNA, 124 bp, Homo sapiens
cactgtcttctcttcctcctccaccgagtcgtgctctcgccccaacccgcgcgccaggtttgcaccttctgctccatctcctcaccacatcagcccccggagagttccagctccttcttcaata

SEQ ID NO: 613945 - DNA, 98 bp, Homo sapiens
tggaggaggcctaggctacagggagcggcctggcctgggctctgagaacatggaatgtcggattgcacatcctattgtaaaatgtacttactgcagat

SEQ ID NO: 613946 - DNA, 98 bp, Homo sapiens
ccttgcttctaggagataaaaagctcctgccctccactgactccagagagggagatccccagtacttgactccatcacgcagatgggagcaggcacca

SEQ ID NO: 613947 - DNA, 90 bp, Homo sapiens
agaaaacctaaagtatttgccgttggtgattcaaggcggaagatccatccaaaagctatgtgaaattacgagactttgtgcttgtgaagc

SEQ ID NO: 613948 - DNA, 100 bp, Homo sapiens
ctttgtgtcctgagatcaaatggcacttcattggccacctacagaaacaaaatgtcaacaaattgatggatcctccccggcgtgaaggtcatcatcgcac

SEQ ID NO: 613949 - DNA, 100 bp, Homo sapiens
cagaaaatgaagagtttgttgaagtgggaagattggggccttctgattattttgatcggagcacagtgctacttggaatgttcagctctgactcagaaag

SEQ ID NO: 613950 - DNA, 50 bp, Homo sapiens
cgaggcttcacggaggaggtgggtgagcatgggtttatgcgtcttaggca

SEQ ID NO: 613951 - DNA, 75 bp, Homo sapiens
ctgccaagttgaaaatggacgagtaatcgcctgctttgattcattgaaaagcaggaaagtccaatccaacctttt

SEQ ID NO: 613952 - DNA, 132 bp, Homo sapiens
gcggccccagtagccgcgggccttgggcccgtaatctcacgacctccgcctgcggcctcctcgcaaaacaagggtgacatccagcagctgctctttgtctcggaccaccgggcagcttatgattactgtgag

SEQ ID NO: 613953 - DNA, 82 bp, Homo sapiens
tttttctggagctcaaagcctggggaagtgattgctcaaaggaaaatatatgcagatgatgaacattcttaagccaattgcc

SEQ ID NO: 613954 - DNA, 100 bp, Homo sapiens
catgaatgaatatttgagctcattcaaagtggcccagtatgtggtacgggaagaagaaatgggggcactcgaaacgttattactgaaacctgcacaaccg

SEQ ID NO: 613955 - DNA, 80 bp, Homo sapiens
gcgtgatcctccgtgacattgcgagagccagagagaacatccagaaatccctggctggacaaccatgtccaagggacctg

SEQ ID NO: 613956 - DNA, 96 bp, Homo sapiens
cccctctcggggcaacccagacgtgcaacaaagtgcgatgacaatgcagatcttcgtgaagactctgactggtaagaccatcaccctcgaggttga

SEQ ID NO: 613957 - DNA, 100 bp, Homo sapiens
gaggagccgggacacgcctagcgcgggctccaggtgtctgacttccagcaactgctggcctgtgccagggtgcaagctgagcactggagtggagttttcc

SEQ ID NO: 613958 - DNA, 100 bp, Homo sapiens
gccaatcaccaaccagaagagctcagaaagcatgtacctacatcagatctaaccttgatcccagcaatgtggattccctcttctacgctgcccaggccag

SEQ ID NO: 613959 - DNA, 74 bp, Homo sapiens
gcgaagatgcgaaaggtggttttgatcaccggggctagcaggtcggaagtctatgcgtcagtctacagctgagc

SEQ ID NO: 613960 - DNA, 83 bp, Homo sapiens
cttcggcagtccacccaccgccgccgcctcccaggtctcctccgggctggggctgagcaagccctcggagtgaccgtgggtga

SEQ ID NO: 613961 - DNA, 90 bp, Homo sapiens
ctggcttacacggcggtccccacggtcctggtaacccccctgggcgcccttggagtaccgttcgggggcaagattcttgccaagagaatt

SEQ ID NO: 613962 - DNA, 100 bp, Homo sapiens
gcctatcccaggacaggtggcactctttcagaacccagtgacttgattgtaaaaatttacagagcggaatcatatgctggtctccaagagtttaaagcag

SEQ ID NO: 613963 - DNA, 82 bp, Homo sapiens
ccgagttcaacatcctcctggccaccgactcctacaaggatgatgagtttacacacctgtacacactgattgtgcggccaga

SEQ ID NO: 613964 - DNA, 101 bp, Homo sapiens
gttacagatccaagaggaggaggagacccttcaggacgaggaggtatgttagagcccaccaaggaaccactgaaaccactttctgctgcagaaaaaatagc

SEQ ID NO: 613965 - DNA, 82 bp, Homo sapiens
gcagatgttgtcaaggtggcctaccaggaggccaggggtgtcgccatggccctgactgcagagatcgtgaagaccatccggg

SEQ ID NO: 613966 - DNA, 82 bp, Homo sapiens
tgaatctgaaaggaaatccggaattatcacagagaaaaagctcctcaatttctgaagagaaaggtgactctgatgatgagaa

SEQ ID NO: 613967 - DNA, 132 bp, Homo sapiens
ctaagttctctaagtactctgaaatgagtgaggaaaaacgagccaaacttcgtgaaattgaggcttccgaggcgatcgatcaggcagtgtcggtctgcagctgctaagccaagaagatctgggaaggagtca

SEQ ID NO: 613968 - DNA, 50 bp, Homo sapiens
ccgcgccgcatccatgttcgatgcgccctatccactcctccacatccagc

SEQ ID NO: 613969 - DNA, 100 bp, Homo sapiens
agaggcctacgtgcgggtggtcaccgagaagtccccgaccgactggtaagtaaggaggtctctgtaccatggctcgtacaaagcagactgcccgcaaatc

SEQ ID NO: 613970 - DNA, 90 bp, Homo sapiens
agagtgaagaacacaatatgttgagatgtgctattttgacaacacttattcatcttgttcaggccgttaattaaggaaaagttgagccag

SEQ ID NO: 613971 - DNA, 75 bp, Homo sapiens
ttagaagaattcatgctcatccggttctcctgtgcctcctgttggctctctttgcatctggcctcatccaccgag

SEQ ID NO: 613972 - DNA, 72 bp, Homo sapiens
gaagaagaataagcagtcagctccagtctcttccaaaccacagtccatgccatcactgccacccagaagact

SEQ ID NO: 613973 - DNA, 82 bp, Homo sapiens
gaagcctcccgggtggcttacagacgctgccagcatcgccgccgccagccccctcggaaaaccacactgagagttgcattaa

SEQ ID NO: 613974 - DNA, 82 bp, Homo sapiens
ccagtgcggggtggaggccctgactaccctggaagtagcaggccgcatgcttggagatgactgccaggggcatgaaggggat

SEQ ID NO: 613975 - DNA, 74 bp, Homo sapiens
ctaatttccaaattacaagatgaatttgaaaaccgaactagaaatgttgatgccgagccacatcgctcagacac

SEQ ID NO: 613976 - DNA, 100 bp, Homo sapiens
cttccacccaacttcctgttagttttcggctttgtgagaaaccttaccatcaaacacgatggccagcaacgttaccaacaagacagatcctcgctccatg

SEQ ID NO: 613977 - DNA, 75 bp, Homo sapiens
ttagatttgtaacaaaaattaatatgaacggaataaataattccagtgggatgactatgaaaatgatgttagaca

SEQ ID NO: 613978 - DNA, 76 bp, Homo sapiens
ctccgagggaaacaagaaaacatcaaagaggtctagcaaaggagatcatttggcatttagctgtgatgttgctaaa

SEQ ID NO: 613979 - DNA, 100 bp, Homo sapiens
cttagacttccggaaggactttggcgaggtaatctatgccagcaattatgacaatgttagcagaccatgcagctcgtcagctgcttgatttcagccaaaa

SEQ ID NO: 613980 - DNA, 75 bp, Homo sapiens
cgaggctcccgccgccgattgacccgcgctccgcccgtagtcgggccgccagatgaaaactcgctggatttttcc

SEQ ID NO: 613981 - DNA, 100 bp, Homo sapiens
aagagatgtggggggattctcgacctgctaacagaactggaccttttcggtttccaatacttatctacaggaatcgccatgaccccagctctgagggagg

SEQ ID NO: 613982 - DNA, 101 bp, Homo sapiens
tgactttggctcagctgctgcatcaggcagtttcccttcccaaggtgagtgtttctatggttggctagaacctctgttggccagaatagctgagaactaca

SEQ ID NO: 613983 - DNA, 88 bp, Homo sapiens
gagacattaaaccagataacttcctaatgggtattgggcgtcactgtaataagattgagaggatccagaatccagatctctggaatag

SEQ ID NO: 613984 - DNA, 50 bp, Homo sapiens
cgggatttttagcccagcccatgaagaaggtgatgagcctggctccagtc

SEQ ID NO: 613985 - DNA, 100 bp, Homo sapiens
ttgccagcacctattctgagtttgcgactcagaaccgtgctgcatactatcctcctagccaaattgctcaactaagaccaagtcctcgctggactgctca

SEQ ID NO: 613986 - DNA, 100 bp, Homo sapiens
ccacctcctgctgcagctctactctggacgcctgcagaatgacccggacaaggagtacaacatgccgaaggacggcaccgtacacgagctcaccagcaat

SEQ ID NO: 613987 - DNA, 90 bp, Homo sapiens
gctgagacaattcgagaagtatgtaccaaatacatttataataggagtccagctattgctgctgttgaccctcatcaaaaagatgacata

SEQ ID NO: 613988 - DNA, 97 bp, Homo sapiens
tcctcggcgggagccctcgcgacgcgcccggcccggagcccccagcgcagcggccgcgatggcccctgagttctgcagcctcgaggaaggcctgccc

SEQ ID NO: 613989 - DNA, 50 bp, Homo sapiens
caatggcaaacagtacggcagtgaggtggtgaactatgacaatgtagtgg

SEQ ID NO: 613990 - DNA, 73 bp, Homo sapiens
ttgatgcgctgcgggcagccgtggtggaccggaaagcagctaccaagggggtgccagctggaaacagtgacac

SEQ ID NO: 613991 - DNA, 100 bp, Homo sapiens
gaaccacagagtcggttcagtctgtggattactactgtgatagagccggtgaaacctgaagaaggcagagatatggcaaacaggattggcgcttttgggt

SEQ ID NO: 613992 - DNA, 83 bp, Homo sapiens
ttcgtctttgcagcgtagcccgagtcggtcagcgccggagacaaatttacatgtattggagaccagaccagaagcccttctga

SEQ ID NO: 613993 - DNA, 60 bp, Homo sapiens
tcaaccccgcgtccctcggggagcggagaaaggacagggtggctttggatcagattattc

SEQ ID NO: 613994 - DNA, 111 bp, Homo sapiens
ggaggagccatggactgcagcctcgtgcggacgctcgtgcacagatacagtcattcaggagagcaggaaagaaaaggccatccctgtggatgtcgcgctgccacagaagtc

SEQ ID NO: 613995 - DNA, 82 bp, Homo sapiens
tgcggcccggcactcaagtggaccctgagattgagctttttgtaaaggaactgtggctgcaccatctgtcttcatcttcccg

SEQ ID NO: 613996 - DNA, 100 bp, Homo sapiens
aacgattccgacagcgccatccaggccccctgggggcgcccgtctcccacagcaaagctgcagctcaactacctgggaaactacgtccccaatggctgga

SEQ ID NO: 613997 - DNA, 50 bp, Homo sapiens
ggagagggggcgctgagctgttggggttcttcacacacccccattcggcg

SEQ ID NO: 613998 - DNA, 90 bp, Homo sapiens
aggacaaaagccaagaggaggacagttcgctacacagcaatgcatcgagggtttctgatctctaacttggctgtgatcattgtgatggag

SEQ ID NO: 613999 - DNA, 82 bp, Homo sapiens
gacagagttgcgaccgcgcggcagcttccatgaggcaggctgaacctgcagatatgcgcccagagatatggatcgcccaaga

SEQ ID NO: 614000 - DNA, 83 bp, Homo sapiens
ccctcaaggccatgatcaaaacatggtcatcatgggccagtgctactacaacgagaccatcggcttcttctataacaacagtg

SEQ ID NO: 614001 - DNA, 98 bp, Homo sapiens
ccgaaaccatgcctcactgtcctaggcaagatgaagggcgccctaatggagatcatccagctcgccagcctcgactcggacccctgggtgctcatggt

SEQ ID NO: 614002 - DNA, 50 bp, Homo sapiens
agcgtttcttgcaagaatgggagaagacgatcaccttctccttattatag

SEQ ID NO: 614003 - DNA, 80 bp, Homo sapiens
agacgctgccagcatcgccgccgccagccccttggatctcccttcgtggagacgacaccggggtcctcctgcccacccca

SEQ ID NO: 614004 - DNA, 80 bp, Homo sapiens
tgggaatattcctcctgacttatttgctagaatgacagcagagggaggagctttatctttatatactgcccttaccacac

SEQ ID NO: 614005 - DNA, 74 bp, Homo sapiens
cagctgcgctcccctaggagtgctgagcccgcggaaccgcagccatgacctgcctagagctggaacgttacctc

SEQ ID NO: 614006 - DNA, 97 bp, Homo sapiens
cgggtgaatgctgctaaaaacaagactggggctgctcccatcattgatgtggtgcgatcgctgtcggaaaaggtaacagaagatggaactcgaaatc

SEQ ID NO: 614007 - DNA, 75 bp, Homo sapiens
cagcaatccagacctctctggagacgagaattcacatcgatcagacaacaacatggcaggaccccaggaaggcca

SEQ ID NO: 614008 - DNA, 80 bp, Homo sapiens
tttgaacggaatgctggagtcagtggaagacggagctggtcggcccgaagattcccaacttcttctggagcctggggatc

SEQ ID NO: 614009 - DNA, 90 bp, Homo sapiens
ggcgctcctccgctgtcgccgcgctggtcacaaacatgtcagacaaaagtgaattaaaggctgagttggaacgtaagaagcagcgactgg

SEQ ID NO: 614010 - DNA, 100 bp, Homo sapiens
aagaaaaagaactctgaaatgaaattgaggatttgaacttcacacagctgtttgaagtaacaagaatgtggtaaccagagagcacttggaccgtatgaag

SEQ ID NO: 614011 - DNA, 146 bp, Homo sapiens
gagagaccccgagtcccccggagtccgactcgctacgcgggtcttgcgagatatctggccgcctctgccgcagctggagtaatgaagccagctgccaattacatcctcccaacagcactttggtctgtggactgctgtgtgaatat

SEQ ID NO: 614012 - DNA, 90 bp, Homo sapiens
gggatctgtgagtcttctggcaaacagtgtttgcctctggttcagctcatacaacagcttcttagattccatactcagccacttccaaag

SEQ ID NO: 614013 - DNA, 80 bp, Homo sapiens
cctccctcggtgttaacgtctgctccagctcgcagcccgctgctggctgtttttggaaggaagaaagatggaaagcggtg

SEQ ID NO: 614014 - DNA, 90 bp, Homo sapiens
cagatggcggatgccctgcagtacctgcagaaggtctctggagacatcttcagcaggcgctccatgaaatacacgctgtgcagtgacaac

SEQ ID NO: 614015 - DNA, 50 bp, Homo sapiens
atgagcgtgtgcagaagcacctgaaggtgagatcggactggaactgttcg

SEQ ID NO: 614016 - DNA, 75 bp, Homo sapiens
aaagaaaagactaccgcactgaaaggcagagatcctacaagaatccaggatgatgatcccagattgccagcgcag

SEQ ID NO: 614017 - DNA, 75 bp, Homo sapiens
gtttttcctaagctcaactctagccagctaggttcctggtgctttgggggcactgaaaatgaagtatttcagtaa

SEQ ID NO: 614018 - DNA, 98 bp, Homo sapiens
ggcgctgcgccgcaacgccgagcgcaccgacatctgcctgctcaaaggcttgggcactgtttaaaggaaagttccgagaaggcatcgacaagccggac

SEQ ID NO: 614019 - DNA, 100 bp, Homo sapiens
tcaccaaagggcacattcagatgtttgatgcctgtgaggagccaccaacatttgaagctatggagctcattggtaaaccaaaaccctactatgagattgg

SEQ ID NO: 614020 - DNA, 100 bp, Homo sapiens
acactgccacctgattaaaggaattgatgaggacggggacttggttgccttttccagtgacgaggaattgacaatggccatgtcctacgtgaaggatgac

SEQ ID NO: 614021 - DNA, 74 bp, Homo sapiens
cagcccccgggcacgacctctcggacacggtgcaggcaggtctcctctgagcctccggcctccataagacccaa

SEQ ID NO: 614022 - DNA, 83 bp, Homo sapiens
ctcctcccccgtcctccgttagctaattaaaacatttttcagggacgtagccatccagagtagcctctagttcgttagtcaaa

SEQ ID NO: 614023 - DNA, 74 bp, Homo sapiens
actcggccctcattctgcacgacgatgaggtgacagtcacggagtggtgaaaggacataggaaggagtctgggg

SEQ ID NO: 614024 - DNA, 100 bp, Homo sapiens
gagagtagagacctaggcaagggccgctcctgtaaaaattagagcccccctccatgcgcctgaaggcccgacccagcagccctggcttttccgtgcttac

SEQ ID NO: 614025 - DNA, 100 bp, Homo sapiens
tttaagcactattattcatgaggcaaatgaggaacagggcaatagtatgatgggtcgagctgtgcagttttagcgggtacaagatctaccccggacacgg

SEQ ID NO: 614026 - DNA, 82 bp, Homo sapiens
gcaccgcagccttgggcctcgcgccggctatggccgtgccctggggctgagccctcagggctgaaatctctttaatgatgga

SEQ ID NO: 614027 - DNA, 75 bp, Homo sapiens
aaagaggagcagcatggcatttcagtcactggtttgcagagtccagttccgatgaagttaaattccgtcaagatt

SEQ ID NO: 614028 - DNA, 75 bp, Homo sapiens
gcgccgcacgagcaccagcctagagccagcaacacggaggtagtcacgtttcccggaaatccgaacacttgagtg

SEQ ID NO: 614029 - DNA, 98 bp, Homo sapiens
aaaaattcatcagagagcattttactactgagctgcaaaggttttataggatcacattgacaaaagtaccatggagttttatgagtcagcatatttta

SEQ ID NO: 614030 - DNA, 74 bp, Homo sapiens
ttcttgtttgtggatcgctgtgatcgtcacttgttgagagggaaaatgtgcagaagaggacctttacacgatgg

SEQ ID NO: 614031 - DNA, 100 bp, Homo sapiens
gccgcggggctggccgccatgcacaagctgcacttcctgcacagaaacattgctgaggctcttgtcagcaaaggtctagccacagtgatcagataccggc

SEQ ID NO: 614032 - DNA, 73 bp, Homo sapiens
ggctaagtcccggcagcgggaacacagagagcgaagccaggtcctaatgccccgagccaagttccactggttc

SEQ ID NO: 614033 - DNA, 99 bp, Homo sapiens
ctcgtcagcactgactttcagctatggaatcgagagttaagaaagacgtggacaagggcacacggcactcagacatgttcctgctgaagccagaggacg

SEQ ID NO: 614034 - DNA, 100 bp, Homo sapiens
ggcagctcggcagcatggcgtccgtgacgctgagcgaggcggagaaggtgtacatcgtgcatggcgtccaggccttcctgggctatgtgctgtatggaga

SEQ ID NO: 614035 - DNA, 100 bp, Homo sapiens
gatcatccaagtggaggttcctacagagattcatatgagagttatggagggtttgcatttgtgtatgaagctcaagatgtggggagtggcagagagtatg

SEQ ID NO: 614036 - DNA, 89 bp, Homo sapiens
tatgtttccttcacaaccaaactggatattcctactgctgctaaatatgaggtatgtgacgcattcccagactcttcagccaactgagc

SEQ ID NO: 614037 - DNA, 97 bp, Homo sapiens
tattcctgcctcagctgaaatgccagtcttcagcctcatctactgcacacttgagtccatgagattttagagtgaccaaactagagtcagaacgaat

SEQ ID NO: 614038 - DNA, 103 bp, Homo sapiens
ggtaaccgaaactcaaagttaatggagccaaatttaataaaggtgaccaagaatatggcccaggtgaccaaagccctggacaaggccctgagcaccatggacc

SEQ ID NO: 614039 - DNA, 83 bp, Homo sapiens
agatgcgccgcgccagctcctactcctccctcaactccctcatcgacctcctgccccccgaggtctgcagtctcctgaaccca

SEQ ID NO: 614040 - DNA, 75 bp, Homo sapiens
agaagatcgatgctgagcggcaggctgcagctgcagcctgccagctgttcaagacgacagtgaaggagtcagcca

SEQ ID NO: 614041 - DNA, 80 bp, Homo sapiens
tcagaggggaggaggactctggagctgacagcgcgcacttcacccgcagttggtgagaagccctaccactgcaactggga

SEQ ID NO: 614042 - DNA, 90 bp, Homo sapiens
aagaaggcaaggagagaatgtatgaagaacagtcacaggacagaattgctttagatttccaaagagggaatgatgttgccttccacttta

SEQ ID NO: 614043 - DNA, 100 bp, Homo sapiens
caacttcaagcctttgattttgaagatgaccactttggaaatggatttttacctcctataactccaccagaaaagttttttctttcccagctgatgctgg

SEQ ID NO: 614044 - DNA, 75 bp, Homo sapiens
cgcttcggcccgggccgctcaggtgcagagtttatgcgaattccatgtgtggatgctggattgatttcaccactg

SEQ ID NO: 614045 - DNA, 75 bp, Homo sapiens
acaatttatcattgaataagtgttttaagaaagtggacaaagagaggagtcagtgaaaatgcctcgtgtaaaagc

SEQ ID NO: 614046 - DNA, 97 bp, Homo sapiens
gtgaagccattctcacagacaccgttcaccttgtcactgactcccccatctactgacctcccaggagggcatcctggctgtttcacccgtggacttg

SEQ ID NO: 614047 - DNA, 83 bp, Homo sapiens
tttgactactggggccagggaaccctggtcaccgtctcctcagcaaattgtggctactaatttgccccctgaagatcaagatg

SEQ ID NO: 614048 - DNA, 51 bp, Homo sapiens
agtaatggtgcaaagcctgaaggtgagttctgcagtcagggtgtccgtgag

SEQ ID NO: 614049 - DNA, 98 bp, Homo sapiens
cgtgtccaagggggacgggatgcggggcctggcggtcttcatctcggatatccgcaactcctactcatgaaggttacttctcttgtttggatatctgg

SEQ ID NO: 614050 - DNA, 74 bp, Homo sapiens
gtgattttcagaggggaatgctaagagtgcaggaggggacggctccctggagaatgtgaccaccttacctagta

SEQ ID NO: 614051 - DNA, 82 bp, Homo sapiens
cagcctgcggagcctgtggggcagggctcacccctccagctacccctccccaccagttatggaagcccctggctgctgtctc

SEQ ID NO: 614052 - DNA, 82 bp, Homo sapiens
ccttctccactttcgccagcccgtgccgcgagcgcggcctgcaggagtgttgcaatctggttcctaaggaggaagaggaagg

SEQ ID NO: 614053 - DNA, 75 bp, Homo sapiens
acacaataccaggcatacatttggcagaataaatgaaccaggtttgaagatcagcttcagcaatggttgtctgaa

SEQ ID NO: 614054 - DNA, 49 bp, Homo sapiens
gccgagtgaaatcgtgcatttgcggtgtaccaacattcgaccaggagag

SEQ ID NO: 614055 - DNA, 74 bp, Homo sapiens
ttgtaacttttgatgatcatgatacagttgataaaattgttgtgattcgcctttgccagtctcatctcgtgtct

SEQ ID NO: 614056 - DNA, 75 bp, Homo sapiens
cttctccgagccagcgagccagcgagccgccgacccgccgagcaaaatgccacataaagaagatccctaatagtc

SEQ ID NO: 614057 - DNA, 83 bp, Homo sapiens
ctgcctctgtgtacgctgaggggggagcatatcccagtagaatacgggcttttccagggcaggaacctttagctggtttgctg

SEQ ID NO: 614058 - DNA, 75 bp, Homo sapiens
ccagtcctgctctgccgcctgccaccgctgcccgagcccggtacggacattgctgcaggagaagaggttgccatc

SEQ ID NO: 614059 - DNA, 75 bp, Homo sapiens
ttttcctgtcatagaaacgttcttgctgcaatcagcccttacttcagtgcatattgggtacttccagaagtatga

SEQ ID NO: 614060 - DNA, 100 bp, Homo sapiens
cctacttcgagcctccggtggaggagagcgccttggaacgccgacctgaaaccatctctgagcccaagacctagtgatccagatcatggttggattgatg

SEQ ID NO: 614061 - DNA, 131 bp, Homo sapiens
cttcaccaaggagactgcaggctacctcaggggccgtccccaggacactgtccggatcttccctccctggtggacccccaaaagtacaagggcatatttaacggattctcagttacacttaaagaggatgg

SEQ ID NO: 614062 - DNA, 75 bp, Homo sapiens
aaaaattagagacaatgaaaacagagttcctacatgtgaagagagactaaggtgtcagtatgttcttcaagctgc

SEQ ID NO: 614063 - DNA, 78 bp, Homo sapiens
aaattgtcagcagaagtagaatctctcaaagaagcttatcatatggagccacctgtctttaccagtttccaagactat

SEQ ID NO: 614064 - DNA, 126 bp, Homo sapiens
tgtggacatctgctgccggaaggggtcccgaagccccctgcaggaactctacaacccaatccagtacactaccagaagatcatccaccgtgacatcaaaccttccaacctcctggtcggagaagat

SEQ ID NO: 614065 - DNA, 82 bp, Homo sapiens
caacaaagaagaccacacactgggaaacatcattaaatcgtgtggccgacgacgatgccctcgctgaggagcgcatgcggag

SEQ ID NO: 614066 - DNA, 50 bp, Homo sapiens
tgcagctctactccaaggagaggaacaagcacatcatgattgacttgggg

SEQ ID NO: 614067 - DNA, 75 bp, Homo sapiens
aatgctgcccagcctccctgtgcactgggaggagatctcggccaactagagattgttgacgggaacctgaagatg

SEQ ID NO: 614068 - DNA, 100 bp, Homo sapiens
ggagcgcctagaggaggagctgcggcgtgcacgggccacctccgcacagggcgccacggagagggtcttactacatattgcaacagaagataatattgga

SEQ ID NO: 614069 - DNA, 75 bp, Homo sapiens
tgctatgataacagtacatactccaaggagaggattaatagacgcgcgggtttaagtggacgccaggtgcaccgg

SEQ ID NO: 614070 - DNA, 51 bp, Homo sapiens
gtttttgacttacatggaaacaggaagattgttgatcgaatcgacaatgat

SEQ ID NO: 614071 - DNA, 82 bp, Homo sapiens
agggtgtggccgttttacattggctgttttcctcacattcctcaagcaggtgaatgaaaactttgccattgatttgatagca

SEQ ID NO: 614072 - DNA, 97 bp, Homo sapiens
ggagagccagagcgcatgggagttctgcctggtccgcgagaacagggatcccaacaagccctcaggattcagaagtgttaaagctcctgtcactaaa

SEQ ID NO: 614073 - DNA, 100 bp, Homo sapiens
agaagctgaaagctgccgactgcgacctgcagatcaccaatgcgcagacgaaagaagatgcctgaagaacaggcattcagtgttctggtcaagatcatgt

SEQ ID NO: 614074 - DNA, 90 bp, Homo sapiens
cgactgagacctcaaaccctggctccagtgtcatggcggccatcgtgagaatcatgaagatgaggaaggttctgaaacaccagcagttac

SEQ ID NO: 614075 - DNA, 87 bp, Homo sapiens
gcgctcctggggacttctccctctctgtcaacaaagccttctagacaagctcagtggaatctgaagggcccaccccatggaggaatg

SEQ ID NO: 614076 - DNA, 82 bp, Homo sapiens
cctcctgctaatgttgagcctggaattgcagcttcaccagatagcagattttgagaagagggggaaaaaggaagtttgtcct

SEQ ID NO: 614077 - DNA, 101 bp, Homo sapiens
ctcagaagcatgtgtcttccccagctctgcagccacatactatccgtttgttcaggaaccaccagtgacagagtatggaacccttcagatcaaagcttacc

SEQ ID NO: 614078 - DNA, 50 bp, Homo sapiens
accaatcccttcgatcaggatgttgcacatatctgaatgagaagtcgctc

SEQ ID NO: 614079 - DNA, 78 bp, Homo sapiens
gcaaagaagaatattggctcactatttttcctctgggcataacgtgctggccaaagcgctctatgacaatgtggccga

SEQ ID NO: 614080 - DNA, 100 bp, Homo sapiens
gccaaagctctgttacgtctccaggatacctacaatttggatacagataccatctcaaagggtaatcttccagctatatgttctcctttcagccaagacc

SEQ ID NO: 614081 - DNA, 82 bp, Homo sapiens
cgaccggggcctgggtccacgccgagggcaggacgaacttcaccaggattttttatcaagcagaaatgcatcgaacaacgag

SEQ ID NO: 614082 - DNA, 98 bp, Homo sapiens
ggcggaggcggaggcggccggcccggcgtttgcctcagcatggagggcggggccgcggcagccacccccacagcactgccttactacgtggccttctc

SEQ ID NO: 614083 - DNA, 100 bp, Homo sapiens
cagcccaagaaacatctcaccaatttcaaatccgatttacgagtatcggaatggccaccaggaggtggagagcccctttcaggggcgcctgcagtggaat

SEQ ID NO: 614084 - DNA, 100 bp, Homo sapiens
gaaaagggtccatgacaatgagcatccagtggaaaacacgccagcttcaaagcaagattgggaaaatgaggtacgttagtgttcgcgattttaaaggcaa

SEQ ID NO: 614085 - DNA, 100 bp, Homo sapiens
gctacagggagggacccaccgtagagactaagtgtttgtaagcggtgcattcggaagatggaccaccactgtccctgggtcaacaactgtgtaggcgaga

SEQ ID NO: 614086 - DNA, 75 bp, Homo sapiens
gaagggctacggccactgtgtggtgggaagaggccgagtcttctgaagaggagtctgatgatgaaatagcagata

SEQ ID NO: 614087 - DNA, 83 bp, Homo sapiens
ctgggaacagacaaagaaacactctccttctgccacatttgttttgagctaaatattgaggcagatataatttctacagtaga

SEQ ID NO: 614088 - DNA, 100 bp, Homo sapiens
ctggtgatggcctacgggagcctgaccctgcccaacatctctgacctgtgtttgagagatgtgcccccagtccctaccctggctgacatcgcctggattg

SEQ ID NO: 614089 - DNA, 100 bp, Homo sapiens
atggggaggcaggaccaggacgccgggaccatcgaaagcctgagcctcctgagtgacagaaagggcctgacccggagggagcggcgggagctgcggcgcc

SEQ ID NO: 614090 - DNA, 74 bp, Homo sapiens
cccagaaagcagttaacagtgccaccggtgttccaactgtttaaagtctccggcgagtgagagacctttgtcga

SEQ ID NO: 614091 - DNA, 75 bp, Homo sapiens
gcggaatgtcaactattcaacatggaggcggaggtcgataagctggaactgatgtgacgacagtatgggctatca

SEQ ID NO: 614092 - DNA, 100 bp, Homo sapiens
gcgctttaccacgacccagatcccagcggaaaggagcgcgcctctttttggcttggggagctgcagcgttcggagagaacattgaaagtattctctaagc

SEQ ID NO: 614093 - DNA, 100 bp, Homo sapiens
tgatgccagaggtcaacaaggttctggacaagatgaagtctttctgccagatttggagtccaggaatgagactaagcatttatctgtaggaaaagatatt

SEQ ID NO: 614094 - DNA, 100 bp, Homo sapiens
ctccaaaagaggaaactacaccttacatagctcaaggtgttgacagctcttctaccacaagcagtgcttctccaatgcccaacagttatgatgccctgga

SEQ ID NO: 614095 - DNA, 82 bp, Homo sapiens
ggccgagcggcgcccggagcccgcgggcctgacacgcggcgggacatgcagcgggagatacagatgacccaccaagaattac

SEQ ID NO: 614096 - DNA, 100 bp, Homo sapiens
tcactagtctggtggccatcagcaagcccaggtctatggtagctttgcagtttggggagggctgttttccatgattgactgtagtatggttcaagtcaga

SEQ ID NO: 614097 - DNA, 50 bp, Homo sapiens
ccgccgcccgtccacacccgccgccagatgcctgaggaaacccagaccca

SEQ ID NO: 614098 - DNA, 101 bp, Homo sapiens
gctgcagggaacagctgcggtgctctgccatattgtgtcttccccggccggtccctcgcctcccggccgagctgacggggcatggtctagtggcccagtca

SEQ ID NO: 614099 - DNA, 83 bp, Homo sapiens
tatcgaacagagccgggagttcaagaagaacactccagaggagtgtggccatctggggccgtgtggtatttgccactcaggag

SEQ ID NO: 614100 - DNA, 95 bp, Homo sapiens
tgagtggaatccatgtttctggacgcggatttttggcctcatactctgttatagataaacaaggtggaaagttaccgaggctggacagtgtagtg

SEQ ID NO: 614101 - DNA, 83 bp, Homo sapiens
cgcctcctccggcctgcagcacgccctcgtcctgcacttcctcctcggaatctgcaaggtaagccaagatgggtgcatacaag

SEQ ID NO: 614102 - DNA, 124 bp, Homo sapiens
tttgaccatgaagaactatgagcaagctctccaagatgccagtgcagcttgtcagaatgaacctctcttgattaagggagagcctggggatgtacaggagatgcctgctccagaatctcctcct

SEQ ID NO: 614103 - DNA, 100 bp, Homo sapiens
agccaaggaaacaggatgctgatagtctccagcgggcctggactgtgggctggtgtgtggaactgaacctcaaccagaaccctcggactttgctgcctaa

SEQ ID NO: 614104 - DNA, 83 bp, Homo sapiens
gtatttgcctgaagaaggtcagtgtgcttgcttggagatcaggacgcaaaggtgctatacttggtagatcagaaactcaggag

SEQ ID NO: 614105 - DNA, 144 bp, Homo sapiens
caagctcatgttttctcctgatcaagaaaatcatccatctaaagcaccagtaaaatatggtgaactcattgtcttaggggggattttggcaattgcttggagcatggcagatcctgaattgttactgagctgtggaaaagatgc

SEQ ID NO: 614106 - DNA, 101 bp, Homo sapiens
acagcccaagatggccgacttcgatgatcgtgtgtcggatgaggagaagaaatatggctacacacacctttctgcaggagagctgcttcgtgatgaaagga

SEQ ID NO: 614107 - DNA, 50 bp, Homo sapiens
ggctgtgttgacatcaaggatctaccagatcaagcttcaggagtctccgg

SEQ ID NO: 614108 - DNA, 75 bp, Homo sapiens
ctggcttggcgcctgaggttctcccattagatgcttgctctgtcaaggcacagcctattgtctcctttgctcagt

SEQ ID NO: 614109 - DNA, 121 bp, Homo sapiens
cccagccgcaccccagcagcagtcagagcccgccagaccttcctctgaaggcaaagtgacctgtggtacgaaggtggatcaagagcccaatggtcagtgtggacaagcatcagagtcccag

SEQ ID NO: 614110 - DNA, 98 bp, Homo sapiens
ttaccatgaagccagtaagtcgtcgcacgctggactggatttattcagtgacttaattcagtgcacaaatgagatgaatgtgaacatcccacagttgg

SEQ ID NO: 614111 - DNA, 82 bp, Homo sapiens
ctcgacctgctaacagaactggaccttttcgttcttctcaccactaaatccaatacgagttcatattgatattggagctgat

SEQ ID NO: 614112 - DNA, 87 bp, Homo sapiens
tcgagtgggtctacaccgaccagccgcacacgcagcggcgcaaggagatactggcattttgaaagcgaagcagaagccgtagaatca

SEQ ID NO: 614113 - DNA, 99 bp, Homo sapiens
gggaacatgtctgagtcggagctcggcaggaagtgggaccggtgtctggcggatgcggtcgtgaagataggatatgggtctgcaggatggagttcttcc

SEQ ID NO: 614114 - DNA, 83 bp, Homo sapiens
gcaacatttcaggaaaacagagaaagaagtgataggagggctctgtaggtcagcccaaggccaaccccactgtcactctgttc

SEQ ID NO: 614115 - DNA, 99 bp, Homo sapiens
gtggtcgcgtctcggaaaccggtagcgcttgcagcatggggaagatgatgacgacgatgaatgtggggaagagaagctgccctcctgtttcgattacgt

SEQ ID NO: 614116 - DNA, 74 bp, Homo sapiens
cagcttgggaggtgctgccaccacaggcttgtccagccggaagccctgagggcagctgttcccactggctctgc

SEQ ID NO: 614117 - DNA, 50 bp, Homo sapiens
agcgcctcttctaccggggcaagcagttcagggcgacagctcagtgaagt

SEQ ID NO: 614118 - DNA, 80 bp, Homo sapiens
ccggcccggagcaccgagctcgcggcacggtaggagggcgtctctggccgagcctctttttgtggaaaacgacagcagca

SEQ ID NO: 614119 - DNA, 100 bp, Homo sapiens
cttgaagctgccgctgtcgctgctgctcgttcgagtcgcagctgttacacatctgtattgaaggttggggcaactggcgttggtcagagcctttcagtgt

SEQ ID NO: 614120 - DNA, 100 bp, Homo sapiens
ttacctccggatgtactccagtctcagtgcccctcaataaacgttaacctgctttgccaaaattgtgcaacttgctttggtgtttgctgttttattgcca

SEQ ID NO: 614121 - DNA, 74 bp, Homo sapiens
aatgggagaagaggaatgttccctgacaatttcgttaagagtatgccaagatggaaggaagcctcatacagtga

SEQ ID NO: 614122 - DNA, 74 bp, Homo sapiens
tgaagccgccatgcgacctctccatgcagtcagtggaagtggcggagaacttgcgcctgtcaggggctggatcc

SEQ ID NO: 614123 - DNA, 50 bp, Homo sapiens
aagagggaagacacgcggaaacagtttgaaaatctgaacacagttgctga

SEQ ID NO: 614124 - DNA, 83 bp, Homo sapiens
gctggggcgacgaggcgattgcgggggcctgggctaggtatcgagaaccttccctgcgaacttcagaggaacttccagctgat

SEQ ID NO: 614125 - DNA, 100 bp, Homo sapiens
cacctggggccgcgtccggtgtgaagacagggagacgctgctgcagctccgggacacctggggccgccgaggcaaaggacctcagcagccatgtcgaagc

SEQ ID NO: 614126 - DNA, 83 bp, Homo sapiens
ctctctttctggcctggaggctatccagcgaggatttgatgaagatgttaaagcgaaagtggagaaccttctcgggatttcca

SEQ ID NO: 614127 - DNA, 74 bp, Homo sapiens
caacttccccgcaggcggcgtgggcatgggcatgtacaacaccgacgaggtctccttggttcatgaatctttcc

SEQ ID NO: 614128 - DNA, 82 bp, Homo sapiens
tccgccgccgcctgaggaggcgagctagccgggagttacaccgccaccgccagaataccctctaccatctgctttggtcagg

SEQ ID NO: 614129 - DNA, 87 bp, Homo sapiens
atgccccctcacatctatgccatcacagacaccgcctacaggagtatgatgcaagcttgaattcggagtgatttaccactgcacaga

SEQ ID NO: 614130 - DNA, 98 bp, Homo sapiens
tggtctacatcctgcgggtgcctttgaaaatcaacgacaacttgagcacaggagttgatccctgaattttattatctccctgagatgtttgtcaactt

SEQ ID NO: 614131 - DNA, 75 bp, Homo sapiens
cctgggctggtagaccaggagcgctctctgtcgctgagtaacgtcaaagatcccagctctcctgttggcttcgtg

SEQ ID NO: 614132 - DNA, 100 bp, Homo sapiens
aggaagctacgtttgtgttgcgaggaactatcttggtgaagcagtgagtcgaaatgcgtctctggaagtggcatttgtgttcgatatatacagagacagt

SEQ ID NO: 614133 - DNA, 127 bp, Homo sapiens
tgccctccacttgcagccagggactgggcatccacccggccaggttcccaggaagtctatacgagatactccagccaaaaatgcacaaaagtcaaatcagaatggaaaagactcaaaaccatcatca

SEQ ID NO: 614134 - DNA, 100 bp, Homo sapiens
cctccaacccagaactggacaatctggtaacccagaatctcccaatgaaagaaggctgcacagaggtctctctccttcgagttgggtggtctgttgattt

SEQ ID NO: 614135 - DNA, 83 bp, Homo sapiens
cgggacacctggaagccgagaaatggtggcccgggagagtggcccaccccacatgaagaactttgtgaccaaggtttcggttg

SEQ ID NO: 614136 - DNA, 83 bp, Homo sapiens
cccagctcggcccgcgggggagccccgggagccgcacgcccagctcaacattggcaatgtgctccctgtgggcaccatgcctg

SEQ ID NO: 614137 - DNA, 101 bp, Homo sapiens
ctttatccaatcaagtgcccttggacaaagcctgaaaccaggccccttcacagatgtagtcactacaaatcttaaattgcgaaatccatcggatagaaaag

SEQ ID NO: 614138 - DNA, 76 bp, Homo sapiens
aggccaaactacaattcccgagagggtgcaacaccggaggatttcagcaacctcccacctgaacaaagaaggaaaa

SEQ ID NO: 614139 - DNA, 90 bp, Homo sapiens
gttttttctaatggctattcaaggttggtcaaagaaaaagtgatgtatgaaaaagaggcaaaacaacaagaagaaaagattgaaaaaatg

SEQ ID NO: 614140 - DNA, 100 bp, Homo sapiens
gatcaaggacatggagaagatgttcaagcaaaaccctccgtaactctaggtcagagcgcactaaaatgagccacttctgaacgagcagcgcccaggcccc

SEQ ID NO: 614141 - DNA, 83 bp, Homo sapiens
ccctctccttttcgtttccggaaacatggtacaccagaggatcgcttcctggcagaatttgggagctgtttattgcagcactg

SEQ ID NO: 614142 - DNA, 100 bp, Homo sapiens
ttgagcagttggcactacccgtcttgaggaatattgctgacagaactggaatctcctgcttggtggccctttagctccaagctttggaagacaccaccgg

SEQ ID NO: 614143 - DNA, 75 bp, Homo sapiens
cagagaagagcacagaatgtaccagagagcttccccgggcgctgcctggacaggcctgcctgcgtgctgggacat

SEQ ID NO: 614144 - DNA, 50 bp, Homo sapiens
tttgcttaaaaacttcccacaggatcgaacagaggctgcaaatagaataa

SEQ ID NO: 614145 - DNA, 50 bp, Homo sapiens
ggacaggcgacagcgacctgcggcaggttaaagctgaagctcaacaaaga

SEQ ID NO: 614146 - DNA, 100 bp, Homo sapiens
cgtaactgctgccatcttctccgcgctatggctgcgttcggccgtcaggaactttatattgctgttggaatatctggagccatccaacatttagctggga

SEQ ID NO: 614147 - DNA, 100 bp, Homo sapiens
agaaagagatatgaagatcttcctataaatagcaatccagcgcctgcctccagcaccctgaagatgctgtgtgatatgtcctccttaccaagttggtgat

SEQ ID NO: 614148 - DNA, 101 bp, Homo sapiens
gaagagctgaagacctttctgctgaacaacatcgacttgctatcaaccactgtagtctgcagatcaaagctctggcgaaaatccatgcctttgttcaagac

SEQ ID NO: 614149 - DNA, 123 bp, Homo sapiens
ctccacccccgagatctccttggaagcagaacccatagaactcgtggaaactgctcttttggtacaccagaaggccagaatggaacgacttcaaagagaacttgagattcaaaagaaaaagct

SEQ ID NO: 614150 - DNA, 134 bp, Homo sapiens
agaggaaagatgggaaaacgaccagagaggaccacatgaaactcaaggtccagggagtggaggtgaccttgggaaaggtgttgaaagtgatcgtcgtcatgcggagcctgttcattgatcgaacaatagtaaag

SEQ ID NO: 614151 - DNA, 100 bp, Homo sapiens
ggcttccagaggccgacgatctactatgtgatgtcagggcctgcgtggagaatgttttatccagtgtttcatatcattggcacaacgaacatcagtaaag

SEQ ID NO: 614152 - DNA, 107 bp, Homo sapiens
ctgccgcagccaggagatggttcgggcctagcggagccgggactggagaaaatgatgcatcctgttgccagcagtaatccagctttctgtgggcctggcaagccttc

SEQ ID NO: 614153 - DNA, 100 bp, Homo sapiens
gcaccgcggcttaaatgatgtattttgtgatcgcagcgatgaaagcttggtttatggcagctccaggacctcgcaccccgagacggacatcttacaccgc

SEQ ID NO: 614154 - DNA, 75 bp, Homo sapiens
gagaatgtccatggatttgtttctcattctcatatttcaccaataaagcctctgcgacttgatatcaaaagaaag

SEQ ID NO: 614155 - DNA, 96 bp, Homo sapiens
acaccagctggactcattgtgtccattgctctcttgcagcacctggggctcatgggcctcgaaaaagcccaagacagcagaagcagacacctccag

SEQ ID NO: 614156 - DNA, 83 bp, Homo sapiens
gggcactggacgggtgattatggtggcccacttttcctcctgccaggggaccctcacaatgatcccaatgctcagggggatgc

SEQ ID NO: 614157 - DNA, 75 bp, Homo sapiens
gactatattaggtcccctttaccatttcagaatagatacgtcggtaacctttccagagatgtgacagaagctcta

SEQ ID NO: 614158 - DNA, 101 bp, Homo sapiens
aggacctctcagaacacagtggacagtgacaagaactttacagactagcatggcaaagcttctctccgatcttagtgtggacagtgctcgctgcaagcctg

SEQ ID NO: 614159 - DNA, 73 bp, Homo sapiens
acagatgatgataaacggcgtgaattggttcagcagactgtacaggatctttttggcagagccccaagtaaag

SEQ ID NO: 614160 - DNA, 83 bp, Homo sapiens
cctgaagaagggctccctcgtgaagaacctgaaggacacactaggtgtcgtgaaaactacccctaaaagccaaaatgggaaag

SEQ ID NO: 614161 - DNA, 97 bp, Homo sapiens
gttccttcagccaaagaaacaagccgtggaataggtgtatcaagtaatggtgcaaagcctgaacgctgctgggacatcgccttgggtcccctcaaac

SEQ ID NO: 614162 - DNA, 98 bp, Homo sapiens
cgcggggagcgcccccggcgcgatgcccttcaggaaaggcttctccagggaaagtgaccgaggcagtgaaagaggccattgacgcagggtaccggcac

SEQ ID NO: 614163 - DNA, 75 bp, Homo sapiens
attcgatttcacatggaagatgctaaaggacaaattcaacgagtgcgccctgggcgctgcctatggcacagccaa

SEQ ID NO: 614164 - DNA, 120 bp, Homo sapiens
gcgctttgacaagtgcctggaagagttctatgcactctgtgaccagctggagctgtgcctgactccatcaagaatgctggaggaagggtgtttgtccactgccaggcaggcatttcccgg

SEQ ID NO: 614165 - DNA, 74 bp, Homo sapiens
gaggccttatggtaatgtcggccattgagaaattgttgaggcagatgctattaactgagtacttggatatgaaa

SEQ ID NO: 614166 - DNA, 75 bp, Homo sapiens
ctcttttccagtataagtatttggctcttaatatgcattatgtagggagcgcatggagcttttggaagaagccaa

SEQ ID NO: 614167 - DNA, 75 bp, Homo sapiens
gcctccgggcatcttcaactatggatgtccatggtagaataagagaaatccttgctgagactatacgggaagaat

SEQ ID NO: 614168 - DNA, 75 bp, Homo sapiens
aggcctacagcccggagctgatcgtccacccagttctgacaagaggaccctgccttggtgtgagagtgagggaag

SEQ ID NO: 614169 - DNA, 83 bp, Homo sapiens
ctcagttggaagcagccgatccagcctgcggagcctgtggggcaggagctggagtcagatggcagcactatggaggactattc

SEQ ID NO: 614170 - DNA, 50 bp, Homo sapiens
catagacaagtttgtacatccaaaatttgcatctgctggtgatgatggaa

SEQ ID NO: 614171 - DNA, 82 bp, Homo sapiens
tggccttcttcaggttcccgcgggaccctgccagaatggcttcctttgggtggaagaggaaaattggtgagaaggtctcaaa

SEQ ID NO: 614172 - DNA, 100 bp, Homo sapiens
aaaaacaagactggggctgctcccatcattgatgtggtgcgatcgattctccctgactctgctcatctggaccttttctgtgtgtctgccacccctgtgc

SEQ ID NO: 614173 - DNA, 100 bp, Homo sapiens
cgccggattccagcccggccggggcctgcgggcgcccagagccgcgccgtccgcgccgcccgttctggtttgatgtaggcccaattctcaaacaagaaac

SEQ ID NO: 614174 - DNA, 83 bp, Homo sapiens
cacgagcagatcctggtcctcgatccgcccacagacctcaaattcaaagaaatgagccgtcagactgctacagcattacctac

SEQ ID NO: 614175 - DNA, 83 bp, Homo sapiens
tccagctttactgtgcaacttggaggagaattctgcctaagccaactcgaaaaagccgtacaaaaaataagcaaaagcgtccc

SEQ ID NO: 614176 - DNA, 93 bp, Homo sapiens
ggaggcggaggcagaggtggaggcgctttgaaaggattttttatcaagcagaaatgcatcgaacaacgagaatcaagatcactgagctaaatc

SEQ ID NO: 614177 - DNA, 90 bp, Homo sapiens
atcaacggcttcccaggcaaagatgggcgtgatggcaccaagggagaaaagggggaaccagatgatgaccactggatcgtcgacacagac

SEQ ID NO: 614178 - DNA, 74 bp, Homo sapiens
ttcaaggaggtgctgaagagcgaggaggaatcgagcccactggaaacatggtgaagcagccagccaagttcact

SEQ ID NO: 614179 - DNA, 101 bp, Homo sapiens
cgccgcgcgaggaaatggccgaggagccggagccgcaggtgagaagccctaccactgcaactgggacggctgcggctggaagtttgcgcgctcagacgagc

SEQ ID NO: 614180 - DNA, 75 bp, Homo sapiens
aacaacagaaaactcaaaaaccatctggtgctgtggattgcaaccttgaattttggctgtagcagcaattcctga

SEQ ID NO: 614181 - DNA, 75 bp, Homo sapiens
tagccatcgacttcggggagcagatgatttgtcattaattcggaagaacagaatggctctctttcaacaattgac

SEQ ID NO: 614182 - DNA, 83 bp, Homo sapiens
agttggaagaaagggtgtcatcacagtaaaggatggcaaatttgagttacatcaaaaacttcaggtttagcagcttggcaaag

SEQ ID NO: 614183 - DNA, 100 bp, Homo sapiens
aaaaagaggaaagtggactgtccggggccgggctcaggagcagaggaacccaagacagaccaggatgaggagcattgccggaaagtcaacgagtatctga

SEQ ID NO: 614184 - DNA, 80 bp, Homo sapiens
agatccgcgcacgactagagggcgggaaagatttgagctacgcctgcgcagaggagggcatcctggctgtttcacccgtg

SEQ ID NO: 614185 - DNA, 75 bp, Homo sapiens
attgcttgaacccgggaggcagagggtccaattggttccaagacgcgtaggcgagttggtctgaaagcccccggt

SEQ ID NO: 614186 - DNA, 101 bp, Homo sapiens
aggacgacgcgctcaaccagatcgcgcgggagcccatcacctcttcatgaccactgcctgccaggaggctaactacggtgccctcctccgggagctctgcc

SEQ ID NO: 614187 - DNA, 75 bp, Homo sapiens
agcacggcgagcagtctcaggcctttagtgatgatggggcaagctctgtgtgattgattggaagacatcagagaa

SEQ ID NO: 614188 - DNA, 75 bp, Homo sapiens
cctaccaggaggccaggggtgtcgccatggtagagggtgagaaacagcaggagcacgaggtgcagtggctgcggg

SEQ ID NO: 614189 - DNA, 126 bp, Homo sapiens
tgtgtgcggcgccgctaccgtgagttcgtgtggctgagaaagcagctacagagaaatgctggtttggtgaaatatattcttccctctctcctgcctttatgaggaaactgatcatcaaaagttccc

SEQ ID NO: 614190 - DNA, 101 bp, Homo sapiens
gctgttctttcaaaatacccaggcagaggaaccggcagacgatgggcaggtgcaatggatgagcttcatagtctggatccaagaaggcaagagttattgga

SEQ ID NO: 614191 - DNA, 75 bp, Homo sapiens
caggccggtgcatgagtttatgctgaaggacttcatgtattttgaaagatctccaccacaacgttcaagatagag

SEQ ID NO: 614192 - DNA, 90 bp, Homo sapiens
ctctgagttcttgggcacgttcatcttgattaagcatccccagacatccagttcaggagatccttgtcaagatggtatattcatttcagg

SEQ ID NO: 614193 - DNA, 50 bp, Homo sapiens
tgacggcgtgaccgacccgagccgtcctattttgtaacggattatgatcc

SEQ ID NO: 614194 - DNA, 51 bp, Homo sapiens
ttacgcagaaggacctggccacggatgataatgaagataattcaaatgatg

SEQ ID NO: 614195 - DNA, 82 bp, Homo sapiens
cggcatcgtcgtctatgggggctactcgaaacagatcctccgagcggcggcgacggctgttgctaagggaggggacgcgcga

SEQ ID NO: 614196 - DNA, 90 bp, Homo sapiens
gttcaggcagctggccaacagtggcaaggcccagcactagaagatttcagtcatctgccaccagaacagagacgtaaaaaactacagcag

SEQ ID NO: 614197 - DNA, 98 bp, Homo sapiens
cttttcgtaaagggaagtcatttctactggacttcatgcttagatacatgtataacaagagcaatgttgatcccagggatgatgtatttggatatcct

SEQ ID NO: 614198 - DNA, 101 bp, Homo sapiens
gcagttttgccaggtgtttgttaccttggagaaatgctgcgcaagaaacgaagggagaaggatggccacaaagatcctctcttggtggaggtgagtcggct

SEQ ID NO: 614199 - DNA, 82 bp, Homo sapiens
gaacttcgttgcttgcttgcctgtgcgcgcgtgcgcggacatggcctcaaacgatgaggacggggacttggttgccttttcc

SEQ ID NO: 614200 - DNA, 74 bp, Homo sapiens
gttaattgaagagtcttgtccacagctggcaaattcagtgcagatcagatcctatgaatgcactccagagcctg

SEQ ID NO: 614201 - DNA, 90 bp, Homo sapiens
caaagcttttgttaattatcttaaatacttgctttactggaaagacccagaatatgccaagtatctaaataatccttcccctctaccacc

SEQ ID NO: 614202 - DNA, 80 bp, Homo sapiens
ggaggggaggaggaggaggattcagggaataggagctggggagcccttctgcgccacagcgtcagcctcgagtttgacca

SEQ ID NO: 614203 - DNA, 90 bp, Homo sapiens
ggagaggttccttcaggaggatcaggtgtggccgacgacgatgccctcgctgaggagcgcatgcggagaggccagaacgccctgccagcc

SEQ ID NO: 614204 - DNA, 83 bp, Homo sapiens
cgacaaggatgcgctggggcctatgatgcttgagcataatgcagtgaagatgggtgaagagagatgtgtttcatctgaaattt

SEQ ID NO: 614205 - DNA, 100 bp, Homo sapiens
ggcagcctgaacggagtgtgcgacggattgggagggaaatcctcattgacgattcaatttgttgaaggccaatttgtggactcctacgatccaaccatag

SEQ ID NO: 614206 - DNA, 50 bp, Homo sapiens
gcagcagcacaagctgaagatggtgctgcagggtgcacagctgatcgccg

SEQ ID NO: 614207 - DNA, 97 bp, Homo sapiens
gtgcaggggaagtacgtgaagaaggagacgtcgcctctgcttcggagggagttgctgagtcagcccagaccggaaggagtggcagagatcatttgcc

SEQ ID NO: 614208 - DNA, 99 bp, Homo sapiens
gttcgctacacagcaatgcatcgaggaatataaatagtttctggaaaggacactgacaacttcaaagcaaaatgaagttctttctgttgcttttcacca

SEQ ID NO: 614209 - DNA, 74 bp, Homo sapiens
agctgttgtctcagggagcacagaaccaaaacctattgatgtacaagtcattacacaccacatgcagcgatatg

SEQ ID NO: 614210 - DNA, 83 bp, Homo sapiens
agcccagtatgggaaagatctaccttctggaagctactactacgtggtgcttggaaaggtataatgggtctctcccaaatggc

SEQ ID NO: 614211 - DNA, 141 bp, Homo sapiens
gtaaaaaatgcgggagacttgagaagaaaggccatggaaggcaccatcgatggatcactgataaatcctacagtgatatgaccacattctgaagtgggaactcttccagctggctgacctggatacataccagggaatgct

SEQ ID NO: 614212 - DNA, 100 bp, Homo sapiens
aaaagcacctggccccgctacagcaaaccaggtgaccctggcaaagatgagagtgcacatttcgtcctgcctgaaggtccaggagcagatggccaactgc

SEQ ID NO: 614213 - DNA, 75 bp, Homo sapiens
gactatgaatctctgttccaaatgctttgctggttcatcgttgggtcaattatgaatccatgctgaaagaatgcc

SEQ ID NO: 614214 - DNA, 90 bp, Homo sapiens
gagaaaaggcctaagaattttggcattgaaggggaaactgaggcccaaggaaattgagtatctctgcaaagtcaccagctgagttcgaac

SEQ ID NO: 614215 - DNA, 100 bp, Homo sapiens
ccgtggtgtgcgaggagacggccctcatcacccgacccggggcgccgagccggaggaaggaggcctactttaaggctggccaattctgcaagaaaggcaa

SEQ ID NO: 614216 - DNA, 100 bp, Homo sapiens
gcggaagggcacctccacccggcctctgagcccaagtctgcacgtattcatccagatggcctgaagtaactgaagattcacaaaagaagtgaaaatggcc

SEQ ID NO: 614217 - DNA, 100 bp, Homo sapiens
cggggctcccaggacctccactaatcaccagaacaaaatgtgcagagcacaggaagcttggaaacatgactgtgacggtgaagaagactgtcccctctcc

SEQ ID NO: 614218 - DNA, 97 bp, Homo sapiens
acatgactgataccactataatttagttgtctttgctcagttcaaaagccacagaagaagttctggacgatgtgggccttcaatcttctaagatggg

SEQ ID NO: 614219 - DNA, 75 bp, Homo sapiens
ccttcgcgtcccctgcaccatgagctggggcaccgagctctggggtcggcactcttcaccctcccgagccctgcc

SEQ ID NO: 614220 - DNA, 90 bp, Homo sapiens
ctcctcgccctcaagttcacctgcaggttttccctgatgaatttcacctccagactttgaatccttttcttcgggcctgtgctgagttac

SEQ ID NO: 614221 - DNA, 82 bp, Homo sapiens
ccgggagccccagggcagccgccccgccgagtcgcaggtgatccgcaggggctggctgaccatcaacaacatcagcctgatg

SEQ ID NO: 614222 - DNA, 100 bp, Homo sapiens
acataaaaattatttatccaacagctcctcccagattctcaagtccaaagatttaacatctccaacccagcgctacatcgacagcaaagttgtgaaaaca

SEQ ID NO: 614223 - DNA, 82 bp, Homo sapiens
gaaaatcatccatctaaagcaccagtaaaatatggtgaactcattgtcttagggactttgattcctggtttgatacaaacaa

SEQ ID NO: 614224 - DNA, 90 bp, Homo sapiens
cgggcttggagttcgcctcagacgcggtggagccgccggagtctgagaagcttttacaaagttgatcacagtaaatggacaagaatatca

SEQ ID NO: 614225 - DNA, 90 bp, Homo sapiens
agctcaccgacagtgccctgagggccttcgagagctaccgcgccagacagtggatcaatcttcctgtcctacaactgacaaaggatcccc

SEQ ID NO: 614226 - DNA, 100 bp, Homo sapiens
gggatgtcggtcagtgcgagatccgctgctgctgaggagaggagcgtcaacagcagcaccatgggtttttggtgcgttagcatctgagccactgaaagtg

SEQ ID NO: 614227 - DNA, 75 bp, Homo sapiens
gactcactgagtgctgcagctggggccagtgatgattcatgttacatgtaaagctgtcctcatttgtgactatgg

SEQ ID NO: 614228 - DNA, 75 bp, Homo sapiens
ctagtaatctagagctggcttcggcttctgctgagtttggccccttcacagatgtagtcactacaaatcttaaat

SEQ ID NO: 614229 - DNA, 95 bp, Homo sapiens
agcgtgtgccagaagatccagctttgttgaaaagcgaagccgttagtcccttaatacaaagggttgcaacaaggacagtgtcagagcaggctgta

SEQ ID NO: 614230 - DNA, 82 bp, Homo sapiens
cagacaccggagactgggaaatgctgatcttgcatctttaatggataaaacatttgagagaaagttgcctgttagttcttta

SEQ ID NO: 614231 - DNA, 74 bp, Homo sapiens
cttctggttggaaacttgtcaaatttcatcaggagaaagaccatttatctgcgaattatgtggaaattcttaca

SEQ ID NO: 614232 - DNA, 90 bp, Homo sapiens
agaagatgatacaaatgaatttgttagtgctgtgtgctggagggcactaccagatgggttggtgttggtattaggagatctgcacatccc

SEQ ID NO: 614233 - DNA, 97 bp, Homo sapiens
gcttgaaggcctggagagccgcccagcagcacaacacagggaagcttggggaggatctcatctggccaccgcgttctggaagaggcgagagggagag

SEQ ID NO: 614234 - DNA, 100 bp, Homo sapiens
aagtcccagatttttgctcattaacagaaaagaagaggagaatgctaagcagaggcctgtccttgatagtggtcgggaagcgaagtcccggagaagaacg

SEQ ID NO: 614235 - DNA, 53 bp, Homo sapiens
aacagaatggactaggactcagtatgccgacatcagtggctcagacagttgtc

SEQ ID NO: 614236 - DNA, 75 bp, Homo sapiens
ccagacaatgccggtggaggaatttgtggctggctggatctctgaacctcaagaaggcatgaagccagcccctgc

SEQ ID NO: 614237 - DNA, 85 bp, Homo sapiens
caatgagtggcacacagtctactatcaccgacaggttgaagatgacagcgatgcagagacctatggagaagagaatgatgaacag

SEQ ID NO: 614238 - DNA, 82 bp, Homo sapiens
tcaggtttccactaaatggctactgtcacctcaactcagtccaggtcagcccaaggccaaccccactgtcactctgttcccg

SEQ ID NO: 614239 - DNA, 101 bp, Homo sapiens
accacggagaaccagtaccggctgacctcgctgtacgccgagcacccaggcgactgcctcatcttcaaggtgctggagaatctggtaaaagcaccattgtg

SEQ ID NO: 614240 - DNA, 74 bp, Homo sapiens
acaggagttcatctacccggagaagcaggagccctactcggcagagtcttctgaagaggagtctgatgatgaaa

SEQ ID NO: 614241 - DNA, 75 bp, Homo sapiens
cgggccgtggaggcttcgccgcctaggagagctcaaaggatggctactgacatgcagaggaagagaagcagcgaa

SEQ ID NO: 614242 - DNA, 87 bp, Homo sapiens
cgattatgtccattgttctcttggagcagctggtcatcatggaggtcttggacttggaacttttgatgcttgtttaattagtgaaga

SEQ ID NO: 614243 - DNA, 51 bp, Homo sapiens
caggggccactcagagtcgcccgagaaggagtcgtcgcatggtggatgtca

SEQ ID NO: 614244 - DNA, 90 bp, Homo sapiens
gcgctttcctgtccccaagccgttctagacgcggctgaggagtacctgtcatttgcctttgagcattgtcaccgttctagtcagaagaac

SEQ ID NO: 614245 - DNA, 75 bp, Homo sapiens
cgccacttccgcaaacaggtgcagggatacccacccaccatcccagggtctacaacatccacagccggaccgtca

SEQ ID NO: 614246 - DNA, 100 bp, Homo sapiens
ctgggcctgaagtgagtgagaggcacatgaagatacttggtgcttgaaaaactgaagaaggaagacgctgaccgaattcatatattcagttcttttttct

SEQ ID NO: 614247 - DNA, 102 bp, Homo sapiens
ctgcagatggcccatttggagatcttgacaaagcctcttctgtttccaatgggtgatgatgacagcctcttcatctatgactgcagtgctgcagaaaagaag

SEQ ID NO: 614248 - DNA, 83 bp, Homo sapiens
cgtcaacgacaaatccctggcccgggtgacccacgcggaggccgtcaaggatttccagatgtgacttgcactcagaagatcag

SEQ ID NO: 614249 - DNA, 100 bp, Homo sapiens
agtttggatgtggaggggaatagactccatctatccatatgaggtactaggttttgacaagcttgcatcatgcgtgagtataagctagtcgttcttggct

SEQ ID NO: 614250 - DNA, 100 bp, Homo sapiens
cttccaaaagcgcagaccacagttacatgtatggagaatggctggtctcctactcccagatgcatccgtgtcagtatacccgaaatcttgtggatcaagg

SEQ ID NO: 614251 - DNA, 90 bp, Homo sapiens
gttttacctctccccaccccaaggattttcctgatgagaaggccaatgatgaggccaatcagagtgatacaagtgtctccttgtcagaac

SEQ ID NO: 614252 - DNA, 98 bp, Homo sapiens
gctgatgctgggaggcctccagggatggagagtggcctggctggcaacggcacaggttccagtgacttttgtcgacattgctgtgtacttctccgaag

SEQ ID NO: 614253 - DNA, 74 bp, Homo sapiens
tttcagtgtcctccttagctctgcagatttctctatgaatcatcatcaagaactctgggagaacttttgaattc

SEQ ID NO: 614254 - DNA, 101 bp, Homo sapiens
cgttaagggactcaggcagtacgggaagaacttcttcagaattagaaaggagctgcttcccaataaggaaacagtcaccctgctgattgccttcatctgtg

SEQ ID NO: 614255 - DNA, 98 bp, Homo sapiens
ggcccttctgcaggctggtgccaaccccaacatgcaggacagcaaggggagtaccatcttcctcatgggaccagtgaaacagctgaagcgaatgtttg

SEQ ID NO: 614256 - DNA, 100 bp, Homo sapiens
ctcggccaagagtccggcccctgctgaccttccttccgctggagtgaacaaccaaggcgatgggctgtaggatgttgatacatctgaggggccagatggc

SEQ ID NO: 614257 - DNA, 75 bp, Homo sapiens
gctgggagctgcctgcgggaaggtgcggggagcggagccatggcctccgattgaaggattctcattaagcaaact

SEQ ID NO: 614258 - DNA, 100 bp, Homo sapiens
ccccaacagcccggaagagtttgaccccatgactggacgctgtgttcccccacgaacttctgctgacgccctgcatgccaatggaggcctgtgtcgccga

SEQ ID NO: 614259 - DNA, 75 bp, Homo sapiens
gagagcattcgaagtgacctcagcagggcatccagacatagggcctgattacattccaacagaggaagaaaggag

SEQ ID NO: 614260 - DNA, 74 bp, Homo sapiens
ccagcccatcctctctaaccaagagatgaaaagatgggccaggagtccagtttctggaaggccaagaatcgaag

SEQ ID NO: 614261 - DNA, 98 bp, Homo sapiens
gaagatgggggatttctacgacccggagcacccgacccctgaagctacttcctcagccgagcccagagcctgtgtggccccgagcacagtgctgttcc

SEQ ID NO: 614262 - DNA, 100 bp, Homo sapiens
gcctccccagctatgtggaactctcttcacctgaaagactatgaagacatcatccctcctgtggagatctactctctgctagcactctgcgcatgcgcca

SEQ ID NO: 614263 - DNA, 100 bp, Homo sapiens
aggatcctcttggagcagaagaagcaggaccgcggggagctgaagctgctgcttttggcgtggggtagagcagcggctgccatgctcttctgtggcttca

SEQ ID NO: 614264 - DNA, 90 bp, Homo sapiens
ctccagaggcctgcacgcggggcgcgggccccgaaggctctccatcgaaggcaacattgtggtagacggaggagaagtccatccccacca

SEQ ID NO: 614265 - DNA, 75 bp, Homo sapiens
agccactgattagcaatttaaagatcctctccaagaccaagttttacaggaaaactccagtgattttcaatcaaa

SEQ ID NO: 614266 - DNA, 82 bp, Homo sapiens
ttcctgctctgaaagctcttcttgaaaaatgcaaagatgtagatgagagaaatgagcctcattacgtcccagacaactacaa

SEQ ID NO: 614267 - DNA, 74 bp, Homo sapiens
aggaatttatggtcgcctttttgaatgaggtacatcaggaacgtctctatcaagaatacaatttcagcaaggct

SEQ ID NO: 614268 - DNA, 75 bp, Homo sapiens
ttctgcagcgccgatggctccgacccgctctggtgcgtatcacggccacctgagctccctgattgacatcagtcc

SEQ ID NO: 614269 - DNA, 100 bp, Homo sapiens
ttgaatggcgactagatgtacaggaatctgtcttgaactatcgtttcgatcctctcggcattgttgatggttttactgccgaggtaggggcaagtggtgc

SEQ ID NO: 614270 - DNA, 100 bp, Homo sapiens
gtcaaaaggggacttgagtcctcagggctgttgactccaaagctgacaagcagactgcctgcgctgctgacttaaggccccaacaccaaacacagaagca

SEQ ID NO: 614271 - DNA, 83 bp, Homo sapiens
cacgactagagggcgggaaagatttgagctacgcctgcgcagaggatcaggattcctgtcatccatctgctggccctttggac

SEQ ID NO: 614272 - DNA, 89 bp, Homo sapiens
cttgaactggaccgtggggaaactaaaaacgcatctatctaacgtttaccctagcaaaccagatacagttgatatattagttggatggc

SEQ ID NO: 614273 - DNA, 82 bp, Homo sapiens
agggaatgctaagaactgctgggaggatgacaatcatgatacatggtgatggcttgcagagtcgtaaacaaaagaagacaca

SEQ ID NO: 614274 - DNA, 100 bp, Homo sapiens
agagtttgcatatatcaactgtggccttaatgagcatgttgacagcatcgatgctagacagacacagatcgaggcggagaagaagccgacgagtgccctg

SEQ ID NO: 614275 - DNA, 75 bp, Homo sapiens
caggctaccaagtccgtgctgtttgtgtgtctggatggagttttaacattgaatgcggagaacactaattatgcc

SEQ ID NO: 614276 - DNA, 97 bp, Homo sapiens
gaaccgctgcttcctggacagtgcctttgtcagacagccgctccgaccgctggtcccagatgccagcaagcagcggctgatggagaacacagaggac

SEQ ID NO: 614277 - DNA, 82 bp, Homo sapiens
ccgttgggtccggccgctctgcgggactctgaggaaaagctcgcaccagcctcccgcgacgatgcccctcaacgttagcttc

SEQ ID NO: 614278 - DNA, 98 bp, Homo sapiens
gtgcttttcgcaagaacaagactctcggctatggagtccccatgttggtatctgcccaaactggaacttatgctgtagacatttctttgtggtttatc

SEQ ID NO: 614279 - DNA, 76 bp, Homo sapiens
cgctatggcgcactggagtaccctgttcctggcatttcacttctccgaaccctgaggcagtgtgtgaagctgggac

SEQ ID NO: 614280 - DNA, 96 bp, Homo sapiens
tggtgctcgattttatactcaattggatgctgctcaaatgagaaatgatgtcatagaggaagaccttgcaaaggttcagcgtcttccatttctttc

SEQ ID NO: 614281 - DNA, 100 bp, Homo sapiens
cgcgggacggctctgtaggaaggaacttggttccccctccctcagcttccgccccaaaaggttctccagcatttggctcaaggccccaagggcacatgtg

SEQ ID NO: 614282 - DNA, 90 bp, Homo sapiens
tggatgactgcagttggtctttcagagatggcagcagaagctgcatatcaaactggtgctgttacactaccaaactgtcagtgaacccgc

SEQ ID NO: 614283 - DNA, 75 bp, Homo sapiens
tgaaccatttcctggacattgggcctatattgcagggtttgatgatatggtggaagagaaacctgatgtcacata

SEQ ID NO: 614284 - DNA, 98 bp, Homo sapiens
cagggcctggtccgtgtccggtcccccaaatctgtcgtccctgcccccaggatccgagggaagggcttcgactggccgctgctggtgaaggacttcaa

SEQ ID NO: 614285 - DNA, 50 bp, Homo sapiens
ggcagctgctgaggctcgggggcggaagcagcagcagcagcagcagcagc

SEQ ID NO: 614286 - DNA, 138 bp, Homo sapiens
cagaaagtgagattaatgaaagaagtcatggaacactatgctgatcaagatgatctggttgtcatgtttactgaatgtaaattcctcatctatgcctgtctgctgctgttctctgtgctgctggcccttcgtttggat

SEQ ID NO: 614287 - DNA, 100 bp, Homo sapiens
gaaagatgtcatgtggatagggttcctcactagaacagttctggaaaatagcacaaggtatgaagaggagatcaacaaacgcacagcagccgagaatgac

SEQ ID NO: 614288 - DNA, 100 bp, Homo sapiens
gtaccgcctgggacggaagatcgggagcgggtccttcggagatatctacctgggactctaaattgccccctctgaggtcaaggaacacaagatggttttg

SEQ ID NO: 614289 - DNA, 50 bp, Homo sapiens
gacactggcctgaatgctgttgttgaggacacagcattgttggttttgcc

SEQ ID NO: 614290 - DNA, 98 bp, Homo sapiens
caggagccgcggccgcggcggcggcggccgggaaggagcggccttgcaggccactcgagccctaatggtggtctccctggtgctgggcttcctggcca

SEQ ID NO: 614291 - DNA, 90 bp, Homo sapiens
gcccggcgcttcggcccgggccgctcaggtgcaggtctgggaccaagtaaaggcttccaaccctgacctaaagttgtgggagattggcaa

SEQ ID NO: 614292 - DNA, 75 bp, Homo sapiens
taatgctaaatttgtgaatgctgtgtatgataccttacttaatactgaatccactgaagacctacatttcccgga

SEQ ID NO: 614293 - DNA, 101 bp, Homo sapiens
acccagcaacacgctcctgacttcccttcccaaggactcgacctgagaaaatcatttgctgtttcaaatagagaactgtgcgatgatgagaaagagttcat

SEQ ID NO: 614294 - DNA, 100 bp, Homo sapiens
cccgaactaagcagggcggtcggggggggcagctggcattttatgctatgtgggagcctatgtcttcatcacttatgatgactatgaccacttctttgaa

SEQ ID NO: 614295 - DNA, 88 bp, Homo sapiens
agtttacacaggcaaactgtcagaaaagagtagcctgggctgtctggaaatctgagtaatagctcttcaagtctgcaataaaaaatgg

SEQ ID NO: 614296 - DNA, 99 bp, Homo sapiens
cctgcaggtattgggagatccacagctaagactccaggaccctctggaagcctagaaatgatgtagccatagctgtaacgtataaccatgatgggtctt

SEQ ID NO: 614297 - DNA, 100 bp, Homo sapiens
gattgctcaatagagagaagttgaaacagcagactaattgcctgtttgtgacacccatgtaatcaacttggatagcagtgagattcacttcaaagtgaaa

SEQ ID NO: 614298 - DNA, 50 bp, Homo sapiens
gtgacatatcactggtccctgcacccagatggagtttcactcttgttgcc

SEQ ID NO: 614299 - DNA, 98 bp, Homo sapiens
ccccctgggcaggctgaaagatggcggcggcgtctgtctctgcggcttctggttctcacttgtcgttgcctttccccatcttcctggttctgctcctt

SEQ ID NO: 614300 - DNA, 98 bp, Homo sapiens
gcggctcccagtgccgcgcgccaagatccattcgttgccgccggaggggaagcttgggatcatgacaaaagcaagccgggaggctggctgcctctcct

SEQ ID NO: 614301 - DNA, 100 bp, Homo sapiens
ctgctacacgcttgatgtggaaatcccagtatgttccatatgatggaatcccatttgttaatgcagaagcccctgaatgtgacagtgatccgcagggggg

SEQ ID NO: 614302 - DNA, 88 bp, Homo sapiens
ttacaccttgtccattcatgagcttgaagaagcaaacagcatgctaaccaaagatattgaaatattaagaagagagaatgaagagcta

SEQ ID NO: 614303 - DNA, 82 bp, Homo sapiens
tggcgcgatgcgtcaagtacactgaaattcatcctgagatgaggaacccaagacagaccaggatgaggagcattgccggaaa

SEQ ID NO: 614304 - DNA, 89 bp, Homo sapiens
cttctgcttccagggaactcaccagtcaccaaggttacaggaaatacaggaggcagaggaacaaataaaagacaccacgagaaacagac

SEQ ID NO: 614305 - DNA, 100 bp, Homo sapiens
tcgtgcagtgtgagcttctcatgctgagagttctgcgcttccaggtctccttccagcatccacacaagaaatcggccctgcctctgtgatggtggggaac

SEQ ID NO: 614306 - DNA, 95 bp, Homo sapiens
atcgatagctatgagaaggacgttgccaagattaaccaggacccccaggtcttggtcttgatgccaagtttgggaaaggagctaagaagacatcc

SEQ ID NO: 614307 - DNA, 80 bp, Homo sapiens
tggagcctcagttggaagcagccgatccagcctgcggagcctgtggggcagtaaaataaaacagggtctgttacctagct

SEQ ID NO: 614308 - DNA, 99 bp, Homo sapiens
accgagagcgtgaccgagagcgcgaatatcgtcatcgttagaagtatttagccttgcaggacctgatgttgctttctcaatattctccttcacgaagac

SEQ ID NO: 614309 - DNA, 60 bp, Homo sapiens
cctggatccaggataacggaggctggagctccatgaacctgcctccagacaaggcccggc

SEQ ID NO: 614310 - DNA, 49 bp, Homo sapiens
ggcagacagcgagtggcgacgatgtgcagctaaatcaagtccagcagct

SEQ ID NO: 614311 - DNA, 91 bp, Homo sapiens
aacatgggtccgtggtcgtttgtttctccaaggtttgaaaagcagctggcctgcaaggtacttggaaaaatggacaaggattgtgaaatga

SEQ ID NO: 614312 - DNA, 114 bp, Homo sapiens
catcaccaacgatgaggcatacgctgaggagtttggcaacgagacgtggggcgtaacaaaggaatcccttggcaccatgtcctgtgtgcattataaattttcctctaaactcaa

SEQ ID NO: 614313 - DNA, 100 bp, Homo sapiens
gcgaacacagtagtggaagatgtaaagcaatatttcgagcagtttggcaagcctggctttcgaaaacatctgggcctgctggagaaaaagaaagattaca

SEQ ID NO: 614314 - DNA, 82 bp, Homo sapiens
tttcatgagcacaggcatcagtcaggcagatgtttgtcgactggaatggtgtcacatttgaagacgagcactgaggatgagg

SEQ ID NO: 614315 - DNA, 51 bp, Homo sapiens
tgtgaaagaaggttgggttcagaagaggggatgaagatgagctggattccc

SEQ ID NO: 614316 - DNA, 98 bp, Homo sapiens
aggaaacatgcctaaattggtttttcaagattgcctccatcagggaactcattccaagatttgatctggtcggatctcacaaggccatccaatgagac

SEQ ID NO: 614317 - DNA, 100 bp, Homo sapiens
aatttccatggctgaattcaacttgctggaccatttactacctgtcattatgggagaaaagggtgccttcaccagggatggaagaggcaggctgcagcag

SEQ ID NO: 614318 - DNA, 90 bp, Homo sapiens
gagaggctgggcctgggcgtgtggagccaggcagtctcgaatcctctcctggtttagggaggggaaggctttcttcgagagtcacccagc

SEQ ID NO: 614319 - DNA, 100 bp, Homo sapiens
ggcgcgcgtgcgcgtgttggaaacgtcagaccgcggctggtggctatgcaggaatcagagatcattgatttcttcctgggggcctctctcaaggatgagg

SEQ ID NO: 614320 - DNA, 75 bp, Homo sapiens
agaccacgcctttgttacctcgagaaacgactggagcagcagaagccgacagtgattgcaacttccactacttcc

SEQ ID NO: 614321 - DNA, 120 bp, Homo sapiens
gagaacatggactcatcttcatggaaacgtctgctaagactgcttccaatgtagaagagatcccagatgcagtgactggttactacctgaaccgtgctggctttgaggcctcagacccac

SEQ ID NO: 614322 - DNA, 96 bp, Homo sapiens
tggagctgaaggatagacaaaaattcctttccctaaggatgtacagttacccagcacgtgtacctcctcctcctcctattgctcgggctgtagtgc

SEQ ID NO: 614323 - DNA, 100 bp, Homo sapiens
tgtctttcctaccatctaaaatacgaaggtttctggctgggatacagttgatatattagttggatggcatatagatcatactcagaaaccttcgctcacg

SEQ ID NO: 614324 - DNA, 75 bp, Homo sapiens
gatgtagatgataaaatcatcaaaagagccaatgagagacggtaaagaacaggtccaagaaaagctcaaagaaag

SEQ ID NO: 614325 - DNA, 75 bp, Homo sapiens
tctgcaaagacctacgctccttcatctaatccatggaaagacttgggaagatccccatgaaaaagataagagcac

SEQ ID NO: 614326 - DNA, 83 bp, Homo sapiens
ctcggagcctttgtcgttgtgcacagtttcactgttacatgccttgaagtgatgaggaggtttctgttactatatgctacaca

SEQ ID NO: 614327 - DNA, 99 bp, Homo sapiens
cgctccaagctccctgcggggaagaacgtgctactgctgggtgatactgtgcttgtccaccgagttcacagttatttagagcgtcatggtcttatcaac

SEQ ID NO: 614328 - DNA, 100 bp, Homo sapiens
gaatgtgtttttcgttgctcacagctatggaggacttgcttttgttgaactgcttggaactgcagttggctttttgctaccaccagttttagtacccaac

SEQ ID NO: 614329 - DNA, 96 bp, Homo sapiens
agattgaattaccagctgcgcctaagtcaactaaacccagcctttccgaaagagacatcgcaatggctaccatgctggagtgcagtggcacgatct

SEQ ID NO: 614330 - DNA, 90 bp, Homo sapiens
agcttacagagggcaatgaatgcagccaacctgaatatacctccttcagataccagtgacagagagtcgagggattgtggatagcctgca

SEQ ID NO: 614331 - DNA, 100 bp, Homo sapiens
cccactggctgctggagcttgtcaccaccaggggatctgccaggagagcccagcaagatgacagcctcgtccagcaacccagacctgctgggaggatggg

SEQ ID NO: 614332 - DNA, 78 bp, Homo sapiens
aaaacatcaaattcttgaccaatctaggacatttctcttgggaagttgtgcatctgacaggaatatagtactgtacga

SEQ ID NO: 614333 - DNA, 75 bp, Homo sapiens
gagatgaagaagaagattaacctggagttaaggaacagatccccggaggagcggagctggagtttgttcagatca

SEQ ID NO: 614334 - DNA, 100 bp, Homo sapiens
tcccttgcatgatggaaacaccatggctgcggcggcccagctctctctgacacagatattaataaggcagcggaaagaagaaatatgaatacggctccat

SEQ ID NO: 614335 - DNA, 83 bp, Homo sapiens
ctcacctgcagcagcccagctttctactgtgctgttccctcgtcacaccaatgccagtgctcgagacaacaccatcaacctga

SEQ ID NO: 614336 - DNA, 94 bp, Homo sapiens
gggcccaggccccggcagcgcctgggacaaggacaggaagataatatgacctcagtaacaaaccacttttctcaatcaaagctggactccccag

SEQ ID NO: 614337 - DNA, 50 bp, Homo sapiens
gaaaactacaggcggggacggcttctcgctcctccatttacaacctacaa

SEQ ID NO: 614338 - DNA, 51 bp, Homo sapiens
gtgaaggggccgaagaaggttgagaagctcctgacccctgaggattaccag

SEQ ID NO: 614339 - DNA, 155 bp, Homo sapiens
cgcctccgcctctgcgtcctcaacgagatcttgggcaccgagagggactacgtgggcaccttgcgcttcttgcagtcgattgccacggcagtgaagtttctacagaattcccgggtccgccagagcccacttgcaaccaggagagcattcctaaa

SEQ ID NO: 614340 - DNA, 88 bp, Homo sapiens
tgagattatgcctgaggttgtggaaaaggaagattactcagagattatagggagcatggaaatgtccaatcagggaagtaagtacgtc

SEQ ID NO: 614341 - DNA, 75 bp, Homo sapiens
gattcatctttcatgcagtgacatgttgataaaaaatgatggatgatcccgtccaccagtcagaccttcctggtg

SEQ ID NO: 614342 - DNA, 83 bp, Homo sapiens
cctggtcctgctcggggctctgttcccaggctcggacatcatcatgcagctggacgacgtggttagcagtactgtgactgggc

SEQ ID NO: 614343 - DNA, 75 bp, Homo sapiens
gggcggcccctggagatgattgagccgcgcacgctacagtacaaggtctgtccagggttttggtggctggcgaag

SEQ ID NO: 614344 - DNA, 80 bp, Homo sapiens
cctggaccgagttccacaagaaggactgcggggacctggtggccatcgatgggggctccggaggtggcgcccaggctctg

SEQ ID NO: 614345 - DNA, 74 bp, Homo sapiens
ctgggctccagtgcgggaatcacacacatacctcagagactaggcattgaaaagactgaccctaccacactgac

SEQ ID NO: 614346 - DNA, 100 bp, Homo sapiens
gcgggctgccggctgtgcgggcgctccggagagaccgacagaagtgtttctgaaagatctatccagcactccgatggccagcaacaacaccgccagcata

SEQ ID NO: 614347 - DNA, 83 bp, Homo sapiens
ctttgagaagcgcttcgtacccagccagcactatgtggctacagtttcagaaaagtcacgtataatggaactggagaaagacc

SEQ ID NO: 614348 - DNA, 100 bp, Homo sapiens
ggattatccggagccaaggtccgctcggaagttccacctggtgccaagcatcaacaccatgagtggcagtcaggagctgcagtggatggtacagcctcat

SEQ ID NO: 614349 - DNA, 100 bp, Homo sapiens
cagctccgaaatcaccaccaaggcgatcagtgggtgaccgcggctgcgagggactttgtcatccgtcctccaggatctggggagaaagagccccatccct

SEQ ID NO: 614350 - DNA, 100 bp, Homo sapiens
tcgatgtcaagtggctcaacgagaacgccgtggagaaggtgaacatcaagccgcagttggtggaccaactgggtgatccctgccatctctgcagtggccg

SEQ ID NO: 614351 - DNA, 75 bp, Homo sapiens
atcgtgtgcctgatgatcacgcagctggctggcttcagtggaccatgtctgctgcacagagctttacatccccgg

SEQ ID NO: 614352 - DNA, 100 bp, Homo sapiens
cagggagacaccgattataagaagagaaactcagcgctggggaagaaggcaaccattgggattgacttcttgtcaaaaaccatgtacttggaggaccgca

SEQ ID NO: 614353 - DNA, 82 bp, Homo sapiens
catcactcccgagtggaggaagcaatacatccagtatgaggtcatgcaagacaagataatctgccttccgaaaagagtgcag

SEQ ID NO: 614354 - DNA, 82 bp, Homo sapiens
ctgtgagttcaacatgatagagcagagtggaccaccccatgaacctcggttgcccccaagtttcctggcagtgtgtgatact

SEQ ID NO: 614355 - DNA, 120 bp, Homo sapiens
ccaccagcgctgggacgcggcggcagcggcggcggcggcggccctccggtgctggagaatctggtaaaagcaccattgtgaagcagatgaggatcctgcatgttaatgggtttaatggag

SEQ ID NO: 614356 - DNA, 100 bp, Homo sapiens
cgaaaagggcctgatgtctgctttgataacaatgtcttgcaagatgagaagatgaagtgaatttatggattctggtttttctgaattttcaaagcataag

SEQ ID NO: 614357 - DNA, 100 bp, Homo sapiens
aggagggaaagatggtgcccaccacatggaggccagcctaggtcttgtatgaaacctgtgagtacaaatggtgatgatcatcaggtcaaggatagtctgg

SEQ ID NO: 614358 - DNA, 100 bp, Homo sapiens
cagggagcctggtggggtggcggagggggagactgtgccgtggagggcctcgccatgtcctgctgcccgattttactatgagcagcgattactacggaag

SEQ ID NO: 614359 - DNA, 97 bp, Homo sapiens
ggtagagattggcttcgggctgagctagcagtgagcaccttttggcccaatgaatatcaggaggcggcgacggcggcggcggggggagaggaagaga

SEQ ID NO: 614360 - DNA, 83 bp, Homo sapiens
gtgaccgtggtggcttcaataaatttggtggtcaaaatgcagatcttcgtgaaaacccttaccggcaagaccatcacccttga

SEQ ID NO: 614361 - DNA, 50 bp, Homo sapiens
aaataaacagaaccattcttatcctggagagattaaacagattctagaaa

SEQ ID NO: 614362 - DNA, 100 bp, Homo sapiens
acagattggattgctatttaccagaggaaggtttcccaggcagctgcagacttgaaacagttctgtctgcagaatgctcaacatgaccctctgctgactg

SEQ ID NO: 614363 - DNA, 90 bp, Homo sapiens
gtgatgttgtcagaaacattccaaatggtttacaagaatttttagaccctctgtgccagagagtcctcctccatcaaagaaaatgaagtt

SEQ ID NO: 614364 - DNA, 100 bp, Homo sapiens
gtcaggcccgggaaccccgagaggagagcccagcccctggtggaggcggcttggcggagattcggagccgtcagcaggctggagtgcagtggcgcgatct

SEQ ID NO: 614365 - DNA, 90 bp, Homo sapiens
gtcacagcagcattgaactgtgtggggaagggcatggacaagaagaaggcagccggcatctcgtccccggtgaagaagacagagatggac

SEQ ID NO: 614366 - DNA, 83 bp, Homo sapiens
ggcaccgggagatccgtagctcagacgccaggacatcccggaagctgggaaatgacaatgcagatcttcgtgaagactctgac

SEQ ID NO: 614367 - DNA, 152 bp, Homo sapiens
caagtaaagaagaggcaaccacgttctccaatgcaatgctgtttgccctgaacatcatgaattcccaagaaggagcaagaccactgatgcagaccctgcctttaagaaccacggtcaacaatggcactgtgttaccaaagaaacctactggc

SEQ ID NO: 614368 - DNA, 75 bp, Homo sapiens
aggagctgatgaagagagagcagagacagctcgtctggtggtctgtttttctggggggccaccaacacctcccgt

SEQ ID NO: 614369 - DNA, 50 bp, Homo sapiens
gatctggggatcttcgcactatcccaaggagtggagtcaacatatcaatg

SEQ ID NO: 614370 - DNA, 99 bp, Homo sapiens
tgctagacaggcgcgtggttaagggacaagtggaatatctactgaagtggaaaggcttttctgagcagaagcttcatgaggcagatctggagttgcaga

SEQ ID NO: 614371 - DNA, 75 bp, Homo sapiens
gcagattatatttctagggacaaacctatcacatttactcaggataaaagaatcagagtgtctcaacccttgaca

SEQ ID NO: 614372 - DNA, 90 bp, Homo sapiens
gccaacccaaattaccttaattgatgccttccgcgccttccaccctgacctggaattcgtgggcaagttcttgaaacccctgctgattgg

SEQ ID NO: 614373 - DNA, 75 bp, Homo sapiens
ctacaccatcaaggaggaaggcctggttcttcaagggctctggaacttcatccattctctatgaaacctcttctg

SEQ ID NO: 614374 - DNA, 75 bp, Homo sapiens
atgtgcctccaggttatatctcacagcatcaacaacagcaacttgtgattggcggtgaccggatattcagttgca

SEQ ID NO: 614375 - DNA, 75 bp, Homo sapiens
cgcccttggagtaccgttcgggacagtcattttgtttactcattcagccctgttgcaggtcccaataaactcttc

SEQ ID NO: 614376 - DNA, 75 bp, Homo sapiens
accctgactaaagcttgaaatgctacatttccaagcatggcggacaccgacctgttcatggaatgtgaggaggag

SEQ ID NO: 614377 - DNA, 100 bp, Homo sapiens
ctaaagaactccctcaagtttcatttgtgaaggtgcaatgaagggcgtgttggtagacattgtgaatgcagcacagatgaagttaacagtgaagacatgg

SEQ ID NO: 614378 - DNA, 83 bp, Homo sapiens
gctttcgccaaagagcttttcctaggcaaaatcaagaagatatttggagtctgggagtgatccttttcatgttggtgtgtggg

SEQ ID NO: 614379 - DNA, 99 bp, Homo sapiens
gattgcagccgagaacgagctcaaccaggtctccagtccccagatttctgtgcatcctctctcatgcaaagaaggctggaagacaaacttgtgaagcta

SEQ ID NO: 614380 - DNA, 101 bp, Homo sapiens
cctcgccaaggcaaccacagccccagccaccacccgtaacacagttgccaccttccagagaagaggtacgagatgacaagacaaccataaagtgtgaaacc

SEQ ID NO: 614381 - DNA, 112 bp, Homo sapiens
ttcttggcaactggaggtcaaggcgaatatttaacttatatctgcctgtcaggtgctggagaatctggtaaaagcaccattgtgaagcagatgaggatcctgcatgttaatg

SEQ ID NO: 614382 - DNA, 90 bp, Homo sapiens
gtgaaatgaaccgtggcaatttcttagagatcaagaataaatttctagctcgaaggtttaaggatgtgaagtgatagctgtgaatacccg

SEQ ID NO: 614383 - DNA, 101 bp, Homo sapiens
ccactggagctcttccgtggcattagtagtcagcccttccctgaactacactgtgctgccttaaaagtgtttacgaatccagactccaaaatgatgcaaat

SEQ ID NO: 614384 - DNA, 83 bp, Homo sapiens
agaaaattgaacttttgtgccaggaccaggatttacttcatttgggtcactaggtcacgggggcctcacttcattctcttcca

SEQ ID NO: 614385 - DNA, 101 bp, Homo sapiens
gtggaataggtgtatcaagtaatggtgcaaagcctgaatctgatgaccgggattccaagcgggattcccttgaggagggggagctgagagatcactgcatg

SEQ ID NO: 614386 - DNA, 50 bp, Homo sapiens
cgggcggccgtgcgcgaggcgaggtctcctctgagcctccggcctccata

SEQ ID NO: 614387 - DNA, 90 bp, Homo sapiens
gatgatgatgctgaccagtttcctgacggtgtgttgaggctcctggaacacggggaggagtacgtattcaccctgcctagtgcctacgcc

SEQ ID NO: 614388 - DNA, 100 bp, Homo sapiens
caggcccgccagctcatcctgcagtatggcttgaccctcagtgatctggatcgacacccagaggcactgcctccttacctgtgaggaatgcaaaataaag

SEQ ID NO: 614389 - DNA, 101 bp, Homo sapiens
catttctccactggaagagaacgtctccgagtccctcaactctctacgctttgcctccaaggtgggagagttcagagcacacgctgctgagtggacagcca

SEQ ID NO: 614390 - DNA, 75 bp, Homo sapiens
acacactgaaacagaagaagcttgaggaaatgactcggactgaacaagagggacaaatccttcagaaagatcagg

SEQ ID NO: 614391 - DNA, 100 bp, Homo sapiens
gtccctgtgacctgtggagacacggccagatctgccctccagcataagatgcacatttttctgctctggagccgggaatgaaatattcttgagttcttac

SEQ ID NO: 614392 - DNA, 100 bp, Homo sapiens
cgacggcggaacccgtgggcctgtggactgcagcctcggcggtcagcaggatttggagttccatggagtgatgagattttattttcaagataaagctgct

SEQ ID NO: 614393 - DNA, 100 bp, Homo sapiens
agaagctgtctgaggatccctatggcatcttctgcctcgtcctgacacccaccagccggagcggttgcagggcacacattactcggtgcagtcggacatc

SEQ ID NO: 614394 - DNA, 90 bp, Homo sapiens
agctctgcgtctgcggtcaccaccaagacaatgcagatcttcgtgaagactctgactggtaagaccatcaccctcgaggttgagcccagt

SEQ ID NO: 614395 - DNA, 98 bp, Homo sapiens
gtgagaagctaagtgaaggagacttactggcagagatagaaactgacaaagccactataggggccttggacaagttgttactgactatgttcatgggg

SEQ ID NO: 614396 - DNA, 78 bp, Homo sapiens
ctgttgctgccgtctcgactcgtggatgggagaggaggtgggcaggaggaacggccctttgtggcccggtttggattt

SEQ ID NO: 614397 - DNA, 73 bp, Homo sapiens
aatatgatgtggaagcacatgaaagtgacttcagtgatgattttagtgatgattttgtagaaactcggcgaag

SEQ ID NO: 614398 - DNA, 128 bp, Homo sapiens
tgtgccgcaacatggacgcgctcagcgagtgggactggatggagttcggtttttcgttggaatatacgttgcacatttatggcgattctgagtgtgagggcagacttctgccaggctcagcacagcat

SEQ ID NO: 614399 - DNA, 100 bp, Homo sapiens
cctcccgccgcgccaccgccccggctttctgcaaatccaccttatggaagccggataaggaaacacttcaagttgaagaagatgatcgacctgagttacc

SEQ ID NO: 614400 - DNA, 75 bp, Homo sapiens
atttgttaaggattccaagtaactcttatttgctcatggatttacagtcgcactttggcaccgatgacagattcc

SEQ ID NO: 614401 - DNA, 90 bp, Homo sapiens
cagcctcaggcgtgcgcggacggtgtgcgggaaagaccacagcaagattctttcattcgtctcctcctagcctgggggaccaggctcgaa

SEQ ID NO: 614402 - DNA, 100 bp, Homo sapiens
ttgaagcctgggcaggtggtgtacaagtgccccaaatgctgcagcatcaagcccgaccgagcccaccactgcagtgaacttgaagatgatttacttggag

SEQ ID NO: 614403 - DNA, 144 bp, Homo sapiens
cagcaatgaaatcctgctttcttttcctcagaactactatattcagtggctaaatggctccctgattcatgatgccatggacaatattaccaggcagaaccaattctacgatacccaagtcatcaaacaagaaaacgagtcagg

SEQ ID NO: 614404 - DNA, 100 bp, Homo sapiens
agatggttcccagcctcatttagtgaacatccaattcagggctggggagcagaataccaccgccaggatgttactagcaccccctgctggattgagatac

SEQ ID NO: 614405 - DNA, 100 bp, Homo sapiens
cagtatcaagggtccggggcaatcgaatgaataatcaaaagtttccttgcttcccatcgacggtcagtgcgcacgttgtaatcagctgaggccatgtcag

SEQ ID NO: 614406 - DNA, 100 bp, Homo sapiens
gcgtagcccgagtcggtcagcgccggagtttaccaagtactggacagaatcaaatggggtggaatctaaatcattaactccagccttatgcagaacacct

SEQ ID NO: 614407 - DNA, 75 bp, Homo sapiens
gtgttactgctattgtggaggccctggagagacagtcattttgtttactcattcagccctgttgcaggtcccaat

SEQ ID NO: 614408 - DNA, 100 bp, Homo sapiens
tttttatgaaatgaaagctcctttggtttgtctaccagtttttgtctccagagacccaccatatcacaaccctgaaaattgatcagaaacctttgccaac

SEQ ID NO: 614409 - DNA, 82 bp, Homo sapiens
ggcgagcgcgagcggcgcgagaaagtggtgatgatgtccagcaactctgtgaagcaggagaagaggagtttttggaaatcat

SEQ ID NO: 614410 - DNA, 101 bp, Homo sapiens
aagagcctagcacctcttatactgatgtatcattgcccagtgcctaagatcttttatgttcagctcactgtaggaaataatgaattttttggggaaggaaa

SEQ ID NO: 614411 - DNA, 98 bp, Homo sapiens
acgggttcaactgcgcagaatctaccaacttcgccaccctgcggtggattgactacggcaaagtggccactcagataatgagcctgtcccacagcccc

SEQ ID NO: 614412 - DNA, 82 bp, Homo sapiens
ggccagggaaccctggtcaccgtctcctcagatgatcaagcggtgctgattcacgagagtggaagcctccagagcttggggc

SEQ ID NO: 614413 - DNA, 82 bp, Homo sapiens
cagaccctggagcctcagttggaagcagccgatccagcctgcggagcctgtggggcagtactatatgtctgcgcgccacatg

SEQ ID NO: 614414 - DNA, 75 bp, Homo sapiens
ggcgctggacttcttggctggatgcgcggggggtggccaggagccccctgaaggagttcgacaaggagaaagcct

SEQ ID NO: 614415 - DNA, 82 bp, Homo sapiens
ggaggatctgccagggagcaaacctgagcctgatgccatttctggtggcaaagaaacacagcatgatgtttggaaatataat

SEQ ID NO: 614416 - DNA, 100 bp, Homo sapiens
cttagatctcattccattcgatggggatctcttatccatggaatcagagggtgcattcaaaatttaatccagagactgacttcactatagaacccacagt

SEQ ID NO: 614417 - DNA, 100 bp, Homo sapiens
tgacaaggcactggatgatgcaatcaaagctcgacttctcaatcccaagtggccaaagatttgcttgtaaatgcatcacgaagaggcagcccagaatgaa

SEQ ID NO: 614418 - DNA, 83 bp, Homo sapiens
cctcgagcctaaggcgctctcaggtccataaatctcctttacagacaataggtgaagaacaaacccagaatccctacactgaa

SEQ ID NO: 614419 - DNA, 103 bp, Homo sapiens
gtgcgcaaacttgacactcaccctgaccggctggacgtaaagaaagaagtgatgcactcaattctgcaatagataaaatgaccaagaagaccagggacttgcg

SEQ ID NO: 614420 - DNA, 83 bp, Homo sapiens
gatggccagctttcccccgagggtcaacgagaaagagatcgtctcaaaccatgaattatgtgggacagctggctgggcaggtg

SEQ ID NO: 614421 - DNA, 100 bp, Homo sapiens
tcctcctaccccggcaccatcttctcctgcgacgacttctacatcctgggcagtgggctgatgttggagtccggggtgacctggtctcagtgaagaaatc

SEQ ID NO: 614422 - DNA, 90 bp, Homo sapiens
gaagatagtgcctttcagccctaccagaatgaggattatcgaaagtaattcctcgaagattcaatctcaaatagatcacatcaagcagtg

SEQ ID NO: 614423 - DNA, 75 bp, Homo sapiens
acccccggcaacccggagaaggtctacagagcggcctgcgccagcgagtcaccaaaaacagtggcatcatccctg

SEQ ID NO: 614424 - DNA, 83 bp, Homo sapiens
ttgttggcctttcaggaagagtgcttaaggtggatggagagagaaagaaaaagccagagaggagagctggggtccacctcgag

SEQ ID NO: 614425 - DNA, 74 bp, Homo sapiens
gatattgtggaacggtgaaaagaaatctgttgcttcttgcatggaatctttagaacacgatgttcttgatgata

SEQ ID NO: 614426 - DNA, 97 bp, Homo sapiens
cgtagatacaaatttttggatgatgatggatccatttctcctattgaggagtcaacgccatccatttacctgctgaaacaatgagaatagtgctgga

SEQ ID NO: 614427 - DNA, 99 bp, Homo sapiens
ggagtgaaccggagaccccgaaaacggaagcgcagggagaaggaagaggtgtttgaaaagaagatgggtgtgaacctgacacgcagcaacaaggagacg

SEQ ID NO: 614428 - DNA, 95 bp, Homo sapiens
agccactactacacgaccatccaggacctgcgggacaagaaaaatgtccattccacaaggtttgtgacatatttctgtgagcaggttctccctaa

SEQ ID NO: 614429 - DNA, 83 bp, Homo sapiens
cccaaatcccggaaactccagcgtgtctccagccgtgacatcaacgagtgtgcaacaccgtcgaaagtgtcatgcggaaaatt

SEQ ID NO: 614430 - DNA, 100 bp, Homo sapiens
aagatgtggatctggtgtgcatcagcatcccccctccactcacccggcagatatccgtgaaggctctagaatgattacggacctgaagccaaagaacaag

SEQ ID NO: 614431 - DNA, 89 bp, Homo sapiens
cgggtccttgcggcgaataggagtctggtcaggcgtcaggctagtccgacgaagagtggattgcaggcctaagtctacctcttcctccc

SEQ ID NO: 614432 - DNA, 75 bp, Homo sapiens
cataagggatgagcaatacaccgctttatcaaatatgcctaagcgttctgccctaggtccaaatgttaccaaaat

SEQ ID NO: 614433 - DNA, 83 bp, Homo sapiens
cttcgagctgattcagcgcatcggcagcggcacctacggcgacgtctacaagcaaggtggcggtgcaggccgtgcaggccatg

SEQ ID NO: 614434 - DNA, 75 bp, Homo sapiens
ctatgtggcagatatcgaggtggatggaaagcagctctggtagctgaagaacatctcacagtggacgccagggtc

SEQ ID NO: 614435 - DNA, 98 bp, Homo sapiens
ctgaacttaaaaagcagtctaaacctgtgaccacccctgaagaaattgcacagccagttctggtgactcagtccgcagctatagttccagtaagaact

SEQ ID NO: 614436 - DNA, 74 bp, Homo sapiens
gatcagcaaacttgctgtaaagagccaggtgctggagaatgccgaaggtgccagaaccaccccttcagttgtgg

SEQ ID NO: 614437 - DNA, 100 bp, Homo sapiens
gcatgaccagctccggcacgggggcctctcgtccgatgctcaggagagcttggaagaaggccagggatgtaccgcctacgacgtagctgtcaacagcgac

SEQ ID NO: 614438 - DNA, 100 bp, Homo sapiens
cggagtctgcccatcttccaagcgcgggggcaactgttggcccagctccgaaacctggacaacgcggtcctcatcggtcacggtctagatcacattctcg

SEQ ID NO: 614439 - DNA, 83 bp, Homo sapiens
cgccagcggccgagcgggcggcttcctggcctgggcgctccggtggcggcggagggaagcccgtcagcctgagctacagatgc

SEQ ID NO: 614440 - DNA, 90 bp, Homo sapiens
tcagagaaaggagacctcattccaagttccaggattaattctggcttctccagggaaagtgaccgaggcagtgaaagaggccattgacgc

SEQ ID NO: 614441 - DNA, 100 bp, Homo sapiens
aagccatgcccctcaggctggaacttgccctgtctcctcgcagatgaggccggagcctcaacagaaagctcctttagttcctcctcctccaccgccacca

SEQ ID NO: 614442 - DNA, 100 bp, Homo sapiens
atggttctccattgtgatgaaagcacatggtacagtctcacagaaagttctccgctcccagacatgggtccctcggcttcctgcctcggaagcgcagcag

SEQ ID NO: 614443 - DNA, 83 bp, Homo sapiens
gccaagctgatccgacagagaaaggaatcaagagagacccggccaaggcttttgtgcccaggactgttatgattgggggcaag

SEQ ID NO: 614444 - DNA, 100 bp, Homo sapiens
gcattccatcctgaagaaatccgtccactccgtggctgtgataggagccccgttctcacaagggcagattccagactccatcatttctcgtggtgttcag

SEQ ID NO: 614445 - DNA, 75 bp, Homo sapiens
ggggggaccccggtacggacctgtgcaggtggacccaagtggagagattgtggaactggcgaaaggtgcatgtcc

SEQ ID NO: 614446 - DNA, 75 bp, Homo sapiens
caccacgcagaacgtcaacaccaagtgcatcaccatccccagctctactgagatgaagaaagaaaaagaatacct

SEQ ID NO: 614447 - DNA, 80 bp, Homo sapiens
tggcagacgagcaggacaaggagacggtcagagtccaaggtccgggtatcttaccagagcaagctataccagagaatcag

SEQ ID NO: 614448 - DNA, 110 bp, Homo sapiens
tggcatcgaactcatcatcgaggacgacatcaggcccgagaagcagaagaggaagcctgggaaaggacccaggagcgataacagtaaatcaaataagatatttgtcggtg

SEQ ID NO: 614449 - DNA, 50 bp, Homo sapiens
gatattccaggcccactccagggcagcaaattccggaccccatctgagct

SEQ ID NO: 614450 - DNA, 50 bp, Homo sapiens
cgagaccattccgtatggagagccgggccctcaggaaagcagagagcttg

SEQ ID NO: 614451 - DNA, 100 bp, Homo sapiens
gtgcggtctgggccttttgggcagcttttccggcctgacaacttcatctttgggccccgagcacgacagccgcagtctccacccagaaccagagagtccc

SEQ ID NO: 614452 - DNA, 100 bp, Homo sapiens
caaacagagaacctgttcaggcactgccttcctctgccagccggaaacgtctggacaagtttgctaatccagactttacacaacctatctcagaagttgt

SEQ ID NO: 614453 - DNA, 83 bp, Homo sapiens
ggccgaacagccccgcgggaatgtcgacgaggagctgagggaactctaatgatccaggacaaagaagttaccctggagtatgt

SEQ ID NO: 614454 - DNA, 80 bp, Homo sapiens
cccgggcacggcggaggcagcggagccctgggccatcggctccccgaatgagaaagaatactcggaatcagcggtgaatt

SEQ ID NO: 614455 - DNA, 127 bp, Homo sapiens
cgccattatcctctgtttctctgctgcaccgacctcgacgtcttgcctgtgtcccacttgttcgcggcctatagagacacctatggctgccgatgaaggctcagcagagaaacaggcaggagaggcc

SEQ ID NO: 614456 - DNA, 51 bp, Homo sapiens
atcagaactctctttatctctcctacagctgacaagctctctactgatgat

SEQ ID NO: 614457 - DNA, 82 bp, Homo sapiens
ccgcgcgcagggcctgcagcgggagctggacggcgagcgcgagcggcgcgagaaagctcgggacgtgtacgaggaggccatc

SEQ ID NO: 614458 - DNA, 75 bp, Homo sapiens
ctggtcactagcggactcttcttcgccttcgagatgaccagtgtcccagtgaaggaacgagtgaaggtgtctcag

SEQ ID NO: 614459 - DNA, 51 bp, Homo sapiens
taaagattttccagctgctctaaaggtggacctctccaaggacattcagca

SEQ ID NO: 614460 - DNA, 100 bp, Homo sapiens
ctggtggaacagcctcggccaccaagatggagtcatcagaacccactgtgaggaagtgacttctccttgaggtcacccagacactccaaacagagcagag

SEQ ID NO: 614461 - DNA, 83 bp, Homo sapiens
tttgtcacctgaactacttcacattttccccaatatatggagcagatcccctggtggagaactttgagcctctctatgacctg

SEQ ID NO: 614462 - DNA, 75 bp, Homo sapiens
atcgtctccacccacctggacactcgtaatgtggcctttgagagtgaggactcagaagacaaagatgtgaagacc

SEQ ID NO: 614463 - DNA, 87 bp, Homo sapiens
ctgggcctcccggtccgcaagcaggtcaaaatgcagatcttcgtgaaaacccttaccggcaagaccatcacccttgaggtggagccc

SEQ ID NO: 614464 - DNA, 83 bp, Homo sapiens
ctacacctctccattactctgtccagacaatgcagatcttcgtgaagactctgactggtaagaccatcaccctcgaggttgag

SEQ ID NO: 614465 - DNA, 100 bp, Homo sapiens
tacggaggtggcagccatctccttctcgccataccggctctgcagcccatagtccacgacctctttgtattaagaggaacaaataaagctgatgcaggaa

SEQ ID NO: 614466 - DNA, 100 bp, Homo sapiens
cacctccaagcccagattcagattcgagtcatgtacacaacccagggtggaggagaggcctggaaccgggaaccgaatatacaatttatgtcattgccct

SEQ ID NO: 614467 - DNA, 82 bp, Homo sapiens
ccgcaacccggtgttcccgcgctttatcaagattatcgagagtactcctgattgtgacatcacattcatcccctgggcgatg

SEQ ID NO: 614468 - DNA, 88 bp, Homo sapiens
tcaatattctcacaaataaacatggtgcttggggagcagtttctcatagcactgccagtgaaagatgtagaagataaacctgaacaac

SEQ ID NO: 614469 - DNA, 119 bp, Homo sapiens
ccgctgtccccaccactgcagccatgatctccttaacggacacgcagaacaaatcttcctattttcaagctgaaagaatctactgttagaagaagatacagtgactttgaatggctgcg

SEQ ID NO: 614470 - DNA, 78 bp, Homo sapiens
aatttatccgtgtgcagccccaaactggaaagaagatgctaattaaagtgaagcatgccaatgaagatgtggaaagaa

SEQ ID NO: 614471 - DNA, 101 bp, Homo sapiens
gtccatccgcgtgtgccgcgatgtagccacccggcgctcgctgggctacgcctacatcaacttccagcagcccgcggacgcacccccccaggcagcagcag

SEQ ID NO: 614472 - DNA, 100 bp, Homo sapiens
tctggcaactggaaaatcatccgatcggaaaacttcgaggaattgctcaaagtgctgggccttggacaagattcgctatgagagcctgacagacccttcg

SEQ ID NO: 614473 - DNA, 90 bp, Homo sapiens
acaaagacaaggtcatttcactgcctgagctgaagggctgcctgggtgttagcaaagaagggaaacagtgcttcttagtcctacgtcagc

SEQ ID NO: 614474 - DNA, 80 bp, Homo sapiens
cgtctcctcctcttgcccgcgcaggcacccctctggctgctcagtcctgcctcaggagagaaatatgagttggagggaag

SEQ ID NO: 614475 - DNA, 75 bp, Homo sapiens
aagcactggatccaaagcatgtctgcaacccagccattttcaggttatgaagacagtatggagtttccagaccat

SEQ ID NO: 614476 - DNA, 83 bp, Homo sapiens
ccactttgctgcactgaccaggggatatgagactttctactcggaatatcctgagtgttgcgtggatgtaaaacccatttcac

SEQ ID NO: 614477 - DNA, 75 bp, Homo sapiens
cgcgtctctctgctgcggcgcggggaccgctgtgctctcgggttggccaacggtccagatgtgctggagacagac

SEQ ID NO: 614478 - DNA, 74 bp, Homo sapiens
cggcgcggcagagtccccgtacgcctacagtaacgcgtgagtgcatctccatccacgttggccaggctggtgtc

SEQ ID NO: 614479 - DNA, 100 bp, Homo sapiens
gagtgtccagacctgctcgatgcttgccaatgcaacggccacagtaaatgcatcaatcagagcatctgtgagaagtgtgagaacctgaccacaggcaagc

SEQ ID NO: 614480 - DNA, 75 bp, Homo sapiens
cagaaaggattgtgacatatcgttggacccagaattgagcatgatgccttcttctgtagagtgggcgctttgcag

SEQ ID NO: 614481 - DNA, 83 bp, Homo sapiens
gccacatttgttttgagctaaatattgaggcggacaaggcaaaatctcagcaagttcggacctctagtacaataaggcgaacc

SEQ ID NO: 614482 - DNA, 100 bp, Homo sapiens
cggcccacagtgggggtgtgcaaacccgagagaactgggtccggcaggttcggctattccaggacgaggagatctacagcgacctgtacctgaccgtatg

SEQ ID NO: 614483 - DNA, 75 bp, Homo sapiens
ggataaggagtgtgagccatctccagtgataggtactccaaagattcaggtttactcacgtcatccagcagagaa

SEQ ID NO: 614484 - DNA, 73 bp, Homo sapiens
agctctgggggtcatcacagagaaggagacccaggtggctttcctcggagacgggtggcatggggagcagcta

SEQ ID NO: 614485 - DNA, 82 bp, Homo sapiens
agctgggcgacgagctgaccctgggagacatcgacgcagcccctgtcaaagggaacaggaagcagtccacggagggtgacgc

SEQ ID NO: 614486 - DNA, 75 bp, Homo sapiens
ccagtcccttgcccagcagttatccgggaaaaacagagaaattgtcgtaaatgaagtcaattttgtgagaaaatg

SEQ ID NO: 614487 - DNA, 85 bp, Homo sapiens
gccgagatgccgggggagcggggccttccacaccccctccgtgggtgtgtggaagcaatgaggctccccaagaacacacctgagg

SEQ ID NO: 614488 - DNA, 99 bp, Homo sapiens
ccacgacctgcagcgcttccttagcgatttccgagacgtggatgacgatggggaagatgtccatcctgtgcagggtgcagacactgtccagctggacgt

SEQ ID NO: 614489 - DNA, 76 bp, Homo sapiens
ccaggctttctgctcagcctaccacgctaccctccccctgctaagccacacccagattgctcagctacctctgaaa

SEQ ID NO: 614490 - DNA, 97 bp, Homo sapiens
gcactcctggaccaagagctctttgactgtcggaaaaggtaacagaagatggaactcgaaatcccaatgaaaaacctacccagcaaagaagcatagc

SEQ ID NO: 614491 - DNA, 82 bp, Homo sapiens
ccgacttcgactcttggggccagctggtggaggcgatagacgagtatcagatagcttactcacatagcatattggtatatca

SEQ ID NO: 614492 - DNA, 100 bp, Homo sapiens
ggatctttacctttccccagtggcccagagccaggagttctctggccgctctctggacaggtcagccccagttgatgctgacagcaggacccagtgttgc

SEQ ID NO: 614493 - DNA, 80 bp, Homo sapiens
ttaagtatctccgctacttcactcgcactatccttgatgctaggtttacccaaggtccagcctagcccctaggcaccatg

SEQ ID NO: 614494 - DNA, 82 bp, Homo sapiens
gccgcgggcggcgcggcccagctcgttccagctcaccatggatgatgatatcgccgcgctcgtcgtcgacaacggctccggc

SEQ ID NO: 614495 - DNA, 50 bp, Homo sapiens
ccgccaccacccactccggacacagcttccgccctgcgctgccagtctcc

SEQ ID NO: 614496 - DNA, 90 bp, Homo sapiens
ctggtgcatattcggcctcttactactggttatgaagacagtatggagtttccagaccatagtagacatttgctacagtgtctgagcgag

SEQ ID NO: 614497 - DNA, 75 bp, Homo sapiens
cgacgaccgcccgacgtgcattcccgattcttcgctgctgctgccttaccgccgagaaccaccacccgccaggcg

SEQ ID NO: 614498 - DNA, 75 bp, Homo sapiens
attggtggaacttgttggaaatggaacatacgggcaagtttataagtctattgcgtctgcagacatggatttcaa

SEQ ID NO: 614499 - DNA, 75 bp, Homo sapiens
catacacaagtgtgcattaatggggttcaaaccttgtactactcagctgatcacaagctgcttgatgggaaccta

SEQ ID NO: 614500 - DNA, 100 bp, Homo sapiens
ctcggaaaatggttcccactgccgggcgagagcgcatcagcgaggaggtggggctgctgcagctccttggggaccccccgccccagcaggtcacccagac

SEQ ID NO: 614501 - DNA, 112 bp, Homo sapiens
ctcgcccggttttaacaacctggatcttcgaacttttgacacggctttggaaacgacgtcatgtgttaggttgtaccagtcagttaagctgctgtactccatcgggatcttt

SEQ ID NO: 614502 - DNA, 147 bp, Homo sapiens
attttcagcctttgagaaacatcaatactataatcttaaggacttggtggacatcacaaagcaacctgtggttatcaatactctggctgaccatcatcatcgtgggactgactttggtggaagtccttggttacatgtcattattgc

SEQ ID NO: 614503 - DNA, 100 bp, Homo sapiens
agatttaacattccaacacataaaaattatttatccaacagctcctcccaggaagttgacaaaagtgttgaagaactacgtggacggtgctgagaagccg

SEQ ID NO: 614504 - DNA, 100 bp, Homo sapiens
acttgcttgtgtgctcctggctggcaagtccaagtggtaagaagttcagaagcaagcctcagttggcaaggtacctgggaaatactgttgatctcagcag

SEQ ID NO: 614505 - DNA, 82 bp, Homo sapiens
ccagctgccatgagcgagcgcctccgtcccaggacactcatgaggaccatgatacttccactgagaatacagacgagtccaa

SEQ ID NO: 614506 - DNA, 95 bp, Homo sapiens
cgtggattttaaccgaggcacggacaacatcaccgtgaggcagggggacacagccatcctcagtagccggatcgagctgggagatgtgacaccac

SEQ ID NO: 614507 - DNA, 100 bp, Homo sapiens
ttctcttctgcagaaaaagaggctcttcctcctcctcccgcgacggatagaatttttgcggcatttgaagagctttttccagattatgtttaaaattgaa

SEQ ID NO: 614508 - DNA, 75 bp, Homo sapiens
tgatgaagttcgagcactaatatttaagaaagaagatgttaactttcaggagttgtatcccgcattttgtattca

SEQ ID NO: 614509 - DNA, 95 bp, Homo sapiens
tttagcaggaggagtgtctacagcaccttctgctcctccaggagaagacagactgctgctttggacctgttggtaatgatggcctgagctaaaca

SEQ ID NO: 614510 - DNA, 100 bp, Homo sapiens
actgtacatacttggtgatgagagcttggtttctgatgaatcctcacagtatttaaccagaataactatagggtgagcagggcagcatttccttctccca

SEQ ID NO: 614511 - DNA, 74 bp, Homo sapiens
agagaagatcatcgagcatttcaaacggaatactcccccagttgcaagaggcgcaggaccgtggaagacttcaa

SEQ ID NO: 614512 - DNA, 100 bp, Homo sapiens
cctgctcttacttgtcctgctcctgctgctcgaggacgctggagcccagcaaggaagtgctggactccctggtcagcaatgtcaacattgagctgctcaa

SEQ ID NO: 614513 - DNA, 75 bp, Homo sapiens
aaaaggcctgacatatctgagggagaagcacaagatcatgcacagaggtactccaaagattcaggtttactcacg

SEQ ID NO: 614514 - DNA, 100 bp, Homo sapiens
tacgagcgctgcctgcagctgctgcgacccggaggcatcctcgccgtcctcagaggggtccactggacggggcctgagctacaacttcacccacctggac

SEQ ID NO: 614515 - DNA, 98 bp, Homo sapiens
agcaagtttaatcagacctgctcacacttcagaatagagaagggccaaaacactcattgactcagatctctcaatccatgctggatctctgtgatgaa

SEQ ID NO: 614516 - DNA, 74 bp, Homo sapiens
tgacacctggctccagagcgccagcagccacagccctctcaccctggtactgcatgcacgcaatgctagctgcc

SEQ ID NO: 614517 - DNA, 83 bp, Homo sapiens
gagctgtgcagccgcgaggaggcgcgggaggtgttcgagaacgaccccgagacgggcctacaaagggagacatggaaatcccc

SEQ ID NO: 614518 - DNA, 100 bp, Homo sapiens
tgatagcctgaccctatctcaaagcaagagtaatgagcctcgtcacgtgttcaatatgctaaagaagtatgtccgcgcagaacagaaggacagacagcac

SEQ ID NO: 614519 - DNA, 100 bp, Homo sapiens
ctcggacttcatctcattgctcagcgcggacctagacctggaatcgcccaagtccctctactcgcgagatagcagaccccacgttagctgaaatgggaaa

SEQ ID NO: 614520 - DNA, 76 bp, Homo sapiens
tggagacatccgctaaaacatcaatgaatgtaaatgaaatattcatggcaatagggacggggtttcaccatgttgg

SEQ ID NO: 614521 - DNA, 50 bp, Homo sapiens
cgaccacttcgaagaagtcagcaaggtcctagcttactctgccaccactg

SEQ ID NO: 614522 - DNA, 98 bp, Homo sapiens
agaagctgagcctttctggacagaccaacctgtcagtgctgcaaaattatatccagatcgagagacagaagattctgaaagggttcaatgaaatgaga

SEQ ID NO: 614523 - DNA, 110 bp, Homo sapiens
aataccgggaagccacatgcagccactgcaagagtcaggttccgatgatcgcgctgcagggaccaccaagctcaccgcagagcgcagcctccgcggacccgaggaccgcc

SEQ ID NO: 614524 - DNA, 82 bp, Homo sapiens
ctactgtgcgctcgatccagcaccatggggaagcgggacaatcgggtggtattagaaaactactcggatgctccaatgacac

SEQ ID NO: 614525 - DNA, 98 bp, Homo sapiens
ttggatacacctgtcaagactcaatatgatttcccatcttgcagatgtgtaggactggaagcaaccccaaaattagacgcaacaaaatctggggagga

SEQ ID NO: 614526 - DNA, 75 bp, Homo sapiens
gcctgcccaactccctggactatacgcagacttcagatcccggacgccacgggccaagaccagcttcaagtctcc

SEQ ID NO: 614527 - DNA, 85 bp, Homo sapiens
tgattatagagttcagttgtgtgcaaaaatgatgagaatgaggacccgggaagaaatgaatttctccaagaagcaacgctatttt

SEQ ID NO: 614528 - DNA, 98 bp, Homo sapiens
tgaccgaagccatgctgggtgtgccccagctttaccgcaaccaccgccaccagtccacggagggcatgagggggggccctcagcctcttggccttgaa

SEQ ID NO: 614529 - DNA, 100 bp, Homo sapiens
gaggctggaccagagtcgagttccctcctcctgcaccaaagggagccgccaccgtctggtgtctaaaccgcctcggtactatactggcaattgctggaga

SEQ ID NO: 614530 - DNA, 100 bp, Homo sapiens
cttggagctgtgatcactggagctgtggtcgctgccgtgatgtggaggaggaagagctcagatctctgggggagccatggactctcaattacatccaaac

SEQ ID NO: 614531 - DNA, 73 bp, Homo sapiens
agcaaagcctggaagcttgacgcgcacctgtgcaagcacacgggggagatggcccactgcgtgaccttggttc

SEQ ID NO: 614532 - DNA, 119 bp, Homo sapiens
caccgcggcatcaagcaggtccggacccactggctgctggagcttgtcaccaccagtaagactttgaccccgacgcaggcttcagtgattgccgcggatcagaagcctgagcactttgg

SEQ ID NO: 614533 - DNA, 121 bp, Homo sapiens
gaacaagatgtgaactgtttctcttctgcagaaaaagaggctcttcctcctcctcccgcgacgaggaactgacaccattgattttggcaactcagaagcagttcaattacacacacatctg

SEQ ID NO: 614534 - DNA, 82 bp, Homo sapiens
gctgctgctgctgcccgcgtccgaggctcgcgggcggcgggcccgggtttaactatagatcaacacatcatcttgcatctca

SEQ ID NO: 614535 - DNA, 75 bp, Homo sapiens
cggaggccgagactctctcctggagtcacccaggttcatctgcagaagccagcggacgcctctgttcaacttgtg

SEQ ID NO: 614536 - DNA, 51 bp, Homo sapiens
tccaggcataagaaatttgacgatctgagaacaattggcaagaaattcctc

SEQ ID NO: 614537 - DNA, 98 bp, Homo sapiens
ttttgcctcatcctacaaattttgggatcctgaaactccgccacatctggaacctgaagttgatgcgttggtgaggaggaatgggcccctcgaagtgg

SEQ ID NO: 614538 - DNA, 101 bp, Homo sapiens
gatgtagatgtgagagccacatcaacccacctcacagcacttcattatgcagctaaggtgaccaagaatatggcccaggtgaccaaagccctggacaaggc

SEQ ID NO: 614539 - DNA, 100 bp, Homo sapiens
cccacttgttcgcggcctataggtacttcgtactggatttcgaggctggcatcctgcagtattttgtgaatgagcaaagcaaacaccagaagcctcgagg

SEQ ID NO: 614540 - DNA, 73 bp, Homo sapiens
acagagccatcattcaagaagtttgcttcatgtatccatttgaggccctcttccgcagccagcactacgccct

SEQ ID NO: 614541 - DNA, 75 bp, Homo sapiens
catttccttcgtacccacagtgcttcatgagagactcaaagaccctattggagagcgagcgggaaaggctgtttg

SEQ ID NO: 614542 - DNA, 75 bp, Homo sapiens
gggcctgcgagggttgaagattgtgaagcaatagcctaagacccaacatgagtgaagtttcctgcaagaaacggg

SEQ ID NO: 614543 - DNA, 100 bp, Homo sapiens
ccccagccagacccagggacatggacaggtgcccgatcagatccttcaggctctgctcagcgcagcttggcagaaaaggtgtgagcggtactgggcccag

SEQ ID NO: 614544 - DNA, 50 bp, Homo sapiens
cagggacctcaaggaagcttatgacagtatttgcaaaagatgtattcgga

SEQ ID NO: 614545 - DNA, 100 bp, Homo sapiens
caggcggtgacagagtggagccatggctagaggtcgcgtggggcaggcagtggcgctgcgggccaaggccttcggcttcaacgtgctcttctacgaccct

SEQ ID NO: 614546 - DNA, 50 bp, Homo sapiens
ggagtatagtacggcaaaaaactgtcggagactacctaggtggagaagcg

SEQ ID NO: 614547 - DNA, 134 bp, Homo sapiens
ctctgctctctctatgagaacgactgcatctttgacaagtttgagtgttgctggaacggttcggatagtcaccttcaggccattcagaggaggaaagagaggggaatatgaagtcagccaagccccaagtgaac

SEQ ID NO: 614548 - DNA, 101 bp, Homo sapiens
gatgacaaaaaagccttcatagactatgagaagatgtttggcacgaaatgccatggctgtgacttcaagatcgacgctggggaccgcttcctggaggccct

SEQ ID NO: 614549 - DNA, 148 bp, Homo sapiens
aaaaaccatcgaagaatgaaaccggcttgttgtcttcaattaaaaaatttattaaaggaagcacacctaaggggaagccaaatataggccaagagcagcctgtggatgatgctgcagaagtccctcagagggaaccagagaaggaaag

SEQ ID NO: 614550 - DNA, 95 bp, Homo sapiens
agagcagaagataatgaagctaaatggaaaagagaaatatatggtcgaggtcttccagaaaggtacggggctgatgttgacgtcaaccaccacct

SEQ ID NO: 614551 - DNA, 100 bp, Homo sapiens
ggagatctgcctcaatggaacccctgctctggcctacctggcggaaaaaacccttccctgccaaaggtgactgtgttttctgccgccgaaggagggcccg

SEQ ID NO: 614552 - DNA, 100 bp, Homo sapiens
cattgtagtagaaggattgtatatgaatactggaactatttgtcctcttccagaattggagcgagaacccgagcagcgccatgagcaacactaccgtcgt

SEQ ID NO: 614553 - DNA, 134 bp, Homo sapiens
ccatggtctcctacagtgacacgggttcatccacaggcagccacggcacctccaccaccgtcagctcggccaggctcatggtgataaacaagacaaagtcaagcagaaagcgtttgtggagccgtattttaaag

SEQ ID NO: 614554 - DNA, 98 bp, Homo sapiens
tgatggccatggagaagagcaaggccacgccggccgcgcgcgccagcaagaagatcctgctgcccgagcccagataaacctctcataatgaaggcccc

SEQ ID NO: 614555 - DNA, 97 bp, Homo sapiens
cgggtgccacctcccgggacgctgcccacggcgtccccggtcgcggttattcagcttctcaaggctggaaaagcgaaggaagtttcctacaatgcac

SEQ ID NO: 614556 - DNA, 100 bp, Homo sapiens
ggcgttcttccgctggctcagccgcaagtacccgtccatcatagtcaactgcgtggaagagaaggaatatatatgtcccagatgtgaatcaggctttatt

SEQ ID NO: 614557 - DNA, 90 bp, Homo sapiens
ccgaaccattgctccaaatatccgttgaagcagtgaatggcattactgaggaagctgatcccaccatttactctggcaaagtaattcgcc

SEQ ID NO: 614558 - DNA, 100 bp, Homo sapiens
caggctcatcctgtccatcgtgtgcctgatgatcacgcagctggctggcttcagtggaccatacaaaattggacagctgtacatgatcagcaaacacagc

SEQ ID NO: 614559 - DNA, 90 bp, Homo sapiens
agcgggtaccgggcgcgggcagagcgcggcggcgcgggttgtcacatcttcccaagccaggccagccaggagcgctgcatgcaaattctg

SEQ ID NO: 614560 - DNA, 50 bp, Homo sapiens
ggaaaatggagcccttcaccaatgctctttcagtctcacatggcaacgaa

SEQ ID NO: 614561 - DNA, 98 bp, Homo sapiens
cgggatcgtgaccgagaccgtgaccgagagcgtgaccgagagcgcgaatatcgtcatcgttagaaggcctctgaggaaacactacattccagtaatga

SEQ ID NO: 614562 - DNA, 75 bp, Homo sapiens
ggcgcctatcagtacacaataagggtgacagttcgtgatgctataaatcagggtatggatgaggagctggaaaga

SEQ ID NO: 614563 - DNA, 75 bp, Homo sapiens
ggtccctgaagagggaagacacgcggaaacagcaacattccaacgcatcccagtccctgtgtgacatcatccgcc

SEQ ID NO: 614564 - DNA, 100 bp, Homo sapiens
aaacttttcttaaacgagagctctggatcaaggagaattatgaggtaacaaatatactctggagactagaccaaaccaagaaggcattgatgtaagacaa

SEQ ID NO: 614565 - DNA, 100 bp, Homo sapiens
cttaatcctgccatatggattcataccccagccaaggtttacatgaggatccacaaagtccacctcctctccctgctgaaaaacctattggaaacacttt

SEQ ID NO: 614566 - DNA, 100 bp, Homo sapiens
attggatcaaacatgtcacaagagtcggacaaatatggctcgtggacagcagaaaattcagtctcagcagaaaaatgccaaaaagcaagctggacaaaag

SEQ ID NO: 614567 - DNA, 50 bp, Homo sapiens
gggctccaccccgtcgcctcgacaggtctcctctgagcctccggcctcca

SEQ ID NO: 614568 - DNA, 100 bp, Homo sapiens
tgaaccctgaagtcggtgtctgctgcgttcacggcaggattcggttaggaaagaccacagcaagattctttcattcgtctcctcctagcctgggggacca

SEQ ID NO: 614569 - DNA, 100 bp, Homo sapiens
ggctgcaggacctctgtcagagaatgaaacactcatcgcatggagtctactcttcatcttgtgttgagacttcgtggtggtgctaagaaaaggaagaaga

SEQ ID NO: 614570 - DNA, 100 bp, Homo sapiens
aatcatgttgaagctaaacccatatgcaaagaccatgcgccggaacaccattcttcgccaggccaggaatgcacagaaaactgaatctgtagataacgag

SEQ ID NO: 614571 - DNA, 98 bp, Homo sapiens
tgtataaaaacagctttgactgttttaagaaagtgctacgctatgaaggcttctttggactgtatagaggagccgtctacatctgcacggaagacgcc

SEQ ID NO: 614572 - DNA, 100 bp, Homo sapiens
cgactgcggcctgaactctagggagccgggttgatttttaaagcttcaaaatcctaagactcagcactgttgcgggagggagacgtggtgggcggtcctt

SEQ ID NO: 614573 - DNA, 75 bp, Homo sapiens
ataaacttcattttacgccacgtatccagagactgaatgaattggagaagtctggaacgttttttcttagagttc

SEQ ID NO: 614574 - DNA, 75 bp, Homo sapiens
gccattttgtgcgcaccacttttgtgtccaggcataagaaatttgacgtaccttggccatgtagaagttgatgaa

SEQ ID NO: 614575 - DNA, 100 bp, Homo sapiens
gtacttcctgaagcagctgctctagtgaaaaatctcctgcaaagaagctgagccatgcaattagtaaatctttggggtgtgtacccacgagagaaccccc

SEQ ID NO: 614576 - DNA, 75 bp, Homo sapiens
tgcagagagagaagcatcctgaagcccctctgcaggaagcagaatctgaaactttctgaggagagcatttgagct

SEQ ID NO: 614577 - DNA, 88 bp, Homo sapiens
ggctcaggcccgggagctgcggaccgaggttggctcgatgctgttcccagtggatggcattcccaatgacagtagtgatagtgaaatg

SEQ ID NO: 614578 - DNA, 101 bp, Homo sapiens
agatttcccaagagcagcggaaaatgatccagtcacagtttggaatctgtgagtgcaacgtgtaaacagctgagccaagaactaatggaaaaatatgaaga

SEQ ID NO: 614579 - DNA, 74 bp, Homo sapiens
ttggagaacttaatccacttacgttcagggttatcattcatagctgctccggctttaattacgtgctgctcaga

SEQ ID NO: 614580 - DNA, 100 bp, Homo sapiens
gcgcggagtgggcgatgccagcgtgccagtaccctcttatatatggactgattcttattccctgctggtgttctctagtttgcctaagtagaatttacat

SEQ ID NO: 614581 - DNA, 74 bp, Homo sapiens
ggagcccggccccggggaactagggagcgtctccggctgcacagcgctcagggaaagaatcatgtgatgtacag

SEQ ID NO: 614582 - DNA, 89 bp, Homo sapiens
aaattcatgcatcaggataggcaagttccagggtcccacatggtgggtttgctaatatcatgggtggaagtggattgcaaaactttaca

SEQ ID NO: 614583 - DNA, 83 bp, Homo sapiens
ggcggcggcgcgtcctccagcggcggcagcggcgctcgcagcgcccgcagcccctgtcaaagggaacaggaagcagtccacgg

SEQ ID NO: 614584 - DNA, 100 bp, Homo sapiens
ctagaagcactgagagatgcggccccctcgcagggtcactcctggaagcaaggcggctctagctaatttatgtattggagatgtaatcacagccattgat

SEQ ID NO: 614585 - DNA, 100 bp, Homo sapiens
aagaaacaagcttctagaccacctatccaaaatgcatgtgttgcagataagcacagttcctatagaagagcagcgtggggactacgacctgaatgctgtg

SEQ ID NO: 614586 - DNA, 75 bp, Homo sapiens
agctcctggcctattacttcacggagctgaaggatgaccaggtcaaaaagctgcactgggtgttcaacagccatc

SEQ ID NO: 614587 - DNA, 83 bp, Homo sapiens
aacaaataaacaaactttcagatcaatcagtattacccagtgtagatattgacagcatttcaaatagtagtgctgatgtcctt

SEQ ID NO: 614588 - DNA, 96 bp, Homo sapiens
tcctcgccagcagccgtccggagccagccaacgagcgctgcaagctttcttcctggtggcagatgacatcatggattcatcccttacccgccgggg

SEQ ID NO: 614589 - DNA, 75 bp, Homo sapiens
cctggcctgaagacatttcctctcctcccctctggatttctcagagattcaaccctatgaaaagataaaggccag

SEQ ID NO: 614590 - DNA, 82 bp, Homo sapiens
tttgaaattgcattgacgactggatttttagactctgaggagcagttggagctaatccacattatggaaatggaaaccaccg

SEQ ID NO: 614591 - DNA, 97 bp, Homo sapiens
gggaccgagccccaccgtcgcctggtgcctcccgcctccgtgtgccctggttgtgagaagacgtctgtgtcgtgcgcattccatattggaagaagag

SEQ ID NO: 614592 - DNA, 100 bp, Homo sapiens
gagtcgacgtcggtgcttccagtgccaaaccaaactggagctggtgcagcaggaattgggatcgtgtcgctgcggagctgtggctaaaggaagtggaggg

SEQ ID NO: 614593 - DNA, 100 bp, Homo sapiens
acaatggcatttacagaaagagtcaacagcagtggcaacaggtgtttgcaagagcagacccttggacctggtgtttatcattgatagttctcgtagcgta

SEQ ID NO: 614594 - DNA, 100 bp, Homo sapiens
cacagttgcaacctgcagaggcccggagaacacaaccctcccgagaagcccaggctgaatcgtctcaaacttgtcattctgaacaaggtgataaaaagat

SEQ ID NO: 614595 - DNA, 100 bp, Homo sapiens
caagaaaccacttatccaaatacttacatttttgacttgtttggaggtgttgatgcattcccatcaagagcaccatggacaaccccaccaccacccagta

SEQ ID NO: 614596 - DNA, 90 bp, Homo sapiens
accaaacccacttcgttcaagacaggtgtttaagcgctagagtaccgtggcacaatctcagctcattgcaacctctgcttcctgggctca

SEQ ID NO: 614597 - DNA, 101 bp, Homo sapiens
tgatctctctcgctgtgagacatgtctgagactcctgctcagtgtagcattaaggaaacttggatttaactggccagaagcaggtattcaaagcagagaac

SEQ ID NO: 614598 - DNA, 100 bp, Homo sapiens
gctgcccgccgccagcatgttgggcgccccggacgagagctccgtgcgggtggctgtcaggttttgtcaagagtcaggaaggagaaaatgaagaaggaag

SEQ ID NO: 614599 - DNA, 75 bp, Homo sapiens
ggacttcatccggtcaccatctacctattcttcaaatggtgactgtggggatcatgttgttataatgaacacaag

SEQ ID NO: 614600 - DNA, 74 bp, Homo sapiens
ccttggaacggcccagcttcttatcccagacaggacacggagccgcccaggaggctcctcaggccgaccccaga

SEQ ID NO: 614601 - DNA, 98 bp, Homo sapiens
cccggtgcagatgaacctgtacgccacctgggaggtggaccggagctcgtccagctgcgtgcctagaaaaatatgtcgtaactgcaagtgtggccaag

SEQ ID NO: 614602 - DNA, 90 bp, Homo sapiens
cgccgattcctcctccttggtcgccgcgtccttggctggcgtggtgataaaagaaaatgtggctgaagttacccgaagttcagcttgcag

SEQ ID NO: 614603 - DNA, 74 bp, Homo sapiens
gggagcggcggcagcggcggcgcggaggcggctgaggtgcgagccgaaaaaaccactgtctgcaataataaagg

SEQ ID NO: 614604 - DNA, 71 bp, Homo sapiens
aagttgaaaaacgcttttcacgtcacctggagagatgcacagaaaaatggctacaaacttcctagcacatg

SEQ ID NO: 614605 - DNA, 95 bp, Homo sapiens
ccacccatctggccgggcagtaccttcttcaagagaaatggagcccttctccaagaataccctctaccatctgctttggtcagggtgccgctcga

SEQ ID NO: 614606 - DNA, 100 bp, Homo sapiens
accttccggagcttctcagaagacagagggttttcttttgaggctaagtgctatttatggaggtacctatatgctgaataaacccattgaagaaatcatt

SEQ ID NO: 614607 - DNA, 98 bp, Homo sapiens
gggaggacaacttcgcccgggacttcatggtgtgttccagagaacaagccttcagacatttgctatattgacgctgagctgtcaggggactcaggctt

SEQ ID NO: 614608 - DNA, 90 bp, Homo sapiens
ggaagtgtatcctcccttcttattttttctagctgttggaggtgtttaccacccgatgggacctgcaaaggataaactggtcattggacg

SEQ ID NO: 614609 - DNA, 75 bp, Homo sapiens
cccgaaaacaccttagtttgcaccgagagaccatttgcagcggactattgcccagaagaaaagatgtttggtttt

SEQ ID NO: 614610 - DNA, 99 bp, Homo sapiens
ctgtggagaacaaatccaagattagcacagtggctgagaagaccaaagagcaagtgacaaatgttggaggagcagtggtgacgggtgtgacagcagtag

SEQ ID NO: 614611 - DNA, 100 bp, Homo sapiens
gtggtgtggattttcatgcaccttacaaacttccatacaaggtttgtgtgctggagaggcaaatatttgacttccttggatatcagtgggcacctatcct

SEQ ID NO: 614612 - DNA, 105 bp, Homo sapiens
gcagctgcgacgcggctaagaggcgcagagcgaggagtcgggatttggtcgcgagcggcgacggttggtcaaagaaaaagtgatgtatgaaaaagaggcaaaaca

SEQ ID NO: 614613 - DNA, 100 bp, Homo sapiens
tgaccatctaccacctcaggaatcaagattgcagaatacatcttcaagacctggaatgtatccgctggaagatctggaagttactgtagctgatcacatt

SEQ ID NO: 614614 - DNA, 83 bp, Homo sapiens
gagaggcccgcccaccagttcgcccgtccccctgccccgttcacaatgatgaccgagtgggagacagcagcaccagcggtggc

SEQ ID NO: 614615 - DNA, 75 bp, Homo sapiens
caatgatgtagccacctcctaaccttcccttcttgaacccccagtgagtgatagttgcttcaggaatcttgcaga

SEQ ID NO: 614616 - DNA, 98 bp, Homo sapiens
agtagctggatcctttgataatgaaggcattgctatttttgcacttcagttcacatactatttatgggggttcagctgttgcaaaaataattggtaat

SEQ ID NO: 614617 - DNA, 98 bp, Homo sapiens
tcagcttcagctccagctccgctctcttcggctgccccaatccccggcagctctctcaggtccctggtgctgaaccgcctgcgtccagttgccagcgg

SEQ ID NO: 614618 - DNA, 90 bp, Homo sapiens
cccagtcactcaaatccgtggactacgaggtgttcggaagagtgcaggtctacaaataagaaacctcgaaaatctccaggtgagaagagc

SEQ ID NO: 614619 - DNA, 105 bp, Homo sapiens
gtacagcctgagcgggaggcagggggacgacaaggagggcatgatcaacctcgtcatgtcctacgcggtgcagagcattgtagaccaaggagccatggataggag

SEQ ID NO: 614620 - DNA, 75 bp, Homo sapiens
aatgggctttacagatgtgggcccagaaaacaagccagtcagagaagatggcgaattagaagatggtgaaataga

SEQ ID NO: 614621 - DNA, 100 bp, Homo sapiens
aggacgaggacgaggaaacctttgagctgcggaccccgagtccagcgggcggcgggaggtcgtgcagccaggataccctgcccaccggcgcatcgtagag

SEQ ID NO: 614622 - DNA, 90 bp, Homo sapiens
aacgtgttcaataccatccttaccaccagaagctatccacaacttcgcagagatcttcttggaaacagaattgttctacaaaggtatccg

SEQ ID NO: 614623 - DNA, 75 bp, Homo sapiens
accctgtggcccatttcattgaccaaactttgaaagccaagagccaaatctcctcagccacctgttgaagaagaa

SEQ ID NO: 614624 - DNA, 97 bp, Homo sapiens
ctgggcgacttgcgaggatgagagcgacgaagccaactgtccaggtctggtgagctgtaccttctttctggcagtgaatggtctgtattcctctagt

SEQ ID NO: 614625 - DNA, 83 bp, Homo sapiens
cgaacgaccaagagggtgttcgactgctagagccgagcgaagccgtgagtgcatctccatccacgttggccaggctggtgtcc

SEQ ID NO: 614626 - DNA, 99 bp, Homo sapiens
ttgtagagagaaaattgaagctgtggcaactgaattaaatgttgactgtgaaatagttcgggtaaatggtcttaaaatggttgatgagccaatggaaga

SEQ ID NO: 614627 - DNA, 104 bp, Homo sapiens
ccctgaccatggctccctgcagtaccctttaacgttgttgacctcctgtactggagagacattaagaagactggagtggtgtttggtgccagcctattcctgct

SEQ ID NO: 614628 - DNA, 83 bp, Homo sapiens
ccctgatcatcctgctgggcttcgtccagatcgggaaggacgagctggagccggtggtgcaggatgggcagaggcgcatacgg

SEQ ID NO: 614629 - DNA, 98 bp, Homo sapiens
agcaggtcacagtggacgaggtgttggcggaaggatttatgagcagcttccagaagtacagaaaaagagagaagaagagaagagaaaatcagaatata

SEQ ID NO: 614630 - DNA, 99 bp, Homo sapiens
gcctcgtccacgctcagcaccggggaagccgaggcggagaagccgcgcgcgcctcagaagctcccggacgcccaggtcccgtcaggaagcccaagtatg

SEQ ID NO: 614631 - DNA, 96 bp, Homo sapiens
cccagctctgcagccacatactatccgtttgttcaggaaccaccagtgacagactgtcaaagctcgaaaaacagcagcagaggaaagaaaagacca

SEQ ID NO: 614632 - DNA, 75 bp, Homo sapiens
cacacctgtgtctgtcccagcggcaggtttggtcagtgcccagcagccctggaggactcccagagctctttttca

SEQ ID NO: 614633 - DNA, 100 bp, Homo sapiens
agtccactctggggagaagcccaacaagtgtacgtctgatgtcatacatcagagtgtatatgaacttatccataccgaagaccgagctgaatttcagcgt

SEQ ID NO: 614634 - DNA, 82 bp, Homo sapiens
gtcgttctgcaccagcgccttgatcgagtacttgagattttgcaagaacgaggctcaaggatgtgagggacacagtattgac

SEQ ID NO: 614635 - DNA, 82 bp, Homo sapiens
ctgggattcgcgctgctgggcacccacggagcctccggggctgcggagctggagtttgttcagatcatcatcatcgtggtgg

SEQ ID NO: 614636 - DNA, 97 bp, Homo sapiens
cgagagcgtgaccgagagcgcgaatatcgtcatcgttagaagatatctcttccaaacgcatgatgaaggaggtcttgtcaacagggcaaggcaatac

SEQ ID NO: 614637 - DNA, 83 bp, Homo sapiens
ggcttgccctggtcttgctcggccgatgaagtgcagaggtttttttctggtattgaagcccctgggtgataatttgatggagg

SEQ ID NO: 614638 - DNA, 101 bp, Homo sapiens
gagggacaggagtatctgaggatggagaactcagcagagcaatttacagcaatgagggatttatacatgaaaaatggacaaggatttgcattagtttattc

SEQ ID NO: 614639 - DNA, 90 bp, Homo sapiens
aaactatgttttaactgatgagcaatcactttggattgaagatactacaaaatcagtttatcaactctgtatgaaaaagctgatatcaag

SEQ ID NO: 614640 - DNA, 75 bp, Homo sapiens
ttcaggggtctaccggctctcttatggcgaatgcaacccgaagagagagtgagctctggattaatcgaattacag

SEQ ID NO: 614641 - DNA, 95 bp, Homo sapiens
caggaggagagcccacaggtgctaaagagagcagtaccctgatggagtcccttgcagggacttcaaaatgagcgtccctgactacatgcagtgtg

SEQ ID NO: 614642 - DNA, 83 bp, Homo sapiens
cgcgagagatggagatgggcagacggattcatttagagctgcggaacaggacgccctctgatatacatttcatcaatgaagcc

SEQ ID NO: 614643 - DNA, 101 bp, Homo sapiens
agtatgaacttgaaaaacgtgtagaaaagctggaacttttcccagtggagctagagaaagcatcgagtagatttctttcaacagatgatcgactcccagaa

SEQ ID NO: 614644 - DNA, 100 bp, Homo sapiens
aaaaactccaacagcttcatatggacagatggacttcaaatgctgtttgtattccagagactaggaactaagcgtcttgtagaaggaactattaatccag

SEQ ID NO: 614645 - DNA, 89 bp, Homo sapiens
cactgaggaagagatcaatcttaccagagggccctcaggtgctggagaatctggtaaaagcaccattgtgaagcagatgaggatcctgc

SEQ ID NO: 614646 - DNA, 90 bp, Homo sapiens
cccgtcagcaaaacactctcttcttcagacacaggtaattctgaattgctcagctctgcagagtttattgcatttgctgagtagcccaaa

SEQ ID NO: 614647 - DNA, 98 bp, Homo sapiens
ggctcagatgatccagaaatttttgggttatgtcgaccagatcaaagaggcacatgaggcagcattggaagccagagccagtccagagatgagtgacc

SEQ ID NO: 614648 - DNA, 90 bp, Homo sapiens
cagacggctcacctgtgcgggatggaacaaaaggagcttactccacgggaacagcctctagataatctgagttgttgaaaatacgaagcc

SEQ ID NO: 614649 - DNA, 82 bp, Homo sapiens
ctgtgtggttgcaacggagataaattcccggaaccgcgattcggcgtgtcagggccgccttcaacaacaacgtgagcgtggc

SEQ ID NO: 614650 - DNA, 100 bp, Homo sapiens
ttactcttcagtacaatgtcaccctcccagcaacaggcccttgatgggttcttctttgtagtgaacctggaaggcaacgttgtgtttgtgtcagagaatg

SEQ ID NO: 614651 - DNA, 90 bp, Homo sapiens
ggcggactgcgagggaaagggggccttgttgagtccgccagatcgttcttgatgttggctgtggctctgggatcctgtcgttttttgccg

SEQ ID NO: 614652 - DNA, 98 bp, Homo sapiens
tttgctgcaaatgaagttgatggaattacactgtgatacgactgactctcttcacagatggaatcacaaataaacttattggctgttacgtgggaaac

SEQ ID NO: 614653 - DNA, 99 bp, Homo sapiens
gttggacttcgcgatcttcgccgttaccttcttgctggcgttggtgggagccgtgctctacctctatccggtcatcctgtacagttctacagcatgaat

SEQ ID NO: 614654 - DNA, 100 bp, Homo sapiens
tttcctattttttctccttctgcgctgaaaccagaaagcaggaactttcgtggtgagagttggcaggggggcgaactttctgaccaagtatacaactacc

SEQ ID NO: 614655 - DNA, 50 bp, Homo sapiens
ggacccaaagtgccatgtctttaataatggcttcagttctgtgcaggcca

SEQ ID NO: 614656 - DNA, 100 bp, Homo sapiens
ccaacgtcgtggtgactggcctgaccctggtgtgcagctcggccccgggccccctggagctggacctgacggcagccccatccggatgtttgcttccttc

SEQ ID NO: 614657 - DNA, 101 bp, Homo sapiens
atgaggagtcagagcacaatcaagatctgaattctacaaacacattgtgctttctggagggtctactatgtatcctggcctgccatcacggttggaacgag

SEQ ID NO: 614658 - DNA, 97 bp, Homo sapiens
gaacctgctcaaagccctgggtcgcttggaagaagccaaggaggagatgttaaagtaacccatcttgcaggacgacattgaagattggtcttctgtt

SEQ ID NO: 614659 - DNA, 100 bp, Homo sapiens
caaccatcccacgtgcagatcaccactttataaagggacacgtcaaaggctacatatcgcatcagcatcagaagctggtggtcagcaagcagaacccatt

SEQ ID NO: 614660 - DNA, 50 bp, Homo sapiens
cacagttgaagctccaggaggtcaaaagagccctaatttgtttagaactg

SEQ ID NO: 614661 - DNA, 100 bp, Homo sapiens
tgcatgccgctcaccgtagacgagggtgatattcatgaggatttttgcagcgtttgcagaaaaagtggccagttactgatgtgcgacacatgttcccgtg

SEQ ID NO: 614662 - DNA, 75 bp, Homo sapiens
ctccgcacctcggggacattattgcgcgtggaacggctgcttttggaaggtttaccgacaagactgtgaaacttt

SEQ ID NO: 614663 - DNA, 82 bp, Homo sapiens
cccgccctgcgggagctgggcagatggagatcttataacaatttttgatagttctgacctttcctttgcaattcagtgcagt

SEQ ID NO: 614664 - DNA, 96 bp, Homo sapiens
cgaaatccaggactatgacttcaagactcggatatgcaaaaaagtctgtggccactacactcaggccatgatcatagctttcacgtcggacatgat

SEQ ID NO: 614665 - DNA, 75 bp, Homo sapiens
ccggccaggagaaattcggtggactgagagatggctattatatccaagatacaaactggactctcaggacaaaac

SEQ ID NO: 614666 - DNA, 75 bp, Homo sapiens
gagatgaaggagttgccgcagctggtggcctcagtcatcgagagggaggagtggatgcgggccatccagatggtc

SEQ ID NO: 614667 - DNA, 100 bp, Homo sapiens
aaatattccacactacctacagtgaaatagcatggatttcatccattatgctggctgttatgtacgcaggaggtttttgattggtcaaggagcacatgta

SEQ ID NO: 614668 - DNA, 82 bp, Homo sapiens
tcggaggagccgcgggcggcgcggcccagctcgttccagcccgcggcgccatggctcacgtcggctcccgcaagcgctcgag

SEQ ID NO: 614669 - DNA, 95 bp, Homo sapiens
ctccgagccttcagcagaggcggcagcctggagagtcgaagcagcagctctcgctccagaagcttcactttgtattcatgtgattgaacggcgtg

SEQ ID NO: 614670 - DNA, 50 bp, Homo sapiens
ctacagaaagtcaccagaggaagcactctacacccccaagtgcatatggg

SEQ ID NO: 614671 - DNA, 75 bp, Homo sapiens
tcaaaattgcaccgaacacacctcagctggctgacattattgcaacaggatacagaaggtggtcatggcactagg

SEQ ID NO: 614672 - DNA, 100 bp, Homo sapiens
ataaactgcttgaacatcctttgactggttagccagaccacagagtattcagccatggcctcgctggctggtgggctggacgacatgaaggccaatctgg

SEQ ID NO: 614673 - DNA, 100 bp, Homo sapiens
gagtttgaagattttcctgagacctcagagcccgtttggatactgggtagaaaatacagcattttcacagggtccctccaatgtgtttgctgccaaattc

SEQ ID NO: 614674 - DNA, 75 bp, Homo sapiens
ggacgccagagtcccagccctggaaccgttcagagtggagcaggttgtccccccggcacgctccacagctggtga

SEQ ID NO: 614675 - DNA, 82 bp, Homo sapiens
catatgatctgccctggttcaggacgctcagctgctatgcaaaagcagccttttgtttagaggaactaatgatgactaatcc

SEQ ID NO: 614676 - DNA, 74 bp, Homo sapiens
tggatttaaaagacagtcctcgtcagcactgactttcagctatggaatcggtgccatggagaactggggccttg

SEQ ID NO: 614677 - DNA, 82 bp, Homo sapiens
gcgctgcctggaggagaatcaagagctccgaggttacgggcaggacttgagtggcttcggacagggcttctcagaccccagc

SEQ ID NO: 614678 - DNA, 73 bp, Homo sapiens
aaaactaaaggcctgggcctgagaactgaatcaggaggcggctttccggaaagtagtacaagcaactatggta

SEQ ID NO: 614679 - DNA, 100 bp, Homo sapiens
ggatctccttcccagccttcagaaattgccggtctgggagttgggggcaaggagaagatcctggtatgacgctgggcgggatggcttcatcgacctgatg

SEQ ID NO: 614680 - DNA, 100 bp, Homo sapiens
cttccagggagaggactgtggccaaggcggagtgtcccctctgccgggagaagttccctccccagaagctcatctaccttcggcactaccgctgagccgg

SEQ ID NO: 614681 - DNA, 73 bp, Homo sapiens
ccagactcagggatcaaagagcaaacagattcagtggcctgcattgaaggtctgaagaaaaccctgcgggatg

SEQ ID NO: 614682 - DNA, 88 bp, Homo sapiens
caagtgcatcaaatacctgctgttcggatttaacttcatcttctgggacctgaaggagaagaaggagaaggtggaggagaaggcaagc

SEQ ID NO: 614683 - DNA, 71 bp, Homo sapiens
gctgcaggctgagatcgacaacatcaagaaccaggcaagttgctccctgagctgctccaaccttatacaga

SEQ ID NO: 614684 - DNA, 90 bp, Homo sapiens
gagacacggccagatctgccctccatagctgctgctggtggtgacaatgtcaaataacggcctagacattcaagacaaacccccagcccc

SEQ ID NO: 614685 - DNA, 75 bp, Homo sapiens
cggcccccaaggggcgggcgctgtggtcatagagacaaacctacatctgttctcttaagaggaagtgattcggag

SEQ ID NO: 614686 - DNA, 85 bp, Homo sapiens
atttgtgccatagattatacgtggaatttactaaaagctggggtaactgacgatgccctggtgtacagcaccttcctgctccatg

SEQ ID NO: 614687 - DNA, 82 bp, Homo sapiens
gagcaaggggcttacgcagaaggacctggccacgtgcctccggagccagcgtggtggccatagacaacaagatcgaacaggc

SEQ ID NO: 614688 - DNA, 100 bp, Homo sapiens
ttgtatagagatgtgatgttggagaactacagaaacctggtctccctagattttcagctgaactctcatctctcaacactggcaaatattcataagatct

SEQ ID NO: 614689 - DNA, 96 bp, Homo sapiens
ggagagctcatcgtcaactggacggcctgcactgcctgaaaagaaggtggctgatctgagcactctgaatgaagtgggctatcaaatccgaattta

SEQ ID NO: 614690 - DNA, 101 bp, Homo sapiens
gttcccctgtcttccccaacgccccggagccgccggccgctagcgtcagcgccagccagattcaaccctatgaaaagataaaggccaggggcttgcctgat

SEQ ID NO: 614691 - DNA, 83 bp, Homo sapiens
gaaggctttgcttaagttcaaaccagacttcacagagaatgcagttgtcttgacttcaggtctgtctgttctgttggcaagta

SEQ ID NO: 614692 - DNA, 100 bp, Homo sapiens
ctgatctccatgtcctgttgtggggcttttacagcctttgggattaacacagattcctcagatccagaagactgaaatttcctttcgtcctaatgatccc

SEQ ID NO: 614693 - DNA, 101 bp, Homo sapiens
gaaattagcttaaaaaatgatctaggccatccggctgtccttagagcaagccctgcctcctgagccaaaggaagaaaatgctgagcctgtgagcaaactgc

SEQ ID NO: 614694 - DNA, 100 bp, Homo sapiens
aggttttagaattttcatggatgccatactactttctttgactagaaagattcctgcaagctggacaaatccctcaggcaaatatcatattggcataaaa

SEQ ID NO: 614695 - DNA, 98 bp, Homo sapiens
gcacatcgaccttggctgatcacaaaagagcacattcaggaagaagcattgcatgcatttattcagccagagattctggatggcccaaatcagtattt

SEQ ID NO: 614696 - DNA, 89 bp, Homo sapiens
ggggctgctcagtgcttgctatcatgtgtgccccaactataccaatttccagtttggaaaaatatctccctggacggggcgtttctact

SEQ ID NO: 614697 - DNA, 97 bp, Homo sapiens
acactgtgggggtgtcctggtgcacccccagtgggtgctcacagctgcccattgcctaaagaagtttcggtctaagtaccacccagatgaggtgggg

SEQ ID NO: 614698 - DNA, 78 bp, Homo sapiens
ggaaaaagcggccaaagaagtgaagctgctgctactcgggacagcaatcagacctattgctttgagagctgtgacctc

SEQ ID NO: 614699 - DNA, 100 bp, Homo sapiens
cttctccaaaaggacctgccagagactgggagtgttgactgctgcaaggaccaagggaatgcagagagcaaccaatgtcacctaccaagcccatcatgtc

SEQ ID NO: 614700 - DNA, 75 bp, Homo sapiens
cccggttgtcctcaggcgctgtcagaaaatgacagatggcgagacctggacaggaaatgccctcttcagattgac

SEQ ID NO: 614701 - DNA, 74 bp, Homo sapiens
gttgccatgaggaaagaattctccgagaaacctgtgaaggtcgaaacagctgcgtttcctgttttaatgttagc

SEQ ID NO: 614702 - DNA, 75 bp, Homo sapiens
accaagagaccgtttttgaaaacattgccaaaccagttgctgggagatcacaatgaggacctagggcatctgtct

SEQ ID NO: 614703 - DNA, 75 bp, Homo sapiens
gctgcgggaaatcgggctgaagcgactgagtccgcgatggagcaatcagaaacggagactgttcatctgtttatc

SEQ ID NO: 614704 - DNA, 76 bp, Homo sapiens
cagtctttctgtccacatggaacaaactgaggagatcgcttgagacgaacgctatcagttgagggatttgcagttg

SEQ ID NO: 614705 - DNA, 98 bp, Homo sapiens
caaatgctgaccctcgaaaaaaagatggagccctgcatatgattggctctttagctgaaatacttctgaagggcttccgttacaagatgaggtctgtg

SEQ ID NO: 614706 - DNA, 83 bp, Homo sapiens
cgcggccggccagccgaagatggtggcggctactcctcctgggagtggggaaggccagggccagattctgcagcgcttcccag

SEQ ID NO: 614707 - DNA, 75 bp, Homo sapiens
gagggaagacacgcggaaacagaactgataaatttcaaacggaagagagtggcagcatttagaaagaatctaatt

SEQ ID NO: 614708 - DNA, 75 bp, Homo sapiens
ctaacgggtattgagcacctactttgtgccaggcccaggccagtgatgtcttggttcgtgtccccactgctttct

SEQ ID NO: 614709 - DNA, 74 bp, Homo sapiens
cgacttcgatgatcgtgtgtcggatgaggagaaggtcctgcatctccagtatggaatgtatgtttggccctgtg

SEQ ID NO: 614710 - DNA, 73 bp, Homo sapiens
actgcgggaaacctgtgcctccagacactgctccctgtgaaattctgaaggtcatcatcagatttgaaatatt

SEQ ID NO: 614711 - DNA, 82 bp, Homo sapiens
ttgacatccggggccccatcagggacaccttgcaggtaaaacgaaccattaccagacaacagtggaaaaaaaaagccttacg

SEQ ID NO: 614712 - DNA, 84 bp, Homo sapiens
taaagaagccaaactctgttccccaagagctcgcagtttttggaaatgctccgccgaatacaatgacagaaaaattttctgatc

SEQ ID NO: 614713 - DNA, 75 bp, Homo sapiens
cccgcctaagccatgcacctctgtgggggcaatgggctgctgacccagacacaagccctggatgaaaacatggac

SEQ ID NO: 614714 - DNA, 82 bp, Homo sapiens
tgccgaggtgcgggagagcctggctgagctggagctggagctgtcggaaggtattatccatgcagcagaagagaaggactgg

SEQ ID NO: 614715 - DNA, 75 bp, Homo sapiens
tctgttttgcctgaatacatgatttaaacaagagatttccacagaagagcagcccgacggccatggaggctgaag

SEQ ID NO: 614716 - DNA, 83 bp, Homo sapiens
caaacatttctggaaatggcttttatccaggtgatgggcagaatctgtttacgaaagacgtgacagtgatcgagggagaggtt

SEQ ID NO: 614717 - DNA, 98 bp, Homo sapiens
aaggagtcacggatcggattcctcagctacgaggaggcgctgaggagagagacggtaaagaacaggtccaagaaaagctcaaagaaagcaaataccag

SEQ ID NO: 614718 - DNA, 51 bp, Homo sapiens
cgttcgagatctcgtgggtcgaaatcaagtgactgaagcaaggctgtgtga

SEQ ID NO: 614719 - DNA, 83 bp, Homo sapiens
ctaatctgatcgggtcttccttcatttcagggcgacagctcagtgaagtcttcattcagttaccttcaaggaaagaattacca

SEQ ID NO: 614720 - DNA, 123 bp, Homo sapiens
gtgacctggccgatgaggaagtactgagcctgttggaggaactggcccggaaacaggaggacttggaatcgaagcctcttaaaatggcagatgacttggacttcgagacaggagatgcagggg

SEQ ID NO: 614721 - DNA, 82 bp, Homo sapiens
gaacttgaagaaatttatatgctcccaagaatgagaaattgtgcaaaacagtttaatcccatggaatcaatcaaattaaatc

SEQ ID NO: 614722 - DNA, 83 bp, Homo sapiens
ggagccgaataccaagctcggatccctgaatttgatccaggtgctcttacagcctgttccaagtgtggcttaatccgtctcca

SEQ ID NO: 614723 - DNA, 82 bp, Homo sapiens
gcttcgccaagggggtgcagtacaacagggcctagaagacagttcccaggaggccgaggacgaggcatcggggctggggcta

SEQ ID NO: 614724 - DNA, 75 bp, Homo sapiens
ccggggcttgccctggtcttgctcggccgatgaagtgcagaggtttttttctgctaagtttggtgcgaacgccat

SEQ ID NO: 614725 - DNA, 75 bp, Homo sapiens
cgccttgctgctgctcaaagctgctgccgccccttgggctaaaaggctgatcaccagttcctcttaggaaccggt

SEQ ID NO: 614726 - DNA, 100 bp, Homo sapiens
gagaggatggcagaatgattgctggccaggttttaggtatgaacgggtagatgaaattatttgggtgaagacaaatcaactgcaacgcatcattcggaca

SEQ ID NO: 614727 - DNA, 51 bp, Homo sapiens
aggaacctggacgccggaagccgggaaatgtttaaagttcctgctgcaaca

SEQ ID NO: 614728 - DNA, 101 bp, Homo sapiens
gcttggttaacttgggagaaagtttcatctgtggatggagtattgaacattaaccaggtggtatttgttggaaatttcttgagaattaatacgatcgccat

SEQ ID NO: 614729 - DNA, 75 bp, Homo sapiens
cggcgggacccagggaaggcagcggccggagcgcgcaaggagccaagccgccatggcctaccacagcttcctggt

SEQ ID NO: 614730 - DNA, 80 bp, Homo sapiens
cgcgaggaaaatgcgggacgcccaggccaagctataacatcagaaatggtgaatgaatacaagaaaattcttttgctgaa

SEQ ID NO: 614731 - DNA, 75 bp, Homo sapiens
ctgcacactgccctccgaagtcggggacgcgggctcggtaatggatgtgaagaacagaaaccccagagctataaa

SEQ ID NO: 614732 - DNA, 83 bp, Homo sapiens
gatcgctgtgatcgtcacttgccattgagacccagagcagcagttctgaagagatagtgcccagccctccctcgccaccccct

SEQ ID NO: 614733 - DNA, 100 bp, Homo sapiens
gtcggcgtaaagcacccgggcgcagccggagccggtgccgcagctgcgatggccgtggccgtggggagaccgtctgcaatcctttatcacaggatattct

SEQ ID NO: 614734 - DNA, 100 bp, Homo sapiens
tggaatgatcatcaaacagctatggtgatgattagagacatactaatgtacatgggcctgctttcttccccgggcgatgtgcagagatctttgccagggg

SEQ ID NO: 614735 - DNA, 90 bp, Homo sapiens
gaacttctcttcgcatcggcggcggcttccgtcacctccgctcccccgatcctattcccagtcgtgctggagcattggatttgctaaagg

SEQ ID NO: 614736 - DNA, 101 bp, Homo sapiens
gcccagggagcgccgcgcgaccaggaggcggcggcgccgccggctttgggcagcagcgttctcggatgctagctactctttttaaggatgaaaggtgccag

SEQ ID NO: 614737 - DNA, 98 bp, Homo sapiens
attaaagggggaaacgaagaagctagactcagatcagaattacctccgagttgcatttcaggaggtcaacagtggttgcacaggaaagaccctccttg

SEQ ID NO: 614738 - DNA, 90 bp, Homo sapiens
cggatatgttgaagtaacaagcttgcctagagatccaaaatacggagctggcatatacttcaccaagaacctcaaaaacctggcagagaa

SEQ ID NO: 614739 - DNA, 75 bp, Homo sapiens
atctgaggatggtaattttcaaatgtctctcaactggcagagatcgaggttccccacattggcagacaaaattag

SEQ ID NO: 614740 - DNA, 100 bp, Homo sapiens
ctgggtctacgataacgcgcttttgctcctcctgaagtgtctttggtccaacgttgttccagattacctggctggtgtttgcttgttctggagtgatctt

SEQ ID NO: 614741 - DNA, 100 bp, Homo sapiens
aaggggtcccgaagccccctgcaggaactctacaacccaatccagactcctgctttgaacttgctgtgggagaagtgttgcagtgacaatgtagtggttc

SEQ ID NO: 614742 - DNA, 100 bp, Homo sapiens
accctgggccagcacatctccacctcatcaggaaacagctgagacagtatccctctgaagaagatatgatcgaatgggccaagagggaaagtgagagaga

SEQ ID NO: 614743 - DNA, 105 bp, Homo sapiens
aaggattggattggcatctttagaactctgtttgctggctacacggacaacctggtgcgagtgtggcaggtgaccattggcacacgctagaagtttatggcagag

SEQ ID NO: 614744 - DNA, 50 bp, Homo sapiens
ctgggtttgagtccagcagtgctttaggtcatacttacctggttgcttgc

SEQ ID NO: 614745 - DNA, 93 bp, Homo sapiens
ccggcagccggcagccagcggcagtggatcgaccccgttctgcggcccctggtccgacccccagtggcactaacgtgggatcctcagggcgct

SEQ ID NO: 614746 - DNA, 80 bp, Homo sapiens
gagcgcaaggtcgccctcaaggccatgatcaaaacgaatgggtaccacagaccatgtcatcgtcctggcgtccacgaacc

SEQ ID NO: 614747 - DNA, 82 bp, Homo sapiens
tctacgagctgtttctcatctttatactcttccagagctcaggccccggggcctccagcggcaccagcggagaccacggtga

SEQ ID NO: 614748 - DNA, 80 bp, Homo sapiens
tttacctgcttcccaatcccactgatgaggatcagcccatgagcttcttcgagacaccttcacttccctgggctatgaag

SEQ ID NO: 614749 - DNA, 75 bp, Homo sapiens
cgatgatcgagtacatcgtgcagcagtgcgcgctgccccccgagcaggagttccagggtcacccccgagaggaca

SEQ ID NO: 614750 - DNA, 100 bp, Homo sapiens
caagaccctgtgcacctctcagcaggcctttgctggacagatgaagagtgacttgtttctggatgattctaagagaaggccggggtcagaaagaaaaaag

SEQ ID NO: 614751 - DNA, 100 bp, Homo sapiens
atcaatgaaaggagggttctgacacgttctcacctcgcgggatggcagctgctgatttgtcccatgagcaacttgctgagcttcgtcaggaatttcttcg

SEQ ID NO: 614752 - DNA, 97 bp, Homo sapiens
ggcctacagcctgtcagagatggaggcagctgggaagaaacccgcagagagagactcccgtgagcacgaggagcccaccacctctgagatggccgag

SEQ ID NO: 614753 - DNA, 88 bp, Homo sapiens
ttcaaggatggaatttttcataactccatatggcttggaacacagcctattggatccctaggctcaatatgtcctaatagttatggaa

SEQ ID NO: 614754 - DNA, 74 bp, Homo sapiens
gggcaccaccgtcctgctcttccagttcgggatggtacaggtttgcagattccgccagcagcacagcaagctct

SEQ ID NO: 614755 - DNA, 88 bp, Homo sapiens
cttcagggatgctacacctttctctcctgcctgggcaagcctcggttcatcctaagttccactataaacaggctcatgactcgggcac

SEQ ID NO: 614756 - DNA, 75 bp, Homo sapiens
caaccgccctgtgagcttctacaaggtggtgagaagctgcaggatgcctactacatcttccaggagatggctgac

SEQ ID NO: 614757 - DNA, 75 bp, Homo sapiens
cctatcagaaccatctaattctgaaagttttagtgcaagttaaggtgaactgcacagctgaagtactttaccctt

SEQ ID NO: 614758 - DNA, 90 bp, Homo sapiens
ccagatgtctgacagccctgtgtgacaccaagataagtaacgcaacgtgaagccggaagatgtgaagagagtcgcttctaagatgctccg

SEQ ID NO: 614759 - DNA, 100 bp, Homo sapiens
agccactacagtatcgtgggacagaagctgcaaaagagtgcattgagaagagtcttctattactaaaatttctgcccacgggcataagttcaaaagaaag

SEQ ID NO: 614760 - DNA, 100 bp, Homo sapiens
ggggagtcatcatgagcgatgttaccattgtgaaagaaggttgggttcagaagaggggcatgtggagaccccaaggcaaaaccatcctatcttatcgaca

SEQ ID NO: 614761 - DNA, 75 bp, Homo sapiens
aaggtggaggtgaagaagtttgtgaagatcggccgcccgggctacaaaggaagaagtttcttgcccaaatgcctg

SEQ ID NO: 614762 - DNA, 51 bp, Homo sapiens
ggtggccagagcagcatgagtggatacgttgctgatgtatattcaagatga

SEQ ID NO: 614763 - DNA, 100 bp, Homo sapiens
gttgcacacactaggagatctcctcaaagaagtttgtccttctgctattgatcctgaaggtggggtggcagttgaaaaatttggtgaatgcactacgaga

SEQ ID NO: 614764 - DNA, 100 bp, Homo sapiens
ccaacctctgactccgagaacctcagccccgatgagctggagctgctggccaagctcgaagagcagaaccgttttaacttctagtcatggcgaatgatcg

SEQ ID NO: 614765 - DNA, 98 bp, Homo sapiens
aaatcacactgcctgaggccaaagataaggccatcaagccctgtcgtcctatgaccaacaatgctggcagacttttccactaccggatcacagtctcc

SEQ ID NO: 614766 - DNA, 100 bp, Homo sapiens
tgttaccctgcacagccgtcaccctcaactttcccttcaggcaatctgaaagcaaatcctgtttagatgcaggcgaaggttcctggtgacccaggctctc

SEQ ID NO: 614767 - DNA, 108 bp, Homo sapiens
gtgaaagtcaacccggagcgtgaggacagtgagactcgaacaagctctcagcatggcggctcctctacgtcacttgcgtccaccaaagtctgcagctcgatggatgag

SEQ ID NO: 614768 - DNA, 50 bp, Homo sapiens
gggcgtactccaaagttgttcaggaacggaaatttgtacatagattctag

SEQ ID NO: 614769 - DNA, 100 bp, Homo sapiens
tcgtgagaaaagctttacgtctcattcaagaaaccgaagtgatttccagaggatttacactgctaaatttattgtgaagaaatcagaagatgaagaagac

SEQ ID NO: 614770 - DNA, 82 bp, Homo sapiens
cagaacgtgagggtgtaacttacaaaaagatatcagttttagagaatgtggcgtggagaaattctcaaggaaagagtaaaat

SEQ ID NO: 614771 - DNA, 82 bp, Homo sapiens
cacaatctggcctcccggtacggatagagagtattaaatgtgtttccaacatggctagatccatcagaaactgaagccgtgg

SEQ ID NO: 614772 - DNA, 89 bp, Homo sapiens
ttagttgcgctttcctgcctgcttctagcaagaccgcctggcccggtgcaccatgcattgcaacgacaaagccaaagattcaatagatg

SEQ ID NO: 614773 - DNA, 123 bp, Homo sapiens
caaggcaagaccgaattcagaaggatatcgacgtcgtgatccagaagtccagagctgaggactgcctgtttgcaggaacccaagacagaccaggatgaggagcattgccggaaagtcaacgag

SEQ ID NO: 614774 - DNA, 75 bp, Homo sapiens
ctggggaccatgggctccaggatcaagagggcctgaggctatggcaggaggagcaggagaggaaggtgcaagccc

SEQ ID NO: 614775 - DNA, 100 bp, Homo sapiens
agtgatgacacaaaatcccagatctacctgacgggcctgcgagggttgaagattgtgaagcaatagcctaaggtggatccataaagaacccagccaaccc

SEQ ID NO: 614776 - DNA, 100 bp, Homo sapiens
ctggactgtgaagagtgaggagaccatagctgcacagccagataactgtgtccagaggacccccaggccatccgtggataatgtgcaccataaccctccc

SEQ ID NO: 614777 - DNA, 75 bp, Homo sapiens
gaccagttgaagaaggaagattcacactgtaacattattcacactgaggtacatcaggaacgtctctatcaagaa

SEQ ID NO: 614778 - DNA, 100 bp, Homo sapiens
agctgtcgtgaagaagcaggaggctaagaaagtggtgaatcccctgtttgagaaaaggcctaagaattttggcattgacaccattcgcttttcacccaag

SEQ ID NO: 614779 - DNA, 90 bp, Homo sapiens
ggaagagatgggctcccgggtcctcctggttcccctgggccccctgggcagcctggctacacaataccttctccaggcaaattccgttcc

SEQ ID NO: 614780 - DNA, 75 bp, Homo sapiens
gaatccagggtacagataggagaatacagtcgttttgaagctaaaatacatgatttacgggagcagatgatgaat

SEQ ID NO: 614781 - DNA, 75 bp, Homo sapiens
agctccatccctttgggcagacagcccatggcacaggtgaaaaatcacatgtggatttttgtaaatgccttaatt

SEQ ID NO: 614782 - DNA, 97 bp, Homo sapiens
cctcaagcctgccaagtcagctcgctctgtccgtgcccagcgccacaccgacatgcccaagacccagaagagggtgtaaatccatctgttggaagat

SEQ ID NO: 614783 - DNA, 90 bp, Homo sapiens
caagctgccggccagaccgcaatgagccccaccgaatccaacaaatcctcaactacatcaaaggagatacaactcgtcaacgaatcaaat

SEQ ID NO: 614784 - DNA, 82 bp, Homo sapiens
aaacgatcatcgagctaaaatatcgtgttgactctaaaatagagctcaagcttgagaagagagaaccactaaagggcagagc

SEQ ID NO: 614785 - DNA, 74 bp, Homo sapiens
attccaagtaactcttatttggacttggaccactctataggaactcagtatagtgccaacccacctgttacaat

SEQ ID NO: 614786 - DNA, 75 bp, Homo sapiens
gtctcttacgtctgcggaagtgcagctgcctcagttcttagcgcaggtggctgcgctggagcggcagatctttga

SEQ ID NO: 614787 - DNA, 98 bp, Homo sapiens
gtgcatcagccagggccggagctacgacacggatcaaggacgagtgttcgtgaaagtgaaccccaaggcggagggcttgtcaatgaggcagatcagat

SEQ ID NO: 614788 - DNA, 100 bp, Homo sapiens
cagggaaaggcaaaggcaaaggcggctcgggagattcagccgtgaagcaagtgcagatagatggcctttggtgctgattactatgattacggacatggac

SEQ ID NO: 614789 - DNA, 51 bp, Homo sapiens
gtatcaagtaatggtgcaaagcctgaaacagtattcgtggctactttgggg

SEQ ID NO: 614790 - DNA, 100 bp, Homo sapiens
ccgtcgtggaagcaggactgcgccgcgtcttcctcaaggaagtagtcatgccccacaagatgtcagtttgtcatatccccaacatcatgttggaaattca

SEQ ID NO: 614791 - DNA, 82 bp, Homo sapiens
tgggagacctgctgcacatcgtcattgacatccctatcaatgtctacaagatgatgaagaacgagagcttcaaatggatcct

SEQ ID NO: 614792 - DNA, 90 bp, Homo sapiens
ccggctgacctcgctgtacgccgagcacccaggcgactgcctcatcttcaagtatggtttgaagtggtgaacatggatttttctcggctt

SEQ ID NO: 614793 - DNA, 101 bp, Homo sapiens
cttggactgagtcctgcaggacacagggggatatgagactttctactcggaatatcctgagtgttgcgtggatgtaaaacccatttcacaagagaagattg

SEQ ID NO: 614794 - DNA, 75 bp, Homo sapiens
tcatgctgcgcggccttcccatcaccatcacagagagcgattgctgtgctgtggctttcattgagaagctagacg

SEQ ID NO: 614795 - DNA, 100 bp, Homo sapiens
ggcagctctacaagctcctcagtgaggacttcctgcctgagatctgcaacatgatcgcccagaagatataaaccacagtacttcaggatcccattatgaa

SEQ ID NO: 614796 - DNA, 82 bp, Homo sapiens
cgcggggccaggaagtcggagtttgagccccggaggcagagcggctgccatggaatgtatcctgtcaggtataatgtcagtg

SEQ ID NO: 614797 - DNA, 100 bp, Homo sapiens
ctgggtagttcgaggggtttttgcggacttgatcatcttccctgacgactgtgagttcaagcgggtgccgcagtgccccagcgggagggtctacgtgctg

SEQ ID NO: 614798 - DNA, 50 bp, Homo sapiens
ctaaagtccagcatgtcatccattaccagattgaccctgctacgggaatg

SEQ ID NO: 614799 - DNA, 51 bp, Homo sapiens
ggcgaaaactaagattgctacagcagaagatggctgtgccacccacgtatg

SEQ ID NO: 614800 - DNA, 100 bp, Homo sapiens
aaaacaagaattacagcagccaacctatgttgccctgagttacataaatagactatatcatcatgtacatagaaaaatccaaaggattctgcaaaaaagc

SEQ ID NO: 614801 - DNA, 74 bp, Homo sapiens
caagttgtcgacgaccgacagggtggtgaaaggattctcaaagttggattggtggaaacaatgaaccattgaca

SEQ ID NO: 614802 - DNA, 98 bp, Homo sapiens
gtggctggagacatgagcaagaaaagcctctgggagcagaagggaggctccaagacctcatcaacaattaaggtcgacaaagatgctgaattagtggc

SEQ ID NO: 614803 - DNA, 83 bp, Homo sapiens
ccgcaaccagagccgccgccacggttggtgttcgaggaagagacattgttgttcttggtgtggagaagaagtcagtggccaaa

SEQ ID NO: 614804 - DNA, 51 bp, Homo sapiens
ggcggagtcggggctcctgacgagcagtatagctgtgactatggatctggc

SEQ ID NO: 614805 - DNA, 74 bp, Homo sapiens
tggaaatcagcgcggagttaccccagacccctcagcgtctggcatctgcccgggtcctttttgtgctgattgtg

SEQ ID NO: 614806 - DNA, 75 bp, Homo sapiens
catcgccggagcctgaggacacttctctgtcgtcacactctgctttcccagcacgctgcctcaccaagaaagaat

SEQ ID NO: 614807 - DNA, 98 bp, Homo sapiens
ccgcctgagcccagcccccagaaaggattgtgacatatcgttggacccagaattgaggtgtgagttcttgatacgaatgaaaggccaagagtttgttg

SEQ ID NO: 614808 - DNA, 90 bp, Homo sapiens
cactaagctggtgttgtcctatcgacccagctggatcgtgtaaccagtctatgggaagtgagttttctggatatgccgcagaaggatccg

SEQ ID NO: 614809 - DNA, 100 bp, Homo sapiens
ccaaacttcagatgcagactacagctctggagtttaggcaacggattatcttacggctcctgagtcctataagaatgtgacagatgtggtaaatacctgc

SEQ ID NO: 614810 - DNA, 90 bp, Homo sapiens
ttacagtcaaaaccccagcgtttgcagaatctgtcacagagggagatgtcaggtgggagaaaggaatttggtgcattgatgagcaattac

SEQ ID NO: 614811 - DNA, 90 bp, Homo sapiens
aaaaggataaggagatcatagcagagtacgatactcaggtcaaaggtggagccgccaccaaaatgcagattttcgtgaaaacccttacgg

SEQ ID NO: 614812 - DNA, 90 bp, Homo sapiens
cggtgagattggaagtggcggcggcggcaggcggcagaggggagacaatgcagatcttcgtgaagactctgactggtaagaccatcaccc

SEQ ID NO: 614813 - DNA, 90 bp, Homo sapiens
gatatgttatcactggaatttattctgaagaagatgttttgctactagctgtaactgaagttcgtgaagtcaccagaaaatcagtccctc

SEQ ID NO: 614814 - DNA, 74 bp, Homo sapiens
cagacatctacaaccttcgatctcctgacgaatctggacatctgtcccttacttagcatcctacgtcagtcccg

SEQ ID NO: 614815 - DNA, 100 bp, Homo sapiens
tatgacagtgcagacctggtggcacagctcagggctgctcacagtgaaggcaataccactgctggattgggtgattatgggagtgctattgagacactgg

SEQ ID NO: 614816 - DNA, 75 bp, Homo sapiens
tcttggcaaagcttctccctcagtatttagaccagctgcagacctattcacagacttggaaaatgcatttcaggg

SEQ ID NO: 614817 - DNA, 75 bp, Homo sapiens
acttgaagatggatatcagctacagactttcctgagtcagtttcttcactagttgaagaaggagaaaaacagaac

SEQ ID NO: 614818 - DNA, 90 bp, Homo sapiens
ccgggacgcgcgtacgccctgctgcttctcctggttttcaaatggaacattttgatgcatcacttagtacctatttcaaggcattgctag

SEQ ID NO: 614819 - DNA, 88 bp, Homo sapiens
gcgccccgcggcatggcagcctcagatgatgattattctccaccgtctaagagaccaaaggccaatgagctaccgcagccaccagtcc

SEQ ID NO: 614820 - DNA, 100 bp, Homo sapiens
cgtcaatgaaaaaatcagagatcggctgcctgtgaatgtccgagaactgagcctggatgatcctgaggtggagcagaaacctctgcgccatgagagccaa

SEQ ID NO: 614821 - DNA, 74 bp, Homo sapiens
gattcgcagtggtcgcttcttctccttgggaccctgaagtggctgatggaggagagctggtcctggggggctca

SEQ ID NO: 614822 - DNA, 100 bp, Homo sapiens
agccagcacactcctcgcgagcaaggaatgtatcctgtcaggtataatgtcagtgaatggcaagaaagttcttcatatggatcgaaacccttactacgga

SEQ ID NO: 614823 - DNA, 100 bp, Homo sapiens
agagaggacgcacaagaacttgagcgacatggagaacgaattctactatcgctacccaagatgtgatggagctgcttgaagaagatctcacatgccctat

SEQ ID NO: 614824 - DNA, 100 bp, Homo sapiens
taaagatccaggcaataatgatgcttcctcctcttggacagccttttacagttctggccatggaacttcagagaaggctcgaagggaattgaaacgcttg

SEQ ID NO: 614825 - DNA, 100 bp, Homo sapiens
cggagctgacggtggaggttcgcggctctaacggggctttctacaagatcagaatcaagctttgcgactctgtctgggtagcactagtgttggaggtcag

SEQ ID NO: 614826 - DNA, 76 bp, Homo sapiens
agaggtttcagccagtgcatgaccttactattggcactaacataaatagtgactctccagttggaaaaaagctgac

SEQ ID NO: 614827 - DNA, 100 bp, Homo sapiens
tcaatgctttcattgaaaaacaggaggaagaaggcacctacgatcaaactctggagttccgtaggggaggtgatggccagccaagacgatccactcggcc

SEQ ID NO: 614828 - DNA, 101 bp, Homo sapiens
gcggcgggcgagggcgactacgaccagtgaggcggccgccgcagcccaggcgcgggggcgacgacaggtcagtatgggaatcctttaaataaatatatcag

SEQ ID NO: 614829 - DNA, 100 bp, Homo sapiens
gatttggatatcgaatcccagacctgtgcttctgactatcttctcttcaccagctcttcagatcaatatgacctcagacatacgtggatcatatggatgg

SEQ ID NO: 614830 - DNA, 75 bp, Homo sapiens
ggctctcactacaaaccttaatctcatcttagagaaaaagcttgtggtgaaggggggcaaaaaaaagaagcaagt

SEQ ID NO: 614831 - DNA, 100 bp, Homo sapiens
gcgctagcttcggagtctcccgcgcgcacctcagccgcctcctagcggcgcggcgctcgctcctacgattcccaaatgctggaaaatcctctttgctaag

SEQ ID NO: 614832 - DNA, 101 bp, Homo sapiens
cgccctgcgccagccttcgtccccgcagaggaccccccgacaccagcatggactgctgcaccgcatttccataagcttccaagcctcctctcttgtgatga

SEQ ID NO: 614833 - DNA, 51 bp, Homo sapiens
cctgggcattgtacaccgggatctcaaggacgagcctgtggagtgggagac

SEQ ID NO: 614834 - DNA, 117 bp, Homo sapiens
ctctgggtggccaacgatgagaactgtggcatctgcaggatggcatttaacggatgctgccctgactgtggaacggcacatgtgtgatggggacattgttatcttcaaccggcagcc

SEQ ID NO: 614835 - DNA, 100 bp, Homo sapiens
tacaccacccatgaggacgtggaggtgggaaggtgtgtccggaggtttgcaggggtgcagtgtgtctggtcttatgagctgtttgcagacaaggtcccaa

SEQ ID NO: 614836 - DNA, 75 bp, Homo sapiens
cggccgccgccgctgccgcttccaccacaggtttttcgttggaatatacgttgcacatttatggcgattctgagt

SEQ ID NO: 614837 - DNA, 75 bp, Homo sapiens
cgcatattatgctacatgaaaaggaagaggagattacctggggcaattgatgttatcggtcagactataactatc

SEQ ID NO: 614838 - DNA, 100 bp, Homo sapiens
gagagagaagatcggggggctgaaatccatcttcatcctaccgctccgcccgtggtgaaattgcctctacctttgatcacccagaactggtgaagcttgg

SEQ ID NO: 614839 - DNA, 137 bp, Homo sapiens
cgggcccagatcctctggcggagcagaagagggccttgatgtacacacgtcggtactcaaggaggaccatgacatcatggaagccgatctggacaaagacgaactgatccagccccagctcggagaactctcaggag

SEQ ID NO: 614840 - DNA, 90 bp, Homo sapiens
cttcctcgttgtttggacatgatctttaacagtatagggtcatttcaagctaaacgatatactagggaattgaaattcggagagatcaag

SEQ ID NO: 614841 - DNA, 75 bp, Homo sapiens
tggcgccctacagcctactggtgactcggctgcagaataatccagaatggctactctgatctatgttgataagga

SEQ ID NO: 614842 - DNA, 82 bp, Homo sapiens
tgacaatttaagagcatctcccttcttattacagtatattcaagaagaggatccatgttctcacaagctatgaagaaatggg

SEQ ID NO: 614843 - DNA, 100 bp, Homo sapiens
aagccgactctcaccatcatcaagacggaaaaagtcgatctggagcttttcccctccccggatgtaaagacgaccgtggtttaccctgccacagagaaac

SEQ ID NO: 614844 - DNA, 75 bp, Homo sapiens
caccaacgtgtccttgtaccctggctacaacttcaggaaagaatacccacctcatgtccaaaaagttgaaattaa

SEQ ID NO: 614845 - DNA, 51 bp, Homo sapiens
atttttgccctcaaaagaaatggcagggtccccagccccaccccagcccca

SEQ ID NO: 614846 - DNA, 77 bp, Homo sapiens
cgaagacgcggtgggccgcccctccgaacttggagcgtgatgcccagaagtgtgtgaactggtctgtgaccacaaag

SEQ ID NO: 614847 - DNA, 75 bp, Homo sapiens
aaacccggggctaatgttgacaacaggctcgaggtgctggagaatctggtaaaagcaccattgtgaagcagatga

SEQ ID NO: 614848 - DNA, 75 bp, Homo sapiens
tttgctgtcctgttcaccactctacctccagcacagaatttggcttatgacaaatttacatgtattggagaccag

SEQ ID NO: 614849 - DNA, 123 bp, Homo sapiens
cgtggctgctgggtttgaacggaatgctggagtcagtggaagacggagctggtcggcccgaagaggaggagacccacccggtggacttgagctcgctctccagtaagctactcccaggcttca

SEQ ID NO: 614850 - DNA, 100 bp, Homo sapiens
ggtgcagatgaaaaacatcttacagcagcattttgacaaggtggatgaaatctctcggcgtttaatttgggaaaaaaacctgaagtatatttccatccat

SEQ ID NO: 614851 - DNA, 76 bp, Homo sapiens
cacagccctgcggacaacaagcgggtggtgcggttgtgtcagaacccaaagctggcgctaaagaatagcccacctt

SEQ ID NO: 614852 - DNA, 100 bp, Homo sapiens
cggcgggctggagacatggaccgcggcgagcaaggagcagcatttctttctattactactatctatgctgagactggttcaggttttgtagtaccaagtg

SEQ ID NO: 614853 - DNA, 77 bp, Homo sapiens
ctcgatctgctcttcgtctgcttcttcctcttcagtcaagttccagggccctgcgaaccagaagacctcatcgacgg

SEQ ID NO: 614854 - DNA, 100 bp, Homo sapiens
gagcctgcgtgctggtgatcgcgctgatgttcctggcctggggggaaggtccatggggccgatgtatgggagatgaatgtggtcccggaggcatccaaac

SEQ ID NO: 614855 - DNA, 74 bp, Homo sapiens
gcttccaaaccttgtggaactgaattgcattttgtgaaaaaagaacaagaattttctgcaaggatcatatctaa

SEQ ID NO: 614856 - DNA, 100 bp, Homo sapiens
ggctcatccaaggatgagattttgccagagaaaggacgagcagcaagtcagggagcttaaggcacttcaaaaaacgtatcagaagatacttcgagaaaaa

SEQ ID NO: 614857 - DNA, 75 bp, Homo sapiens
cgccaacagtacctcattgctctttggcgactcttattggtcaaaatgcagatcttcgtgaaaacccttaccggc

SEQ ID NO: 614858 - DNA, 100 bp, Homo sapiens
ctcagctttatgtcctacgacgaaattagccagctccgcctggtctctaattaacagaagatggcaaagcccagccacagcagctatgtccttcagcagc

SEQ ID NO: 614859 - DNA, 100 bp, Homo sapiens
atgccgtcggagaagaccttcaagcagcgccgcaccttcgagtatggtgtttgcgaaaacttgcggaagctggagatcacaggcgtgtcttgtcgggacg

SEQ ID NO: 614860 - DNA, 100 bp, Homo sapiens
cggaagaggtgggtgctcgccctggtcttcgggctgtcgctcgtctacttcctcagcagcaccttcaagcagggggcagtacccaaaggaaacgctacga

SEQ ID NO: 614861 - DNA, 75 bp, Homo sapiens
acaccaccggtcctgagtccgcgaatgaaacagtgattcagagtgcatataaaagcctcatacaacacttggaag

SEQ ID NO: 614862 - DNA, 83 bp, Homo sapiens
ggatgacatatttttggacctgaaacagaaattctggaacacctatatgcgtgagtgcatctccatccacgttggccaggctg

SEQ ID NO: 614863 - DNA, 100 bp, Homo sapiens
atttcctgaaaagaaaggtggcttaaaggaactgtttggaaagggccctcaaaatgccttcttcctcgtaaaattctggaaaccttcagcaaatgtgaag

SEQ ID NO: 614864 - DNA, 78 bp, Homo sapiens
ctagctgttctcaaggcggattaattagcccaagaaacattatattcattggtttgaagaaaagcagcagcaatttga

SEQ ID NO: 614865 - DNA, 98 bp, Homo sapiens
cgaaggccgggacccggttccccggcccacagtgggggtgtgcaaacccgagagaactggcctgctgagggatgcccaagaagttccagggtgagaac

SEQ ID NO: 614866 - DNA, 80 bp, Homo sapiens
ccctcgtgagcgacccggacaccgacgcgctcatctgctggagcccgtttgatgaaggccggaacaactttgaaggggag

SEQ ID NO: 614867 - DNA, 100 bp, Homo sapiens
gcctggagcaacgaaaagagccctggaatgtgaagagacaggaggcagcagacggacatccaggtggtgagcttcattttctccaaattggaggaacctg

SEQ ID NO: 614868 - DNA, 83 bp, Homo sapiens
gccgagcagactggcatctgtaaggtgcggccgccgccggttttaaaatcaaagatgggaaaatcggagaaaattgcccttcc

SEQ ID NO: 614869 - DNA, 100 bp, Homo sapiens
ctgcaggaaacaagctcctacttccagaaaaagtgctcctgggactccaggataccagaaatgcactcggtgatggaaagagagccactattctgaagaa

SEQ ID NO: 614870 - DNA, 100 bp, Homo sapiens
gtacagaaattgaaaggcttcaaagctagcaggtagttgatgtcacttggcgatattcctgcaaacatgaagaggtgattgccagaagaactaaggttaa

SEQ ID NO: 614871 - DNA, 100 bp, Homo sapiens
tgccagatgacttcaaagcctattcaaaaataaaggtggacaatcacctttttaacaagagtgagctgagtcgacagaaacttcatacccaagagctgct

SEQ ID NO: 614872 - DNA, 82 bp, Homo sapiens
cctccccagccacgtggaactgaaatcaaggcagatgtagaaccaagatccagcacagtgacatctcatcccttctcatctt

SEQ ID NO: 614873 - DNA, 97 bp, Homo sapiens
gaacctgaggaccattattttttaatggaaattgacaatggcccttcagctatgctaggtctataatgggaagtgtcacagttcggtatttctgtta

SEQ ID NO: 614874 - DNA, 100 bp, Homo sapiens
ctggcgcagcagccgcaccagaaccaggcgaagctggtggtggcgctgagccgcacctaccgcacggtattgaagcccctgggtgataatttgatggagg

SEQ ID NO: 614875 - DNA, 100 bp, Homo sapiens
tcccagccatgtcatcttatctacgaaatgattcagctggcgctacgtacatctttgggaaaagtggtgggcttatcctctacacctggccagccaatga

SEQ ID NO: 614876 - DNA, 100 bp, Homo sapiens
gggcgcatatcttcaaagcacctagtacctcctaccattgtcaactgatatcaacatggcaggagagcccaaaccatacagaccaaaacctggaaacaag

SEQ ID NO: 614877 - DNA, 126 bp, Homo sapiens
gggcctcagctgggattcccgcgcccctcggacggccacgagactcgggatggtgccatgacaatggtgtgaactacaagattggagagaagtgggaccgtcagggagaaaatggccagatgatga

SEQ ID NO: 614878 - DNA, 100 bp, Homo sapiens
ggatgccaagaccaaattagaggctcaggctgggttgcggcccatttgtgaatttatgaccttcaatttctccatgcaagccattgaccaggttataaac

SEQ ID NO: 614879 - DNA, 75 bp, Homo sapiens
taataaaagttaaaacaattgctgcacgaaacactgaaattttggcagttgcagagcttgaagtgaaaaccagag

SEQ ID NO: 614880 - DNA, 74 bp, Homo sapiens
ctggttcgaagtctcagcggtattctggtgcttatggtgcctcagctgactcttttggtgatcccttcttcccc

SEQ ID NO: 614881 - DNA, 82 bp, Homo sapiens
gaacaaatagagctgccagaggttccctccgagccccttcctgagaagatcccagcacaggaagtcctggagaacctgaagg

SEQ ID NO: 614882 - DNA, 100 bp, Homo sapiens
tacagctttcactatggggtggagacgtggtactcagcaagctcgagttaaagttggatgtgctggaacagcaagatggaaagttgccttttgttcctcc

SEQ ID NO: 614883 - DNA, 143 bp, Homo sapiens
ctcagcgccaggcctttcaggagacccgcggttacatccaggcccggctccacctgcagcatgagaatcggcagcaggttaaaaagatcaagtggcatgagcagccttttggggaaaattggtgccaagaagcagaaaatgag

SEQ ID NO: 614884 - DNA, 100 bp, Homo sapiens
gaagagtggctggttgctgcgacagaagttgtggaaagtaaaaatgtagccctaccaaaaggaactattgtactggcttctccaggctggacaacgcact

SEQ ID NO: 614885 - DNA, 100 bp, Homo sapiens
tcagatcttcatgtgtctcttctaagctgaataaagctgttttggaactgtcaggtacctcaaagcctggcagccggtcaagttccccaggaaaattgtt

SEQ ID NO: 614886 - DNA, 100 bp, Homo sapiens
agagaatgagttaatctcctcagaaatcactaaatactactctgaggggcttagaaattaacaggtacggcaagaagaagctgaaatacctgccctacaa

SEQ ID NO: 614887 - DNA, 88 bp, Homo sapiens
ctcccaaggtgctgggattacaggttgtggacctggcctattagcagatgccaagatgcgggtatttgaacgttcagtgtattttggt

SEQ ID NO: 614888 - DNA, 74 bp, Homo sapiens
tcagagtgccggaccccagcacacagaagccgagacggagacagtgtttcacaaaatgattttccttctgaagc

SEQ ID NO: 614889 - DNA, 100 bp, Homo sapiens
atccttggatttattgctgctgacaataaagtgttcccagtgaagcggcggaaccggcacagcctagtggggcctcagcagctaggaggacggccagccc

SEQ ID NO: 614890 - DNA, 100 bp, Homo sapiens
gctttatgcctccaaactcagctattgccataccttgctctactaaccattccaatgagaaatcaaggtgcttccaatagtcctggtcagcctaattctg

SEQ ID NO: 614891 - DNA, 90 bp, Homo sapiens
cttcaccatggcctagcagtggctctccccagtcacccccttcacccccagtccagcagcccaagacttcatcctgtgaagccaatgaat

SEQ ID NO: 614892 - DNA, 75 bp, Homo sapiens
ggaaactaggtcgatggtcggcggcgcccggatgggcagctgagaagcctggaatggtcccccctccgccgggag

SEQ ID NO: 614893 - DNA, 100 bp, Homo sapiens
caagtttggtgtccagatggacagagttgatcaggtgtttcactgcctgaatgaaatcctagatctctgtcacagtttttgttcgctggtcagtcagaac

SEQ ID NO: 614894 - DNA, 109 bp, Homo sapiens
cgcggacgaagatggcgaccgccatgtacttggagcactatctggacagtggcctgtgagtacggcatggtgcacgtggtctcccaggccgggggccccgaaggcaaag

SEQ ID NO: 614895 - DNA, 101 bp, Homo sapiens
catatttgatgaggtggatctgacagatgccagcgtagctgaatccagtaccaaaaacgtcaacaacagttttacgtaattgtgtaagtgactgcattgga

SEQ ID NO: 614896 - DNA, 80 bp, Homo sapiens
agagcatcgactggaccaagatcgagcccagcgtcaacttcctcaagtcgcccaaagatataacacgtgggaaccggagg

SEQ ID NO: 614897 - DNA, 75 bp, Homo sapiens
tgaacattctgccgaagagaacaagacgtgtgaagactcagacgctgttggaagctctgactgtggcagttgttg

SEQ ID NO: 614898 - DNA, 98 bp, Homo sapiens
ggcctgccccagtgacagtgggacgggctgccctaacaatccatttcacagatgaagaaacagactcagtgagcacgtgatcacttctcacaactaat

SEQ ID NO: 614899 - DNA, 129 bp, Homo sapiens
aaacgatcctttgtctttgttagatgattcgaagtttcctatagaggataccccattggttccagtggttattaacttggtgatgcttttggctgaaatgaaaatacaggaccgcgctgttccatcctt

SEQ ID NO: 614900 - DNA, 108 bp, Homo sapiens
agaggcgcaaacaagccaatcccaggaggaaaaacggtgttccattgcctaaagaggagaacatttctgctcccttgatctccagctccccagtgaaggcagcccggg

SEQ ID NO: 614901 - DNA, 98 bp, Homo sapiens
aagagttcaactttcccagaagttgttctaacgctgcctttgctttaaaacagtattacttgcggattctgagtaacaataagatatccgagctgaag

SEQ ID NO: 614902 - DNA, 100 bp, Homo sapiens
tttagggtcctttatatagaagggagagtagggagcagctccccgagtcagcctatatgcaccagctcttgggcctcaacctcctcttcctgctgtccca

SEQ ID NO: 614903 - DNA, 96 bp, Homo sapiens
ggatcataacgcacagatcattgtcatgctgccagacaaccagagcttggacataagcagctctatgaccaatagcacagctgccagtagaccccc

SEQ ID NO: 614904 - DNA, 50 bp, Homo sapiens
aatgcaagaagaccatcatgccaggcagtggagctactgctgtggttcag

SEQ ID NO: 614905 - DNA, 50 bp, Homo sapiens
gagagcttcacagtgcagcggcgaggtaattctctaacgggccacaacaa

SEQ ID NO: 614906 - DNA, 50 bp, Homo sapiens
ccttcccagccctacctgagaacgaagacttaattcagtgcacaaatgag

SEQ ID NO: 614907 - DNA, 100 bp, Homo sapiens
attgtctggcaggaggtttttgatgataaagcaaagggcaaatgtgagaaacgagtacaggatgtaattgaacgattttgggatttcattgaccagctga

SEQ ID NO: 614908 - DNA, 74 bp, Homo sapiens
tggccacctcgccgcccagctcacgccgcgcccgcgctcccaggctccgggatggacaaccggaaattttctac

SEQ ID NO: 614909 - DNA, 75 bp, Homo sapiens
ggagattactaccagggccggaggattaccatcaccggaaatgaatagacctagtgctgccaacccttgttctcc

SEQ ID NO: 614910 - DNA, 82 bp, Homo sapiens
agcgcctgagaaagaagtttgcccaaaagatgactcagaaccgtgctgcatactatcctcctagccaaattgctcaactaag

SEQ ID NO: 614911 - DNA, 100 bp, Homo sapiens
gcgagccaggtctgaggccccgctccccgaaacgtgaccatgtggattcaacagcttttaggactcaggttgacatcatggacatatgtgagtccatcct

SEQ ID NO: 614912 - DNA, 80 bp, Homo sapiens
ctaatcgtgagcatggatgtgattcaacatgaaacaattgataacaatccatattcctcatttggagcaactctggtgag

SEQ ID NO: 614913 - DNA, 89 bp, Homo sapiens
ccgacaggaacgtggagatctggaagatcaagaagctcattaagagcttggaggcggcccgcggtgggtaattccagaattgattggcc

SEQ ID NO: 614914 - DNA, 75 bp, Homo sapiens
ctgccttcactcttctcccctgattcaagactcctctgctttggactgaaggatgactcactggttgtgtggaag

SEQ ID NO: 614915 - DNA, 100 bp, Homo sapiens
agccagtacatcaagttcatcagcgagactctgcggcgcatggaggaggaggagtgatgctacaggacgaagaggaatggataaaaacattggcgagcaa

SEQ ID NO: 614916 - DNA, 88 bp, Homo sapiens
ccataaaagttgatggagattacctttggagcacgaacttccaggagccggtgcagccgctgacacagcagcaggtggcgcagatgca

SEQ ID NO: 614917 - DNA, 82 bp, Homo sapiens
ggcgtcctcaatgacttccacaagtgcatctataaggcctccggtgtggctgtctctgatggtgtcatcaaggtgttcaacg

SEQ ID NO: 614918 - DNA, 100 bp, Homo sapiens
cgccttcatgctgctcacgcaggtgtctttcctgaagactatcttcccgtctcaaaatggacatgatggatccacggatgtacagcagagagccaggagg

SEQ ID NO: 614919 - DNA, 90 bp, Homo sapiens
cccgatccaagttggaattagcatcctctcggggatgaagatctccttcaacgacaaaagcctgcagaccacatttgagtacccttccga

SEQ ID NO: 614920 - DNA, 100 bp, Homo sapiens
cgctccctcaccgagggggagatgaagaagggtctcgggtccctaagccacggggttttcctttggaatatggataaatacaccatgatacggaaactag

SEQ ID NO: 614921 - DNA, 75 bp, Homo sapiens
gccgccgcttgtgctgcagccatgtttcgttggataccactagctgggaatatccagatgtctgcagacattatt

SEQ ID NO: 614922 - DNA, 74 bp, Homo sapiens
gcgccacaagctcattcactgtgtaggtggcagctttggctatcgcaagtggcaatggcttgttactcaaagga

SEQ ID NO: 614923 - DNA, 100 bp, Homo sapiens
ggaaatgcctatactgccctcctcactcacttccggtggcagggaactctaatgatccaggacaaagaagttaccctggagtatgtatcaagcctggatt

SEQ ID NO: 614924 - DNA, 100 bp, Homo sapiens
catgtcctacgtgaaggatgacatcttccgaatctacattaaaggcctgcccatccaggttcgtgacgcaggattgtcttttaaagatgacatgccaaag

SEQ ID NO: 614925 - DNA, 75 bp, Homo sapiens
caagggaggaggaagatggcggcgggggcgaggcctagttccccgagagcgttcagacagtgggggctcaagctc

SEQ ID NO: 614926 - DNA, 83 bp, Homo sapiens
tgcagctctgaagtggttctgcctggtccgacccccagtggcactaacgtgggatcctcagggcgctctcccagcaaagcagt

SEQ ID NO: 614927 - DNA, 75 bp, Homo sapiens
ctgaaacagcggataaacttcagtgatttagatcagcacttttcaggattagaagaggctgtgtatagaaacata

SEQ ID NO: 614928 - DNA, 75 bp, Homo sapiens
ccttaccagctcacctctcgccgcacatgtttggaggtgacagagctgaatgaacctctctccaatgaagatcga

SEQ ID NO: 614929 - DNA, 90 bp, Homo sapiens
ttgaacgcggtgtggaatcggcagcgaggaatcctggagcacagagaagctcccagctttgaagatgctgtctttgcatttcaactacgc

SEQ ID NO: 614930 - DNA, 75 bp, Homo sapiens
ctggtggtccacgactgtcccgtctggtgttgctaacaaccacaagcagaatttgatgacggtggcaaaccttgg

SEQ ID NO: 614931 - DNA, 51 bp, Homo sapiens
aaactaagccgattttccggaaaaagtctattatcctcccagtccacaacg

SEQ ID NO: 614932 - DNA, 83 bp, Homo sapiens
atctcatttaccccaaggtcctagatactgtcatccccgtgtggctgaatcatgcaatggttgaaaggattgttgacaaaagg

SEQ ID NO: 614933 - DNA, 100 bp, Homo sapiens
ataaaatcttatgattatgaggcatgggcaaaacttgatgtggagtggaagctggacacactatgtgacttgtatgaaaccctgaccatcacccaggcag

SEQ ID NO: 614934 - DNA, 90 bp, Homo sapiens
ctcgatgaggataacatccctccagaagatggtacatcgagtacatgtgtgacatggtggcggaggagcccatcacaccccacagcaagc

SEQ ID NO: 614935 - DNA, 78 bp, Homo sapiens
cgtgccacagatcccatcagaggcaccccagacacagtatgagggtgctggttgatgctcgagagaagcttcatattc

SEQ ID NO: 614936 - DNA, 102 bp, Homo sapiens
gctgccagagatattttcaacaaaggatttgagatgctgttcagttaaatgtgattgcaacgcgacagcttattctccttgcacaacaaatgaagaatctgg

SEQ ID NO: 614937 - DNA, 105 bp, Homo sapiens
aactttctgggcgttcatgatcctggccagcctgctcatcgcctactgcaggggggccctcagcctcttggccttgaacgggctgttcatcttgattcacaaaca

SEQ ID NO: 614938 - DNA, 87 bp, Homo sapiens
cctgagagagctcatctcagatctggagcatcggctgcaggggtcagtgatggagctgcttcaggttgatgccttccctcccaatgg

SEQ ID NO: 614939 - DNA, 75 bp, Homo sapiens
gcggattcgccgaggcaccgaggcactcagaggaggtgaagcaaatcatggaggaggctgtcaccaggaagtttg

SEQ ID NO: 614940 - DNA, 144 bp, Homo sapiens
tacgaatcccagaaatctaaatccagcagcgtggctgtcggaaacgactttggcttttcctctcctgtcccaggactcgggacctggttcgggccggggtgctgaaggagaagcccctgtggtttgacgtatatgacgcctttc

SEQ ID NO: 614941 - DNA, 100 bp, Homo sapiens
ccaccaggactcagaggccgccatcaaccgccagatcaacctggagctctacgcctcctacgtttacctgtccatgggcacagactccatcaagatggag

SEQ ID NO: 614942 - DNA, 75 bp, Homo sapiens
cgcagatgcccaccggaatggagaaggaagaggagtcgacttctcgtgggattgatgctgagaaggtgaatctgg

SEQ ID NO: 614943 - DNA, 100 bp, Homo sapiens
ccacgtcatcctgaacgacatcaccgaggagtgtaggcccccatcgtccctcattgtgttaacagggcacaaccattatgtgatgtgtgctcagttccac

SEQ ID NO: 614944 - DNA, 100 bp, Homo sapiens
aaactttagagaagacgttcatatcattgtcttccacagatgtgtcaccaaaccaggctagtagcattaccagagagctccaggggagagagctaaagct

SEQ ID NO: 614945 - DNA, 75 bp, Homo sapiens
gaagcagcgacggcacagcgggaagaatggtaatcgtgctgtccacacgactcctgaagccacttaacattcctg

SEQ ID NO: 614946 - DNA, 80 bp, Homo sapiens
gcaggcaggcgctgagaaggacgcgcagtccatctctctcagggtttggaaatcccttgtctccaggttgctgggattga

SEQ ID NO: 614947 - DNA, 75 bp, Homo sapiens
aaaataccttctttaaatgcacagtggatgttcctgaggatttgagagaggccataccataaagtctccaaagga

SEQ ID NO: 614948 - DNA, 82 bp, Homo sapiens
acttctcctagttgcagtcaggcttcatacgctattgtcctgcccgtaccgaggagaaggcattgtatatgggacactagag

SEQ ID NO: 614949 - DNA, 98 bp, Homo sapiens
caacattgacctcacaaccgagcaaattgaagagacgttaaaatacttccttaagctgaaggaatctgttgttgaaaatcatgcagtgttaagttatg

SEQ ID NO: 614950 - DNA, 90 bp, Homo sapiens
ctacctccgttgaaaggagagccagttactaacttatgctgggctcttgcactgtttggtggaaatggtgagacaggatttgagcaaaat

SEQ ID NO: 614951 - DNA, 108 bp, Homo sapiens
cggacaagacctccaccacgcagagaatccagcctggtgacatctgttcccgagctgttcctgactgcagtgaagctcacccatgatgacacaggagccaggtattta

SEQ ID NO: 614952 - DNA, 100 bp, Homo sapiens
cgacagctctccgagagtgagtccagcttagaaatggacgacgaaaggacctgcagagaaacgcctcctgattttgtcttacaatggaacttaaaaagtc

SEQ ID NO: 614953 - DNA, 48 bp, Homo sapiens
agtctgtgacctgccccttctctttacaatcgagagctccagatcatg

SEQ ID NO: 614954 - DNA, 83 bp, Homo sapiens
ccactgttcctgccacagcggcttcgagctctcctctgatggcaggacctgccaaggtgagaagccctaccactgcaactggg

SEQ ID NO: 614955 - DNA, 76 bp, Homo sapiens
tcatcatgctgaccaccaatcagatccgtaagctgtggcggggccttcgtgggcccgcgatgccaggaccccaacc

SEQ ID NO: 614956 - DNA, 82 bp, Homo sapiens
ggcagtggaaaatgcgctcgggctggaccagcagggtggcccagttgaaatccttcccttcctctaccttggaagtgcctac

SEQ ID NO: 614957 - DNA, 101 bp, Homo sapiens
ttctgtacagtgcttagcctgggttcccagtgctcctgggatgtttataactggagatattgagctcctggcagcttgcagagaagaatttcataggagac

SEQ ID NO: 614958 - DNA, 90 bp, Homo sapiens
aggaaaaggaatcgtatcgtatgtccgctatccagaacctccactctttcgccccaggtctcctggatccccaacaagcactactccggc

SEQ ID NO: 614959 - DNA, 100 bp, Homo sapiens
tggagaatgatatcaaaccagggactcagaagaagatccttgacattgccaacatgctgggcttgtccaacacagtgatgcggctcatcgagaagcgggc

SEQ ID NO: 614960 - DNA, 80 bp, Homo sapiens
agagaaacccggagggcgccgggtgagacggtttaagcggaagcatcttactgccattgactgccagcatttggctcgga

SEQ ID NO: 614961 - DNA, 96 bp, Homo sapiens
ttcttcgaaaactgaagcagatgttgaacaacaagtgtactccaaaatgtggtccaggattcaagcatcggattgttctgtgcaagagcagtgacc

SEQ ID NO: 614962 - DNA, 75 bp, Homo sapiens
ctttgcgaatgtatttattggtgccaatcccctgggaaggatctgagtctctccctgcggagacagccctgaaga

SEQ ID NO: 614963 - DNA, 82 bp, Homo sapiens
atggtacaggaagggaacgtggaaagcgcatacaggaccctaaacaggcctccggtgtggctgtctctgatggtgtcatcaa

SEQ ID NO: 614964 - DNA, 100 bp, Homo sapiens
gagcgcgagagatggagatgggcagacggattcatttagagctgcggaacaggacgccctctgatcccaaagatccctgtgcagctccgattttattcgc

SEQ ID NO: 614965 - DNA, 75 bp, Homo sapiens
aaagaagtgcattgttttggtgactgaacttatgacgtctggaacacttaaaactggccacagatgtctttaatt

SEQ ID NO: 614966 - DNA, 87 bp, Homo sapiens
tggctagacctgaaaatttcttccaaggttgatgcatctctctcagaggctgcaataggatctgtggctttggacacagcaaggtca

SEQ ID NO: 614967 - DNA, 100 bp, Homo sapiens
gtccaatcaggctactttgtagaggaaaatcttcaacactgatttgggtattcggattcccgttggacatgtggactacttcgtcaacggaggccaagac

SEQ ID NO: 614968 - DNA, 88 bp, Homo sapiens
ccccgcgagcacagagcctcgcctttgccgatccgccgcccgtccacacccgccgccagtgtactaatggtcacttgatgtgcgctgg

SEQ ID NO: 614969 - DNA, 75 bp, Homo sapiens
gcggcacgcacgcggtgcagggtaacatggcggatgcggaagagcactgacacggctcccgggacctcggcagga

SEQ ID NO: 614970 - DNA, 50 bp, Homo sapiens
atggccttatcaatgaagctactaggcaacttcagttcatttatgcagaa

SEQ ID NO: 614971 - DNA, 104 bp, Homo sapiens
cggcggtgtagacgccccttcgccgggacctggcacccgaatccggcctgccgggtgtcgtgaaaactacccctaaaagccaaaatgggaaaggaaaagactca

SEQ ID NO: 614972 - DNA, 90 bp, Homo sapiens
caaatgcagaagtaagaggatttatagatcagaatctcagtccaacaaaaggtataagcagtttagccaaattttgaagaacattggaga

SEQ ID NO: 614973 - DNA, 98 bp, Homo sapiens
ggacatcactttagaccctccacctaattgcaggcctatatgaacccaatagcaatggcgagatcaaggggtccaatccagtcttcagggccaacaat

SEQ ID NO: 614974 - DNA, 75 bp, Homo sapiens
cgagcacataacggggttcgggtgtctcgtgtgtgaacatcacagctccagtaataaaccgattcacaaggcgtg

SEQ ID NO: 614975 - DNA, 51 bp, Homo sapiens
ggtgcggcgcgcctgccgcgcggggcagttggctggggaacagaccaggga

SEQ ID NO: 614976 - DNA, 98 bp, Homo sapiens
agctttgaagacttctaccaagggatcacagccatcagaaacggagtactatactggcaattgctggagaagattttgcaattgttgcttctgatact

SEQ ID NO: 614977 - DNA, 83 bp, Homo sapiens
cgcggcggggctgaggcggccgcggggcccgagcgcagatgggtctgtgaagaaatcccggatctcaagctcgctatggagaa

SEQ ID NO: 614978 - DNA, 83 bp, Homo sapiens
ttctcaggacaccatccgttcaattggtacaaagctgcaaaagactgttgaagtagagagcattttgcccagctcactcggat

SEQ ID NO: 614979 - DNA, 82 bp, Homo sapiens
gaagatttggataatacagtatttggagcagagaggaaaaaacggctatctataataggtgaaaacttttggcccgtttgga

SEQ ID NO: 614980 - DNA, 100 bp, Homo sapiens
gctgagcagagccaaggatgagtatgagagggccctgtctcagcgggaccctcctcacaacaacttcttcttcttcgatggcatgaaggggaatgggatt

SEQ ID NO: 614981 - DNA, 100 bp, Homo sapiens
aaagaagaatttattcactcaagactaaaaactaaaggcctgggcctgagaactgaatcaggaatctacttgaaaatggatcggtttatgttggattaaa

SEQ ID NO: 614982 - DNA, 83 bp, Homo sapiens
caatatctgtcttcggtggactccttcggcagtccacccaccgccgccgcctcccaggcccctgtgtccgtctgggatgagga

SEQ ID NO: 614983 - DNA, 100 bp, Homo sapiens
acgaggcggaagaccgcgcgcagggcctgcagcgggagctggacggcgagcgcgagcggcgcgagaaaacatgctgctgctgaagaaacacacggaggac

SEQ ID NO: 614984 - DNA, 82 bp, Homo sapiens
acatggcgacattgacagtggtccagccgctcaccctggacagaggtactccaaagattcaggtttactcacgtcatccagc

SEQ ID NO: 614985 - DNA, 100 bp, Homo sapiens
gagtcgggaaatggccgctgtgtggttgcaacggagataaattcccggaaccgcgattcggcgtgtcagccacgccgcaatgaagagcttcttacagtga

SEQ ID NO: 614986 - DNA, 75 bp, Homo sapiens
cagcaccacagtccttctgcagtccctcgtccagccacccccagttgtggaagatatcaataagcgcagagagcc

SEQ ID NO: 614987 - DNA, 100 bp, Homo sapiens
gtctgacgtgtgatctcgagagacctgcgtacattcggggtgccagaaggaaagcataggtgccattactgcaagtcatcctgccacgtgtcttccctcc

SEQ ID NO: 614988 - DNA, 90 bp, Homo sapiens
gttgcagcgaggagaagcgcagcgacggcgtcgggagagcgcgcctagccggctcgcgagtatctctggagacaaagtagagatagaccc

SEQ ID NO: 614989 - DNA, 101 bp, Homo sapiens
tcccatctgcttgctgtataagaacctggccaacaagattgtccccattgccatccagggtccatgggtcctacgagcacctgtgggccgggcaggtggcg

SEQ ID NO: 614990 - DNA, 100 bp, Homo sapiens
tgcagcacatcagcgaccgggagaacatagacgggcctggattccttctgaaaacattcaagatatcacagtcaacattcatcggctgcacgtgaagcgc

SEQ ID NO: 614991 - DNA, 71 bp, Homo sapiens
cccagccccggagcagtacctcgtgctggaaacaggggcaagtgtccgagtggtgaatcagctacttacag

SEQ ID NO: 614992 - DNA, 100 bp, Homo sapiens
agtggtcaatactggcccagcatttaccacacaatggcctggtcgacaagtgcccccaatgatttatggtacaacttcattgaactgccctaccacgggg

SEQ ID NO: 614993 - DNA, 82 bp, Homo sapiens
gccggccctacagactttcctgcgtggaagcgtttgctgccaccttctgcatcgtagatgtgaagttcatttccaatccgcc

SEQ ID NO: 614994 - DNA, 96 bp, Homo sapiens
cgcgccgcgctccaaccgcctcctcctcctcagtaacgcggaatgatatggaacctagcaaagctgttccactgaatgcatctaagcaagatggac

SEQ ID NO: 614995 - DNA, 88 bp, Homo sapiens
ctcgccggcagcggcgggtccgggccccggggggtccaggctgccacccgggttaccatggagagaggtgtcatgggctgagcctccc

SEQ ID NO: 614996 - DNA, 100 bp, Homo sapiens
agctgttgaaactagatggcaagttttccgtggtatacgcaaaatgtgattccagtccagatctcactgatgaaaaggcctccaggtttttcacctttcc

SEQ ID NO: 614997 - DNA, 88 bp, Homo sapiens
ctcgtccagacgccccaaacaaacagcatcccgggcccaaatcctagacaaagccacagaatatatccagtatatgcgaaggaaaaac

SEQ ID NO: 614998 - DNA, 73 bp, Homo sapiens
tcttctatgtttccacatcggtcagaaaaagatgtgctgtgattctcttgggaagaaccaatatgtttcgctt

SEQ ID NO: 614999 - DNA, 100 bp, Homo sapiens
cttccctgcactctcatcgctctcggcctcggcctcggcctccgacacgttccaagatgagatgggattctccaacatggaagatgatggcccagaagag

SEQ ID NO: 615000 - DNA, 98 bp, Homo sapiens
tcctcttgctcacagagctctgtaaagagtgaccgtctccttatcaagggaggcagaatcgtcaatgatgatcagtccttttatgctgatatttacat

SEQ ID NO: 615001 - DNA, 82 bp, Homo sapiens
aggtacctctccttttccctctccctttccctaaggagccttcacgtaaatgggtccagtcatgcctcccagtaagaagcca

SEQ ID NO: 615002 - DNA, 75 bp, Homo sapiens
acttttggggaccactgcccagaccaaagtgtgactgtgatctcacccagggtggcagaaggaggccttctggag

SEQ ID NO: 615003 - DNA, 87 bp, Homo sapiens
tatggaagcagaagaagctgaggatgaagaagatggtgtctgacttccagcaactgctggcctgtgccagggtgcaagctgagcact

SEQ ID NO: 615004 - DNA, 75 bp, Homo sapiens
gacaaaaggagattctgatgaagaagttattcaagatggtgggcagcctcacaaaaggagaaagacctctgatgc

SEQ ID NO: 615005 - DNA, 82 bp, Homo sapiens
tcggaaccgagagctggaggccactcgacgccagaggatggattacccagtattcatgatgttgctatcaaaagttgagaaa

SEQ ID NO: 615006 - DNA, 80 bp, Homo sapiens
ggaggtgcagatggcactttccaaagtggatgcctccggggaggttgaagctccattcataccaaagtttagaggctctg

SEQ ID NO: 615007 - DNA, 83 bp, Homo sapiens
tctggactcccacttaggaaagacgacctgcctagagctggaacgttacctccagagcgagccctgctatgtttcagcctcag

SEQ ID NO: 615008 - DNA, 100 bp, Homo sapiens
gcgagcagagccgcccagccctgccagctgcgccgggacgctcagcgacatgtcctcacctacatggaggatgcagtgtgccagctgctagaaaacaggg

SEQ ID NO: 615009 - DNA, 101 bp, Homo sapiens
cctccatctaagatctcttccccttgtccatagcctagatcgagctccctgtgtgcaccgcgcgctgcccgaggcgcgttatcaatactctggctgaccat

SEQ ID NO: 615010 - DNA, 82 bp, Homo sapiens
ctcctcatgctagtagctgccttctgctctccagcgctctcagcaccaagaggaaaatatgcagcaggcacgagaggaagaa

SEQ ID NO: 615011 - DNA, 90 bp, Homo sapiens
gccaagtcgcggtgacgttgatgatgccttgggaaagcacagtaaccttggtgcacgaccgaaagggctgtctactctggtgaagagtgg

SEQ ID NO: 615012 - DNA, 100 bp, Homo sapiens
cctcccgactagctgggattacaggggtgggaaccgccaaacctctcccttctttttgacttcacccttggataccatcaaggccagaggatggaaccaa

SEQ ID NO: 615013 - DNA, 75 bp, Homo sapiens
ctggaagctcgtccccacagctgcaggtaaagggtgaggacgcttgagcggaagttagaagcaaaaatgatcaag

SEQ ID NO: 615014 - DNA, 100 bp, Homo sapiens
gcagggagaaggaagaggtgtttgaaaagggatcgcttacacctgagacgaactacagaacagcacgtaccagaggtggaagtccaagtcaaacgcagaa

SEQ ID NO: 615015 - DNA, 98 bp, Homo sapiens
aaagcgagaccgcgtgcgaggaccgtgagcagcggttccatcgcagtgaacgccgactcttcggtgcagttgttggccgaagaggccgtgacgctgga

SEQ ID NO: 615016 - DNA, 82 bp, Homo sapiens
gccctcaaggccatgatcaaaacacctgcaggctgggacaatgaaaagaaaatagctattttacatgaaaattttacaaccg

SEQ ID NO: 615017 - DNA, 100 bp, Homo sapiens
agagcccctcgcggagggagcggcggccgagttctccagcctgctgcgcaggataaaaggcaaactcttcacctgatgatcaagcggtgctgattcacga

SEQ ID NO: 615018 - DNA, 100 bp, Homo sapiens
taatggcacgctatgggcggctggcggaccctgctgtcactgactttccagttctgaaggctgagaagttcaagagcaagtgctggcatctgatgagggc

SEQ ID NO: 615019 - DNA, 88 bp, Homo sapiens
agtttgagaggaagctcaacgactccattgccgaggagctgaacaagaagttggccaacaagaaagctctgggtgtgcggcagtacca

SEQ ID NO: 615020 - DNA, 97 bp, Homo sapiens
ctggacctaaatggcgcagcatgactttgctccagcctggcttaatttccctactccaccatcatcaacaaagtgttatccaagataaattctgtgg

SEQ ID NO: 615021 - DNA, 75 bp, Homo sapiens
gattccagtgactggggatagtgaaggtgctacggtgcagaggttggaaagaaccatgactgtattcaggaaggc

SEQ ID NO: 615022 - DNA, 76 bp, Homo sapiens
ccgggatcaaagtgtaccagtcggcagcatgggaagtactgtgagagtcttgcctgttgccgcccactcagcacag

SEQ ID NO: 615023 - DNA, 100 bp, Homo sapiens
cagttcagaggacaccctgctgaagtgctaccttgccctggccaaaggaggcttatctgatgaccatgtcctcatcctgcctattggacactaccagtca

SEQ ID NO: 615024 - DNA, 100 bp, Homo sapiens
ctgaagaaggctctgtgcaatcctcacattcaagctgataggctgcgctaccggaatgtcatccagcgagtgattagctcattcttggaatcccagaaca

SEQ ID NO: 615025 - DNA, 100 bp, Homo sapiens
tttgccactgggggtgctggcttctgcatcaatcgcaaactggctttgaagatggctccgtgggccaggtttgacaactattcagccaatgtgatggtgg

SEQ ID NO: 615026 - DNA, 100 bp, Homo sapiens
aaacagaagactggcccagcagatggagaatagaccctctgtccaggcagcattaaaacttaagcagttcctctgtgacgagggtgcaggtatctctggg

SEQ ID NO: 615027 - DNA, 82 bp, Homo sapiens
aggacttgtcagtacccgagtttccggaagcacacgccaaagaagatgagtcaaggacctacacttttctcttgtggaatta

SEQ ID NO: 615028 - DNA, 92 bp, Homo sapiens
cggaggcttcgagtgacccgggtgccgaggagcgggaagagttgctgggatgtgaagttcatttccaatccgccctccatggtggcagcggg

SEQ ID NO: 615029 - DNA, 100 bp, Homo sapiens
caagatggtgcagaagaagaacgcggatgaagtcattgctgtttccgaaaaggtgattgtgaagcttgaagacctggtcaagtgggtacattctgatttc

SEQ ID NO: 615030 - DNA, 83 bp, Homo sapiens
ctcgtcagcactgactttcagctatggaatcggttcactattatgaagatggcaatgttcagttggttagtcataaagatgta

SEQ ID NO: 615031 - DNA, 88 bp, Homo sapiens
ataatagcaggcaactttgagctggcagaatacatcaagaaccacaaggaaacagacattggtatttcaggacagccaggagggggcg

SEQ ID NO: 615032 - DNA, 75 bp, Homo sapiens
cgctcttcggcaacccgaagccacaggatggaggagggggatcccagcaaagggtttccaggcctgaggtgcccg

SEQ ID NO: 615033 - DNA, 100 bp, Homo sapiens
ccttgtggcgaatggggctcacgtcgagttggtcaaagaaaaagtgatgtatgaaaaagaggcaaaacaacaagaagaaaagattgaaaaaatgagagct

SEQ ID NO: 615034 - DNA, 100 bp, Homo sapiens
gtcggtgctccggggaggtcacctgacgaggaggtcaaaatgcagatcttcgtgaaaacccttaccggcaagaccatcacccttgaggtggagcccagtg

SEQ ID NO: 615035 - DNA, 75 bp, Homo sapiens
gggacttcccgtccgcggcgtggagggcctctctgctgatggtggtgccaagcgccaggagcacctatcccgatt

SEQ ID NO: 615036 - DNA, 101 bp, Homo sapiens
gtcgatggtcggcggcgcccggatgggcagctgaggtcacagtaatgaaaggcagtaatagaaataaggatcattcagcagaaggagaaggggttggaaaa

SEQ ID NO: 615037 - DNA, 100 bp, Homo sapiens
ctccaggatgccatacacgagcgggaccagctccagcgccaccttaactccgccctcccccaggtacaagatggtggtgaccccccggagggcggcggtg

SEQ ID NO: 615038 - DNA, 77 bp, Homo sapiens
atgaaccaagaaaaacaaacgtcacacatgaagaacacacagcggtggaaaagagtatgcagagaacatcggggacg

SEQ ID NO: 615039 - DNA, 78 bp, Homo sapiens
gggtgacaatgccttggtttcaacactatcggaatgataacgaaggaggcccaacttcattcaataaggagcctgacg

SEQ ID NO: 615040 - DNA, 90 bp, Homo sapiens
ggaagctatctagagctggccaacacaatggaagatggtaccccaaagcatatcatccagatgacaggatttaagatggaagaaaaagaa

SEQ ID NO: 615041 - DNA, 74 bp, Homo sapiens
tattacctccaaaaaagacaggggagtattaaaggattcttacagaagcagagattgatgctcaccttgttgct

SEQ ID NO: 615042 - DNA, 99 bp, Homo sapiens
ataaaattgctatcctgagtggagactttcttctagcaaatgcctgcaatggactagctctgctacagaacaccaagctcggtcatgagcaccgacagt

SEQ ID NO: 615043 - DNA, 98 bp, Homo sapiens
acaaatatcatgagagcatggctcttccagcatctcacaatacgggaatatgaatggattcattcccaaaccaaaagattgaagttcaacgcacttat

SEQ ID NO: 615044 - DNA, 123 bp, Homo sapiens
cgagggatgctgaaaacctttgggcttcatggagtcgtcttagatgttgattcagttgtatcagagtaagatggacggtagctttgattgtgattgtggtgagctggagccacctgatcacta

SEQ ID NO: 615045 - DNA, 48 bp, Homo sapiens
cgaccccttgttctttggtggcgctggatgtggagagcatcttgtgcg

SEQ ID NO: 615046 - DNA, 100 bp, Homo sapiens
cgcggcgctgagccagccgggacggacatgcgcgggagggcgccgcggggcagccgccgctcctccggggagaaaatgcagaagtctccatggacgtttc

SEQ ID NO: 615047 - DNA, 82 bp, Homo sapiens
tggggccagggaaccctggtcaccgtctcctcaggttatgccaaggacgccctgaatctggcacagatgcaggagcagacgc

SEQ ID NO: 615048 - DNA, 100 bp, Homo sapiens
cttttttcgaaagctgggtttcccgggagatcccaggcggtgacagagtggagccatggctagagcaggatacagacgtccctcaccagtgccagcttgg

SEQ ID NO: 615049 - DNA, 85 bp, Homo sapiens
tcttcatattggcgatcctgttgtgggactgtgaccctcctgggaatccagttcatggctattttgaaggaaataacttcacctt

SEQ ID NO: 615050 - DNA, 100 bp, Homo sapiens
ggatcactggagttattccatcaactacttgcactgtgccggtggtggtgtgcacattgagccccggtatagacagttcccccagctgaccagatcccag

SEQ ID NO: 615051 - DNA, 100 bp, Homo sapiens
aaagcacccgggcgcagccggagccggtgccgcagctgcgatggccgtggccgtggggagaccgtctagcatcttcaagaaagcaatggacatttgattt

SEQ ID NO: 615052 - DNA, 98 bp, Homo sapiens
cgtgaaggggaagaggcccaccctggagtaaccctcactggagaatccagaggtgttggagcgggccggagagaagtagagtgggctgcgaggagaag

SEQ ID NO: 615053 - DNA, 82 bp, Homo sapiens
acagcaagttgaagcccgaagttgtggaggagctgaccaggaagacctactgatgatgtgaggcataaagttcatctgaaca

SEQ ID NO: 615054 - DNA, 100 bp, Homo sapiens
cctgagcgcggcggcggcccacgcgcagcgacagggagaggtttggtgcacctcgatttggaggaagtagggcagggcccttatctggaaagaagtttgg

SEQ ID NO: 615055 - DNA, 90 bp, Homo sapiens
aaaagataatgacaaagaagatggctgcttctatttcagcttaagagttggacagtggaggaccttcagaagaggctcttggccctggac

SEQ ID NO: 615056 - DNA, 100 bp, Homo sapiens
ccatgacggaggaagagctcggacacattcgagcggctggggagggatgcagaggctgcgcacagggccggcctggccttcggagtgaagctggtacgag

SEQ ID NO: 615057 - DNA, 100 bp, Homo sapiens
ctgctccagcaacttgaggctgatattgtttcttggcggatctgatggataactcagagctcatcagaaatgtgaccctttgtggacatctccaccatgg

SEQ ID NO: 615058 - DNA, 88 bp, Homo sapiens
tgatggcctgcgcaaggtcaacaagagctatccatccctcaccaccaaggcgcttaaattcctagcgaagtgccgtaagaaaaagaaa

SEQ ID NO: 615059 - DNA, 74 bp, Homo sapiens
taaaccacagttacaaggaattccaatgccaacgtccggcggtacctccagctgacacagtcagaactcagcag

SEQ ID NO: 615060 - DNA, 51 bp, Homo sapiens
cccaccgctgccgaaatgaagtataagaccccaggcaggcacagtcttccc

SEQ ID NO: 615061 - DNA, 76 bp, Homo sapiens
ccgtgaccgagagcgtgaccgagagcgcgaatatcgtcatcgttagaaggtggaatgaatcttacttgttgaatat

SEQ ID NO: 615062 - DNA, 83 bp, Homo sapiens
ctggagaagctgggattggagattccacccaaacttgctggtcactgggaggttttaaaatcaaagatgggaaaatcggagaa

SEQ ID NO: 615063 - DNA, 90 bp, Homo sapiens
tcaaatcactagccactggaggaaatgttagccaggcactgaaaggtgactcttttgatggtgggacttgataatgctggtaaaaccgca

SEQ ID NO: 615064 - DNA, 100 bp, Homo sapiens
ccactcttatggcaccaacatataagaaacttgcacctgatgcatataataatcaggtagctcctgaagaatttaaagccagcatcaacagagttaacag

SEQ ID NO: 615065 - DNA, 82 bp, Homo sapiens
cccaccttctttcttcagccgaggccgccgccgcctctccttgctgcagccatggactgaagaaacacttaaattctggaaa

SEQ ID NO: 615066 - DNA, 75 bp, Homo sapiens
gggtgaaaggagagtgtaagagaggagaggaatgtccatacagattgccttgggtccccagtgtttactcccatc

SEQ ID NO: 615067 - DNA, 100 bp, Homo sapiens
aaggaaggaggcgtgtttgacctggggcccttcattgtaggtacaggtttgcagattccgccagcagcacagcaagctctacagatgagtggctctttgg

SEQ ID NO: 615068 - DNA, 100 bp, Homo sapiens
tctgggaacaggataaaaagcaaccagatcagtaaactgcagaaggaatttaaacgtcataagggtcattttcaacattgttaacttcagtaaaaccaag

SEQ ID NO: 615069 - DNA, 85 bp, Homo sapiens
caaaatcagaaattaagattctaagcataggcggaggtgcagaaccaagcgcctccaggtctctacacgaagacccaggacccag

SEQ ID NO: 615070 - DNA, 100 bp, Homo sapiens
aagtaagagaaactgcaatagaagttggaaaaggatgtgatttccatatttcaagtcattcaaagacagatgctttcccatggtttggcatggacattgg

SEQ ID NO: 615071 - DNA, 83 bp, Homo sapiens
tgaagacagagggctctgatctgtgcgacagacaattctgtggtgttcttggtcacacatttatggagtttctgaagggcagt

SEQ ID NO: 615072 - DNA, 75 bp, Homo sapiens
caccatcccactggcctctgataaaggaagacaatggtgtaaaattggttgatcctttgggtgaaatgttggcac

SEQ ID NO: 615073 - DNA, 100 bp, Homo sapiens
gggcttcagggctgcctggctgcagagctggagtggctggatgtggagcaccgcaccgtggctggagtcctgagcagcaccttctggacagggggcgtga

SEQ ID NO: 615074 - DNA, 100 bp, Homo sapiens
tcacttctcagggaaactgagcatctgggcgattccatctctgaagcaacaaggggaatggggtcaaaatgagcaggtagatatagttgtaggtactccg

SEQ ID NO: 615075 - DNA, 75 bp, Homo sapiens
gtctgacatggaggatgatttcatgtgcgatgatgaggaggactacgacctgctagaagaaccacacctcttttg

SEQ ID NO: 615076 - DNA, 50 bp, Homo sapiens
ctcgtcctccagctgttatctggaagaacaccgaaaatctctcccagcac

SEQ ID NO: 615077 - DNA, 100 bp, Homo sapiens
gcaaggcccctcagcacacagctgtcggcttcaaacagacggtctgaccttgcttttaacttagaaggctatatttttgtattcctgaatgatatcttca

SEQ ID NO: 615078 - DNA, 75 bp, Homo sapiens
caaggggacccagtgcgcccgcatcgtcgagtgaagagacgcttcgggggaaccctgttctacagctgaacccag

SEQ ID NO: 615079 - DNA, 80 bp, Homo sapiens
gccggggagaactgattgccctttaacagtcaatatgttggaggcatgctaagggaaatcctcattgacgattcaatttg

SEQ ID NO: 615080 - DNA, 75 bp, Homo sapiens
tgttggaaactgcttctatcctcaggtctgctcaccaggtggccagataccgcccacgtgcccccatcattgctg

SEQ ID NO: 615081 - DNA, 100 bp, Homo sapiens
aactgctccacagattatttagaggggaaggtgtggctcattgactttaatccatttggtgaagtcacagattcactgctgttcacctgggaagaactga

SEQ ID NO: 615082 - DNA, 74 bp, Homo sapiens
ctgcctagagaaggacccaattgaccggacagatgatgacattgaaccacaatggacactgccagccatagcct

SEQ ID NO: 615083 - DNA, 106 bp, Homo sapiens
actccgagaggaggtggaccagaacttttggaactagtgccggcggctctccaccccccagttttcggctttgtgagaaaccttaccatcaaacacgatggccagc

SEQ ID NO: 615084 - DNA, 75 bp, Homo sapiens
agccatcctggagtacctcaccgcagaggtgtacagtgccaccaacgtggagctggtgacacgcacacgcacgga

SEQ ID NO: 615085 - DNA, 100 bp, Homo sapiens
gccacctcctccctttcatggttccatcagccgccttcatcaaatcaaacagttttcggctttgtgagaaaccttaccatcaaacacgatggccagcaac

SEQ ID NO: 615086 - DNA, 83 bp, Homo sapiens
tgaccaccaatcagatccgtaagtctgtggtccgaagacaaccctatgaggcatcagtagggttttacaggtggggaagtgga

SEQ ID NO: 615087 - DNA, 88 bp, Homo sapiens
attgcccatgtcatccggggccaggatgagtaagccatatcaaagacttcattgaaaaataccaaggatctcaaagaagtcctccgtt

SEQ ID NO: 615088 - DNA, 82 bp, Homo sapiens
ccgtgccgcgagcgcggcctgcaggagttacagacgttccacgttccgtctccctgtgccagccctcaggacctgagcagcg

SEQ ID NO: 615089 - DNA, 75 bp, Homo sapiens
atggaattctgaagatcactcacttaggaaacaaaaatgtctacacaaggaagtacaggatttggcttttctaga

SEQ ID NO: 615090 - DNA, 100 bp, Homo sapiens
ccggccctggcagcgcgccacagcccgcgaagccaacgagtgcgtgggtagcctttccagtaaatatatgactcagggaaaagcctcagcgaagaggacc

SEQ ID NO: 615091 - DNA, 75 bp, Homo sapiens
ctcgggagctggctgaagatggctactctggagttgaggatgagaacaagttgagcagtgccaacggccatgaag

SEQ ID NO: 615092 - DNA, 85 bp, Homo sapiens
ggagagttttctagaagcctgtcgaaaaatgggggtgcctgaggtactccaaagattcaggtttactcacgtcatccagcagaga

SEQ ID NO: 615093 - DNA, 75 bp, Homo sapiens
tggtagagagaaaaatcctggatctgtatgctttgagcaaggttacactcctcttcctgggtccaattattcaga

SEQ ID NO: 615094 - DNA, 50 bp, Homo sapiens
ggacaacccccctaagaagttccgtggctgtaggttccatgaggacaggc

SEQ ID NO: 615095 - DNA, 83 bp, Homo sapiens
aacgcagtgaccgaaggctccgctcacgcccggccgtgcttcctcaaagactgggaaatgcacgtccacttcaaagtccacgg

SEQ ID NO: 615096 - DNA, 98 bp, Homo sapiens
aggtacattgagcaggctacagtccactccagcatgttcctcctcagatcatgaatatctcctcagacatcactgtgaatgagggaagcagtgtgacc

SEQ ID NO: 615097 - DNA, 83 bp, Homo sapiens
cagtctctgtcagaggaagatcccttgcctttagaagaagccacactctctgaattaaaaactgtcctcaagagcttcctaag

SEQ ID NO: 615098 - DNA, 100 bp, Homo sapiens
cgtctttgtgggcactggggacctgtttgctgccatgctcctggcgtggacacacaagcaccccaataacctcaagattttgcaagaacgaggctcaagg

SEQ ID NO: 615099 - DNA, 82 bp, Homo sapiens
taaaagtccccgcccagaggccaattcgtcgcggcggcggtggagatcgcaggtcgctcagtgccctcggctagcatgaccc

SEQ ID NO: 615100 - DNA, 100 bp, Homo sapiens
tccgcgggggaggcggcggcgccaagcaagtgctctacgtgcctgtcaagaccacgggaacagaaagaacagcttcaaaagatgaaagacttcgggtctg

SEQ ID NO: 615101 - DNA, 117 bp, Homo sapiens
aacgatggcatatagacacaattatgcgtgttttgacaacggtgaggcaggcgactaatcagattgtgatgaattgtgctgatattgatattattacagcttcatatgcaccagaag

SEQ ID NO: 615102 - DNA, 100 bp, Homo sapiens
tggtgattgttgtccaggactggttcacagacctcagtctctacagaacatacatatgatagttgagaaagacacatattctgatcatgaagaaataaac

SEQ ID NO: 615103 - DNA, 88 bp, Homo sapiens
gaagtccccgaggcagcctccgcggaggagcagaagtgtaaacaggaacatcgataagtagtgtaaaaacttgcacaatgaaatccga

SEQ ID NO: 615104 - DNA, 100 bp, Homo sapiens
gcagcccccaccggccccgccaaagaagatcatgcctgaaggccgccttgaattaaaagaagataatattgagtgcctgttatctacagcttgccttctt

SEQ ID NO: 615105 - DNA, 74 bp, Homo sapiens
cttcctcacccgcgcctgcgacctcggaccaagaatcgccttcagccctgtctggtgcatccttggcagaaagt

SEQ ID NO: 615106 - DNA, 90 bp, Homo sapiens
atcgtcctgtggacgcgtatcgccagcacgatcccaccgcacgttcagaagtcggcaatggctgccatccggaagaaactggtgattgtt

SEQ ID NO: 615107 - DNA, 82 bp, Homo sapiens
agctgtgcagccgcgaggaggcgcgggaggtgttcgagaacgaccccgagacggcggcggcggcggcgcccgggagccggag

SEQ ID NO: 615108 - DNA, 89 bp, Homo sapiens
ggacaaaagccaagaggaggacagttcgctacacagcaatgcatcgagaataatgcatatactgccatgtcagattcctacttacccag

SEQ ID NO: 615109 - DNA, 100 bp, Homo sapiens
gctggccaaaggggcctgtgtacttgctgtagatgaaaatggtgagccgttctccaaccctttggcccccgatggccacgatgtggatgatcctcactcc

SEQ ID NO: 615110 - DNA, 74 bp, Homo sapiens
atctcacctccctaaactggttaatagtggcatggaagatccatttggcccctagcagtcttcttgatgctttg

SEQ ID NO: 615111 - DNA, 83 bp, Homo sapiens
cacccacccttccgagacatgaagaaagatgccacacgctggcagctctgaccagccccacccctccatacaacaaggtttgc

SEQ ID NO: 615112 - DNA, 100 bp, Homo sapiens
gcggatcctgctggtgggagaactttcaggtttagctgtgcctcccagtgactataatgacaaggaagctgtaaatgtatttgagttaagcttttgcgag

SEQ ID NO: 615113 - DNA, 119 bp, Homo sapiens
tagaagatgacgaagacatgacacttacaagatggacagggatgataattgggcctccaagagcagactgccagattcacttacagccccagctaattccaccaaacatggaggagtac

SEQ ID NO: 615114 - DNA, 100 bp, Homo sapiens
atcttctcttcaccagctcttcagatcaatatgattgcagcaattctccggaaacggaaattagactattatttacacaaactactccctgagatcctac

SEQ ID NO: 615115 - DNA, 100 bp, Homo sapiens
cccaagcaaggttccttggaagaagatgtctgcagagggccagtgcctcagtttcaatccaggtaacctttaaatgaaacttgcctaaaatcttaggtca

SEQ ID NO: 615116 - DNA, 100 bp, Homo sapiens
ctctaacccaacagatgacagctggaagggtagaccatacgcaagacagagcgggatgccaccagcttgtccaaagggaagttccaggagctcctggtgg

SEQ ID NO: 615117 - DNA, 98 bp, Homo sapiens
tgtagttcctggatatatctcccgatctgtggctggctcctatgataatgaaggctgccagctgttggtatatccaggagcttttaatctgaccactg

SEQ ID NO: 615118 - DNA, 98 bp, Homo sapiens
gccgccatgtcggcgcaggcccagatgcgcgcgatgctggaccagttgatgggcacctcccgggacgattgtggcccagaagaaggtgacccgcccgc

SEQ ID NO: 615119 - DNA, 90 bp, Homo sapiens
ggcgggtgtcactggggacgttctgaggacctcctgccccccgaggtctgcagtctcctgaacccagcagccatctacgccaacaacgag

SEQ ID NO: 615120 - DNA, 100 bp, Homo sapiens
aaaaggacacttctgattaagacggttgaaactagagatggacagactccaagcccacggtagagacgctgggacccactgtgaagagcgaagagacaac

SEQ ID NO: 615121 - DNA, 82 bp, Homo sapiens
ggaggcctgggaagccaacgaccacacgcactggtaggtgagtgctgtcctcggctcactttcctcaagctctccggctgcc

SEQ ID NO: 615122 - DNA, 100 bp, Homo sapiens
ctggttggccctgtgatccctcaagactggtccacggagtgtatgaccacaaacagccatcaagaacatcgggtcagaagttgagatttccactatcgag

SEQ ID NO: 615123 - DNA, 74 bp, Homo sapiens
tccttccttttctcggggctcccgtgggacccctgcagctgcagacatctgcttcaccaaggagctacactccc

SEQ ID NO: 615124 - DNA, 100 bp, Homo sapiens
tccagcaacttgtggacctcctgtgccgcctggagctctaccgggctgcccagatcatcctgaactgatgtggtggatacccaccctggtctcacgttcc

SEQ ID NO: 615125 - DNA, 75 bp, Homo sapiens
ttcgagccgctacgaagctttgccagaccgagtgtgtcagcagccaggactttctctctgggtccccttccaaaa

SEQ ID NO: 615126 - DNA, 100 bp, Homo sapiens
gaggaagaggaggaagaaaaatctgaggttatcaatgacgaggtttctgaaggattgtcattcttgcatagcagtgtgaaaatggtgcatggaaatatca

SEQ ID NO: 615127 - DNA, 100 bp, Homo sapiens
ctctcagatgtcccaaggacctattgctatgcagatgcggtgatgggagccatatacacaaagatgaaggactggctacagctttcacagaccttacaac

SEQ ID NO: 615128 - DNA, 122 bp, Homo sapiens
caagccacaatttccatcaaaaagtgattaagcagagaatggagaagaaggttgattccagtctggccttaccaaggcagtgaaggagagtacaattacattgcagcaggcagagtatgaat

SEQ ID NO: 615129 - DNA, 100 bp, Homo sapiens
ggacaagctgctggagcgagtgtcagccatcgcttcggaggggaaggctgaggaaagcacatttcagttggactgcgatgcagttcttcagctcttcatt

SEQ ID NO: 615130 - DNA, 100 bp, Homo sapiens
cgtctccacctcctcgcgtccgtaatcagtgacgaggtccgctacgtaaatccctttgcggcgggtataaaggaccattgttagaagagcaagcccttac

SEQ ID NO: 615131 - DNA, 100 bp, Homo sapiens
tggtgacttcacttttgagtgcaactgccttccaggccaagctataacatcagaaatggtgaatgaatacaagaaaattcttttgctgaaaggatttgag

SEQ ID NO: 615132 - DNA, 98 bp, Homo sapiens
gtccaaacaatcatgggaatttccaaggggattcaaacttcaacagaatgtggcaaccaggctgcagccacaggtccgcacggaaaaccaggagctcc

SEQ ID NO: 615133 - DNA, 51 bp, Homo sapiens
gaaatacatcgtgagaagagagacggccatcctgagacgacagggtcgata

SEQ ID NO: 615134 - DNA, 75 bp, Homo sapiens
cttgacgttcctgacgaagcaggagatcctcctgtactcagaccccacgcagtggacggccttcctgggcttgca

SEQ ID NO: 615135 - DNA, 75 bp, Homo sapiens
gaagaaccttttccctaatacgtacctcattgtgggagctgtccaatgtgaaagaaaacccattgaagtatcacg

SEQ ID NO: 615136 - DNA, 100 bp, Homo sapiens
agcacaaatggacctctctggaagagggaatcccatcaaagtcagccgtgtggggtctgcaatgattctggctacattggagattggttgctttctaaaa

SEQ ID NO: 615137 - DNA, 83 bp, Homo sapiens
cggagaaccccgccctcctcgtctcagccccaatttaacgggtgcatgtgagcatcagatccatgctgctgctgactcggagc

SEQ ID NO: 615138 - DNA, 100 bp, Homo sapiens
gtgctgcctgcattcgcggggcatgttcccgaggctgtcaccagattttgttggcccccatttgaccaaaaaagtgacactgaattccgaaaacattgct

SEQ ID NO: 615139 - DNA, 74 bp, Homo sapiens
cagcttcagcggcggcgatctcaggccggatcacctcaacagtcacgtcagacaagtgcactcaacagaacggc

SEQ ID NO: 615140 - DNA, 83 bp, Homo sapiens
cggcaatcgcacctggggccgcctaacagatcaatgtccgagttaccaccatggatgcagagctggagtttgcaatccagcca

SEQ ID NO: 615141 - DNA, 97 bp, Homo sapiens
tctacatctcagactactgtgtgtggattcagaaagtcaaccttgccaacattccactaacccccgagactcagcgggaccaggagcggcggattcg

SEQ ID NO: 615142 - DNA, 87 bp, Homo sapiens
agctccccatcgcagaggccatgctgacctacaagcagaagaggctggggccgggctggcggggccctcccgactgacttccccttg

SEQ ID NO: 615143 - DNA, 100 bp, Homo sapiens
taatttgaaccatgtttggattgaagccgcctctgtattacttaccaggctaaggtgattcaaactaaatcaacccaatgtctctcctacccactcacca

SEQ ID NO: 615144 - DNA, 100 bp, Homo sapiens
cttgtacagagatgtgatgttggagaactatagcaatctggttttcttggtgctgggcctaaaggagataacatttatgaatggagatcaactatacttg

SEQ ID NO: 615145 - DNA, 76 bp, Homo sapiens
gaaactggttcttgggtgtttaagaaggaacccagccagccggcggaatgcaagcagcagtaggaagcggaggcgg

SEQ ID NO: 615146 - DNA, 99 bp, Homo sapiens
gaggacgtcacggccatcattttctgtgtcgcgctcagcggctatgaccaggtgctccacgaagacgaaaccacggaactttccttgagactggcagag

SEQ ID NO: 615147 - DNA, 75 bp, Homo sapiens
gcaaaggtcatcaatgcagcctcaagtcagttgccttttctaagtttgagaaagcaatggctgccatccggaaga

SEQ ID NO: 615148 - DNA, 100 bp, Homo sapiens
aaggaaacctttccaacacagatgtccaagctgccaagcaaattgcaacttgatctgtggtgatgaatatggtccagaaacaaggttgagcatgtctcaa

SEQ ID NO: 615149 - DNA, 80 bp, Homo sapiens
ggttgagcggcggcgaacatgcgcttttgacacattggaggcctgttgcagtctccaaggcaccatgaatgccatcgtgg

SEQ ID NO: 615150 - DNA, 74 bp, Homo sapiens
tgtgttaagtgattctctgacaaggttcctaaaagtaaagctctagaggccgtcaaattggcaatagaagccgg

SEQ ID NO: 615151 - DNA, 82 bp, Homo sapiens
tcgatatcagacaaaattcaggcatttgtccaaggaagagctctggattaatcgaattacagctgctagccaggaacatgga

SEQ ID NO: 615152 - DNA, 100 bp, Homo sapiens
atgggagctgtggccctcagaatttaaacttaaggaaagagtgggaaagtgagggtgcagtagacattgttgcaatcatgatcggcaatctgaaaggcac

SEQ ID NO: 615153 - DNA, 75 bp, Homo sapiens
tgagttgctggacagcatgtcagattggtgtaaggagcatcacgggaagcttacatcacgagaaaaagcagccaa

SEQ ID NO: 615154 - DNA, 105 bp, Homo sapiens
cctctgggttacgtggaatgtgtttgttatctgcttctatttggaggctggggacctctcaaagataccatgtttgtgtggaagtgccccgtgtttgctatgccg

SEQ ID NO: 615155 - DNA, 75 bp, Homo sapiens
gagtgcgtctacaaccgcgcggccctgctggccgccatggcatcagatgaaggcaaactttttgttggagggctg

SEQ ID NO: 615156 - DNA, 75 bp, Homo sapiens
agactgcctagagaaggacccaattgaccggacagatgatgacattgaaaatgctgctcaaattccagtggctac

SEQ ID NO: 615157 - DNA, 75 bp, Homo sapiens
tataactgtgactgtgaattctggttggccaaacgaagacaccattgcagttgcatttgctggtctggcctttgc

SEQ ID NO: 615158 - DNA, 74 bp, Homo sapiens
cttcctcaacatggctgcgcccttgtcagtggaggtggagttcggtctcacaccattttgctggtacagcctac

SEQ ID NO: 615159 - DNA, 100 bp, Homo sapiens
gagtcttccatcaatcatatctcacaggtatatgagtagaccagtgatgagtggcccaggactctatgaccctacaaccatcatgaatgcagatattcta

SEQ ID NO: 615160 - DNA, 100 bp, Homo sapiens
cacttccccggggtgtaataatgttaactgagcagcaatgcagcaagtcttggaaaaccttacggagctgccctcgtctactggagcagaagaaatagac

SEQ ID NO: 615161 - DNA, 98 bp, Homo sapiens
ggatgccctgcagtacctgcagaaggtctctggagacatcttcagcagccccccatgggtgaggagggcaaccacaagcgacactcagtggtagcagg

SEQ ID NO: 615162 - DNA, 100 bp, Homo sapiens
tgtgggctggtgttccttgactggagacaacctgcagcctcctggcaccaaagtgccggtggtggtgtgcacattgagccccggtatagacagttccccc

SEQ ID NO: 615163 - DNA, 83 bp, Homo sapiens
gagacggcggccttcgaggaggtcatgaaggacctgagcctgacgcgggccgcgcgggaagccatcttcgacaagagcacagg

SEQ ID NO: 615164 - DNA, 100 bp, Homo sapiens
ttggaggatcacctagtaacacacgctacctctttctgggtgactatgtggacagaggctatttcagtatagaggtaccctgacatgcccactgctgctg

SEQ ID NO: 615165 - DNA, 75 bp, Homo sapiens
cagccctgaaatcagctcgagacatgtgggctgattacatcctgcttcagcgcctgctcctggtcatcactaacc

SEQ ID NO: 615166 - DNA, 89 bp, Homo sapiens
gtgctgggtgcagatgcagtgtggctctggatagcaccttatggacaggtatatcccgtgccttacctgactgggggctctgagtccag

SEQ ID NO: 615167 - DNA, 75 bp, Homo sapiens
ctccatgcagatgggagcagtggatctcctaggaggaggactagatagtctgcttttgttaggagtgataaaccc

SEQ ID NO: 615168 - DNA, 75 bp, Homo sapiens
gccatgaacaactcgggcgccgacgagatcgggtgtggacactgccagcggctgcagccgacttggaatgacctg

SEQ ID NO: 615169 - DNA, 100 bp, Homo sapiens
cagtttgaagcatctttgatttattggaccaactggcaacagaaaatgaaaagtagtgtggcacagataaaagtgtgagttcttgatacgaatgaaaggc

SEQ ID NO: 615170 - DNA, 100 bp, Homo sapiens
ctcaggacctgacccaaccactgtctacgtggacatgagagccctgagacacgacaggtatatgtctcgagtccacggtatgcaccctaaagagaccacc

SEQ ID NO: 615171 - DNA, 52 bp, Homo sapiens
aactaccattcgcctgatgaactctcagattctcactctgttgcccaggctg

SEQ ID NO: 615172 - DNA, 90 bp, Homo sapiens
ctggtgggcccagtcctcggtgcggcgcggccaggtgtggccgacgacgatgccctcgctgaggagcgcatgcggagaggccagaacgcc

SEQ ID NO: 615173 - DNA, 98 bp, Homo sapiens
cgccgtggcagcctgaacggagtgtgcgacggattgggaggtcattgctgtggtcatggacctcttcactgatggtgatatctttcaagacattgtgg

SEQ ID NO: 615174 - DNA, 98 bp, Homo sapiens
actgagtcgcagttaccaccaaacccaggaggagactctccctggaaaacttcccttccctttcgtaggtaaccagttaggggccttggtacatcaaa

SEQ ID NO: 615175 - DNA, 74 bp, Homo sapiens
cggagggggccggagaagagagctctggggtcgacacggtgatgagacaaaccatgcttctgccacatcaacac

SEQ ID NO: 615176 - DNA, 50 bp, Homo sapiens
ctcagaagaaggcggccccaacagagctgcctgtggaggaaccgattgtg

SEQ ID NO: 615177 - DNA, 100 bp, Homo sapiens
aggtaggctgcgttgaggatctttgctcttccatccgcctttgatcgtcttcctcttcagccatccagaaagcgctttcagtcggagagtagaaggcaaa

SEQ ID NO: 615178 - DNA, 50 bp, Homo sapiens
ggatcctattgttaccagacgcgcaatcgaaaatatcgacaccttaacca

SEQ ID NO: 615179 - DNA, 83 bp, Homo sapiens
atgtgtcggaactagatctttctgacaacaaactcgaagactggcatgagactgtgggctgtttagtgccatgcaccctttac

SEQ ID NO: 615180 - DNA, 100 bp, Homo sapiens
tggtggagatcttttgggagaactactgggacgtcagagcttctccgtgaaagacccaagtgccggtggtggtgtgcacattgagccccggtatagacag

SEQ ID NO: 615181 - DNA, 83 bp, Homo sapiens
tagcgtatggtgctgctgtccaggctggtgtgctctctggtgatcaagatacagtttccagaaatacaagttagataattggc

SEQ ID NO: 615182 - DNA, 74 bp, Homo sapiens
acgtgaagaagttcagcctggccgcaactcgcagcaatgaccctgtggccattataagctgtcattggaaggaa

SEQ ID NO: 615183 - DNA, 100 bp, Homo sapiens
aaatatctgaaaacaccaccaggcatcccagcatgcaatgatgctacctgttctgacccatcatatccgctaccaccaatgcctaatgcatttggacaag

SEQ ID NO: 615184 - DNA, 90 bp, Homo sapiens
gacacgcctagcgcgggctccagaatctgaattatccagaacagaaagttgtgactgttggacagttcaaaattggtctgatccatggac

SEQ ID NO: 615185 - DNA, 76 bp, Homo sapiens
cgcagtttcagctcccgcagcttccgacggtggatgggaagagagtcccaagggatgcagggcatcctctgtaccc

SEQ ID NO: 615186 - DNA, 97 bp, Homo sapiens
atgattttgagcgtcgcagagaacttagaaggcaaaagagggaggagatgcgactcgaagcagaaaggcctgtgtcacttgtgaaaatgaagattca

SEQ ID NO: 615187 - DNA, 82 bp, Homo sapiens
ccactccgtcccccgcgggtctgctctgtgtgccatggacgggtgcgcgctggcgagctggaaccgttgctggtggcggccg

SEQ ID NO: 615188 - DNA, 75 bp, Homo sapiens
ggctatggtgggcaaactaagccgattttccggaaaaagagaaaatattctctttggaatgggaaatcctctgct

SEQ ID NO: 615189 - DNA, 75 bp, Homo sapiens
tgaagatcctggtgtcgccatgggccgccgccccgcccgttgagagaagaagaaggaggttcctgctgtgccaga

SEQ ID NO: 615190 - DNA, 75 bp, Homo sapiens
ggcggagctgacggtggaggttcgcggctctaacggggctttctacaaggttatttaggaggattcgatggcaat

SEQ ID NO: 615191 - DNA, 90 bp, Homo sapiens
gctgtatctactcaagagtggaagttttcacagtgaagctgtggtctaccaatctagacaactcagtggcaagcattgaggcaaaggcta

SEQ ID NO: 615192 - DNA, 101 bp, Homo sapiens
aaaatgtgatgcatgtctcagtgacttaattcagtgcacaaatgagatgaatgtgaacatcccacagttggcagacagtttatttgaaagaactactaata

SEQ ID NO: 615193 - DNA, 102 bp, Homo sapiens
cacgcacgaggtggagggcgtgttgtcgcaggtggacttcttgcaacaggttaacgtgtatggcgtgtgcgtgccagagatggagtttcaccgtgttgccca

SEQ ID NO: 615194 - DNA, 89 bp, Homo sapiens
gacaagcatgatgtctgtacacaggtggaaaaggaactcctctgggaaccccagcaacctctcctcctccagccccactctgtcattcg

SEQ ID NO: 615195 - DNA, 75 bp, Homo sapiens
cagtgcagtaggatactgaaactgacattatttgaatgctaacagaccctcgacctctcaagcagctagagtaga

SEQ ID NO: 615196 - DNA, 95 bp, Homo sapiens
aaggacatttggaccgatcttttacatgttccacaagaagtgcagcttataatccaagctattactcagactgaaggagcattaggttatgcgta

SEQ ID NO: 615197 - DNA, 82 bp, Homo sapiens
caaccagccgctggaattcacgttccagaaaagagagctgcctcagatgatggacgaggtgggtcgcatcctctgtaacctg

SEQ ID NO: 615198 - DNA, 75 bp, Homo sapiens
aacaagtagaacccattcagatatggcctcagcaggagcttgtgaaagtggtataagttgaaatccaaaccagga

SEQ ID NO: 615199 - DNA, 50 bp, Homo sapiens
tgcaaacagtggtatcgacttatcaaaggaccctgatgctcccataagac

SEQ ID NO: 615200 - DNA, 50 bp, Homo sapiens
caacagcctggcgtccgccacggtacctgggccagctggacgacagtgag

SEQ ID NO: 615201 - DNA, 82 bp, Homo sapiens
ctttgccactatcacgcctctcatgttcacaggatcttgtcgtgcctgatggaacatttatacacagagaagatggtagaag

SEQ ID NO: 615202 - DNA, 98 bp, Homo sapiens
ccccgtggatccgctggagcggagccggccgtacgcggtgctgcgagggcagaacctgggtgttgacttcaaaatcaaaactgtagagctaagaggaa

SEQ ID NO: 615203 - DNA, 96 bp, Homo sapiens
tcctgtgaccggcctgtggagatgatgactggcccgaaactactttgcttcgcactttttcatgggaggagagaaattcgacaccccccaccctga

SEQ ID NO: 615204 - DNA, 90 bp, Homo sapiens
tgaacccagaggtcgtggaggtggccgtggaggcagaggtggcatgggtgtcttcgtcaaattacagaagccaaatgctgccatccgaga

SEQ ID NO: 615205 - DNA, 101 bp, Homo sapiens
caagttggagaaaggcgaggagccatggatattagaggaaaaatttccaagccagagtcatctgggtaatcgtgctgtccacacgactcctgaagccactt

SEQ ID NO: 615206 - DNA, 101 bp, Homo sapiens
tgaacaccgcacaggcaggaggcatggccaagaagatgcctctaatggaggagtttctgagcagcacccctggcccagtggctttgaaagggagctcaaac

SEQ ID NO: 615207 - DNA, 87 bp, Homo sapiens
aggaggtggagttgctgcccttccggagtccgccccgtgaggagaatggtgcacatgaacttgaacagatgcagctgattttagaat

SEQ ID NO: 615208 - DNA, 83 bp, Homo sapiens
ccacagaacttacctgcctcttcatgcagttctccatcgtgccagcctactttgaaaacgactgctgggtcaggtacttcctg

SEQ ID NO: 615209 - DNA, 80 bp, Homo sapiens
ccaccagtcccagaacccgccaatgctggggaacggaaaatgagggagttcaactctgtgacctagagtcccgcagggat

SEQ ID NO: 615210 - DNA, 101 bp, Homo sapiens
cctccccagcaatgtggaacttttctggcgtcggcaagttccagcaccacatgctgcgaatctacccaacgctctgtctcagatgtggcatcaggctccac

SEQ ID NO: 615211 - DNA, 100 bp, Homo sapiens
gcctaaatcagccaaacacaggaatgcaatgagagccactatggaacaccatgccaacagaggtgtttacccccctattcaagttcatgtcacgctgggt

SEQ ID NO: 615212 - DNA, 82 bp, Homo sapiens
gttcagagagcatctggagctaattgtgaaaaatagtgcaacctacaatgctgaataccactagaaacatacctgtaaccag

SEQ ID NO: 615213 - DNA, 83 bp, Homo sapiens
cctccctgcgacagaccttcagcttcctctcgggcatgaccggaaaggccaaggtttccacttgagcggcacagtgacagaac

SEQ ID NO: 615214 - DNA, 100 bp, Homo sapiens
cgggcggtggcttcctttccgccactgcccaaactgctgaagcagctcccgcgaggaccacccggtaagaatgattgatgttggctgatattggagtgct

SEQ ID NO: 615215 - DNA, 100 bp, Homo sapiens
tcggcggcgccaccatgtactcgggagccggccccgttatttcaagtaccattggaagaggaaggacaacgtggtggacctatccttgcaccagaggaga

SEQ ID NO: 615216 - DNA, 74 bp, Homo sapiens
gtatttatgcttaaaagaaacagtgaggtacttttagtgtttaccaaagaagataaccaatgtaatggattctg

SEQ ID NO: 615217 - DNA, 100 bp, Homo sapiens
gaacactctgtgcagcgagttacatgttgagccatttcagagtgagcgattacagtctgacctggtagtatgcattgtaattggtgtgctgtattttgct

SEQ ID NO: 615218 - DNA, 82 bp, Homo sapiens
ggagagttttctagaagcctgtcgaaaaatgggggtgcctgaggagggtgaggacaaaatcttcttaatcaacaagcttcac

SEQ ID NO: 615219 - DNA, 98 bp, Homo sapiens
gaggatgtgcggggtgcgccggcagaggatccagtgttcaccatcctggccccggaaggtcgcctgcgaggccgctggccaggcctgagcctctgcca

SEQ ID NO: 615220 - DNA, 95 bp, Homo sapiens
ccttgctccaaagaaaagccggatggcaaaagagcccagaacctattgcaaccatgaagttgaaggacacaaaatcaaggccaaagcagtcaagc

SEQ ID NO: 615221 - DNA, 100 bp, Homo sapiens
gtgcattctgggtgatgacatgggacttggaaaaacagtacaggtccgggcccaccagctggtcttgccaccttgcgacgtagtgatcaaagccgttgct

SEQ ID NO: 615222 - DNA, 80 bp, Homo sapiens
gcccgcctcagcatctggtacagccgactggaaaggcagctcatcatgcagagtgaaatgagggaaagacaaatggccat

SEQ ID NO: 615223 - DNA, 75 bp, Homo sapiens
acgccttgtgcgaacagaaataaattcccgcggaaaggatccaccccacgtcatgctgcagcgccgcagagatca

SEQ ID NO: 615224 - DNA, 80 bp, Homo sapiens
atgaacactgtccttcaaaacgagacactcaatcacttgtcggaagtccctcaacccgtatagcacctcatattattgga

SEQ ID NO: 615225 - DNA, 50 bp, Homo sapiens
attcatcccagaaatctaagagcacgtcagctaactgttcagatgatgca

SEQ ID NO: 615226 - DNA, 98 bp, Homo sapiens
gtctcttctggtgtgaggacgagcgcttcctgaagcagttctgtgtatccaacattaatcagaaggtgaagtttcagaggaagctggcgcgtatggca

SEQ ID NO: 615227 - DNA, 100 bp, Homo sapiens
gtcagaaccctccgcagagtaaaggctgcagaagatgtcaatgttactttcgaagatcaacaaaagataaacaaatttgcacggaatacaagtagaatca

SEQ ID NO: 615228 - DNA, 100 bp, Homo sapiens
gctgactcccggacgccgcccgctcacacccgccgcctttgcacccaaggcctcgcgcgaccagcaggtcgtgtacaacgtgggactctgcatttgtctg

SEQ ID NO: 615229 - DNA, 90 bp, Homo sapiens
ccctgctctgctctaacaacatttctccaaagacaacaggccctccctctgccctcccgtctgtgagctccctgcccagcaccacctcct

SEQ ID NO: 615230 - DNA, 80 bp, Homo sapiens
catctccagcaccctcatcgccctggccgacaagcacgcaagaaaacgaagccccctcctgtattgacagctgggaattg

SEQ ID NO: 615231 - DNA, 100 bp, Homo sapiens
ccgccgagctggacccggaccggttttggaacctgcacttgttgccaagtcttccatcttactagatgtgaaaccttgggatgatgagacagatatggcg

SEQ ID NO: 615232 - DNA, 75 bp, Homo sapiens
gcaagctgaaggaggaccagatcaagaaggttttgagagtattttagaagggctttatggaccacggctacgaag

SEQ ID NO: 615233 - DNA, 75 bp, Homo sapiens
acatatgtacagcctagaagaaaacagagagatgagcagcttctgagaagttttattcagtgtatgggtctggtc

SEQ ID NO: 615234 - DNA, 122 bp, Homo sapiens
agcggtgttggaacttcgttgcttgcttgcctgtgcgcgcgtgcgcggacatggcctcaaacgatgttccatttaagcagacctcttccatagctgtagctggagcggtaattggagctgtt

SEQ ID NO: 615235 - DNA, 100 bp, Homo sapiens
aatttgtccaaatacaaagacaggtatggagaatacagaatcccaaacaaggcaatgaacaaagaagaccattatgtgggccattggaaagaaggaaaaa

SEQ ID NO: 615236 - DNA, 100 bp, Homo sapiens
gtcgcgagctgctgatacagaagagatggatattgaaatggacagtggagatgaagcctaagaatatgatcaggtggtttgtgatgaaaatggttccaag

SEQ ID NO: 615237 - DNA, 51 bp, Homo sapiens
ctcttcttgtgtctggagattctgaagccagagcccagaggtggagcagtt

SEQ ID NO: 615238 - DNA, 83 bp, Homo sapiens
ctacagaatgcacctttctccagcaaagccaagcttcatggtgaagtgccacagatagaagattctgaaaaagagttccacgt

SEQ ID NO: 615239 - DNA, 89 bp, Homo sapiens
ctgggtgggcgctgcggggcgctgctggcgtgtctcctcctagtgcttcccgtctcagaggcaaactaactctcttgatagagcccaag

SEQ ID NO: 615240 - DNA, 98 bp, Homo sapiens
cgacctttaaattttccactcaggacggaatcagtccccaatgcctggaaattcctcattggattactgtgttttaaacagaatttcgtgaacagcct

SEQ ID NO: 615241 - DNA, 113 bp, Homo sapiens
caaaggcaaaggcggctcgggagattcagccgtgaagcaagtgcagatagatggccttgcagctgttgtgctgtgtatggacgtgggctttaccatgagtaactccattcctg

SEQ ID NO: 615242 - DNA, 75 bp, Homo sapiens
gccgggctgccccgcaggatcatcaaggtcgcctgcgaggccgctggccaggcctgagcctctgccaccatggcc

SEQ ID NO: 615243 - DNA, 82 bp, Homo sapiens
tctgggattcagacaccgcaagctgctttcggaagggcttcaggaggggacaatgcagatcttcgtgaagactctgactggt

SEQ ID NO: 615244 - DNA, 74 bp, Homo sapiens
attaggccacaatcttcaatgagtaaacatattcctgactatttgcactctttggggaaggctcgaacagctca

SEQ ID NO: 615245 - DNA, 100 bp, Homo sapiens
gctgctgtgtaaggagaagcccacaaccgccctcctggacaaggtggccgacaacctggccatccagcttgctacgcaaacatgcagatctttgtgaaga

SEQ ID NO: 615246 - DNA, 78 bp, Homo sapiens
taaccctcactggagaatccagaggttatgatgtgattgctcaagcccaatctgggactgggaaaacggccacatttg

SEQ ID NO: 615247 - DNA, 100 bp, Homo sapiens
caactggtcttggtagcggaggcacccgaatgctgcccgggtgagtttcaccagtgatcattaaagaatgggcagcttacaaaggaaagtctcctcaaac

SEQ ID NO: 615248 - DNA, 75 bp, Homo sapiens
ggaaaggaactgtggaaagtagagaggtcagtttaggggctggtgcaaaggatgagttgcacattgttgaagcag

SEQ ID NO: 615249 - DNA, 75 bp, Homo sapiens
cgggcgagcggctgtgtggatgtcggcgaagccgcgggcgagcctgttcgacatgggcggtgagtattactgctt

SEQ ID NO: 615250 - DNA, 100 bp, Homo sapiens
gaaagcagctgatagcacatcacaggtcaacaagctgaagagagagatggttcacctccagcacgagctgcagttcaaagagcgtggctttcagaccctg

SEQ ID NO: 615251 - DNA, 75 bp, Homo sapiens
ctccaagaacaatagcttgccctcataaagaatgtatcctgtcaggtataatgtcagtgaatggcaagaaagttc

SEQ ID NO: 615252 - DNA, 100 bp, Homo sapiens
cacttccctcggtctgggcttctctgaggcggcgagagatggtcaggtctggagctcgaccgggccagttccttcagccgcccctgagaacgtgtcagcc

SEQ ID NO: 615253 - DNA, 96 bp, Homo sapiens
cgagacaccaaagattgagacggaccactggcctggtcccccctcatttgctgtcgtagtcaccaggagactaaagtccatcaaaaacatccagaa

SEQ ID NO: 615254 - DNA, 95 bp, Homo sapiens
aaaccccctcaggtacagacccaggctcttcgagactttgagaagtttccagagtggaatctccagtctgtgtaacatagccttcaagagccaga

SEQ ID NO: 615255 - DNA, 100 bp, Homo sapiens
gcaactgagggcagcagagatggaggatgaccattctgccccccttggagaaactgcggctgctgctggagaagctgagcaggttccatgccaagttcac

SEQ ID NO: 615256 - DNA, 83 bp, Homo sapiens
cccttatatcatgaaaaccactaagcacttcaatgactacgaattggagcaatgttggcttatacacctctggatgagaagag

SEQ ID NO: 615257 - DNA, 75 bp, Homo sapiens
caactcctaccagccagatcaacacaattgatagccttcatggtgaaacacctcttggagtatacccaggcaaca

SEQ ID NO: 615258 - DNA, 75 bp, Homo sapiens
acggtgccccggcgccacctggagagaggccgcgtcctgggcagagaattcagcttagagaactatcaacacagg

SEQ ID NO: 615259 - DNA, 100 bp, Homo sapiens
gatgacgacgacgacgaagatgatgaagatgatgatgatgaagatgatgaggaggaggaagaagaggaggaggaagggtggttctcttcccaaagtggaa

SEQ ID NO: 615260 - DNA, 90 bp, Homo sapiens
cagccagggactgggcatccacccggccaggttcccaggaagattatataaatggtggtgaactttttactcatctttctcaaagagagc

SEQ ID NO: 615261 - DNA, 75 bp, Homo sapiens
aggagattctgatgaagaagttattcaagatgaaacgggtatgcaggagattagaagccagtgggcatgagcgtg

SEQ ID NO: 615262 - DNA, 74 bp, Homo sapiens
atttgatgtcttagagaaacttggagaaggaaatctcctgcaaagaagctgagccatgcaattagtaaatcttt

SEQ ID NO: 615263 - DNA, 100 bp, Homo sapiens
cttcactgctctgctgtctcctgcaagaactggctcaagaaatttgcctcgaaaaccaaaggaggccgagcgtggcagcctcggcgcgggctcgctgtgc

SEQ ID NO: 615264 - DNA, 91 bp, Homo sapiens
ccaacccagaccacacccttgagcctgagcccgacattattcctgaggacttatcaaactggtttcaaagcacagagctcaagtaatttac

SEQ ID NO: 615265 - DNA, 75 bp, Homo sapiens
ctttgggagaccttcctagcacagcggcaggttgcccgacatgtgagtgccattccttggggcatttctgccact

SEQ ID NO: 615266 - DNA, 101 bp, Homo sapiens
gtggcctcggcgattatggacccggccgaggcggtgctgcaagagaaggcactcaagtttatggtgagcgagtgctgtgctttcatgggcctcttctttat

SEQ ID NO: 615267 - DNA, 75 bp, Homo sapiens
gacttcagactggtggactgttcatcattctgttgaagaaacgcttaacccagcctatatgaacccaatagcaat

SEQ ID NO: 615268 - DNA, 83 bp, Homo sapiens
ccgagtcctactccagcggcggcggcggccagcaggtactggctgtgatcgaacttctcaaccctcagagacttagatcttcc

SEQ ID NO: 615269 - DNA, 90 bp, Homo sapiens
gggctttgccatccccggctccagcttcctggcgggatccacagcaccattgtttactgaccagccagaggaacctgagtcaaacacaac

SEQ ID NO: 615270 - DNA, 82 bp, Homo sapiens
gccgggatagccccggcggagcccgcagcttccctgccgattattttcgaaataccagtatttcgactccagggggatgttc

SEQ ID NO: 615271 - DNA, 75 bp, Homo sapiens
cccgaaccggtgcccatccagtccggtgccatctgaagcccccttcccaggccacggcgtatgcctccgaggacg

SEQ ID NO: 615272 - DNA, 100 bp, Homo sapiens
cggcccagcttctgaagggagatgtcatgttcctctgtgacgagggtgcaggtatctctggggactacatcgatcgcgtggacgagcccttgtcctgctc

SEQ ID NO: 615273 - DNA, 75 bp, Homo sapiens
aagcagcacgtgggtgaaagaaacttccacgccttctaccaagtgggggagtctgtgttccacacaacccgctgg

SEQ ID NO: 615274 - DNA, 74 bp, Homo sapiens
gtaaagtcgagtatctggtgaagtggaaaggatggcccccaaagtctcggcgcggaagatggccggcggcgtgg

SEQ ID NO: 615275 - DNA, 100 bp, Homo sapiens
cccgtgccggccagcgcaccaggttcaagggcccccaaaagaagcatctggagaaggaaacgccggagacctcgggagacttgtaggctgtgtggggtgg

SEQ ID NO: 615276 - DNA, 90 bp, Homo sapiens
tggccaggtccgaaaacttaatctacacctacgataagtgcatctagtgagagtgaagctgaaaatcttgaagcacaaccccagtctact

SEQ ID NO: 615277 - DNA, 49 bp, Homo sapiens
tgtgcacactggctatcattgatccagagcgcatcagcgaggaggtggg

SEQ ID NO: 615278 - DNA, 83 bp, Homo sapiens
gtcatgtggcagtggaaaatgcgctcgggctggaccagcaggctactgcagcactggggtgtcagttgttggtccgacccaga

SEQ ID NO: 615279 - DNA, 98 bp, Homo sapiens
ctggacttcgcgcagtgcctggggtactacggctacagcaagttcacagaaatcagccaccgcatcctgtgctcatacaacaccaacattgaagagct

SEQ ID NO: 615280 - DNA, 99 bp, Homo sapiens
catcaggtaggctgcgttgaggatctttgctcttccatccgcctttgatcgtcttcctcttcagccatccaggttcacagcatgtccgcctcggcccct

SEQ ID NO: 615281 - DNA, 75 bp, Homo sapiens
aatagctgtttgtattttggctgctgcaggagccattttagacttgtgcaccatggacaattttgctgagggaga

SEQ ID NO: 615282 - DNA, 75 bp, Homo sapiens
acttattccgacattcagagttgtttcctccatttgctaaaggaatagtgtttgaaaacccatatagacagctgc

SEQ ID NO: 615283 - DNA, 82 bp, Homo sapiens
aagaaagatgttttgcctactgttgatccgacctgcctagagctggaacgttacctccagagcgagccctgctatgtttcag

SEQ ID NO: 615284 - DNA, 109 bp, Homo sapiens
cagattcgcagtggtcgcttcttctccttggtgtgatgaatgcagactctgctaccattttggctgtttggatcctcctttgaaaaagtctcctaaacagacaggctac

SEQ ID NO: 615285 - DNA, 100 bp, Homo sapiens
tggaaataacggagcaacttgctaatggcaggcattttacaaggatgatcacggacgtgcagctcgccatcttcgccaacatgctgggcgtgtcgctctt

SEQ ID NO: 615286 - DNA, 74 bp, Homo sapiens
tttaagaaagtggacaaagagaggagtcagttggaaaatggatataccttatttgattatgatgttggactgaa

SEQ ID NO: 615287 - DNA, 73 bp, Homo sapiens
gcgctcagcccacctgtgattatgctactacccacagatggcatgatccgaaaacactctcatgtcaagatag

SEQ ID NO: 615288 - DNA, 90 bp, Homo sapiens
ccggaaaggcgtttgggatgccaacggatcaggattcctgtcatccatctgctggccctttggaccactcggccactggcatgctttcca

SEQ ID NO: 615289 - DNA, 105 bp, Homo sapiens
aatttgtgcaatgtttagccaacccaaattaccttaattgttttttgcatgtctgacacccatgactccacctggaccttatggctccacccagaagcaattcag

SEQ ID NO: 615290 - DNA, 74 bp, Homo sapiens
catcgcctacccccatctccgcatcaggaccaaggtacctgaatctctctcatccatggagtgtcaccattttc

SEQ ID NO: 615291 - DNA, 100 bp, Homo sapiens
agctaaaggccaaatacccaagcctaggacaaaagcctggaggctccgacttcctcatgaagagactccagaaaggggatcttcacactatatagcaaat

SEQ ID NO: 615292 - DNA, 100 bp, Homo sapiens
acaagaccaacaaattcatcaaggagctcatcaaggacgggaagtcactcataagcgcgctcaagagggagcttttggaagagtcccagatggaagcgac

SEQ ID NO: 615293 - DNA, 100 bp, Homo sapiens
tggaggctggcagcgaagaagatcgaaaattaaacctcagactggtcgaattgacaaatcttaccctacagtatgtggccacacaggaccagtgctggac

SEQ ID NO: 615294 - DNA, 98 bp, Homo sapiens
gctggacctgttcgagatcagccagccgaccgagcggggatctgatgagcttctttcttctggcatcattaacggaccttttaccatgaatagttcta

SEQ ID NO: 615295 - DNA, 82 bp, Homo sapiens
acaaacagcccgcccgaccccgtcccgaccctggccgccccgagcggagcctggagttcaaaaggtgatgacctatcaacag

SEQ ID NO: 615296 - DNA, 87 bp, Homo sapiens
gggccccgggcggcggtcgccaggtctcagggccgggggtacccgagctttggaaacatgatgagcaaggagaagcgagaggctgtc

SEQ ID NO: 615297 - DNA, 100 bp, Homo sapiens
gttcaaggaggccttccagctgtttgaccgaacagctggcccgagataacttcttccgctgtggtgtgctgtatgaggactccctgtcctcccaggtccg

SEQ ID NO: 615298 - DNA, 107 bp, Homo sapiens
ttctgtagaccagctccaacaggattccatggtagctgggatgttagggctcagagctgaaatatgctaataccgtgatgcgctttgattacgtctggcttcgagac

SEQ ID NO: 615299 - DNA, 49 bp, Homo sapiens
ctggagagagttccgatttgtccagggctacaatagaagtatctcccga

SEQ ID NO: 615300 - DNA, 99 bp, Homo sapiens
gctcagacaaacaaaatgattttatgcaatcgatacttcacactatggagagggaagcagatgttgaagactgggatagtttccaagctattttggatc

SEQ ID NO: 615301 - DNA, 75 bp, Homo sapiens
gacacaggagagggccccagcagggccaccgggcggcaagatcccaccaaatattttggttgtgagctgggagca

SEQ ID NO: 615302 - DNA, 75 bp, Homo sapiens
cctaccagaggacctcagaaaggagctctatgaactttgggaattggtgttggtattaggagatctgcacatccc

SEQ ID NO: 615303 - DNA, 100 bp, Homo sapiens
ccctcacagtttgctctgctcttccaacaccagtggaagatgatcacatcccagataaatttgcgcctcattttggtaagcggaaaaacaaaagagttcc

SEQ ID NO: 615304 - DNA, 100 bp, Homo sapiens
agcgcaatgaggcgggcagcactgcgacctagaggatcaagacataatgggagcatttttagacaagccaaagatggaaaagcataatgcccaggggcag

SEQ ID NO: 615305 - DNA, 83 bp, Homo sapiens
tgcgtcggagctctacacaaaggtctcctccgggctggggctgagcaagccctcggagtgaccgtgggtgacagcggctccag

SEQ ID NO: 615306 - DNA, 87 bp, Homo sapiens
cctcccaggtagctgggattacagcaggtgaagcccagggagcaaaaagagggagttgccagattatttctacctccacgccctccc

SEQ ID NO: 615307 - DNA, 100 bp, Homo sapiens
cgggagacgagaagcctgaaaagtcgcagcgagctggagccgccggagcaaattgtggctactaatttgccccctgaagatcaagatggctctggggatg

SEQ ID NO: 615308 - DNA, 75 bp, Homo sapiens
cgcgacgctgctcaaaacctcgctccggaaaggggacacctggtcagcccaaggccaaccccactgtcactctgt

SEQ ID NO: 615309 - DNA, 50 bp, Homo sapiens
ctgttcgcagagctgcggaagatggctatgtatgtcaaaaaggatgttcc

SEQ ID NO: 615310 - DNA, 75 bp, Homo sapiens
gtaaaacaaaaatattatggtctttgtgcacatttacatcaaggtctgaaggggcgtctcgattacctgagctct

SEQ ID NO: 615311 - DNA, 51 bp, Homo sapiens
ctcgtgaacatagctttaataggaaatttaaaagcctgttgattcaagaac

SEQ ID NO: 615312 - DNA, 76 bp, Homo sapiens
cggcgatattgtcattattgatcagttcattgacagaatcctaatgctcatccaagacccacctcccaggatttgg

SEQ ID NO: 615313 - DNA, 74 bp, Homo sapiens
cagaagtgctcatcgatgctctgggttggattgagattgttggatgtgctgatcgttcctgttatgacctctcc

SEQ ID NO: 615314 - DNA, 51 bp, Homo sapiens
gcctactatctgtctggagaagagggtggtgattccactgaagcaactgcc

SEQ ID NO: 615315 - DNA, 98 bp, Homo sapiens
tttcaacgatctcctctgcaatgttgatggagatctggaacaccaaggactcggttgtggcgcagactggttctggaggctccttccatgagttctgc

SEQ ID NO: 615316 - DNA, 50 bp, Homo sapiens
ttcctgtggtctctgcacctcctttctgttaaacccatccagagtaatgg

SEQ ID NO: 615317 - DNA, 121 bp, Homo sapiens
aagacccctggctctataagctgaattatggcagcccagtcaaggtactccaaagattcaggtttactcacgtcatccagcagagaatggaaagtcaaatttcctgaattgctatgtgtct

SEQ ID NO: 615318 - DNA, 97 bp, Homo sapiens
ggaggttttggctctgcgtgagtgtggtctacgagctgtttctcatctttatactcttccagaattcactcgtgaagtaacagacacacagatgcca

SEQ ID NO: 615319 - DNA, 100 bp, Homo sapiens
ctcaagtgcttctgcattacagcatctgcagccctggctagaaagaaggggaaaagtttgcataaagacatggctatcttttggcacaggaagaaaataa

SEQ ID NO: 615320 - DNA, 100 bp, Homo sapiens
ctttcaatgtgacacaaggaaagtattctacagggcaatgaggacataagaatgtgattctaatttgatacaaatggtgatcttatgagaagaggaagga

SEQ ID NO: 615321 - DNA, 100 bp, Homo sapiens
tggagcctcagttggaagcagccgatccagcctgcggagcctgtggggcaggttcctacaaacttgatgacttttgagtagaagcctgagaaaaaaagag

SEQ ID NO: 615322 - DNA, 74 bp, Homo sapiens
ctagcaaccagagcagtgacagtagcaaccgccggaatgatttgaggcttaagcaacttcttccggggaagagt

SEQ ID NO: 615323 - DNA, 100 bp, Homo sapiens
gttttagaaaaacaagaattacagcagccaacctatgttgccctgagttacataaataggtcctcttcctgatggatgggaacaagccatgactcaggat

SEQ ID NO: 615324 - DNA, 74 bp, Homo sapiens
tcagcacacagaggatgatgctgactttgatgaagggcacagtcagtggtgtgctgctagttacaccaaataat

SEQ ID NO: 615325 - DNA, 131 bp, Homo sapiens
tcttgtgacgttgtggagatggggagcgtcctggggctgtgctccatggcgagctgggtgtcgtgaaaactacccctaaaagccaaaatgggaaaggaaaagactcatatcaacattgtcgtcattggaca

SEQ ID NO: 615326 - DNA, 82 bp, Homo sapiens
tatgatgatgatcctgaaatcataacattggaaagaagagaatttgacccttcttatgactcagtcagaagaggagcttggg

SEQ ID NO: 615327 - DNA, 104 bp, Homo sapiens
agtaaagtcttggacagacttaaaccagttataggggtaaacactgatccagaacgaacaagtaagaagtttgcgacagagcactattgccaagcgttcaaatg

SEQ ID NO: 615328 - DNA, 51 bp, Homo sapiens
ctttcttctaagtgccacagtgaaatgctgcagttggagaagaaacttgaa

SEQ ID NO: 615329 - DNA, 100 bp, Homo sapiens
ctggaccagaccatgggcctgagcatcaggttgattcttcaccacactgaaaccattaggaaaaatccttgtggttaacagcagaggcttcagagtgtaa

SEQ ID NO: 615330 - DNA, 75 bp, Homo sapiens
acatcatttacggcatgtacttctgcatgaacatctccagccagggacagtcattttgtttactcattcagccct

SEQ ID NO: 615331 - DNA, 100 bp, Homo sapiens
aacattcagacccatttccagtcatgagaaccttcagcctgtggtgtcatcccaagtttgaggaccgctgtcaatctgttgtagagtttattaagagagc

SEQ ID NO: 615332 - DNA, 71 bp, Homo sapiens
aaaccccgcggggaaaagtgacccaagacatcaagagaatccatcccattaaatgacctgaagtcagaagt

SEQ ID NO: 615333 - DNA, 100 bp, Homo sapiens
gctgaaaggcatggtcacaaagaactcaagaaaatcttcgaagacttttcagtatggcgatttagtactgcattttgttctgttaatgaatggaaatttg

SEQ ID NO: 615334 - DNA, 100 bp, Homo sapiens
ctgtgaagctggggaagacgcagaaggtgaaggtgctcacgggcacggatcctgataacttaagtgactctctcttttccggtgatgaagaaaatgctgg

SEQ ID NO: 615335 - DNA, 100 bp, Homo sapiens
ggtgtagagtctaaactcatccttaaaggggtcatactgctgggtatctgtgcagatcaagtgaaagttttcagctatcatcgctaccaaagagtagaaa

SEQ ID NO: 615336 - DNA, 74 bp, Homo sapiens
tgggcctactcgcccgccaccctgcgctgccgccgctctgaggagttaaaggaataatgtatttgtggccttgg

SEQ ID NO: 615337 - DNA, 98 bp, Homo sapiens
ggctgaggctgcagtggcagaaaaacgagccatttctccgtcgattaaagagccatctgtggtgccaattgaaggacacacacctcctctacgtactg

SEQ ID NO: 615338 - DNA, 82 bp, Homo sapiens
ttaggagcgcagtggcggcgcaaccagccttctagggcggcggagacaatgcagatcttcgtgaagactctgactggtaaga

SEQ ID NO: 615339 - DNA, 104 bp, Homo sapiens
gagcgtcgccgccgccgccgccatgaacaactcgggcgccgacgagatcgggttctgactcagaagatcttttggaagaattgctgtgctgtttgatgcagttg

SEQ ID NO: 615340 - DNA, 74 bp, Homo sapiens
catggaagggcattggagacccagggacctgcatagacaaagcagttgagaaatgcactcggtgatggaaagag

SEQ ID NO: 615341 - DNA, 96 bp, Homo sapiens
acgccctgggggcatcctggtcctagagccccaaccctggtcgtcgtatggcaagagaaagactcttacagttcgttccaccagtcataaaccaga

SEQ ID NO: 615342 - DNA, 88 bp, Homo sapiens
tgcttgcattttctcttgtactgctactcagattcgttgatgactgtctgctatcagtttttaagagactaaggtgtcagtatgttct

SEQ ID NO: 615343 - DNA, 74 bp, Homo sapiens
tggtgctgtaaccacctcacagattccagcttcggaacaagagaccctgtagtcgtgaaaggtgccaaattggc

SEQ ID NO: 615344 - DNA, 98 bp, Homo sapiens
gtccaaacaatcatgggaatttccaaggggattcaaacttcaacagaatgtggcaaccagtattgaatttgaccgggattgtgactattttgcgattg

SEQ ID NO: 615345 - DNA, 100 bp, Homo sapiens
ttcaatgaagggctgtgggagatccagaacaacccccacgccagctacagcgcccctccgcacttctccaccgacccagtggccgcctccatcatgaaga

SEQ ID NO: 615346 - DNA, 128 bp, Homo sapiens
cttgaggtatctgatgacctggaaaatgtgtgcaattgggtagtggacacttgtttacacaagctgtctgtgatcctggaaacatacgtgtgactgaagctcccaaacacccaatctctgaagaactg

SEQ ID NO: 615347 - DNA, 90 bp, Homo sapiens
acagccgatgagaagactcttatttcaagttctgatgatgctgaaattcaggttgctgctgactcagccattctagaagttcttcagtcc

SEQ ID NO: 615348 - DNA, 100 bp, Homo sapiens
cggggatctgacgagcttttctctacttgtgtcactaacggaccgtttatcatgagcagcaactcggcttctgcagggtacctgctcttccgagacttct

SEQ ID NO: 615349 - DNA, 119 bp, Homo sapiens
cacgtccagcttcaccacgcggctgcacaactgcaggaacaccgtcacgctgctggaggagaaggacagaataacgggctcccagattcacaagccccaccaagaggatcaccccagga

SEQ ID NO: 615350 - DNA, 98 bp, Homo sapiens
ccttgtctcggccacctcaaggataatcactaaattctgccgaaaggactgaggaacggtgcctggaaaaggtgtctgcttttggggcagagttttca

SEQ ID NO: 615351 - DNA, 99 bp, Homo sapiens
acgactaccaccgcagcgacgagcaggctcctgtaaccgccaggcagcggccccgccatgtcccagccccggaccccagagcaggcactggatacaccg

SEQ ID NO: 615352 - DNA, 125 bp, Homo sapiens
ccagtatccggccctccctcatgacacagctatctctgggccactccactatgccccttaccacaggagctctgcacagcatagggctactttcaaatttgaatcaacagatgaagataaaagaa

SEQ ID NO: 615353 - DNA, 74 bp, Homo sapiens
gaaacaaaaaaaaaaggaagttaaggggccattcccaaagtcaaagatcaatggaagatagatgataagcctgt

SEQ ID NO: 615354 - DNA, 100 bp, Homo sapiens
ttcccttggtcaaaagcgcactaaatcgtctccaagatgcctgaggaagtgcaccatggagaggaggaggtggagacttttgcctttcaggcagaaattg

SEQ ID NO: 615355 - DNA, 50 bp, Homo sapiens
ggagtggattaagtgcattaagatttttagactctgaggagcagttggag

SEQ ID NO: 615356 - DNA, 60 bp, Homo sapiens
agaagatgagaacagtagacagtcggtcatctttctgtccaagggcaaggatgccatgca

SEQ ID NO: 615357 - DNA, 75 bp, Homo sapiens
taaactacttgaaaaatttagccttgttcaaaaagaggtacatctccgttcatggatgcattaacagccaatggg

SEQ ID NO: 615358 - DNA, 83 bp, Homo sapiens
ggccgccgcttaccccggggtctatggaagtaatggaaggacccctcaacctgaaacttgggtccctgaacaatgagcctgcg

SEQ ID NO: 615359 - DNA, 51 bp, Homo sapiens
gcgccttcgcccagaagatcagcaggccaaagaggtgctgaaaaaatattt

SEQ ID NO: 615360 - DNA, 98 bp, Homo sapiens
ataagcacttggaatcacgggttgaagttcgatcctttggtacagaagacagaccgacagatcgtccaataccacctcgagatgaagtctttgaatac

SEQ ID NO: 615361 - DNA, 100 bp, Homo sapiens
caccaattcagagaggagatgtgacaatagaccgcagacacagggcccatcaccctaaggtgtgtgaatatcctgatggaaccaagtctttgaaactggg

SEQ ID NO: 615362 - DNA, 90 bp, Homo sapiens
cccggagaatgtcactgatgtctccttagggatctcttcaaatgagcaggaccaagggcttcgtgggacacatatgcaacatgcctatga

SEQ ID NO: 615363 - DNA, 75 bp, Homo sapiens
aagaaatccgcagaagcttattaaagttaaggaagagctgaagagagacctgaaaattaagaaagaaaaagacct

SEQ ID NO: 615364 - DNA, 50 bp, Homo sapiens
ccgcactctggagcataatgtgctcagccgcccagtgggctcaggcccag

SEQ ID NO: 615365 - DNA, 75 bp, Homo sapiens
gtggggctgaatccgcccgggctacgctcctccatcacgtgttctaggtctcgttccagatcatattctccagct

SEQ ID NO: 615366 - DNA, 127 bp, Homo sapiens
cgggagtcccactggtctagaacccggctctgagggcactggcctagttcccgacttgtttctcaggaattgaatgatctggcacgggaccctccagcacagtgttcagcaggtcctgttggagatg

SEQ ID NO: 615367 - DNA, 74 bp, Homo sapiens
tcccgagtagctgggatcacaggatgatgatgctgaagctatccttgctgcagacttcgaaattggtcactttt

SEQ ID NO: 615368 - DNA, 75 bp, Homo sapiens
gtggaggagctgctccgcgggtgcatcgaagccttcgtgagtgagatcattggccgagacctgagtggcttccct

SEQ ID NO: 615369 - DNA, 100 bp, Homo sapiens
cgagcccagagggacagcccaaggtccaccgagcccgcaaaaccatgtccaaaccaggaaatggacagccacaagtatatggttatgatgacttgcagat

SEQ ID NO: 615370 - DNA, 96 bp, Homo sapiens
actgtttggagaaaaccctcagaagaatttaatggatatctgtgcctcgagcaaaggccttatgcaactacagagggcagaatcccggtgacctaa

SEQ ID NO: 615371 - DNA, 75 bp, Homo sapiens
ctgcctggtgctggtttggagcctctgcaggttcctggccaacacgtccttccagggccgcacgggccccgtgtg

SEQ ID NO: 615372 - DNA, 98 bp, Homo sapiens
gaggaggcctgcggcgtgtggctggacgcggcggcgctgaagaggcggaaagtgcagacccaacatgagtgaagtttcctgcaagaaacgggacgact

SEQ ID NO: 615373 - DNA, 112 bp, Homo sapiens
cacctactgggattccttgggcaatggtgaatttgaaaagggactattggcattcagggatgtggctctagaattctctccagaggagtgggaatgcctggacccagctcag

SEQ ID NO: 615374 - DNA, 58 bp, Homo sapiens
gccggccgagcggcgacggaccgcgagcacacgtcacatggagatgggcgtcaagaag

SEQ ID NO: 615375 - DNA, 74 bp, Homo sapiens
accgccacagccacgatcatgggcttccgttacaagatgaggtctgtgtatgctcacttccccatcaacgttgt

SEQ ID NO: 615376 - DNA, 110 bp, Homo sapiens
ggagtgcatcacggaggacggcaggactgtggccgtgggggacatcgtctgggacaatgcagatcttcgtgaagactctgactggtaagaccatcaccctcgaggttgag

SEQ ID NO: 615377 - DNA, 96 bp, Homo sapiens
ggagacgattctctatgacttgttggtcaacaccgagtggccaccggagactgaagtacagatttgttcccgacaaggagttttctggttcagacc

SEQ ID NO: 615378 - DNA, 100 bp, Homo sapiens
catgggtccgtggtcgtttgtttctccaaggtttgaaaagcagctggcctgcaaggttagaaaatggatttctgactggaatctcaccactgaaaaaaag

SEQ ID NO: 615379 - DNA, 82 bp, Homo sapiens
gggactcggaggaggggccaaggtgtggctcctctgaagacctgcacgaacaatgcagatcttcgtgaagactctgactggt

SEQ ID NO: 615380 - DNA, 100 bp, Homo sapiens
tgccccggcgccacctggagagaggccgcgtcctgggcagaggctgcttctgatgcttggaagatatcctctcagccacaaagatggtaataaatctttg

SEQ ID NO: 615381 - DNA, 50 bp, Homo sapiens
gcagcactccgtacccactcgtaaacaaatccgagctatgctgggccagt

SEQ ID NO: 615382 - DNA, 90 bp, Homo sapiens
agtcaggaccgcgacggcagcagagcatgatcagggccaaagcggtcagtgagaaggaagtggactctggaaacgacatttatggcaacc

SEQ ID NO: 615383 - DNA, 75 bp, Homo sapiens
ggacagctgagctggcatcagaagacctacgccttcaggcagctcacagtgtgccaccatggagttggggcccct

SEQ ID NO: 615384 - DNA, 100 bp, Homo sapiens
gcgagaagagcttctgtctcgaaccttcaccactaacgtatggtttaggaatgatttattacaagcaagaaaaattcagccttgcagaaatgcatttcca

SEQ ID NO: 615385 - DNA, 83 bp, Homo sapiens
gctgatgtgaaaaataccacgacaaaaccaccctagggtgagcccctccagactccgaataggagatcaagagtttgattcat

SEQ ID NO: 615386 - DNA, 75 bp, Homo sapiens
agaccctggtgaaggaggtcgtacaggtaaagtcagtgataaatcttttgtttgctgcatatactggagatgtgt

SEQ ID NO: 615387 - DNA, 83 bp, Homo sapiens
aaaaacttcccaaagaactcctgttacgtcctcctgcatatgcccaagaggattgggagtggaatggacaccagcagaagcac

SEQ ID NO: 615388 - DNA, 75 bp, Homo sapiens
ttcattgcggaataacatcggaggagaagagaggaggttcagatgagcccctgctgacttgagagagacagagag

SEQ ID NO: 615389 - DNA, 95 bp, Homo sapiens
ttgatcccgccaaagatcccagaaggggagcgcgttgacttcgatgaatggaagttggatacactttgtgacttgtacgagacactgaccattac

SEQ ID NO: 615390 - DNA, 100 bp, Homo sapiens
ttccacttgatgtcatcacgcagaaggggtgaaagagactcggtgacagatacaggtttatggctacaaatgatttgatgacggaactgcagaaagattc

SEQ ID NO: 615391 - DNA, 74 bp, Homo sapiens
tttccttactggatcctcaaaccagaagaaaacctgaatctctgaggttttgggatttgagattgacgcggtga

SEQ ID NO: 615392 - DNA, 75 bp, Homo sapiens
ggacattcagacttcagaatgaaagtgactgagaccgaagatgatagtgatagtgacagcgatgatgatgaagat

SEQ ID NO: 615393 - DNA, 50 bp, Homo sapiens
catgcagatctcatcaccatggtcacccacaaaagctgtatataatgcca

SEQ ID NO: 615394 - DNA, 100 bp, Homo sapiens
cggcagcagcagcagcaggcgaggaggaagatggcgggacggctgccggcctgtgtggtggactgtggcacgggggttctgcagcattccagaccttgag

SEQ ID NO: 615395 - DNA, 48 bp, Homo sapiens
agtctgatccttttgttggcagaagtttaactaactctttgaatatct

SEQ ID NO: 615396 - DNA, 90 bp, Homo sapiens
gttctgccttctggacaatctttccgagttccccaccaccaagttagagatgactgctgtggctgacattttcgaccgagatggggatgg

SEQ ID NO: 615397 - DNA, 83 bp, Homo sapiens
gcgagagtgaacgattcaacccgggggagctcagagccccacagtcttcgttataacctcacggtgctgtcctgggatggatc

SEQ ID NO: 615398 - DNA, 100 bp, Homo sapiens
gggactgccataacattcccaaagacaggcaggattgaacccaactaccccaaggtctgcggccaccagggcaatgtgctggatatcaaatggaacccct

SEQ ID NO: 615399 - DNA, 83 bp, Homo sapiens
aagtccgggagctgggcggccatttaccagattcaccagaccagagcacttgggcagcagcgccaagatcaagtgcagcggtt

SEQ ID NO: 615400 - DNA, 84 bp, Homo sapiens
cgtcctgccggggaagaatcaaagagcagtggatcttgtgctgtgaagacatttcccaagtgcttcatgttagccagcaaatct

SEQ ID NO: 615401 - DNA, 100 bp, Homo sapiens
gccgccaccgtctggtgtctaaaccgcctcggatcttggaaaggactttggaacctgatagctcggatgaagagcccccacctgtgtactccccgccagc

SEQ ID NO: 615402 - DNA, 74 bp, Homo sapiens
ccggctgggactcttccatgcgatgttccagatgaccttgatggtgcccccatcgaggaagagcttgatggtgc

SEQ ID NO: 615403 - DNA, 90 bp, Homo sapiens
ctggcaagaggtgctgatatcaacacggtcaacgtggacggcttgacagccctgcaccaggtcaccagggtccccgtggagtcatgtgag

SEQ ID NO: 615404 - DNA, 101 bp, Homo sapiens
cctggaatgatgatgtctcatatgtctcaggcttccatgcagcctgccttaccgtggatctgattggtggctacaacattggcaccgtcagccatgagagc

SEQ ID NO: 615405 - DNA, 100 bp, Homo sapiens
atgcggccaactccaatgggcctttccagcccgtggtccttctccatattcgagggtttccaggcctgaggtgcccgccctggccccaggagaatgaacc

SEQ ID NO: 615406 - DNA, 101 bp, Homo sapiens
gtttttgggagactatctttggcaacagagctcctgaaattattcttgggttaccattttgtgaagctattgatatgtggtcactgggctgtgtgatagct

SEQ ID NO: 615407 - DNA, 100 bp, Homo sapiens
ccacactggccgtcccggccatctcgctgcccgacgatgtccgcaggcggcatctctgggaaaggacctggggctggtgaggggcccggaggagcctttg

SEQ ID NO: 615408 - DNA, 100 bp, Homo sapiens
ccatgagctggggcacggagctgtggtgattcgcctttgccagtctcatctcgtgtctgctttgttaagttccatgatccagactcagcagttgtggcac

SEQ ID NO: 615409 - DNA, 75 bp, Homo sapiens
cttccaagcaaggaagtcgacaggatcttagaaatgaagttgaaaaattacgcaatgaagtgaatgaaagagaga

SEQ ID NO: 615410 - DNA, 98 bp, Homo sapiens
gagaatatatggctggacagctagctgcttatggctataaaattacagggggaacgcctagtttgaaaatattatggctgaaccaagagccagaaata

SEQ ID NO: 615411 - DNA, 75 bp, Homo sapiens
cctgcgagaactccagtccgggctccacaaagggcgcgacatatctgaagagatggattaagaatgctttggatt

SEQ ID NO: 615412 - DNA, 51 bp, Homo sapiens
catcggcgagggcgcctacggcatggtgtgagtctttctctgtcacccagg

SEQ ID NO: 615413 - DNA, 101 bp, Homo sapiens
agagagcaagcagatttgaacctatctgctttcaagctggtcatcatgatgaaacttagacacacgctagtcctgctgatgggcaaagaaggtgtccacgg

SEQ ID NO: 615414 - DNA, 100 bp, Homo sapiens
accttgtgtctcaatttggctacaaaagttgatattcactgatggactccaaagaatcattaactcctggtagagaagaaaaccccagcagtgtgcttgc

SEQ ID NO: 615415 - DNA, 100 bp, Homo sapiens
cgccaggccctgcaggacctgctttcggagtacatgggcaatgtgaggaattttaaattggaacaagagcaagaaaaaaacaaaatcttgtcagaagcac

SEQ ID NO: 615416 - DNA, 88 bp, Homo sapiens
cgatctgcacttcgcattttggcattgacatttaattttagggtcctttatatagaagggagactcagctgtctccagtactacacgg

SEQ ID NO: 615417 - DNA, 82 bp, Homo sapiens
ccgctgtgtggttgcaacggagataaattcccggaaccgcgattcggcgtgtcagacttcccaagtaagaagcggaagagga

SEQ ID NO: 615418 - DNA, 82 bp, Homo sapiens
cggctacctggccctgcagaagtcctgcctcaccaaggctggctcctcaagaaagaagctcaccatggatgatgatatcgcc

SEQ ID NO: 615419 - DNA, 75 bp, Homo sapiens
ccggcagcagcagcaccaccggacggtcaaaatgcagatcttcgtgaaaacccttaccggcaagaccatcaccct

SEQ ID NO: 615420 - DNA, 83 bp, Homo sapiens
ggagaaggcacccgcggaaccgacggctcaggtgccggacgctggcggatgtgcgagcgagcctcttgttgctgtaccacata

SEQ ID NO: 615421 - DNA, 89 bp, Homo sapiens
tcccaaagaaacccatggtgcatatgctttgggcagcttttgaggaacagcagggtcagacatatttccaacatttgggtcaaaacctt

SEQ ID NO: 615422 - DNA, 83 bp, Homo sapiens
ctttcacttccagccagctgtgaagaaggaaccctaaggactctgcaatatgaataattccctagagaacaccatctcctttg

SEQ ID NO: 615423 - DNA, 75 bp, Homo sapiens
caaagtccaaattcttactttatggatgtaaaatgtccaggttgctacgatttctgcaaacggagacaaagaaat

SEQ ID NO: 615424 - DNA, 74 bp, Homo sapiens
tcaagtccttcaagcagttcgcactacagcgggagcaggagctggaggaacccgatgctccctccaaatccaag

SEQ ID NO: 615425 - DNA, 82 bp, Homo sapiens
gtccgcccacatcgatcccgacgccagctacatggcagctgtcaatagcaccccagcagcgatgacatgaccctcaccagcc

SEQ ID NO: 615426 - DNA, 100 bp, Homo sapiens
ccatcattgggagaaatccccactcctccaagaaccaacccccaaattggctgggacagtcactcaagactgcttgcaactgattgcagacagtgaaaca

SEQ ID NO: 615427 - DNA, 83 bp, Homo sapiens
gccggaggagtcagctgtgtgtccagaacgtgccatggagacgcttaacgccgcctttttatagccgaaacacagctgaaatg

SEQ ID NO: 615428 - DNA, 50 bp, Homo sapiens
cgcaggacctgccgccgctgcacagatactgggtcgtcaggatggagttt

SEQ ID NO: 615429 - DNA, 82 bp, Homo sapiens
aattcaatgagaaagaagatgatgaatggattcttgttgacttcatagcttaaagcttttcaagccaggccaagaagctgtg

SEQ ID NO: 615430 - DNA, 80 bp, Homo sapiens
aagcggatttccgattgaatgaacagcacattagttccagaagaaagatggaaattctgaaaactgaatgtcaagaaaag

SEQ ID NO: 615431 - DNA, 50 bp, Homo sapiens
agggctctgtctcgcacttcccaggaagaggaggctgcaaaatgggcccg

SEQ ID NO: 615432 - DNA, 100 bp, Homo sapiens
ggtgttcgagaacgaccccgagacggttgcacactgggccacagaggatccagcaaggatgaagaaatggagcagcacagacttgggggcagctgcggac

SEQ ID NO: 615433 - DNA, 75 bp, Homo sapiens
ttgtttgtggatcgctgtgatcgtcacttgcatcaagatggtgctcatgtggaccagtggtgacgccttcaagac

SEQ ID NO: 615434 - DNA, 93 bp, Homo sapiens
cgcgcctgttccgcagcccgcgtccgcgccggccccacagctctgcgtccggacctgcctagagctggaacgttacctccagagcgagccctg

SEQ ID NO: 615435 - DNA, 51 bp, Homo sapiens
agttcggcggggaagatggcggatgacaagatggaagatggtaccccaaag

SEQ ID NO: 615436 - DNA, 98 bp, Homo sapiens
agatacaaagacagaccatcccagttgaatgctgtcttccaagaacagaagaaaatgatccaggcccagcccacaggtcctgacttcaggagcaagac

SEQ ID NO: 615437 - DNA, 101 bp, Homo sapiens
caatgcggttcaagaatcgattccagcggtgattaaagtatacagtgaagatgaaaccagcagggctttagatgtacccagtgacataacggctcgagatg

SEQ ID NO: 615438 - DNA, 90 bp, Homo sapiens
ggcacagacaggctgtgtgcatgcaccaaaggttattgaagaaattgaagaaatgatgcaggaatcaccggacccagaagatgatgaaac

SEQ ID NO: 615439 - DNA, 98 bp, Homo sapiens
gtgaatcttgcacttgcactagcagcgaacgattcgtcttctagtgcaaattcacccagtgaaaaaacctcttcggccaagcagaactcagaaaaaag

SEQ ID NO: 615440 - DNA, 101 bp, Homo sapiens
gaccagcagatgaatggacaccttgaagcagaggagcagcaggaccaggtctcagcggcggtggcagccgaggtgcaggatgcaagaaggcgccccccggc

SEQ ID NO: 615441 - DNA, 98 bp, Homo sapiens
cgcgacggcctggctttctgcgccatcctgcaccgccaccggcccgacctcatggtgaggtggctttgaccccgggttgcccggccagcacgaccgag

SEQ ID NO: 615442 - DNA, 100 bp, Homo sapiens
gacgtgatcgtgctgggcaccggcctgacgatgggaataactgggaacacaagtccatttggacagccctttagtcaagctggagggcagccaatgggag

SEQ ID NO: 615443 - DNA, 82 bp, Homo sapiens
tccagagatcattcatgcccaacaagtcaagaatctttcaagccaggaaacgtaaatattttcaccacgatcgattagactg

SEQ ID NO: 615444 - DNA, 75 bp, Homo sapiens
atgggccctggcggtggacgagcaggaagctgcggctgagtcgcctctactcttcatggatcttttggatgaaag

SEQ ID NO: 615445 - DNA, 51 bp, Homo sapiens
accatccgttcaattggtacaaagctgagacagggtttcaccatgctggcc

SEQ ID NO: 615446 - DNA, 90 bp, Homo sapiens
gacatcagccagtgtggaagaagggactgtgctgtcaaaccatgtcaatctatatctgtgtgaggctggattttctttgcctactccaac

SEQ ID NO: 615447 - DNA, 75 bp, Homo sapiens
cctgtgaactcagcattgctgcagctcgtgggtgctcagttttttgctccactcaagcctgttagaatcaccatg

SEQ ID NO: 615448 - DNA, 95 bp, Homo sapiens
aaggacagcttttttcctgcaaggaaaacagttcctcctgaggatttcagagaagagctggacttcctggctgactctcacattctcttcttctg

SEQ ID NO: 615449 - DNA, 100 bp, Homo sapiens
agaagttgctaaactgtttgcagatgctggcttagtgtgcatcacaagtttcatatcaccttacactcaggattcttactacagatttaatgaccttaac

SEQ ID NO: 615450 - DNA, 98 bp, Homo sapiens
agcggaggacagcgtgcccggattgcccttgctcgtgctgtctaccagggctgcacaaagatgttcagggataactcggccatgagaaaacatctgca

SEQ ID NO: 615451 - DNA, 100 bp, Homo sapiens
ctgaaggtttccaacttgctcatgaccgacaagggttgtgtgaagacagccttctgtggacgattacatggggatgatcaaaaggagcccttccccgccg

SEQ ID NO: 615452 - DNA, 90 bp, Homo sapiens
gcgaggaccacatgcgcttcatttcggagctggcgcgctacagcaacagcgagaaaaaggtgcactgcctcaacatggacagcctctctt

SEQ ID NO: 615453 - DNA, 75 bp, Homo sapiens
ggaagagggttggaggcaaagttccgaatagggatgaggcatacgtgattcatgatgttgctatcaaaagttgag

SEQ ID NO: 615454 - DNA, 98 bp, Homo sapiens
cgggatcctcatgttcactacccttcatgcatgaaagacaaagctactcagggtgagccaggtcctcctggtccttatggttctccaggagctcctgg

SEQ ID NO: 615455 - DNA, 75 bp, Homo sapiens
tcttctactcagcccccacttgtggaacttgatcaggaagctgaatatggtgggcatgatcagatagatttgtat

SEQ ID NO: 615456 - DNA, 96 bp, Homo sapiens
ggggtggcgtggcaagccggactaaggaccggggacttcttgattgagagcgatcaggacgccacggctccgcctgaagcgatggcccagccctac

SEQ ID NO: 615457 - DNA, 95 bp, Homo sapiens
aagctgttgtctcagggagcacagaagttactcactataaacaatatccacccaacacaagcaaagtttattcctactttgaatgccgtgaaaag

SEQ ID NO: 615458 - DNA, 100 bp, Homo sapiens
ccaggtggtcatcatcagcatgctcacccgctacgcccgcacgcagttcctgagccccacccagaacacttccaggactctgaagaaacagttacaagca

SEQ ID NO: 615459 - DNA, 83 bp, Homo sapiens
gtcttctcttcctcctccaccgagtcgtgctctcgccccaacccgcgcgccaggtgagaagccctaccactgcaactgggacg

SEQ ID NO: 615460 - DNA, 75 bp, Homo sapiens
ctgggaataaaatatgctttggcagtccgtcagttccggtgtctcgcccggtcctcaccctcagggctcccggga

SEQ ID NO: 615461 - DNA, 104 bp, Homo sapiens
ggcgtccgcggagcagcttccccccgcgcctctcttcgcctcgcctcgggacccgcggtccccgctcttgctggtactccaaagattcaggtttactcacgtca

SEQ ID NO: 615462 - DNA, 96 bp, Homo sapiens
caaggaaaatggctctgtcggtgtaaaaaagtcatcatcagatttgaaatatttaaagtggatacaaaactatttcagcaatgcagacaattaagt

SEQ ID NO: 615463 - DNA, 83 bp, Homo sapiens
gctacatagaaatgtacaccctcgagagcggcctgattgggaagaaactcttagcgcaatgaggaagtccacaaatgaagggg

SEQ ID NO: 615464 - DNA, 100 bp, Homo sapiens
gaagcgggccgcatgcctgtgtttccgcagcgagagcgaggaggagcaagagacagagcgacatgagagattggaccgcgggctgcactggagaatttac

SEQ ID NO: 615465 - DNA, 100 bp, Homo sapiens
cctggagcagttgtatgtgtagaaagtgaaatcagaggagatgtaactatcgatcctgataacttaagtgactctctcttttccggtgatgaagaaaatg

SEQ ID NO: 615466 - DNA, 96 bp, Homo sapiens
gctgcctcgccgcgtctcgccacgtgggggcttatttggcctccccaggatggactggagcatcagtagtgcccgggtttatcacaggacagatac

SEQ ID NO: 615467 - DNA, 100 bp, Homo sapiens
aggcccaacgagaattccagtgctgacatctcaggtggacttttcatgagaaacacagtgcaggagcacagcgctttccgctttgccgtgcagttataca

SEQ ID NO: 615468 - DNA, 83 bp, Homo sapiens
ctcaattacacttcgactctcaaagcaataccaggatagctgttgtttcagagaaaggttggtcaaagaaaaagtgatgtatg

SEQ ID NO: 615469 - DNA, 90 bp, Homo sapiens
cgaggcggaagaccgcgcgcagggcctgcagcgggagctggacggcgagcgcgagcggcgcgagaaagctttggaggagaagatacggac

SEQ ID NO: 615470 - DNA, 82 bp, Homo sapiens
cttcggatcatatctcatgaggctgtaggctccttcaacccgtggctgatagctgaaaggtttacccaaggtccagcctagc

SEQ ID NO: 615471 - DNA, 100 bp, Homo sapiens
cggcgcactaccagctcgtctacacctgcaaggccatctgagtgaggatccccggtttccaaagcttcagtggcccactccggacctctgcccagcctgc

SEQ ID NO: 615472 - DNA, 99 bp, Homo sapiens
agaaacactctttgacattctggtggctggtggaatgctgggtttccaggtcttggcaacctttgaaattccaattccatttgagagagctttgacgag

SEQ ID NO: 615473 - DNA, 82 bp, Homo sapiens
caacaatgcctctgttcaaactcccagacaccagagccggaagtggaaccgcccagtgcccccgagctcaagcaagggctgt

SEQ ID NO: 615474 - DNA, 51 bp, Homo sapiens
accattggcgtggatccgctggcctggaagtgctcagcggctgcactggac

SEQ ID NO: 615475 - DNA, 83 bp, Homo sapiens
ctccagcgccctggcctccctcaccttggacacctcgcttgggtgcagaccatgaattacgtggggcagttagccggccaggt

SEQ ID NO: 615476 - DNA, 75 bp, Homo sapiens
cttccgctagtgatcctttgcaccctgcttggagacggacttgcttccgtacacaatgttgtcaggacaggttcc

SEQ ID NO: 615477 - DNA, 73 bp, Homo sapiens
gccgacgccatcaggctcaacgaggaactcaaagtggatgaggaaagagatggtaacctgcacctcaatgtga

SEQ ID NO: 615478 - DNA, 98 bp, Homo sapiens
gaaaacgtgaagactgtttgccctatggatatgggccctcacattttccaaacctgtccatctgctaactattttgactgcagagccatgtccattgg

SEQ ID NO: 615479 - DNA, 75 bp, Homo sapiens
tcttggaacagcacccccttctttaagggtccgccttagtaagcgccgggccaaggctggggttcagtcaggcac

SEQ ID NO: 615480 - DNA, 75 bp, Homo sapiens
cggggctgtggctccttttcgggctcacagtgacctccgccgcaggccaggtcagagcagcccaccatgggatgg

SEQ ID NO: 615481 - DNA, 82 bp, Homo sapiens
atcattaaggacggaggcacgggggagctgatcaccttctattactattggaagaagacccccgaagcagccagctcccgag

SEQ ID NO: 615482 - DNA, 60 bp, Homo sapiens
gatgaattgggtagagagaccaaagatcttgatgaggtgcgggccagtgctattgcccag

SEQ ID NO: 615483 - DNA, 75 bp, Homo sapiens
attggctttggaaaaatggaaacctacatcaaattggaaaagcttggagaggcaaacgaagatttaatattaaat

SEQ ID NO: 615484 - DNA, 90 bp, Homo sapiens
ctgggccagatactttgtgaaagtggtattcagttaagagaacaattatttcgtataagccacatcagagacgactgaagatgaaaaaac

SEQ ID NO: 615485 - DNA, 123 bp, Homo sapiens
aacgtagggaccacatcaaagacagctttcacagtttgcgggactcagtcccatcactccaaggagagaagctggcataaccttgacaacagattgccttgaagatagcctccttacatgcta

SEQ ID NO: 615486 - DNA, 82 bp, Homo sapiens
gccacctactattacccccagtatctgcaagccaaggctcttttccacaatggcccccctgaccagcgcgtcgaccgcggcc

SEQ ID NO: 615487 - DNA, 50 bp, Homo sapiens
cccggaccgcagtgccccaagagaggtggctatggaccgccccctgcagg

SEQ ID NO: 615488 - DNA, 87 bp, Homo sapiens
tattacatttgtttgcccgtcggagcggagagaggtcattgggctgactgcctcggttggtgttggggatgccaaaaacacagatga

SEQ ID NO: 615489 - DNA, 80 bp, Homo sapiens
cgagtctacctggatgaaaactacaaatcccaggagcacttcacggctttttggaaaggatataaacaacggaaggagta

SEQ ID NO: 615490 - DNA, 111 bp, Homo sapiens
cccccggctccatcgacctcaaggacatcaacttccggccgcagatgtcccagacagccccagtaagggccttggaccttgcggatggattttggtggcgttctcattctt

SEQ ID NO: 615491 - DNA, 100 bp, Homo sapiens
gcgcttcctgcgcatcgtctgcaagaccgcgaggcgagacctcttgtcccactctatgaccagtgggaggatgtgatgaaagggatgaaggtggaggtgc

SEQ ID NO: 615492 - DNA, 73 bp, Homo sapiens
agaaagagacttttttctaaagaatgttttgagaacagagtgctgttttagagctggcagcagcatctcagcc

SEQ ID NO: 615493 - DNA, 82 bp, Homo sapiens
tggaaactaggcataaggaagaatgtctcatgttcgagtctggggctgtcgctgtgctctacaagttggatggcttgaggac

SEQ ID NO: 615494 - DNA, 90 bp, Homo sapiens
tgtatttatggagaccgctgcagggcagctgcaatgactctccgcacggtattattgtcattgcaagcactattggcagctgcagagcca

SEQ ID NO: 615495 - DNA, 90 bp, Homo sapiens
gttggaccttccggagcttctcagaagacagagggttttcttttgaggtttttggattcaaagcataaaaaccattacaagatatacaat

SEQ ID NO: 615496 - DNA, 75 bp, Homo sapiens
gaaatgaggaggagtagtggtttgcgagcaggttctcggagggaccgggatagatttggagcaagaggtggtggt

SEQ ID NO: 615497 - DNA, 90 bp, Homo sapiens
ttgggactttgatacccaggaagaatacagcgagtatatgaacaacaaagaagctttgcccaaggcagcaatgaacttcatcaagttcca

SEQ ID NO: 615498 - DNA, 81 bp, Homo sapiens
ggacaactgcagctactctgatgaatgcatactctagtgtatactctgaaagagcgatgcctccaggttgtccggagccta

SEQ ID NO: 615499 - DNA, 83 bp, Homo sapiens
tcaaggtggggttcggggggccaccgaatcgctgtcacgccggcagccacctgtctgtccagccacccttccacagactgagg

SEQ ID NO: 615500 - DNA, 101 bp, Homo sapiens
ggtggatgaaaaaagagctttcaagacaaatggcaaacctgaagaaaaaaaccatgaagctggaacatcagcatttgatgagcttgttgaagcataccaag

SEQ ID NO: 615501 - DNA, 83 bp, Homo sapiens
catccttccagaaggagcgaactgaagaggttctacacaattgttccagtgtctcgccccatcctcaccctcagggttcccag

SEQ ID NO: 615502 - DNA, 90 bp, Homo sapiens
tgtgacagcacagcccagtaaggatgtacatgttgtaaaagagcaaaatccaccacctgcaagaattgctggaatccacaaataccaaac

SEQ ID NO: 615503 - DNA, 97 bp, Homo sapiens
agcgaggaagctacacttttcaccaaggaactggtgctgcagcgagaggaagtaaaaggcctacaagcccagattgccagctctgggttgaccgtgg

SEQ ID NO: 615504 - DNA, 100 bp, Homo sapiens
gaaaaatataaaaatcactggtatccagaaaaaccatcgaaaggacaggcctacaggagagaagaccaagaggtcggagaagaggtagaaaatgtggcag

SEQ ID NO: 615505 - DNA, 98 bp, Homo sapiens
tgaaagcccccaacaccacgacaatccagtttcctgctaatttgcagcttcctccagaaccccaagtttcacatgcctgaggatgtacgagaaaaaaa

SEQ ID NO: 615506 - DNA, 74 bp, Homo sapiens
ccagcggcaggaccagcgggcgggggcccacgagtgctttgcaagatatcaccttgtcacagcagaccccctcc

SEQ ID NO: 615507 - DNA, 90 bp, Homo sapiens
cgcgcacaggctgtagcaggttccggcggacggcgttgcgaagtattggatgaacgaatatacctcatccattggaattggagtttttca

SEQ ID NO: 615508 - DNA, 82 bp, Homo sapiens
agcgatccgcgggctggcgacgtagaggaggacgcctcacagctcatctttcctaaagaactcccccactggaaaggattct

SEQ ID NO: 615509 - DNA, 128 bp, Homo sapiens
ggactctgtatctggaactggtggcgtcggcccaggtcggcgggaaccccctgaaccggacctggaagctccgaccccaggagccagcccatcaacctgaaccattacgccaccaagaagagcgtggc

SEQ ID NO: 615510 - DNA, 100 bp, Homo sapiens
gggggaaaggatgcaaattctccagaatttcaagcacaaccccaaaattaacaccatcttcatatccaagatcttcttggcttagcggctgaagactgac

SEQ ID NO: 615511 - DNA, 101 bp, Homo sapiens
cgagcccaaggcaattgatcccaagttgtcgacgaccgacagggtggtgaaagaaggacagaataacgggctcccagattcacaagccccaccaagaggat

SEQ ID NO: 615512 - DNA, 75 bp, Homo sapiens
tgggcctggagccaagcccctcttcaggagtaaggacaggtcccagaagaggaggccagtcacaatggacagcgc

SEQ ID NO: 615513 - DNA, 82 bp, Homo sapiens
tatggtgatgattagagacatactaatgtacatgcccctcttggagtctgtgccttatgaagaagcactggcaaaccgccgc

SEQ ID NO: 615514 - DNA, 74 bp, Homo sapiens
cgtgctccattatgtcgtgtgcttccccggaggaaggctgaacaaggacctgcgacattttctcaatcagcgat

SEQ ID NO: 615515 - DNA, 100 bp, Homo sapiens
cgcgcccgccagttgcttgatcaggtggaacagattcagaaggagcaggattaccaaagggaagcagaatctggtaatataagtcaaaagtctgatgaag

SEQ ID NO: 615516 - DNA, 50 bp, Homo sapiens
gaatctgtcttggaggacatcagaagttgaagtctgagcgggaattggac

SEQ ID NO: 615517 - DNA, 82 bp, Homo sapiens
ctcgggaatccggcacaaggcactgggctacgtgctggacaggtgagaagccctaccactgcaactgggacggctgcggctg

SEQ ID NO: 615518 - DNA, 83 bp, Homo sapiens
agggccgccggaggaaacgctgtcactgtggaaacggacatggatttgattgacatactttggaggcaagatatagatcttgg

SEQ ID NO: 615519 - DNA, 142 bp, Homo sapiens
cccttcagaacgctggggaggttgggctgaactgcagtgggagaggagaagagatgctggcgtgaagggaactgataaatttcaaacggaagagagtggcagcatttagaaagaatctaattgaaatgtctgaactggaaat

SEQ ID NO: 615520 - DNA, 75 bp, Homo sapiens
cgcgaatatcgtcatcgttagaagcagaaaggacccaggagcgataacagtaaatcaaataagatatttgtcggt

SEQ ID NO: 615521 - DNA, 100 bp, Homo sapiens
cggatcaccggcgtgccccaccatgtcagacgcagccgtagacaccagctccgaaatcaccaccaaggttcgatacaagaggctgttttcctagcgtggc

SEQ ID NO: 615522 - DNA, 90 bp, Homo sapiens
ctattctcctaacatgtatcctggagcgaatcctaccttccaaacagatatgcacccaatgtccagggagcgtgcaaaatttgtcaaaag

SEQ ID NO: 615523 - DNA, 97 bp, Homo sapiens
aggagatgaaagctttgtatgaacaaaaccagtctgatgtctatgctgggactcatgtatgtctactggactcagctcaacatgttccagaccttga

SEQ ID NO: 615524 - DNA, 100 bp, Homo sapiens
attaccagttcctacagctccactcgaggcatctcacagctctcctgccacagctcctcaccccctgaaaatgttcgcctgctccaagtttgtctccact

SEQ ID NO: 615525 - DNA, 100 bp, Homo sapiens
gttgtctccgatccagaggatctgcaagtacccgctcctccttaaggtttggtgcacctcgatttggaggaagtagggcagggcccttatctggaaagaa

SEQ ID NO: 615526 - DNA, 96 bp, Homo sapiens
gaattcagccagtggtcacagctggatgtttgcgacatcccagagagcttccagaccacagacccctttgcttctgtttttgggaatgaatcattt

SEQ ID NO: 615527 - DNA, 50 bp, Homo sapiens
aaagagacacagcccatttttttagaacctgagccagcagaagagtacac

SEQ ID NO: 615528 - DNA, 100 bp, Homo sapiens
catggctcagaggagagggaggaaggatctcatgagcaggatgaattgcatcatagagacaccgagggtgtcctgttcccagacctgagctgatctacca

SEQ ID NO: 615529 - DNA, 50 bp, Homo sapiens
ccagtgcatcttttgcacagctgtaccagaggtttgaaaaggcatttctc

SEQ ID NO: 615530 - DNA, 100 bp, Homo sapiens
gatggtggagtaggaggcaggtctccgcgtcttcccatgcacaagatgattaatacagatcttagcagaatcttgaaaagcccagagatccaaagagccc

SEQ ID NO: 615531 - DNA, 112 bp, Homo sapiens
gctgctcttttcctggacagtgtatctttgggagaccttcctagcacagcggcaggaaaatcaggaaaatgtttccaacctggtgattgaggacacagagctgaaacaggtg

SEQ ID NO: 615532 - DNA, 90 bp, Homo sapiens
gggagagtccgacgcgcctggctaggagcgccgaccgcagggcctctacgggtgggaaagcagtgccactctccgcttcacagatgcccc

SEQ ID NO: 615533 - DNA, 73 bp, Homo sapiens
cctacagacggagtgctgtgccacatttccaactgataccatacagcgctcaaaatggatcagggctgttaat

SEQ ID NO: 615534 - DNA, 75 bp, Homo sapiens
ggagcgaaggctgaggtggcagcggcaggagagtccggccgcgacaggacggcataatcaccagcaacacccggg

SEQ ID NO: 615535 - DNA, 75 bp, Homo sapiens
ccacaatggagacgccgccgctgcctcccgcgtggtgagagcggctgaggaggctgcgtccacactggccagttc

SEQ ID NO: 615536 - DNA, 74 bp, Homo sapiens
ggacgctttactctaccagagcaagggtgtgatgaatgcagactctgctaccattttggctgtttggatcctcc

SEQ ID NO: 615537 - DNA, 100 bp, Homo sapiens
ccggcgcgctggcgggcgaggagcggcggcggtggcggccgctgggcaccaccaagtctgaagatcgtgctgctttgctgaagaaattcaatgaacctgg

SEQ ID NO: 615538 - DNA, 75 bp, Homo sapiens
ttctcatcccaaaacaatgcctttgcacaaaataaaccaactggctttggcagtggtctgctgtgtgaataaata

SEQ ID NO: 615539 - DNA, 82 bp, Homo sapiens
attgctccggactcagccaagttccccaacggctccccgtcgtcctggtgctgcagcgccttacgacagtctgcctacctca

SEQ ID NO: 615540 - DNA, 74 bp, Homo sapiens
tattgacggaaagcttgaattacctacatgggcggcgactggcggcgcgatggacctgaccgggctcctgctgg

SEQ ID NO: 615541 - DNA, 90 bp, Homo sapiens
atttacgcggatgtcggcgaagagttcaaccagatctaccttctgagatatcatccttcttcagggagataaggaaaaaaagccacaggg

SEQ ID NO: 615542 - DNA, 115 bp, Homo sapiens
ggtaacgggggaggcagcaggaggaggaggaggaggagggactcggcgggaggatgacaccattcgcttttcacccaagatgatttgatgtcttataaaactctgatgaaccatg

SEQ ID NO: 615543 - DNA, 98 bp, Homo sapiens
agcagggctacgtgaaaatccgcagcaggaagcttggggaattactgaaccttcaacatgcctactataaactaaacagacaataccaggcaaatatt

SEQ ID NO: 615544 - DNA, 100 bp, Homo sapiens
cttgaaatgctacatttccaagggtttcatcaccttaaatggttttgaaccaatgaaggtgtattcccttaaaaagacggacagcccatcgtgtgaacta

SEQ ID NO: 615545 - DNA, 100 bp, Homo sapiens
gaaaataagatggaacccatccacataaggaagcggctcagccccagggcagcacatcagagacaccatggaacacagccattcctctgccgtcgtgctg

SEQ ID NO: 615546 - DNA, 74 bp, Homo sapiens
atacagcaacttagcgaagctgccggtgaagatggtactagcaaaggccagacgtcttactcaacaacttccct

SEQ ID NO: 615547 - DNA, 83 bp, Homo sapiens
gggaagatgcgtgcgcccattatggagaaggaggagacaacccgggagctgctgctgcccaactggcagggtagtggctccca

SEQ ID NO: 615548 - DNA, 132 bp, Homo sapiens
gcgaggacagcgcgtgcccgcgaggagccgccgcgcgcccgcgccctccgcgcgacgccagagctgaagaagcaggtggagagtgccgagctgaagaaccagcggctcaaggaggttttccagaccaagatc

SEQ ID NO: 615549 - DNA, 51 bp, Homo sapiens
cggaactgtcactctcaaacttcacagaaatcagtcatctcctggctgttg

SEQ ID NO: 615550 - DNA, 75 bp, Homo sapiens
tcctgtctgctagtgccatctgaaatccttcctggaacttgcttggctgaagaggaaataaaaacagaacaggag

SEQ ID NO: 615551 - DNA, 82 bp, Homo sapiens
cccaacacgcctgaccccgccagcgacgcgcaggacctgccgccgctgcacaggaatatattaaaggaatctgtgaacctga

SEQ ID NO: 615552 - DNA, 99 bp, Homo sapiens
ccgagtctccgccgctgcgggcccgctccgacgcggaagatccagaatataagaagtttttagaaacctactgtgtggaggaagagaagaccagtgcca

SEQ ID NO: 615553 - DNA, 75 bp, Homo sapiens
ctgccactgtcttgttccgaggcggccccagagactaggactcaatgaaattgctgcccccatgttcctgaggct

SEQ ID NO: 615554 - DNA, 100 bp, Homo sapiens
agctgcgccggcgagaagcggccgagccagcagcagattggtgctgaagacatggacggcttccaggcagacacggaggaggaggaagaggaggagggcg

SEQ ID NO: 615555 - DNA, 100 bp, Homo sapiens
ctagtgcattgtagtctaaatgagctagaagatgcagcacttacttttccagtccttttccaagatgtcatttatcaggggacggcaaaacagaacagaa

SEQ ID NO: 615556 - DNA, 51 bp, Homo sapiens
gagtcacctgaaaggcaagaaatgacggagttttactcttgttgcccaggc

SEQ ID NO: 615557 - DNA, 101 bp, Homo sapiens
ttgtgcaaccagggcaactctgaagcagagaccccgacggaaagcgtttcagagcctgaggtggccacgaagcaggaactgcaggaggaggaagagcagac

SEQ ID NO: 615558 - DNA, 111 bp, Homo sapiens
caggaggagatgcttcagagagaggaagccgaaaacaccctgcaatctttcagacagacttcctagcatgggctgttgtgctggagagaacgagagctacgaagagactac

SEQ ID NO: 615559 - DNA, 115 bp, Homo sapiens
ggctcgctggccttggcggcggctcctcaggagagctggggcgcccacgagaggatccctcacccggtgctggagaatctggtaaaagcaccattgtgaagcagatgaggatcct

SEQ ID NO: 615560 - DNA, 75 bp, Homo sapiens
aggacggcgtgatcacggccagcgaggacaggagaagaaggaagttgtggaagaggcagaaaatggaagagacgc

SEQ ID NO: 615561 - DNA, 51 bp, Homo sapiens
gccactatgaggagggccctgggaagatggtcagtaggacagaaggtaaca

SEQ ID NO: 615562 - DNA, 83 bp, Homo sapiens
cgatgacatccctttccgagtcaactggcccggcaccgagttctctctgaaactggaggagcaggaccgccgggcactgagca

SEQ ID NO: 615563 - DNA, 83 bp, Homo sapiens
cttggactgagtcctgcaggacacaggtacatcaggaacgtctctatcaagaatacaatttcagcaaggctgagggccatctg

SEQ ID NO: 615564 - DNA, 110 bp, Homo sapiens
taatccccaaagtcacagaaataatacctaaatatggcagtataaatggagcaacaaggctgactataagaggggaaggccataggaaaaggatacagagtagagtttca

SEQ ID NO: 615565 - DNA, 51 bp, Homo sapiens
gaaaagttaagcatgaagtcttgggcaacagattatgagcttacagaaagc

SEQ ID NO: 615566 - DNA, 100 bp, Homo sapiens
acacggctttggaaacgacgtcatgtgttagacagaatgttgctgcgggatgtaaaagctcttaccctccactatgaccgctataccacctcccgcaggc

SEQ ID NO: 615567 - DNA, 74 bp, Homo sapiens
ggacgcgcaggagaagctggagctcacggagaagaaggcctccgacagtccggcagcgtcttctcttgagggag

SEQ ID NO: 615568 - DNA, 90 bp, Homo sapiens
cccaagaaacatctcaccaatttcaaatccggagacccaaacatggcaaacctggaagaaagcttcccccgaggaggtacaagaaagatc

SEQ ID NO: 615569 - DNA, 125 bp, Homo sapiens
attcaactcctgaaaagacagaacagttttatagaaagcttttaaacaagcatggaattaaaaccgtttctcagaaatacccgcagcccaaagggcagaagaagaagaagatcgtcaagtacggc

SEQ ID NO: 615570 - DNA, 102 bp, Homo sapiens
tggaccgagctcttggatgttcttggacttgacgatatgtcttgtcgttcaagacttgcaacactaaacgagaaattgacagcccttgaacggagaatagag

SEQ ID NO: 615571 - DNA, 102 bp, Homo sapiens
gggcgacccagcccccgcccgcagcctggacgacatcgacctgtccgccctgcggatcttgattccacccaaaggtttattttcaaagctcaagaaagaggc

SEQ ID NO: 615572 - DNA, 90 bp, Homo sapiens
cgaaaccatgcctcactgtcctaggcaagacgcaggaggagggagacgcactgatgacatcgggccgctcctgcagctcgggcgcctcgc

SEQ ID NO: 615573 - DNA, 100 bp, Homo sapiens
tggcggagctggagctggagctctcggagggatgctgaaaacgccattcaacagatgggtggccagtggcttggtggaagacaaatcagaactaactggg

SEQ ID NO: 615574 - DNA, 109 bp, Homo sapiens
tcagctccgactgggtcaggttgcggagactccaggccgcttccagggcgggcagcaggatgggtgtggaagcagtgatggcacttttggaggggaccccagatacccc

SEQ ID NO: 615575 - DNA, 100 bp, Homo sapiens
ttgctgctgtctgttttcgtgattcagcaagtttcatctcaagaaagtgaaattcgttattctacatggaagaaagctgtgatgaagtcaatgggttggg

SEQ ID NO: 615576 - DNA, 50 bp, Homo sapiens
ttgggcattgctgaatatgaaaagatccccaagtaagcccttggcacgga

SEQ ID NO: 615577 - DNA, 100 bp, Homo sapiens
tgtgccatccccagaggtgcccccaaacagttatacctgaaggggaatgctgcccggtctgctccgctactgtttaattggttggggtcagataagaaga

SEQ ID NO: 615578 - DNA, 97 bp, Homo sapiens
tcagctgccgcggtcgctccgagcggcgggccgcagagaggagaattctgcctaagccaactcgaaaaagccgtacaaaaaataagcaaaagcgtcc

SEQ ID NO: 615579 - DNA, 98 bp, Homo sapiens
ttgccacgtggatgtgaagatttcctctaaaaggctgtgggtgagcgtggaggatgctcagatgcacaccgtcaccatctggctcacagtgcgccctg

SEQ ID NO: 615580 - DNA, 97 bp, Homo sapiens
ccgcgctgagggcgcccagctgatatttggatttgacctgcattttggaatttatctacacttaaaatgccaccagcagttggaggtccagttggat

SEQ ID NO: 615581 - DNA, 83 bp, Homo sapiens
ccctttgttggagttttgcccacgcgttgtaattaagcctcgcacaatatggtcttgccccagaagctgcgggcacatccacg

SEQ ID NO: 615582 - DNA, 110 bp, Homo sapiens
tttacatacaggaaaaactttccagccattgggccatgttctgcaacgatttaaaggaaaagtatgagaaaaggatcattattaaaggggttgatgctgagaccatgcac

SEQ ID NO: 615583 - DNA, 100 bp, Homo sapiens
atactattcttcagaaccaaacaaccttcgtgaggagtttacaaggccatggcccaaaaggaagatatggaagagagaatcactactcttgaaaaacgct

SEQ ID NO: 615584 - DNA, 78 bp, Homo sapiens
gatgaaaggaatgggtctgggaccttaacagggagccatggtccaagtgtgcctgccatcaactaactatccaggcta

SEQ ID NO: 615585 - DNA, 95 bp, Homo sapiens
atcagccagtgtggaaaaccagtggtaaatgtcagctacaggccagcttatgaccagacaatgcagatcttcgtgaagactctgactggtaagac

SEQ ID NO: 615586 - DNA, 83 bp, Homo sapiens
aaaaggaaggagaaaagatccggaagaaatatccggacagggtccccacactggctctgagaccccgactgcccgacggctct

SEQ ID NO: 615587 - DNA, 82 bp, Homo sapiens
tcgttttgcctccggttggggctgctgtttctcttcgccgacgttccaagatgagatgggattctccaacatggaagatgat

SEQ ID NO: 615588 - DNA, 100 bp, Homo sapiens
ctcagatggtagtggataggcctgtgacgaaggtgctaccatcgtgagagtaagtcctggagcttgaaaatctgccgcagaatggccgccagtgttacag

SEQ ID NO: 615589 - DNA, 111 bp, Homo sapiens
catttttcctgttttaacaacggctgtgctagacgaagtggtgaagcccaaatttctcgaatgctggcagccaaaaccgttttggctatccgttatgatgcttttggtgag

SEQ ID NO: 615590 - DNA, 75 bp, Homo sapiens
gcaactgaaagtcacgattaggactgacaataagatgccttcaattaagttgcagagttctgatggagagatatt

SEQ ID NO: 615591 - DNA, 82 bp, Homo sapiens
atttaagaaagaagatgttaactttcagataacgaaggaggcccaacttcattcaataaggagcctgacggatttatcccag

SEQ ID NO: 615592 - DNA, 100 bp, Homo sapiens
tgcagtccatagaagagcgtgagaaactgtgggtaattccagaattgattggccataccattgtcactgtattactgctcatgtcattgcactggttcat

SEQ ID NO: 615593 - DNA, 82 bp, Homo sapiens
atagacattcccaagaatggcaagttaaacatacagtcgcctctgacaagccaggctgagtcatcactagagagtgggaagg

SEQ ID NO: 615594 - DNA, 76 bp, Homo sapiens
ccctgagccctgggacctctgaagtgaacactgcagggccatttgatggaatggggcgagtccttgctcaagatgt

SEQ ID NO: 615595 - DNA, 105 bp, Homo sapiens
gggatcgtgaccgagaccgtgaccgagagcgtgaccgagagcgcgaatatcgtcatcgttagaagattgatgaagaccctagccttgttccagaggcaattcaag

SEQ ID NO: 615596 - DNA, 71 bp, Homo sapiens
ctgtgaccagaacggcacggccatctgtgtgtctgggcagtgcaaggtataaaggaccattgttagaagag

SEQ ID NO: 615597 - DNA, 122 bp, Homo sapiens
agtgcctcaggtgcccggccctgtgactgcagccatggccacaggcttagctgttaacgggaaagttgttttgacagggcaatggaagaatggagacagttccattgtgaccttaatgacct

SEQ ID NO: 615598 - DNA, 75 bp, Homo sapiens
ctacaatgagtcaccggatgatggagaggtcaatgagatggtgggcagtggtggtgctggctgcgttcccctccc

SEQ ID NO: 615599 - DNA, 80 bp, Homo sapiens
tcgtgaaacttgtccgtgccaaatttcctgaacacaccattatgttctcctgtgcctcctgttggctctctttgcatctg

SEQ ID NO: 615600 - DNA, 100 bp, Homo sapiens
catctgaagttcatcgccaggactgtgatggtacaggaagggaacgtggaaagcgcatacaggaccctaaacagaaaaggtgtgagcggtactgggccca

SEQ ID NO: 615601 - DNA, 75 bp, Homo sapiens
accggacccagtccctgagccgcccctacacccacagggacttcaaaatgagcgtccctgactacatgcagtgtg

SEQ ID NO: 615602 - DNA, 50 bp, Homo sapiens
actgataaaacccaccagtctaggtcttggtggatgtcagtgcttactcc

SEQ ID NO: 615603 - DNA, 51 bp, Homo sapiens
ggtgtccagctgcccaaaggcgacaggttggactccatgaaagaattgcac

SEQ ID NO: 615604 - DNA, 100 bp, Homo sapiens
ggggacttctgcattcaggttggcagtacctggggtcctgggccacaggaaaagttaaaggaagagtcattgaaatactcttcagttggacagtctggtt

SEQ ID NO: 615605 - DNA, 90 bp, Homo sapiens
ggggtccccaccttcttccgggtgcgcgtcccgggacgactggcgctgtgcgcgctccatgcacgagttttccgccaaggacatcgacgg

SEQ ID NO: 615606 - DNA, 50 bp, Homo sapiens
ggccaagttactggagccgatatgatgataattccgaagaaggcttccac

SEQ ID NO: 615607 - DNA, 100 bp, Homo sapiens
gggacatgtgcaccttctcccatagggaaactgagacccagcaagggtaaaggacttagtaccacacagctcctgctccagcccagcccccagagagcag

SEQ ID NO: 615608 - DNA, 74 bp, Homo sapiens
ccagtactaccaaggacagcttttttcctgcaagggaggtggggaagacagggctccagctaccacaggacggg

SEQ ID NO: 615609 - DNA, 74 bp, Homo sapiens
ccggtgcagcagccttcagcttttggcagcatgaaagttagcaatgacttcaaacctgcttctattgacacttc

SEQ ID NO: 615610 - DNA, 83 bp, Homo sapiens
agatgatcagacaaggcaaagcgaaattggtcattctcgctaacaactgcccagctttgaggatctgccactgtgaaggagat

SEQ ID NO: 615611 - DNA, 74 bp, Homo sapiens
ccaggagtcatgagcgacagcggcgagcagaactacggcgagcgggtgaggaagaggatggagatgaagatgag

SEQ ID NO: 615612 - DNA, 80 bp, Homo sapiens
gagtatgcctacagcgacaacagcctggaccccggccctggccaacgtcaacattgggagcctcatctgcaatgtagggg

SEQ ID NO: 615613 - DNA, 98 bp, Homo sapiens
acccaggaagccgcgggcaaactcagactcgaaggttccaatgattttggttggcaataaatgtgacctggaagatgagcgagtagttggcaaagagc

SEQ ID NO: 615614 - DNA, 115 bp, Homo sapiens
ctccgccggctaccatgtccgcccaggcgcagatgcgggccctgctggaccagctcatgggcacggctcgggacgatgttctcagtgcagctgagtcttggtgagcagacatggg

SEQ ID NO: 615615 - DNA, 100 bp, Homo sapiens
gttcccactgccattggggtcagcatagctatagacaagatatctgctgctgtcctcaacatggaggaatctgttcaaaatcaaaggaagcccagaaggg

SEQ ID NO: 615616 - DNA, 100 bp, Homo sapiens
ccggtagcactcgggccggcggacagtgagggcgcgatttggaagtcaaaccagaaacttcaggctctactacgatggcaagcactttgttggggagaaa

SEQ ID NO: 615617 - DNA, 100 bp, Homo sapiens
tgcataaaggcagctttgaaacagtgtgatccctcacatccacaaatctctgattggaaagaagggacagcagaaaactgcttagagggatgctttaacc

SEQ ID NO: 615618 - DNA, 95 bp, Homo sapiens
tggcaagggcgagtgaagcagtgtcacgcattttagaagaatgggtgctacagaatattttagaaacagaaaatgaatattctaaagaacttcag

SEQ ID NO: 615619 - DNA, 74 bp, Homo sapiens
tgccttcctgtgtgggaaaaccctggagatgaatttcccgagggtgtcgaatctttcggaagtctatgaagtcc

SEQ ID NO: 615620 - DNA, 97 bp, Homo sapiens
cctccaggccaagagggatccttcacccgtgtctggcacgggcgagagcgggaagagcacgttcatcaagcagatgcgcatcatccacggcgccggc

SEQ ID NO: 615621 - DNA, 83 bp, Homo sapiens
cagtacaaagaagactcttgtcacactaattgccaacaacaatgcccaagaagatgaaaggattgttcttgttgacaacaaat

SEQ ID NO: 615622 - DNA, 82 bp, Homo sapiens
catcctgaacgtctctccctgtcctagctctgtaactgtttacagaatgggtaccacagaccatgtcatcgtcctggcgtcc

SEQ ID NO: 615623 - DNA, 101 bp, Homo sapiens
cccgcccggccgcgggagcctcgtggctgcgtcaccgccgcccccccagacaagatggacaccgcggaggaaggtgatgcagaagatggggaagaatatga

SEQ ID NO: 615624 - DNA, 100 bp, Homo sapiens
ctcacccatcgacggcgagtgcgtctgcaaggaaggcctcctgaattgcaagatgccacctgctgagaaggcttccaggatcagagctgctgagaaggtt

SEQ ID NO: 615625 - DNA, 75 bp, Homo sapiens
aagaaagggaagctattgctgggattttgaggaggtgccttagctggaccaattattgtggagccacatgtcaca

SEQ ID NO: 615626 - DNA, 82 bp, Homo sapiens
gtttcttccactcagcctgtgggagtctctatgctgcagtttcaaatctgaacatcaatgatgtactagggaactactcatt

SEQ ID NO: 615627 - DNA, 98 bp, Homo sapiens
ggacccagaccctggagcctcagttggaagcagccgatccagcctgcggagcctgtggggcagattggttgtgatcgtagccaaaaccttgtggacat

SEQ ID NO: 615628 - DNA, 75 bp, Homo sapiens
gtcaggaggtgctcaaaacgcccgtgcggaccacggcctgtcagcacgtctctattaccaggttttaaacttcgc

SEQ ID NO: 615629 - DNA, 134 bp, Homo sapiens
tatgagtgaccgggttcagtttgtgatcacagcacaggaatgggatcccagctttgaggaggcgttggagaccagggccagccctggccacaccccaggctgtgtcaccttcgtcctgaatgaccacagcatgg

SEQ ID NO: 615630 - DNA, 100 bp, Homo sapiens
cgcggggaccgctgtgctctcgctggctctgaagcaccgacaaggcaagaatcacaagatgcgcatcattgcctttgtgggaagcccagtggaggacaat

SEQ ID NO: 615631 - DNA, 83 bp, Homo sapiens
cccagatatagccgttggtacaaagggggatatgagactttctactcggaatatcctgagtgttgcgtggatgtaaaacccat

SEQ ID NO: 615632 - DNA, 130 bp, Homo sapiens
ctttgtaactcccactcctggaactgtggtagatcatacaataacaagctgtgagtggaaaaccagtagattcccagacatcgcgaagtgaatctgaaattgtgccaaaagttgctaaaatgactgtatc

SEQ ID NO: 615633 - DNA, 75 bp, Homo sapiens
ccggggcgcgcggtgcttggctgcggtgctcacactcatgaggagccggaagtctgaaccggacggcttttctca

SEQ ID NO: 615634 - DNA, 50 bp, Homo sapiens
tctaatggatgggaacatgggggtttggaaatcccttgtctccaggttgc

SEQ ID NO: 615635 - DNA, 75 bp, Homo sapiens
ggttactcgcacgcggatttggctggcgtcccgcgtgattagccagtcaagagctaggtttaatcccagtatcag

SEQ ID NO: 615636 - DNA, 51 bp, Homo sapiens
gagaactacaaaaacctggtcttcttgggctggagcacagtggcgtgatct

SEQ ID NO: 615637 - DNA, 100 bp, Homo sapiens
agttgtaccgagaagaaactgcaaaaatgaaggaacacaaagccatttgtaaagctgcagggaaagaggatgatcataaacttagccttgatgaacttca

SEQ ID NO: 615638 - DNA, 88 bp, Homo sapiens
atgaggacacctgaggttcagattaagaaatctgccccaaagtcttagaactggaagaagactatgaatggggaagtagttccatact

SEQ ID NO: 615639 - DNA, 75 bp, Homo sapiens
gaagttgttctaacgctgcctttgctttaaaacagtattacttgcggaaaatgtttataggaggccttagctggg

SEQ ID NO: 615640 - DNA, 82 bp, Homo sapiens
tccaacacagccccatctcctccgacttcgctgtcaaaatccgtgagctgactgcttttggcttctggatgccctcctccag

SEQ ID NO: 615641 - DNA, 96 bp, Homo sapiens
aaacctgtgataacctgtctcaaaaccctcctcatcatctactccttcgtcttctggggttctccaaaaaatgtggaatcctttgcatctatgctg

SEQ ID NO: 615642 - DNA, 100 bp, Homo sapiens
cgtgagggatacagcagtttggtcaatattgtcttaacatgcttcaaataaatcagctttaccgatttgttacaactcaagcaagggccagcagaaattc

SEQ ID NO: 615643 - DNA, 96 bp, Homo sapiens
tggtctgtcagtctttatggctcccatcttgaagcacgctccctgaaatttggcaggcagactggaggtgaagagggagatggagcttctgggtat

SEQ ID NO: 615644 - DNA, 75 bp, Homo sapiens
ggagaccctgaccaggaagcgggtctctgccagttccccaatctaatactagtaatgagatgaagctaccgtcac

SEQ ID NO: 615645 - DNA, 95 bp, Homo sapiens
attcagagaccaaacagcttcctcttccgttcctcctctcagagtggctcaggcccttctgcagaaaaatgtagagtgtgcccgtgtgtatgccg

SEQ ID NO: 615646 - DNA, 100 bp, Homo sapiens
cacgaaatggattggagtgaaccggagaccccgaaaacggaagcgcagggagaaggaagaggtgtttgaaaaggaaaatgttggggcttttcaggaagca

SEQ ID NO: 615647 - DNA, 100 bp, Homo sapiens
tcgtcggaccctttggggctcagtggagagactaaggtgtcagtatgttcttcaagctgctctgctcctgggcccaagctattctcctgcctcagccttc

SEQ ID NO: 615648 - DNA, 80 bp, Homo sapiens
aacgctttgataccaagaattaaaaatgcttgtctacaaacatcttcccttgcgcattccaagaatcaagcactacaaag

SEQ ID NO: 615649 - DNA, 98 bp, Homo sapiens
tgttcaggtcacaatttctacagcagagaccttgagggatatctttcttcactcctcttcacttcttcagggatatcattttcaatgcccaataccca

SEQ ID NO: 615650 - DNA, 100 bp, Homo sapiens
ggaaaagcaccaggcaaaccaccatcacatctcattttgcaaagggtaccgctccatcaaccaccgggtggatgccagctcgatgtggctttaccgacgg

SEQ ID NO: 615651 - DNA, 124 bp, Homo sapiens
ggcggaagaccgcgcgcagggcctgcagcgggagctggacggcgagcgcgagcggcgcgagaaagtactccaaagattcaggtttactcacgtcatccagcagagaatggaaagtcaaatttcc

SEQ ID NO: 615652 - DNA, 83 bp, Homo sapiens
tggagcgcggaaatctggaaccgggatggcgacgtctacactgagtcggaggcgaagccctgggcgctgcctatggcacagcc

SEQ ID NO: 615653 - DNA, 75 bp, Homo sapiens
cctcccaaaggatttgatacgactgccataaacaaaagctattacaatgtgtgatgaatcaccaacaccagcagc

SEQ ID NO: 615654 - DNA, 102 bp, Homo sapiens
gaccactctccagcaccagcttccagttagtggatatagcacaccatccccagccagctgaaggtgatgtggccgccctcaaccgacgcatccagctcgttg

SEQ ID NO: 615655 - DNA, 82 bp, Homo sapiens
caaaatagacatgccgcccttcttcccctccgaaaatcctgaggaggatgaaggggctggccctggaggccgagagtgagct

SEQ ID NO: 615656 - DNA, 85 bp, Homo sapiens
gaggagaacgtcccgctggatctgacccgaggtatgccattgcattggccttaagggaaaagcagcgtgtaatatttaccagccc

SEQ ID NO: 615657 - DNA, 100 bp, Homo sapiens
taataaatcaagtcctatttgtgaatggaaaggactggaagttcaccttaaaaggtgggaaagaacatggtgttccaatcctcatctctgagatccatcc

SEQ ID NO: 615658 - DNA, 75 bp, Homo sapiens
accttgtccacacagagttcctgtacaaggttcctgacctgtgaaagaagagattttatcgacatcgaaagtaaa

SEQ ID NO: 615659 - DNA, 100 bp, Homo sapiens
gagggtatctggatcaacccgacaactgtccagagagagtgtcgggtcggcagcggttctggtcggaacctgtgggtcagcgggctgtcctccacaacac

SEQ ID NO: 615660 - DNA, 76 bp, Homo sapiens
cgtctcttacgtctgcggaagtgcagctgcctcagttcttagcgcagcatccctacccaacagaggatgagaaaaa

SEQ ID NO: 615661 - DNA, 97 bp, Homo sapiens
aactaaatgggagaagaggaatgttccctgacaatttcgttaaggctgccctgaggatctgtgtttggtgaaaaggagccaaattcacctgcagggc

SEQ ID NO: 615662 - DNA, 98 bp, Homo sapiens
agcttcaagcttaggaccacccaccatgcctatccagtgtactaatggtcacttgatgtgcgctggctgttttatccacctactagcagatgcccggc

SEQ ID NO: 615663 - DNA, 75 bp, Homo sapiens
ttaagaagcctatggatttttccacaattagagagaaactaagtagtggacaaatgatcaagtctcggcctctgg

SEQ ID NO: 615664 - DNA, 83 bp, Homo sapiens
agaggcgcaaacaagccaatcccaggaggaaaaacggtgagaagccctaccactgcaactgggacggctgcggctggaagttt

SEQ ID NO: 615665 - DNA, 101 bp, Homo sapiens
cccgcatcaagaaggagtgcgagcgggagatccgcaggctgcttcgccgacacgaggtgaccatctgcaattacgaagcatctgccaacccagcagaccat

SEQ ID NO: 615666 - DNA, 59 bp, Homo sapiens
ggaaacctgggggctccctggacaactccgagcagcagcctcccgcgacgatgcccctc

SEQ ID NO: 615667 - DNA, 100 bp, Homo sapiens
aggagctggatcacctcctgctgctggcgctgatgaccgtgctcttcactatgtgttctctgcccgtaattgttaccaaagtgacccaggtagatggaaa

SEQ ID NO: 615668 - DNA, 75 bp, Homo sapiens
gaggagacgcgggccttcgagcagctcatgaccgacctcaccctgtcgcgggttggatccatgccgtctacaccc

SEQ ID NO: 615669 - DNA, 82 bp, Homo sapiens
ctgaaaagatctcaaaatctggacttgaaaagtgggttgtatcccctgcagaaaaagctaaatatgatgaaatcttcctgaa

SEQ ID NO: 615670 - DNA, 100 bp, Homo sapiens
caaagagagaactcttctcaaagaggaccctgcttactggaccgtataatagacgctggccccaaaggaaactactctcgatttatgaatcacagctgcc

SEQ ID NO: 615671 - DNA, 75 bp, Homo sapiens
aaggtcgccgaacccgcctggctagccggcgagttgagtggcgaatgccatggacaatattaccaggcagaacca

SEQ ID NO: 615672 - DNA, 75 bp, Homo sapiens
ccggagcggtccgcgagccaccgaggcccaggccaggtcagagcagcccaccatgggatggggagggggtggagg

SEQ ID NO: 615673 - DNA, 101 bp, Homo sapiens
aagcaatgcttgtcatctctttataagaagaatattcagaggctaacaaagtcctcctccgcctcctcctctctgcatgcgcgtcagagcccgtgccaaga

SEQ ID NO: 615674 - DNA, 99 bp, Homo sapiens
aaagcagcatttctgtggaagacgcaagaaataccggaacatgaacattttgcagtactgcccctcttccgacatgtggacgctctttgaaacatgtga

SEQ ID NO: 615675 - DNA, 88 bp, Homo sapiens
tgaatgaagggatgaaggaggactgctagcgtctaaggttatgatgtgattgctcaagcccaatctgggactgggaaaacggccacat

SEQ ID NO: 615676 - DNA, 101 bp, Homo sapiens
aacagagtctccaggaggtctgtggccagggccaggcgatttatgggaaagaggcagacattttcctggcggtcttgcgagtggctggttccctgcagaag

SEQ ID NO: 615677 - DNA, 90 bp, Homo sapiens
cagcaactccagcctgtccggctcgtcggtgtcctccgatgaggtggaaagtgagaaatggtacctgtctacagacttcccttcaacatc

SEQ ID NO: 615678 - DNA, 83 bp, Homo sapiens
caaggatgcccgtgagcctgttgtcggggccaggcaccatgactcctgtgaggatgcagcactccctggcaggtcagacctat

SEQ ID NO: 615679 - DNA, 90 bp, Homo sapiens
tagtcacagaaaagggccatacatttgccgaagagcttcagaaagaagagctaaagatggctgaatttctagatgaccaggaaactcgac

SEQ ID NO: 615680 - DNA, 90 bp, Homo sapiens
gtgaacacgtggaagatgaaggagaatccaggacagaactgtaccgctctctttttggccagctccaccctcccgacgaaggccacgggg

SEQ ID NO: 615681 - DNA, 100 bp, Homo sapiens
tctcaagatcttccttatgttcacatcatttaccaggatgttttagaagaatgtatgtctcttcccaagctatcttcttattctggatgggtggtagagc

SEQ ID NO: 615682 - DNA, 100 bp, Homo sapiens
gggagaatatttaatggaaaatcgcttggttaaaacctgacacttttaacagaaatgcactcggtgatggaaagagagccactattctgaagaacacttg

SEQ ID NO: 615683 - DNA, 75 bp, Homo sapiens
tttaggaagctgtcctggctcagatggctcggtcatcacgggggcttctgaggagaatggcctgcctcacacgtc

SEQ ID NO: 615684 - DNA, 90 bp, Homo sapiens
ctcaatatctgtcttcggtggactccttcggcagtccacccaccgccgccgcctcccaggtatgccattttgaagactgagacgttggag

SEQ ID NO: 615685 - DNA, 51 bp, Homo sapiens
tgcaccttctccatcaggtgcagaagaaccactcacgaattcttgtttggt

SEQ ID NO: 615686 - DNA, 101 bp, Homo sapiens
tattcttgtgcttaccgatgatcaagatgtggagctggcttttacaaagttgatcacagtaaatggacaagaatatcatcttcaacttgtagacacagccg

SEQ ID NO: 615687 - DNA, 90 bp, Homo sapiens
aactggaggctgagtacgacagcctcaaacaggagctggagcagctcaaagaggataaaagaatcagagtgtctcaacccttgacaagag

SEQ ID NO: 615688 - DNA, 82 bp, Homo sapiens
gtcggcgtcggcccctgcgccggcctcggccaccgagatcctgctgacgccggctaggggcgtgatggtgggcatgggtcag

SEQ ID NO: 615689 - DNA, 100 bp, Homo sapiens
tgccactctgactggaagagtggggaatactggattgaccccaaccagggctgcgcgcgggactcgttcagggttttttgcaacttcacggcgggaggag

SEQ ID NO: 615690 - DNA, 76 bp, Homo sapiens
ggcgcttcgggagccgcggcttatggtgccgacttcctggtgacggaggtggaaaatggtggctccttgggcagca

SEQ ID NO: 615691 - DNA, 82 bp, Homo sapiens
cgcccctgttgcgatggcgcagaaaccccgttgacaaggcactgctttttcatgacggcataatcaccagcaacacccggga

SEQ ID NO: 615692 - DNA, 101 bp, Homo sapiens
acccctgccccctcagccggcccagcctcatctgccccaggcccaactcatgttgacgggcagccagctagctgggaggatgacggccgaggcgcaccggc

SEQ ID NO: 615693 - DNA, 99 bp, Homo sapiens
cacctcctcgccagcagccgtccggagccagccaacgagcggacaggctgcgggaggagctgcaggactgaggtacagaggccaggggcccagggcagg

SEQ ID NO: 615694 - DNA, 51 bp, Homo sapiens
gtccgccagagctgcggccgccaaggatctcctcttcagcgtgtgtgccct

SEQ ID NO: 615695 - DNA, 100 bp, Homo sapiens
ggaggtcgctgtagccctgttccaggtctatcaagcagcccttctgggtcacccttgcatggagaaatatggggagttgatgagcatcagaaaaaccagg

SEQ ID NO: 615696 - DNA, 123 bp, Homo sapiens
cgtccgcggagatctctctcatctcgctcggctgcgggaaatcgggctgaagcgactgagtccgcgatggagaaatgcactcggtgatggaaagagagccactattctgaagaacacttggcc

SEQ ID NO: 615697 - DNA, 100 bp, Homo sapiens
agaaaatcataccatatcagatgcctcgcagagcaccaggcccaccgtgaaagacaagcagatgcccagtgtcgggaaggcagcccaggatcacagcagc

SEQ ID NO: 615698 - DNA, 50 bp, Homo sapiens
gtgccacgtgtggtctgtaagtaggatcaaaaccattcaagtgcaagata

SEQ ID NO: 615699 - DNA, 80 bp, Homo sapiens
tattcaacaggagcaccaacggtggccaagaagtcactacctcccgcgacgatgcccctcaacgttagcttcaccaacag

SEQ ID NO: 615700 - DNA, 82 bp, Homo sapiens
cccagtggatactccatgtgacatggtttctccctatgttacgtggatgtttgtaacgtaaatgaattggtggatgccagag

SEQ ID NO: 615701 - DNA, 98 bp, Homo sapiens
aacctcttctgccgtctcagcctgggcgtcgctgaagctgtgtctgcggggaggcagcggaaggcggcagacctaatctgggagcctgcaagtgacaa

SEQ ID NO: 615702 - DNA, 83 bp, Homo sapiens
caaccttggaacagaacaagaggacaggaggtgtcgttccagtgtaaacaggaacatcgataagtagtgtaaaaacttgcaca

SEQ ID NO: 615703 - DNA, 100 bp, Homo sapiens
ccaagagcccagcaccacggcacggaaggtggggcggcctgggaggaagcgcaagcaccccccgtacagtgctgtggataccaatccactttctctgtat

SEQ ID NO: 615704 - DNA, 100 bp, Homo sapiens
ttcagatgtgccggagcagagggatagcaagtgcaaggtcaaatggacccatgaggagaactgataaatttcaaacggaagagagtggcagcatttagaa

SEQ ID NO: 615705 - DNA, 98 bp, Homo sapiens
ggacggagaggacctgttcaccagcactgtctccaccctagagctctttcaccatgcctggatcacttcctttgaatgcagaagcttgctggccaaaa

SEQ ID NO: 615706 - DNA, 50 bp, Homo sapiens
ctgagcgctcagactcagaccaaggagatcatgcacgccctgaagatgac

SEQ ID NO: 615707 - DNA, 75 bp, Homo sapiens
ccggagcccccagcgcagcggccgcgatgatatcatcaagttgaatcgaaaggaagggaagaagcagaattttcc

SEQ ID NO: 615708 - DNA, 73 bp, Homo sapiens
cgacgtcgtgatccagaagtccagagctgaggactgcctgtttgcagactatgttaggtcttaatggtgggag

SEQ ID NO: 615709 - DNA, 75 bp, Homo sapiens
agacagaggctgcagaatctggagtttgctctgaatctcctcagacagctctcaaaggtctatggccctgtgttc

SEQ ID NO: 615710 - DNA, 50 bp, Homo sapiens
aacattcccaacctatccctaaagtggaggccatagtggagtttgactac

SEQ ID NO: 615711 - DNA, 98 bp, Homo sapiens
ttctcaaatataggcattctgatgggaacttgtgtgttaaagtaacagatgatttagttgccctccacgcccttcaggaggagcaggccagactcaag

SEQ ID NO: 615712 - DNA, 74 bp, Homo sapiens
tggacactggctccaaggaaaaaggcaaccacgagacagacaacatgaaccagatctacggtttcgagggtgag

SEQ ID NO: 615713 - DNA, 100 bp, Homo sapiens
acaaaacagctgctttcttaatagcgctgtacagctggatgaaaaagaaagtcggcgtctgttccaacagatcctttctggtgtggattattgtcacagg

SEQ ID NO: 615714 - DNA, 82 bp, Homo sapiens
ctggagctgggtcagtccgccgctcaccccgcggccgcaccttcccgccttctcaggaacccaagacagaccaggatgagga

SEQ ID NO: 615715 - DNA, 51 bp, Homo sapiens
acggtttcgccggcagtctcggagttcgtctgcacttccacaatctggtga

SEQ ID NO: 615716 - DNA, 96 bp, Homo sapiens
cctggaaatgggagagctcagaattcaggtactggtgtggcatactcggacagagaagcccaagatgaagcaggaggagcagctgcagcggcaggg

SEQ ID NO: 615717 - DNA, 71 bp, Homo sapiens
tggaactgtggtccatggtaaagttttacaggcggtctatgcttgcttggtgcttatgctgacagtgatga

SEQ ID NO: 615718 - DNA, 100 bp, Homo sapiens
ctgcacttcgcattttggcattgacatttaattttagggtcctttatatagaagggagagtaggaccgtgaatagtctcccacaatacgcagagccttcc

SEQ ID NO: 615719 - DNA, 82 bp, Homo sapiens
attgctctcgccatggctctcagcgatgctgacgtgcaaaagcaggtgaaatgacaatggatgctctgttggctcgattgaa

SEQ ID NO: 615720 - DNA, 80 bp, Homo sapiens
ccagggcatcgtggatgcctacggcgtgggccgctaccaggaggtcaaccccgcaccactgccggaactgtggccacatc

SEQ ID NO: 615721 - DNA, 149 bp, Homo sapiens
gccctattcccagaggcaggtggtgctgaccctgtaacccaaaggaggaaacagctggctaagctcatcattgttactgttttaacttctagtcatggcgaatgatcgcaggagagcacagactggaccctgctacgatctctcttgga

SEQ ID NO: 615722 - DNA, 100 bp, Homo sapiens
ggccaagatccgcaaggccgcccgggaactgctgacgcttgatgagaaggacccacggcgtctgttcgaaggtggcagaatcgtgtcctcgaaacccttt

SEQ ID NO: 615723 - DNA, 100 bp, Homo sapiens
cttcgaataactgaaacctggaaagcttacaacagtgactttgaggaatcaggtgggagagttcagagcacacgctgctgagtggacagccaacgtcaca

SEQ ID NO: 615724 - DNA, 83 bp, Homo sapiens
agcggccatgagctggtgtgcagccgcccaggagggatgtccagaaggcttcttgggggaatattgtcaacatcgagacccct

SEQ ID NO: 615725 - DNA, 98 bp, Homo sapiens
gcaccagcaacagtggcaatgagaccagtggaagcagcaccatcggggagacaagcaagggacaactgtgggaaggctgggaaggttaagaaacaaca

SEQ ID NO: 615726 - DNA, 83 bp, Homo sapiens
cccagaccctgctccgggtcgcgtcctgggtgtccctacctgcaccggacgacgggggacacagaacgcaagtaccacctgcg

SEQ ID NO: 615727 - DNA, 100 bp, Homo sapiens
gcttcttgtgggaaccaaacaaggacatcttcttctctataggattcggaaggacgttgatgtccagaaggcttcttgggggaatattgtcaacatcgag

SEQ ID NO: 615728 - DNA, 80 bp, Homo sapiens
cgggatgctgtactccttgtctttgcaaacaaacaggaaacccttttccaaagagaaatgaagaagaaaactgtatgtac

SEQ ID NO: 615729 - DNA, 90 bp, Homo sapiens
gcctgaggagcgggcacagggcaaggcggcggacggctgcgtcgcccgaggcgaggaggagcgctggcgatctacggaatccagaggcag

SEQ ID NO: 615730 - DNA, 75 bp, Homo sapiens
gatactgctccaacatctccttgtccttccatatcttcccaggttaatgacccagagactgcagtaaaggaatta

SEQ ID NO: 615731 - DNA, 100 bp, Homo sapiens
gagaacctcagcgctgttgcaagggatcacagagaccatattctacggggctttcagcaaatcaaagccagttcctattatccttgccgtaaataaatgt

SEQ ID NO: 615732 - DNA, 80 bp, Homo sapiens
acccgaggccaggagccaggggcccagaagcagaatggaagtgaggaaaggcaaccagctgacacaggagccagagtgag

SEQ ID NO: 615733 - DNA, 100 bp, Homo sapiens
ctgtacagagatgaaaacttggtgactatactggggaccagcctcttaatcggatgtatcttgtattcatgaggtcctgctgtactagccaccaaagcag

SEQ ID NO: 615734 - DNA, 82 bp, Homo sapiens
cccatcacccacatctcacaggcacggccgagcagatgaggactgtgtggacgaccgggccagacaccgggaggaacggctg

SEQ ID NO: 615735 - DNA, 80 bp, Homo sapiens
attccaagtaactcttatttggttgatgataattagaagcatgctttccactgaacttcccgacaacatttgttatgcag

SEQ ID NO: 615736 - DNA, 100 bp, Homo sapiens
ccgggtggtcccattcatatcagatgtcatccatactgtagggccaatagccaggggccatattaatggttcccacaaggaagaccttgcaaattgctat

SEQ ID NO: 615737 - DNA, 75 bp, Homo sapiens
cctgtgctcacgccgggttctttacctccgagccaggccgccgcaaagcaggaattacatgaatgacagtcttcg

SEQ ID NO: 615738 - DNA, 100 bp, Homo sapiens
agaaagtggaaggaatccaatggaaacttgaggtccagaggtgtccttctaaagctggtagaggtttcacgagtcatcagggacccagaacccttctctt

SEQ ID NO: 615739 - DNA, 98 bp, Homo sapiens
ccgcgggagcctcgtggctgcgtcaccgccgcccccccagacaagatggacaccgcggaggaaggacctgcagagaaacgcctcctgattttgtctta

SEQ ID NO: 615740 - DNA, 74 bp, Homo sapiens
gcgaatcaagcgggagttcaaggaggtgctgaagagcgaggagagctggaatcttgctccattgcccaggctgg

SEQ ID NO: 615741 - DNA, 83 bp, Homo sapiens
gctgcttttgatgtctgacaacgtggatcgttgttttgaaactgcagagcagagcgggcggaggaccccgggcgcgggcgcgg

SEQ ID NO: 615742 - DNA, 101 bp, Homo sapiens
cgggcctcaaaatggccacacgcgtacccccgtagcggaaaaactaatctatgccagcaattatgacaatgttagcagaccatgcagctcgtcagctgctt

SEQ ID NO: 615743 - DNA, 100 bp, Homo sapiens
tttaacggagatcctgatgaagttcgagcactaatatttaagaaagaagatgttaactttcagcactgccagtgaaagatgtagaagataaacctgaaca

SEQ ID NO: 615744 - DNA, 100 bp, Homo sapiens
cggaaactgccccttctcgggggtcatgatgggcagcaagatggcgtctgctagtagggtcgttcaggaagagcaagcagtcagaccaaaatacctactg

SEQ ID NO: 615745 - DNA, 100 bp, Homo sapiens
cgcttccagacggcgcgtttctatcgggacgtcctggggatgaaggcaaccatcggcttgatcaggaatctggccctgtgcccagccaaccatgccccgc

SEQ ID NO: 615746 - DNA, 96 bp, Homo sapiens
ggaggctgagtcctggccgcgggccggggccggggcgccgctggcaggagcgcttggggatcctccaagagttatcattaccatgttggtgacctg

SEQ ID NO: 615747 - DNA, 75 bp, Homo sapiens
tcgactcagacgtggataaagataatcccggaagttggagctgccacctgtgtctggacctgttgaaagagaaag

SEQ ID NO: 615748 - DNA, 90 bp, Homo sapiens
cctcagcctcctgaatagctgggattacaggcccattggaactacttcagtttgatcacgggcagtcaaatccaacttactacatcaggc

SEQ ID NO: 615749 - DNA, 100 bp, Homo sapiens
tccgtggtgcagttcaagatcaagaggcacacgccgctgagcaagctgatgaaggcctactgcgagaggcaggcattgatcaatatgacagagatagcat

SEQ ID NO: 615750 - DNA, 100 bp, Homo sapiens
gtcgtggaatcgggaggtcatctggctcgtcctgcgctgagcatttgaacacagggctgtcaagggagaggtactaggttttgacaagcttgcatcatgc

SEQ ID NO: 615751 - DNA, 100 bp, Homo sapiens
ggatcctgctgggatttttgagctggtggaagtggttggaaatggcacctatggacaagtctataagtaatctatgccagcaattatgacaatgttagca

SEQ ID NO: 615752 - DNA, 98 bp, Homo sapiens
taccttaccagtggataatagtctactgtccaattctgtttactctgaattaccatcagctgaagggaaaatgaagaaatctcctgcaaagaagctga

SEQ ID NO: 615753 - DNA, 75 bp, Homo sapiens
aggcctagtttgactctgacagtcctcccactaaggagctgtgtcagagcacactgaccgaaatggaaagccaga

SEQ ID NO: 615754 - DNA, 75 bp, Homo sapiens
tactgtacaaaaatttaaagaaatggtctatagtctctttaaggtggcaggttttaagaagcaaatggcagatac

SEQ ID NO: 615755 - DNA, 100 bp, Homo sapiens
gtcaagtcgtgttctgatcactactgacttgttgaatctcacaaactatgatctctgcagcatttttcttggaacctctacgctcttggtttgggttgga

SEQ ID NO: 615756 - DNA, 82 bp, Homo sapiens
agaaatcctgaagttccctcacattagccagtgtgaagacctccgaaggaccatagtactatactggcaattgctggagaag

SEQ ID NO: 615757 - DNA, 48 bp, Homo sapiens
ctacggaatccaaagaatgcaggaattgaatgatctggcacgggaccc

SEQ ID NO: 615758 - DNA, 98 bp, Homo sapiens
cgccccccggagctgccaacattgccaacgccaccgccacgctacacacaggtagctacagcaagctgggtagcaggcagatccaaaggatatcatga

SEQ ID NO: 615759 - DNA, 100 bp, Homo sapiens
cgacagaccgtttgtgtgcaatgccccgggctgtggacagtgttacctggaatgtcagagagctgaaagcagtcatattttgggatcatgcacctactgc

SEQ ID NO: 615760 - DNA, 83 bp, Homo sapiens
ctcggagaccccgcgccgacggctgctcaaacatcaggggtgctttcttctgcgacctggtactcatctacctcatcaaaaag

SEQ ID NO: 615761 - DNA, 100 bp, Homo sapiens
ttaaaaatatggcccatcataagctacaaacccttgcaactaacctcttggcttctgaggcatctgacaagattctcagcgctgattttgagatgatggg

SEQ ID NO: 615762 - DNA, 98 bp, Homo sapiens
ccaggcgctgaagggcaccatcgacccgaagttgcggattgcagccgagaacgagctcaaccagttgactggtctgagtgtctccaatggaaaggacc

SEQ ID NO: 615763 - DNA, 100 bp, Homo sapiens
ctccgccaagaggcgccgcaggagatccaggatgagaagactgataaaagaagaagctagctgaacagctgtaaaatgcccaaatctgggttcacaaaac

SEQ ID NO: 615764 - DNA, 100 bp, Homo sapiens
aagaacagtaaagttggaacacagcagagggtgtgtaataaaatacagatgttatacatccaggctctaccagggcctttcctttctatggatccatccg

SEQ ID NO: 615765 - DNA, 98 bp, Homo sapiens
ctttctcctcattgaagctatgcagtatttctttggcatcactgcagctagtaatttgccttctggatttttacgtttaataagaaggagacctgtaa

SEQ ID NO: 615766 - DNA, 89 bp, Homo sapiens
ccggtggatcctgtccttcatgcagtctctcattggcttctttgagactgaaatggcagatggcagtcttgggcacgtccatctgtaaa

SEQ ID NO: 615767 - DNA, 75 bp, Homo sapiens
agcagttcttgctttgtataaaacacttcaccagtatacgggaagcatcagaagagctaacaattgctggaatga

SEQ ID NO: 615768 - DNA, 51 bp, Homo sapiens
aagatggcgactgtcgaaccggcacattcaggaccccgcgagccagcggct

SEQ ID NO: 615769 - DNA, 80 bp, Homo sapiens
atgatgtgcgatgtgcggaagggcacctccacccgaaatacactttcgggaaatggcctctaaatcctggctgaattttt

SEQ ID NO: 615770 - DNA, 100 bp, Homo sapiens
cttcccactggcgaagagaagctacaaaatatgctcgatggatagcattcactggaagtgctggagaatctggtaaaagcaccattgtgaagcagatgag

SEQ ID NO: 615771 - DNA, 80 bp, Homo sapiens
ctgcaattctggatttcctgccaggtgcctaacttactgagaatcatgcctgctgtgatgagcccttggaaaccatcagg

SEQ ID NO: 615772 - DNA, 74 bp, Homo sapiens
cccccaggagcagaagtccttcttcgccaaatacatttcagatactctgactccacctttacttttacctacgt

SEQ ID NO: 615773 - DNA, 100 bp, Homo sapiens
aaaacacaagaaaactgcacataactccgaagattagtgatgatgaaccaggttatgaccttgatttattttgcatacctaatcattatgctgaggattt

SEQ ID NO: 615774 - DNA, 83 bp, Homo sapiens
cttccccacgcaaccccagatccatttacactttacagatattagaaatggctactccccagtcaattttcatctttgcaatc

SEQ ID NO: 615775 - DNA, 100 bp, Homo sapiens
ggaagcagcgtgagcagccggaggatcgcggagtcccaatgaaacgggcagccatggccctccacagcccgcagcacctgtggaatcctctcaagaggaa

SEQ ID NO: 615776 - DNA, 100 bp, Homo sapiens
ccgggagccatggagcgcggccctggggcccgggggcgcgggccggggtggatgggagctacagtttttgtccagcccctggacctggtgaagaaccgga

SEQ ID NO: 615777 - DNA, 75 bp, Homo sapiens
ctcgtcgacatgagtgatgtggaggaaaacaacttcgagggcagaggaaaagatgccgttccaccatgtgaccgc

SEQ ID NO: 615778 - DNA, 95 bp, Homo sapiens
aggaactatcgcatttttgagaagacatgcaagaaagcacttcagccaagcagaagggagccagctggacgaggtgcgccaggccatgggcatgc

SEQ ID NO: 615779 - DNA, 81 bp, Homo sapiens
caagaagtccgagacacgcggtgaggcggcgacgggctccggacaatgcagatcttcgtgaagactctgactggtaagacc

SEQ ID NO: 615780 - DNA, 106 bp, Homo sapiens
ctccactgttcctggaggaatccgagaagagcagagcggagggagccccagacacggtgagaagccctaccactgcaactgggacggctgcggctggaagtttgcg

SEQ ID NO: 615781 - DNA, 90 bp, Homo sapiens
cctggggatggcgcatcacacaccaaaggtcccactctatgaccagtgggaggatgtgatgaaagggatgaaggtggaggtgctcaacag

SEQ ID NO: 615782 - DNA, 100 bp, Homo sapiens
cctgcggaaagatcgtgtcgcacacgcacctcggagttccaagccttatgcatttgatcgggtgttccagtcaagcacatctcaagagcaagtgtataat

SEQ ID NO: 615783 - DNA, 75 bp, Homo sapiens
tactttgtcggttacctaggagagagaacgcagagattggctctaccagtgcacctggacagggaggaatcctgg

SEQ ID NO: 615784 - DNA, 51 bp, Homo sapiens
cccagccctagtgtagctgatgaggccttcaccacggagaagcaacagtcc

SEQ ID NO: 615785 - DNA, 83 bp, Homo sapiens
cggacggtggcgggcgagcggctcctctgccagaggaaataatgcaaaaggtgtcccaaggctcctgaccagtgaacaaagat

SEQ ID NO: 615786 - DNA, 90 bp, Homo sapiens
tgctcttgttggaagaatactaccagagtgcctggaagagctgggatgtctggttgagtcctatggcatgaatgtttgccaaccaacccc

SEQ ID NO: 615787 - DNA, 100 bp, Homo sapiens
gaggatgatgctgactttgatgaaggtttgttggcatccaaagctgttggggttgatggtgctgaaaaaaaggaagactacaatgaaacagctccaatgc

SEQ ID NO: 615788 - DNA, 95 bp, Homo sapiens
gtgaaaaatacaccgatcctttcaaactcggttggagagacttgaaaggtctgtatgaggacattagaaagccttcacttaacttaagggacctt

SEQ ID NO: 615789 - DNA, 100 bp, Homo sapiens
ctggccccgctacagcaaaccaggctttatcctgtggataaacgcagagtgaacgagtttggggagtcctacgaggagaaggccacgcgggcgccccaca

SEQ ID NO: 615790 - DNA, 97 bp, Homo sapiens
atccagtggaatgcaccacagccatctcacatttccaagtacattctcaggtggagacctctacatctggtaccttggctggcattatgggaatgag

SEQ ID NO: 615791 - DNA, 101 bp, Homo sapiens
tgtctgtgaagccatggaatacctggagtcaaagcagttccttcaccgagacctgagtgagtatattgctccatgtgactgtcggcgggcttttgtctctg

SEQ ID NO: 615792 - DNA, 102 bp, Homo sapiens
cctggagcctcagttggaagcagccgatccagcctgcggagcctgtggggcaggaggccactgtctgcagctcccgtgaagatgtccactccagacccaccc

SEQ ID NO: 615793 - DNA, 99 bp, Homo sapiens
ataaaatagaacttccaactactgactctaaaatagagctcaagcttgagaagagagaaccactaaagggcagagcaaagactccagtaacactcaagc

SEQ ID NO: 615794 - DNA, 85 bp, Homo sapiens
actgctggggtggtggttccaatgagacagggcacaccaaactccatctggaatactcccccagttgcaagaggcgcaggaccgt

SEQ ID NO: 615795 - DNA, 50 bp, Homo sapiens
agagcattcagctgtctcaaatgcaggagtctccccaggacagtgctatc

SEQ ID NO: 615796 - DNA, 96 bp, Homo sapiens
gtcgtcctctacaatgaggagcgctacgggaacatcaccttgcccatgtctcacgcggggaggagatatcaccaaacatgatggaacaggcggaca

SEQ ID NO: 615797 - DNA, 83 bp, Homo sapiens
cgccctgttccccgcgctgcggcctggcggcttccaggcgcactaccgcgagcggttctggtgaggttggaaggatgcagcca

SEQ ID NO: 615798 - DNA, 100 bp, Homo sapiens
aaagatttggtttgccaggttgggctgtagcatctagtgcagaatacagaaactgcagccatgaccacgcacgtcaccctggaagatgccctgtccaacg

SEQ ID NO: 615799 - DNA, 100 bp, Homo sapiens
ggggtcataagctgctatgtcacctacctcaccttctcagctctgtccagcaaacctgcagaagtaggtgcttttcagtgggaagaattggaagaagata

SEQ ID NO: 615800 - DNA, 100 bp, Homo sapiens
cgaagatccggactctgggtgttttgctaccgtgaccgtttaggtctatgttaacaatgaatgggcaaccagtgttggggaaggagggagctttggagaa

SEQ ID NO: 615801 - DNA, 97 bp, Homo sapiens
ccgaattctgctggaggcagcgccatatcctggaggtgaaggtgagaagccctaccactgcaactgggacggctgcggctggaagtttgcgcgctca

SEQ ID NO: 615802 - DNA, 87 bp, Homo sapiens
cctccccaggacagtcatcagaggctctcaggctggatggacttttttcattcagacggccgctctggcttaaagatatgtacaaac

SEQ ID NO: 615803 - DNA, 83 bp, Homo sapiens
acagcctgttctctctggaacgggagaagaaactgttaggctagatcgaaagctgctttgcgtcgcagttggagcagcacccc

SEQ ID NO: 615804 - DNA, 75 bp, Homo sapiens
tgaaaatcaacgacaacttgagcacaggtgtgtgtctggggaagagacttacagaagtggagttgctgagtcaaa

SEQ ID NO: 615805 - DNA, 95 bp, Homo sapiens
gtcgtgagctggcaggacacacagaatacttcagagagtcagagttgtgccagaagtctcttaatggcagatagaatgcaaatagttgtgattct

SEQ ID NO: 615806 - DNA, 75 bp, Homo sapiens
ttgacccttatttatccagaagattgatcatcatatgggttgggatcatggaagctgataaagatgacacacaac

SEQ ID NO: 615807 - DNA, 100 bp, Homo sapiens
ccggacaaggagttccagaatgtcatgacctacctcaccagcatccccaggtaattggtacgcctcagagaccggcagcgtcaaacaccctggtggtagg

SEQ ID NO: 615808 - DNA, 115 bp, Homo sapiens
tgaagaaccaggttgcaagatttaatgacctcaggtttgtcggtcgaagtggaagagggtacaagttgaattctatatgaatgaaaatacatttaaagaaagactaaaattattt

SEQ ID NO: 615809 - DNA, 75 bp, Homo sapiens
gaccggtgtctggcggatgcggtcgtgaagatagccacaatggtgcgcatgaatgtcctggcagatgctctcaag

SEQ ID NO: 615810 - DNA, 75 bp, Homo sapiens
gagaaattgctgaagaactcgcaagctcctacgaaagaaagctcatcgagggcttttttccagacttcaagctcc

SEQ ID NO: 615811 - DNA, 100 bp, Homo sapiens
tgggaaacatggcgaccgagggaatgatccttactaaccacgaccatcaaatccgtgtcggagtccttacagatgcgtctgttactagagtggagagtct

SEQ ID NO: 615812 - DNA, 100 bp, Homo sapiens
tggccttctcagattttctttcctgtgcacagcatggtcccctggtttatggacttagttgtatgttgcagtaccctgagctgatggtggcttcttacaa

SEQ ID NO: 615813 - DNA, 100 bp, Homo sapiens
ctcgggaagtgaggagagcccccattggaccagtgtttgcttagggtctaaaattcccaggactccacagctttgcaccagataagcctggaggaatact

SEQ ID NO: 615814 - DNA, 50 bp, Homo sapiens
gcagaggatgtgttagactcagagagtcagtggatcggtggggaaaatgc

SEQ ID NO: 615815 - DNA, 98 bp, Homo sapiens
aatattactactgggttattaatcctgctgacagtagtggcattacacctaaaggattaggcacgtgtggttctcaaatataggcattctgatgggaa

SEQ ID NO: 615816 - DNA, 90 bp, Homo sapiens
ttccgcttctaccgcgtgctcacctgtatcagctggcccctgtcggtgtttgtaaaatgtatgaagaacatctgaaaagaatgaatccca

SEQ ID NO: 615817 - DNA, 98 bp, Homo sapiens
gaagagcgaccaggccctgaactgcggtgggactgcctcgactggcagcgcgggaaacgtcaaactcgaggtctacttccccagcaggacagcatcat

SEQ ID NO: 615818 - DNA, 99 bp, Homo sapiens
gagaaaaactggatgttggtagaaaaagcaagagtttgttatatagcagtgtcctggggaagtgtcgctacgtttactatgggaaaaactcagagggca

SEQ ID NO: 615819 - DNA, 100 bp, Homo sapiens
ctctgccaccttctccagcattgtgaaaggcctgctacctgtgccacagcttgctgatgctggccggggtagttgttagctgccaggacatcactccaga

SEQ ID NO: 615820 - DNA, 90 bp, Homo sapiens
tttggtcatcggaagtggtgccttcagcacaggtgatcgaggagttctacaaccagacatgggtccaccgctatggggagagcatcctgc

SEQ ID NO: 615821 - DNA, 74 bp, Homo sapiens
acccaacctagtgggtgtaatacatcatgaactgcagggctattgagggcacctacattgacaagaaatgcccc

SEQ ID NO: 615822 - DNA, 75 bp, Homo sapiens
gaaaaggacgcaaagttctccggcgaggtactttgaactcaagtaaacaaaagggaagattttctcgttgatact

SEQ ID NO: 615823 - DNA, 97 bp, Homo sapiens
caccaacagcagcaactgcaggggctgaccggttccctgatgtgttacctgcttctgctactgatccaaactgcagaacttctcattcatccccaag

SEQ ID NO: 615824 - DNA, 73 bp, Homo sapiens
aagctggaggagaaacaagcgcgaaaggcccagcgtgagacagacgccagctacccccaccaccaacaccagc

SEQ ID NO: 615825 - DNA, 100 bp, Homo sapiens
tgcttcccgtccgtgtcgcggccctgcggttggcggcctcctcgtggagcggagcaagggtgaaaggaaagcaagccaggatggatatttacgacactca

SEQ ID NO: 615826 - DNA, 90 bp, Homo sapiens
ggctcccactgattctacattatgttgtatcacggactgattcaccgagcccaaccgtactcaactcacatatttctaccccaaatgtga

SEQ ID NO: 615827 - DNA, 83 bp, Homo sapiens
tgaaatcttccaagtccaaggatgtcttcttggacacttaatgattgttggcaagaaatgtgctgctgatctgggcctgaata

SEQ ID NO: 615828 - DNA, 100 bp, Homo sapiens
ctttgtagcagacactgcaaatgaagctctcgaggctgctaagagactaaactttgccttcaaaagaaacagcatttttaaacactacacaaatgccttg

SEQ ID NO: 615829 - DNA, 83 bp, Homo sapiens
cgggaccggctgtatgattaggccacaatcttcaatgagtaaacatattcctgtaactaggatttctacctcaaccgcgagac

SEQ ID NO: 615830 - DNA, 73 bp, Homo sapiens
accgcctgggaactccgccatgtcatccacttcgcccaacctccaggcaatcttgctgccaatgatctctccc

SEQ ID NO: 615831 - DNA, 100 bp, Homo sapiens
ggtcatcccgtccagtctctgatcgaaggggagtttccacagtgattgatgctgcctcagatcaggatcctcatgaccagccaaagagaagaagaattag

SEQ ID NO: 615832 - DNA, 100 bp, Homo sapiens
tttaatccttacattacctgctatatctgtaaagggtatctgatcaagccaacaacagtgacggaatgcctccatacatcctcaagacgttcagaagaca

SEQ ID NO: 615833 - DNA, 75 bp, Homo sapiens
cgcctttgccgatccgccgcccgtccacacccgccgccaggttttttattggcacctcagtctcaacattttctt

SEQ ID NO: 615834 - DNA, 83 bp, Homo sapiens
cccaggagaaattcgccctcaaacacttgcacctcctgcgccgccgccccccatccaaggatatgccttcaagcctccaccta

SEQ ID NO: 615835 - DNA, 100 bp, Homo sapiens
gtcactctgtccctggaccgatttgaaaaccaggtggatatgaaagtcccttcaaggtcaaggtccttcccacatatgatgccagcaaagtgactgccag

SEQ ID NO: 615836 - DNA, 83 bp, Homo sapiens
ccggaaccagacgatgagacagagttgcgaccgcgcggcagtgcctccggagccagcgtggtggccatagacaacaagatcga

SEQ ID NO: 615837 - DNA, 98 bp, Homo sapiens
agcggctcggcggtgagatcgtcagcgctgactccatgcagtctgcatgaagaaatcagtgatttttatgaatacatgtctccaagacctgaggagga

SEQ ID NO: 615838 - DNA, 82 bp, Homo sapiens
ccggcaaaccgtgaaaactggattgtgaatctgcaaaatggctgataatttggatgaatttattgaagagcaaaaagccaga

SEQ ID NO: 615839 - DNA, 83 bp, Homo sapiens
cagaccctggagcctcagttggaagcagccgatccagcctgcggagcctgtggggcagatcatcagaaaagcccttactgagg

SEQ ID NO: 615840 - DNA, 100 bp, Homo sapiens
gacggtggagctccataagctaaaggcaagtatatcgcgtcaacacagcgacctgacgggacctggcgcaagcagcggagggtgaaagaaggatatgtgc

SEQ ID NO: 615841 - DNA, 98 bp, Homo sapiens
gcattggccgccgcgatgtcagctcagtgctgtgcgggccagactcgctctttactgagcgtgtttgaagaagatgctggcaccctcacagactatac

SEQ ID NO: 615842 - DNA, 100 bp, Homo sapiens
tcctctccttccagctcaacctcaagaccaacaccgtcatcaactggttccacaactacagggcagcagagaagaaagtggtgaaaattacatctgaaat

SEQ ID NO: 615843 - DNA, 100 bp, Homo sapiens
gagcgagaaagccgttgcctccagcaccacttctaatgaaataagcgggttttgaaaacaaaaaaaagaaggagtggaagagggggccaggatccaggcc

SEQ ID NO: 615844 - DNA, 82 bp, Homo sapiens
actggctcggagactcctgcctgctgagtgtgctggaattgatgttcgtctgtgtgatgttggtgaggccatccaagaagtt

SEQ ID NO: 615845 - DNA, 98 bp, Homo sapiens
aagaaattgagaaagaatgtgaagataccagtttgcgtcaggagacacaggctatgtccaaactgggtcttcggcaggttacaggagttactagagtc

SEQ ID NO: 615846 - DNA, 75 bp, Homo sapiens
ttcgaggacggccgcccatcgccacgttctctgccaatccggaggcaaaagacttcccaagaaggacaacccgag

SEQ ID NO: 615847 - DNA, 100 bp, Homo sapiens
tccagagcctgttctcattggcaagaaactaatctggattcactccctctggttgatacccactcaaaaaggacacttctgattaagacggttgaaacta

SEQ ID NO: 615848 - DNA, 90 bp, Homo sapiens
cgcagtggtcgcttcttctccttgatggttccttcatcagcttcaggccaagttcgaagtcactatgtagactggagaatgtggcgcgat

SEQ ID NO: 615849 - DNA, 100 bp, Homo sapiens
gctgctggtgctgtgcgcgaggctcctcactgcagcgaaggaagcagctgacacaggatgatgatactgatgcggttgagattgctatcgacaacacggc

SEQ ID NO: 615850 - DNA, 82 bp, Homo sapiens
ttcaagcacgcggacatcgtcaccaccactactcacaagactcttcgaggggccaggtcacgcatgaagggagcaccgtgga

SEQ ID NO: 615851 - DNA, 75 bp, Homo sapiens
ctacaaccatccatcatctttatagatgaaatagttgaggagctcaagcttgggaaaatggtgtgcattccttgt

SEQ ID NO: 615852 - DNA, 100 bp, Homo sapiens
ccacaaccatgcggacatcggcttctgcctggtgctctgcgtcctcatcgggcttatgttcgagggactggtgattgcagctggaagtgcccatgaccga

SEQ ID NO: 615853 - DNA, 83 bp, Homo sapiens
gtcaagtacactgaaattcatcctgagatgagcggacaaggagttgtgaaactggacgttcagccaaagtgcgtagccgtcgg

SEQ ID NO: 615854 - DNA, 98 bp, Homo sapiens
gtgttggaccttccggagcttctcagaagacagagggttttcttttgagctctaccgtctgtgttggagcctgcgcaacagcaaagaggagcgtattg

SEQ ID NO: 615855 - DNA, 75 bp, Homo sapiens
gatcacatctcactgcagccttgtcctcctaggctcaggtatcctgtggtctgaggccatcttcctcgaggcaag

SEQ ID NO: 615856 - DNA, 75 bp, Homo sapiens
aaattccccccgaagaagactcccccacatctggatgtgtatatctcatgattgatatggagaaactagtcatgg

SEQ ID NO: 615857 - DNA, 100 bp, Homo sapiens
atggattaaattttttgctgatggagagctggaatctatgggattttcagctcgatacaatttcacacctggttttgagagtattttagaagggctttat

SEQ ID NO: 615858 - DNA, 76 bp, Homo sapiens
aggatgtattgtggcttttgtttggattgcagcatgcagaattacagggtgaagcagctgaccgatgaggaggagt

SEQ ID NO: 615859 - DNA, 100 bp, Homo sapiens
cgcccccaatttcccagctgctaaaggaagaggaaggtatcctacctcctggaagggggcagcatggcccatgaagacttctgtggacacactggtaaaa

SEQ ID NO: 615860 - DNA, 76 bp, Homo sapiens
ctcctacattagcgtctacgaccaccaagccatattttctgctcttaagaatcttcaagataagattcgacgcttg

SEQ ID NO: 615861 - DNA, 96 bp, Homo sapiens
gccccgaggaggaggcctgcggcgtgtggctggacgcggcggcgctgaagaggcggaaagtgcagtagactataagcttttggaaaacagggacta

SEQ ID NO: 615862 - DNA, 85 bp, Homo sapiens
tacatgtatggagaatggctggtctcctactcccagatgcatccgtgtcagaaagtcttaatagacatcgatacttgaattcttt

SEQ ID NO: 615863 - DNA, 87 bp, Homo sapiens
gtaccacctgtcgcggcgcgagacctctgacccctctccctcagggccacaggccttggcacctctacctggggatgacgtcaactc

SEQ ID NO: 615864 - DNA, 100 bp, Homo sapiens
caagagagaccccaggacacacacagctgcctcccggtgcgagaagaagaccccggcttgagagtgaggagctgtgaaattagttgtaactgaaaatgtc

SEQ ID NO: 615865 - DNA, 75 bp, Homo sapiens
cagatcatctacgacgagaaccggacaggagactggggagaaccttccattaccttgcgacctccgaatgaagcc

SEQ ID NO: 615866 - DNA, 74 bp, Homo sapiens
gacaaaaggcatggtgatccttcgggacaagattcgcttctatgaggggggatatgagactttctactcggaat

SEQ ID NO: 615867 - DNA, 97 bp, Homo sapiens
tcgttctatttctctagctattgccttattttttctcatggatgttcttcttcgagtatttgtagaaggatacctgggcaaagagggctgggcgcca

SEQ ID NO: 615868 - DNA, 100 bp, Homo sapiens
ggaatgttttgctagctgctaaaaccacctttgtcaccagaatgaatgaagtgcttcagatttaaataccgtgctggtatagaggactctaagaagtggg

SEQ ID NO: 615869 - DNA, 95 bp, Homo sapiens
aaaacagatgagatgcacactgccttaatggaggcctgcatggaaaaaccacctccggtcaataagcaggagaatgcaggcactttgaacatcct

SEQ ID NO: 615870 - DNA, 75 bp, Homo sapiens
aagggaggcaagaaggaagcaggacagtcattttgtttactcattcagccctgttgcaggtcccaataaactctt

SEQ ID NO: 615871 - DNA, 100 bp, Homo sapiens
cggagcgcttgaaggagctgcgggccagagatcctcagcaggagcctatggaagagatagaaaatttgaagaaacaacatgatttattaaaaagaatgtt

SEQ ID NO: 615872 - DNA, 97 bp, Homo sapiens
ctgaggacggcgtacggagtgtggcattaataataagctacagcagccggaggcagcggccggagtgttagaatatgccatgaaacactttggagag

SEQ ID NO: 615873 - DNA, 100 bp, Homo sapiens
cttcatcaaaaatagtgatagctttgataaaatattccctctgtatacttgcatttttttctatcaattgacgcttacaattatttttgcaagttggaaa

SEQ ID NO: 615874 - DNA, 90 bp, Homo sapiens
gaaatatccaactgaggggatctctcacgtcacttcaccgagcaacattaaatatcattcacagtgttgttctctcagttcttgacaaaa

SEQ ID NO: 615875 - DNA, 83 bp, Homo sapiens
agggacacctggttccagctgcagcacgtggacgctgactcggaagtgcaggtcgcaatggaagaagagatcgccgcgctggt

SEQ ID NO: 615876 - DNA, 50 bp, Homo sapiens
tcagctggaggaggccagctctacaggcgcagtgcctgatttgagatggg

SEQ ID NO: 615877 - DNA, 100 bp, Homo sapiens
ctttcttctggcatcattaacggaccttttaccatgaatagttctactccttctacaggtgtgtatgagaaatctgacagaatattttgtggctgtggat

SEQ ID NO: 615878 - DNA, 90 bp, Homo sapiens
gcctcctctgtggagaccctgaggaaaactgtgcagttcacagaagaaaagcttggccaggctgagaagacagaattggatgctcactta

SEQ ID NO: 615879 - DNA, 83 bp, Homo sapiens
cgcaagctgagcgagctgtcagagcccggggacggcgaggccctcatgtaccacacgataacgaaggaggcccaacttcattc

SEQ ID NO: 615880 - DNA, 100 bp, Homo sapiens
gacgaaactacgtgctcaacaatgtcgattctggacatcattttttccaaaagtcttggaaatgacagcacttttccagccattaactccaggctctcga

SEQ ID NO: 615881 - DNA, 100 bp, Homo sapiens
gggaagttcctttttgaagtagttccagatgccttcaattaagttgcagagttctgatggagagatatttgaagttgatgtggaaattgccaaacaatct

SEQ ID NO: 615882 - DNA, 100 bp, Homo sapiens
gggaccgcgcccgcctcatttgcgccttgcagcactgctggaccaggtactccaaagattcaggtttactcacgtcatccagcagagaatggaaagtcaa

SEQ ID NO: 615883 - DNA, 100 bp, Homo sapiens
ggaagttcctttttgaagtagttccagaacttactccagcaaaaggactgtaaacatggattatctgtcgcttctaagggatgcacttgtacagcccttg

SEQ ID NO: 615884 - DNA, 73 bp, Homo sapiens
caagagcaagatcaccgtgacatccgaggtgcctttctccaaaaggggccgctacctggtggcgctgggccac

SEQ ID NO: 615885 - DNA, 103 bp, Homo sapiens
cctggcgtgcactccgcacctcggggacattattgcgcgtggaacggctgcttttggaagactgattcttgctattccaaatcctcttccacgttgacagccc

SEQ ID NO: 615886 - DNA, 100 bp, Homo sapiens
attcaatcttctttaccaattttggatccatacagagcgccagtggggagatgttgaagttcaaatatggagcgcggaatcctttggatgctggtgctgc

SEQ ID NO: 615887 - DNA, 83 bp, Homo sapiens
cccaggtgatgcctgaagctcaagggactgtgtccaccctcagacccctttgctgatgcaagtaagggtgatgacctgcttcc

SEQ ID NO: 615888 - DNA, 100 bp, Homo sapiens
cagtatttgcctcctgtgtcccaaccggcctgagtcaagtggtgcccaggcaacatgggtgactggagcgccttaggcaaactccttgacaaggttcaag

SEQ ID NO: 615889 - DNA, 78 bp, Homo sapiens
agctgagcgggcggtcattcgcatcgcagccattcaaactcctccccacgacactctgaagcagcgacggcacagcgg

SEQ ID NO: 615890 - DNA, 100 bp, Homo sapiens
gcgtgcacatgctcgcccagccacccccaggacgccttctgcaactccgacatcgcactgaacctaccagatgtatttgggttggtcgtcctcccattgg

SEQ ID NO: 615891 - DNA, 74 bp, Homo sapiens
gaggccaggagccaggggcccagaaggtattagaaaactactcggatgctccaatgacaccaaaacagattctg

SEQ ID NO: 615892 - DNA, 75 bp, Homo sapiens
gaaacaaccaccatttcaaattttcacactcagatgagctttgatccaaaccttctccacaacaatggacataat

SEQ ID NO: 615893 - DNA, 100 bp, Homo sapiens
cgccgacgaatgttaatgaaacgattagatgtgactgtacagtcctttggatggtctgatagagcaaaggtaatgtacagaaggattctgcagcaggcgg

SEQ ID NO: 615894 - DNA, 105 bp, Homo sapiens
gccagcgcgctgcaacacaagatcaagaactccatctggcatgaacttcttgaagaagctcggagaaagggattaccttttgcccagtgggatgggccaactgtg

SEQ ID NO: 615895 - DNA, 76 bp, Homo sapiens
attaaagaagcccctgcagcatcttggagataacaacagtgagctgggacggagacaagctccagtgtgtgcagaa

SEQ ID NO: 615896 - DNA, 98 bp, Homo sapiens
aaaaagagaggtgcctttatctgatgatgatgaaagttacacaggtgctggagaatctggtaaaagcaccattgtgaagcagatgaggatcctgcatg

SEQ ID NO: 615897 - DNA, 98 bp, Homo sapiens
tctgggtgtcgcgggccggccccgcggggagcgcccccggcgcgatgcccttcaggaaagagctcagagttctacagagtcaccactgaacaatatca

SEQ ID NO: 615898 - DNA, 75 bp, Homo sapiens
catcgttgctgccttcttcgtcaaggcattgacaaaggatccccaggattaccctgataaaaaaagcctacctca

SEQ ID NO: 615899 - DNA, 99 bp, Homo sapiens
gtgggcgccgagcaaccgccctctcctgcatccaccagcagccaggaatccaagccaccagctgaacaggccaaagccagactacagctggttcttgaa

SEQ ID NO: 615900 - DNA, 83 bp, Homo sapiens
aaacgagccatttctccgtcgattaaagagccatctgtggtgccaattgaaggtgttggggatgtcctttgcactgaccctga

SEQ ID NO: 615901 - DNA, 106 bp, Homo sapiens
gagcttcgccaaggctggcgcagtcggatgtgatggagctgcttgaagaagatctcacatgccctatttgttgtagtctgtttgatgatccacgggttttgccttg

SEQ ID NO: 615902 - DNA, 109 bp, Homo sapiens
cccccgtggtgcagcgaatcctcaagcataacatgaaaaccatgagctgttttccaagagcttcatctccatggaagtgcctgtcatggtagtaaatggcaaggatgat

SEQ ID NO: 615903 - DNA, 75 bp, Homo sapiens
aatatgctggatgagctgctgaagcccaccgaattagagctgatgttcctggagaccagcgctctcacaggcgag

SEQ ID NO: 615904 - DNA, 100 bp, Homo sapiens
tgtatgacgatgtggaacccagagatgactccagccccagccccaagggcagagctttaccactctgatgaattcagagcttatgactggggaaatgacg

SEQ ID NO: 615905 - DNA, 100 bp, Homo sapiens
caagcacgtggtgggctatggccaccttgacgagccaaactcaggctgtaccttgagcagctcaagcaactggtgcccctgggccccgacagcacccgcc

SEQ ID NO: 615906 - DNA, 100 bp, Homo sapiens
aggaggaaaaggactcgactttcacattggaacaaccttctttccagtgctaaaggatctctgatctgggttgatgaaaagcccagaaccttgatgacag

SEQ ID NO: 615907 - DNA, 90 bp, Homo sapiens
gctcagccgcaagtacccgtccatcatagtcaactgcgtggaagagaagcttgacagagccaattcgctattaaaccagactcaacagcc

SEQ ID NO: 615908 - DNA, 75 bp, Homo sapiens
cttcggcagtccacccaccgccgccgcctcccagacagcccacctgaggatattgaccataaggactcatatctc

SEQ ID NO: 615909 - DNA, 100 bp, Homo sapiens
gtttacatatgaccaaaggactcgccctctgggaggcttaccgagagtttgaaagtgcgattgtggaagctgctcggaacctggagctggttgaaaaagg

SEQ ID NO: 615910 - DNA, 75 bp, Homo sapiens
atagcggaacttcatggtcttatgttcttccaggtcaccaaaaaggaggcgatctagatctggttctagatctcg

SEQ ID NO: 615911 - DNA, 98 bp, Homo sapiens
ggaccctgctgaatagctggggctacaggcgtgtgtcactgcgcccaggtatcgagaaccttccctgcgaacttcagaggaacttccagctgatgcga

SEQ ID NO: 615912 - DNA, 75 bp, Homo sapiens
ggaggaagaggaggaggaagaagaaggtgatggtggagacagattactgtctgctgctggctctgccctgtggcc

SEQ ID NO: 615913 - DNA, 71 bp, Homo sapiens
atgttcccagaacattgcacgatgcctcctggtgtggatgaggtcaccattgtcaacattttgaccaaccg

SEQ ID NO: 615914 - DNA, 100 bp, Homo sapiens
cagagtcgccgccggcgtcggcgccgatctgaattctacaaacacattgtgctttctggagggtctactatgtatcctggcctgccatcacggttggaac

SEQ ID NO: 615915 - DNA, 51 bp, Homo sapiens
acggactccgtcgtcagccaaagatgaaggatttgggggcagagcacttgg

SEQ ID NO: 615916 - DNA, 75 bp, Homo sapiens
aataacacctggaataacagccacatagcactggtacctggtggaggaaatgaagaagcgggaagggtttgagct

SEQ ID NO: 615917 - DNA, 100 bp, Homo sapiens
gggcatccttgactccatcgggcgcttctttggcggtgacaggggtgcgcccaagcggggctctggcaagatgccttcaattaagttgcagagttctgat

SEQ ID NO: 615918 - DNA, 75 bp, Homo sapiens
caacgatgttaatggggaggccaaagagacacagcccatttttttagggattgaagaggttaatgaccatttgcc

SEQ ID NO: 615919 - DNA, 75 bp, Homo sapiens
caagtcctcgctggactgctcagggtgccagacctcatcatcatagaagaagatgctgctcttgtagaaatagga

SEQ ID NO: 615920 - DNA, 100 bp, Homo sapiens
agaaaatggaatcctcctctgcgagtgtcatggagaaactccagctgggcccagagattctgcagcgggaaaatccaaggcttatttatgccaggctgag

SEQ ID NO: 615921 - DNA, 100 bp, Homo sapiens
tcgagagccctgtcatcttctaaacagagcagcagcagcagagatgataacatgtttcagactaatagggatgccaaaggaaaaatatgatcctccagat

SEQ ID NO: 615922 - DNA, 90 bp, Homo sapiens
tcatgacagaagggagtttgctaaatttgaaaaggagaaaatgaatgccaaatgggacacgatccatcacaaagcgaagtcatgggagag

SEQ ID NO: 615923 - DNA, 101 bp, Homo sapiens
tggccaagtatgcgcccagcggattctacattgcctccggagggatcgcttacacctgagacgaactacagaacagcacgtaccagaggtggaagtccaag

SEQ ID NO: 615924 - DNA, 100 bp, Homo sapiens
caccacgctgctgcgcctgccccagaaggtgtttgatgcggtggtggaagctgtggcccgcgcatctctgggagcgcatggagcttttggaagaagccaa

SEQ ID NO: 615925 - DNA, 82 bp, Homo sapiens
gggtcccgccctggggccggcgatgtgccaccgaggctgaggatgatggtagattgccagaacatggtccaagacaattcct

SEQ ID NO: 615926 - DNA, 82 bp, Homo sapiens
gcggctcctgttgctcctcgggctctcggccggcggaatactcccccagttgcaagaggcgcaggaccgtggaagacttcaa

SEQ ID NO: 615927 - DNA, 75 bp, Homo sapiens
taataacaagcaattgcacatcaaaatcagttcccgtgaggagaaaacatgtctcaacttagcgaggaagaacag

SEQ ID NO: 615928 - DNA, 78 bp, Homo sapiens
tagagcagctgcatggccaacacgaagcctggcttattcacaagacaacgaagaagcgatgaatgagatgaacgatga

SEQ ID NO: 615929 - DNA, 59 bp, Homo sapiens
ctgccacttttgctagagagcaaggctttgaggttggaaaagagactgttcaaaccact

SEQ ID NO: 615930 - DNA, 90 bp, Homo sapiens
gatgtgcgatgtgcggaagggcacctccacccgaggaccattcttagtggcactggggaaatcttggcacccagaagaattcaactgcgc

SEQ ID NO: 615931 - DNA, 100 bp, Homo sapiens
taattgttctagtctccaggcccagtacatggatgcttgttggatgaattaatgaaccttgacccacaccaagggtctccctctgttgtccaaggctgga

SEQ ID NO: 615932 - DNA, 100 bp, Homo sapiens
ttcaattaagtgcagttcaagctgctagcacgaagaactggaacacaccaattatatttgatctcaaagaaggaactgttagtttgattctgcaggcaga

SEQ ID NO: 615933 - DNA, 52 bp, Homo sapiens
aattcggcggcttatgggaaaaccacggagaggaaggaacagagccacagag

SEQ ID NO: 615934 - DNA, 100 bp, Homo sapiens
tcctccacctaccttcccgagccgcaccagcttctatgaggagtacggtgtcattcgcgacgtcctccagaaccatctgacggaggtcctcaccctcgtg

SEQ ID NO: 615935 - DNA, 75 bp, Homo sapiens
aacttcttcaatgactggcgaaagtttaagtgctgtggggctgctaactacacagattgggagaaaatcccttcc

SEQ ID NO: 615936 - DNA, 75 bp, Homo sapiens
gcgggcagaggtgatgtctgggagcccttccttgacagcccgggccgagaaggctgaccccgcactacatctacc

SEQ ID NO: 615937 - DNA, 75 bp, Homo sapiens
ttgggccctggcctgcggccaggcgaggaccccaagggcccctttggccgacaatgcagatcttcgtgaagactc

SEQ ID NO: 615938 - DNA, 100 bp, Homo sapiens
gctcagcaagctgcgccgcgccgcagtcggtcgtccgctggacaagcacgagggcgcgctcgagacgctcctgaggtgtgactgaagaaatatcaaatgt

SEQ ID NO: 615939 - DNA, 75 bp, Homo sapiens
cggacatcactttagaccctccacctaattgcaggcctctaattgtggcattgtagaaagtatcctgaactgggt

SEQ ID NO: 615940 - DNA, 100 bp, Homo sapiens
ggatgaagatgactgtggatttcgaggagtgtctgaaggactcgccccgcttcaggatgtttcgtctgaactcactttctgctttggcagaactggctgt

SEQ ID NO: 615941 - DNA, 100 bp, Homo sapiens
agaagatattcacagacatgcggaatttgaggaagttgaagaccatgtggcgtttctaataacagttccaactgccctggcgattttctttgcgatattt

SEQ ID NO: 615942 - DNA, 83 bp, Homo sapiens
tggatgtcgagaacggtgcttctatggcaggatatggctatggaaagggcaaatggaatggagctggatggtagaagaattcg

SEQ ID NO: 615943 - DNA, 74 bp, Homo sapiens
aatgttggagccgtctgcaaagtgtccccggcaagaaggatgccggaccagatctctgtctcggagttcatcgc

SEQ ID NO: 615944 - DNA, 87 bp, Homo sapiens
gctccttaccagctcacctctcaccgcgcatgtttggagtcttcaggagacatatgaagcaaaaaggaatgaattcctgggagaact

SEQ ID NO: 615945 - DNA, 88 bp, Homo sapiens
tcatgacagtggtcatggccgtgtgctccctgcctctcacgagccgtcctggggaggtgtgctctgctctcaacctctgcgagtctct

SEQ ID NO: 615946 - DNA, 101 bp, Homo sapiens
ccgcctgtctgctcgtggccagcggcgccgccgaagactcggtgaaatacctggagtgctcagctctcacccagagaggcctgaaaaccgtgttcgacgag

SEQ ID NO: 615947 - DNA, 50 bp, Homo sapiens
tctcccttcatgtctgggtcatggtaaaaatgtctccatcgtatcatcag

SEQ ID NO: 615948 - DNA, 100 bp, Homo sapiens
ggctgcaggggtcagtgatggagctgcttcagtttacttctacaatttcggatggaaggattatggtgtagcgtctcttactactatcctagatatggtg

SEQ ID NO: 615949 - DNA, 73 bp, Homo sapiens
tcagagtgtgggggttgtgaaagttggtccagcatttgccacatctttatatgtgccttcaataccccagtac

SEQ ID NO: 615950 - DNA, 75 bp, Homo sapiens
agacttgtaacctggagaagagctgttaaacgtttaatgaaagaagcggcagaattgaaagatccaacagatcat

SEQ ID NO: 615951 - DNA, 99 bp, Homo sapiens
cccgcttgcgtcagggacctgcccgactcagtggaaatgactgttgaaaacagaattgctgaaactcacagcaagagctgtgttccagttagctttgct

SEQ ID NO: 615952 - DNA, 95 bp, Homo sapiens
gatttcaggtttgagtatcttagctctagcacaattacttggactagtttatatgaaatttgtggcttagcagtgtctgcaaaaacgaatctttt

SEQ ID NO: 615953 - DNA, 74 bp, Homo sapiens
ggccagtcatttagccgggcgaaagtatcatatcagggcactccacagaaggatgttattatcaagtcagatgc

SEQ ID NO: 615954 - DNA, 50 bp, Homo sapiens
ccgaaacgctctgaaaatcgagccggtgacaaaacacgacagccttcttc

SEQ ID NO: 615955 - DNA, 87 bp, Homo sapiens
ctgcagccacgcgggcgagcggctgtgtggatgtcggcgaagccgcgggcgaggaggccactgtctgcagctcccgtgaagatgtcc

SEQ ID NO: 615956 - DNA, 75 bp, Homo sapiens
gccaattcggtggaacgaggacgcggactgcgaaggcagctccagaacctgggtatcaacccagcaaacattggc

SEQ ID NO: 615957 - DNA, 90 bp, Homo sapiens
tgggcaaggccgagatgctgtgctccacactgaaattggtgtacatgggttttgatgcactcgtggccgaagctgcgctgagagtgttca

SEQ ID NO: 615958 - DNA, 104 bp, Homo sapiens
ggtttggtaccgagcggagaggagatgcacacggcactcgagtgtgagctcaaactggaggattataaggatcgcctgaaaagtggagagcatcttaatccaga

SEQ ID NO: 615959 - DNA, 98 bp, Homo sapiens
gcattactacaggactcagagaagaagaggagtcattcttctccatcacagattcctaaaaagattctcaggtcttttagataaccctgaacttcgtg

SEQ ID NO: 615960 - DNA, 83 bp, Homo sapiens
cagctcctcaggacatttatgcggctgaccccgcactacatctacccaccagccatcgtgcagcccagcgtggtgatcccagc

SEQ ID NO: 615961 - DNA, 74 bp, Homo sapiens
ccagatcgggatttacgtggagatcaagcgcagcgatgagctgccatcagtcatgctcttaaacggggactgcc

SEQ ID NO: 615962 - DNA, 82 bp, Homo sapiens
cggagcttatactcctcccagtgacgggtctggagtgcgtgggggaccggctgttggcgggctgtctgtccccagaccccag

SEQ ID NO: 615963 - DNA, 100 bp, Homo sapiens
ggcggatggccccaggtgtaagcgcagaaagcaggcgaacccgcggcgcaataacggaaacctcgacctgtctcccagttggttgcacagcaggttactc

SEQ ID NO: 615964 - DNA, 100 bp, Homo sapiens
ggagcacgattggatttgccgaagattaggaagaatccactgatagaaatcatttccatcaataccggtaatctatgccagcaattatgacaatgttagc

SEQ ID NO: 615965 - DNA, 94 bp, Homo sapiens
attagttaagaagagtagcacattattaattgcttcagctagttaaaggccttcagcaagagctgaatcgattgtattcccttttctgttctcg

SEQ ID NO: 615966 - DNA, 100 bp, Homo sapiens
tgtgttggagcgatatacatcagtagtaaccttggtgaaacctcatttagtaaagcataatgcagtgaagatgggtgaagagagatgtgtttcatctgaa

SEQ ID NO: 615967 - DNA, 74 bp, Homo sapiens
actcccccaggactcctttgaaggcgtggacgaggacgagtggctgaactttgacctggaccggggcgtgtttc

SEQ ID NO: 615968 - DNA, 82 bp, Homo sapiens
cggcgagtttccgatttaaagctgagctgcgaggaaaatggcggcgggaggttaatttggagtggcccctggagtcagtttc

SEQ ID NO: 615969 - DNA, 83 bp, Homo sapiens
aatgccagaaacatgcccctataaattcagcccagcacctggacaatgttgaccaaacaggtttccaatacttatctacagga

SEQ ID NO: 615970 - DNA, 75 bp, Homo sapiens
gtggccgtgttcgtggtcaccttcgacccccgctcgggcgatatgagtctcatccagtctgtgctgatctgcagg

SEQ ID NO: 615971 - DNA, 80 bp, Homo sapiens
cggctttggcggcgtgtgcctggtgttcgtcggtcaccctctggacacggtcaagactaaagcagcttatgtgctatttt

SEQ ID NO: 615972 - DNA, 50 bp, Homo sapiens
tggcaatcaggttctcttttgagggtcttacagacgtcattttataccac

SEQ ID NO: 615973 - DNA, 50 bp, Homo sapiens
aagaatgaagccgtggaccctcacgtctacaggtgtatccagcagctcca

SEQ ID NO: 615974 - DNA, 102 bp, Homo sapiens
gggaaaggttgaggcaactaacttgatttatgaagactctatggatctaatcgcaaagctaccttgtgttgcagcaaagatctaccgaaatctctacagaga

SEQ ID NO: 615975 - DNA, 100 bp, Homo sapiens
gaatacctgaaacagaagctgcaagatgaagcttatcaggttcttgctcaagtaccaactctatggacccaggacaggtttgtcccatgacctgctgtga

SEQ ID NO: 615976 - DNA, 75 bp, Homo sapiens
ctgcgggccgctccgacggcggtccatcctgctggagatatccctgttcagtactgcgcccagcccaccaatggc

SEQ ID NO: 615977 - DNA, 75 bp, Homo sapiens
gcagaggatggtcagtgtgccccaggtgaaggccagtgctctcaagcatcctccaggacaaatagcaaggaaata

SEQ ID NO: 615978 - DNA, 99 bp, Homo sapiens
gcaaggtcggcagagcaaggggcttacgcagaaggacctggccacggtacatgtcccagagcaagcacacggaggcccgggagctcatgtactcgggag

SEQ ID NO: 615979 - DNA, 74 bp, Homo sapiens
cagacgcctctctttcattgggacaccctactgcaattaccagctctggctgggtcgccacaacttgtttgacg

SEQ ID NO: 615980 - DNA, 100 bp, Homo sapiens
tgggtcactggatttctgaggagccgttcgaactgtctcaccacttccctgcagctccccctccacctcagatatatgacaagcagttggatgaaagaga

SEQ ID NO: 615981 - DNA, 83 bp, Homo sapiens
ctgcaaccagttctctgcatcacaatccagggcctgaaaacccagaatgaacttgtgtccatcccagagatcactgcagatgt

SEQ ID NO: 615982 - DNA, 88 bp, Homo sapiens
gtaaggatatctttgttaaattgacaacaatggccatgtatccgcctgctggtgggtacccttgatgttgtgttggactccagcgccc

SEQ ID NO: 615983 - DNA, 83 bp, Homo sapiens
gctgtgctcgcgctactctctctttctggcctggaggctatccagcatcatggaagggaagtggttgctgtgtatgttactgg

SEQ ID NO: 615984 - DNA, 87 bp, Homo sapiens
ttgtgccccagttgctgtgctccaaggacacacaggatcaattacatctttacaggatttccagatgtgacttgcactcagaagatc

SEQ ID NO: 615985 - DNA, 83 bp, Homo sapiens
aaacacgtcatgaaactgtaatgcatgaacagaactcaggagttgtctggccagcttagtgtaaaagaatgtgtggatcattt

SEQ ID NO: 615986 - DNA, 90 bp, Homo sapiens
agcacgcagagtccttctgtcggttggtcctggagcggcgcagccggagtggggccgtgaggtgttgggatggccaccaactgggggagc

SEQ ID NO: 615987 - DNA, 96 bp, Homo sapiens
gatctttgaccatcagtctgtgacctgccccttctctttacgaactttatattgctgttggaatatctggagccatccaacatttagctgggatga

SEQ ID NO: 615988 - DNA, 96 bp, Homo sapiens
tcgcactgagtttgaccaggagattgacatgggctcactgaacccgggaaagcaactagattctagactttggctacccacagaattccgagacag

SEQ ID NO: 615989 - DNA, 83 bp, Homo sapiens
tgctgagagtgttaattctgctcctctcctgggcggcggggatgggaggcagtgtgtacacaaggaaggaaatggcaggctgt

SEQ ID NO: 615990 - DNA, 50 bp, Homo sapiens
attacttcagaattaccagtgttacagaaaggaaacagattcattgtctg

SEQ ID NO: 615991 - DNA, 96 bp, Homo sapiens
cttattccgacattcagagttgtttcctccatttgctaaaggaatagtgtttgagcaatccacatcctttggtctgggccaaactgaaggggtttc

SEQ ID NO: 615992 - DNA, 80 bp, Homo sapiens
tccctgaaatccgacactactgattctagtcaagctgaataccactagaaacatacctgtaaccagagacagctgattat

SEQ ID NO: 615993 - DNA, 90 bp, Homo sapiens
gtgcctaggctcggaagcacgttcagtctggatacctccatggtcattaacgggctgaagcagaggatcctgaagctggaacagcagtgc

SEQ ID NO: 615994 - DNA, 50 bp, Homo sapiens
ctggacggcaccattgagtacatgcgagtagagacgggggttcaccatgt

SEQ ID NO: 615995 - DNA, 100 bp, Homo sapiens
attttgccgatttcatgactaaccagtaaacttgaactggatcgatttatgctgtatgctcacgggcctgacctttgtagagaatcggaccttcgacatg

SEQ ID NO: 615996 - DNA, 80 bp, Homo sapiens
tggaggcggtggccgtgctcgtcgggcccccttcgggagttacagaatgtctgaaggggacagtgtgggagaatccgtcc

SEQ ID NO: 615997 - DNA, 98 bp, Homo sapiens
cgctccagccgcccgcgggccagcgcaccggtcccccagcggcagccgagcccgcccgcgcgccggtgctgcccaccaaccctgaggagagctggcag

SEQ ID NO: 615998 - DNA, 82 bp, Homo sapiens
ttagctgtgctcgcgctactctctctttctggcctggaggctatccagcctctcgtggcattatccttcagtggggctattg

SEQ ID NO: 615999 - DNA, 82 bp, Homo sapiens
gccgcgtgtcctcggagcgcggtccctgtattggtctcctgctcctagagctcgagcccagaaaactatcctctaagaccag

SEQ ID NO: 616000 - DNA, 75 bp, Homo sapiens
gctgctgtgtgggaagaagatttgtaaagaaaactcttagcgtaatgaaggcgatctcttccaccggctgtggca

SEQ ID NO: 616001 - DNA, 50 bp, Homo sapiens
gggtctgctcgggggtctacttcgagggttcggagcgaccttggccgttg

SEQ ID NO: 616002 - DNA, 75 bp, Homo sapiens
agcgccctgtaggacccccaggacccgatggaggacccctcgctggaaaggcattttaagggccaccgagatgca

SEQ ID NO: 616003 - DNA, 97 bp, Homo sapiens
tatgcattggctggggagacccatctggactaccaaggagaagctatagactacttctactccaccaggaaggttctgatctacaatggccaactgg

SEQ ID NO: 616004 - DNA, 50 bp, Homo sapiens
gacctactgatgtccctgatacaggatacagttgatatattagttggatg

SEQ ID NO: 616005 - DNA, 100 bp, Homo sapiens
cccccatcctccccgccccatcggttgttgtctgggcgggttatgagaagacagatgatgtttcagagaagacctcactggctgaccaggaggaagtaag

SEQ ID NO: 616006 - DNA, 82 bp, Homo sapiens
gaccagacaggcggcgccatcttcgaacttagacttccggaaggactttggcgaggatttggtgcttccagatgtgagttat

SEQ ID NO: 616007 - DNA, 83 bp, Homo sapiens
gagatatctgcaatgatgtactgatggcgattttgctgacagctgccaagaaaatgcttcactcaacagtcctcatgtgccca

SEQ ID NO: 616008 - DNA, 74 bp, Homo sapiens
tttcaactacaccagccagcccgaccagatttcaagttccacctataaagacaggaatgaggaatacagaagac

SEQ ID NO: 616009 - DNA, 74 bp, Homo sapiens
agtactgagcctgttggaggaactggcccggaaacaggaggacactgtccaggacggccggcagtttctaaagt

SEQ ID NO: 616010 - DNA, 71 bp, Homo sapiens
gcctccggagtagctgggattacagtcaccaaaggcttcgtgtacagctctttcctaaagccctacaatcc

SEQ ID NO: 616011 - DNA, 82 bp, Homo sapiens
tgatgaccaagagaatgtgtcagccgatgcaccgagtccagcccaggaaaatggagagagcagctgcaggagccccaagtca

SEQ ID NO: 616012 - DNA, 99 bp, Homo sapiens
gttgctttcagcttcggcttcctcatctgcaaagcataaatacggatcatgctcctctgtggagcaagtgcctccatgaaatgccatattttgtgaaga

SEQ ID NO: 616013 - DNA, 103 bp, Homo sapiens
atatcccggcctctccgtttatgcagaagcttggctttggtactggggtaaatgtgtacctaatgaaaaggtgtctgctttttcaacgtgggagaaggagttg

SEQ ID NO: 616014 - DNA, 75 bp, Homo sapiens
gcgcggctgaaagcgactgggacctggaagatgctcatgaagcagcaggaccggctggaggagcgagagcaggac

SEQ ID NO: 616015 - DNA, 51 bp, Homo sapiens
gaacttattccagagaaactggccaagttccggaactttaagatcatttac

SEQ ID NO: 616016 - DNA, 76 bp, Homo sapiens
caacaccaagacaaagtgccctgtaagatggtttgtggtggtgtgtggtgatggggagtatatcatctacacagca

SEQ ID NO: 616017 - DNA, 100 bp, Homo sapiens
ctggaacttctgcccagctctccttgctgaactagatgcagagcacgcccagaaggtcctggaaatggagcacacccagcaaatgaagctgaaggagcgg

SEQ ID NO: 616018 - DNA, 101 bp, Homo sapiens
gtacaccctcgagagcggcctgattgggaagaaactcttagcgcaatggcaattgctggctactttgatatatattttgagaagaattgccacaacagggt

SEQ ID NO: 616019 - DNA, 121 bp, Homo sapiens
ctctgagcagcctgttaccttctgcctcagtgccagagtccatgacaattaggtttggaaatcccttgtctccaggttgctgggattgacttcttgctcaattgaaacactcattcaatgg

SEQ ID NO: 616020 - DNA, 50 bp, Homo sapiens
ggaagcgggtctctgccagttccccaatttctcagggagtattgctaaaa

SEQ ID NO: 616021 - DNA, 75 bp, Homo sapiens
gcagaaaaaagatcacaagcaactctggatgggattgcaaaatgatgccttcaattaagttgcagagttctgatg

SEQ ID NO: 616022 - DNA, 101 bp, Homo sapiens
acctgcctccctccttgtggccctgggaggaagccatggactctaccaagtctgaacccctgaagggatcaccagaggctggagtgcagtggcgtgatctc

SEQ ID NO: 616023 - DNA, 138 bp, Homo sapiens
gaggaggcccgggagcgccgagcgtcgccgccgccgccgccatgaacaactcgggcgccgacgagatcgggccagcactccttgcccgaggacagagatggcgagcgcccggattggggatgagtatgcggaggacag

SEQ ID NO: 616024 - DNA, 80 bp, Homo sapiens
tttgcattgactggaaacaatggcatttacagaaagagtcaacagcagtggcaacaggtggacgtgggcgtggtgcactt

SEQ ID NO: 616025 - DNA, 98 bp, Homo sapiens
cctactccagaaacgagaacaacggaggcagaggagctgaagactccagtatgcaactgactacaaggagataaccagcccgagtcatgcagtctttt

SEQ ID NO: 616026 - DNA, 83 bp, Homo sapiens
cgtgccctacttcaaggataagggcgacagcaacagctctgccggctggaaggtgaaagaacttgtcctggacaacagtcggt

SEQ ID NO: 616027 - DNA, 50 bp, Homo sapiens
ctcagcaacatcacatacagggtccggaccctatttgtcagtggccttcc

SEQ ID NO: 616028 - DNA, 88 bp, Homo sapiens
tacgtctgtgcggctgcgtggggctcggccgcgcggactgaaggagactgaaggttgacatcatggacatatgtgagtccatcctgga

SEQ ID NO: 616029 - DNA, 100 bp, Homo sapiens
catcacagaagtgaaatacaggctgaacaggacagaaagatgatgaggagtctgatgaggaagctgtgaagaaaaccaacaaatgtgtactagtctggga

SEQ ID NO: 616030 - DNA, 100 bp, Homo sapiens
cggggaggaggagcgggcgagaagctgccgccgaacgacaggacgttggggcggcctggctccctcagattccctataaggagcccctgctggtgcacca

SEQ ID NO: 616031 - DNA, 101 bp, Homo sapiens
gagaatatcaagcaagtgcctcaaaagctggaacagtgcatggccagcaagcactatctcagtgccactgacatgttgccaggagatgaaatataccctag

SEQ ID NO: 616032 - DNA, 100 bp, Homo sapiens
aaaggagacctcattccaagttccaggattaattctggtcttctacattaagtccattgagccacagaaagtatcgacattagggaaaagcaacgtgata

SEQ ID NO: 616033 - DNA, 98 bp, Homo sapiens
acacagtgtccagatacgagggcaatcgaaaatatcgacaccttaaccaacctggagagtttgtttttggggaaaaacaaaattactaaacttcagaa

SEQ ID NO: 616034 - DNA, 88 bp, Homo sapiens
gaagagtccggttctgggacagctggagacagtggtggtgactgatctctagctcctataccaccaccaccaccattacagcgcctcc

SEQ ID NO: 616035 - DNA, 98 bp, Homo sapiens
cacctcgtgaacgaagattcgaaaagccacttgaagaaaagggtgaaggaggcgaattttcagttgatagcttcgtgctctgtctgatgatggagtat

SEQ ID NO: 616036 - DNA, 51 bp, Homo sapiens
ctctgcctggcggcagtcacggccaaggactacaaagctgatgaagaccca

SEQ ID NO: 616037 - DNA, 100 bp, Homo sapiens
cagtagccgccgtgggagggagccatgaagcattacgagggcagctgcaatgactctccgcacggtattattgtcattgcaagcactattggcagctgca

SEQ ID NO: 616038 - DNA, 100 bp, Homo sapiens
ggcacagggagaagggataaccctacacccagaccccaggtgaacatcattccaataattgcaaaagctgacaccattgccaagaatgaactgcacaaat

SEQ ID NO: 616039 - DNA, 98 bp, Homo sapiens
ggagggacgtgaacggagtgaccaagagcaggtttgagattttatcatgtgggcaacctgctgcaactggttctgcctggatggacagcctgaggagg

SEQ ID NO: 616040 - DNA, 75 bp, Homo sapiens
cccagctatgagagacagagccaggatttgaaaccaggttgtggcagcactgcctgaaggtatgagaccagattc

SEQ ID NO: 616041 - DNA, 75 bp, Homo sapiens
cgcgcggctcggagccctggaagcagcagctcaccgaggacggggactcgctggagtgcaatggcatgatctcgg

SEQ ID NO: 616042 - DNA, 97 bp, Homo sapiens
cctccttgcagcctcccccagaaagcaatgataattcccaggacagtcagtctggtactaacaatgcaggtgacttcatggtcatgacgattttctt

SEQ ID NO: 616043 - DNA, 100 bp, Homo sapiens
cttgcttttatcgaacttgtcaatgaaggaaggtcagaagacatgtcttcatctacatggcatctttccttacctctatgtgccatacgatggttatgga

SEQ ID NO: 616044 - DNA, 97 bp, Homo sapiens
ctatgttcggctggacttctccatcaccaagatacagtactgtagtcttgaagagaaaattcagtctccaacagaagaaacagaaatcttttatcac

SEQ ID NO: 616045 - DNA, 90 bp, Homo sapiens
cacacctccattggatttaaaagacagtcctcgtcagcactgactttcagctatggaatcggtttcccaacctctttcccccactgaagc

SEQ ID NO: 616046 - DNA, 80 bp, Homo sapiens
ggccagcagccagaaggcctccagtctgagccacctgaggtcctaggtgttgtctacatctactggcctaacaaaaacag

SEQ ID NO: 616047 - DNA, 87 bp, Homo sapiens
aatagaaactttggaatctgtacccattattggtggtttttgggagactatctttggcaacagctggagaatgctggaggagacctt

SEQ ID NO: 616048 - DNA, 75 bp, Homo sapiens
agaagccactgacagcccccagggcaggtgagccctgcatctggaataaggtgctggagaatctggtaaaagcac

SEQ ID NO: 616049 - DNA, 75 bp, Homo sapiens
gccctttgcgcttggatccacttccccatctgtaacgaggtgttgagacgagtgcatctgggggaggtgttgtag

SEQ ID NO: 616050 - DNA, 100 bp, Homo sapiens
cgacaacagcctggcgtccgccacgatggtcagtaggacagaaggtaacattgatgactcgctcattggtggaaatgcctccgctgaaggccccgagggc

SEQ ID NO: 616051 - DNA, 75 bp, Homo sapiens
ttgcaggaaatgtgaatctcaggagagagcagccagagtgtcagaggctaactgttctgccatgtttggaaaact

SEQ ID NO: 616052 - DNA, 90 bp, Homo sapiens
cagtttgaacctcagaagactctgttcatccagtgcgatgtggctgaccagcaacaactgagagcaggtattaatctctggagaagacac

SEQ ID NO: 616053 - DNA, 75 bp, Homo sapiens
tcgagaattacaccggggtccaggttctttcagagcacggcttcggccccatcactaccgacatccgggagggac

SEQ ID NO: 616054 - DNA, 118 bp, Homo sapiens
gggccgggcggtgcgcactgcgggcgcatccctgccccggcgccgtccgtgcccgcgggacctgacagccgggtcagagtaagactttgaccccgacgcaggcttcagtgattgccgc

SEQ ID NO: 616055 - DNA, 51 bp, Homo sapiens
cctacctggcccaggtggaccccaaagagaccccagaatccaacaatagcg

SEQ ID NO: 616056 - DNA, 100 bp, Homo sapiens
gctgagtgaccaagcaaggtacccaccaggccgattatgtccattgttctcttggagcagctggtcatcatgagctcttcagaaaccaggctgctttcag

SEQ ID NO: 616057 - DNA, 50 bp, Homo sapiens
ctcccaagtagctgggaccacagctactgcagccgtggaactaagtgttg

SEQ ID NO: 616058 - DNA, 82 bp, Homo sapiens
caccgaatcgctgtcacgccggcagggagtgcatccgccccaacccttttccccctcgtctcctgtgagaattccccgtcgg

SEQ ID NO: 616059 - DNA, 87 bp, Homo sapiens
cttcttcgggatcactggattgctgacggcagccctctcaggaactcttaacattcagggatgtggccatagaattctctccagaag

SEQ ID NO: 616060 - DNA, 100 bp, Homo sapiens
ctggtaatgtgtccattcgagggcggatcctctctgacaccattcgcttttcacccaagatgatttgatgtcttataaaactctgatgaaccatgatggc

SEQ ID NO: 616061 - DNA, 51 bp, Homo sapiens
acgaattcatccgctctctgccaggtgaatgcatcccggcagggtattgaa

SEQ ID NO: 616062 - DNA, 100 bp, Homo sapiens
tcggcagtcgcgaagcagcaaccatgtttcaggcacctgcaagagagacctgcgtggaatgtcagaagacagtctatccaatggagcgtctcttggccaa

SEQ ID NO: 616063 - DNA, 97 bp, Homo sapiens
ttcctggttggagggacagccccaggatgccgtgggccgcagccactcaggactgtcaaaggaaatggaggcacgacttgcagcgttgcagggcaga

SEQ ID NO: 616064 - DNA, 100 bp, Homo sapiens
ggatgtctttgggccgaagcatcctgctctgaagatcactcgtcgctatgccttcgcccatatcctaacgggcctagccagggttgagttctcacccacc

SEQ ID NO: 616065 - DNA, 74 bp, Homo sapiens
ctcaaggcggcgcggcggccactgggcgcagcacccagattttctggcatccttaaatcttgtgtcaaggattg

SEQ ID NO: 616066 - DNA, 100 bp, Homo sapiens
ccacctcggcagaagaggacatcattgatggatttgccatgaccagctttgtcacttttgaagcgctggaggtggatgaaactcagtttaagaagatcct

SEQ ID NO: 616067 - DNA, 100 bp, Homo sapiens
aagttggtgctgtttgactccaaagttggtgatggagttttgtggtgctggctctgtcaccgacctgatcaagaacacaaaaggtaacacgttgaaagag

SEQ ID NO: 616068 - DNA, 100 bp, Homo sapiens
cacagacacagccggggtcgggagccgcccggggcagggctcgggagagcggatgaacacaatgacgtacagaagaaaacctttaccaaatggataaatg

SEQ ID NO: 616069 - DNA, 83 bp, Homo sapiens
cgggacccggtgtctgctcctgtcgccttcgcctcctaatccctagccactatggtttttcgttggaatatacgttgcacatt

SEQ ID NO: 616070 - DNA, 101 bp, Homo sapiens
ccgcgcgcacctcagccgcctcctagcggcgcggcgctcgctcctacggttaatgttgaagaaggaaaatgcggaagtcgtcatttgacaagttttataaa

SEQ ID NO: 616071 - DNA, 100 bp, Homo sapiens
atgataaagggctctgaaagctagaagaaaaggtgtacttgcaagaaacctcaggacttgagtaacagcaacatgattgtgccaaggacttgaatggatg

SEQ ID NO: 616072 - DNA, 75 bp, Homo sapiens
gtggattgttgggaattggagcagatataagccttccaaagtcagcagcaatctgttacacagcagcactgttga

SEQ ID NO: 616073 - DNA, 100 bp, Homo sapiens
atgagatttacctgtgagatgtttcatcccaacagttctaagctggtctatgtccatcaccttcttggagaaggagcctttgcccaggtgtacgaagcta

SEQ ID NO: 616074 - DNA, 100 bp, Homo sapiens
gccagcgggagctcggaggccaggccgccctccccactgttaccaacatgaagctgctcgcagcaactgtgctactcctcaccatctgcagccttgaagg

SEQ ID NO: 616075 - DNA, 82 bp, Homo sapiens
aggaacgtgaccgtcactgacgtggacatcgtcttcagcaagatcaagcttgggcactgtttaaaggaaagttccgagaagg

SEQ ID NO: 616076 - DNA, 101 bp, Homo sapiens
ggtagtagaatgcttgaggcctggaatttaaacctgagccactatctgaaggtgaggagtaagaggagcaggctcctgcacagtgactacatgaacatgac

SEQ ID NO: 616077 - DNA, 74 bp, Homo sapiens
cccgtggacatgcgcacctcacacaggcgaaagggcgtgtggttgcgcctgaggaagatacttttctgtgtttt

SEQ ID NO: 616078 - DNA, 82 bp, Homo sapiens
aaaggatgacatatttttggacctgaaacagaaattctggaacacctatatggaccgtataatagacgctggccccaaagga

SEQ ID NO: 616079 - DNA, 100 bp, Homo sapiens
agaagtaccagttctaaatgtcagttataagccacagaaaattagtcccaaatcaactgtggggcatgaggacactggccactccttgcatgactacaag

SEQ ID NO: 616080 - DNA, 75 bp, Homo sapiens
ggggatggctataatggatttggtaatgatggaaggagaagtatatgcaattgaaacctttggtagtacaggaaa

SEQ ID NO: 616081 - DNA, 100 bp, Homo sapiens
agagccagaagggagtgcagggaatcatcgtcgtgaacacagaagtgggattttcctgtgatgggatgagaccagaagccataaggcaagatcctacccg

SEQ ID NO: 616082 - DNA, 82 bp, Homo sapiens
gagctgcggcagaagggctacgaagaagtgcttcagcgggccaggaagcgcatccaggagaacactctgctccagccaaggt

SEQ ID NO: 616083 - DNA, 75 bp, Homo sapiens
ccggtgtggtgaagagcgtccaccggcggctccgcaagaagtaccgagaaggtttccctaggacttctgcatgcc

SEQ ID NO: 616084 - DNA, 99 bp, Homo sapiens
cctgtgtggggcccaccctccggaatataaatagtttctggaaaggacactgacaacttcaaagcaaaatgaagttctttctgttgcttttcaccattg

SEQ ID NO: 616085 - DNA, 51 bp, Homo sapiens
ggatattgtccttttggagcagggcagtgagaaagatcagtctaaagaaaa

SEQ ID NO: 616086 - DNA, 50 bp, Homo sapiens
gtctcgttcctgatcgaacgtggtgtctgcgggccaggcatcgacatccg

SEQ ID NO: 616087 - DNA, 100 bp, Homo sapiens
gtcggtcccggggatgcagcgcgggggtcagagagcgaccccaacagggtagacggttttgcacactagggaccaagaagccctcggggacactgctgag

SEQ ID NO: 616088 - DNA, 97 bp, Homo sapiens
cctgcctcagcctcccgagaagctgggattacagggtctgggatccccaaggcctgggcaggcatagacttgaaggtacaaccccaggaacccctgg

SEQ ID NO: 616089 - DNA, 101 bp, Homo sapiens
ggatgcacaagttccaaggttacgtttcatgcaaagcagttggtccgaggggagcccaatgtctcctacatctgttctcgctactaccgggccccagagct

SEQ ID NO: 616090 - DNA, 100 bp, Homo sapiens
tgcgttcagactggggcactgccatcccctccgcatcatggggtctgtggaccaagaaaatgatgcatcctgttgccagcagtaatccagctttctgtgg

SEQ ID NO: 616091 - DNA, 90 bp, Homo sapiens
ccgcgggagtaggcgacgggcgtgagggcgaggcggcggcggcggcggccagagagcagcagccgcctgatagctgatcagcttccttgg

SEQ ID NO: 616092 - DNA, 100 bp, Homo sapiens
tcgtgaccgagaccgtgaccgagagcgtgaccgagagcgcgaatatcgtcatcgttagaagaatttgttcctagagacagagaacccaatacaaaagtga

SEQ ID NO: 616093 - DNA, 100 bp, Homo sapiens
tggacctgggccatgcagggagattgggcatctcctgcaccagagcctgttagtattaatgaagaaaatgagggatttgaacataacacacaagttagaa

SEQ ID NO: 616094 - DNA, 75 bp, Homo sapiens
gatggatatcagctacagactttcctgagtcagggacctaatacctatcattgctgctctggaatataatcagtg

SEQ ID NO: 616095 - DNA, 100 bp, Homo sapiens
gcgtgggtgcctggagatgaagctggaaagaccctgtgcgcactcattcgaggagtccatcaaaagaataagtctacctctgggtttgacattatcaaca

SEQ ID NO: 616096 - DNA, 100 bp, Homo sapiens
cagcaaggtcggcagagcaaggggcttacgcagaaggacctggccacgcgccgtgccgtccctgcagtgacaccgaggtgctcctagccgtctgcaccag

SEQ ID NO: 616097 - DNA, 82 bp, Homo sapiens
ggaagctttggagcagtgtattttgcagtcgatgatgtgaagaaaggttacatcaaagcagaagaaaagtcctatcaattac

SEQ ID NO: 616098 - DNA, 97 bp, Homo sapiens
cagccatggagttctacttagagggtgtcttttatgaataatcaaaagcagcaaaagccaacgctatcaggccagcgttttaaaactagaaaaagag

SEQ ID NO: 616099 - DNA, 101 bp, Homo sapiens
gttcatctacccggagaagcaggagccctactcggcagaaccgggggcggctggcagacaagaggacagtcgccctgcctgccgcccggaacctgaagaag

SEQ ID NO: 616100 - DNA, 100 bp, Homo sapiens
cgcgcccgccagttgcttgatcaggtggaacagattcagaaggagcaggattaccaaaggcctccagggtcgtatagacctccccctcctatgggcaaac

SEQ ID NO: 616101 - DNA, 90 bp, Homo sapiens
ttccttcggccttgtccgagcaaacagaggcgctcatccacagagccacatctgttagctgtgaaagttgtgtagatttactgtttgtga

SEQ ID NO: 616102 - DNA, 61 bp, Homo sapiens
ccgagcccaccgctgccccacaccccgtgctgaagcagatgggctgcgccatcatcgcggg

SEQ ID NO: 616103 - DNA, 50 bp, Homo sapiens
gatgacagccaagaagttctggaagccagattgtaaaccatggctgtgtg

SEQ ID NO: 616104 - DNA, 80 bp, Homo sapiens
tgcacgaaagctttcctaggccaaaaagagtcctccactttagtgtcttctctggaggcggagctctctgaagttaaaat

SEQ ID NO: 616105 - DNA, 90 bp, Homo sapiens
gtctccatccagatcagctgaatcagagtttgcattgttaacaagaggtcatgacgccagtcagatcacactagccttgggcacagctgc

SEQ ID NO: 616106 - DNA, 83 bp, Homo sapiens
gaagtccattgtggaggctcagactagtgtcagcagtgggatacctgcgcttgaaggacatcatccaccgtgacatcaaggat

SEQ ID NO: 616107 - DNA, 75 bp, Homo sapiens
ccagctccccagaaatgaacctgcccacggtgtccgcgctcaggcgggtcctcctcgccctggtatgatgccagc

SEQ ID NO: 616108 - DNA, 100 bp, Homo sapiens
gcgcggacctccgtcttccttgtccgcgtgggcccgggcgcaggcgagagtccagggacacccccgtttcgagatatcaaagctcagctctttgaaacat

SEQ ID NO: 616109 - DNA, 75 bp, Homo sapiens
gccagctcacctctcacgtccccgtcatcgccaactccaccctctacatcaggtgtggaaacaggaagagaacta

SEQ ID NO: 616110 - DNA, 82 bp, Homo sapiens
gagctggagaccaaagctgagctcctccagtctggtcaaatgaagcgcaacagaggggaagaaatagattttgagacacctg

SEQ ID NO: 616111 - DNA, 90 bp, Homo sapiens
ggaaaacctaaccatgaagacttgaacttaatacagcaagaaagaccatcaagtttaccagtgaagtattacagacacttagcacctgat

SEQ ID NO: 616112 - DNA, 100 bp, Homo sapiens
tgtccaagtcagttcctgggtacaagcaaatgcagccctgaggatttggctactgcatataacaacagggggcaaatcaagtacttcagggttgattttt

SEQ ID NO: 616113 - DNA, 82 bp, Homo sapiens
gcccggcagctgccggcggcgcggcgagagagcggctgacagaggggatgcgaggtgtgtgatcctgtaaaattaaatcttc

SEQ ID NO: 616114 - DNA, 75 bp, Homo sapiens
ctagctatgggagctttctacgttatccttagcagaatcaccatgatcgattacttctgctcatcataaacatct

SEQ ID NO: 616115 - DNA, 99 bp, Homo sapiens
ccaccccggtcctcggctctggggccgccgccgcgggccggagccgagcagccgtcggcagggtttgtatttcagcagtcagaaaaatttgcaaaggtg

SEQ ID NO: 616116 - DNA, 82 bp, Homo sapiens
gtgaacaggagccgctcttaggcgacacacctggaagcagtgtactaatggtcacttgatgtgcgctggctgttttatccac

SEQ ID NO: 616117 - DNA, 100 bp, Homo sapiens
aattttccaaacacctgactctgtgtgtttttaccaaccatacagttgatcacagccgagttaaattgacattaaagactccttcacaagattcagacta

SEQ ID NO: 616118 - DNA, 96 bp, Homo sapiens
ccgacgcaagactgtcccggcccggggccagatattcgaagcttacaacatggcagctttgtggaaattaccttgtattttcatctgtgagaataa

SEQ ID NO: 616119 - DNA, 74 bp, Homo sapiens
tggattgtagaacttctctctctgctttattgaaaaggcttgaggccgtgaaaccaacagttggtatgaaacgt

SEQ ID NO: 616120 - DNA, 101 bp, Homo sapiens
tttaaaaatcatcgattccgcttcttgcatgaaactggaggagcaatggtgtatgagagacaagagagacacctccaacttcgacaaagagttcaccagac

SEQ ID NO: 616121 - DNA, 100 bp, Homo sapiens
acctttgagcatacaccgagagagtgaggagccagacgacaagcacacactatggcgctgaaacggattaataagaactctaagaaggagctgatgtgga

SEQ ID NO: 616122 - DNA, 100 bp, Homo sapiens
cactgcctgggaggaagagaatttgtccaaatacaaagacaggtggctgaagccatactattttatagaattaatggaaagcagaaaagacatcacaaac

SEQ ID NO: 616123 - DNA, 99 bp, Homo sapiens
ggactctgaaggccacattaaactcactgactacggcatgtgtaaggtggtaaattcactccagcagcaacctcaggctgcatccccttcagtaccaga

SEQ ID NO: 616124 - DNA, 74 bp, Homo sapiens
ggggagtagctcctgcagactcaccagaagctccaaggcgcagcaggttcaggagaagtggcacctggtggagg

SEQ ID NO: 616125 - DNA, 124 bp, Homo sapiens
cggcattagagaaagagattggtccagaacagtttccggtcaatgagcactattttggattagtcaatccaggtgactttatacacactttgggagatgcacatatttacctgaatcacatcga

SEQ ID NO: 616126 - DNA, 100 bp, Homo sapiens
gagaaaattggagatttgataacactggagatcagcaccaaatcccacagaggcatctgagggcccgcactaagagcctaactgaaatcccgcgaggatc

SEQ ID NO: 616127 - DNA, 74 bp, Homo sapiens
ggcggagcggagacgggagtattatgaaaagatcgtgaagctcgtgtgtggagtgccacggtacaatcagacga

SEQ ID NO: 616128 - DNA, 75 bp, Homo sapiens
cctggagccagaaacattaccgtcatattccacccattactaagcatcgagagtaaacatgaggttacgatcctg

SEQ ID NO: 616129 - DNA, 87 bp, Homo sapiens
cgccgcgggctccgcgcccggccggacccgggcccgagaacccagcgggtgccgcttctccacccgaggcttccacctccaacgagc

SEQ ID NO: 616130 - DNA, 83 bp, Homo sapiens
agcctgcggagcctgtggggcaggtttaagaattgtttaagctgcatcaatggagcacatacagggagcttggaagacgatca

SEQ ID NO: 616131 - DNA, 75 bp, Homo sapiens
gtacatggatgcttgttggatgaattaatgaaccttgacccacaccaagaaacattgtcaattgttgctgtggaa

SEQ ID NO: 616132 - DNA, 100 bp, Homo sapiens
ggtatctgtggcaggagcttttcgtaaagggaagtcatttctactggacttcatgcttagatacatgtataacaagttgagtggtgattttatgcaatgg

SEQ ID NO: 616133 - DNA, 82 bp, Homo sapiens
cagcgcccgcgccccgccgctgagccgtcgcggagccgcgcagccctcggagcacggcccgatgagagaaagggaaagttaa

SEQ ID NO: 616134 - DNA, 98 bp, Homo sapiens
gtgagcgcgaggaggcggaggctgcggcggggcggacggtcgcgcggcggcaggcacaggatcttaagattgaaagtgatgttcaagaaccaactgaa

SEQ ID NO: 616135 - DNA, 82 bp, Homo sapiens
acgcagaaggacctggccacggctctgtgtgctccgggatggagcaggtgtgcagagggtgagaacccagctctgggaccaa

SEQ ID NO: 616136 - DNA, 100 bp, Homo sapiens
tgacattcccaaggaggaggcattcggaaagtattgtcggccagagagccaggagcatcctgaagctgacccaggtaccgggccagcacatggctcccag

SEQ ID NO: 616137 - DNA, 83 bp, Homo sapiens
cagacaaggagctcagtgacctcctggacttcagcatgaaacaccaagggacccacgacaggcctgccccgcatcgcagggca

SEQ ID NO: 616138 - DNA, 90 bp, Homo sapiens
cggatcaatccagatggcagccagtcagtggtggagaaattccgggtagatatgcctggctcaggcagtgcattcatccccaccatcaac

SEQ ID NO: 616139 - DNA, 100 bp, Homo sapiens
ggtgtggcatgtgagctggtccatcacagccaacatcctggctgtctctggtggagacaataagaacactcgtgaaactgctcaggccatcaagggtatg

SEQ ID NO: 616140 - DNA, 100 bp, Homo sapiens
tatggttctccattgtgatgaaagcacatggtacaggtcctcgatgggcttcctggaatattggtgtgtttatttgcatcagatgtgctggaattcatag

SEQ ID NO: 616141 - DNA, 100 bp, Homo sapiens
gaagagacgcacagtagaaccgatctcagccttgctgatcatctcgtacagcagcagaaaatgaccatgttacagatgaacgactttcgaagtaaaatgc

SEQ ID NO: 616142 - DNA, 82 bp, Homo sapiens
cttccgagagcgcctgccgcccctgcgccgccgagccagctgccaggtcacgcatgaagggagcaccgtggagaagacagtg

SEQ ID NO: 616143 - DNA, 101 bp, Homo sapiens
acgggccatacccaataaccaggtgcttggcaaaatcgagcgggccattggcgtgaacgatggtgacatgcggctggccgatgggggcgccaccaaccagg

SEQ ID NO: 616144 - DNA, 100 bp, Homo sapiens
ggctgtttggaaagacccaggagaagccgcccaaagaactgccatccaacatattctttacaatggatgatgtggtcaaggttggagactttgggttagt

SEQ ID NO: 616145 - DNA, 90 bp, Homo sapiens
ctttgattctgaacttgagcttatgacatacattaatgaaaactgggatagattgcaccctggagaggcaagatgatgatgaatgaagtc

SEQ ID NO: 616146 - DNA, 100 bp, Homo sapiens
gatgaagagttggattctcttatcaaggctaccatagctgggggtgatgttttctggcaaaggccttcctgcatttatgaattctctctcaagaagcaag

SEQ ID NO: 616147 - DNA, 51 bp, Homo sapiens
catgaagtttgtctacagaggcagatggaaaaattgtacctgcattacttg

SEQ ID NO: 616148 - DNA, 100 bp, Homo sapiens
acttgaggcccagaatgcactgcacaatattaaaactttacctggggcgggatccacagcaccattgtttactgaccagccagaggaacctgagtcaaac

SEQ ID NO: 616149 - DNA, 112 bp, Homo sapiens
gacctagaaaaatcaagaaagatgggaaggaaggtgctgaggaaatagacagacatgttgaacgcagacgttcaagtgttggctgcaccaattctagaagtaagctctccaa

SEQ ID NO: 616150 - DNA, 100 bp, Homo sapiens
aaaagtttcatttgatctgaatagtattaaaataaaatacctggatgaggaagatgaagagggacatgggcggctttgccatctggtgcaagaaggccaa

SEQ ID NO: 616151 - DNA, 90 bp, Homo sapiens
gaagcctcggtgctgcacaacctcaaggagcgttactactcagggctcatctacgagtttgggctttgcaaaactgagaacaaagccaag

SEQ ID NO: 616152 - DNA, 100 bp, Homo sapiens
cctgtacgcggagggctcggtcaacggcttcatcagcaccttggggttgggacagcgtcttcgctgctgctggatagtcgtgttttcggggatcgaggat

SEQ ID NO: 616153 - DNA, 73 bp, Homo sapiens
accacccacgcttgcccagcctttcttcacgcagttgtttttgagcacgttcactctcgcagtgtcagctggg

SEQ ID NO: 616154 - DNA, 90 bp, Homo sapiens
cctgtttgctttgttaattattttcgtccccagaggaaggcggtgcagcagtaccgcgtcgccatgactgccaaggactgctccatcatg

SEQ ID NO: 616155 - DNA, 100 bp, Homo sapiens
gggcacagctgccgccttctcccctgatagccactacctcctctttggggccccaggaacctataattggaaggattatgtttgagaccttcaacacccc

SEQ ID NO: 616156 - DNA, 100 bp, Homo sapiens
cgacgtggagagcccctacacgctgatcgattctagaggccatttcaatcgaatatctcatggcctacagggactttctgcagtgcctctgagaacttac

SEQ ID NO: 616157 - DNA, 121 bp, Homo sapiens
gtgtcagtgttaaaggaacctctacaacgaaggtgaagccacggaagataaggtgtgcaactgaggaacatggctcaagaaactaatcacagccaagtgcctatgctttgttccactggct

SEQ ID NO: 616158 - DNA, 74 bp, Homo sapiens
ccgcggctccggccctggccccgatggctctgtgcaacggagactccaagtgcctccggagccagcgtggtggc

SEQ ID NO: 616159 - DNA, 100 bp, Homo sapiens
aataaaactccagcgagatccgggccgtgaacgaaagcagtgacggaggagcttgtaccaccgcagagagagatcatcattgcctgaatttagctttgtg

SEQ ID NO: 616160 - DNA, 74 bp, Homo sapiens
tggctggacagctagctgcttatggctataaaattacagcagatataatttctacagtagaatttaatcattct

SEQ ID NO: 616161 - DNA, 100 bp, Homo sapiens
ctggaagagactcggggccccccagcctccgccaacccaggtatgggcactaggaaaagacttcttccatcaagcttaattgttttgttattcatttaat

SEQ ID NO: 616162 - DNA, 75 bp, Homo sapiens
catcactttagaccctccacctaattgcagttgatattcactgatggactccaaagaatcattaactcctggtag

SEQ ID NO: 616163 - DNA, 75 bp, Homo sapiens
taaggcgtctgcgagatgagctgagggctgtggtgcggcaccggcgagccagcagttaatgttctcctcagaggt

SEQ ID NO: 616164 - DNA, 74 bp, Homo sapiens
aacgaactccgtccactaacaaaagatggctacgagggtaacatgttcgagccccagtttgagggacagcggga

SEQ ID NO: 616165 - DNA, 100 bp, Homo sapiens
gaaggacaacagcacccgtaacatcttcatctaccatgaggacgggaaggagccaaggcaaagagggaccactgtgctcatggacccatcgctgccttcc

SEQ ID NO: 616166 - DNA, 75 bp, Homo sapiens
gcaggcgttggttcccctctttgacctgttttcggctttgtgagaaaccttaccatcaaacacgatggccagcaa

SEQ ID NO: 616167 - DNA, 100 bp, Homo sapiens
ctgtatgaattcaaagtgattgtagagggtcaaaatgcccatggggaaggctatgtgaacgtgacagtcaagccagataaatgcagagggaacaccagag

SEQ ID NO: 616168 - DNA, 98 bp, Homo sapiens
aagaatactgaaaattgtcactggatttaatggacaattggcgggcaacgacctttcttttatccacccaaaggccttgtctgggttgaaagaactca

SEQ ID NO: 616169 - DNA, 95 bp, Homo sapiens
cgagcactccggcgaggccaaggccttccaggactatggcaaaataacatggcagccagacgaattacacaggagacttttgatgctgtattaca

SEQ ID NO: 616170 - DNA, 90 bp, Homo sapiens
gtcctgcctggcccccagccagttccctgctgaagatggccagatccccttgtctgtactatactggcaattgctggagaagattttgca

SEQ ID NO: 616171 - DNA, 100 bp, Homo sapiens
cagccgagcccgcccgcgcgccgacaatgcagatcttcgtgaagactctgactggtaagaccatcaccctcgaggttgagcccagtgacaccatcgagaa

SEQ ID NO: 616172 - DNA, 74 bp, Homo sapiens
caaaatgtgttccatggtcaaaaaatggcaggagccaaaaacctgtatatcatctccgtgaaggggatcaaggg

SEQ ID NO: 616173 - DNA, 75 bp, Homo sapiens
cggcaagaacggggacctgcccaggccgccgctcaggaatgaattcagttttgtcaaagcaacaggcttcacaag

SEQ ID NO: 616174 - DNA, 74 bp, Homo sapiens
cggcgcggcagagtccccgtacgcctacagtaacggtgagaagccctaccactgcaactgggacggctgcggct

SEQ ID NO: 616175 - DNA, 90 bp, Homo sapiens
aaatcaaaaataacacatcctgtgtatagcctttactttcctgagaaaaagaggaatccagtcgggctcggtggctcacacctataatcc

SEQ ID NO: 616176 - DNA, 100 bp, Homo sapiens
aaagtcccccgtggtcacatctgggttgaaggtgatcatcatggacacagttttgacagtaattcttttgggccgggttacattccgaaaagcaaatggg

SEQ ID NO: 616177 - DNA, 100 bp, Homo sapiens
ggcatccagggtcggactcccggggccatggccggaatgcagtaccctcagcagcagcacaacattctgaaattttttggttattgtaatgatgttgatc

SEQ ID NO: 616178 - DNA, 96 bp, Homo sapiens
tcttcggcaccccggagtttgtggcctccagaggtgaagtccccagtggagcctatggctactcttacatgcccagcggggcctatgtctatcccc

SEQ ID NO: 616179 - DNA, 100 bp, Homo sapiens
cctgaacgacggccccaagccggggcagtcccgattctgaatattcagcagctcgctgaagtttgtccctaaaggacaacttccccagataccccgtggg

SEQ ID NO: 616180 - DNA, 75 bp, Homo sapiens
aactctaactttaactttgcattggttggacaccttttaaaagggaaaatttgttggcagattgtttgcagggtt

SEQ ID NO: 616181 - DNA, 75 bp, Homo sapiens
ttgtagtcatgtacagaacatgatcaagggtgttacactgattactgattttgggcactccaagattttgggaga

SEQ ID NO: 616182 - DNA, 73 bp, Homo sapiens
ggaggcagaggtggaggcgctttgaaaggtgttcaggcgcttcgtggaggttggccgggtggcctatgtctcc

SEQ ID NO: 616183 - DNA, 50 bp, Homo sapiens
gacagccgcaaccaggaatgacttctagaagaagtctggaagaagaggaa

SEQ ID NO: 616184 - DNA, 101 bp, Homo sapiens
cttgaatcaagtagatgttggcagctatgttctaaaagtttgtggtcaagaggaagtgctgcagaataacaaatgtggcaattattttggatctatcacct

SEQ ID NO: 616185 - DNA, 82 bp, Homo sapiens
ggcagctatgtgtcttggattggctcacagtttaattggttggggtcagataagaagaggagtgacaatcaagccaacagta

SEQ ID NO: 616186 - DNA, 83 bp, Homo sapiens
gccgcagctgctgctgctgctgctggccgcggagtgcgcgcttggtcaaaatgcagatcttcgtgaaaacccttaccggcaag

SEQ ID NO: 616187 - DNA, 82 bp, Homo sapiens
cttcaatgtccgcatcgcaaccaccgccctggccatctaccatgtgtgagagggtccaagcctggtaagaatgtccagcttc

SEQ ID NO: 616188 - DNA, 75 bp, Homo sapiens
acaaaagccaagaggaggacagttcgctacacagcaatgcatcgagacctttgcattgcagctgtaattaaagaa

SEQ ID NO: 616189 - DNA, 80 bp, Homo sapiens
cgacccgaagtcatcgctgggagtactggttgccctttcctcagtttgagccccagctacatagatctgactgagtgtcc

SEQ ID NO: 616190 - DNA, 75 bp, Homo sapiens
tggaggagcgaggcagctgtactaggactgggaacgggatttgcctcaaagggcactgcaaaaattgaacagagg

SEQ ID NO: 616191 - DNA, 100 bp, Homo sapiens
cagctggggaaaaccgtgcattacctgcccatcctgttcatcgaccagctcagcaaccgcgtgaaggacctgatgctgtcgcctggttgggcccggaaat

SEQ ID NO: 616192 - DNA, 51 bp, Homo sapiens
aggccaaaggcagttgtattggccgctttgtagttcagaatgtttctgcac

SEQ ID NO: 616193 - DNA, 75 bp, Homo sapiens
gagagagcgaacgccagggaccctgtgcaggcctgctcctccgtttgcaaggctttcaccagttctcaggatgcc

SEQ ID NO: 616194 - DNA, 116 bp, Homo sapiens
cccggagcggccgacgcccgcctcggcgcgcacatcccgcggggcccggccgggtgttttccgacagctcaacacggccatcgccgtatcccagatgtcctcaggccagtgccgcc

SEQ ID NO: 616195 - DNA, 100 bp, Homo sapiens
cagccttcagaaattgccggtctgggagttgggggcaaggagaagatcctgccagcaatagaacatcagatagccaatatgatgctttaattactagcaa

SEQ ID NO: 616196 - DNA, 82 bp, Homo sapiens
aatggaacaagttccagcacaagtgcaaaacacttactattttggagtttaaagtatgtcatcatggcaaagtttcggagaa

SEQ ID NO: 616197 - DNA, 100 bp, Homo sapiens
gagaacaaccgttgtttaatggaagatttcgatcagttagggtggtcgagatatccagtctgacggagcacttgctgacggaatgtgacaaaaaagacgg

SEQ ID NO: 616198 - DNA, 100 bp, Homo sapiens
cgggccggggcggagggttcggctgcgcggcggggctgaggcggccgcggggcccgagcgcaggtacatgtcccagagcaagcacacggaggcccgggag

SEQ ID NO: 616199 - DNA, 82 bp, Homo sapiens
ggtggcggggctgaagaagcagttctacaaggcgagccagggtttccaggcctgaggtgcccgccctggccccaggagaatg

SEQ ID NO: 616200 - DNA, 141 bp, Homo sapiens
ggggaggaagccctttctcctcggcactgtattctttacctgcttcccaatcccactgatgaggatcagcccatggaaggagggagccccaggaacaggagtcccaccgaagaactgctctctgacagaacagagacctcc

SEQ ID NO: 616201 - DNA, 96 bp, Homo sapiens
cttctcacgttcagccggcgtataccaacccaccccacatggcccacgtacctcagatcactgtgtccactactatgatcttcgtaacactaaaca

SEQ ID NO: 616202 - DNA, 100 bp, Homo sapiens
agattcttaatgcttttcggactcctgatggcatgcctgtaaagaacttgcagttgaaggagtataacacagctgatgtaagcaatggtacagtaaagaa

SEQ ID NO: 616203 - DNA, 87 bp, Homo sapiens
tgggccaaatgctcctttaatttttgaacgagctaaggagagagtgttgaaaaaaggagagcaccaaatacttgttgacgaaaaacc

SEQ ID NO: 616204 - DNA, 98 bp, Homo sapiens
tctctgtgaagattatttgccgctccgggtccaggtaaaataccatgaagattttgaaaaaacaaaggggagaggctttactcccgtcgtggacgatc

SEQ ID NO: 616205 - DNA, 51 bp, Homo sapiens
gttggggaacatgatctgttaaagaccctgtttgggaagatgatggactac

SEQ ID NO: 616206 - DNA, 96 bp, Homo sapiens
caggtccccgtccattgatagcattcagaaagatcccagagcaaatttttcagaacataaaacaagaatatagtcgttatcagaggtggagacatt

SEQ ID NO: 616207 - DNA, 98 bp, Homo sapiens
gccgcgggcaggacgcgcgctgcagagtgcttgtgatttcacgtatttttgctgaactcgtaaaagagacacttggatggtggattaaccagaacact

SEQ ID NO: 616208 - DNA, 83 bp, Homo sapiens
gaactgaaacatgaaaacatcgtggccctgtacgacttccagagacaagaggagcagcagcggcaccgcccctcaccctggag

SEQ ID NO: 616209 - DNA, 90 bp, Homo sapiens
caaaaatgtgcaaatatgaagtaaatggggcaaaatcttaataagaagtgaatgtaggcagatcgggagcggtgccgagaaaaatttcct

SEQ ID NO: 616210 - DNA, 90 bp, Homo sapiens
tggaatattcccatctcctgcctcctaatagctttgaggatgccaacgtccggcggtacctccagctgacacagtcagaactcagcagct

SEQ ID NO: 616211 - DNA, 100 bp, Homo sapiens
ccagcctgacctacgaggacacgtacaacaccctcaaatatgccgaccgggccaaggagatcaggctctcggatgccttcgtgaagatcgtgaggcacga

SEQ ID NO: 616212 - DNA, 75 bp, Homo sapiens
gagatggcagtgtgtgcaaaaaagcgccccccaggtgctggcatcggccccaccattcagattggggaggagacg

SEQ ID NO: 616213 - DNA, 100 bp, Homo sapiens
aggagctggagacagattgtaggaccgagcgcgggcaggcgggaggcaacggagctaccagccggcagcaagagcaactcaccaccagccttgggcccag

SEQ ID NO: 616214 - DNA, 75 bp, Homo sapiens
cgatgaccttggacacctccatgttatggacacggtctttcttattcagggagaagagaagtttacctttattga

SEQ ID NO: 616215 - DNA, 101 bp, Homo sapiens
gcgtcctttttcgtttttcggatgatgccttcaatactacctttatttccaccatagcctggagcattggtaagcgtcacactgccaaagtgagagctgct

SEQ ID NO: 616216 - DNA, 97 bp, Homo sapiens
cagcaacagtctgcgttctgtggtggggataagcagacccttccagctacgagttccagggagctctgtcctggtgaccgtgcccgggttatgacga

SEQ ID NO: 616217 - DNA, 100 bp, Homo sapiens
atgtgatgttggagaactacaggaacatggtcttgctgggcaatttctaaaccgggatgacattggcatcatcctcatcaaccagtacatcgcagagatg

SEQ ID NO: 616218 - DNA, 90 bp, Homo sapiens
gtggttcacccgctgccgggcaccgaggaccagctcaatgacaggagagtagttatcttgatggaattagaagttttgaagtcagctgaa

SEQ ID NO: 616219 - DNA, 83 bp, Homo sapiens
ctaatttgaaccatgtttggattgaagccgcctctgtattacttaccaggaaacatttactagggacaacttttgagtgtcag

SEQ ID NO: 616220 - DNA, 50 bp, Homo sapiens
attcattgtctcctgagaaagtggtggtgaagcagtattttccaatttga

SEQ ID NO: 616221 - DNA, 50 bp, Homo sapiens
ctgactttcagctatggaatcgcaacatggccaatctttcctaagctgct

SEQ ID NO: 616222 - DNA, 82 bp, Homo sapiens
ggatgttcatgggcagcaccatcgagccagaagcagtatttgtcctgacccaacatgagtgaagtttcctgcaagaaacggg

SEQ ID NO: 616223 - DNA, 100 bp, Homo sapiens
catggccagcgtcttggagcagctgaacgtcattaacggcatcctcttcattcctctcagacgagccaaactcaggctgtaccttgagcagctcaagcaa

SEQ ID NO: 616224 - DNA, 50 bp, Homo sapiens
caacctcagaggacaacgaagtgttcgttacccagcatgccacaatctga

SEQ ID NO: 616225 - DNA, 98 bp, Homo sapiens
tggtcactccagagaaggccatcaagctggcggccaacgactttttccggcggctgctcatggaagatgggttcccgtgtggccggtggttagggaag

SEQ ID NO: 616226 - DNA, 100 bp, Homo sapiens
tcacgctagccgatgccctggaaaagtgcctcaagaaaggggccaacaaatatgatgaggcagccagctacatccagagtaagtttgaggacctgaataa

SEQ ID NO: 616227 - DNA, 100 bp, Homo sapiens
tcagtatcgctacttcaaagggtactttttagaaccaaaggtatctgatggtataattgccccaggatatgaagaagaagccttgacaatactttccaaa

SEQ ID NO: 616228 - DNA, 75 bp, Homo sapiens
ggaggacttcatgaggaacctgcagctcaggatcctggtgcacctgagccgtggaggggctgaagtccagatctt

SEQ ID NO: 616229 - DNA, 82 bp, Homo sapiens
agagcgacaagccgctggcagccgcggatctcaccgccgctcagggtgctcttacagcctgttccaagtgtggcttaatccg

SEQ ID NO: 616230 - DNA, 75 bp, Homo sapiens
ggccagctgacggagatggtgcagaagatggaggagataaactgtgtgacgttccctcacccagacacgatgccg

SEQ ID NO: 616231 - DNA, 75 bp, Homo sapiens
cccgggacacgcaggaacggctccagcatcaagatccgtctgacagtgaacagagtatctgtcaggcaagagctg

SEQ ID NO: 616232 - DNA, 73 bp, Homo sapiens
gcactacaacaggaaaatcatattatagatggagtaaaggttcatcttccttcctgtacagtattttcaaact

SEQ ID NO: 616233 - DNA, 109 bp, Homo sapiens
agcttggaaggatgcttcagctcatcttaggctgtgctgtgaactgtgaacagaagcaagatccacttcctcatgatactgtcttctaactgggcttacttaaaggatg

SEQ ID NO: 616234 - DNA, 75 bp, Homo sapiens
cagctacaaaatcaatggccggacgaaagaggtacagaaggtgaaacagaacagaagaagatcataaagaaaagg

SEQ ID NO: 616235 - DNA, 90 bp, Homo sapiens
aagtcttacatgacacaatggatctgaatcatctcttgaaagggccgcgatgggcctcttggaacattggtgtgttcatctgcattcgat

SEQ ID NO: 616236 - DNA, 82 bp, Homo sapiens
agatcatctacgacgagaaccgggaggaagttaacatccctaataggagggttctggttactggtgccactgggcttcttgg

SEQ ID NO: 616237 - DNA, 101 bp, Homo sapiens
cccagaggttacccagcagaccatagagctgaaggaagagtgcaaagactttgtggacagaaagtggagaatgaggacatgaataaagaccagatcttgct

SEQ ID NO: 616238 - DNA, 97 bp, Homo sapiens
gcctgggggtgcgcgcctgcgacctgcccgcctggtgttcggtgaccagtgacttggattttccaacacaagtcatcccattaaagactctgaatgc

SEQ ID NO: 616239 - DNA, 75 bp, Homo sapiens
gcaccaggtcatgctaatgagacaggggagagtttggggtgtacctggtgtctgatggcagcagccgcccttatc

SEQ ID NO: 616240 - DNA, 130 bp, Homo sapiens
aagaacccacaggtgcatttcacagcactctgggcgaaaattggatgtgaaaatgaagccagaccgagcttcagtatcagacacagcacagcagccatctgaagagcaaagcaagtctcttgaaaaaccg

SEQ ID NO: 616241 - DNA, 101 bp, Homo sapiens
ctggccaagaagctcctggcaaaactgcgctttctggctgaggaggagatggacagtgaggaggaggaggaggtgcctcagcccatgccaagcatcccgga

SEQ ID NO: 616242 - DNA, 101 bp, Homo sapiens
tttcacatccttgtctgtgaagctaaactcaatgctgctgtgtgggaagaagatttgtaaagaaaactcttagacatgggagatgaagtttacgatgatgt

SEQ ID NO: 616243 - DNA, 131 bp, Homo sapiens
aagctcaaaggcatcattataatgggagaggatgatgactcacacccctctgagatgagactatcccttcccactggaggcatgtgatgagaggaaatcaccgaaaacgtggctgcttcaaggatcctgag

SEQ ID NO: 616244 - DNA, 50 bp, Homo sapiens
cttgttccagaagtcaccttcaggccatcaccatcgaggctgagccaaga

SEQ ID NO: 616245 - DNA, 100 bp, Homo sapiens
cgctgctgctgccgctgccgccctgagtcactgcctgcgcagctccggccgcctggctccccatactagtcgccgggacaagaatccttcaagaaacagg

SEQ ID NO: 616246 - DNA, 100 bp, Homo sapiens
ggaactacgtcttctctgcattttgtccacatgagaggattacctttccaagccaatgcccaagacattataaacgatgttttagaagaatgtatgtctc

SEQ ID NO: 616247 - DNA, 100 bp, Homo sapiens
gcctcctccgggaccctccccttggaccgagccgatcgccgcggggcagttcgggccggctgtcctggcgcgaacccttaggagaaatcttgagagtgga

SEQ ID NO: 616248 - DNA, 124 bp, Homo sapiens
ccgtgggctgcagtacctgctggagaagggagactacaaggacagcagcgactttggggcccgtcaccctcagaatgaaacagtgattcagagtgcatataaaagcctcatacaacacttggaa

SEQ ID NO: 616249 - DNA, 100 bp, Homo sapiens
aagatgacagacttggacaacatgtcccaacattacatcccaactctgtttgctggctacacggacaacctggtgcgagtgtggcaggtgaccattggca

SEQ ID NO: 616250 - DNA, 75 bp, Homo sapiens
cccggggctaatgttgacaacaggctcgaggacctctttgtttttagacatgaattggccataatgagactagca

SEQ ID NO: 616251 - DNA, 100 bp, Homo sapiens
ccctcaagtgtccagaatttccaattacagacgacaaagtagcactgttatagctgaggtggtaccagtttaagaagtgagaacttcttcactgactgaa

SEQ ID NO: 616252 - DNA, 51 bp, Homo sapiens
tatgaatggaaagaaactgctagactgaaactgttgaggagcccatggagg

SEQ ID NO: 616253 - DNA, 75 bp, Homo sapiens
ggtggtgaaaaatgaccctgaactggaccagcaggtatcatgatattagctggtttgacatcaagtcatttgtga

SEQ ID NO: 616254 - DNA, 95 bp, Homo sapiens
gatcgtgtgcagaagaaaaccttcaccaagtgggtcaacaagcacctcatcaagaaaccagcctggacaccaagtctgtgtcagaaggccacctc

SEQ ID NO: 616255 - DNA, 101 bp, Homo sapiens
cacttcttcacggaccagtttcagttcgccgatgggaaacccggagaccaaatccttggtcactcctggaagcaaggcggctctagctaatttatgtattg

SEQ ID NO: 616256 - DNA, 97 bp, Homo sapiens
ttggaagaagatgtctgcagagtattggtaaaggttttcaaggtgtcatgaaaagatggggatttaaaggccagcctgctacgcatggtcaaacgaa

SEQ ID NO: 616257 - DNA, 50 bp, Homo sapiens
ctttgccgccaccatgcccaaaacggatgctcgtcagaagttccgctctg

SEQ ID NO: 616258 - DNA, 82 bp, Homo sapiens
agcgtttccccgcggccttcgcgccccaggcttcgcggggctacatgacatcaggatctggaaatagtatattcctatttac

SEQ ID NO: 616259 - DNA, 76 bp, Homo sapiens
ttcacatgtatgctcatcggggagatctttgagctcatccgtggtccttcagcatatctctgtgctgcagacaaca

SEQ ID NO: 616260 - DNA, 100 bp, Homo sapiens
tggagagaaaaaagaagagagcctaactgaaaggaagagggagcagagcaagaaaaaaaggaagacgatgacttcaggtggtgatcgtggcagaggtggc

SEQ ID NO: 616261 - DNA, 83 bp, Homo sapiens
cccagacaggtggcgacggcagaggatgaagaactggtggctgaagcacataacctctgcaccctgctagaaaatgccataca

SEQ ID NO: 616262 - DNA, 100 bp, Homo sapiens
ctctgaagtcctcccaactaggcagagaaatcgacttaattcagtgcacaaatgagatgaatgtgaacatcccacagttggcagacagtttatttgaaag

SEQ ID NO: 616263 - DNA, 100 bp, Homo sapiens
ctattcccagacagagagaaagagcagaagagcagattacctgcaaaggacagacttaggcttccagacagttcgtgttgggacagtgggcacccctgtg

SEQ ID NO: 616264 - DNA, 75 bp, Homo sapiens
tcgacctgctaacagaactggaccttttcgctccgggaagcagtttgttcgctatataaacatgttgataaacga

SEQ ID NO: 616265 - DNA, 83 bp, Homo sapiens
aacgtgaccgtcactgacgtggacatcgtcttcagcaagatcaacatcaagatggtgctcatgtggaccagtggtgacgcctt

SEQ ID NO: 616266 - DNA, 100 bp, Homo sapiens
tggaagcaagggagccatggggcctgaacatgcaggcagctcagcctaaggggaatccagttgctgctcctacagaacagagcaggacccaggatgcaag

SEQ ID NO: 616267 - DNA, 75 bp, Homo sapiens
gtcgtctatgggggctactcgaaacagtcaccttcaggccattcagaggaggaaagagaggggaatatgaagtca

SEQ ID NO: 616268 - DNA, 98 bp, Homo sapiens
ctgggaggtcatcgaaggctaccgggcccagcacagccagcaccgcacgccctgcaagggagacacaggcagccatgccgcgcagcccaacatccagc

SEQ ID NO: 616269 - DNA, 75 bp, Homo sapiens
ccggatcctgaggaggcagctgcggtggcagctgctgagttctcggtgaagtaaaatgtttattggaggcttgag

SEQ ID NO: 616270 - DNA, 95 bp, Homo sapiens
cttccctcgggaattccacctctgcgtttttccctccagtgttctaagaacggaagcatctgggctggatggaatttagcatcaagcagagtccc

SEQ ID NO: 616271 - DNA, 100 bp, Homo sapiens
gcgccgcgcgcgggcctcgcacagatcgcctgctttgggccttccatgtcgtcagcattccacgcctacgggaaggcaggcaagatgctggtggagacca

SEQ ID NO: 616272 - DNA, 98 bp, Homo sapiens
ctccgttagctaattaaaacatttttcagggacgtagccatccagagacaatgcagatcttcgtgaagactctgactggtaagaccatcaccctcgag

SEQ ID NO: 616273 - DNA, 90 bp, Homo sapiens
gggagccctcgcgacgcgcccggcccggagcccccagcgcagcggccgcggcaacatttcatttgttgcatttccagtttccaataccaa

SEQ ID NO: 616274 - DNA, 100 bp, Homo sapiens
ggatactcagtcaaccaacatttactgagcatctacttcgtgccggttttgaatatagccgttctggaaatcccactaggaattgccttgaaaaagcagt

SEQ ID NO: 616275 - DNA, 90 bp, Homo sapiens
cacatcatataagtctgtgcagtcgactcctttacatctagcagcgggctacaacagagttcgaatagttcagcttcttcttcagcatgg

SEQ ID NO: 616276 - DNA, 75 bp, Homo sapiens
aatggcctggactcagccctggaccaagtgcagacttcagcaggaaatcctagatgtccagtctcgtctctttga

SEQ ID NO: 616277 - DNA, 100 bp, Homo sapiens
tctcggagtaggaagctcgggcgctccggctgtaaggagccgcggcggggggaaaatggagcccttcaccaatgcatcagccactatgtgattgtcatgt

SEQ ID NO: 616278 - DNA, 76 bp, Homo sapiens
tttccatctcttcagagatgaaccaggtctcggcgcggaagatggccggcggcgtggacggccccatcgggatccc

SEQ ID NO: 616279 - DNA, 50 bp, Homo sapiens
cagcgactggcccaagttctttgaaaagggtgacattacttccattcctg

SEQ ID NO: 616280 - DNA, 74 bp, Homo sapiens
tttccagaagtgccggacgtcgggcagcgtctatatcaccttgaagaagtgtggccaaacaggagaagaagaag

SEQ ID NO: 616281 - DNA, 80 bp, Homo sapiens
ggaagttcctgaaggatcacagttacaaggctgctcccgtcagctgtttcaagcacatttggagcaagaggtggtggtgg

SEQ ID NO: 616282 - DNA, 75 bp, Homo sapiens
gctgtattcagctcaggaccaggcaccttctgtggaagagccccccaagatgaacccagtggtggagccactgtc

SEQ ID NO: 616283 - DNA, 100 bp, Homo sapiens
gctttaaagaatacacttcaagactcgggacctggttcgggccggggtgctgaaggagaagcccctgtggtttgacgtatatgacgcctttcccccgctg

SEQ ID NO: 616284 - DNA, 100 bp, Homo sapiens
gagccccgcggctgagaccccgcagcctggaggagggctgtccggggctttgggttatgaaggacagaatctggcaaagatcctcaaggatttagagatg

SEQ ID NO: 616285 - DNA, 83 bp, Homo sapiens
aaaggaattctgtcttcacaagcagaaggacagagcgggatgccaccagcttgtccaaagggaagttccaggagctcctggtg

SEQ ID NO: 616286 - DNA, 74 bp, Homo sapiens
ggagactgttcaatcaccagggtttcagaaaagggatccctaacatcagaagagtttgctaagcttgtgggaat

SEQ ID NO: 616287 - DNA, 110 bp, Homo sapiens
tctccctctgcccccccttccccacgcaaccccagatccatttacactttacagcttgggcactgtttaaaggaaagttccgagaaggcatcgacaagccggaccctccc

SEQ ID NO: 616288 - DNA, 75 bp, Homo sapiens
caagttttgcaagatgattctgtcgaacccaaaatttgctgaacatggaggtcgatttggtcagacaacgccacc

SEQ ID NO: 616289 - DNA, 100 bp, Homo sapiens
ggaaagtcacccggcctgacagtgggcacctgtatgctatgaaggtgctgaagaaggcaacgctgaaagacaaatttacatgtattggagaccagaccag

SEQ ID NO: 616290 - DNA, 75 bp, Homo sapiens
ccaggacagtcagtctggtactaacaatgcaggggatggcattcctactgtatttgtggcagtggcaggcagaag

SEQ ID NO: 616291 - DNA, 82 bp, Homo sapiens
gacggctgctcaaacatcagggtcagcccaaggccaaccccactgtcactctgttcccgccctcctctgaggagctccaagc

SEQ ID NO: 616292 - DNA, 90 bp, Homo sapiens
cgagttcaagcctccgtgggtgcagttggtcgccagagacggtaaagaacaggtccaagaaaagctcaaagaaagcaaataccagcagca

SEQ ID NO: 616293 - DNA, 100 bp, Homo sapiens
ggaaaactgtttcagttgcagactttaggcctgaaaggttgcaaaagcttctcatttcagagagatgccaggatcctaagtgcctgccaaacttaccaat

SEQ ID NO: 616294 - DNA, 51 bp, Homo sapiens
agccaccaggaagttaaagttcaggtattaatcaagaagagctatgaccgg

SEQ ID NO: 616295 - DNA, 74 bp, Homo sapiens
caggaggagaaggacgagtggatcaagtccatccagtgcgaggaagaagatgtggagatgagtgaggacgccta

SEQ ID NO: 616296 - DNA, 101 bp, Homo sapiens
ttggatttggctacacacttatagatcttctgcactgtttacaggcacaggtgaacccgtgagcaactgtggtacctccacctgtcccacaacctacaact

SEQ ID NO: 616297 - DNA, 75 bp, Homo sapiens
ccgacagagtcctccgtgtcctcccccgcatgacccccttggagccgcaaagacagcctggaaagtgacagctcc

SEQ ID NO: 616298 - DNA, 95 bp, Homo sapiens
ccaacagaggggcaaatcagagtgaagaggaagccagaagatgggagagacatttttgaagtgtcacctccttcagcaggacagaggctaagagg

SEQ ID NO: 616299 - DNA, 88 bp, Homo sapiens
aaggattccaagtaactcttatttgaaacaagtggaagccggtgtctgtgttaccatggagatggtgaaagatgccttggaccagctt

SEQ ID NO: 616300 - DNA, 100 bp, Homo sapiens
ctcatcccctggatgggggaccacaagatcctcatcgacagaaatcgacttaaagcctccagagaagtagaatctgtagaccttccacactgccacctga

SEQ ID NO: 616301 - DNA, 82 bp, Homo sapiens
ggagggccagggtctcccggagcaagagtgagccatggagctacgtgtggggaacaagtaccgcctgggacggaagatcggg

SEQ ID NO: 616302 - DNA, 51 bp, Homo sapiens
cgtacgtggtggagctctgcgtgtgtctacttccccagcaggacagcatca

SEQ ID NO: 616303 - DNA, 100 bp, Homo sapiens
gctctggctgtgctgcgcggcccccgcgcatggtggtgttcccactgatgaagagcaggcgactgggttggagagggagatcatgctggctgcaaagaag

SEQ ID NO: 616304 - DNA, 83 bp, Homo sapiens
gtttgcgcagtacccccggagggcggaaggccgccgaggctcttgtcaggatggtgaagctgttcatcggaaacctgccccgg

SEQ ID NO: 616305 - DNA, 100 bp, Homo sapiens
tgcagcaacagcagcagcaacagcttcgaaggcgaccttccttgctttcagaatttcacccaggttctgacagtgggagaagttgcagatgacgtccagc

SEQ ID NO: 616306 - DNA, 75 bp, Homo sapiens
acctggaggccaagaggctgttgaaggagttccaggcacgttaccggcagctggaaatgaatggggtgctgaaag

SEQ ID NO: 616307 - DNA, 100 bp, Homo sapiens
cgacgagcgctgcactaacgcaggatccggctgccgaaggtcctcgccagcccccttacccaggaatggaacaacctccacaccatccttactatcagca

SEQ ID NO: 616308 - DNA, 83 bp, Homo sapiens
caaatacccctttgaattaattatggctatccagaatataagaagtttttagaaacctactgtgtggaggaagagaagaccag

SEQ ID NO: 616309 - DNA, 83 bp, Homo sapiens
cacgaggcctgttgtctaccaagtgcagtttaaatacttgtagtgaacaggactctgagccaggggcccggcttacctgccgc

SEQ ID NO: 616310 - DNA, 51 bp, Homo sapiens
cactgagctgccataccccgaaagatgtcgtgatctcaacagcttgtcacc

SEQ ID NO: 616311 - DNA, 100 bp, Homo sapiens
ggctacttcctgattaaacccactctccacataaacctatgatggacttgttgatattcctttgtgcacagtatcacttaaatccatcaagttacacaat

SEQ ID NO: 616312 - DNA, 96 bp, Homo sapiens
accgactttgaggatctggaggacggagaggacctgttcaccagcactgtctccaccctagagccagattctactgcaactgaaagagcaattgcc

SEQ ID NO: 616313 - DNA, 50 bp, Homo sapiens
ccacaacttcattgctgggaaaagggcgatttgatgaaactgttatcgaa

SEQ ID NO: 616314 - DNA, 100 bp, Homo sapiens
agagggcagtgaccggcaccttctgtgcgtcctggactcctctgagaaacagctggctggcccgcacagaccccaaggatgtggcacgagtagagagcaa

SEQ ID NO: 616315 - DNA, 98 bp, Homo sapiens
gctggcgttgcagctaggccagcggctcggcggtgagatcgtcagcgctgactccatgcagtgcatgcaagagatgggaaatggaaaggcaaaccgac

SEQ ID NO: 616316 - DNA, 88 bp, Homo sapiens
aagaaggccctgagtcaaagaagatgcctcgaactaaacaaattcatcccagaaatctaagaggagtcttttagtcctgctatacagc

SEQ ID NO: 616317 - DNA, 97 bp, Homo sapiens
agaagcacagtcagcaaaagcaaagacccctcggggctgctcatctctgtgatcaggaatcaaacattttaagtccagtgcaggatggaacaaagaa

SEQ ID NO: 616318 - DNA, 96 bp, Homo sapiens
cgatgaaatccaaaggtgaatcttttggttggtgattttgatgatagccacaaagcaagcagggtacaagaatattccacagatgtcctttgatga

SEQ ID NO: 616319 - DNA, 75 bp, Homo sapiens
tggcctgttccagagtctttttggccagatcaaaattcgccaacactagagtctcgctctcagtcaaaatctcca

SEQ ID NO: 616320 - DNA, 75 bp, Homo sapiens
cttgctcgtcatcagagaattcatactgcccttgaaggtagtggacccagatcatcccctcgcagcacttgttcg

SEQ ID NO: 616321 - DNA, 100 bp, Homo sapiens
ttggagttccaggtgttgggggccttggagggagtcctgacctgggggctgtggagctgcgcatcgaagagctgcggcaccacttccgagtggagcacgc

SEQ ID NO: 616322 - DNA, 74 bp, Homo sapiens
aacatgactgataccactataatttagtgttctctgggtgccctgcagacctttggatcctgccaccttgctgg

SEQ ID NO: 616323 - DNA, 75 bp, Homo sapiens
tgttccgcttctcagaggacgccttcaacaccaccttcatctccaccatcgagcctattgtgaagaatggcaggc

SEQ ID NO: 616324 - DNA, 98 bp, Homo sapiens
aactgctgacgcttgatgagaaggacccacggcgtctgttcgaagataaggatgacattcggctgctgccgtcagcattgggtgtgaagaagagaaaa

SEQ ID NO: 616325 - DNA, 100 bp, Homo sapiens
gctcagtctgcggccaagactccgtcctgcaagggaacactgactatgccaaatggagactacattgaaggttattttagtggagaatggggatctggga

SEQ ID NO: 616326 - DNA, 80 bp, Homo sapiens
gcggtaatcctgggagcaccagcgctgccacttgtacccgcagacattatgaaaggttttctcacgatgagtcggaggag

SEQ ID NO: 616327 - DNA, 75 bp, Homo sapiens
actgcctccagatggaaggatatctcacgaatttgctttgagtcatgtgctgttcctggggcttggatgatgtag

SEQ ID NO: 616328 - DNA, 100 bp, Homo sapiens
aaagcttttgttaattatcttaaatacttgctttactggaaagacccagaatatgccaagtatctaaagaaccaaccggtgagccctctcctaagagacc

SEQ ID NO: 616329 - DNA, 82 bp, Homo sapiens
gccctctcgctttccctctcgcgtctctggctgcagggcgtgatggtgggcatgggtcagaaggattcctatgtgggcgacg

SEQ ID NO: 616330 - DNA, 74 bp, Homo sapiens
tgcagctgcctcagttcttagcgcagataatcaggacacccggagcaacctggacataactgtcggctctcggc

SEQ ID NO: 616331 - DNA, 100 bp, Homo sapiens
gtcgcctcttcctttttcgacgcctccgccgccgcctgaggaggcgagctagccgggagttacaccgccaccgccagatacttggcatatcgaaatttta

SEQ ID NO: 616332 - DNA, 83 bp, Homo sapiens
tgtgaaaacttctgagaaacttggagagtggaatgagaaagtgacccagtcagacctttcaaaaggtgatgacctatcaacag

SEQ ID NO: 616333 - DNA, 75 bp, Homo sapiens
tcgcgtcttctcttccctcgggtgacttgagactctatcaagaagaatatctaatccgtaccttgaacatacgcc

SEQ ID NO: 616334 - DNA, 74 bp, Homo sapiens
cctcaactctctatgtttgccagtggtttattttacaggactgggagtaaactaggtatttctcccctgatgtt

SEQ ID NO: 616335 - DNA, 100 bp, Homo sapiens
ctccgcgcacatcactcccgagtggaggaagcaatacatccagtatgagcgcaaatctgtccaaggctgcctggggagcattggagaagaatggcaccca

SEQ ID NO: 616336 - DNA, 100 bp, Homo sapiens
gtcggtgacaatccaggctcccggggagcccctgctggacaatgagtccacacgaggggatgagcgggctttcctcggagacgggtggcatggggagcag

SEQ ID NO: 616337 - DNA, 100 bp, Homo sapiens
tgaccatgatggaatgcttgacagagatgagtttgcagttatcgtcagtatttaaacagatcacatcatgcgtgagtacaagctagtggtccttggttca

SEQ ID NO: 616338 - DNA, 75 bp, Homo sapiens
gagcattacaagccagcctctgggaccgaggtgctggagaatctggtaaaagcaccattgtgaagcagatgagga

SEQ ID NO: 616339 - DNA, 75 bp, Homo sapiens
gttaaatcagtccacggatgatatcaacagacgggagactgaacttgagattgagaggatccagaatccagatct

SEQ ID NO: 616340 - DNA, 98 bp, Homo sapiens
agctgatggcatagttatgagaggggtgaagactgcgactgcatttccaacagaccctgaggacaattgggaagaatatggagtcttgctctgtcgcc

SEQ ID NO: 616341 - DNA, 98 bp, Homo sapiens
tctgacctccgcgcgacgtacccgccgccgccgttggctggagtacctggagtagaacagaaaaattattatgtctgtgttcccttgggactcattgg

SEQ ID NO: 616342 - DNA, 87 bp, Homo sapiens
taccatcagcagctcatccctgtgcatggtgatcaccatctattatggaaaccgaatgcggtgctacaactgtggtggaagccccag

SEQ ID NO: 616343 - DNA, 75 bp, Homo sapiens
cccggtcacagagtgcaccgtatcctgtcacttctggatgtgaggtacaccaggggttggaaaaaccacactagg

SEQ ID NO: 616344 - DNA, 75 bp, Homo sapiens
tctttgcatccggagagtggacaagaaaatctattaatgagatgaagcggttggaagaaatgtcaaatatgtttc

SEQ ID NO: 616345 - DNA, 100 bp, Homo sapiens
gctgcgaactgggctgcaggaggtggagcgctcacggctggaggctcggcgggagctgcaggagctccggcgtcaggtaatcaaatgcaaagcagctgtg

SEQ ID NO: 616346 - DNA, 83 bp, Homo sapiens
gtgcagccgcgaggaggcgcgggaggtgttcgagaacgaccccgagacgatctcctgggaggcccccgtggagaagaagactg

SEQ ID NO: 616347 - DNA, 100 bp, Homo sapiens
tgcgcgcaggctgggctgcaggctctcggctgcagcgctggattgcagagggaatggcatacatcgagcggaagaactacattcaccgggacctgcgagc

SEQ ID NO: 616348 - DNA, 82 bp, Homo sapiens
cggcttggacgaagatggggagaaggaagcgagactcatacgcaacctcaatggccaagatcaaggctcgagatcttcgcgg

SEQ ID NO: 616349 - DNA, 100 bp, Homo sapiens
cactgtcgcagggacaggagtactccacagaggataaatttcaacctccggggccacaatagcgagagtacctgtggagaagaaacaatggattccttag

SEQ ID NO: 616350 - DNA, 96 bp, Homo sapiens
ctgattgtgatattgaaggtaaagatggcaaacaatatgagagtgttctaatggtcagcatcgatcaattattggccgtgacttggcgagcacgac

SEQ ID NO: 616351 - DNA, 75 bp, Homo sapiens
gcgatttgcctggtgaaggggtcccataagaccctgaagctggtcgtcaaaaggggccagcagcctcccccgatg

SEQ ID NO: 616352 - DNA, 73 bp, Homo sapiens
aactcctcaggcttcacccatgatcgagagaagcaatgtggaatgatgagaagacagcagctgattacaagat

SEQ ID NO: 616353 - DNA, 100 bp, Homo sapiens
actttatgatcacatttacgaacagtttcctgatgaagtaaataagggtgtcgtagtcattcttcagcacaattcttaattggagaccaagaaccctggg

SEQ ID NO: 616354 - DNA, 83 bp, Homo sapiens
ctaatacccagttcattgagaatgttcgagaacttgtcttggacaattgcaaatcaaatgatggaaaaattgagggcttaaca

SEQ ID NO: 616355 - DNA, 100 bp, Homo sapiens
atcgtgtaccgcaccatggagatcttccagctcctgaggaacatgcagaacgagtccctggagaggcagatgcgcgagcaggaggagcggcacgtgcggg

SEQ ID NO: 616356 - DNA, 98 bp, Homo sapiens
cgcggagtatacaccatgagcaaagctcaccctcccgagttgaaaaagattcttacagaagcagagattgatgctcaccttgttgctctagcagagag

SEQ ID NO: 616357 - DNA, 75 bp, Homo sapiens
gagagactgtggagtttgatgttgttgaaggagaaaagaaactaattctgaagcaagcccttatagttgtgctgc

SEQ ID NO: 616358 - DNA, 98 bp, Homo sapiens
ctcagcagcttccaagagaaccaatggaatggagaagtttaattggttggggtcagataagaagaggagtgacaatcaagccaacagtagatgatgac

SEQ ID NO: 616359 - DNA, 82 bp, Homo sapiens
cgctgatctacaagaaaatccacaagaacgcactttcctcccagctgctgatgcaaggaatcccctgggctcccgtccactc

SEQ ID NO: 616360 - DNA, 83 bp, Homo sapiens
ctctgaacatactgccttatgggacagatcaattaactgcctgtatccatggatcagctgctcttctatacccaatgtattgg

SEQ ID NO: 616361 - DNA, 98 bp, Homo sapiens
tatggaggagctcgatggcgagccaacagtcactttccctgttcttcaggacaatttagaagtttatttgggattacaacagtttatagtcacttcag

SEQ ID NO: 616362 - DNA, 101 bp, Homo sapiens
ggaaatcctaatgacagtctccaaattcgcctccatctgtaccatgcgccacagcaacatcctcagagtctgagcgaactgcgcccagcgcgggcacggag

SEQ ID NO: 616363 - DNA, 102 bp, Homo sapiens
gcggcttggacgactcggagagccgcgtttagtgggctacagatggcatggcatctaaaaccttacaatgcttgattttcatacagaagacactttggccag

SEQ ID NO: 616364 - DNA, 88 bp, Homo sapiens
caatcctcacattcaagctgataggctgcgctaccggaatgtcatccagcgagtgattaggtgcgtttttgcaagactgcgcactcac

SEQ ID NO: 616365 - DNA, 98 bp, Homo sapiens
atgggtgcatgttagtgctcaagagcctcattatctaccacccgagatgccccaagagccccggagctatgtggagtctgtggcacggacagcggtgg

SEQ ID NO: 616366 - DNA, 100 bp, Homo sapiens
tggaatgtcttcaaagaatattaaaaaatctggagggactccaacttcaatggaaggcaacagcccccaggggagcaaccagggagtcaaaatcacaccg

SEQ ID NO: 616367 - DNA, 75 bp, Homo sapiens
acatccaaaagattgggttggtatattcaagggtgtccgcaatgttgccagtgtctgtctgcagattggctaccc

SEQ ID NO: 616368 - DNA, 98 bp, Homo sapiens
ccttcgcggaccgagcctgacggagccggaggctgggagccgcggcggcctggggacccagatgatgtggtaccagttggccaaagaagagcctggtg

SEQ ID NO: 616369 - DNA, 75 bp, Homo sapiens
tggaaaccaaagtcaagcatgtgataaagcagatgactatgtccacatctccagcaaaccgtgtgacctgcactg

SEQ ID NO: 616370 - DNA, 101 bp, Homo sapiens
gacttcacggagctctggagaaacatgaagttcgggactatcttctggtatgcttcagaagtgtccttctgttgatgacttcgtaagtgccctcgtttccg

SEQ ID NO: 616371 - DNA, 105 bp, Homo sapiens
gcttactggaaactggatgcagcaaggaaataggatttaaccgctctctgcctcccaggtcaaaatgcagatcttcgtgaaaacccttaccggcaagaccatcac

SEQ ID NO: 616372 - DNA, 82 bp, Homo sapiens
gaacccagcattttcggcaaccgctgctggcagttttgccaggtgtttgttaccttggtgctgatattcgtggcttcagtgc

SEQ ID NO: 616373 - DNA, 75 bp, Homo sapiens
ttcgccagcccgtgccgcgagcgcggcctgcaggaggggtcgggccccggctcagtggtcccaggcagctcgggt

SEQ ID NO: 616374 - DNA, 100 bp, Homo sapiens
cccgcagcaccgctactcggagggcgagcggacctccctggagaaggatcttatggttggtgatgaggcaagtgaattacgatcaatgttagaagttaac

SEQ ID NO: 616375 - DNA, 75 bp, Homo sapiens
ctaagagatatctgcaatgatgtactgatttggagcaagaggtggtggtggccttcccccgaagaaatttggtaa

SEQ ID NO: 616376 - DNA, 73 bp, Homo sapiens
ggatggagtgcctccaaaggttgctgagatcctgtttgaccaaactcagagatcaattaaggcacagcttcag

SEQ ID NO: 616377 - DNA, 101 bp, Homo sapiens
ctcaagcatgttactgaacagcaaagcatggttcagaaacagctagaacaggcatttattgaaatggcaaccacagaggatgctcaggccgcagtggatta

SEQ ID NO: 616378 - DNA, 100 bp, Homo sapiens
tcgcagctctacgtgtaccgcctcaaccgcgacgccgaggcttccgaagatcttctcaaggaacactacgttgacctgaaggaccgtccattctttgccg

SEQ ID NO: 616379 - DNA, 90 bp, Homo sapiens
agtcctgtcctcttctgaccaaagagcataatcaccagcaacacccgggacaataatacgggggccacctacccccacctgaacttcagc

SEQ ID NO: 616380 - DNA, 101 bp, Homo sapiens
cgggcctgggcaggcggagcagggccttggaccccgcggcgcccctcggcctcggagcaacgagcgcagcgccggccggatcacctcaacagtcacgtcag

SEQ ID NO: 616381 - DNA, 82 bp, Homo sapiens
ggaagaactagtttcccaaacagatgttaagacattcttggaagccttaccggcagttgtgaaaaacttcaggacaaaaatg

SEQ ID NO: 616382 - DNA, 100 bp, Homo sapiens
ccttttccctctccctttccctaaggtccattcaactgcaattgaatattggagttgagcagattcgagttgtacatagagatggaagagtaattacact

SEQ ID NO: 616383 - DNA, 96 bp, Homo sapiens
tgaatttgctaaacttaaaagcaagctggttctctgggatataaataaggatatgggcactgtggtcctgggaaagctggaatcaggatctatttg

SEQ ID NO: 616384 - DNA, 73 bp, Homo sapiens
acctacagaaacaaaatgtcaacaaattgatggaacagctgaatagatttgctggatttggtattggacttgc

SEQ ID NO: 616385 - DNA, 100 bp, Homo sapiens
atcgccaagagatcaaagataaaatcttttgtgaaagtgtataactacaatcacctaatgcccacaagttttaacttctagtcatggcgaatgatcgcag

SEQ ID NO: 616386 - DNA, 75 bp, Homo sapiens
gccgtgggtaggagatggagaaattccaagttcagattctccagccatgtttcctgagagactgggagttgcagg

SEQ ID NO: 616387 - DNA, 100 bp, Homo sapiens
tatggtggaggcgcaaaactcagccacaatgggattttcaccctttactcttacagggcctgtctgtgctcattgtggccatccacatcctggagctgct

SEQ ID NO: 616388 - DNA, 100 bp, Homo sapiens
tgatcaaggaaatcaagaactacatccaaggcatcaacctcgtccagcggaaggagagttttacatggaagtggcttacagaaacttggcgctgaggtgc

SEQ ID NO: 616389 - DNA, 100 bp, Homo sapiens
cagaaggcccgaggtgaaggtgtcccggacccccagggagggggtcagctcaggctcccgctggtgtccctggagcatgggaggctgctgagcgtgagtg

SEQ ID NO: 616390 - DNA, 96 bp, Homo sapiens
ggctgccgagggtgttcttgacgattaatcaacaggttgatgataattagaagcatgctttccactgaacttcccgacaacatttgttatgcagaa

SEQ ID NO: 616391 - DNA, 121 bp, Homo sapiens
cttagctatttacatcccattccctgaagatgattctaattcaacaaatcataacttgggagaagtgagtcatctcattcccctccgtggatcagaggacttggactagatagaagcatgt

SEQ ID NO: 616392 - DNA, 89 bp, Homo sapiens
ctcaagtacaacccaatgaggatgtccctggtagatttgggaaagaagcttttagaagcggcacgagcaggtcaagatgatgaagttcg

SEQ ID NO: 616393 - DNA, 100 bp, Homo sapiens
aggatatcactgcccccatcccggggcccaccattaccagcagggagagggaggcagaagacgctggggaggaaacgtgggcacaagggttccttcaagg

SEQ ID NO: 616394 - DNA, 82 bp, Homo sapiens
atccgccgcccgtccacacccgccgccaggcatcatggccgccctcagaccccttgtgaagcccaagatcgtcaaaaagaga

SEQ ID NO: 616395 - DNA, 87 bp, Homo sapiens
ctggttttgtggcggctgctgctagagctggagcatttgccgggaaaaccatccccttggttatccgttgatactgccttgtatatt

SEQ ID NO: 616396 - DNA, 100 bp, Homo sapiens
gacatacttgaaacaaaataggaaaatggcagcaaactcttcaggacaagctaatgggaatgacagcaagaaatttaaacgagatagacctccctgttcg

SEQ ID NO: 616397 - DNA, 82 bp, Homo sapiens
cccaggaacagccccgtgccccccacaaagaaagatgaaagcacccccgccaagaagacagacattccctggcggctgaagc

SEQ ID NO: 616398 - DNA, 50 bp, Homo sapiens
ggtgcaactattcgcagtccgagcggtcaaaatgcagatcttcgtgaaaa

SEQ ID NO: 616399 - DNA, 96 bp, Homo sapiens
tgtagatctagaagtcactttggaagaagtatatgcaggaaattttgtggaagtaaatgaaattgcctttataaatacccttgaagcccagaataa

SEQ ID NO: 616400 - DNA, 147 bp, Homo sapiens
ggaaccttctctctttcgctctttggactaatgggagttgcttttggaatgaatttggaatcttcccttgaagagttaagtgggcagaccaacatccacctcagcaaaaacttcttcctgacgaatcgcgccagggagcgctcagac

SEQ ID NO: 616401 - DNA, 97 bp, Homo sapiens
gcctacttcatcaactcctcgcataacacctatctcactgtgcagattctgggaaagtgaactccacggaagactcagaaaccaagttctaattcag

SEQ ID NO: 616402 - DNA, 100 bp, Homo sapiens
aggtcaccgccagcacgcgcctgcttcccgtctgcgcgagtccacgcagctccccaggattggaggctgttgtcattggagaagttcatgagaatgttac

SEQ ID NO: 616403 - DNA, 100 bp, Homo sapiens
aagacacgacatctagccctgaatctgcaggttagaaaatggatttctgactggaatctcaccactgaaaaaaagcacacccttttaagactactttatg

SEQ ID NO: 616404 - DNA, 83 bp, Homo sapiens
cccatctggccgggcagtaccttcttcaagagaaatggagcccttctccaagcgcggagacccacatcaagggcttcacactg

SEQ ID NO: 616405 - DNA, 100 bp, Homo sapiens
gtcctgtgctctgtggaggagctggcactggcccattacagacgcagcggttttgaccaggattcaagatggaaaaggtgatgtaaccattacaaatgat

SEQ ID NO: 616406 - DNA, 90 bp, Homo sapiens
gtaccacactgaggagcgcggccagccctgctcgcagaattaccgcctcttctttagaaaggccacttaaggatgcagcaagaaggagcc

SEQ ID NO: 616407 - DNA, 100 bp, Homo sapiens
ctcctctcctctgattagagccactgttggtacagcagggaagaactggaaactcagagaaagaaactgcccttccatctacaaaagctgagtttacttc

SEQ ID NO: 616408 - DNA, 80 bp, Homo sapiens
ggggccttccacaccccctccgtgggtgtgtgaatgttcgtggcatcagagagaaagatgagagctcaccaggtgctcac

SEQ ID NO: 616409 - DNA, 73 bp, Homo sapiens
aagagccctgcaatttgaagatacatgagacagcagccaaacccccagccgtgctgaaggccgagcaggcggc

SEQ ID NO: 616410 - DNA, 75 bp, Homo sapiens
gggacctgggctgggaacccgcggtggagcgggacacgaacgtgctgctgatgcaaggaatcccctgggctcccg

SEQ ID NO: 616411 - DNA, 98 bp, Homo sapiens
ccgtcgccagcggagcgaacccgagagcgtggagcgggctgggccagaccagattacagaggggtattgatttgccttgcccccgcccccaccatcac

SEQ ID NO: 616412 - DNA, 100 bp, Homo sapiens
acacaggcaccatcccaggggcacaaggactgatgaacagttccctccttcatcaggcaattttcgttctgctctcaatgatgtgacagctgccagaaag

SEQ ID NO: 616413 - DNA, 100 bp, Homo sapiens
caagccattcagggcctttgcctttgttacatttgcagatgatcaggttcggactaaggatcaccgctttgaaagtgtcagtcaccttatcagctaccac

SEQ ID NO: 616414 - DNA, 75 bp, Homo sapiens
gccaggatttcctggaagcagagaaatggtgacgccttctgggccccatctgtccttcctcacagcaccctcagc

SEQ ID NO: 616415 - DNA, 100 bp, Homo sapiens
gaagccgagttcaacatcctcctggccaccgactcctacaagcctactcgacacccagcacctcccccgcaaaccgattcgtcagtgttggaccacggga

SEQ ID NO: 616416 - DNA, 75 bp, Homo sapiens
tagcagatagccagcccatacaagatcgtagtattgttacaatcacatttgacgtaccaggaaatgcaaaggaag

SEQ ID NO: 616417 - DNA, 100 bp, Homo sapiens
agtttgcggcggagagaataaagcagaaagacaggaagaggaggtggagttctacagttttgggatttgagattgacgcggtgaactctgtccagttttc

SEQ ID NO: 616418 - DNA, 83 bp, Homo sapiens
atgcaaaggcaggggaggaagccacctcgagacctgaaggaaaagattatgcccttcattggctagtgctggggactcatacg

SEQ ID NO: 616419 - DNA, 90 bp, Homo sapiens
cagcggcggcggttgcgggggggaagtgactgggcggtgccggcgccggagacgatgccgtttgtgccccctaccaccggagccagagaa

SEQ ID NO: 616420 - DNA, 51 bp, Homo sapiens
caggcgctccataaatgttcgttgggctgtgagcgggaccgcctgtccttc

SEQ ID NO: 616421 - DNA, 50 bp, Homo sapiens
aagaaactgtccgagaagcccaaagtggtattaaagataatcaaacatta

SEQ ID NO: 616422 - DNA, 75 bp, Homo sapiens
tgaaccctgaagtcggtgtctgctgcgttcacggcaggattcggttaggctttcatgagaaggacaagaagccat

SEQ ID NO: 616423 - DNA, 100 bp, Homo sapiens
cgggccccgcagaggaaggaagccggcgggcggggcagaggtggaggagacactgaagcgactgcagagccagaagggagtgcagggaatcatcgtcgtg

SEQ ID NO: 616424 - DNA, 84 bp, Homo sapiens
aatgaggaagatcttcaaatgggcattcacaagattacataccggttacggcacctccttcgtgcaaggtgtgatgcatcccca

SEQ ID NO: 616425 - DNA, 98 bp, Homo sapiens
ggccatataagaattcgtgcaaagagccagtcaccaggagactaaagtccatcaaaaacatccagaaaattaccaagtctatgaaaatggtagcggca

SEQ ID NO: 616426 - DNA, 90 bp, Homo sapiens
caggcctcagccttcatgccactggcgactatctcctgagctcctccgatgatcagtgcgccaatctgcagaacgccattgcggatgccg

SEQ ID NO: 616427 - DNA, 82 bp, Homo sapiens
cgagctgtcagagcccggggacggcgaggccctcatgtaccacacggtgaccaaaagccagccccactgtgagttgaactct

SEQ ID NO: 616428 - DNA, 101 bp, Homo sapiens
ggcagcggggcaggagctccaagcctggaagagcccaggagctgatctgttacaagtcctgaccaaagcagtcaaggtcagctgaaagaacactttgcaca

SEQ ID NO: 616429 - DNA, 50 bp, Homo sapiens
ggtgcaaaagaaatgcgtggacagcagagggcctgaggctatggcaggag

SEQ ID NO: 616430 - DNA, 87 bp, Homo sapiens
gggacagcagacaccctcctcaaccgggttaagaagctgccttgtcagatcaccaggccctcgggaccaaggatcacgtcatgactc

SEQ ID NO: 616431 - DNA, 72 bp, Homo sapiens
tttgagctctgctctgcctgtgatgtcgagaacactggggccctccagaatttccacagcatacacctggac

SEQ ID NO: 616432 - DNA, 100 bp, Homo sapiens
gcggaggagaacaaacagatcatccgcaaacacgcgcagaccttcgttgccctctgtgccacagaagtccattggaatattaagcccaggagttgctttg

SEQ ID NO: 616433 - DNA, 98 bp, Homo sapiens
aatccttccgagacacctaagctgctgctgaccggttccctgatgtgttacctgcttctgctactgatccaaactgcagaacttctcattcatcccca

SEQ ID NO: 616434 - DNA, 75 bp, Homo sapiens
ctgcaggggctgctcggcgtcgtggccttcagcacgttaatgcgtccacaaggcgattacaatttccagtcccct

SEQ ID NO: 616435 - DNA, 99 bp, Homo sapiens
attaagttggagcagggagaggagctgtggataacgggaggtgaatttccatgtcaacatagtcctgattcccgagcacttcggggccgtgcgagccat

SEQ ID NO: 616436 - DNA, 75 bp, Homo sapiens
caacctccttcccccgccgcccagatatcagaggagtatacctctcccaggtcccgcggcagtgctggtggccat

SEQ ID NO: 616437 - DNA, 75 bp, Homo sapiens
ggacgagccactgaaggagtcccgcaggaaggaggccttcttgaacatggagctgatccaggacacctcccgccc

SEQ ID NO: 616438 - DNA, 75 bp, Homo sapiens
gggaaccctggtcaccgtctcctcagctgttaggcaattttcttcagtggtatggcattttctcaaataaaactc

SEQ ID NO: 616439 - DNA, 100 bp, Homo sapiens
ggcggcgggcggcaaaggagcagccatgagggccgggcccagtcaccgaccgctggagcattggatttgctaaaggagcttaagaatattcctatgaccc

SEQ ID NO: 616440 - DNA, 75 bp, Homo sapiens
gccaaaaggaaatgcatctttatgtcagaaacacaaagcagcccaaccaaaggaatgtttccattggaattgttg

SEQ ID NO: 616441 - DNA, 74 bp, Homo sapiens
caggaggccgagcgcagagcattggcaggaggggcaaggtggaacagttgctgctgacacgccgaccgcctgct

SEQ ID NO: 616442 - DNA, 74 bp, Homo sapiens
agaggctgcagaatatgctaaacttttggccaagagaatgaaggatgttccttcaggaggaagcagcactaaaa

SEQ ID NO: 616443 - DNA, 75 bp, Homo sapiens
acctgagtattcccagatcaaggtcagcaaattaaaacgtcacattcgctctcatactggagagcgtccgtttca

SEQ ID NO: 616444 - DNA, 100 bp, Homo sapiens
gcaaaattttggactgtgaagcaaggcattgggaatagggtttggtggtctggaagcaatgaatagcatgggaggatttggaggagttggccgaatggga

SEQ ID NO: 616445 - DNA, 100 bp, Homo sapiens
cgagcgggtgcgtctgccgcagagtcggcacctgaaggacatggagctctaagcgaaagacatgaggcctcagcctgaaatgaggttgttttgaggtcat

SEQ ID NO: 616446 - DNA, 88 bp, Homo sapiens
ctgctccccaggacctgagcaggaacctggagttttcagacttaattcagtgcacaaatgagatgaatgtgaacatcccacagttggc

SEQ ID NO: 616447 - DNA, 75 bp, Homo sapiens
caagggggatctgatgcacgacccagcaatggatgaagagctggaacggctctcggccatcctgatttacctgag

SEQ ID NO: 616448 - DNA, 90 bp, Homo sapiens
ctttctaccacgtcaaaaacaacgggaagattgaactcatcatgagtgagatcattggccgagacctgagtggcttccctgcacctcctg

SEQ ID NO: 616449 - DNA, 100 bp, Homo sapiens
tctgcacgctgaggccgaggcggagaaggggcttcctgagcgtcccagtacactgacagaggtacggttcctggagcagcagaacaagatgctggagacc

SEQ ID NO: 616450 - DNA, 101 bp, Homo sapiens
cagattccatttcaacttctgccgacaacttttctcctgatttgagggaaaggcagcaacaggtggaagctgttgagttggaggctaaagaagttctcaaa

SEQ ID NO: 616451 - DNA, 82 bp, Homo sapiens
gtcgcgtgtctaggtgagtcgcggtgggtcctcgcttgcagttcagcgaccacgatccagacatttaatgtggatgcaccat

SEQ ID NO: 616452 - DNA, 101 bp, Homo sapiens
atttctatgacttagtccgaacaattggaggagacctggtggaaaaggttgatctcatagacaagtttgtacatccaaaatatttggagttcttacaacat

SEQ ID NO: 616453 - DNA, 101 bp, Homo sapiens
tttaatatctgattgggacaacattcagacccatttccagtcatgaatgatgtctttctacctaaagatattgacctagacagtgtggatatggatgagac

SEQ ID NO: 616454 - DNA, 100 bp, Homo sapiens
ccggagcggaaaaccttctgaagcatcctagaatacgtttccacacgggtcttgtggatgcccacctctactgtttgaaaaaatacatcgtggatttcct

SEQ ID NO: 616455 - DNA, 100 bp, Homo sapiens
tcttgaagcatttggctggttctgcctctccatcagtggttctgattaccaagcccacgactgtaaaggaagctcagcgtgtccggagcggtgactggaa

SEQ ID NO: 616456 - DNA, 74 bp, Homo sapiens
cgccgccgcctctccttgctgcagccatggatttgcctgcaatggtactgtaattgagcatccggaatatggag

SEQ ID NO: 616457 - DNA, 74 bp, Homo sapiens
ggcgcggcagcggagggacggcagtctcgcgcggccagaagcggactcctagaagaggggagcagcaaggatgg

SEQ ID NO: 616458 - DNA, 75 bp, Homo sapiens
atttgttaaggattccaagtaactcttatttggggcaagattcttgccaagagaattaatgtgcgtattgagcac

SEQ ID NO: 616459 - DNA, 118 bp, Homo sapiens
agacattgtttctctccctctgcccccccttccccacgcaaccccagatccatttacactttacagttcgagaacttgtcttggacaattgcaaatcaaatgatggaaaaattgaggg

SEQ ID NO: 616460 - DNA, 75 bp, Homo sapiens
tacatcaagggcggcacgctccggggcatcatcaagagcatggttggatggcaagcatgtggtgtttggcaaagt

SEQ ID NO: 616461 - DNA, 80 bp, Homo sapiens
tgcagctgcctcagttcttagcgcaggaggaggaagccaagaatctggtgagcgaagccatcgcagctggcatcttcaac

SEQ ID NO: 616462 - DNA, 100 bp, Homo sapiens
agatttgttgtcagagtttggacaattcctaccagatgccaacagctccgtgaatatcaacacctttgagaacagaatgttaatgcttgatgggatgccg

SEQ ID NO: 616463 - DNA, 76 bp, Homo sapiens
cagggcttctcctatgactacgtctttgactggaacatgctgaaattcgaaacaggaagagcgagtacagcaagta

SEQ ID NO: 616464 - DNA, 49 bp, Homo sapiens
cagttttttctaatggctattcaagataacaacgaacttgatgcaagtg

SEQ ID NO: 616465 - DNA, 98 bp, Homo sapiens
aaggcctcgcgccgctgcgggtcctgcgaccgctcctggctggtaatgtgaggctacaggagatgatggcaacaatgtgccaggaacgtggagcccgg

SEQ ID NO: 616466 - DNA, 100 bp, Homo sapiens
cttggatattccagtcgatgtatttgtacaccaatgtaaacaggaacatcgataagtagtgtaaaaacttgcacaatgaaatccgaagccaaggatggag

SEQ ID NO: 616467 - DNA, 98 bp, Homo sapiens
gcgctgccgcctgaagtgcgggcgcagctggcggagctggagctggagctctcggaggatccagtttgctgaccagaagcaagaattcaacaaacgtc

SEQ ID NO: 616468 - DNA, 74 bp, Homo sapiens
ccgaactccaggacagcatccaggcctcattggacagcattcgaggtcagcccaaggctgccccctcggtcact

SEQ ID NO: 616469 - DNA, 100 bp, Homo sapiens
tttgcatctggtgtgcaatgtgaagagtccttcaaaaatgccagaaatcaacgccaagggcttcgtgctgtgtcactccatcgctgggggtacgggttct

SEQ ID NO: 616470 - DNA, 98 bp, Homo sapiens
tgccatcccctccgcatcatggggtctgtggaccaagctagatgaggaagaggagcgaaggaaaaggcgccgggagaagaacaaagtcgcagcagccc

SEQ ID NO: 616471 - DNA, 75 bp, Homo sapiens
ggagaagagagctctggggtcgacacgattggctcacagtggttgattgatcaaccccattggacgttggttctg

SEQ ID NO: 616472 - DNA, 98 bp, Homo sapiens
cgctcttctgcgtggccgtcagcgtggtgtggggcgtcttccgcaacgaggaccagtccagctgggagctccccgacctccaggagggcaagatccaa

SEQ ID NO: 616473 - DNA, 97 bp, Homo sapiens
cagagagaagtccccagaagagacagcacacttagcaattgccctcattattaaaggcctagatcaaatgatgccgtttggaaaaatttcccagcag

SEQ ID NO: 616474 - DNA, 100 bp, Homo sapiens
tctgtactctggtggcttccagtggaaaaggcattttggaggcagaaatctgacccggtcgtctcgtaccgcgagacggtcagtgaagagtcgaacgtgc

SEQ ID NO: 616475 - DNA, 50 bp, Homo sapiens
ctcggcccctggctcctgctcctggatagaagaagtcagagatgccatgg

SEQ ID NO: 616476 - DNA, 97 bp, Homo sapiens
cgaactccgccaggctgcattcaagctctatgcctctcttggagcaaatgatgaagacatccggaagaaggagtcagtggatcggtggggaaaatgc

SEQ ID NO: 616477 - DNA, 83 bp, Homo sapiens
cagatcgacaagtccgggagctgggcggccatttaccaggaaacctaacgaagcatatgaaatctaaagcacacatgaaaaaa

SEQ ID NO: 616478 - DNA, 100 bp, Homo sapiens
tgtatgcctcaatttgctggatttaagcactgctgcactttatgaggtagcacaggcggagtgcagcggaggcccctgccgctgccgtcatgccgttccc

SEQ ID NO: 616479 - DNA, 101 bp, Homo sapiens
ctggctactatggctttggccccacaggctgtcaagaggctgtgggtaatattgtgaagttcttgggaatgcacccttgtgagaggtcagacaaagtgccg

SEQ ID NO: 616480 - DNA, 75 bp, Homo sapiens
aaagaactccctcaagtttcatttgtgaagacctctgtatggcttttcaattttagttgaaattctctctccatg

SEQ ID NO: 616481 - DNA, 110 bp, Homo sapiens
tggaagttgagcaagagcagcggcgcagaaaggtggaggccgggaggacgaaggctgaaggtgatgtggccgccctcaaccgacgcatccagctcgttgaggaggagttg

SEQ ID NO: 616482 - DNA, 83 bp, Homo sapiens
ggagcggctgtacgagttgtggctgctctactacgcgcaggaagtatttgaaaaggagcagtccatctgtgctgcagaggaac

SEQ ID NO: 616483 - DNA, 74 bp, Homo sapiens
ctcctgcgagaagcaagcggaacttcctgagtctctccatttcaaggactaaaacagtcttgcgttaagtaaaa

SEQ ID NO: 616484 - DNA, 82 bp, Homo sapiens
gcgactctgtgcctcgctgagggcacatccatctggaaggcctttttcttcacccccaacttcaaccccgtgggttccaacg

SEQ ID NO: 616485 - DNA, 50 bp, Homo sapiens
gggagcgatgcggtgcagcgcgctgtgagccgtgagctttgaggcggtgg

SEQ ID NO: 616486 - DNA, 75 bp, Homo sapiens
cggggagcccctgctggacaatgagtccacacgaggggatgagcgggacagggtgcaggcagatgacctggtgaa

SEQ ID NO: 616487 - DNA, 75 bp, Homo sapiens
cggggagaaggccatcacccaggttaaaccttctctcgatgaagcttttgtcatccaagaacagaatgttgcact

SEQ ID NO: 616488 - DNA, 100 bp, Homo sapiens
cgcttctgcagtgcgtaggagcggccggggcgggaggctccgcggagccgaggcgtggaggtccagtccaggtgcagcagcaaggagaacattctcagag

SEQ ID NO: 616489 - DNA, 76 bp, Homo sapiens
tcgggctgaagcgactgagtccgcgatggagatatcagttttagagaatgtggcgtggagaaattctcaaggaaag

SEQ ID NO: 616490 - DNA, 92 bp, Homo sapiens
tggactccttcggcagtccacccaccgccgccgcctcccagggttgtgagtcccggcccagcccctccacccccctgcccccccgatgcgac

SEQ ID NO: 616491 - DNA, 75 bp, Homo sapiens
ttcaagtgccctgaggaccagcttcctctggactatgccaagacgtggatctgtcctgcaatgacctgacacggg

SEQ ID NO: 616492 - DNA, 75 bp, Homo sapiens
caaccccctgccacctcagatatttaatggcgaccgatactgtggacggatactctgttttcaaggaagctgaat

SEQ ID NO: 616493 - DNA, 75 bp, Homo sapiens
gcctgcggactgtctggatggactggtaaactagcgctcctttccgtaaccacgggaggcacggccgagatgtac

SEQ ID NO: 616494 - DNA, 100 bp, Homo sapiens
gcaagacaatcactgcagagataccagatacagccttttcctccctctccatgaactctggaaacagtacatcagggacctgtgcagtgggctcaagcca

SEQ ID NO: 616495 - DNA, 83 bp, Homo sapiens
cattgctacacatgctaaaagatgacagacttggacaacatgtcccaacattacatcccaatcatacctcactcctgttaggg

SEQ ID NO: 616496 - DNA, 89 bp, Homo sapiens
gctctcatcccagacttggccatggaaacctggcttctcctggctgtcagcctggtgctcctctatctaggtgctgatactcaaagaag

SEQ ID NO: 616497 - DNA, 71 bp, Homo sapiens
cccagcgagcagctgccaccttttccaggaccttctctaacccagaaaaggagaatcatacccccattcca

SEQ ID NO: 616498 - DNA, 98 bp, Homo sapiens
cgcccgccaccctgcgctgccgccgctctgaggagttaaaggaatagccaggccagaagaaggaaggcctgtggtgagtgggacaggaaatgacatca

SEQ ID NO: 616499 - DNA, 90 bp, Homo sapiens
gtcatcaaactcctcgaagagactgataaaatgtctgatatgccaaagcctgccttcatgaagcagaacctggatgagcttggaatagga

SEQ ID NO: 616500 - DNA, 75 bp, Homo sapiens
ctgatctccatgtcctgttgtggggcttttacagcctttgggcagaaaccactaatactagcctcttgcaggtgc

SEQ ID NO: 616501 - DNA, 75 bp, Homo sapiens
gaaaagattgctgcgagttttccattttccttctgtgtgatggacaaagacagatggtttgatgtcctccagaaa

SEQ ID NO: 616502 - DNA, 100 bp, Homo sapiens
aaaacgctttcaggtcggcgtctcgtttcatcctcacaacagccagctgtggtgctcccattcaagtttccgaggtgaagctgctttccttttcatcagg

SEQ ID NO: 616503 - DNA, 90 bp, Homo sapiens
ggtctggtgcaccactcctcaggagcatctcagaaatgatgatgcacgtgcaacagctgtctcttgcgtctttatgtgtgaaaaaacaac

SEQ ID NO: 616504 - DNA, 100 bp, Homo sapiens
cccacgcgctcagacatgatatgcggctatgcctgcctcaaaggtttatttgcaagatgggtttgagggaattaaggataaagtctgctgaaagtagcac

SEQ ID NO: 616505 - DNA, 100 bp, Homo sapiens
cctctgtgtccctgtgacctgcagatattgggagatccacagctaagacgccgggactccctggaaacctagaaatgaaaaccgtgaggacatactgaat

SEQ ID NO: 616506 - DNA, 82 bp, Homo sapiens
cttgggctacgcgtatgtgaacttccagcagccggcggacggtcctaggcctacttacaagcctccagtctcaaattatcca

SEQ ID NO: 616507 - DNA, 100 bp, Homo sapiens
gggacagagaaccatccaggttgagaattctcacttaattctaacaggagctggagccctcaacaaaatgtgggcgctatctccaactgtctttgcactt

SEQ ID NO: 616508 - DNA, 74 bp, Homo sapiens
ttggaaaccactgggccacaggaaaggcaggcatggagaatggtggaaagcaaagtcccttttaacaaaaaaag

SEQ ID NO: 616509 - DNA, 74 bp, Homo sapiens
tccagagaaaggaatgcaagatggtcatcctgtctgtctgttcacagaataaaactgtgggtgtaccaatagag

SEQ ID NO: 616510 - DNA, 76 bp, Homo sapiens
gtgagctgcctggtcctgctgcaggtggcaagctctggtgcctttcctgaagactatcttctggtctcgaaatgga

SEQ ID NO: 616511 - DNA, 82 bp, Homo sapiens
ctatctttatgtatgcccctgagttcaagttcatgccaccaccgacttatactgaggagttgatccccctcatattgtgtac

SEQ ID NO: 616512 - DNA, 100 bp, Homo sapiens
caaactggaacttatgctgtagacatttctttgtggtttatctaaaaaccaaagggctaaggaatatgagagtttaatggaaaccaaaaattctggctct

SEQ ID NO: 616513 - DNA, 97 bp, Homo sapiens
tgtgtcttccccagctctgcagccacatactatccgtttgttcaggaaccaccagtgacagaggtttatttggtcaagatactcacttgtaattatt

SEQ ID NO: 616514 - DNA, 49 bp, Homo sapiens
gaaaacctgccaatcaagatgagtatggacaagttggatggcttgagga

SEQ ID NO: 616515 - DNA, 100 bp, Homo sapiens
tgcagggctacgcggccaagactgtgttcgaggaagccagttgagggaagttctccatgaatgtacgtcacaatgatgatgaccgaccaaatccctctgg

SEQ ID NO: 616516 - DNA, 101 bp, Homo sapiens
gaatgatattcagtggtgtttttctcaggtgaaaggagcagtagatgatgatgtagcagaaggcattacagcagaagttctggtggtgacctctttcgatg

SEQ ID NO: 616517 - DNA, 100 bp, Homo sapiens
cccgccagcatgccccagtccaaagtggaatgcagtagccctctgggcctgggatattgtggttgataactgtgccatctgcaggaaccacattatggat

SEQ ID NO: 616518 - DNA, 75 bp, Homo sapiens
tggacaatgtgatgaagaaacttgcaaaagtatctcatatgaccagtgggcaagaatatcacggcatgggcatga

SEQ ID NO: 616519 - DNA, 75 bp, Homo sapiens
tcagtcctgtttgacaacatctgccctacccccatcctgcagaaggtacttggattatggagaagagaattggaa

SEQ ID NO: 616520 - DNA, 75 bp, Homo sapiens
ggaagcaacaacataatgcccagagttggagccaattaaaccaggtggtgaagcagtattttccaatttgaagat

SEQ ID NO: 616521 - DNA, 100 bp, Homo sapiens
aagaagaaaagaggagagttgaaagagaacaggacacaactcagatgggaagttcatcgcccgggcacagcggatagagtacgactgtgaactagttccc

SEQ ID NO: 616522 - DNA, 100 bp, Homo sapiens
atgttactattacaacgaaaacagctgatggaaagtgtgcatacagagccatacacctgaaggagggatggaaagactaggagagcctgggatcctcaga

SEQ ID NO: 616523 - DNA, 101 bp, Homo sapiens
gcagaagccaaccaaaatagacacttcaaccctaaacctgtttcaacaccttcctgaactcaagtcattttttatagagttacatccttaatgttcagtca

SEQ ID NO: 616524 - DNA, 82 bp, Homo sapiens
ccgttttcatggctgcttaaaatggtctatggtctgtctctgtgacttaagagattaaaattaatttggttgctgttggttc

SEQ ID NO: 616525 - DNA, 74 bp, Homo sapiens
cagtacttggcctctgaaacagtgctgaacttggcttttgcgcaggaattttgagctaccctggttggatgagc

SEQ ID NO: 616526 - DNA, 101 bp, Homo sapiens
aattggcagaaactcctggagacagggggcagctgtgcggagggtagtggcagccatgaaccggatggaccagaagaagcacgagaagttttcaaaccagt

SEQ ID NO: 616527 - DNA, 90 bp, Homo sapiens
ctggccgcctggacggctcgggcgctggagttctgggaggtgatcagtgatgaacatggcatcgaccccaccggcacctaccacggggac

SEQ ID NO: 616528 - DNA, 74 bp, Homo sapiens
aagcccagacaatgccggtggaggaatttgtggctggctggatctctggaagtggtcatagtaagtgctacaag

SEQ ID NO: 616529 - DNA, 100 bp, Homo sapiens
gtttttctgttttgcctgaatacatgatttaaacaagagatttccacagaaggcaagtatatcgcgtcaacacagcgacctgacgggacctggcgcaagc

SEQ ID NO: 616530 - DNA, 99 bp, Homo sapiens
gtggctttgctctgggctcctgttccctgtgagctgcctggtcctgctgcaggtggcaagctctgcctcctgacaaggtgatccgggcgggccccgcag

SEQ ID NO: 616531 - DNA, 97 bp, Homo sapiens
gcgcacaatcggggcaccgagctcgattgcttccaagtatgatcatcaggcagaagaagatcttcgcaattggatagaagaggtgacaggcatgagc

SEQ ID NO: 616532 - DNA, 74 bp, Homo sapiens
caggaaagccagtgttgtggaccctagcacagaggccttgtctggttttagacagattcatgttatagatatgg

SEQ ID NO: 616533 - DNA, 74 bp, Homo sapiens
gtgtcagtgatggcggtgaaacgtcagccggatccctgaatattgccgagccttagaagagaatgaaatatctg

SEQ ID NO: 616534 - DNA, 80 bp, Homo sapiens
ccatgcctatgccatctgcaaatacgcctttctcatatccactgccaaagggaccaatagcagaccccacgttagctgaa

SEQ ID NO: 616535 - DNA, 98 bp, Homo sapiens
cgcggagctccccggccggcggtgcgtccccacggtcaccatgaaagctgataggaagatgtcttcaggaaatgctaaaattgggcaccctgccccca

SEQ ID NO: 616536 - DNA, 97 bp, Homo sapiens
gttttgttccctttgctgccgtagctgctgctaattgcattaatattccattaatgaggcaaaggtgaaaggtgtagcagtcactcggcctacaccc

SEQ ID NO: 616537 - DNA, 83 bp, Homo sapiens
tccaacaagatgtgggcacaaaaactaccattcgcctgatgaactctcaggatgaaattgattctgcagtaaagatgttggtg

SEQ ID NO: 616538 - DNA, 82 bp, Homo sapiens
aaagtctattactgtgcccgtggaaatccccagctcccctctggatgagctgcttcagaaagagcaaaactattcagatgac

SEQ ID NO: 616539 - DNA, 100 bp, Homo sapiens
tgcctcgtgccgctgagcctggcgcagatcggttgaaaggattgttgacaaaaggaaaaataaaaaagggaagacagagtatttggttcggtggaaaggc

SEQ ID NO: 616540 - DNA, 100 bp, Homo sapiens
ttttgggagctgtgggcgcaaccccagtggcagttatgtgtcctgcacccctaggagtgcatcccctgacagtaggaaggtggtcaaatggaatgtggaa

SEQ ID NO: 616541 - DNA, 82 bp, Homo sapiens
agatgtctacttcgaagactggcaagcacggccacgccaagattgagaggatccagaatccagatctctggaatagctacca

SEQ ID NO: 616542 - DNA, 100 bp, Homo sapiens
cgcaccgggacgatcatcctggggacctggtacatggaacatcatttacagcgagcaatttcagcacagcaagtgtttagagaaaaaaaagagagtatgg

SEQ ID NO: 616543 - DNA, 90 bp, Homo sapiens
ccaacgtctccacgaggatgagaggggcccgggcagcagcctcatcttccgcacggccagggccctacggaaggctctgacccatctgga

SEQ ID NO: 616544 - DNA, 121 bp, Homo sapiens
cgtggtttcccaggacctccgggtcctccaggacgcactggcttagatgggctccctggaccaaaagggaaatgtttcaacgtgcgcaagcgttgcggcggcgggcagaggactactacag

SEQ ID NO: 616545 - DNA, 100 bp, Homo sapiens
gtgctgggatttaaagcttcagaggcagaaaggcagaagtggaagcaacttctatttagtgatcatgtctgttcggcacttgaagtactccttgtttaag

SEQ ID NO: 616546 - DNA, 100 bp, Homo sapiens
ctgaagggcatgtccctgcttgtcagggctgagagcgacgatattgatgaatgccgaaccatccccgaggcctgccgaggagacatgatgtgtgttaacc

SEQ ID NO: 616547 - DNA, 100 bp, Homo sapiens
ttggacagctgggagtaacaacacccgttttggcattgctgctaagtacatgctggattgtagaacttctctctctattctgctgtctacatcaatacac

SEQ ID NO: 616548 - DNA, 83 bp, Homo sapiens
gtgctttttatttttccccaattcagcagagaatattttcaagggggtttcatgatcaacatgggagactcccacgtggacac

SEQ ID NO: 616549 - DNA, 50 bp, Homo sapiens
ggaacgcttattcaacggcaaaagattgtgacaccaggactgaagacaag

SEQ ID NO: 616550 - DNA, 90 bp, Homo sapiens
ctggcaccaacaaaactatctctttgagggtcagagtactgatcggctactatcaacagaacctcatgaggaagtacctaatattcttca

SEQ ID NO: 616551 - DNA, 90 bp, Homo sapiens
tgggaattgctgaattagaactgcagaggttcctctacagcaaggatttgattgccttatgtgacaagcccaagatctgtgacagttgga

SEQ ID NO: 616552 - DNA, 75 bp, Homo sapiens
cggcgagagtgggcgagaacgtccactgcgggccggcgaaagctggttgattcttcaccacactgaaaccattag

SEQ ID NO: 616553 - DNA, 75 bp, Homo sapiens
tgcagctgacctacatctcgaaggactcatctgatgatgtgagaagagttcagaggagggagaaaaatcgtattg

SEQ ID NO: 616554 - DNA, 82 bp, Homo sapiens
cgacgtcttgcctgtgtcccacttgttcgcggcctatagtgaagatagtgatccggggagacaggaacacgggcaagacagc

SEQ ID NO: 616555 - DNA, 50 bp, Homo sapiens
gggacctcaaggaagcttatgacaggcacttccgttccggcgcccctccg

SEQ ID NO: 616556 - DNA, 75 bp, Homo sapiens
attctccactgccgtctactcggccactccggtcccgacacctagcctgcgtcagttgctccgattaaaaatgtt

SEQ ID NO: 616557 - DNA, 100 bp, Homo sapiens
ggaagatgttttaaatgagattcaattaaggatgctacagaacatggcttcaattaagattgggcactgccaccctctcgtggtccaagcagcacatgag

SEQ ID NO: 616558 - DNA, 100 bp, Homo sapiens
actggtgacacagaaatagctcatgcaactgaggatttagagaataatggcagtaagaaagatggcgtgtgtggaattctatcgtgatgcagagaagaaa

SEQ ID NO: 616559 - DNA, 50 bp, Homo sapiens
cttaaaatggtctatggtctgtctctggagaagaaatgggtgaccgttgg

SEQ ID NO: 616560 - DNA, 100 bp, Homo sapiens
gaggaggaggaggaggcgaggaggagagactggcgtctctggccgagcctctttttgtggaaaacgacagcagcagcagtggcctggaagacgccaccgc

SEQ ID NO: 616561 - DNA, 87 bp, Homo sapiens
ggggttggtgtgattagcttcgcagtctggaaagctttaggagttcacagtgaatcttcctgatgcagcagagcccgatattatttc

SEQ ID NO: 616562 - DNA, 83 bp, Homo sapiens
tggctcccttctgccccagctccgtctcggcggcggcgggcctcatgcattgtgcgtcagcagcaatgtttatggtgaaaaat

SEQ ID NO: 616563 - DNA, 51 bp, Homo sapiens
aagaatactggaaagttgctatgttttgcagcccagatgcgcccagcctgt

SEQ ID NO: 616564 - DNA, 100 bp, Homo sapiens
caggacagctgttccttggccatcccaaagctattctgggggcaacagaggagtgtgagcagctgcagaagatgtacggggggcagattgatgaaagaac

SEQ ID NO: 616565 - DNA, 50 bp, Homo sapiens
cttcgagaagaaccatggcactcgtgtccgagttggagagtgctctgcag

SEQ ID NO: 616566 - DNA, 90 bp, Homo sapiens
ctgagagattccactgtgtgggaggctccgtgcaggaccctgagcagactcagtgggatcctcctacttgggaaagcccaggagatgatg

SEQ ID NO: 616567 - DNA, 75 bp, Homo sapiens
cgggacccgcggctcgggatggaggtgtgcaccggcacagacatgaagctgcggctccctgccagtcccgagacc

SEQ ID NO: 616568 - DNA, 75 bp, Homo sapiens
agacgcctcacttaggacaatgtctcctttcctcttgggccgggcactttgggctgccagtcggttcactgttgc

SEQ ID NO: 616569 - DNA, 100 bp, Homo sapiens
gaaagtgctcctgcggctgtatggagcgattttgcagatgggggaagcgagtagcattatctgatgatgagacaaaggaaactgaaaacatgaggaaaaa

SEQ ID NO: 616570 - DNA, 90 bp, Homo sapiens
ggcagtgctcaaactcaccgaccaggcctcggcaagacgcgcaggaagaccagcgcgcgggatgcgtcccccacgcccagcacggacgcc

SEQ ID NO: 616571 - DNA, 143 bp, Homo sapiens
cttttcaaagtctgacatttaagagaaaaaactgtggctgttggtttgtggaacagacagctccttctttattgttcaaaagaatgctgaaccgggagctgacacacctctcagagatgagccgatcagggaaccaggtgtct

SEQ ID NO: 616572 - DNA, 100 bp, Homo sapiens
atttgctgccagagggatctactcggaggagatgccgtcggtggcccggcctcggcctgtcgggggtaccacagataatttttatggtgggacgaggata

SEQ ID NO: 616573 - DNA, 50 bp, Homo sapiens
gcatgaggcaatgatcactgacttggaagtgttctgtcagttgtggcgtt

SEQ ID NO: 616574 - DNA, 107 bp, Homo sapiens
ttcttaacccagaagtagctgaatgtgttactccattgctgaggagtgctggagagatttaccagcatgagaattaagaaggagaaggaaaagcccaattctgctca

SEQ ID NO: 616575 - DNA, 100 bp, Homo sapiens
gtgttcccaggcccgtggagagtcaaaccggcacgatgtccaggcaccagaaccagaacaccatccaggagctgctgcagaactgctccgactgcttgat

SEQ ID NO: 616576 - DNA, 100 bp, Homo sapiens
acaaactcgaagaacagctgtggaaagaagttgcaaaacactgggatggatagaatgacagaagatgctcttcgcttgaatctgttgaagcggagcttgg

SEQ ID NO: 616577 - DNA, 83 bp, Homo sapiens
ctttcctgagtgtagtacggaaggatctcacacgttcacccatgccggagtgcagctgtatgatcttggttcactgcaacttc

SEQ ID NO: 616578 - DNA, 100 bp, Homo sapiens
cggagaattcctggggcgcaccgccaagagctgggaccccaagactgcttctgagacagaaacagatatctgtgctgaatgggagataaagaccatcact

SEQ ID NO: 616579 - DNA, 99 bp, Homo sapiens
cttcccggtgtcccactgagaagcgggctcttccttggcaggggcttcttcattgcctcgctgtggatgtcgagtatcttaaatagtgaagatggagaa

SEQ ID NO: 616580 - DNA, 71 bp, Homo sapiens
aaataccacaggatggagactacgagtttgacgaatgccttagtttccactttccagcctggatcccctca

SEQ ID NO: 616581 - DNA, 101 bp, Homo sapiens
tggcggagaaggatgacaccggagtttgacgaagaggtggtttttgagagtttacccctcaatcccaaacctttcctcaatggactaacaggaaagccagt

SEQ ID NO: 616582 - DNA, 82 bp, Homo sapiens
aaaatatgatggtggttggacagtcagcatttgcagactttgtacgagctcaactggaggcagtcctgtgcggaaatctgaa

SEQ ID NO: 616583 - DNA, 100 bp, Homo sapiens
ttagagtataatccagataaggacccaggaggtagctttggatatgttaaatcctcatgttactttgcctgttttttacccacatcttaagcatggtggt

SEQ ID NO: 616584 - DNA, 83 bp, Homo sapiens
cagaccctggagcctcagttggaagcagccgatccagcctgcggagcctgtggggcaggtgccacttcggataaaccctttgg

SEQ ID NO: 616585 - DNA, 113 bp, Homo sapiens
ctggagcaggagcggggccggaactggagccgaggcgcaggtggcgctgggtcatacttatcctgacgaagctgtatgacttcaacctgggcagcgtgactgagagttcacta

SEQ ID NO: 616586 - DNA, 75 bp, Homo sapiens
atttgaacgtctaaaacagtttctggaatgcagggctgataacatccggaaatactggagccgctactaccaagg

SEQ ID NO: 616587 - DNA, 98 bp, Homo sapiens
tttgactcggactgcagcgaggacggcgaggcgctcaacggcgagccagagctggacctcaccagcaaggtaccattgttggatactggtgacatcat

SEQ ID NO: 616588 - DNA, 100 bp, Homo sapiens
aaatcattgatgaccacagagctgggaaaattgttgtgaacctcacaggcaggctaaacaaggagctgcagcagctgctgtgctgcacgcggcaagaggc

SEQ ID NO: 616589 - DNA, 82 bp, Homo sapiens
gaacctcagcaccgagaacatctactctttcaactacaccagccagcccgaccagaggaatggcttcttgtgggaaccaaac

SEQ ID NO: 616590 - DNA, 82 bp, Homo sapiens
cgagcaggcggcgccgtcttggggcctagcggcgaggcgacccgcacagggcatttgatgtagaactactgtacatagcaca

SEQ ID NO: 616591 - DNA, 95 bp, Homo sapiens
gcaccgcagccttgggcctcgcgccggctatggccgtgccctggggctgagccctcagggactggtgattgcagctggaagtgcccatgaccgag

SEQ ID NO: 616592 - DNA, 88 bp, Homo sapiens
gacagagtggagccatggctagaggatgtagctgagctgattcgggccagagcctgccagagggtggtggtcatggtgggggccggca

SEQ ID NO: 616593 - DNA, 80 bp, Homo sapiens
aaatcgatgatgcattgtatagaaaccaaggatgacctagagcagctcacgactgagattaagaaaagggccaacaacgt

SEQ ID NO: 616594 - DNA, 100 bp, Homo sapiens
atacacgtgttctgttcagactcaacatacacccagaacaatgcaggtgcatctaactgtgcaagctgtcaccactgactaaagaagagaaaactgcggc

SEQ ID NO: 616595 - DNA, 90 bp, Homo sapiens
aaaatcttagctctctcaatctctgtctgaactggatcataaatgacagctgtgttccagatcatctccctggtaatttaccccgtgaag

SEQ ID NO: 616596 - DNA, 90 bp, Homo sapiens
ggagggatgcttgtatggtctccatatcacagtatcccagatgccaaatgtatctctggagacaaagtagagatagaccctgttacgaat

SEQ ID NO: 616597 - DNA, 152 bp, Homo sapiens
ccaaccccagccgaccttgagctccaggagttcgtctcttacgtctgcggaagtgcagctgcctcagttcttagcgcagacagcgtggaagatgaactggagatggccaccgtcaggcatcggcctgaagcccttgagcttctggaagccca

SEQ ID NO: 616598 - DNA, 100 bp, Homo sapiens
ccgctaccgcgcgtgcgggattccggcgccgctctccgagctcgatccgctgctcgcacgggagccagctgggtgagcgtttcccaaagtgtattctgcg

SEQ ID NO: 616599 - DNA, 98 bp, Homo sapiens
ctaaattacatattccagtaatggtggatgaagttgttcattgtttgtcaccacaaaaaggacagcttgaacatgcgaaagtgacacagacagagttg

SEQ ID NO: 616600 - DNA, 90 bp, Homo sapiens
caaaaggctgctgccaaagctgccttaatatatacctgcactgtctgtaggatcgtactgagaagcactccacaatgccagactcacctg

SEQ ID NO: 616601 - DNA, 90 bp, Homo sapiens
cattctgtgcatttgggcaaaatgagccaattcttctgtatatttacgatttccatggggtctaaattatggataataatggaatacctg

SEQ ID NO: 616602 - DNA, 101 bp, Homo sapiens
gaaagacacagctttcctcttcctctccaaaccacctcgaagcagggtcactctacatgacatgatcctgaaaaatatcgagaagatcaaacggccccgga

SEQ ID NO: 616603 - DNA, 96 bp, Homo sapiens
ggcctacgtggtggtgcaggcgagacccaggctgggcaaggcgcagatctcacattcttgaaggtggcattgaagagcactaagatcggaagatga

SEQ ID NO: 616604 - DNA, 82 bp, Homo sapiens
aaagacagagaaactatgggacacagatatgttgaagaagtttgcctgcaatggtactgtaattgagcatccggaatatgga

SEQ ID NO: 616605 - DNA, 100 bp, Homo sapiens
gcctggtcaactataacaagatggtcttctgtccctactacgatgcaatcctgacttgaattagagtctgtcaaagcccagtctttggcaataacaaaac

SEQ ID NO: 616606 - DNA, 76 bp, Homo sapiens
ccctcagcctgcggatgtgaggctgatgaagaggaaaacaggttcaaagtcaagtgttttctgaagcaaactgtgc

SEQ ID NO: 616607 - DNA, 98 bp, Homo sapiens
cgcggaggaggaggaggtggagttgctgcccttccggagtccgccccgtgaggagaatggtgcactttacaggtccccgatgaaccaagagaaccctc

SEQ ID NO: 616608 - DNA, 92 bp, Homo sapiens
tgaggccaaacccgccactccagaaatccaggagattgttgataagaggcggggtttcaccatgttgcccagactggtcttgaactcctgag

SEQ ID NO: 616609 - DNA, 74 bp, Homo sapiens
cagctttcacagtttgcgggactcagtcccatcactccaaggagagaaggttgggggccgtcccgctcctaagg

SEQ ID NO: 616610 - DNA, 100 bp, Homo sapiens
gcttacatcttgcatcctcaagcgattagcctgaggcctgctcagtcgttcctaatgaataaaaatcaagtgccaaagcttcagccccagataactatga

SEQ ID NO: 616611 - DNA, 100 bp, Homo sapiens
ttggagataaagttgctttttactgcatcctaatgtcctatgatcacgtggaactcacattcaatgacatgaagaacgtgccagaagccttcaaagggac

SEQ ID NO: 616612 - DNA, 100 bp, Homo sapiens
caaatcatggaggaggctgtcaccaggaagtttgtgcatgaagacagcagccacatcattgctttatgtgataaaggttccttcgttctctgagacactg

SEQ ID NO: 616613 - DNA, 74 bp, Homo sapiens
gggatggattggatactgatcacagctgccaggaattttcaacgtccggttcatctaatacagacactggtaaa

SEQ ID NO: 616614 - DNA, 75 bp, Homo sapiens
agcagatatggaaggtgcactgagtctactcttcatcttgtgttgagacttcgtggtggtgctaagaaaaggaag

SEQ ID NO: 616615 - DNA, 101 bp, Homo sapiens
aatgccgatgtgactctacgtagtgatgctacagctgatgacctcattgatgtggtggaaggaaacagctgggtgggctatgaacaggccaactgcaaggg

SEQ ID NO: 616616 - DNA, 90 bp, Homo sapiens
cgccgcctgactgtggggtgttcgttccgcacccgctcccggcgcctgccggagaggccagggcagtctactttgttcggcataaagaat

SEQ ID NO: 616617 - DNA, 90 bp, Homo sapiens
agcagatttcccaagagcagcggaaaatgatccagtcacaggtggatccataaagaacccagccaacccgcagagggaggggaggggctg

SEQ ID NO: 616618 - DNA, 100 bp, Homo sapiens
agaaccaccgcatcaagagcttcaagaacaagggccgcgatgtggaagttatgaagacagtatggagtttccagaccatagtagacatttgctacagtgt

SEQ ID NO: 616619 - DNA, 50 bp, Homo sapiens
cggggagcggagccatggcctccgctggtcacctgacttttgaatgccgc

SEQ ID NO: 616620 - DNA, 82 bp, Homo sapiens
tgactggaaaaagactttaaaactccctccaaaggatctaagaatcaaaacttcggatgtgatggtggcaggtgggatggag

SEQ ID NO: 616621 - DNA, 82 bp, Homo sapiens
cggcgcccgctggccgggctggctgcggccgccctgggccgggccccaccggacgtgatcagggccaaagcggtcagtgaga

SEQ ID NO: 616622 - DNA, 50 bp, Homo sapiens
ccaagtggccagacagtcatccaggttaccattaagaatatcgaaaggga

SEQ ID NO: 616623 - DNA, 100 bp, Homo sapiens
ctgctgcttccaggctgcaaacctgacagcatggggctgtactgaataccgcagaccattgtaattcatgccacaggtgtcaagctctcataaccctaca

SEQ ID NO: 616624 - DNA, 87 bp, Homo sapiens
gtcacacatctctgctttttcccaagaagagcaggaaatggccaaaccccagaggaaatatcattctgcaaaagaagcttatgaaca

SEQ ID NO: 616625 - DNA, 100 bp, Homo sapiens
cgggatatcgggtggcggctcgggacggaggacgcgctagtgaccggccagccttgcagctgtatgatccaggagctcgcttccgagcgcgagagtgtgg

SEQ ID NO: 616626 - DNA, 46 bp, Homo sapiens
agacactttctcagttacagagagtccacaagaatcggaatgtcag

SEQ ID NO: 616627 - DNA, 80 bp, Homo sapiens
acttgaacttcataacactggagagcaaccatgtccaagggacctgcagttggtattgatcttggcaccacctactcttg

SEQ ID NO: 616628 - DNA, 100 bp, Homo sapiens
cgcaaaaccgggggcaagagaaagccctaccacaagaagcggaagtatgagttggggcgcccagctgccaacaccaagtgtatgtggtagaagaccaaag

SEQ ID NO: 616629 - DNA, 99 bp, Homo sapiens
tttgagcatacaccgagagagtgaggagccagacgacaagcacacactatggcgctgaaacggattaataagattgtaaaccatggctgtgtggataca

SEQ ID NO: 616630 - DNA, 75 bp, Homo sapiens
gtgcccaccgtcttcgaccactacgcagatgagaactggactgatgaccaactgcttggttttaaaccatgcaat

SEQ ID NO: 616631 - DNA, 100 bp, Homo sapiens
ggttgggttcagttttcttcagaagaaggacttcggaatgcactacaacaggaaaatcatattatagatggagtaaagaccacagcaccgggaagtccag

SEQ ID NO: 616632 - DNA, 75 bp, Homo sapiens
ccagacgcggcacagagagggcctgggagcttgctgcagcttcagccatggccatgcagaaaatctttgcccggg

SEQ ID NO: 616633 - DNA, 82 bp, Homo sapiens
agccgctggcagccgcggatctcaccgccgctcaggacatgggagtcccaccgtattgtccaggctggtctcgaactcctga

SEQ ID NO: 616634 - DNA, 80 bp, Homo sapiens
cgcttatgccaggccgatcccgacctggactcagacaagacgttggacctctcgaacaaccagctgagcgagatccctgc

SEQ ID NO: 616635 - DNA, 100 bp, Homo sapiens
agtgaagctaacaaagcgaagtggccatactcagcatcagacaacagtcagcgctttcgagaaacctgttttgcatttgccttgacaccacaacaagtgc

SEQ ID NO: 616636 - DNA, 98 bp, Homo sapiens
cctggagatactcttaaaagatgatgatgatgattcagactctgatggtgatggcaaaggcttcagggatgacttcttagggggcaggggaggtagtc

SEQ ID NO: 616637 - DNA, 123 bp, Homo sapiens
gtccggcggcgtggacagcgccgtggccgcgctgctgctgaggcggagagattttgcaagaacgaggctcaaggatgtgagggacacagtattgacagctgaagaaatgatttacgttttccc

SEQ ID NO: 616638 - DNA, 80 bp, Homo sapiens
gggttacaagcagcaagtgcgcggttggggccactgcgaggccgttttagagtccctgtgaagcaggaagagtgagggca

SEQ ID NO: 616639 - DNA, 101 bp, Homo sapiens
ccgagctcgatccgctgctcgcacgggagccagctgggtggatgtggcagataaccagatagactctggggacctgatggagtgtctgatacagaacaaac

SEQ ID NO: 616640 - DNA, 98 bp, Homo sapiens
tcggtcccgcgctgcgcatccccgcggacgccacagcgctgttaacgtccctaaaacccgccggactttctgtaagaagtgtggcaagcaccaacccc

SEQ ID NO: 616641 - DNA, 100 bp, Homo sapiens
caggacgtggacttggtgtgcattaacctgccgccgcccctcaccagacagatcgctgtcaaaaccctagtttgctgatggccgccaaagttggagttcg

SEQ ID NO: 616642 - DNA, 100 bp, Homo sapiens
ccgggctgcggcgtgtgcgcgcccgccagctgctccggagatacggcctcattgctacgatttcagagtaccctggtaatagctgagcatgcaaatgatt

SEQ ID NO: 616643 - DNA, 78 bp, Homo sapiens
ggtcgacgggaagggccaggcaggcagtgtatctgaaagtgcgcggagtgaaggaagcacaacctccaagagggaaaa

SEQ ID NO: 616644 - DNA, 82 bp, Homo sapiens
aggaatcgtatcgtatgtccgctatccagaacctccactctttcgcaattctgtggtgttcttggtcacacatttatggagt

SEQ ID NO: 616645 - DNA, 98 bp, Homo sapiens
gaatattttaccggaacaacattttgtgttgcagttgactccctcaatggattggtttacataggtcaaatgagttttgatcatcctgagaaaaatgg

SEQ ID NO: 616646 - DNA, 80 bp, Homo sapiens
gcgattattgaccagtggatctgcgcacacgccagttacagaatgtctgaaggggacagtgtgggagaatccgtccatgg

SEQ ID NO: 616647 - DNA, 100 bp, Homo sapiens
aaacgagaatgtgtcttctttaccaaagattccaaggccacgttcaccggaacagcacaatccgccctggctgtgatgtgaatccctcctgcgcactgtg

SEQ ID NO: 616648 - DNA, 98 bp, Homo sapiens
aacagaaagaagaaaacaagggaggagaagacaagctaaaaatgattcgggaatatcggcaaatggagccaaaaacctgtatatcatctccgtgaagg

SEQ ID NO: 616649 - DNA, 100 bp, Homo sapiens
cagacatgcaacctttcatcatgggaattcatatcatcgacagggagcagatcaaacgggtgaaggactcggatgacgtgcccatggtgctggtggggaa

SEQ ID NO: 616650 - DNA, 110 bp, Homo sapiens
gaggtggggggggtcagccccccgcccggccagccgccccgtccgggaggtgacaaacagcatgtttggtgcttcaagaaagaagtttgtagagggggtcgacagtgact

SEQ ID NO: 616651 - DNA, 90 bp, Homo sapiens
ggccgggatcacattctgattgtcacgagaagagaatgccttctagatgcaaaatcacctccaaaccagaccacttttcttgacttgcct

SEQ ID NO: 616652 - DNA, 128 bp, Homo sapiens
ctcgagaatacagagagaaaattgagacggagctaagagatatctgcaatgatgtactgcctgctgttcatgtacaaggtcaggaacctttgactgcttccatgttggcatctgcccctcctcaagag

SEQ ID NO: 616653 - DNA, 90 bp, Homo sapiens
gaagcgggcggcgcgggggagatggacctgaaggagaagaaggagaaggtggaggagaaggcaagccggaaagagcgaaagaaagaagtg

SEQ ID NO: 616654 - DNA, 75 bp, Homo sapiens
gaagcagctggcttcactgctcagcttcccatcgacggtcagtgcgcacgttgtaatcagctgaggccatgtcag

SEQ ID NO: 616655 - DNA, 98 bp, Homo sapiens
gattgtcagcagctgcctctgcagagcctggacggctccctccacgtcccggggagtttgttgcttgtctcctgtccctattacgacaaatgacagat

SEQ ID NO: 616656 - DNA, 74 bp, Homo sapiens
gtgacaccaagataagtaacagacagaagagatgggtgatgaagaagttttctcctggttgaagtgtgcaaagg

SEQ ID NO: 616657 - DNA, 75 bp, Homo sapiens
tgtgggatctgtaatagaaatgtgactctcctattccatctgtttcttcgggatcatcttcacctctttcagcca

SEQ ID NO: 616658 - DNA, 90 bp, Homo sapiens
ttaaacccttggaaaatttccggaaggaacaaataggcttcaccaaggtgaatgaaaactttgccattgatttgatagcagagcagcccg

SEQ ID NO: 616659 - DNA, 100 bp, Homo sapiens
aatacattgctgattatctcatgcagatgtctttggtggacttgggaaagaggttgctagaagcagcaagaaaaggccaagatgatgaagtgagaacgtt

SEQ ID NO: 616660 - DNA, 75 bp, Homo sapiens
acgcgactgggactaggccggaggcagcgggggaccggcaggtgtgatgaatgcagactctgctaccattttggc

SEQ ID NO: 616661 - DNA, 96 bp, Homo sapiens
ccgaggctcgcgggcggcgggcccggtcgtggcattcctggtggctttccatcagaacaagcagctcatcggtgacagggggctgcttccctgcag

SEQ ID NO: 616662 - DNA, 51 bp, Homo sapiens
agactgaaatgggggcgaccattcttaggaaatgctctatgtacagtgaag

SEQ ID NO: 616663 - DNA, 80 bp, Homo sapiens
agtgtgaggagttgctaaatgctcagggttatacaattccattagacaaacgtctggctgctgatggaagaggactacag

SEQ ID NO: 616664 - DNA, 96 bp, Homo sapiens
actatggcaacttatgcaagaaactgttgaattagacccgtttcctatagatgagaaaccatacaagctgtggggatggtggatccaggagagaag

SEQ ID NO: 616665 - DNA, 100 bp, Homo sapiens
gccatcctcttctacatcccccagattgtgcaggccctcaggtacgacaaggagcttgaagaaatccgcaaatgtgggatgaaaaacttccgtaacatcc

SEQ ID NO: 616666 - DNA, 100 bp, Homo sapiens
ctaaaaacttcatgtgtctggttgtttgaaatgtatttgcagtttcctgggactgctaggaggttctacctacagcgtcctgtccaccatgccctcagac

SEQ ID NO: 616667 - DNA, 83 bp, Homo sapiens
ggaacatgcagagtctgcacaaccaggcatggtggtgtgttcctgtagtcccagctactcgggaggctgagcaggagaatcgc

SEQ ID NO: 616668 - DNA, 96 bp, Homo sapiens
gggccgtcatgggcaccttctcatctctgcaaaccaaacaaaggcgaccctcgaaaggtaatcagatcctgtcccttgggagcctctcaaaagatc

SEQ ID NO: 616669 - DNA, 97 bp, Homo sapiens
tgaagaaaagggtgaaggaggcgaattttcagttgataggctatagaaagcgcaattggtggtaacgcttatcaacacagcaaagtgaaccagtgga

SEQ ID NO: 616670 - DNA, 80 bp, Homo sapiens
ccagaagtgatcgctcagctggagaacgcggctaaagttctgatgtgtggacgaatgtggaacctcgctctgtggctgtg

SEQ ID NO: 616671 - DNA, 101 bp, Homo sapiens
gcagctggaattgattcgtttacagatggagcaaatgcagcaacagccaactcagtttataaatccagaaacacctggctatgttggatttgcaaacctcc

SEQ ID NO: 616672 - DNA, 74 bp, Homo sapiens
catcaacctcacgctgcacctggtgaagctgtggtctaccaatctagacaactcagtggcaagcattgaggcaa

SEQ ID NO: 616673 - DNA, 82 bp, Homo sapiens
cggcgttgttcagtcagagcgagaacattccagagacaatgcagatcttcgtgaagactctgactggtaagaccatcaccct

SEQ ID NO: 616674 - DNA, 75 bp, Homo sapiens
gtttcaagaatataagaattctatctaaaagaagtgaatgaaaggtatattctgtaacagcaacaagtgggaatg

SEQ ID NO: 616675 - DNA, 101 bp, Homo sapiens
gggcctggcggacgcggcgccatcgcagtcagcccgagcgggaagaagttccgcagcaagccgcagctggcgcgctacctgggcggctccatggacctgag

SEQ ID NO: 616676 - DNA, 75 bp, Homo sapiens
cactgggaaacatcattaaatcgtacaaacccgtagtgctgatgaaccaatgacaacatttgttgtctgtaatga

SEQ ID NO: 616677 - DNA, 83 bp, Homo sapiens
gggcgccgcgggacctctccgggccatgggttagctttatacgtctacgaatatttactgcacgtaggagcacagaaatctgc

SEQ ID NO: 616678 - DNA, 96 bp, Homo sapiens
tccgacgccgatccggacagcggcacagaggagggagttgtattccctgaatgactataaaccacccatttcgaaagcgaaaatgacccaaattac

SEQ ID NO: 616679 - DNA, 100 bp, Homo sapiens
ctcctccgggagcttatgtacatgggatacaaatttgagcagtacatgtgtgcagacagaacaatggcagcccgagtacttataattggcagtggaggaa

SEQ ID NO: 616680 - DNA, 73 bp, Homo sapiens
tcgtgtgcaacgcgctactggcccaggagagaagtggatgggccctatacctccagccgtgaatgccagactt

SEQ ID NO: 616681 - DNA, 100 bp, Homo sapiens
cgcggcgggacgcgagcggcgagccggagcgcggagcccggctcccgcaccatggaggaggacgacagctacgtgagcaagaagaacccatcaggtgatt

SEQ ID NO: 616682 - DNA, 82 bp, Homo sapiens
cggcggcgaacatgcgcttttgacacattggagagccccccaaaattaaacgaggtcagttcagatgccaacagggaaaatg

SEQ ID NO: 616683 - DNA, 82 bp, Homo sapiens
aagatttctggccagtggagagaggaattcctcaagacaccattccagtgaattttgaagattgcaccggtcgacaaaggac

SEQ ID NO: 616684 - DNA, 100 bp, Homo sapiens
caagtatgaggagctcatcgtctgctcccacgagatcgcagccagcacggcccagctggtggcggcctccaagtcccaggtccagcgccagccctatcat

SEQ ID NO: 616685 - DNA, 83 bp, Homo sapiens
gagaaagctttcgagccagcaaccgaacacaccacagccatcagcactggaatgcaaagaccagaacaaacagaaggaagcca

SEQ ID NO: 616686 - DNA, 100 bp, Homo sapiens
cttcggagtacctgcgctatgaagacacgcttcttctggaagaccagccaacagcggacggaatagacctcagcagcggcgtggtgaggacttagctggg

SEQ ID NO: 616687 - DNA, 90 bp, Homo sapiens
acaacagaaacagaaacgattgtggaaacagggaagcagtttaagtgcacggtgtgtgactacacagcggcccagaagccacagctgctg

SEQ ID NO: 616688 - DNA, 74 bp, Homo sapiens
aaaagttcatccatctctagtttcaaggattatatgcgtcaggcaggagaagtgacttatgcagatgctcacaa

SEQ ID NO: 616689 - DNA, 100 bp, Homo sapiens
ccctggaatccctgtctgggtgcggactcggagaagccctcgagcatccccacagccatgaagctcatgactgctctggtgaatgttgccttaaacctca

SEQ ID NO: 616690 - DNA, 75 bp, Homo sapiens
ccaagcccgggcgccaccgctgccacctccgcgaggtagcagcaccgcctgcattgtggtgctggacagaaccag

SEQ ID NO: 616691 - DNA, 74 bp, Homo sapiens
cagggagatcctgaggggcttcaaactgaattccgagaaatctcttacctcaagaaattgaaggttaaaaaaca

SEQ ID NO: 616692 - DNA, 74 bp, Homo sapiens
ttcctcagcagcaccttcaagcaggcaaaatgtcgtgactttgagaatatgctgtggtttgaatctttgctgtt

SEQ ID NO: 616693 - DNA, 82 bp, Homo sapiens
gcgagaaggcctcgtgcaagcgctttgcccgaagtttttacatacaaattctactagtcacacctggccattcagtgcagtt

SEQ ID NO: 616694 - DNA, 82 bp, Homo sapiens
gcagcggaggagcccgaccgacccggtttgatctgtggatgaaatgaatcatgattttcaagctcttgcattagaatctcgg

SEQ ID NO: 616695 - DNA, 82 bp, Homo sapiens
gggggacctgccggcacgcgactccccccgggcccaaatgtggacgaatgtggaacctcgctctgtggctgtgttcccttgg

SEQ ID NO: 616696 - DNA, 101 bp, Homo sapiens
tgccaagcttcctccagtctgttgcaagcgtcttgctgtaccttgacacagcaaggtgcccggcgacgactgcccgctggtgtggggccagtgctcccact

SEQ ID NO: 616697 - DNA, 75 bp, Homo sapiens
gaaggatcgtccagtggctgaggctggacagagcacagctatggcattgctggttctaccaacgtgacaggtgat

SEQ ID NO: 616698 - DNA, 50 bp, Homo sapiens
gcagttttcatcatctaagtgaaagactttatgcagttggtggtcgtgat

SEQ ID NO: 616699 - DNA, 51 bp, Homo sapiens
gttgaggcctcctgtatccgaacacggttgggcatggagggactagagact

SEQ ID NO: 616700 - DNA, 93 bp, Homo sapiens
cgggtacctgcggccaattcggtggaacgaggacgcggactgcgaaggcagcagcctcccgcgacgatgcccctcaacgttagcttcaccaac

SEQ ID NO: 616701 - DNA, 83 bp, Homo sapiens
aaccagcctttggtcatcaccagggtatggcccatctcctgtacgcttggagcgacctttggctacgtggctggccttgttat

SEQ ID NO: 616702 - DNA, 90 bp, Homo sapiens
aggcgctggagaaatacaacatagagaaggacattgcggctcatatcaagaagggtatgttagagcccaccaaggaaccactgaaaccac

SEQ ID NO: 616703 - DNA, 98 bp, Homo sapiens
ggaggagccacacaagctggacagtctcctgaagcgtgtgcgcagcatgacagacgtcctgaccatgctgcggagtgagaaagatcagtctaaagaaa

SEQ ID NO: 616704 - DNA, 82 bp, Homo sapiens
gacctagtatttgaatttgctagtaacgtcatggaggatgaacgacaggtccgcccgtctgcgcccctcacaggaagccgga

SEQ ID NO: 616705 - DNA, 100 bp, Homo sapiens
ccaccgtgcacatccgaatgggcctatggcatgtctgcgttacctttaaatctgataaaaggcactagaagcgctgcttatgaacgtttggaaaacactg

SEQ ID NO: 616706 - DNA, 75 bp, Homo sapiens
ccatggctgtgactctctttccacaggtgtgatgaatgcagactctgctaccattttggctgtttggatcctcct

SEQ ID NO: 616707 - DNA, 90 bp, Homo sapiens
ttctgctccaggaaattcagcctcaaaaccgtcctgctgcttgctgaccaaatggctgaaggggatgctaagggagataaagcaaaggtg

SEQ ID NO: 616708 - DNA, 100 bp, Homo sapiens
atatttgaaagaaattcttcaagatttggttaagaaccttacaagcaatatgtggcgagttcgagaatccagggtgattctgggggtccacttgtctgta

SEQ ID NO: 616709 - DNA, 51 bp, Homo sapiens
ttccagactcggtgctgtacccgccgaggaagaaggcacctacgatcaaac

SEQ ID NO: 616710 - DNA, 51 bp, Homo sapiens
gtcaacattgcccagcaagtgccacatccatcctgaagcggcagaagcagc

SEQ ID NO: 616711 - DNA, 75 bp, Homo sapiens
gccgcctccgaagatgggggatttctacgacccggagcacccgacccctgagtattctctgaaaccaaatgacca

SEQ ID NO: 616712 - DNA, 82 bp, Homo sapiens
gattcccttgcaaatttacatacgagaatggcttgtgaaatcatgcctctgcaaagagtcttttattcaaaacttcagcgtt

SEQ ID NO: 616713 - DNA, 50 bp, Homo sapiens
cgaaagtccagggtccctgcccgctagccgctgccatggcccagacactg

SEQ ID NO: 616714 - DNA, 75 bp, Homo sapiens
ctggatctgctgccagcattagcctggctcaatatctaatcaatgtcagggctgactctgtggcctggaatcccc

SEQ ID NO: 616715 - DNA, 101 bp, Homo sapiens
ctggagcagagccgagcccgcctcatccccatcattgtgctgctattgcagaagattgaggtggtgccttctgcctctgccctgatcatcaaagccctcaa

SEQ ID NO: 616716 - DNA, 115 bp, Homo sapiens
tagcattcctttcgaacaccacggcaagtagctgctcgtctcccatcggaaggcagcactggcgggctgacgcacgaggcacacaggaaggaggtggagcaggtgtatctgcgct

SEQ ID NO: 616717 - DNA, 122 bp, Homo sapiens
agctgcacctatgacaaagttcagagctacaattccgatatcaacgaatggagcctcatcacctccagtccacatccagtattattttggcgacttcaatttgccacgggacaagtttctaa

SEQ ID NO: 616718 - DNA, 58 bp, Homo sapiens
ctgcccggtccgcccgcggtgagaggtgtaattgaaaagtgatcctctcttcagagat

SEQ ID NO: 616719 - DNA, 95 bp, Homo sapiens
ctcccggcaactttctccctcgcagcgccccgcccgcccgcggctccccagccccaggccgggaggaatgctgaaatacttttaaagctgataaa

SEQ ID NO: 616720 - DNA, 83 bp, Homo sapiens
gtttgatacttccagatttcatcctcagataagtgccatagagttcatttccatttgccgtatcgatggcaattcttggatag

SEQ ID NO: 616721 - DNA, 75 bp, Homo sapiens
ccgggtgggtctctccccagcgacgatttgggtggatgtacgaagtaggtccaaagttgttgaccgtatttacag

SEQ ID NO: 616722 - DNA, 100 bp, Homo sapiens
ggatttctggactccactgttggaaatgtagacaaccaatttcctgggcaagctgctccacctggattcccagtgtatcccgcgtttagcccactgcaga

SEQ ID NO: 616723 - DNA, 80 bp, Homo sapiens
gagcaatacgtttccattgtgatcccaccttctgggcaaagaatgtagtcaatttaggctagagctaatggtctgcagtc

SEQ ID NO: 616724 - DNA, 144 bp, Homo sapiens
gtcgcaacaaactgctgagacgcacagtctccgtgccggtggaggggcggccccacggcgagcatgggcaagctgcctgtcctgctgcttggccgctcctcagagctgcggccgggagagttcgtggtcgccatcggaagcccg

SEQ ID NO: 616725 - DNA, 89 bp, Homo sapiens
ctccagagctccgacttatttctgtgggcagacattaacattcagccctgcagagcccagggagatggaagacttcgcccgaggggcgg

SEQ ID NO: 616726 - DNA, 75 bp, Homo sapiens
tgaaaaagagaacttggcaatagaaagtcaatcgactgacttccttttggtagtactgcgtgatgttgttcaggc

SEQ ID NO: 616727 - DNA, 75 bp, Homo sapiens
acaatgaaatgagttgttcaccttaacccattacggtctacatgttcaagtgcgtgtggcggtgctacagattga

SEQ ID NO: 616728 - DNA, 83 bp, Homo sapiens
cagatggcagccagtcagtggtggagcgcatggatttaggagaatgtaccaaaatccacgacttggccctccgagcagattat

SEQ ID NO: 616729 - DNA, 100 bp, Homo sapiens
ccctgtgtactttccatttgccttcctggatctacgaactgcgtgtgatggagaccaaacccgacaaggcagtgtccatcattgagtgtgacatgaacgt

SEQ ID NO: 616730 - DNA, 98 bp, Homo sapiens
ggcccagggagagcctggttctgtaccactggacccagtccttcagctcgcagaaggtttctaccatgaatgaaatgaagagttattctcaagctgtc

SEQ ID NO: 616731 - DNA, 98 bp, Homo sapiens
ctcgagttgtcctgactcctctgaaggtaaacggggcccacgtggaatctgcatcagttaccttatcccatatcacacaactggtcctcagccataac

SEQ ID NO: 616732 - DNA, 75 bp, Homo sapiens
gttgtcgcccttttctactttgccagcaaactggtgctcaaggctgcaggtgatattgttgacatacgagaagaa

SEQ ID NO: 616733 - DNA, 50 bp, Homo sapiens
ggcctccccagccacatggaacttgaattagtgccatcttacgattcagc

SEQ ID NO: 616734 - DNA, 75 bp, Homo sapiens
agaaaacagcaggcacccaagcgggcggcagcatcagtatgacaacctgttccaccgtggccgccctgggaatga

SEQ ID NO: 616735 - DNA, 50 bp, Homo sapiens
ccaggaccggccgaacgcagagactgtgccctgtccacggtgcctcctgc

SEQ ID NO: 616736 - DNA, 83 bp, Homo sapiens
ttgggctgtgttgacatcaaggatctaccaggagcatgcctttgagagcagtcagaaatataaggaaggaaaattcatcattg

SEQ ID NO: 616737 - DNA, 90 bp, Homo sapiens
tgaagcaggacaacatagcggtgaaggcgaacgcggtctgcaagctgacgtatggcgtctctggccgagcctctttttgtggaaaacgac

SEQ ID NO: 616738 - DNA, 98 bp, Homo sapiens
actgtcatcactctgccgcacgtgattgtggagaatatccctctccatgtgaatgcagtgacagactggatattggaaagagatccccatgaagaaat

SEQ ID NO: 616739 - DNA, 98 bp, Homo sapiens
gagttggttcctttgctggaaacctgtacagcttgaccgacagacagcctcagccagcagtacccctggaccagaggaggtagacagcgcctctgctg

SEQ ID NO: 616740 - DNA, 75 bp, Homo sapiens
tcatgaacctgtctctcctcgaagtcttcagcgctcaagatgaacatttcatcccgtgacaatgccatgcccgtg

SEQ ID NO: 616741 - DNA, 75 bp, Homo sapiens
tacttttacctacgttggcggccccagaagtctttcccagggaactccgatgaagtgttccaacaaaatgagcga

SEQ ID NO: 616742 - DNA, 100 bp, Homo sapiens
gggaggggcttcagcatcgtcacggacactcctgagctacagagactgaagaggactcaggagcaaatcagtaatgccaggcacctcattgagaagtcag

SEQ ID NO: 616743 - DNA, 100 bp, Homo sapiens
gaggatatgatggttacaatgaaggaggaaattttggcggtgcaaagaacagtctgaacttgatcaagatttggatgatgttgaagaagtagaagaagag

SEQ ID NO: 616744 - DNA, 75 bp, Homo sapiens
gattcagtgctactcccttagtaactatgcagttttaatggaagagcgccgtgtgatttatgtcggtaaaatcag

SEQ ID NO: 616745 - DNA, 105 bp, Homo sapiens
ttaacatcgtgacctccagttccatccatgttgctgcaaatggaagaagaggaggggtcagaagacgatagcaatgtgaagccagacttcatggtcactctgaaa

SEQ ID NO: 616746 - DNA, 88 bp, Homo sapiens
agaaaattgagacggagctaagagatatctgcaatgatgtactgctgtgtgccaaccacgatgcaaacatggtgaatgtatcgggcca

SEQ ID NO: 616747 - DNA, 80 bp, Homo sapiens
agcttcttttctaatttgtttttattctgagatcagatgagatcggcatgttcaggttgagactgagctaaagttaatct

SEQ ID NO: 616748 - DNA, 100 bp, Homo sapiens
tcttacctttcaaagtggtgggatattatagatattcagaagaaggatgctgttaaaagcctgaacccccgccaacaaacaaatggcaacttgataattg

SEQ ID NO: 616749 - DNA, 75 bp, Homo sapiens
atcgacctgcagtccatgcaccagtttcgccaggacacaggtgatggcatcagctgagaagggaaggaagcccat

SEQ ID NO: 616750 - DNA, 104 bp, Homo sapiens
ggcggacggcgtggaccacatagacatttacgcggatgtcggcgaagagttcaaccagatgtgaagttcatttccaatccgccctccatggtggcagcggggag

SEQ ID NO: 616751 - DNA, 98 bp, Homo sapiens
actgatgaccaagagaatgtgtcagccgatgcaccgagtccagcccaggaaaatggagagtgagggccccaaggctgttgcagctcctcgacctgatc

SEQ ID NO: 616752 - DNA, 80 bp, Homo sapiens
gaaaagacaattgatgacctggaagggagtgcatccgccccaacccttttccccctcgtctcctgtgagaattccccgtc

SEQ ID NO: 616753 - DNA, 90 bp, Homo sapiens
ccagacagatcgctgtcaaaaccctaggttgaaatcacaaagattagacacctttttagataggtgttcttcagcaccactgacaacacg

SEQ ID NO: 616754 - DNA, 100 bp, Homo sapiens
tgccgcgggggccgctcgcgtcctccatggaggccggaggttctcctcagtgaactggcagtaccagtgtgggcttacctgtgagcacaaggccgacctt

SEQ ID NO: 616755 - DNA, 125 bp, Homo sapiens
ctcgaaaattccttgatacctctcactattctactgctggaagctcaagtgtttctgatgaagaattgaaaagaagagtagctgaggagctggcattggagcaagccaagaaagaatccgaagat

SEQ ID NO: 616756 - DNA, 100 bp, Homo sapiens
cagacaacttctggcagaaacagaggactaattttggcagttctaaatttgaatttgagcttatagtgatttaggatactacattatcaataaactgcac

SEQ ID NO: 616757 - DNA, 83 bp, Homo sapiens
gaagatgatgctgccattaccttgggtggcccagttgaaatccttcccttcctctaccttggaagtgcctaccatgcatccaa

SEQ ID NO: 616758 - DNA, 100 bp, Homo sapiens
acgccgcctggcaggccctgcgcaccaggtacttttacccatttccagttccacctttactttatcaagtggaactttctgtgggaggacagcaatttaa

SEQ ID NO: 616759 - DNA, 98 bp, Homo sapiens
cgcatccaccagctgcaggctgagcgcgcgcagggcttccgccgactggaggagccctgggaggagcggggacactgaggacctctctccaaattggc

SEQ ID NO: 616760 - DNA, 50 bp, Homo sapiens
tgctcttcctcccttcgctcgcaccatggaggcaaaaccttcaactgagg

SEQ ID NO: 616761 - DNA, 100 bp, Homo sapiens
aagtgctcatgctggaccagcagtatgacaccttccacaatggcagctgggtccacctcaccatcaacggtgcacattcaggttcccgagcacaaacatc

SEQ ID NO: 616762 - DNA, 100 bp, Homo sapiens
gattcaagatgtatgttcagcagttggacttaacgtatttcttgagtggttggcacttaccatggttccccagaccagtcccatcaagtgactggtaacc

SEQ ID NO: 616763 - DNA, 50 bp, Homo sapiens
cctccagagtggctgggattacaggacccagtggcctttgaggatgtggc

SEQ ID NO: 616764 - DNA, 100 bp, Homo sapiens
caaaaagcttcagagttctctaaaaaaactggctgtgaataatatagctggtattgaagaggcttctcgtcagtgcctcgcaggatggtaaacttatcat

SEQ ID NO: 616765 - DNA, 98 bp, Homo sapiens
acactttcgcaacatcaagggagttttccggggccctctcagcaagaacgggaacaaaactctgtaaacctatgatggacttgttgatattcctttgt

SEQ ID NO: 616766 - DNA, 100 bp, Homo sapiens
ttccaactgccctttggttcacaaaccaggatgttcctccacgaagttgccagggcctgtccagtgtgggccaaactgaaattgcagaaggcttcagaac

SEQ ID NO: 616767 - DNA, 90 bp, Homo sapiens
tctggcttgccaacaatatagtttggtgtttcggaagccaagacagaacaatggcagcccgagtacttataattggcagtggaggaaggg

SEQ ID NO: 616768 - DNA, 100 bp, Homo sapiens
gcaccatgtcgaatctgagcaaaggcacgggcagccggaaggacaccaagatgcggatccgggcctttccggacatggatttgattgacatactttggag

SEQ ID NO: 616769 - DNA, 73 bp, Homo sapiens
gaacaatacgagcagatccttgcatttgtccaagaccccaccaacaactgaacgctttggtcaggctgctaca

SEQ ID NO: 616770 - DNA, 82 bp, Homo sapiens
cgccggtggacagtcctgatgacacagccctcagcgagagtgccaaccaggccttcctggtccctgtgcgttttattgcgac

SEQ ID NO: 616771 - DNA, 75 bp, Homo sapiens
gcctatggtggttccatgtgtgctaaatgtgttcgtgacagatccgaaagcccccaatgtcgttgtcacccggct

SEQ ID NO: 616772 - DNA, 100 bp, Homo sapiens
ccaggggacttctccatctctgtcaggccccttcacagatgtagtcactacaaatcttaaattgcgaaatccatcggatagaaaagtgtgtttcaaagtg

SEQ ID NO: 616773 - DNA, 89 bp, Homo sapiens
cgagcgaggaggatggcggagtcggggctcctgacggttaaacccatccagagtaatggctgcggccttacccaggaccctgggggagt

SEQ ID NO: 616774 - DNA, 97 bp, Homo sapiens
tcatccccttccgcacccgcctcggactctattggacctttccaaagtgaaactgatgagatttgatgatccactgttggggcctcgacgagttcct

SEQ ID NO: 616775 - DNA, 82 bp, Homo sapiens
gccttcatggaatgtcttcaaagaatattaaaaaatctggagggactccaacttcaatgtctgaatcaccatcttattctcc

SEQ ID NO: 616776 - DNA, 100 bp, Homo sapiens
gcggagcctgcgtgctggtgatcgcgctgatgttcctggcctggggggaaggacagctactaaagcttatccacagtctccaaagacaacgaaacctccc

SEQ ID NO: 616777 - DNA, 100 bp, Homo sapiens
cagctgcaaggagggcggcgggactgcactcgagtgtccagacctgctcgatgaacatacatatgatagttgagaaagacacatattctgatcatgaaga

SEQ ID NO: 616778 - DNA, 82 bp, Homo sapiens
gcggaacgcaggagacacaagaagcggatccagcaattctgtggtgttcttggtcacacatttatggagtttctgaagggca

SEQ ID NO: 616779 - DNA, 100 bp, Homo sapiens
gaagcctttttggtggcatggtcctcaagaagttcctaaaagcacacactcacgggacacagtgggaaagtgctgtctgctaagttcctgctggacaatg

SEQ ID NO: 616780 - DNA, 85 bp, Homo sapiens
cgagtaaacattgttgatctacaacaggtgtttcagggtaactctaactttcgggacccagtgcaaaacaatttcatccctccca

SEQ ID NO: 616781 - DNA, 82 bp, Homo sapiens
ctgctgctgctgcccgcgtccgaggctcgcgggcggcgggcccggggcatttttggtcgaagagagctgaagtaatgagaag

SEQ ID NO: 616782 - DNA, 100 bp, Homo sapiens
ctggtgatcgcgctcgttcccgtcggccggggtggacgacatccttggagaaggcagcgacgacagcgacagcgagaagaggaggcctgaggagcaggag

SEQ ID NO: 616783 - DNA, 50 bp, Homo sapiens
acaaccttcgatctcctgacgaaactatgaatagactgacccagctggaa

SEQ ID NO: 616784 - DNA, 100 bp, Homo sapiens
agaagttctcgaatcattctttgtacagaaattgaaaggcttcaaagctagcagatatcggaaactggcactgaagtggcatccagataaaaatcctgag

SEQ ID NO: 616785 - DNA, 101 bp, Homo sapiens
cgcccgaagccgggagccgccgccatgggggcctgcctgggagcctgctccctgctcagctgcctttgggacatccggaagaaagcagccatccagacatt

SEQ ID NO: 616786 - DNA, 100 bp, Homo sapiens
ggcctttgtaaaattgacagagaggggaaaccccgtaaagtggttggttgcagttgtgtagtagttaaggacatgatccacatcgcggacaccaaggtcg

SEQ ID NO: 616787 - DNA, 97 bp, Homo sapiens
tggcctcgagtttcctgatcacaaaaagatcacggtatgcagggagttccagcgaggaaactgtgcccggggagagaccgactgccgctttgcacac

SEQ ID NO: 616788 - DNA, 96 bp, Homo sapiens
atctactgtctttttcttcaatgggcagcatatgaaagtggattatgggacagtcattttgtttactcattcagccctgttgcaggtcccaataaa

SEQ ID NO: 616789 - DNA, 82 bp, Homo sapiens
atcggcgccgcggcaagagccaggagggtgtgaagacagagaatgaccacatcaacctgaaggtggccgggcaggacggctc

SEQ ID NO: 616790 - DNA, 74 bp, Homo sapiens
tgccatcaatgggtgtcaggagctgagcttgccccgccaggaacccctgaggccagacgaggacagccggctgc

SEQ ID NO: 616791 - DNA, 82 bp, Homo sapiens
ggatttggatgtgggatccggttccttggtgtcatccagccttagcaaaccagaggttaaacccatccagagtaatggctgc

SEQ ID NO: 616792 - DNA, 100 bp, Homo sapiens
ctaaattcccagtaattgctcctttggccttctagggactgacttcaaagaaggaaggaaagaatcaggcagtttttccaggggcattgttatttgtgac

SEQ ID NO: 616793 - DNA, 50 bp, Homo sapiens
tcgagcccgggaagtgcgttttggctatggtgaactaaacggtaatgctg

SEQ ID NO: 616794 - DNA, 100 bp, Homo sapiens
caaagacagctttcacagtttgcgggactcagtcccatcactccaaggagagaagtcggagtctagccagtcagaggcgtctgtccggagggaggaatca

SEQ ID NO: 616795 - DNA, 83 bp, Homo sapiens
ccacagcctcccgcgcctcgctcagctccaacatgctattgtggacgatgaaaggctctctgcagaggagatggatgagagga

SEQ ID NO: 616796 - DNA, 74 bp, Homo sapiens
ggaactgatagcttatggttctccattgtgatgaaagcacatggtacaggtgtttttccacagcaggaaatgat

SEQ ID NO: 616797 - DNA, 96 bp, Homo sapiens
ccgggatgcggctctgagccagcggcggcttccagcccgactgggcctgccggggctgccccgcgcacgaatgtttactcagtgcctggctcccag

SEQ ID NO: 616798 - DNA, 99 bp, Homo sapiens
gcgtggaacggctgcttttggaagatttgtaggatcactgggtaccatcatcataaaatgtaaagattttcgaattattcagttggatattcctggaat

SEQ ID NO: 616799 - DNA, 100 bp, Homo sapiens
aggggaaggcgcctgaagaggacgaaggtctggagcccggcactgtggtcataacagagcaggcagtggatacctgcttcaaggcagagtttgagcagat

SEQ ID NO: 616800 - DNA, 100 bp, Homo sapiens
gtgggacttcgaaggagggctctcctgtctgccaccatcctgggttgacaattctacacaaggaggttttgcactgattgcaaaaataaagtcctccgag

SEQ ID NO: 616801 - DNA, 75 bp, Homo sapiens
ggaacgggtggccgattactgcgagaacaactacatacagcatatagcactttctacattgtgggtttaatatta

SEQ ID NO: 616802 - DNA, 100 bp, Homo sapiens
gcggggaccatgttgcttccgaacatcctgctcaccggtcctgtccaaaatgcattgctgtcttcacaagagtcagtgagccaaggatacaatttccagc

SEQ ID NO: 616803 - DNA, 100 bp, Homo sapiens
gtcccagccagccaagtgacgctgacattaaggaccagccagaaaatggctcatgctgaagattcggttatggaccatcatttccggaagccagcaaatg

SEQ ID NO: 616804 - DNA, 100 bp, Homo sapiens
ggctgtttggaaagacccaggagaagccgcccaaagaactgggaacacaacagtagatgagttaatgatgagactcatggctgcaatggagatcttcaca

SEQ ID NO: 616805 - DNA, 76 bp, Homo sapiens
aaaaagtgaagaaaacaactcaggtcaaagactacagctttgtcactgaaggtggtgaagcagtattttccaattt

SEQ ID NO: 616806 - DNA, 75 bp, Homo sapiens
tggttcaacagctccggctggaggccggactcaaccgcgtaaaagagtccaaaactacttacctggaagaccttc

SEQ ID NO: 616807 - DNA, 75 bp, Homo sapiens
gtatttggctgaggagttttcaatcccaaagacttgcactatctgccagatgctgcttcctaaccagtgcagtta

SEQ ID NO: 616808 - DNA, 74 bp, Homo sapiens
agacgcgctccgtgtggacgtggaccagctggagaaggtgcttccgcagctgatcccagatgcagtgactggtt

SEQ ID NO: 616809 - DNA, 101 bp, Homo sapiens
cttagataacagccatcctattgaagatcccatgacagattctgttgtcacgtctccttacagagtttgagcggtgctgaactgtcagcaccatctgtccg

SEQ ID NO: 616810 - DNA, 75 bp, Homo sapiens
tgcgctctttgaaagcgccccggaatgacctgtcgcctgccagctctggtgtgctgatgtatcgggactaccccc

SEQ ID NO: 616811 - DNA, 97 bp, Homo sapiens
acaccgccaagaagcccatcatcgagactgacttgcataccaaatgtgtggtggatgtggatgcaaacaaggttattcttaatcctgtaaatacgaa

SEQ ID NO: 616812 - DNA, 100 bp, Homo sapiens
ggtggggagatgaacccaacctagtgggtgtaatacatcatgaactgcaggtccggttccagttgttggcaaaggagaggaagaggaagaggaagatggc

SEQ ID NO: 616813 - DNA, 98 bp, Homo sapiens
ttcgaggggccaaggcagaagaaatcttggagaagggtctaaaggtgggtgaattttctggagccaataaggaaaagcttgaagccaccattaatgaa

SEQ ID NO: 616814 - DNA, 99 bp, Homo sapiens
gaagatgattccaacgccaccaattccaacctgaacgtgcgcatcgaccccagtagcctgtccttcaacatgtggaaggagatccctatccccttctat

SEQ ID NO: 616815 - DNA, 100 bp, Homo sapiens
tagacatttacgcggatgtcggcgaagagttcaaccagactttatattcagagcaccaatcaaattaagcaagcctggggaacttcgtgaggaatatgaa

SEQ ID NO: 616816 - DNA, 88 bp, Homo sapiens
cagtattttagcagtccattccaaagacaactataaacgagtgactgggacaagctggtggtagattggttagagagtattgccaaag

SEQ ID NO: 616817 - DNA, 75 bp, Homo sapiens
aaatgtaatgcacgttggactacagaagagcagcttctcgccgtacaaggcagaatatctcttcaagaacaatcc

SEQ ID NO: 616818 - DNA, 100 bp, Homo sapiens
aggattcgatggcaattttttgtggaacagaattggagcaggcctccatgaagaagtggactattctgagaaactgaagttcagtgatgatgaagaggag

SEQ ID NO: 616819 - DNA, 83 bp, Homo sapiens
ccgggacagtgacgacgacagcgtcctcgaagccaccagctcccgggacccgctcagcgatatgtgaagttcatttccaatcc

SEQ ID NO: 616820 - DNA, 75 bp, Homo sapiens
ttcatctcttgtgtggggagtttcatcctagcgggaaagaccacagcaagattctttcattcgtctcctcctagc

SEQ ID NO: 616821 - DNA, 105 bp, Homo sapiens
tgcagaggacacgaggcggcgggctggagacatggaccgcggcgagcaagatgaaggatttgggggcagagcacttggcaggtcatgaaggggtccaacttctcg

SEQ ID NO: 616822 - DNA, 95 bp, Homo sapiens
tcggtttgagccaaaaccacaataacttttttctgcaaagtaatcaactgctaagagctgggatgaagctctcttgactatgagtaaaggagaaa

SEQ ID NO: 616823 - DNA, 51 bp, Homo sapiens
caacaccacaataatccacagccaagttgttgacctcctgtactggagaga

SEQ ID NO: 616824 - DNA, 50 bp, Homo sapiens
tgtgaaaaggctggtgaaagttaagagctggaagtcgagtgtgctactca

SEQ ID NO: 616825 - DNA, 75 bp, Homo sapiens
gatcgtcgagatgtctacttcgaagactggcaagcacggccacgccaaggcatccaggctggagaagcagaacag

SEQ ID NO: 616826 - DNA, 83 bp, Homo sapiens
ctcggcagccttgcgctgctctaatggtccggacttccgtgtgataaggaagcctgtgtgggtaccaacaatcaaagctacat

SEQ ID NO: 616827 - DNA, 118 bp, Homo sapiens
cgtcaactcataatatggatgtccccaacatcaaaaggaatgacttccaggtcttgccgccttggtagcttgctcctggtatggccatcagattgtcacagacttttataaccctttg

SEQ ID NO: 616828 - DNA, 82 bp, Homo sapiens
tcacactgcagaactgggttctggactttgggcgtcccattgccatgaaattcggaactatccgggcagatttgattgaaca

SEQ ID NO: 616829 - DNA, 96 bp, Homo sapiens
gtattccaaatttgatggcaagtgttccaagagctgccagggtggctttcgggtccgggaagtgcggtgtctgtctgatgacatgactctaagtaa

SEQ ID NO: 616830 - DNA, 100 bp, Homo sapiens
ctgcagctttcagcaggggccaaggacaggaagcagttttcggctttgtgagaaaccttaccatcaaacacgatggccagcaacgttaccaacaagacag

SEQ ID NO: 616831 - DNA, 75 bp, Homo sapiens
aagcctcttctgtttccaatggggtagtgggcagcagtcagtgacaggtgtaacctctgtggatgacagcaacag

SEQ ID NO: 616832 - DNA, 74 bp, Homo sapiens
agaagatcatcgagcatttcaaacggtagaacgtcatgacatgaataccttaagcctgcccctgaacatacgcc

SEQ ID NO: 616833 - DNA, 98 bp, Homo sapiens
aaaaaaacaggagatcagtgagctagcagcagagaagccttcctggaaaagggggcagtaacagccatgaccaaagctttggccctggatgaaagtcc

SEQ ID NO: 616834 - DNA, 100 bp, Homo sapiens
cagacgtggggcgatgcttgtgaccctgcagctcctcaaacttcagccccaggaaatcagcccccctcctactgccaacctggaccggtcgaatgataag

SEQ ID NO: 616835 - DNA, 100 bp, Homo sapiens
aaagatctccaggagttcattcctcttatcaaccagattacggccaaattcaaggaccctgatgctcccataagacagaaaatgccccttgatgatctgg

SEQ ID NO: 616836 - DNA, 52 bp, Homo sapiens
ctcctgagtagctgggattacagactgggctggcttagatgaagatgaagat

SEQ ID NO: 616837 - DNA, 83 bp, Homo sapiens
tgaagacgttccttgaggaggtttgaaaaagtttgcctgtctgtcctgagctggtgagggaacacatacctaaaaccaaggat

SEQ ID NO: 616838 - DNA, 100 bp, Homo sapiens
ccccggcctctcggcctctgccggagaaacaggtgtgatgaatgcagactctgctaccattttggctgtttggatcctcctttgaaaaagtctcctaaac

SEQ ID NO: 616839 - DNA, 96 bp, Homo sapiens
ctcacctggttcatggttcttcacctggtgtgatgggaacttcagtccctgcactaggtcagacaatcccctttggggtacaggaaacaaagcagg

SEQ ID NO: 616840 - DNA, 114 bp, Homo sapiens
ctgtgctggccgcgggagaggtaaacagaacaccaggacatcccagagtctgggaaatgacaatgcagatcttcgtgaagactctgactggtaagaccatcaccctcgaggttg

SEQ ID NO: 616841 - DNA, 50 bp, Homo sapiens
ctggcggtcccgggtgctgctggttttgagcaaaattttggactgtgaag

SEQ ID NO: 616842 - DNA, 88 bp, Homo sapiens
ccccgcgcagctggctggcggagcatgagcgccccagcctgctatgggatggatgaagaagagaaccactatgtctcgcagctcaggg

SEQ ID NO: 616843 - DNA, 73 bp, Homo sapiens
ctgggctgtctggaaatctgagaaccaggacaatcctgtgattgatgaaatagacttccttgaagcttttaaa

SEQ ID NO: 616844 - DNA, 75 bp, Homo sapiens
gccaaagagttgtaccgagactataaccacggtgtgctgaagataaccatctgtagagatgcaggtcagctcctc

SEQ ID NO: 616845 - DNA, 82 bp, Homo sapiens
cgaggagctgggccggctggaggcttgcactcgcaagagaaggttcgttccaccagtcataaaccagatgaaatctatggca

SEQ ID NO: 616846 - DNA, 100 bp, Homo sapiens
cgctcctgccaatttatatgtcagaggtgctcagcagggagaccccctttcccgctatatcttcaggaaggctggggagatgctgggcagacacatcgta

SEQ ID NO: 616847 - DNA, 90 bp, Homo sapiens
cattttcaaaaagattccatttatagacacccttcattgcaagttcttatttgtaaggtcatcatggtcacaggagaccatccaatcaca

SEQ ID NO: 616848 - DNA, 82 bp, Homo sapiens
agcagtagctgttgtttgggctgtgtttcgaaatgaagacagtttattaaccttgcaagaactcttcaggcacatatggaag

SEQ ID NO: 616849 - DNA, 74 bp, Homo sapiens
ggtcaggacagattctctgtggagaggcctggcagaacgaagaggatggactctagtatgggattcctttctac

SEQ ID NO: 616850 - DNA, 100 bp, Homo sapiens
tcagggaagcgagcaaggggcttggaagtgcctgaagccagtgggctggggactcacggccgggacactcagggcagacatgcaagaaagcacttcagcc

SEQ ID NO: 616851 - DNA, 82 bp, Homo sapiens
gggactcgtacgagaacctcagtgcagatggagaagggggaaatttgcagtggtgagaaaatgtataaagaaagattctggg

SEQ ID NO: 616852 - DNA, 101 bp, Homo sapiens
aactcagcagcggaggctggacgcttgcatggcgcttgagagctggtggagttgagatctataatggagatcgtaaaataaaggtttccaacaccctggaa

SEQ ID NO: 616853 - DNA, 83 bp, Homo sapiens
cgctgttcgacgtgcggcccgaatgccagcgcctcttctaccggggcaagcaggcacattcaggaccccgcgagccagcggct

SEQ ID NO: 616854 - DNA, 75 bp, Homo sapiens
gtatcatgagcattggatttgatcacatggtccctctccaagatcctggatgtggccagtttggaggtgctgaac

SEQ ID NO: 616855 - DNA, 51 bp, Homo sapiens
aaaatcttcacttctgggctcaggaggtcctaggcctacttacaagcctcc

SEQ ID NO: 616856 - DNA, 75 bp, Homo sapiens
gctccaggaagagcaaagccgagctgcaggtgaaatgacaatggatgctctgttggctcgattgaaacttctgaa

SEQ ID NO: 616857 - DNA, 50 bp, Homo sapiens
gttcttgactccgctgctcgccatggagccttcacgtaaatgggtccagt

SEQ ID NO: 616858 - DNA, 97 bp, Homo sapiens
gcagtccgagagctagatggaagtggccacaagtaatcatcctgagactgactacaagaacaaagactgggtcttcatcaattacacgtacaagcgc

SEQ ID NO: 616859 - DNA, 100 bp, Homo sapiens
aggcaggctcgagtgcacggagcgtcccttccatcaggagagcaaattgtggctactaatttgccccctgaagatcaagatggctctggggatgactctg

SEQ ID NO: 616860 - DNA, 88 bp, Homo sapiens
atgtattgagtaaaaggaacttcggtacacaggcctttagtgatgtggtggtaagatgtatgttgattatggaagattcccacaagag

SEQ ID NO: 616861 - DNA, 75 bp, Homo sapiens
gcgatcttaagcgcgcatctgtggaaacaattaagaaagaccacagcaagattctttcattcgtctcctcctagc

SEQ ID NO: 616862 - DNA, 83 bp, Homo sapiens
ttttgagagagctacttttctggtccttgaatgggcaagagggcacatgaagtacggcgtcctccacattcacggcctctaca

SEQ ID NO: 616863 - DNA, 100 bp, Homo sapiens
cagaggcgtcgggctgctgaacaccgggagctactatgagcacgtgaagtttgctgacctctctgaggctgccaaccggaacaatgacgccctgcgccag

SEQ ID NO: 616864 - DNA, 51 bp, Homo sapiens
tggcacctatgcgcctgcagaggtgtggatccggagttgtatgagttaaca

SEQ ID NO: 616865 - DNA, 59 bp, Homo sapiens
aacctcattcaggggaagagtacactcgagatgaaggacgcgagaactcttggaactgg

SEQ ID NO: 616866 - DNA, 87 bp, Homo sapiens
caggaggggttaaacttcggctgaagcacaggattggtccaaaggaagattttttccattgtttgaaatgtaacttatgcctagcta

SEQ ID NO: 616867 - DNA, 75 bp, Homo sapiens
gagctggaaggtcttggagcgaagagctcggaccaagcgctcagatgctcccataatactctcagatagtgaaga

SEQ ID NO: 616868 - DNA, 75 bp, Homo sapiens
gtggccgcgagtgcatcttccacgggttatggttttgtgaaattcacagatgaactggaacagaagcgagccctg

SEQ ID NO: 616869 - DNA, 83 bp, Homo sapiens
caggtgcttggcaaaatcgagcgggccattgggttgtgagtcccggcccagcccctccacccccctgcccccccgatgcgacc

SEQ ID NO: 616870 - DNA, 75 bp, Homo sapiens
gagctacgtggacgcaggaactccagagcacatggatgaagtatgctcctcgcagcttctaacttcagtaaggcg

SEQ ID NO: 616871 - DNA, 100 bp, Homo sapiens
gggagttgagccacgagctgttgtgcatccagaggtggaattggggcccgggagccccagactctggtaaatgctctgcttcctcctgcctggatacttc

SEQ ID NO: 616872 - DNA, 87 bp, Homo sapiens
ggtcccggaggagcaggtgcagagcactgcgctgtcagcgatagcccagtggatggccattccagaactttccatgactggatcaca

SEQ ID NO: 616873 - DNA, 82 bp, Homo sapiens
gcagtggaggccatcaggggccttgataacacagagtttcaagagaaccatggagtctggcagtaccgccgccagtgaggag

SEQ ID NO: 616874 - DNA, 96 bp, Homo sapiens
ccgccctcggcttccgcggggcgctgggccgccagcctcggcaccgtcctttcctttctccctcgcgttaggtgtcatggagaaactccagctggg

SEQ ID NO: 616875 - DNA, 82 bp, Homo sapiens
ttgtttgtggatcgctgtgatcgtcacttggagaaccaggtgcatcagcgcattgcggagctgaggaaagcaggtctgtggt

SEQ ID NO: 616876 - DNA, 75 bp, Homo sapiens
tttcaaccataaagacatcttaattgggcacgaaagaggttgcagatatcaagaaagtcaacaacttcatcagag

SEQ ID NO: 616877 - DNA, 73 bp, Homo sapiens
acatgagacgcctggagtttcatataagtaagggcgtcttactactgcaggcactaacaagaagcaatggtgc

SEQ ID NO: 616878 - DNA, 82 bp, Homo sapiens
gaggccgccggttttctccccgcttgccggggtggtcctcttccctttgtcgatcatggaagggaagtggttgctgtgtatg

SEQ ID NO: 616879 - DNA, 82 bp, Homo sapiens
gaatcccttgcatggctctcaaaagcagagtgagggcactcactgccatcctgtggaagccaccatcatctctggcccaagc

SEQ ID NO: 616880 - DNA, 99 bp, Homo sapiens
ttggaggactgcaccggatcgctgtcattaaaaattaagcgtggcttttgaggaagatgtgacaactaccggagaggctggaagtcatccacaacaaac

SEQ ID NO: 616881 - DNA, 48 bp, Homo sapiens
tggcagccagtcagtggtggaggcattgggatcccgtggcagttgcag

SEQ ID NO: 616882 - DNA, 90 bp, Homo sapiens
ggtggcggctctcggagccggcgcgaatccggcccccgcagcgggacccggctcctgtggtcgtcgttcctccccgaagtgttcacaacg

SEQ ID NO: 616883 - DNA, 82 bp, Homo sapiens
ggatttgttaaggattccaagtaactcttatttggtacaggtttgcagattccgccagcagcacagcaagctctacagatga

SEQ ID NO: 616884 - DNA, 75 bp, Homo sapiens
ttgctcattaacagaaaagaagaggagaatgctaagcagaatgtttgggtcattgctgtgattgttattgccata

SEQ ID NO: 616885 - DNA, 82 bp, Homo sapiens
gcgtcttccgctgcatccccatcttcggcatgtccttcgcctgccagtcgcatccgtgggctctgagaagctctttgcgccg

SEQ ID NO: 616886 - DNA, 75 bp, Homo sapiens
ccgagccagccgctgttttgccggaggagcccctcaggcctgcttgtgcccgggacgggcctggctgccatcctg

SEQ ID NO: 616887 - DNA, 100 bp, Homo sapiens
cgggccgggatgcggctctgagccagcggcggcttccagcccgactgggcctgccggggctgccccgcgcacggatttcgtattcaatttcaaaagtaag

SEQ ID NO: 616888 - DNA, 82 bp, Homo sapiens
gcaggaaggtctcacctgaggtgaaccttcgaccttggacttctcagcctccagaatgccttatgccagcctggaccatctt

SEQ ID NO: 616889 - DNA, 50 bp, Homo sapiens
actctgggaaaaggcactgaagttgatcatcagaaaagcccttactgagg

SEQ ID NO: 616890 - DNA, 100 bp, Homo sapiens
agggagactgttgttcccggagatgcggcgcgcagtgtcttgggacaaggtgcgcattcctggtgtgctgcagcgattgggagtgacatactttgtggtt

SEQ ID NO: 616891 - DNA, 100 bp, Homo sapiens
gtatatcaaacggcaagatgtccagtaatgtcccggcggatatgaatttcgctaaggagtttgtgatcagtgatcggaaggagctggaggaagatttcat

SEQ ID NO: 616892 - DNA, 75 bp, Homo sapiens
ctggatcatcacaggaagattctggtccaggtggcaggttttaagaagcaaatggcagatactggaaaactgaac

SEQ ID NO: 616893 - DNA, 95 bp, Homo sapiens
aagttcaaaaactgaaggactctgaagctgagtcccagcaacctctagaggatcttgatgctcaattgagaagaacacttagtccagagatgatc

SEQ ID NO: 616894 - DNA, 101 bp, Homo sapiens
tgctcaacttcctgatagatgtacactgaaaactggacattataacattaagtactaggttttgacaagcttgcatcatgcgtgagtataagctagtcgtt

SEQ ID NO: 616895 - DNA, 82 bp, Homo sapiens
ccgggcacctccgagcgcaaggacagcgcgaggtccgcgcagcccagcgcagccatccacgccgcaatgaagagcttcttac

SEQ ID NO: 616896 - DNA, 100 bp, Homo sapiens
agttgacatctgacgacgtgaaggagcagatttacaaactggccaagaagggccttactccttcacagatcgagtccgatgggtggtccttttattcctg

SEQ ID NO: 616897 - DNA, 100 bp, Homo sapiens
tagagaccaaggatttcgtggtgatggagcattatcctgtagcgtgggtaaatacgatggtttttgactttaaaggacaattgagaactggagacataat

SEQ ID NO: 616898 - DNA, 100 bp, Homo sapiens
ccgggcggcacccgggcgggcgaatccgtcagctcccgcgggaggcccggcgagagaaggacccggccgagacgcatccagagctttcgtgaccggggac

SEQ ID NO: 616899 - DNA, 75 bp, Homo sapiens
cggcagagtccccgtacgcctacagtaacggacccttgaacatctgtgaagaaatgactattctgcatggaggct

SEQ ID NO: 616900 - DNA, 74 bp, Homo sapiens
tggcgcgatgcgtcaagtacactgaaattcatcctgagatgaggccgtaagttcatcatcgccaacgctcgggt

SEQ ID NO: 616901 - DNA, 83 bp, Homo sapiens
attgataacaccctgtaacagctgagttgttgatcattatgaaaatcctagaaacgtggggtcccttgacaagacatctaaaa

SEQ ID NO: 616902 - DNA, 96 bp, Homo sapiens
aagagatgtggggggattctcgacctgctaacagaactggaccttttcgtgagtctgccaaaaaagaggtggttgctgaagtggtaaaagccccgc

SEQ ID NO: 616903 - DNA, 75 bp, Homo sapiens
ccagacaagatggacaccgcggaggaagagtgcagcagctgccccgagccccgtgcttggcaacattccccccaa

SEQ ID NO: 616904 - DNA, 98 bp, Homo sapiens
aggagagcacaaccatcgcagttggaagcccatggggcagcttttagaatgattccatacccgttagagaaaggacatctattttacccttatcccag

SEQ ID NO: 616905 - DNA, 83 bp, Homo sapiens
acgagcgcgccggccgcgagcagaccggcctggaagcctacgccctggggctggacaccgttcatctgcagaagccagcggac

SEQ ID NO: 616906 - DNA, 74 bp, Homo sapiens
ccagaattacgggcaagcgctgttcaaacccatgaagtgcgaagcccagcggtgcagagtccagcaaaggtgca

SEQ ID NO: 616907 - DNA, 100 bp, Homo sapiens
gtccccggctgaggcagcgcggccgcagcagccctgaatacggttggacagaatgaactgaagattacaagtgatcaagtgataaattcaggattgattt

SEQ ID NO: 616908 - DNA, 75 bp, Homo sapiens
ctgagaaggacgcgcagtccatctctctcagggtcaaagaattgactgtagatccaactgctgctggtgatgttc

SEQ ID NO: 616909 - DNA, 82 bp, Homo sapiens
cggggaggaggcggtggccctgctggaggagctctgggccttcctgggctatgtgctgtatggagagtgccaggaggtcttg

SEQ ID NO: 616910 - DNA, 82 bp, Homo sapiens
aggaattctcctgccaccgcgtggtgcttgccgcagccagcaactatttcagatacttggtgttagatgaagctgatcggat

SEQ ID NO: 616911 - DNA, 73 bp, Homo sapiens
tgggatacccgtaccacagaaatgcagggaccattgcttcttccagtggtgcctgggtcccggcaggaagaag

SEQ ID NO: 616912 - DNA, 96 bp, Homo sapiens
tctgaaaatgaagggtgattacttccggtaccttgctgaagttgcgtgtggtgatgatcgaaaacagttggattacagaaactcctatgaaattga

SEQ ID NO: 616913 - DNA, 75 bp, Homo sapiens
ggtcatccttggcatgggctacaaggaaaacgcaagaagatccttataggaagaaaaagcttcaggagaaaagag

SEQ ID NO: 616914 - DNA, 100 bp, Homo sapiens
cctgcttttgccaaagggaacctgactttcacagctcagtacctaaggctggtgaatcaaagacttctggaagtacagtcacaagttgaagaattacaaa

SEQ ID NO: 616915 - DNA, 74 bp, Homo sapiens
gcttctcagaagacagagggttttcttttgagtaaatgtggggacctagaggaggagctgaaaattgttaccaa

SEQ ID NO: 616916 - DNA, 49 bp, Homo sapiens
cgcacctcgtcaccaaggccaagcaggaacgaatttcatatacacctcc

SEQ ID NO: 616917 - DNA, 83 bp, Homo sapiens
tttgaggagctgaggctctggaaggcttgcggatcgcctggaagccacgatgtgagatgaccaaagagaaccctgtacagtaa

SEQ ID NO: 616918 - DNA, 96 bp, Homo sapiens
atcaaggcagagttatttggtcatggaagaacaactgacttgtccaagtctgaagatgatgagaaactgaaaaagaggaaggagcgatttgggatt

SEQ ID NO: 616919 - DNA, 83 bp, Homo sapiens
cttcgcctgcacctggccaggctgcggctggagaagcaaggtctcgctgtgttaccctggctggagtgcagtggctacttaca

SEQ ID NO: 616920 - DNA, 123 bp, Homo sapiens
aaaatcatgaaagtcaccgtgaagaccccgaaggaaaaggaggaattcgccgtgcccgagaatagctccgtccagcaggacctctttgtttttagacatgaattggccataatgagactagca

SEQ ID NO: 616921 - DNA, 100 bp, Homo sapiens
ctcaaaaggtgatctggacaaaggaacaggtatctcaggttttgcactgattgcaaaaataaagtcctccgagcatacaatatccttattggtgaacttg

SEQ ID NO: 616922 - DNA, 78 bp, Homo sapiens
tttcttctcaccatttctggccaaaactacaaacaagacttcgcaggcccgatgagagaaagggaaagttaaggatgc

SEQ ID NO: 616923 - DNA, 74 bp, Homo sapiens
tcaagaacaaaggccgcgacttggagcagaagatggctgtgccacccacgtatgccgatcttggcaaatctgcc

SEQ ID NO: 616924 - DNA, 96 bp, Homo sapiens
ccaacctagtgggtgtaatacatcatgaactgcaggaaaagattgatctctgggctggtgaacataatctctgtcccagtcagaaaaggagagagg

SEQ ID NO: 616925 - DNA, 98 bp, Homo sapiens
gcttgtgtagcgtcagatccttgagtgataaaggagtagagctattcaggattatgaaactgctcaggaacacaatgaaaatgatcagcagattcgag

SEQ ID NO: 616926 - DNA, 87 bp, Homo sapiens
acgaggaagttttctactgtaaagtcaccaacgagatcttccgccactacgaatgccgctcctacgaggactgctgtggctccaggt

SEQ ID NO: 616927 - DNA, 75 bp, Homo sapiens
cttcgtgcaggcaatctctgatgcccgctgtgtttttgacatgggggctgaggcaggagaattgcttgaacccgg

SEQ ID NO: 616928 - DNA, 100 bp, Homo sapiens
gcaaggaatatgagcgcttctctaaatacatgcccaatgtcaaggctcaaactgctttttctgcaaaccctgccaatccagcaattttgtcagaagcttc

SEQ ID NO: 616929 - DNA, 110 bp, Homo sapiens
gagtattcagctcttcacagggggtagaacaagtggtactaggattatacattgtaagaggtgacaacgtgaagctttctttggaaaagatcttctagatacaagtagac

SEQ ID NO: 616930 - DNA, 100 bp, Homo sapiens
accatggagcccatcgccctccctggcggcctcaccctgccaccggtgcccttcaccaagcttcccatcgtcaggggtaaaagcatgtctacgaagaaaa

SEQ ID NO: 616931 - DNA, 100 bp, Homo sapiens
ttaccactaccaagaagggatctatcacctctgtacaggggaagccatatgtttttgaccgtgtattccccccaaacacgactcaagagcaagtttatca

SEQ ID NO: 616932 - DNA, 76 bp, Homo sapiens
ctttccgctcggctgttttcctgcgcaggagtgttgctagaaaatgttggcgaagaactagatcctattttggaac

SEQ ID NO: 616933 - DNA, 83 bp, Homo sapiens
ccttctcatcagctacaccaccaacgcctttcccggagagtacatccccaccgtgtgagaagccctaccactgcaactgggac

SEQ ID NO: 616934 - DNA, 75 bp, Homo sapiens
tgttcttcttcgagtatttgtagaagggacacattcagctaacgtattttagcaggtggagtgaggttgaagatt

SEQ ID NO: 616935 - DNA, 96 bp, Homo sapiens
ggaagctgatgctgctggacgccactttccggggtgcacagcaagtggagaatcttatttatactgctgatccagaatcctttgaagtaaatacaa

SEQ ID NO: 616936 - DNA, 100 bp, Homo sapiens
tctgtttacatggaactcagacatctgcaaatcatgacaactgccagaacttccatctaaaaacctgtttttcaacatgaacaatcgccagcacgtggat

SEQ ID NO: 616937 - DNA, 98 bp, Homo sapiens
cggatgcagaaaacttaatggaggaggctgaggcatcatctggctgcaaagaagagaacacactgtgtttgagggaggaggaaggaggatcagagttt

SEQ ID NO: 616938 - DNA, 96 bp, Homo sapiens
gactcctacctgaaacatacggagattgacaatcaatgggccatcttggacggtgttgctgcctatgttggctggcaaagctcctcaattctcaag

SEQ ID NO: 616939 - DNA, 99 bp, Homo sapiens
tcggagacgttgataacgatacggtggtgaaaacaggaatgagaacgaggagtcaacctcaaaggctgaaacctcggaagattcagcatcacgcgggga

SEQ ID NO: 616940 - DNA, 100 bp, Homo sapiens
cccaggtccgcaacccggagaagcaagaggagatttgcaccctagttatcgctgagactttccctgaagatgcagggatctttacatgttcagcaagaaa

SEQ ID NO: 616941 - DNA, 98 bp, Homo sapiens
tcctggatggggtgaactaccttcacacaaagaaaattgctcactttgatctcaagtccctgttctgggaaaatagccacctccttgttaacagcttt

SEQ ID NO: 616942 - DNA, 99 bp, Homo sapiens
ctgactttgcagccacggagagaacctgaaggcggctaacacagaccccacagccccgccctacgacaccctcttggtgttcgactatgagggcagcgg

SEQ ID NO: 616943 - DNA, 51 bp, Homo sapiens
tggagatccccgaaccccgggtcctggagctcccctgaacagcagctgcag

SEQ ID NO: 616944 - DNA, 88 bp, Homo sapiens
tggcaattgacctcacctcaagcacacccaatggacagcatgcctcaccaagtcacatgacaagcactgcagaaccttggcctgaaaa

SEQ ID NO: 616945 - DNA, 74 bp, Homo sapiens
actgagaacagttgaccgcaagctgaaactggacgggctctacgagtgcattctctgtgcctgctgtagcacca

SEQ ID NO: 616946 - DNA, 87 bp, Homo sapiens
ttctgagggaggaggacaacaagtactgcgccgactgcgaggccaaagctgcaagagaaatagtgtggttagaaagagaagagcgag

SEQ ID NO: 616947 - DNA, 100 bp, Homo sapiens
gccggcctccgcccggccccgagggaatggcattgtgcccatcgtggagcctgagatcctccctgatggggaccatgacttgaagcgctgccagtatgtg

SEQ ID NO: 616948 - DNA, 83 bp, Homo sapiens
agttgggtatcctcctcagtatccaccgacagcattccaaggaagtgaccaagttcactcctggatgctagctacaagccaag

SEQ ID NO: 616949 - DNA, 100 bp, Homo sapiens
atcctgaaagcatacattgaggtgatggctcattctgtgaaaatgatgctggttggagtgcaatggcgtgatctcggctcatcccaacctccacctcccg

SEQ ID NO: 616950 - DNA, 98 bp, Homo sapiens
accgagagcgcgaatatcgtcatcgttagaagaccctgtattcagtggatcagctggcaccacccaaatagataaattggcccatctggtcttgtggc

SEQ ID NO: 616951 - DNA, 90 bp, Homo sapiens
gatcagctctattatttcaaagatgaagatgaaaccaagcccttggtggtcttcaagctgacagagaagctgacggaacagaaggagtgg

SEQ ID NO: 616952 - DNA, 98 bp, Homo sapiens
aacacagttaccctccgcatcattcctggggatgggactggtttggctgaaagacaaagaagcaacacattgtaaactttgtgaaaaggaattctcac

SEQ ID NO: 616953 - DNA, 82 bp, Homo sapiens
caaagccctcccagcccccatcgagaaaaccatctccaaagccaaaggggagctgaatatgtatctgcaagagagtggatga

SEQ ID NO: 616954 - DNA, 100 bp, Homo sapiens
cttgaacttaatacagcaagaaagaccatcaagtttaccagtggatattccatctattataaccaagaaactattaaaagcagcaatgaagcatatagaa

SEQ ID NO: 616955 - DNA, 83 bp, Homo sapiens
gctaaggaaaccctattacctccagactggattatggacagaacttggaaatattgagaataatttcttaaagccacttcata

SEQ ID NO: 616956 - DNA, 90 bp, Homo sapiens
cagaagatgagattatgcctgaggttgtggaaaaggaagattactcagagattatagggagcatggggcccaatgtaaaggctgttgcta

SEQ ID NO: 616957 - DNA, 100 bp, Homo sapiens
ggcggtttccaaaggaacacagaattgggattccagagttcaaatacgtggcaaatatgcatggagatgagaaggccaatgatgaggccaatcagagtga

SEQ ID NO: 616958 - DNA, 98 bp, Homo sapiens
agtaaaaacaatagctcaaggaaacctttccaacacagatgtccaagctgccaacaaaccagtccagctacgggggcccagccagccagcagctgagt

SEQ ID NO: 616959 - DNA, 97 bp, Homo sapiens
gggctgaggatgacaaaaaagccttcataggcccggaggctgtttgatgtcctgcacgagcccttcttgaaagtaccctgatgaccccagctgccaa

SEQ ID NO: 616960 - DNA, 75 bp, Homo sapiens
atggggtatatccaccctcaagtgtgggtagtttgaagtttgagtatcctcacgacatggcagctggattcctga

SEQ ID NO: 616961 - DNA, 83 bp, Homo sapiens
ctgcccggggccctcatggacggttggatcagggccgaagtaatgttgcaggtcagtggaatccagtttttatgcagcctctg

SEQ ID NO: 616962 - DNA, 75 bp, Homo sapiens
gcagctggagactctgggccaggagaagctgaagctggaggtggtatgcagatcttcgtgaagaccctgaccggc

SEQ ID NO: 616963 - DNA, 98 bp, Homo sapiens
ttgccttaagtgagaaatcagcatggctcagaatctccctggaaaaggagacatgaatgtctgcaatgatacttcctgacaagaagttgatacaagaa

SEQ ID NO: 616964 - DNA, 90 bp, Homo sapiens
ctgcgagagatcgagagcactgacacggcctgcatcgggcccacgctcaggactcgggtcaagctggaaagcctggaagacgcctacatt

SEQ ID NO: 616965 - DNA, 75 bp, Homo sapiens
gacctcctggtgcgcatcctgctgctggctgcccttgtctcctttattcgacacctcttagaggctgcaatccca

SEQ ID NO: 616966 - DNA, 50 bp, Homo sapiens
tgaacctggaggcttccgaggcaatcatgaacaggctgaacactttgcca

SEQ ID NO: 616967 - DNA, 83 bp, Homo sapiens
cttctacagagcaaccactcaccagctttgaagacaagattcccaaaaggagattctctgagatgcaaaatgaaagacgagaa

SEQ ID NO: 616968 - DNA, 98 bp, Homo sapiens
gaggaaagcgggaagactcatcggagcgtgtggatttgagccgccgcattttttaaccctagatctcggatttctctctgatcaaacggacagttcag

SEQ ID NO: 616969 - DNA, 75 bp, Homo sapiens
tccttaactttgttcactcattccagctgctctgttaaaagcgaaaatgaaacaattgcctgcggcaacagttcg

SEQ ID NO: 616970 - DNA, 76 bp, Homo sapiens
cagctgaaggctgcgagggactaagagcagaacgcaaaatcgaatgaagctaatggccgacaactacgaggatgac

SEQ ID NO: 616971 - DNA, 74 bp, Homo sapiens
acaatgcctccactgactatgacctatctgacaagagcatcaaccctctggaccgtataatagacgctggcccc

SEQ ID NO: 616972 - DNA, 83 bp, Homo sapiens
gccattccttttggaacaatgcttagcagtgtctgcaaaaacgaatcttttcctacaacctgttaactgactggactgttggt

SEQ ID NO: 616973 - DNA, 82 bp, Homo sapiens
gcggagttcaaggagcctacgccgagcctcaccgatttagctttggagtcaaacccttctgaccatccaagggcaagcacaa

SEQ ID NO: 616974 - DNA, 75 bp, Homo sapiens
aaatcgcctcccgagaagaagttgaggcgctatgatgatcggctgaatgtaacagaggaactaacgtccaacgac

SEQ ID NO: 616975 - DNA, 75 bp, Homo sapiens
cttggaaaatactcagtttcctgcttactgcttcattatggattatacaggcctactctgtgtatgatgaagaca

SEQ ID NO: 616976 - DNA, 100 bp, Homo sapiens
tgaagatgctgagccggaatccggacaattatgtccgcgaaaccaagttggacttacagagagaactggatgaattgcctccattgtctccaatgcagcc

SEQ ID NO: 616977 - DNA, 51 bp, Homo sapiens
agcccaggagctgctggaattcaccatcagcatcaattcctgaagattgcc

SEQ ID NO: 616978 - DNA, 75 bp, Homo sapiens
atctaatcatggggtatttacttaccaggttcacaatattcttgcagaaatggtgatggggggaatggtattgga

SEQ ID NO: 616979 - DNA, 50 bp, Homo sapiens
agcgacctggagcggggatacacgatcttcccagacccgtcagattttga

SEQ ID NO: 616980 - DNA, 100 bp, Homo sapiens
cggcggcggcggcagcgacagcagcagcagcagccagtattcgggaaaggcagacaggaagatgatccctatgatcttgaagatgtttctgcacagaaat

SEQ ID NO: 616981 - DNA, 76 bp, Homo sapiens
ggttttcaggaccaaaattgtggaaaagtcactctgctactctccagagagaccggatcttcaaacattttaccag

SEQ ID NO: 616982 - DNA, 100 bp, Homo sapiens
cccgagggcggggaccggcggcgctggaggagcgaggcagctgtactaggactgggaacgggtgctttggagcttgctgatgtgtctaatgaactgccag

SEQ ID NO: 616983 - DNA, 83 bp, Homo sapiens
gttgtttcatcgttttttctactccaaatctttcgtcaaacacagtttcgaggctacctcatcattcacatggtacagagcct

SEQ ID NO: 616984 - DNA, 75 bp, Homo sapiens
gttaaagtctctcttcaccctgccgtcatgtctaagtcagaggatcaagtcttccataccagggaccaggccaaa

SEQ ID NO: 616985 - DNA, 75 bp, Homo sapiens
gctttgaggaaaagccagtttatatccaagacttagatgagtatgtgccaagagttgtaacctctgcacaacaga

SEQ ID NO: 616986 - DNA, 83 bp, Homo sapiens
tggagaaggaacatgaagtagaagtcaatggcaccgacacattgtggggagaaacagaatggtccacttccattgaaatacag

SEQ ID NO: 616987 - DNA, 73 bp, Homo sapiens
gaagaactcgtcatgctctttgtagcgtggtgcttctgttgctcacagttggatgttgatggacagatagact

SEQ ID NO: 616988 - DNA, 85 bp, Homo sapiens
ggaccaaaggatcacccacatcctccacgtgtccttttgtggggacattcatggacaattctttgatttgatgaagctctttgaa

SEQ ID NO: 616989 - DNA, 80 bp, Homo sapiens
ccccacgcaaccccagatccatttacactttacaaccaagatcactccatggatgaaatgacagctgtggtgaaaattga

SEQ ID NO: 616990 - DNA, 100 bp, Homo sapiens
ttggttcttccttcatcctagctataaaccaaatgaccttgtggaagttagcacctgtgaaactggaaaaacatctgcacagtgctagatctgaagaggg

SEQ ID NO: 616991 - DNA, 100 bp, Homo sapiens
ctttttcgacgcctccgccgccgcctgaggaggcgagctagccgggagttacaccgccaccgccagtaaagatgacggcgccttgaggtaagctacaggc

SEQ ID NO: 616992 - DNA, 96 bp, Homo sapiens
ctgggcgcggattcgccgaggcaccgaggcactcagaggagacctcctgccccccgaggtctgcagtctcctgaacccagcagccatctacgccaa

SEQ ID NO: 616993 - DNA, 101 bp, Homo sapiens
ggatattcagttgcacatccccacatcaatgcactgccaatggctgcaagaaagcgtaagattgccattcgaaaagcccaggggaaaaatgtggaggccat

SEQ ID NO: 616994 - DNA, 100 bp, Homo sapiens
tacaactcaatcagaaactattcagacagcggcttctctgttggcctctcaggcatagaatgtcaagctaaccaggcgtccgctacttcagaagagtgta

SEQ ID NO: 616995 - DNA, 100 bp, Homo sapiens
ctgggtccagccccttacttaaagcagttgcaccaccagcaccaccttccagtagtcagctctgccgttacttccctgcttgtaagaagatggaatgtcc

SEQ ID NO: 616996 - DNA, 100 bp, Homo sapiens
agaggtacagccctcggcctacaagctctttaggtggtgacgggctcagggctggacagccagaagtcagacgaggagtatcgcgagctcttcgacctag

SEQ ID NO: 616997 - DNA, 133 bp, Homo sapiens
tgactggggacctgtcccacctggcggccatcgtcatcctgctgctgaagatctggaagacgcgctcctgcgccgacaatgcagatcttcgtgaagactctgactggtaagaccatcaccctcgaggttgagc

SEQ ID NO: 616998 - DNA, 98 bp, Homo sapiens
ttgactgtatacagaatcttgaatcagaaattgagaagctggactatgatttaatctccaaagaaccaaagccttttgtatttgagggaaaagtacgt

SEQ ID NO: 616999 - DNA, 98 bp, Homo sapiens
cctccgctgcagtcgctgcgtctccaagatcaatgaactgagccatgttcaaatccctgttatgttgatgccagatgacttcaaagcctattcaaaaa

SEQ ID NO: 617000 - DNA, 74 bp, Homo sapiens
gaaggaacgaggcaaggagctaaagcagcgtgcgttcagccctggggtgtttcagtcacctccagtaacacggg

SEQ ID NO: 617001 - DNA, 98 bp, Homo sapiens
ccgggtccccgcgttcacagccccagcgcagtactatactggcaattgctggagaagattttgcaattgttgcttctgatactcgattgagtgaaggg

SEQ ID NO: 617002 - DNA, 76 bp, Homo sapiens
caagtactgcgccgactgcgaggccaaagatgaataatacggcagctagtccaatgtctactgcaacttcaagtag

SEQ ID NO: 617003 - DNA, 50 bp, Homo sapiens
caacccttaatgtgcatgatggttgtgaaaaccagtgttctctggacatg

SEQ ID NO: 617004 - DNA, 95 bp, Homo sapiens
gatgaactgaaacggattgccagagaattggcagaaggctcagatccacctacttggaaacatagtgatctgggtttcgggcagcctcgctctgg

SEQ ID NO: 617005 - DNA, 100 bp, Homo sapiens
ctgcgagcgggttctgacctgaaggctctgcgcggacttgtggagacagccgctcaccacaggggcaagtgtccgagtggtgaatcagctacttacagag

SEQ ID NO: 617006 - DNA, 75 bp, Homo sapiens
tggtatcaggactttggttatgttggatgaacaaggagaccgtacgcgtccagggcaatgacatctcacaccggc

SEQ ID NO: 617007 - DNA, 101 bp, Homo sapiens
caacaactctcgaaacctcaacatccagctcaagtggaagagacccccagagaatgggggccgaaggccagagaccaggatttggctacggaggcagagcg

SEQ ID NO: 617008 - DNA, 90 bp, Homo sapiens
ggctgctacgccttcactgcgggagggcacgatcgctcggtggtgcagtggaaaatcaccttaagagaacgccagatcaagtgtcccaag

SEQ ID NO: 617009 - DNA, 74 bp, Homo sapiens
gagaccgcggccgggaccgaggtcagagcaccataacatggtgtgggaagtgaagacaaatcagatgcctaatg

SEQ ID NO: 617010 - DNA, 100 bp, Homo sapiens
agtagcgccactcataaaaggtgtatttaaaggctaaatttggccgaagatggaccaaaatttcaaagctaattggaagccgcactgttttacaagtgaa

SEQ ID NO: 617011 - DNA, 51 bp, Homo sapiens
ggaaaatggagcccttcaccaatggcagcagtgaggatgccagagttcatg

SEQ ID NO: 617012 - DNA, 144 bp, Homo sapiens
tgttgatgaaggaatctgtcttgaaaccaatagtggaactgaaaagatctcaaaatctggacttgaaaagtgtctcatagttgggggaggaccctgtggcttgcgcactgccattgaacttgcctacctgggagccaaagtggt

SEQ ID NO: 617013 - DNA, 134 bp, Homo sapiens
gccacttttgattgcaaagtgctatcaaggaaccacgctctcgtctggtttgatcacaagacgggcaagaatccacactggtgatagaccatacaaatgtgcacacccaggctgtgagaaagccttcacacaac

SEQ ID NO: 617014 - DNA, 100 bp, Homo sapiens
catagtgattgatggcagcaacgtggcgatgagctcttttggtacaccagaaggccagaatggaacgacttcaaagagaacttgagattcaaaagaaaaa

SEQ ID NO: 617015 - DNA, 82 bp, Homo sapiens
gttggaagcagccgatccagcctgcggagcctgtggggcagattgggaatcaagatgggaaaacaaggaattatcaacaaag

SEQ ID NO: 617016 - DNA, 75 bp, Homo sapiens
ggctccgtcgtggaagcaggactgcgccgcgtcttcctcaagagttttgcggcctccaggtggtggatccaattt

SEQ ID NO: 617017 - DNA, 86 bp, Homo sapiens
ccttcaggaagtgaaatggatggagcagaatctggaaagtaacaatgatgatgttatgttgatttctgtggaaagtcctaatttga

SEQ ID NO: 617018 - DNA, 100 bp, Homo sapiens
cggctgcagagacaggcgttcgaggagatcatcctgcagtggctcctgtatcaggaataccgagataaatcgactctccaagaaatcgaaaccaggaggc

SEQ ID NO: 617019 - DNA, 74 bp, Homo sapiens
catgaataggacaaagaacagaccgctggttcgtggacagatcaggccaatatacccagtagaagaattagaag

SEQ ID NO: 617020 - DNA, 107 bp, Homo sapiens
ttagctgtgctcgcgctactctctctttctggcctggaggctatccagcactgcctctgtcaccgggtccctccacccttgtctcctgtgcggccagcgtcagagcc

SEQ ID NO: 617021 - DNA, 90 bp, Homo sapiens
gccgaggagaacctgcccttcgccaaggagatcgtctctctcatcgaggcccaaaccgccaaggggcctttatcatctgctggactcctg

SEQ ID NO: 617022 - DNA, 73 bp, Homo sapiens
taaaagacagtcctcgtcagcactgactttcagctatggaatcgtactgaaaagactggtggtgacaatgatg

SEQ ID NO: 617023 - DNA, 96 bp, Homo sapiens
acgaaaatgcatattatgccacatcgtgtacagctcaaaaaaggttgctccttgagggcaggacagttcttatggctttatccgttgcgtaagcac

SEQ ID NO: 617024 - DNA, 87 bp, Homo sapiens
ctgtggcaggggcgggcgcggccaccgggaccggcgtgggagcgacgccagcgcctcaacaggcatagacgtgccagagatcaatga

SEQ ID NO: 617025 - DNA, 75 bp, Homo sapiens
aaccaccaaaagtccattatgaaactgattactacaagggaagacataaattcaaagcaggttgctacagtgaaa

SEQ ID NO: 617026 - DNA, 139 bp, Homo sapiens
ccgatttccgcgatggcgagagggggcaccggaggtgacaacaataacaagactgtccttcggacaagttttagtatctggagtccatctttcaccatcttctcctgagattgtactggaccgtgaccactcttcttcc

SEQ ID NO: 617027 - DNA, 80 bp, Homo sapiens
aagacaaggatgaccaggaatgggaaagccccagattgaggacgagacgcaggtgtcacgggccactcagggtgaacagg

SEQ ID NO: 617028 - DNA, 50 bp, Homo sapiens
gtccacttcttgatgggaggcgtgacattgtaaacaggaacatcgataag

SEQ ID NO: 617029 - DNA, 74 bp, Homo sapiens
agaaatggattagtgataactcaagtttcatcacctgtgatctgtgaaaatggttcgctattcacttgacccgg

SEQ ID NO: 617030 - DNA, 74 bp, Homo sapiens
ctcgcttgcagttcagcgaccacggtaagtaaggaggtctctgtaccatggctcgtacaaagcagactgcccgc

SEQ ID NO: 617031 - DNA, 104 bp, Homo sapiens
gggcttcataccagctgaagagcgacaagccgctggcagccgcggatctcaccgccgctcaggttgatattcactgatggactccaaagaatcattaactcctg

SEQ ID NO: 617032 - DNA, 50 bp, Homo sapiens
tctccttcacagtaaagtggctgtgattcgcctttgccagtctcatctcg

SEQ ID NO: 617033 - DNA, 75 bp, Homo sapiens
cgcgggcggcagcccgggggaagcggtaaaccgtcctattggcagggtacagatcttcactgcagacttatctga

SEQ ID NO: 617034 - DNA, 100 bp, Homo sapiens
atcctgtgaaagacctgtcttgagaaaaggccagtgttgtccctactgcatagttagttgaatccatggacatgaaacccacagatatagagggttggcc

SEQ ID NO: 617035 - DNA, 100 bp, Homo sapiens
gggcgtcggtcaccaaggtcacaggacccaggaattgcgccctccggcatttggattgtattacacagagcatgaatatacttctttaggttacacgcat

SEQ ID NO: 617036 - DNA, 76 bp, Homo sapiens
ccacctagctctcctctctttgcagagccatacaaagttgggtgatccattcatgttgcagcagtctacaaatcca

SEQ ID NO: 617037 - DNA, 75 bp, Homo sapiens
ggcgaggctagggaggacctcacttccccggggtgtaataatgttaactgagttcaggcccatgaagttcatcag

SEQ ID NO: 617038 - DNA, 75 bp, Homo sapiens
gaattatgtcagcaacgtatccaaggttcacaatattcttgcagaaatggtgatggggggaatggtattggagac

SEQ ID NO: 617039 - DNA, 51 bp, Homo sapiens
ccctaataaagcgactcattgagcaggaatgtatcctgtcaggtataatgt

SEQ ID NO: 617040 - DNA, 100 bp, Homo sapiens
ccttcatgcccaaatcccggaaactccagcgtgtctccagccgtggtgctgaccttaaggaaagagccaaaatgagttccagtgaagttggtccttttgt

SEQ ID NO: 617041 - DNA, 100 bp, Homo sapiens
gtttgtttctctgtatggcacagaagaatatttggggctttgttatgcacctaaagccatattggaagctccagaagaaagagcaccccccggaagtcag

SEQ ID NO: 617042 - DNA, 75 bp, Homo sapiens
cctgcgctgactaggtccggggaagggtcatcgagcagctcggtgggaagcagctggtcatgaaccacatgcatc

SEQ ID NO: 617043 - DNA, 90 bp, Homo sapiens
cattgaagacgtcattgcccaggcaccttgggcctgagctgtggtgtcggcagtggcaactgcagcaacagcagcagcagcaacttcgag

SEQ ID NO: 617044 - DNA, 74 bp, Homo sapiens
cagcaagttttggagcaaagacaacagcagtttccaggaacatcaatggaaaccatctgccgtgtgactggtgg

SEQ ID NO: 617045 - DNA, 75 bp, Homo sapiens
gtccggggccgggctcaggagcagaggtactccaaagattcaggtttactcacgtcatccagcagagaatggaaa

SEQ ID NO: 617046 - DNA, 100 bp, Homo sapiens
cccggacgagctgacggtcaagaccaaggatggcgtggtggagatcaccgcaattctgtggtgttcttggtcacacatttatggagtttctgaagggcag

SEQ ID NO: 617047 - DNA, 83 bp, Homo sapiens
cttcggcagtccacccaccgccgccgcctcccagcacacttccaccctgggcagcgtgtttggggacgcgtactatgagcagc

SEQ ID NO: 617048 - DNA, 83 bp, Homo sapiens
cgccgcgcgcccgcgccctccgcgcgacgccagactcgtttgtgaacagccaggagtggacgctgagccgctccgtaccggag

SEQ ID NO: 617049 - DNA, 100 bp, Homo sapiens
ggggccccagtgggcgtgggcgaaggtatgccattgcattggccttaagggaaaagcagcgtgtaatatttaccagcccaattaaggctctgagtaacca

SEQ ID NO: 617050 - DNA, 108 bp, Homo sapiens
gtttgcggttcagccctttgatgaccgcagcaggtatggcaaattcctcagtctcttaaaagatggtgcagaaaatgatcttacctgggttttaaagcattgtgagag

SEQ ID NO: 617051 - DNA, 108 bp, Homo sapiens
gtgggggatgatggtgacgcttctcactcacgtgtgaagggcccactgatgatggtgaagaagagatggaagaagacacagtcacaaacgggtcctgagcagtgaggc

SEQ ID NO: 617052 - DNA, 83 bp, Homo sapiens
gtctcctcggatcgcctggagaggcactcggacctggcttgggcactgtttaaaggaaagttccgagaaggcatcgacaagcc

SEQ ID NO: 617053 - DNA, 96 bp, Homo sapiens
gacaggctctgtcactaaaataggatgtgtgctgtgtttggtggaatttattgtcttcgccattcagtacagtgccttgtagtggacaaagaatcc

SEQ ID NO: 617054 - DNA, 78 bp, Homo sapiens
aataacccagatttgttgatgttttgtgaccaaggagaaggatacatccctgtatcgaccagcgctggaggaattgcg

SEQ ID NO: 617055 - DNA, 100 bp, Homo sapiens
tgaagaaggcagtacattttgggttaccgaagatgggtgtgaacctgacacgcagcaacaaggagacggtgaagcacagcgacgtcctgtttctggctgt

SEQ ID NO: 617056 - DNA, 100 bp, Homo sapiens
cttctccatcctctcagtgtttcccgagcgcctcggcttctgccagcaccacgacgacgagacgtgctgtattgcccagaagccatcgtgtcgctggtcg

SEQ ID NO: 617057 - DNA, 83 bp, Homo sapiens
tcaacttcctcaagtcgcccaaaggaccctgacgtggctgaagcggccccgggagcatgagcgggcagcgcgtggacgtcaag

SEQ ID NO: 617058 - DNA, 100 bp, Homo sapiens
ccgaggtctccgcggcccgaggtctccgcccgcaccatgcggctgggcagaatttttccctagattggtgtaaacagccagacgtgggccttcccaaacc

SEQ ID NO: 617059 - DNA, 100 bp, Homo sapiens
aacgggctaagtttcagagcttcgtggtcacctacgtggccatgctggccaagcagtctaccaggtggaacctaacttcttgtggaacaagtgttgccag

SEQ ID NO: 617060 - DNA, 80 bp, Homo sapiens
ggcacacagcttccgcccagcataccgcaagagctcccccatccaggaatccactgctcccgagctgccttcggagaccc

SEQ ID NO: 617061 - DNA, 100 bp, Homo sapiens
gaaatatgtttgtctacgaagcctgtgttccagcccttttcaggacagggtcacagactaggaagatccctgccgcccaggtgtcacttgttctgtttgg

SEQ ID NO: 617062 - DNA, 148 bp, Homo sapiens
tttccagctttcctttaatgcactaaacctttaatattgtattctcctaaatgagacgtctcgcatttgagcaggtgtcatggagaaactccagctgggcccagagattctgcagcgggaaaatccaaggcttatttatgccaggctg

SEQ ID NO: 617063 - DNA, 98 bp, Homo sapiens
ctcgctcctcgatcgaggacgacttcaactatggcagcagcgtggcctccgccaccgtgcacatccgaatgggtttgcaccttctgctccatctcctc

SEQ ID NO: 617064 - DNA, 76 bp, Homo sapiens
aaggcagccaatgccaggaaccatgttaaaatcctgcaagctactgggttgccacagcatctgtcccactttgtgt

SEQ ID NO: 617065 - DNA, 80 bp, Homo sapiens
caacaagaggacccaggagaaattcgccctcaaacatcagtctccgagagttgaagaccatcttgcccctgatcaacttt

SEQ ID NO: 617066 - DNA, 90 bp, Homo sapiens
gtccctggccatagctccgccgctgcccgaaatatggctacacacacctttctgcaggagagctgcttcgtgatgaaaggaagaacccag

SEQ ID NO: 617067 - DNA, 82 bp, Homo sapiens
gccaggtgctgcagaagctcttgggtcaaaatgcagatcttcgtgaaaacccttaccggcaagaccatcacccttgaggtgg

SEQ ID NO: 617068 - DNA, 100 bp, Homo sapiens
aggtcctaccgggccaagctgcctctgaggatatttctggctgtcgccaactccatggctttccaggaaccagggaaaatgtgtagagggcatggtggag

SEQ ID NO: 617069 - DNA, 100 bp, Homo sapiens
caccgaagaaatgaagttacaggaggggcacaccgtccttttgtctctgcctttgaggttggcgggaactgaaactgaaatactacccgccggactttga

SEQ ID NO: 617070 - DNA, 96 bp, Homo sapiens
gacatcccggaagccgaaaaatggaccgagtctcctgccattccgagcaggcctggtatgggtaatggtgtgaaggaaggcccggtgcgattgcat

SEQ ID NO: 617071 - DNA, 82 bp, Homo sapiens
tcaagagaaagctatgaaacttcataatgcttctaattctgaaatgagccagataacagtgaatggaaactcaggaggtgcc

SEQ ID NO: 617072 - DNA, 75 bp, Homo sapiens
atccgcatcaacaagatgttgtcctgtgctggggctgacaggaggaagagtttgccagcccgggatggaggcttc

SEQ ID NO: 617073 - DNA, 100 bp, Homo sapiens
ccgtgacatccgaggtgcctttctccaaaagcccgagcgggaagaagttccgcagcaagccgcagctggcgcgctacctgggcggctccatggacctgag

SEQ ID NO: 617074 - DNA, 90 bp, Homo sapiens
caatgacacagtcattttggacccaccactggtagccctggataaagatgcaccggttccttttgcagtcctgagaaacatctttgtcct

SEQ ID NO: 617075 - DNA, 101 bp, Homo sapiens
ccaacagcagaagagaaagccagttatccacggactggaagatcaaaagaggctgtcttttggggagacattgccttagatgaagatgacttgaagctgtt

SEQ ID NO: 617076 - DNA, 96 bp, Homo sapiens
aaagaatacattcctgattacctgccacccattgtgtcttctcaagaagaacaaggcaaaggcaatctgcatgtaacatcaccagaagatgcagaa

SEQ ID NO: 617077 - DNA, 75 bp, Homo sapiens
gtgagatgtttcatcccaacagaacctggcttctgtatttaccatgtacctggagcattggtttggcagctgaac

SEQ ID NO: 617078 - DNA, 71 bp, Homo sapiens
tacactcagtgctcccaatttctttatggtttcctagaacttgacttgcgtcacacgatcattcctgcaaa

SEQ ID NO: 617079 - DNA, 83 bp, Homo sapiens
gtgcgtagctgctcctttggttgaatccccaggcccttgttggggcacaaggtggcagatcaatgtccgagttaccaccatgg

SEQ ID NO: 617080 - DNA, 102 bp, Homo sapiens
cgagaaccgtcagtttgagccagatggcatcagaacacaccatgatggctgtgacctaagaccctcaggaagccccggggtcatggcccagaagcaccccgg

SEQ ID NO: 617081 - DNA, 74 bp, Homo sapiens
cagcgggatcaagctgtgtgcattagtacaaatgaggctgcctccattcgaaacattttctcagggacctacgt

SEQ ID NO: 617082 - DNA, 80 bp, Homo sapiens
cggctgaacggagctgccgtcgccatgtttggctgcttggtggcggggaggctggcccctagcagtcttcttgatgcttt

SEQ ID NO: 617083 - DNA, 74 bp, Homo sapiens
tcgggtttgagattatccacgtgtgtaaggctgaggagaaggcagagcccccccaggctatgaatgccctgatg

SEQ ID NO: 617084 - DNA, 90 bp, Homo sapiens
ccgagacccaccggaccccgaacccaggagagaagatgactgaggaggaggtggagaccgttctggcaggacacgaggacagcaacggct

SEQ ID NO: 617085 - DNA, 100 bp, Homo sapiens
gccgcagcggcgcagctgatagcaggaacagtactatactggcaattgctggagaagattttgcaattgttgcttctgatactcgattgagtgaagggtt

SEQ ID NO: 617086 - DNA, 109 bp, Homo sapiens
gacctgaactcttcagataatcagagtggaggaagtacagccagcaataaagtgaaatctttccgtgcagctctacaagaggaggaacaagccagcaagcaaatcaacc

SEQ ID NO: 617087 - DNA, 82 bp, Homo sapiens
tgtcctctctgggtgggagccacctgtgtgatgatgcctgagttcagccctcagcaggtgaccagcgccatgtccagccagg

SEQ ID NO: 617088 - DNA, 83 bp, Homo sapiens
gtgacgctgctggaggaaacacctcaggacacggcctacaacaccaagaggaggatacgaagcgttttcggcttcctgcccgg

SEQ ID NO: 617089 - DNA, 84 bp, Homo sapiens
cccgtcccgaccctggccgccccgagcggagcctggagtgagacggtttaagcggaagcatcttactgccattgactgccagca

SEQ ID NO: 617090 - DNA, 75 bp, Homo sapiens
ccctgctgggtcctacctgtcagagccccaagtatggtttgaagtggtgaacatggatttttctcggcttcacat

SEQ ID NO: 617091 - DNA, 100 bp, Homo sapiens
gaatcagaaaagatgaaaatagagctgaaaaagactcatgctgctgagacagagatgacactggaaaaggaagctgtagagaaatatgaagaagtgctac

SEQ ID NO: 617092 - DNA, 82 bp, Homo sapiens
gtcagcatggcccaggctcctgctgacccgggcagagaaggcaccgcatcagcctgctcaaccctttaaatttacaatttcc

SEQ ID NO: 617093 - DNA, 76 bp, Homo sapiens
gaagctctagaaatgaatgtttccatctcttcagagatgaaccaggctaactcaggtgagatggagccgctatagt

SEQ ID NO: 617094 - DNA, 90 bp, Homo sapiens
atgaactttatgtggacgtgacttacataggttccttgcattgactccatggagagtatatcacctgatttccgtcatgatacttgggcg

SEQ ID NO: 617095 - DNA, 101 bp, Homo sapiens
acgctgggccgggtgttgcgcctggcctacagcgaggctggcttgaaactgttacaatatggctttccttggactcttctctttgctggttctgcaaagta

SEQ ID NO: 617096 - DNA, 75 bp, Homo sapiens
gtggagcagcttctttatcccttcatctgtggataagcagctggttctagtgagccctacatcagagcagtatga

SEQ ID NO: 617097 - DNA, 90 bp, Homo sapiens
caccagcgcagcgctgccatggagcccagcagcaaggaaaccactatcagcggcctgaccccggagaccacctactccgttactgttgct

SEQ ID NO: 617098 - DNA, 98 bp, Homo sapiens
tgcttcttatttagcactcacaggtgtcagctgtgatgcatgtttaaaaggaaattttcgaggtcgcagatataagtgtttaatttgctacgattacg

SEQ ID NO: 617099 - DNA, 99 bp, Homo sapiens
gccacagcccgcgaagccaacgagtgcgtgggcctctggctgtacctggcagggagcagcctgccctgtctcacgctgattggctctcctaattttggg

SEQ ID NO: 617100 - DNA, 90 bp, Homo sapiens
gggctgggaagtggattccacccaggaaggagctgtgtatttcatcaagaagcgtcagcccccgtagcacctctgttaccacgacttcta

SEQ ID NO: 617101 - DNA, 98 bp, Homo sapiens
ctacattaacattcttcttggagttttctacactgtttgtcgagatttgaaagagctcagacatctgatggctgatcactgggaaactgcacctcgtc

SEQ ID NO: 617102 - DNA, 74 bp, Homo sapiens
gcactgggtcgtcacggaggacgggaaaatccagcagcaggtggatttagttttggagaaggaggtggctggcc

SEQ ID NO: 617103 - DNA, 98 bp, Homo sapiens
tcccgggctgaattctctctccactcttcgagattggcacacccaggttggagcagaaagaaacgtgctcatctttgacctgggaggtggcacttttg

SEQ ID NO: 617104 - DNA, 98 bp, Homo sapiens
tgcggcagcaagggcggcggtggcggcggcggcagctgcagtgacatgtccagcatgaatcccgaatagtgatcaatgttgatgggacgaagaggcgg

SEQ ID NO: 617105 - DNA, 75 bp, Homo sapiens
ccagcaactttccaccaccattcaagaggagttctatagagaaaatgtgatggaggatatttgtagtaaactgca

SEQ ID NO: 617106 - DNA, 100 bp, Homo sapiens
gggctcgcccctgcactccagctatctcaacagcttcttccagctgcagcgcggagaggaatcttgtcgattggcctggctgctgcctactacagcggag

SEQ ID NO: 617107 - DNA, 97 bp, Homo sapiens
atttgggtgatacccagtgcagtgaactgcagcaaatggctactgcagaaggactgataaaacgatctaaagggaaggagagaccctttgttcttac

SEQ ID NO: 617108 - DNA, 98 bp, Homo sapiens
gggccagttcatgaaggccggcagcatcaatgtctggaacatctgtcccttgttcaaaggctatggaactcagtcaactccccagggatatggctcga

SEQ ID NO: 617109 - DNA, 75 bp, Homo sapiens
cttagctcagcaattcttaccttatgggaaagggctccttcaagtatgcctgggtcttggataaactgaaagctg

SEQ ID NO: 617110 - DNA, 89 bp, Homo sapiens
aacaggaggaggaagtggagggttaatttggagtggcccctggagtcagtttcctacaccatccgaggccccacccagcacgagctaca

SEQ ID NO: 617111 - DNA, 101 bp, Homo sapiens
ttatatgatgaaactcaatacggaacagagactctttggtcaaaagatatggcgccatatcagggtgaccaagaatatggcccaggtgaccaaagccctgg

SEQ ID NO: 617112 - DNA, 100 bp, Homo sapiens
gcaggatgatgacaaaggcaactgtgaggactaccttatgatttcctcccacaatgcagttgttacatcagccatctttgcaccaaacccaagtttgatg

SEQ ID NO: 617113 - DNA, 100 bp, Homo sapiens
agatgtcacctgaaagtggtcacagccgcatctttgaaggtttttcgttggaatatacgttgcacatttatggcgattctgagtgtgagggcagacttct

SEQ ID NO: 617114 - DNA, 83 bp, Homo sapiens
ctggcttagaagaaggatcagagtactatgagaggtagttgtcctgggaacccctgcagaagaagatggtggtggcaaaattg

SEQ ID NO: 617115 - DNA, 75 bp, Homo sapiens
caagtatgtgccggagagaaacgtcgtgatttggagtattaagtctttcccgtcatctggggacctggagaatga

SEQ ID NO: 617116 - DNA, 99 bp, Homo sapiens
atcgtcctgtggacgcgtatcgccagcacgatcccaccgcacgttcagaagtcgggtgctggagaatctggtaaaagcaccattgtgaagcagatgagg

SEQ ID NO: 617117 - DNA, 75 bp, Homo sapiens
gcctagcgtcctggaattacttcaatcaatgccctgcaggagtcattaaatcaaaacttcatgctgatcatcacc

SEQ ID NO: 617118 - DNA, 90 bp, Homo sapiens
ctgcagaggtgctggagctggcagtccacaggtcctggctaccctgggaagagacaagaagtaaatgaagaaagaggaagattccaggac

SEQ ID NO: 617119 - DNA, 76 bp, Homo sapiens
caccaagaaggacgcactgactcgcctcaagcacctgcgcatcgtcatcggcacagaccccacaggctcctcggac

SEQ ID NO: 617120 - DNA, 75 bp, Homo sapiens
tgctgaaagttttacttttttgatgagaaaggaaccactcgttttgactattattttatcactctttgtgaaact

SEQ ID NO: 617121 - DNA, 100 bp, Homo sapiens
ctacgccctgcgccgccatccccgcggcccgcggaaaggtcccagcatttgagggtgatgatggattctgtgtgtttgagagcaacgccattgcctacta

SEQ ID NO: 617122 - DNA, 99 bp, Homo sapiens
gcagtggcacctgcgcgaagctggccaaagcctgcccagacggctcacctgtgcgggatggaacaaaagattggttttcacagaattccatggacttta

SEQ ID NO: 617123 - DNA, 83 bp, Homo sapiens
ctctgagaagctggagctggtgacaggagcctccatcgacctgcagaagacatcccacgattacgcagacaggaacactgcct

SEQ ID NO: 617124 - DNA, 100 bp, Homo sapiens
ggagacgcgagcggtgcgtgtgccgcgggtgcgctgccggtgacaggtcatttattggggaggcagtgttccctaaacaccttaccagcagcttccattt

SEQ ID NO: 617125 - DNA, 98 bp, Homo sapiens
agctgtgtggcttatgttaccgagctttcactaaggtagctacagcaagctgggtagcaggcagatccaaaggatatcatgaagtttccagggccttt

SEQ ID NO: 617126 - DNA, 100 bp, Homo sapiens
ccacactaacgagattcaagattatttgcaacagctcacgggagcaagaacggtcactacaggaaaagatatcttcattaaagtgcaacagcacactgag

SEQ ID NO: 617127 - DNA, 95 bp, Homo sapiens
gcggatctggaggagcagttgtctgatgaagagaagttctgatagtatcagcagtgatgaggaggagctaaggactttgggaagcagtggtagcg

SEQ ID NO: 617128 - DNA, 75 bp, Homo sapiens
cttctctcgagagcttttgtccccccggatctcaaggttgaaatcacaaagattagacacctttttagataggtg

SEQ ID NO: 617129 - DNA, 90 bp, Homo sapiens
gttccgggaagacacggtgaccagctgaatcgtgtggtctcgagacatccatgatgcaagagccaaattaccagcaagagttaagtaaac

SEQ ID NO: 617130 - DNA, 100 bp, Homo sapiens
cctcgcctctgcccgtgagcgtgttctttcagagcacggcttcggccccatcactaccgacatccgggagggacagactttctactatgcggaagactac

SEQ ID NO: 617131 - DNA, 100 bp, Homo sapiens
tccgagcaactgaaaaagacaaggttgttgtctcttcaagaaaatgaggaggaggagattgggaacctagagcttgcctgggatatgctggatttagcaa

SEQ ID NO: 617132 - DNA, 100 bp, Homo sapiens
tttcgaaagccagaggctcgagttacccctcttaccaccgtcatggcagtcccaggacgatgttcaactttggctctcctatgtggctttttgtaagaag

SEQ ID NO: 617133 - DNA, 100 bp, Homo sapiens
caccgtgacttcccggacgctgggaaatggccgacggtcgcaaggtcctacggtcaagcatccgggagtttctatgcagcgaagccatgttccacctggg

SEQ ID NO: 617134 - DNA, 100 bp, Homo sapiens
caagtaaacagtgcacttaaacagaaaatggaaggtggaattgaagaattcaaacctcctgaggtggagccgccaccaaaatgcagattttcgtgaaaac

SEQ ID NO: 617135 - DNA, 100 bp, Homo sapiens
tgcagcttatgaccatcaatatgtttgcagtacacaactcccagctgaaagctggaaggggtctgtgtacatcagcaactttcaaacccattttatttgg

SEQ ID NO: 617136 - DNA, 98 bp, Homo sapiens
gtgcttttcctcctgcagcccaccgtctacttgtattaaaggtggaagaaggtccatatctttttctgtgggtgcttcaagtgttgttggaagtggag

SEQ ID NO: 617137 - DNA, 74 bp, Homo sapiens
gcaagcaacagtagtcgctgttggatcgggttctaaaggaaagggattgtcgatcagtcacaacaagcatacca

SEQ ID NO: 617138 - DNA, 100 bp, Homo sapiens
cacattctctgttctaagtgccttaagagaggatcgcccaatccacatgcttttccagctaaaagatggcggcaaggcagcccaggcaaatgtaagaata

SEQ ID NO: 617139 - DNA, 101 bp, Homo sapiens
cggggccccgaagaggacagagcccgcggccgcgccgagcgggctttctgaggaagagaaaattcagcgctacagcatcctctccgagctctatgagctga

SEQ ID NO: 617140 - DNA, 82 bp, Homo sapiens
ttcctctacaacctcagctcagatgacttcaatgacaagagggccctcctggacccgggagcggaccctggtggcggtgaag

SEQ ID NO: 617141 - DNA, 90 bp, Homo sapiens
cagtgccagctggcctgactttacagtctgttagtccccagagcctccaagggaaaacgcataagcagtactataatggatgtagacagc

SEQ ID NO: 617142 - DNA, 99 bp, Homo sapiens
catgctcaagtcagagggcttttactcctacctgtgtaccgagccagatattaataaggcagcggaaagaagaaatatgaatacggctccatcaagacc

SEQ ID NO: 617143 - DNA, 82 bp, Homo sapiens
cgcagaagtcgcgtgtctaggtgagtcgcggtgggtcctcgcttgcagttcagcgaccacgtgtcctcagcctgcgggggct

SEQ ID NO: 617144 - DNA, 82 bp, Homo sapiens
ggagctgtcgtcgccctggaagacgatcccgagttcaacgcaggacagtcattttgtttactcattcagccctgttgcaggt

SEQ ID NO: 617145 - DNA, 100 bp, Homo sapiens
cagaccttctgctcttcccagaccaccagtaacacatcccgttatgccgctgcactctacaggcaaggctgaaggtgatgtggccgccctcaaccgacgc

SEQ ID NO: 617146 - DNA, 90 bp, Homo sapiens
cagggacacaactgccacaagccggacacgtattttgactaaaggagaagttcaagtatcagataaagacacacacaactggagcagatg

SEQ ID NO: 617147 - DNA, 75 bp, Homo sapiens
cagctgcctcagttcttagcgcagaaaactgcctggagcagttggagatgggatttccacggggagcccagccag

SEQ ID NO: 617148 - DNA, 87 bp, Homo sapiens
gcgcgcctttgtgcgcgcgccgagatgcttttactgactctgctatcagtgctaaagtgaatggcgaacacaaagagaaggacctgg

SEQ ID NO: 617149 - DNA, 51 bp, Homo sapiens
tgccggaacactgtggcggccatcgaggagtcttggcctgactacgaggac

SEQ ID NO: 617150 - DNA, 90 bp, Homo sapiens
gacctttaggtgcttttatattcatctcaaaaacaaaattctgaactcaggacttggcaaggccggctcccaggcctcagggtccgctgc

SEQ ID NO: 617151 - DNA, 100 bp, Homo sapiens
cccctttgaattaattatggctgactatacaggctccaacccaagttccagtggttgtgtctcctaggaatcagcagttgcatacagtaacactccaaac

SEQ ID NO: 617152 - DNA, 92 bp, Homo sapiens
tgttcatataaatggtggcagaaataccagaagcttgatgtagttttagagaccaatctggcaacaatccgggttctggaagcaatacagaa

SEQ ID NO: 617153 - DNA, 51 bp, Homo sapiens
atcttctgcactgtttacaggcacaggtattcaaaacctttgaccacatgg

SEQ ID NO: 617154 - DNA, 100 bp, Homo sapiens
ggtccttcggagatatctacctggcgagaaccctctgcccacagtggagattgccatccggaacacgggcgatgcggaccagtggtgcccactgctggag

SEQ ID NO: 617155 - DNA, 88 bp, Homo sapiens
ctgtacaggaaatgtggtgccggcatctgcttctgttattgtgaccaactgaaagtctcagagagtacccacgtgctccagcccttcc

SEQ ID NO: 617156 - DNA, 96 bp, Homo sapiens
aagcacttttttcggaacacgagacaaatcttcctattttcaagctgaaagaatctactgttagaagaagatacagtgactttgaatggctgcgaa

SEQ ID NO: 617157 - DNA, 100 bp, Homo sapiens
cttgtccagaactctgtcaaatgaagaacactttcaagaaccagggtatacctcagttaccatgtgccaaagcattatacaactatgaaggaaaagagcc

SEQ ID NO: 617158 - DNA, 100 bp, Homo sapiens
acagattcagatgtgccggagcagagggatagcaagtgcaaggtcaaatggacccatgaggaggtgcaaattgagcatgacccagaattagaaaaagaaa

SEQ ID NO: 617159 - DNA, 85 bp, Homo sapiens
gagatcaccgacaagatcaccacggacgagatgatcaaacgcctgaaggtgttgacagctcttctaccacaagcagtgcttctcc

SEQ ID NO: 617160 - DNA, 75 bp, Homo sapiens
aggtcagacgaacgtggggcaggatggacggcaaaaccttctgaggaaaggaggccatacagaaattgaacctca

SEQ ID NO: 617161 - DNA, 74 bp, Homo sapiens
tttaaagaaaattttaaaaggaatcttggattataatcatgagcagatataatttctacagtagaatttaatca

SEQ ID NO: 617162 - DNA, 98 bp, Homo sapiens
ggagagggagtgcgtggaggagctgtgcagccgcgaggaggcgcgggaggtgttcgagaacgaccccgagacggtgtgacgtatgcagccaaaggcta

SEQ ID NO: 617163 - DNA, 101 bp, Homo sapiens
cactcccactggaacacacttctgtgaagttgaacagctgagaagtgagaatggatcttggagaatgtctgaaagtccatgacctggctttaagagcggat

SEQ ID NO: 617164 - DNA, 100 bp, Homo sapiens
cgcggggaggaggatgggggctaaccagttagtggtgctcaacgtgtacgacatgcatgttggcagataaattgaacatgactccagaagaagctgaaag

SEQ ID NO: 617165 - DNA, 50 bp, Homo sapiens
gttttgatgatggagggctactacaggatgagaacaagttgagcagtgcc

SEQ ID NO: 617166 - DNA, 51 bp, Homo sapiens
cctggggatggcgcatcacacaccaaagaaattcattgagtttgaagatgc

SEQ ID NO: 617167 - DNA, 87 bp, Homo sapiens
ggggccctgtgtagaagctccatcccccttgtctttgtgcttgcctgcgtccccagactcagagattgggtggatcacaagaactaa

SEQ ID NO: 617168 - DNA, 100 bp, Homo sapiens
taatccagatcattccacttaccatgatttcgatgatgatgatcctgagtgctgtgctgtggctttcattgagaagctagacgcccagtctttgaatcta

SEQ ID NO: 617169 - DNA, 90 bp, Homo sapiens
gcagagcaggctggagcccaagccccagccccctgtggctgaggctacaccccggagccaggagggcctgaccttcataagaagacccag

SEQ ID NO: 617170 - DNA, 75 bp, Homo sapiens
gaaagcagcatagagaatgagatagccgtcctgagaaagttgtcctttgtggagggtcttctcgaatcccaaagc

SEQ ID NO: 617171 - DNA, 83 bp, Homo sapiens
atctgtggccgagttgctgttgccgggtgatagttggagcggagactgtagtagattccatggatgcattagataaagttgtc

SEQ ID NO: 617172 - DNA, 109 bp, Homo sapiens
ctttggagcctgagctcgaggcccggctggcgcacctgggcgtgcaggttcgatacaagaggctgttttcctagcgtggcttgctgcctttggtaagaacatgtcgtcc

SEQ ID NO: 617173 - DNA, 83 bp, Homo sapiens
gccatattgtgtcttccccggccggtccctcgcctcccggccgagctgacgtgcagagcagagcgggcggaggaccccgggcg

SEQ ID NO: 617174 - DNA, 90 bp, Homo sapiens
ctccgggccgcgaagtcgcagcgccagacccaaggcccccgagtgagcgcgggcgccgagccacacccactcgcccgggtctatggccac

SEQ ID NO: 617175 - DNA, 100 bp, Homo sapiens
tgtgggccagccacttagtgcacttcctgagctcagaaacacgcaggtgtggtatctgtgcgctttgaagaagatgaagacaggaacttgtgtctaatag

SEQ ID NO: 617176 - DNA, 101 bp, Homo sapiens
gaagaaggctgctattgaaagagagtatgcacagtcccagaaatcctggatagaaagcactttgaccaagagggaatgtgtatatattataccaagttcca

SEQ ID NO: 617177 - DNA, 100 bp, Homo sapiens
caactcctgagtatgttcacgatcggggtcagagaattctgccagatatcaggacagatggggaacagcagaagccgtgtggggcggagcttttgttcac

SEQ ID NO: 617178 - DNA, 82 bp, Homo sapiens
cgtgggaacccaggccccgccgaggcggccagaccatggtgaatccgggcagcagctcgcagccgcccccggtgacggccgg

SEQ ID NO: 617179 - DNA, 75 bp, Homo sapiens
cccatcacctacccgcagggcctggcactggccaaggagattgggatcgcttacacctgagacgaactacagaac

SEQ ID NO: 617180 - DNA, 100 bp, Homo sapiens
tctgtgccaaaagagcctctctccggagtagaaagactcagattgatggacaacttttcttaattaagcaccttttgatacttcgtgaacaaattgctcc

SEQ ID NO: 617181 - DNA, 129 bp, Homo sapiens
cgacaaccttcccagaaagtccaagctcgtggtgggtggaaaagtgttcgccgaggcataatggttatgaaagcttctgtagatgatgacgattcaggatgggagctcagtatgccagaaaaaatggag

SEQ ID NO: 617182 - DNA, 98 bp, Homo sapiens
tagatggctttggtcacggtccagcggtcacctacccccagcaccacctccagcccctgcgcctcgacgctgcatccaggtagtacacaaactgctct

SEQ ID NO: 617183 - DNA, 102 bp, Homo sapiens
gctgagccaggccccttctcagattgcaaacagtggttctgctggattgataaacccagctgctacaggacacattcagctaacgtattttagcaggtggag

SEQ ID NO: 617184 - DNA, 75 bp, Homo sapiens
tcttcccaccacagcttcacaaagcactgggatggattacagacaagcttaccattgttcagaagcaaacagttt

SEQ ID NO: 617185 - DNA, 100 bp, Homo sapiens
tggcattccaggagcatcgcctggagctggagcgcgtccacagagccccccaagatgaacccagtggtggagccactgtcctggatgctgggcacctggc

SEQ ID NO: 617186 - DNA, 82 bp, Homo sapiens
ctgaactaggatgtcccgacatgaagatttagctttggagtcaaacccttctgaccatccaagggcaagcacaattttcctg

SEQ ID NO: 617187 - DNA, 98 bp, Homo sapiens
cctaatcctcccaaagttcttagattacagaaccctcggcctcaggaaagtcggacagtattcagtggctcagtcagtattccatctatcaccaaatc

SEQ ID NO: 617188 - DNA, 128 bp, Homo sapiens
aagaccaccaaaaagttccaccgcgcgcgcctcgacctgctgctggagacctggatctcgcgccacaaggagatggtgtttccccccgggccggcctgccgtgacgatcacagccctgccgtctcagg

SEQ ID NO: 617189 - DNA, 100 bp, Homo sapiens
gacaaaccacctgccaatgttgccaccactcttcccatcaggaataaagggtgtatgtacaaagacttttgaagaggtgtgggagcacacatgatttaaa

SEQ ID NO: 617190 - DNA, 82 bp, Homo sapiens
ggggaacatggacatgaagaggaggatccacctggagctgaggaaccggaccccggcagctttatgcaaagggtgacctgga

SEQ ID NO: 617191 - DNA, 96 bp, Homo sapiens
ctcggtttggctgactggggagtcggcaggcggcaggtggacccaagtggagagattgtggaactggcgaaaggtgcatgtccctggaaggagcat

SEQ ID NO: 617192 - DNA, 98 bp, Homo sapiens
cagaacaggaggtggtagagggcatggatatctctactcgctccaaaggctggagtgcatagcacgtgatgctgagctggtagataagtcggtggcag

SEQ ID NO: 617193 - DNA, 75 bp, Homo sapiens
gactaccagccgcttcctggcatgtcagagaacccctccgtctatgtgcctgaactgggcacctccgggctgtga

SEQ ID NO: 617194 - DNA, 73 bp, Homo sapiens
gcggcgctgctgaccgacatcgaaggagatgaccaggatagtgaaaagtcaaaaccagcaggctcagatggtg

SEQ ID NO: 617195 - DNA, 78 bp, Homo sapiens
aggtttctgccttatcatattctgaccagattcagcaacctctaactaaccaggaagtgtttggattgtgagctattt

SEQ ID NO: 617196 - DNA, 98 bp, Homo sapiens
tccatcaggaccccagatgtctgacagccctgtgtgacaccaagataagtaacgtaaggaagtggaggattaaatgatttgcccaaagtctcacagta

SEQ ID NO: 617197 - DNA, 100 bp, Homo sapiens
gcctcaggagcggaacaacgtcggcgagcggggtggaaaaccatgaattccttgtaaaaccttcatttgatcctaatctcagtgaattaagagaaataat

SEQ ID NO: 617198 - DNA, 100 bp, Homo sapiens
cacaatgatttctccagtgctcatcttgttctcgagttttctctgccatgttgctattgcaggacggaatgtctctgcccacccacgcaacccagactat

SEQ ID NO: 617199 - DNA, 101 bp, Homo sapiens
tggccgagggaggggaccccgcgagagggccgcgcgccggccgccgccgccccggcgcccaggctcggtgccctacgagacgctgaacaaacgctttcgcg

SEQ ID NO: 617200 - DNA, 131 bp, Homo sapiens
cttgagctccaggagttcgtctcttacgtctgcggaagtgcagctgcctcagttcttagcgcaggaatcactctgcatgatgaacctgtcgactgggcggcagcaggcgatcatgttagtcttactttggt

SEQ ID NO: 617201 - DNA, 100 bp, Homo sapiens
cacaggagagctggctgcagtaaaaatcattaaattggagcctgatcaaatgatgccgtttggaaaaatttcccagcagttgtgtggcgtaaagaaactc

SEQ ID NO: 617202 - DNA, 76 bp, Homo sapiens
cgagaccttcatcagtgacgtgctgcagcgggacttgcgctgaagaaatcaggggagaaacccctgcttggtggaa

SEQ ID NO: 617203 - DNA, 83 bp, Homo sapiens
ctcaccagcttcaccagccaggccgtggacagattcctggtcgggtggcttccagtggtcttcagtctgtcgtgcaccgatga

SEQ ID NO: 617204 - DNA, 90 bp, Homo sapiens
cggaggcagctccacactgtgaactaaaatcgctgttctggcatccatttgcgttactcaggcatttatgatgtggaagttcattaattt

SEQ ID NO: 617205 - DNA, 98 bp, Homo sapiens
caagatggcggccaatgtgggatcgatgtttcaatattggaagcgctttgatttacagcagctgcaggattaagttgtcatcattctgggaagaaaaa

SEQ ID NO: 617206 - DNA, 100 bp, Homo sapiens
ggacgctgcacctcccgcgccgcacggtggacgaggaggactggaatgaaattgaccccattaaaaagaaagaccttcatcacagcaatggagaagagaa

SEQ ID NO: 617207 - DNA, 75 bp, Homo sapiens
agagagaaaaatagggatcgtccaacccgagaacagctttgctgagccatcaaggtctaatggaagcatggttcg

SEQ ID NO: 617208 - DNA, 75 bp, Homo sapiens
ccaggcgctcgggggccgaactggccctggactacctctgcagaaactagatgatggccatttaaacaactcttt

SEQ ID NO: 617209 - DNA, 74 bp, Homo sapiens
agaaacaggcccggacctcctcctctaccacccccaatcgaaaggccagctttgctccaatggaggacaaactc

SEQ ID NO: 617210 - DNA, 82 bp, Homo sapiens
gcagggcctgcagcgggagctggacggcgagcgcgagcggcgcgagaaagttttttattggcacctcagtctcaacattttc

SEQ ID NO: 617211 - DNA, 100 bp, Homo sapiens
aaaaaatgaaaacttagattgcaacagtgattcacaggtgtttccctctttgaataaggccaatgatgaggccaatcagagtgatacaagtgtctccttg

SEQ ID NO: 617212 - DNA, 99 bp, Homo sapiens
atccgatcccgctctgcacattccaaaggtgctggagaatctggtaaaagcaccattgtgaagcagatgaggatcctgcatgttaatgggtttaatgga

SEQ ID NO: 617213 - DNA, 74 bp, Homo sapiens
gaacatcacttggaccaaatggtaaatacggcatcatctgcatggaggatttgattcatgagatctatactgtt

SEQ ID NO: 617214 - DNA, 100 bp, Homo sapiens
agctttggccggagccattcccctgaatggtgactctgaggccaatggtggcagagtctacatagaactatgcttcgtggtgttctggggaaaacctttc

SEQ ID NO: 617215 - DNA, 96 bp, Homo sapiens
ccaactaccaccaagtcctctccatctgatcccatgaccacctccagagctaatcagggtctcctatggacagaagtgcgggcaaggagctttgtt

SEQ ID NO: 617216 - DNA, 100 bp, Homo sapiens
tgtttcccagaggaacagttcatttcaacagccagggagaaagcctggatgctcaagattacataccggttacggcacctccttcgtgcaaggtgtgatg

SEQ ID NO: 617217 - DNA, 83 bp, Homo sapiens
cctgtcccaagccctggtgccaggtgtccatccccgtgctgagaggacaagaattttgggcagatttgaatgccatgaacgtg

SEQ ID NO: 617218 - DNA, 98 bp, Homo sapiens
aatgactacctgaaccgcatcttttcctcttctgaacatgcacccccagcagccaccagcagttcaatcaaatgcctggtaggaattgctagcgttgc

SEQ ID NO: 617219 - DNA, 90 bp, Homo sapiens
ggggcggactccttggaactggcttagcgcacccatcccaccttcccgcaccctgggaccggcatgggttggaattggagcctatccccc

SEQ ID NO: 617220 - DNA, 100 bp, Homo sapiens
cgggtaaaaaggcctctcctttggtggtggctgcagcggcagcagcagcggtagctgcccaaggagggagaagatgtcaaccggacactagaaggtggaa

SEQ ID NO: 617221 - DNA, 83 bp, Homo sapiens
gtggattctgtgatgtcttcaataaatccaaatacttctgaaatgcactcggtgatggaaagagagccactattctgaagaac

SEQ ID NO: 617222 - DNA, 80 bp, Homo sapiens
ggactacttctaccgaccagagacccagcaccggtacatccagacactgaaggaccacaggccccggatggtgtgggaca

SEQ ID NO: 617223 - DNA, 75 bp, Homo sapiens
agttcagttcgcccaacatggaatgacttgagaacacctggagagtgcaagttctaactcaggtataccagctgc

SEQ ID NO: 617224 - DNA, 82 bp, Homo sapiens
tccaaggacacctacagccccgacgaacatttctgggtgacactcaacaggattcccggacaatcatatcctgattcagccc

SEQ ID NO: 617225 - DNA, 50 bp, Homo sapiens
atggcatctatgttatcaaccaggtcaaaatgcagatcttcgtgaaaacc

SEQ ID NO: 617226 - DNA, 100 bp, Homo sapiens
aggcaatggtctggtcacttttcagctgcggggacttgaattcagaggccacggaaaggtatgatatatttgatccaagacagtccattccagtccggga

SEQ ID NO: 617227 - DNA, 90 bp, Homo sapiens
cacaataagagcagaggatggaacacttcagtgcattcaagtgctcttaaagttccgtacagataaaggaagagatcccagttctgatac

SEQ ID NO: 617228 - DNA, 101 bp, Homo sapiens
cttgttctgctcggcagtggtctgatatgtgtcagtgccaacaatgctaccacagggtgtcaaattgagaaccaggtagatccccaccacctacagtaaaa

SEQ ID NO: 617229 - DNA, 80 bp, Homo sapiens
ttatgaaccagtgtatcccaattcagacttggttccttcaacctagagaaagttgaaaacccagctgaagtcattagaga

SEQ ID NO: 617230 - DNA, 75 bp, Homo sapiens
caggaaggcaccaggtggccccatgcttttgccgcagacatacggagcgttgcccgacatgtgagtgccattcct

SEQ ID NO: 617231 - DNA, 90 bp, Homo sapiens
gcttgctcatacaggatgcccactttcatcaacttctctgtctgctcaacagtcagaggatgtccggcttccagatcaacctcaacccgc

SEQ ID NO: 617232 - DNA, 87 bp, Homo sapiens
caagctttgatcttggctcccacaagagagttggctgtgcagatccagaagacccttcttatgactcagtcagaagaggagcttggg

SEQ ID NO: 617233 - DNA, 82 bp, Homo sapiens
ctgctcttcgctctcttcctggctgcgtccctaggtgtttcccattaaacactaccaggacaaaatcaggccttacatccag

SEQ ID NO: 617234 - DNA, 75 bp, Homo sapiens
caggattgttcctgagggagccaaaaaaggccgagtgtactacttcaaccacatcactaacgccagccagtggga

SEQ ID NO: 617235 - DNA, 82 bp, Homo sapiens
agccgatccagcctgcggagcctgtggggcagacacccatcatactgactccaagccccttgctctccagtatccacttctg

SEQ ID NO: 617236 - DNA, 80 bp, Homo sapiens
ctcaaggatccttcaaataacttcaggctggcagacacaccaaaatctgaaagatatgagcatgttctggaggcattaaa

SEQ ID NO: 617237 - DNA, 50 bp, Homo sapiens
cgcctgggaggaggcccaagtggaggtgacaacatgtacagctgtgagcg

SEQ ID NO: 617238 - DNA, 111 bp, Homo sapiens
tttctgcattttgttaagaagcacctcatgcaagcgagggacctgggactgctcacagccagtgaaggaagcccatcccccagaattgagctgctgcataatattgacccg

SEQ ID NO: 617239 - DNA, 85 bp, Homo sapiens
gagatcaggaaacggcttcttcctcacttcgccgcctggtatctcaaatctgtgaagtattgtagaggagacacaaaaggaattg

SEQ ID NO: 617240 - DNA, 75 bp, Homo sapiens
atggacagggaggagctggagctggagagtgcaaattcacctgcaccagtggtaaatgcttgtatcttggttcgc

SEQ ID NO: 617241 - DNA, 96 bp, Homo sapiens
gcccgcaagagcgagccgcctgccccggtgcgcagacagagctattccagcaccagcagaggatgctccaggatgaaacgccataggcctgtcagc

SEQ ID NO: 617242 - DNA, 100 bp, Homo sapiens
gaacataaaccagtaaagatcggacgtgatggacaggtcttttccaatggtcaccttggaagtgaagaatatgatgttcctccccggctttctcctcctc

SEQ ID NO: 617243 - DNA, 100 bp, Homo sapiens
gaagccggcgctgctctgtggggctctggccgcgcctggcctggccgggaccatggaaagaccacagcaagattctttcattcgtctcctcctagcctgg

SEQ ID NO: 617244 - DNA, 90 bp, Homo sapiens
gtttagaggatgaagtgacccctggactcccgacagcagaatcccaggcaagaaactatattcagtctttgactcagatgccgaagatga

SEQ ID NO: 617245 - DNA, 80 bp, Homo sapiens
acatcgtccgatctgtcatcaatacctcagactactccaaaggattcggcgggaagtatggggtgcagaaggatcggatg

SEQ ID NO: 617246 - DNA, 90 bp, Homo sapiens
tctacctctatgaggtagatattaaaccagacaagtgtcctaggagagtgaacagctattcctctacacagccgactagttatgatcaga

SEQ ID NO: 617247 - DNA, 100 bp, Homo sapiens
atggagccaggctaaggacattttctataagaactccttgttccgacatcccaaacagagcctggagaaagttcttgtggaattcagtcacaaggagttg

SEQ ID NO: 617248 - DNA, 100 bp, Homo sapiens
caggtgtgaaccagacccccgtggtagacccaaggtagctttagtaaaatgtcgggacttgcactgggctatgatggcacatcgggaccaaagagacgtg

SEQ ID NO: 617249 - DNA, 90 bp, Homo sapiens
cttctgaagaaattattagtcctgaatccaataaagagaggcagcttggaaacggtctggaaaatcccgaagcagaagcccgtattcatc

SEQ ID NO: 617250 - DNA, 101 bp, Homo sapiens
cttcgacaggaaaaaaatttgctggatattgatgcgccagtcactgagagattggaacaattatcaggtcattaggatgctgtcctacggaaggagagctg

SEQ ID NO: 617251 - DNA, 50 bp, Homo sapiens
ccccactcctgggccgtccctgaagcgatgtgacattggggatgcttcca

SEQ ID NO: 617252 - DNA, 82 bp, Homo sapiens
gaggaattagcagtgctcctcctccaaagtgatcctttttttatgcccgagttttttgaggaagagtctcgctaccactgtg

SEQ ID NO: 617253 - DNA, 50 bp, Homo sapiens
ttcgcagtggtcgcttcttctccttgatccagctccaggtcccacagggg

SEQ ID NO: 617254 - DNA, 82 bp, Homo sapiens
cgcccctggtgcacacaccctcgtattctcctgcccttccccagcttaaagcttttcaagccaggccaagaagctgtgaagt

SEQ ID NO: 617255 - DNA, 75 bp, Homo sapiens
gtcaagttcctgctgcttttctacctgaagaagcaagccctggatgaaaacatggacctcttggaaggtataact

SEQ ID NO: 617256 - DNA, 90 bp, Homo sapiens
gtatgaacatccaaatccctggaaagagagtttccagcagttgcttccttggaaatcattgactagcatcattgaatattattacatgtg

SEQ ID NO: 617257 - DNA, 75 bp, Homo sapiens
gccaaacaaataagccatctcttcagttaattttggatccgtctaacacaggcacgtgtggttctcaaatatagg

SEQ ID NO: 617258 - DNA, 98 bp, Homo sapiens
ggattcccgcgcccctcggacggccacgagactcggggaacagaaagaacagcttcaaaagatgaaagacttcgggtctgagccacagatggctgacc

SEQ ID NO: 617259 - DNA, 100 bp, Homo sapiens
cctgatgggcacggccgaggacttcgccgaccaggtctgccatcatggatgttctcgcagaagcaaatggcacctttgccttaaaccttttgaaaacgct

SEQ ID NO: 617260 - DNA, 100 bp, Homo sapiens
ttcgacccaacagcatcgttcctctttccaagaagaatgtcaaaactggaccaatggggccaggctgaagtattgaactttctgctacgctaccaacccc

SEQ ID NO: 617261 - DNA, 73 bp, Homo sapiens
ttgtgctctcaatggcttagcaggcattcatattattaaaggtgaaagaacttgtcctggacaacagtcggtc

SEQ ID NO: 617262 - DNA, 87 bp, Homo sapiens
tgtctgacagccctgtgtgacaccaagataagtaactctcctgggctacctgaccaagtacgactgctccagtgcggacatcaaccc

SEQ ID NO: 617263 - DNA, 82 bp, Homo sapiens
cccggcgcaggtgaccggcgcgcgggagcgctacggccccaacgctcaggtaacggaggccttggaaagagactctgcgtca

SEQ ID NO: 617264 - DNA, 78 bp, Homo sapiens
tattattctgcgtggaagctacacttactccagtgggaggaggactccagtacgtgaacacactcctgaaactcatcc

SEQ ID NO: 617265 - DNA, 74 bp, Homo sapiens
aggttcaagcgattctcccgcctcagcctcctgagtagcaattacagaagtccccacgagaagaagaagaagag

SEQ ID NO: 617266 - DNA, 83 bp, Homo sapiens
agcttctgaagaaggccggctacgtcagcaagattgtcggcaagtgatcgcaccccctccctccctggcggagcccctgaagg

SEQ ID NO: 617267 - DNA, 88 bp, Homo sapiens
gcggattaaagctaaagacatagttcctggtgatattgtagaaattgctgccttgtcagagtttcttccttgccttgcacttcctctc

SEQ ID NO: 617268 - DNA, 82 bp, Homo sapiens
cggaatatggagccctgggcgcgggggcggcgtgtcaggtggttgcggagctggtaagcaaggacacccaggcccattattt

SEQ ID NO: 617269 - DNA, 87 bp, Homo sapiens
cgggacctgttccagtttaacaagtgatgatggccaaagagaagccaccgataactgtagttggagatgttggaggccgcatcgcaa

SEQ ID NO: 617270 - DNA, 60 bp, Homo sapiens
catcacaatcacaccccctgaccgctacttcacagagaatgcagttgtcttgacttcagg

SEQ ID NO: 617271 - DNA, 98 bp, Homo sapiens
acagattcagaaggagcaggattaccaaagggaaactgggaagaactggtgaagtacttgcagatggcccgtaagaaggctcgagagtcctatgtgga

SEQ ID NO: 617272 - DNA, 100 bp, Homo sapiens
aggcgactagcggcggcgggagcggcgccgagaggccgtgcgggacgcgggcgccaggaccggccgaacgcagaggtacgtgaacacactcctgaaactc

SEQ ID NO: 617273 - DNA, 88 bp, Homo sapiens
cagggtctagcccagccgaatccgcgtcgggctgtaactcgagtgccagttaatcagctgtgttcagcgaatacttatgaacagaagg

SEQ ID NO: 617274 - DNA, 74 bp, Homo sapiens
ggggttgaagctgctgcatctgacccctcagagaagactgatgaagtatttctggaagcccagattcagaatat

SEQ ID NO: 617275 - DNA, 104 bp, Homo sapiens
cgtgtctgggagaaacctcgtggcctggtctccattatttgagatgagttacatcttggagcagcctcccgcgacgatgcccctcaacgttagcttcaccaaca

SEQ ID NO: 617276 - DNA, 90 bp, Homo sapiens
cttggttctgccagatgttcctggggttactgtaaatgggaaggacaggcagagctaaacaaggaaaatgtttataggaggccttagctg

SEQ ID NO: 617277 - DNA, 74 bp, Homo sapiens
ctacctgctggacgaggagagcaagtgctgctgctgcctccactgtactcagacccaggtagcacaggattgtc

SEQ ID NO: 617278 - DNA, 75 bp, Homo sapiens
aggagctcttgaggaaagccattgctgaaagcctgaatgatggccaggccatgttatgggatctcaacgaaggca

SEQ ID NO: 617279 - DNA, 74 bp, Homo sapiens
ctggtgttccactttgagtacacggtggccactgactgtgggggcttgtcaatgaggcagatcagattcaggtt

SEQ ID NO: 617280 - DNA, 100 bp, Homo sapiens
aaaagaagtaaaagaagctattattacaagaataaaggcaggaatcaatccattcaatggccttcccttcttcttggtggtgttcttgagtaagataatc

SEQ ID NO: 617281 - DNA, 98 bp, Homo sapiens
cggactggatcaacaccggggagtctgcgggtgaaagtgggagatacattggatcttctcattggagaggataaagaagcaggaacagagacagttat

SEQ ID NO: 617282 - DNA, 75 bp, Homo sapiens
gatgcaattggaccaagagaacaatgggaaccagtctttcaaaatcattcctctgaatattgatttgctgaatag

SEQ ID NO: 617283 - DNA, 94 bp, Homo sapiens
ccgggaggaaggaacgaggcaaggagctaaagcagcgtgcgttcagccctgggaattcggttccctcaaaattataaaggcaggaaagctcaag

SEQ ID NO: 617284 - DNA, 100 bp, Homo sapiens
cagcgaccacaagcctgttagcgccctcttccatattgggcacttttcaggattagaagaggctgtgtatagaaacatacaagcttgcaaggagcttgcc

SEQ ID NO: 617285 - DNA, 89 bp, Homo sapiens
ctcatacggctgcttctggagaagtgtctttggtgcaacactaacaaggcttgtctggactacccagttacaagcgtcttgccaccggc

SEQ ID NO: 617286 - DNA, 75 bp, Homo sapiens
aaagacatcctgagaggacttggcaggctttccatctgatggtcccctggtgtgtgccctggaacaggagcgaag

SEQ ID NO: 617287 - DNA, 82 bp, Homo sapiens
aggagtcatcggacgccagaatctgggccgcctgggcagaatgtcacgatggacgagggcggcacgcccctgctccccgaca

SEQ ID NO: 617288 - DNA, 100 bp, Homo sapiens
ggagaacctgctgcgcaacaggaacttctggatcctgcggctccctccaggtattaagggagatatcccaaaggctcctggaacagctcatccttatgat

SEQ ID NO: 617289 - DNA, 75 bp, Homo sapiens
agaccattgattcccgactgaagtgtcggagatgtatgcagtgtgacgccaagtttgactttctcaccagaaagg

SEQ ID NO: 617290 - DNA, 101 bp, Homo sapiens
cttggcaaggagtggaagacaacaaaaacaactgcattgtgtacagcaaagcaataagagctaactgccatcaagagccatcagtatgtcttcaagctgca

SEQ ID NO: 617291 - DNA, 100 bp, Homo sapiens
ttggggctgcgtttctcttgctggccttcatcctcttcgtctgctttgctggacagcttctggctatggagttactagtagagaaagcaatcagcagtgc

SEQ ID NO: 617292 - DNA, 98 bp, Homo sapiens
tccgccctgcacaggatcatcgaggtcgtcgacgccatcatgaccacggcccagaggaagcatggcactctggcgggcataccagcgggccctggccg

SEQ ID NO: 617293 - DNA, 100 bp, Homo sapiens
cgcctgcacaagcgtttccccgcggccttcgcgccccaggcttcgcggggctacatgacatcaggctctgacgcccgctctgcggcttcggtgtttgaac

SEQ ID NO: 617294 - DNA, 100 bp, Homo sapiens
cgccaagtttcagggagaagacacggtcgtgatcgcgttactccacaggatccgctgaacataggatgttgccacaaaatctacctcgtgtatttttctc

SEQ ID NO: 617295 - DNA, 100 bp, Homo sapiens
tgccgcccaggacccgcagcagagacgacgcctgcagcaaggagaccaggaaggggtgagacaaggaagagcccgatctgctcaacttcaagaagggatg

SEQ ID NO: 617296 - DNA, 100 bp, Homo sapiens
ggtgcgcgaccgggagctggacctccggggtcttgaggaccggcccagctcaggctcctggggcagcggcgaccagagcagctcctcctttgaccccagc

SEQ ID NO: 617297 - DNA, 82 bp, Homo sapiens
ctggccacttgcttgggatcctttatcctggtcatcttctatttccaaaaaccctcacacggacgcctggaagagccacggc

SEQ ID NO: 617298 - DNA, 89 bp, Homo sapiens
agcggctgctgtctgcgcttgaggacttggaggtcctgtctagacaaggcgcctctgtcgaagagccttctgctggtccccagtgccct

SEQ ID NO: 617299 - DNA, 75 bp, Homo sapiens
aaaagaagccctattgtaatgcaagtcctggagggtatttgggagccaaaaagaaaaagaagaaacagaagagaa

SEQ ID NO: 617300 - DNA, 50 bp, Homo sapiens
agaaccggtacctggatggcatgacccccagggtggccagcggcagagcc

SEQ ID NO: 617301 - DNA, 75 bp, Homo sapiens
aatatatccgaagcctgaagatggttccaagtattccctatctagtttccctgaaacctgggctcttgaagacgc

SEQ ID NO: 617302 - DNA, 100 bp, Homo sapiens
tccgcccacagacctcaaattcaaagcccgggttggcgccatgtacgccgtgtacaaacaggcgcatccgcccaccggtctggagttctccatgtactgc

SEQ ID NO: 617303 - DNA, 75 bp, Homo sapiens
aacttcgccaccctgcggtggattgactacggcaaagtggccactcagagacaagaggagcagcagcggcaccgc

SEQ ID NO: 617304 - DNA, 100 bp, Homo sapiens
tccaattctgttgttgcctccatgcgccaatccaaaccgaaagccagaaggtgaagtattacagacacttagcacctgatcacttgctgcaaatatgtca

SEQ ID NO: 617305 - DNA, 90 bp, Homo sapiens
ggaacttggtagtagtcaatcagcaggcctgattgggctgcctccagaggatgactggcctcgagatgtatccctgccccgtggagcctt

SEQ ID NO: 617306 - DNA, 98 bp, Homo sapiens
cccaccagggccccctcgatgcagagacagaggtcggtgctgaccgctgcacgtcgactgcctaccaggagcagggaacaagaggaggatcagatgct

SEQ ID NO: 617307 - DNA, 100 bp, Homo sapiens
acagctacaagaagattttctataggagaaatctgcaggcagcaaagatggcccaagaggtggacccaagtggagagattgtggaactggcgaaaggtgc

SEQ ID NO: 617308 - DNA, 98 bp, Homo sapiens
tttaagagcagcttattccaagctttgctagttttctggatatgccgcagaaggatccgtgccagaagcaagcctgtgagatacagaaatgtttacaa

SEQ ID NO: 617309 - DNA, 98 bp, Homo sapiens
cagattcgcagtggtcgcttcttctccttggtcttgtgataatggtcactgtatgctgaatggaacacatggtccatcttcagagaagaaatcaaaca

SEQ ID NO: 617310 - DNA, 83 bp, Homo sapiens
aggataatcactaaattctgccgaaaggactgaggaacggtgcctggaaaagcttccttcaaaatgtctactgttcacgaaat

SEQ ID NO: 617311 - DNA, 100 bp, Homo sapiens
tgagacatgtctgagactcctgctcagtgtagcattaaggtctgcttagtggcctatcttggcttgtttatgctttgtgtctcatatcaggttgacgaac

SEQ ID NO: 617312 - DNA, 75 bp, Homo sapiens
ccgagctcgctcgctacagcaacagtgaggtgggatgcagatcttcgtgaagaccctgactggtaagaccatcac

SEQ ID NO: 617313 - DNA, 101 bp, Homo sapiens
gggagacacgccgcttcatcgagctgcctttacaggacgaaaggtgaccaagaatatggcccaggtgaccaaagccctggacaaggccctgagcaccatgg

SEQ ID NO: 617314 - DNA, 83 bp, Homo sapiens
cgcccagctcgcccagcgtccgccgcgcctcggccaaggttgtgaccgagattcccgacgagagagactgaggggaagagagg

SEQ ID NO: 617315 - DNA, 95 bp, Homo sapiens
ggaagcccgggaccgtttaaaaaactgatacgtaggtaacctttccagagatgtgacagaagtccttatacttcagttgttcagtcagattggac

SEQ ID NO: 617316 - DNA, 50 bp, Homo sapiens
ggaatgcagtttttacataagttcagcagtgttgtactgctacttctata

SEQ ID NO: 617317 - DNA, 100 bp, Homo sapiens
taacttctactgacgaagcttggaagttgcagaaggaaacattggcaaatttggagcgacagatctatgcttttgagggaagctacctggaagacactca

SEQ ID NO: 617318 - DNA, 50 bp, Homo sapiens
taagagctttatcaagaactatcctggccacccctgttctccgatgtgta

SEQ ID NO: 617319 - DNA, 101 bp, Homo sapiens
ctcgcctgcgcagcatgcaagagctcagcacgatccacatccagggcagtgagcagccctccctcacaaccagaatccacactggtgatagaccatacaaa

SEQ ID NO: 617320 - DNA, 75 bp, Homo sapiens
gcacgcttcccgatgccacgttacatcaacacggagcatggaggcagtcagctccagaaagcagtggggcctgag

SEQ ID NO: 617321 - DNA, 90 bp, Homo sapiens
taactgatgatgtgcgggttcaggaggtacccaaactgaagggcatggcctatctgcacgcgcagcactacatccaccgagacctagccg

SEQ ID NO: 617322 - DNA, 102 bp, Homo sapiens
atgtgactcactctcattaggtagcgtggaaggagccttcggatggggagtgcatccgccccaacccttttccccctcgtctcctgtgagaattccccgtcg

SEQ ID NO: 617323 - DNA, 83 bp, Homo sapiens
cgctggggatccctgctcttcgctctcttcctggctgcgtccctagagatgccctgtatccaagcccaatatgggacaccagc

SEQ ID NO: 617324 - DNA, 83 bp, Homo sapiens
atcgtcgccacctggatgctggaggggccaaaccagtgctcctgccacctctctggctgccccctagagcctgcccatcccag

SEQ ID NO: 617325 - DNA, 100 bp, Homo sapiens
ccagccacagagacagtgcctgccttttcagagcgtacctgtgccactgtcaccattggaggaatgcattttgttcccaacatcacctttggtcaccctg

SEQ ID NO: 617326 - DNA, 75 bp, Homo sapiens
ctcgaccacactcacctctctctgctcatgcagattcacaatgacatcctttcaagaagtcccattgcagacttc

SEQ ID NO: 617327 - DNA, 75 bp, Homo sapiens
gtggacatctcaggtcttcagggtcttccatctgcacaactttgatgaagatgaaatggatgatcctggagattc

SEQ ID NO: 617328 - DNA, 119 bp, Homo sapiens
actgaaccagatgagagccttcaaaagcagtgcaactggctcagtattcacagggaaagctgtgaggtacgctggggaggaggaggaggaagggagcggcagcagtgaaggatttgacc

SEQ ID NO: 617329 - DNA, 100 bp, Homo sapiens
gctgggtccgctgagcggggcgacccgaggactgatcctttgaaatactccagccatgactaaaagagaagcagaggagctgatagaaattgagattgat

SEQ ID NO: 617330 - DNA, 100 bp, Homo sapiens
cgagcccttgggccgcgtctcctttgaggtttacatgaggatccacaaagtccacctcctctccctgctgaaaaacctattggaaacactttcagtacag

SEQ ID NO: 617331 - DNA, 97 bp, Homo sapiens
caaaggaattggaatgagcatctgaagtcaaaactgcctctcctctacagcaggtacttcttgcaagggatatgcattagcacatactcaagaaggg

SEQ ID NO: 617332 - DNA, 74 bp, Homo sapiens
ctttggatgttgccaacaaagcaccaccaggaccagctgatcattccagcccacagcaatggagccacatgact

SEQ ID NO: 617333 - DNA, 82 bp, Homo sapiens
gctgcaccgacctcgacgtcttgcctgtgtcccacttgttcgcggcctataggtgctgggcgtcctcttctttgccatagcc

SEQ ID NO: 617334 - DNA, 90 bp, Homo sapiens
cagatatggcgaaattagaggagtgcgtcagaagcattcaagcagacggcttagtctggggctcatagtctcgctctgtcacccaggctg

SEQ ID NO: 617335 - DNA, 87 bp, Homo sapiens
gattcgcagtggtcgcttcttctccttgacgaggagaagaccttttcatgtgtatggacatacagctcgttgaagcactgtgtggct

SEQ ID NO: 617336 - DNA, 75 bp, Homo sapiens
ggagcccaaagacccctggagacatgagcgtgccaggaagatgtcgagcccgggcatcgacggcgaccccaagcc

SEQ ID NO: 617337 - DNA, 74 bp, Homo sapiens
gcgcggcggggctgaggcggccgcggggcccgagcgcaggagccttcacgtaaatgggtccagtcatgcctccc

SEQ ID NO: 617338 - DNA, 97 bp, Homo sapiens
gattattcagcatatatctcttgagtacctgtgcatgcaagacactgtcctggatattgtgagagatccaaagaaccccgacatcgtcctggtgcac

SEQ ID NO: 617339 - DNA, 75 bp, Homo sapiens
gatgaaattgtcagatgcctagcatttgctccatgataatctgaggcacagtgtctgtcctttatttgattttcc

SEQ ID NO: 617340 - DNA, 75 bp, Homo sapiens
tggctactgcgtacatccacaggttcactaacgggggcaagcaccactgccggaactgtggccacatcttctgca

SEQ ID NO: 617341 - DNA, 100 bp, Homo sapiens
gctttgataaatgaaatcttcctaagtatagaatcttgacaaaacttttggaagtgtcagatgatccccaagtcttagctgttgctgctcacgatgttgg

SEQ ID NO: 617342 - DNA, 95 bp, Homo sapiens
ctgatgatggacagaaaagaaagacagaaaaatagagcctctattaatggacacttctataaccatgaacccttgaaggtagtggacccagatca

SEQ ID NO: 617343 - DNA, 98 bp, Homo sapiens
gtaggaagaggcactgctgagggggcgcgaggggaacggaggccagagctgcgagataattgacgaccttgccaacctagtggagaacacagatgaaa

SEQ ID NO: 617344 - DNA, 90 bp, Homo sapiens
gcggaggcgttggagcgcggaaatctggaaccgggatggcgacgtctacactgagtcggaggcgaagcattttgaaagcgaagcagaagc

SEQ ID NO: 617345 - DNA, 100 bp, Homo sapiens
gaggcacagctggagcggcgagctctgcagagcgccgccctgtgctgggctgccgggagctcgtcttcaggaacctctccaagatcctccctgccctgtg

SEQ ID NO: 617346 - DNA, 83 bp, Homo sapiens
cttctgcgcagcggcgcccgcagccgcagccccctgctccggaggctggtgcagtgttctaagaacggaagcatctgggctgg

SEQ ID NO: 617347 - DNA, 100 bp, Homo sapiens
ctgtggtgtgtttgctgttcccaggcatattaatgaggataagagaaaaacagaagctcaaaagcaaatttttgatgttgtttatgaagtagatggatgc

SEQ ID NO: 617348 - DNA, 75 bp, Homo sapiens
agctggcgactttctccagtgactgggaaatccaggaagacagtaggaccatcattgaatgtctaaaatatattt

SEQ ID NO: 617349 - DNA, 100 bp, Homo sapiens
agctcctcgaccgcagtctgaggcggcgggcaggccccggtggcaaaggagggagaacgtgctggccctggacatcttctttgaggccctcaactatgag

SEQ ID NO: 617350 - DNA, 74 bp, Homo sapiens
acaagacatggaaggaaatgagggcaacttctgaagacttcaacaaggccaccagcccctcgggttccaagatg

SEQ ID NO: 617351 - DNA, 106 bp, Homo sapiens
ctcgctccgtggccttagctgtgctcgcgctactctctctttctggcctggaggctatccagcggcgccaatgcttcggcattagagaaagagattggtccagaac

SEQ ID NO: 617352 - DNA, 100 bp, Homo sapiens
atcgacaccgcaagaagagaaacggacttactagtacctacgcgggtatcagaaaagctgctctgttaaaagcgaaaatgaaacaattgcctgcggcaac

SEQ ID NO: 617353 - DNA, 83 bp, Homo sapiens
ttactgggataattatccaaataaattgcaagcattctatccaaatgggtgataaaagaaaatgtggctgaagttacccgaag

SEQ ID NO: 617354 - DNA, 97 bp, Homo sapiens
ttcctgctgctgcctatcttgagttctgcaaaagctcaggttaatccaggtgatgcgactgtgaaaaagaaacctgcccccaagacacctccgaagg

SEQ ID NO: 617355 - DNA, 75 bp, Homo sapiens
aacacggaccgcgcccgccgggcacacaagaatggtcactctccttgctcggattgaacgtatggaaaggcggat

SEQ ID NO: 617356 - DNA, 83 bp, Homo sapiens
gaagaagaggacctggatgatgatgtcatcctgacagaaggcagctgcaatgactctccgcacggtattattgtcattgcaag

SEQ ID NO: 617357 - DNA, 107 bp, Homo sapiens
aaagctgggtttcccgggagatcccaggcggtgacagagtggagccatggctagagggactttgaacatgtcggggatcgccctcagcagactcgcccaggagagga

SEQ ID NO: 617358 - DNA, 82 bp, Homo sapiens
gatcctggaagagactcggggccccccagcctccgccaacccagcaaattgtggctactaatttgccccctgaagatcaaga

SEQ ID NO: 617359 - DNA, 100 bp, Homo sapiens
gaccaggagaaactgaaaactgaattaaggaagacttcagatggtgcgtatagcagcaaaattcatcattcatgcccctcctggagaatttaatgaggtt

SEQ ID NO: 617360 - DNA, 98 bp, Homo sapiens
cagggagatgctggcgagacgacagcgagatcctctccaggccctgcggcgccgcaatcaggagctgaagcaacagcacaaacgtgcagatatctgat

SEQ ID NO: 617361 - DNA, 100 bp, Homo sapiens
cagaaaccccgttgacaaggcactgctttttcatgacggtgtcgtgaaaactacccctaaaagccaaaatgggaaaggaaaagactcatatcaacattgt

SEQ ID NO: 617362 - DNA, 83 bp, Homo sapiens
agatttctattcgccgcggaggcggcgacaattagaacgtctcggacccatggaattgaatgatctggcacgggaccctccag

SEQ ID NO: 617363 - DNA, 82 bp, Homo sapiens
attccccccgaagaagactcccccacatctggtcttattgccagcagttttgaagatgactcccgtgtagcctcaccgttag

SEQ ID NO: 617364 - DNA, 75 bp, Homo sapiens
gccgttaaggaccgttacgtttcccgggcctggagctgctgaagactgctattgggaaagctggctacactgata

SEQ ID NO: 617365 - DNA, 100 bp, Homo sapiens
ccgttgtgtttgtgaaacagagaaagataggcggccatggtccaaccttgaagaatcacaaccacagctgcctgcatgatggacctaaggaggtacccac

SEQ ID NO: 617366 - DNA, 100 bp, Homo sapiens
actcacagagacgtggatgtgctgttactgctttctaactctgcctactacgtggcctagaagatgtgcgaccctggcatgacagccttcgaacctgagg

SEQ ID NO: 617367 - DNA, 100 bp, Homo sapiens
cgaaggtgctaccatcgtgagagtaaggacccagatgatgtggtaccagttggccaaagaagagcctggtgttggtgcatgtgctttggactagcattta

SEQ ID NO: 617368 - DNA, 110 bp, Homo sapiens
tttggatttagcgtttcagaattgcaattccaaaatgtgtaagacgggatattctcttctgtgctgtcaagggttcaaagtacggagggagaagctcctcatgttccagc

SEQ ID NO: 617369 - DNA, 50 bp, Homo sapiens
caccatgacaatgatcaccaaagaggagaaaatgctgagaagcttctgca

SEQ ID NO: 617370 - DNA, 75 bp, Homo sapiens
cgaatctgcccacccctcctgtaacccagcctgtttcacttcttgctgctgaatgccatggtggcaaaactgggg

SEQ ID NO: 617371 - DNA, 90 bp, Homo sapiens
ttctggagtttgtgtaaaacaaaaatattatggtctttgtgcacatttacatcaagaaatcgagctatagcagattatcttcgttcaaat

SEQ ID NO: 617372 - DNA, 100 bp, Homo sapiens
gggaaacggctccccttaactctgaagttccgcgatcttctctttgtgcgcgggcggatggatcaacgccgccaagtgatgaaaccagcttgtataaaag

SEQ ID NO: 617373 - DNA, 100 bp, Homo sapiens
tcgggacaccccggaagctgggaaatggacacattcagctaacgtattttagcaggtggagtgaggttgaagattcctgtgacagcgatgccatagagag

SEQ ID NO: 617374 - DNA, 100 bp, Homo sapiens
ctcacggtcaacgagcggggcaaccactgcgagtactgcttcaccaggtgtcatggagaaactccagctgggcccagagattctgcagcgggaaaatcca

SEQ ID NO: 617375 - DNA, 100 bp, Homo sapiens
tggctctatggtgttgtgagccatcaggactccatcactcgtcttatggaggtgtctgtaactgaggcatttcagaagatggacacaaagaagaaggagg

SEQ ID NO: 617376 - DNA, 75 bp, Homo sapiens
acgaagagctctcctccttcttcctcaactatctcgctgacacgcaggtgggaacctaaattattctgcaagaca

SEQ ID NO: 617377 - DNA, 75 bp, Homo sapiens
tgaatttgttagtgctgtgtgctggagggcactaccagatgggggtgaatttgtaaatgaatacgtcggtgaatt

SEQ ID NO: 617378 - DNA, 100 bp, Homo sapiens
gcaggcttcagcagtgcacagagccggaggatcgcgtacaggtttgcagattccgccagcagcacagcaagctctacagatgagtggctctttggcattt

SEQ ID NO: 617379 - DNA, 100 bp, Homo sapiens
gacaaattatgctgcagcatattgtactggcctgctgctggcccgcaggaacagtccacaggaagaggttgaactaaagaagttgaaacatttggagaag

SEQ ID NO: 617380 - DNA, 100 bp, Homo sapiens
tgtggcagacagacttatgctggaactgggttttagcaaggacccctatggtgtagccgtgggtggaactgtggggcactgcctgtgcacgggattggca

SEQ ID NO: 617381 - DNA, 75 bp, Homo sapiens
gaggtgacagatgggtcccgcaccattgccacacagatgactgagaagactgttaaagcaaaaagctctgttcct

SEQ ID NO: 617382 - DNA, 82 bp, Homo sapiens
aaggagctaaagcagcgtgcgttcagccctgggaaccgggctgtgggtcggcccaaggggaagctgggcccggcctccgcgg

SEQ ID NO: 617383 - DNA, 83 bp, Homo sapiens
gaaagacctctgtcacctttctatttgagacaatgcagatcttcgtgaagactctgactggtaagaccatcaccctcgaggtt

SEQ ID NO: 617384 - DNA, 100 bp, Homo sapiens
aagccccacatttgcagctcattgaaggaaaggctctattccgttcgctggttcgccacctcaggggaacgatggccatggagtccacagccactgccgc

SEQ ID NO: 617385 - DNA, 88 bp, Homo sapiens
aaactatgaccctagggagtgaggaggagagtgaaaaatgctaactctcaggagccttctccgcagttggcttcctcggtagcttcca

SEQ ID NO: 617386 - DNA, 100 bp, Homo sapiens
gatggcccccggtgcaagaggcgcaaacaagccaatcccaggaggaaaaacggtgttacacataatattgcattacttcgagaggtgataatcaactcac

SEQ ID NO: 617387 - DNA, 50 bp, Homo sapiens
ttctggaaactgtacattgaagcagagttcttccctgtggaacagtagag

SEQ ID NO: 617388 - DNA, 95 bp, Homo sapiens
acaccgaggaattctatgatgcccctgaagatgtgcacctagggggcggctaccccgtggggtggtgatgatgtccagcaactctgtgaagcagg

SEQ ID NO: 617389 - DNA, 100 bp, Homo sapiens
ggaaagctgtgggaagaaaagcagggtgctggtttctaggacactaaacctcatgaatgattacggacctgaagccaaagaacaagatgcgctagtggac

SEQ ID NO: 617390 - DNA, 99 bp, Homo sapiens
atggaatccgctatgaatttgggatttttaaccagaagattgtcaatggctggcagactctgtttgctggctacacggacaacctggtgcgagtgtggc

SEQ ID NO: 617391 - DNA, 142 bp, Homo sapiens
cgccgctaaggaacatggcgaaggtggagcaggtcctgagcctcgagccgcagcacgagctcaaattccgagccatccagtccaatggatcagatgggcaagatgagacctcagccatatggcgggactaacccatactcgc

SEQ ID NO: 617392 - DNA, 100 bp, Homo sapiens
ggcatcatgtactacctaaccccgcagtgggacaagatcctggaggccaagggtcccgctggtgaacgtggttctcctggccctgctggccccaaaggat

SEQ ID NO: 617393 - DNA, 121 bp, Homo sapiens
ccgcccctgttgcgatggcgcagaaaccccgttgacaaggcactgctttttcatgacgggactttgaacatgtcggggatcgccctcagcagactcgcccaggagaggaaagcatggagga

SEQ ID NO: 617394 - DNA, 75 bp, Homo sapiens
gaactgaatcatgattttcaagcacttgctctggagggaagagcgatgggagagatctgggacatgagcgatgat

SEQ ID NO: 617395 - DNA, 82 bp, Homo sapiens
cggccgagctgaggcggtcgcggccatgaagcaaacggggattcagcgtccgatcctttggaacagggactcacgtgaagct

SEQ ID NO: 617396 - DNA, 100 bp, Homo sapiens
atgattcagtccttgaaaacaagaaaaaggtgcactgcctcaacatggacagcctctctttccagctgggcctctacctcagcccacacttcctccaggc

SEQ ID NO: 617397 - DNA, 100 bp, Homo sapiens
attcatgttcactaccctgggaatcgccagcccaaccctcctcttatactgcagaggctcatttgcaggggggagccaaaagggtcatcatctctgcccc

SEQ ID NO: 617398 - DNA, 90 bp, Homo sapiens
cgggaacaaatactactacatcccgcagtacaagaactggagagggatgatcatggtgattttactgctgcttgtggctatcgtggttgt

SEQ ID NO: 617399 - DNA, 82 bp, Homo sapiens
tgccacaggtgttcaagagctagatgaaggaaagtcttaatagacatcgatacttgaattctttatttcccagtgaaaactc

SEQ ID NO: 617400 - DNA, 98 bp, Homo sapiens
gccattatccccagcaaaaagctccgcaacaagatagcaggctacaaaagaccccacagctgtagagagagcaaacttgttaaacatggctaaactga

SEQ ID NO: 617401 - DNA, 90 bp, Homo sapiens
cagcagctgcctctgcagagcctggacggctccctccacgtcccgttatgatgtgattgctcaagcccaatctgggactgggaaaacggc

SEQ ID NO: 617402 - DNA, 99 bp, Homo sapiens
cccaatcccccactctttccgccctaatggaggtctccagtttcggcctgtctcctccctcctacacatttccagctcctgctgcagttattcctacag

SEQ ID NO: 617403 - DNA, 80 bp, Homo sapiens
ggaaactgaacagccagaagaaaccttccctaacactgaaaccaatggtgaatttggctcaccagctggattccctcctg

SEQ ID NO: 617404 - DNA, 82 bp, Homo sapiens
catgtactcgggagccggccccgggggatatgagactttctactcggaatatcctgagtgttgcgtggatgtaaaacccatt

SEQ ID NO: 617405 - DNA, 75 bp, Homo sapiens
gcaacctgcccatggtgcagctgtgggccgcccacgcccatgaagaccatgctcgacagctgaccaaggccatga

SEQ ID NO: 617406 - DNA, 100 bp, Homo sapiens
tggaggatcacctagtaacacacgctacctctttctgggtgactatgtggacagaggctatttcagtatagagggacatagttctcaaactacttcagta

SEQ ID NO: 617407 - DNA, 80 bp, Homo sapiens
acgggctttctgctgccgcccgcaagcagagggatgttcaatagcccagaaatgcaagccctcctccagcagatctctga

SEQ ID NO: 617408 - DNA, 100 bp, Homo sapiens
cctcttgataaaaagagatgtggggggattctcgacctgctaacagaactggaccttttcgctgagatctgtatctgtggacctgaatgttgatccctcg

SEQ ID NO: 617409 - DNA, 74 bp, Homo sapiens
cactacagttcatcaacatcaactacgtccctctgaagaatttgaaagacatattggctgacctgatacctaag

SEQ ID NO: 617410 - DNA, 100 bp, Homo sapiens
cgggaggtccctgatcaagctgaacttttccaagaacagtgagggtaactgcatcctgcccagcatgacggccccctgcccgccgccacctccagacccc

SEQ ID NO: 617411 - DNA, 100 bp, Homo sapiens
cacattaccattttttcacccgagggtcggctctaccaagtagatattaacctggctgcagagccaaaagtgaaccgaggaaaagcaggtgtgaaacgat

SEQ ID NO: 617412 - DNA, 98 bp, Homo sapiens
aaaaaattaaattttaaccatgagggaaatcgtgcacatccaggctggtcagtgtggcaaccagatcggtgccaaggaatgaatctgaagtctgctgc

SEQ ID NO: 617413 - DNA, 83 bp, Homo sapiens
ctgcttcatctgcccggcgctgatctacaagaaaatccacaagaacgcactttcctcccagagacgctctcctggtctgtgtt

SEQ ID NO: 617414 - DNA, 83 bp, Homo sapiens
cctgacaaaaaatcatgcaattttctctgaagaccttgaaaatctgaagaccaggaaaggatttgaagatgatcgaattgagg

SEQ ID NO: 617415 - DNA, 100 bp, Homo sapiens
ccaagcagaaggaggtctgcatcaatccctaccactataagagagtagaaagccctggtggaacacctgcagcaggagactgctgctctgaaaaagcaaa

SEQ ID NO: 617416 - DNA, 100 bp, Homo sapiens
ggggcttactgctgatgctagactgttatgataccatggcctgggagaccatcctgatggatacactggaggacaacatcccccgtgctcgggctggcca

SEQ ID NO: 617417 - DNA, 74 bp, Homo sapiens
ctttgtctgactacaatattcaaaaggttcgagaaatggctgctactaccttaagcggtctgctacagtgtaac

SEQ ID NO: 617418 - DNA, 106 bp, Homo sapiens
ctcacgttgaccaactctttgatgatgcatccaggctgcagagagactaagggcacttcctgaggttcattaccacctggggcagaaggacagggagacagcaacc

SEQ ID NO: 617419 - DNA, 100 bp, Homo sapiens
caacaacggcgccaagatgcccatcctggggttgggtacctggaaggatcttaagtaccaggcccaagataactttatgatgatggatgatgctgtcctc

SEQ ID NO: 617420 - DNA, 75 bp, Homo sapiens
ggcacaagtgcgcattggtgggaaagcccgccaagctgccccctgtgtgctattctttgatgagctggattcgat

SEQ ID NO: 617421 - DNA, 75 bp, Homo sapiens
tgtatgctgcatccagtactcagtttcaggtttagctgtgcctcccagtgactataatgacaaggaagctgtaaa

SEQ ID NO: 617422 - DNA, 80 bp, Homo sapiens
gaagtagcaaaggcaagaaggcaacgacgttccatctgtggaaggacctaccaaccagtagagatggggtttcgccgtgt

SEQ ID NO: 617423 - DNA, 100 bp, Homo sapiens
gctgagtgatgggcagcccccaccacccgcccaggccagccccagcagcaacagcagcacagcatgacgtatcccagactttactcaaggcaacactgga

SEQ ID NO: 617424 - DNA, 83 bp, Homo sapiens
cgtgcttcaacgctctgctgcccgctgtgagggaaaagcaaattcaacacccaacagcttccttaatagcaaaggtagcaaca

SEQ ID NO: 617425 - DNA, 90 bp, Homo sapiens
gccgccatcatgggtcgcatgcatgctcccgggaaattaagtgttaaatccattacgaaccctcgatacctggacagcctggggaaccca

SEQ ID NO: 617426 - DNA, 51 bp, Homo sapiens
ttcactgcctctggcatggatgaggcgcatattaaatttcctattgactac

SEQ ID NO: 617427 - DNA, 74 bp, Homo sapiens
ggcaggaaaacgtggatgattactacgacaccggcgaggaacttggcaggcacaggggcagagccagggtcagc

SEQ ID NO: 617428 - DNA, 82 bp, Homo sapiens
ggcaccgaggcactcagaggaggtgtctcccagtctgctaaagccctaaggccatcaccatggacttccagcatcgccccgg

SEQ ID NO: 617429 - DNA, 101 bp, Homo sapiens
cttgcggaaaggatgttggcggtccctgtgacctgtggagacacggccagatctgccctccagtgattgaagatagtactggagtccgccgggtggtggtc

SEQ ID NO: 617430 - DNA, 101 bp, Homo sapiens
ccgacgtggaactcagcagcggaggctggacgcttgcatggcgcttgaggaatggtcgttggaggtcagaatggaagtttacaatcactccttcaaccact

SEQ ID NO: 617431 - DNA, 79 bp, Homo sapiens
cagtgcgtcaatcagagcgtcctgtgcgcacatgattaagtaccggtacatcccgttcacacatgggaagagaaggtac

SEQ ID NO: 617432 - DNA, 60 bp, Homo sapiens
ggaagccatgaggccaaaggcagttgtattggtgtggcagagaagacacagcttctgaaa

SEQ ID NO: 617433 - DNA, 100 bp, Homo sapiens
ggaactgctagatgaacccatcccccagatagtggctacagagatgtacagttacccagcacgtgtacctcctcctcctcctattgctcgggctgtagtg

SEQ ID NO: 617434 - DNA, 83 bp, Homo sapiens
aaaagaggagcagcatggcatttcagtcactggtttgcagagtccaggtggaccacacaggagaatatggaaatctggtgact

SEQ ID NO: 617435 - DNA, 83 bp, Homo sapiens
gccaatcctggagctgctgttgcagcacttgttccccaaacaagtgctcctacattctgaatgcatacacagccacagctatc

SEQ ID NO: 617436 - DNA, 75 bp, Homo sapiens
catcagctctcctgggaccctccaagagcactagtgtctagaaggcactaaggttactgcaacaaggaggtatac

SEQ ID NO: 617437 - DNA, 98 bp, Homo sapiens
acaggagttccgatcgacccggtaccaagaaggggagtgcccgcggcaggaaaccactgattgcttgtgtggagaaacagctattaggagaacattta

SEQ ID NO: 617438 - DNA, 50 bp, Homo sapiens
gccgcaggaagcagctcaccttccaccgcgacgagtagaacagcccctct

SEQ ID NO: 617439 - DNA, 75 bp, Homo sapiens
tgagcagtgacgagaacagcaatccagacctctctggagacgagaatggcgtctctggccgagcctctttttgtg

SEQ ID NO: 617440 - DNA, 75 bp, Homo sapiens
tgtattcagctcaggaccaggcaccttctgtggaagtatgccgagattttgctgtcctggaggaccacaccctgg

SEQ ID NO: 617441 - DNA, 88 bp, Homo sapiens
aggagcgataccgccgctacgtggacaaggcccgcatgaggccatgtggaagtgttacatcaccttttgcttggaaagatttactaag

SEQ ID NO: 617442 - DNA, 100 bp, Homo sapiens
agttgcctctcagatcacagaagctttagtcagcggaccaaagccacctattgaaaaaatggaatctagttcatcagactactataataaagacaatgaa

SEQ ID NO: 617443 - DNA, 100 bp, Homo sapiens
aaaatgcaaaaaaggaggccaaagactttggaaatcctcattgacgattcaatttgttgaaggccaatttgtggactcctacgatccaaccatagaaaac

SEQ ID NO: 617444 - DNA, 75 bp, Homo sapiens
gtgctgctggcttccccatccgaaaaagctgttcatttgcaagaggagctcatagctattaattcaaaaaaggag

SEQ ID NO: 617445 - DNA, 100 bp, Homo sapiens
gggtcagtgatggagctgcttcaggagtgtgaggaagaggctgtctgtgtcattatgtgtgcgtcggtcaagtataatatccggggtcctgccctcatcc

SEQ ID NO: 617446 - DNA, 100 bp, Homo sapiens
tccctctgacactgggtctctgtcacctccatgggaccaggaccgtaggatgatgtttcctccgccaggatatgttcaaggaatgagtgatttactttcc

SEQ ID NO: 617447 - DNA, 74 bp, Homo sapiens
tggaagtgcaggatgacaatgcttctgtgcttgacgtctatttagagaactatgccatttttgggtcaggactg

SEQ ID NO: 617448 - DNA, 96 bp, Homo sapiens
ctgcagaatcacgcggacatcgtctcctgtgtggcgatggtcttcctgctggggctcatgtttgagcaagccctcgcagggagcctggtagcaggg

SEQ ID NO: 617449 - DNA, 90 bp, Homo sapiens
tttagacttgagtgatgccgaagtggaccaaactcttacccaggatctactggagcagctgttggagcccatgacgcctgtcgggatgca

SEQ ID NO: 617450 - DNA, 50 bp, Homo sapiens
ttgggtgaactctagcaattacaagaaatttaaaagcctgttgattcaag

SEQ ID NO: 617451 - DNA, 82 bp, Homo sapiens
cgacaagccgctggcagccgcggatctcaccgccgctcaggtgcaagaagaaacacacgctgctgtgccccgactttgcccg

SEQ ID NO: 617452 - DNA, 90 bp, Homo sapiens
atggaatcaagttttaaagaggaaggagcagactctcctctgctaatgcaaagaacactcttttggtacaccagaaggccagaatggaac

SEQ ID NO: 617453 - DNA, 97 bp, Homo sapiens
gcaatgcctgttgtgtggccaacccttctggatctcagcagggatgaatgcaaaagaattcttcgaaaattgggagttgatccctgaattttattat

SEQ ID NO: 617454 - DNA, 101 bp, Homo sapiens
ctgctcgtcggaggacccggttgccatggtgaaggaaaaagcaagccagggctgagcaggaagaagaattcattagtaacactttattcaagaaaattcag

SEQ ID NO: 617455 - DNA, 75 bp, Homo sapiens
aaccaagaagaaatccacagatttagttctcaattctgtggtgttcttggtcacacatttatggagtttctgaag

SEQ ID NO: 617456 - DNA, 75 bp, Homo sapiens
tttgcttgatggcttagaactctccacagccatcactcatgtccataaggaggtgctgggtaggccaggtttcag

SEQ ID NO: 617457 - DNA, 87 bp, Homo sapiens
atgtgagaaaagggggaaaatgcccaggaggaagcaggagcagcccaagcgccttccctcactacttcctcctgtgctggttccaag

SEQ ID NO: 617458 - DNA, 96 bp, Homo sapiens
cggtcacctacccccagcaccacctccagcccctgcgcctcggactcaagtttcttcaatctgaagatacatgtctttctccagggacatgtggaa

SEQ ID NO: 617459 - DNA, 100 bp, Homo sapiens
caggaatgcttactgttgcgtggttcgttattaacagggctacttctacaagtccgaacagccagtccagcaaaatgaacagcattgtctaccagaagca

SEQ ID NO: 617460 - DNA, 82 bp, Homo sapiens
tccttgttggctgcttgctggagaggaaccctaaggactctgcaatatgaataattccctagagaacaccatctcctttgaa

SEQ ID NO: 617461 - DNA, 100 bp, Homo sapiens
cacaggaattggatctactagtgcaggtgctggagaatctggtaaaagcaccattgtgaagcagatgaggatcctgcatgttaatgggtttaatggagag

SEQ ID NO: 617462 - DNA, 75 bp, Homo sapiens
gaaaagcaggggtgtcgtcatgctcaacagagtgatggagaaaggttcgctagtgtcagcagtgggatacctgcg

SEQ ID NO: 617463 - DNA, 100 bp, Homo sapiens
tgatcatctcgtacagcagcagaaaatgaccatgttacagaattttgaacagaaaatgctgaaaaaaggagggtcatggattcaagaaataaatgttgct

SEQ ID NO: 617464 - DNA, 75 bp, Homo sapiens
agcagccgctctgagggcgcctgctcaggattcttctcatcgcagtgctccaggcagccactaccaatcgattgg

SEQ ID NO: 617465 - DNA, 98 bp, Homo sapiens
ctagagaaggaaacgggactaaactggcgggctccgtggaagcgtggccggcagcgtcccggacgaggaggcaaacgaagatttaatattaaattgtg

SEQ ID NO: 617466 - DNA, 73 bp, Homo sapiens
gccctgctacgcgtcgggtccaggtggcagaacatcctaggcagctgagtatgtcccagagaaggtgaagaaa

SEQ ID NO: 617467 - DNA, 83 bp, Homo sapiens
acaaactcgaagaacagctgtggaaagaagttgcaaaacactgggttgttcggaatcctataattgaaaaacagtaaagatgg

SEQ ID NO: 617468 - DNA, 90 bp, Homo sapiens
aaaatttttacatttggatcttacagattaggagtgcatacaaaaggacctctggtcctcaatcgagttcctctacgaagaacacaccag

SEQ ID NO: 617469 - DNA, 75 bp, Homo sapiens
cctggaggtcagaggccctttcatcatcagtgcacttggaggctcctcagctcttcatatcccagcttttccagg

SEQ ID NO: 617470 - DNA, 85 bp, Homo sapiens
ggagcactcggttcgctaccagtgtaagaactactacaaactgcgcacagaaggagatgcacccgacagacgtggactacagggt

SEQ ID NO: 617471 - DNA, 74 bp, Homo sapiens
acaaaatggcgccctacagcctactggtgactcggctgcagtctctcatcacttttgtgaacaagcacctgaac

SEQ ID NO: 617472 - DNA, 113 bp, Homo sapiens
acacagtgggacctagacaaagggagagggtgaccgacatcccaactaggaggaggtgcgccagtctgtaactcctgccgagccagtccagtactatttcacgctggctcagc

SEQ ID NO: 617473 - DNA, 133 bp, Homo sapiens
tcagcggggaccgagcctgggaggccggccggtgccagcacctttcggcttctgagacggcggcagcagcggcattcagatgtgaatgaatgtgaactgctcagtggggtgtgtggtgaagccttctgtgaaa

SEQ ID NO: 617474 - DNA, 100 bp, Homo sapiens
gcggagacccccgggtgaagccaccgtcatcatgtctgaccagccttgttagatgacttggataaagaactaaacaactacattatgcgatgtagagaat

SEQ ID NO: 617475 - DNA, 74 bp, Homo sapiens
ccattatttatgtcatcaagaagaatgacgatgattggctctaccagtgcacctggacagggaggaatcctggc

SEQ ID NO: 617476 - DNA, 98 bp, Homo sapiens
ccgttctctgggagtgacgcagcttgcagttgcagttaataaaatggatcagatgggaaccaacaaatgtgccagccaggcaggtatgacagcttacg

SEQ ID NO: 617477 - DNA, 105 bp, Homo sapiens
cgacgcgcgggaacaacgcgagtcggcgcgcgggacgaagaatgtcgtactctcaggaggctccaccatgttcagggatttcggacgccgactgcagagggattt

SEQ ID NO: 617478 - DNA, 90 bp, Homo sapiens
gcccagacgggccggcccagagctcccgggtcgtctttcgtgtggccgcgaggtgtggatgaggtcaccattgtcaacattttgaccaac

SEQ ID NO: 617479 - DNA, 75 bp, Homo sapiens
gcggcttcctgtccaaagacaaagggctccttggcaaaattgagaggatccagaatccagatctctggaatagct

SEQ ID NO: 617480 - DNA, 100 bp, Homo sapiens
cctggattataaggatgtcatccccatggctgatgcagcaggcatcatccgctatgcaattgggattatggcatcgtcaaagcattgtggtgtctttttt

SEQ ID NO: 617481 - DNA, 83 bp, Homo sapiens
catgctctccatcctgctcttcttccacagggatcatggcccaagttgcaatgtccaccctccccgttgaagatgaggagtcc

SEQ ID NO: 617482 - DNA, 82 bp, Homo sapiens
ccggcgtcgtcggatgttgtgttgcccgccaccatgagctacacaggatcgaatcatcaatttagttgttggcagcttaaca

SEQ ID NO: 617483 - DNA, 82 bp, Homo sapiens
gaattacctgctgcgatttttcttcacagccagtttctggaatgtttacccttgcggaagttgcatcacttaatgacattca

SEQ ID NO: 617484 - DNA, 82 bp, Homo sapiens
ctgcacagccgcggcggcagcagcagtgagagtgtcaggggaagctgatggagaatcgagctctggatccagggactcggga

SEQ ID NO: 617485 - DNA, 132 bp, Homo sapiens
gctccttcagcagactgcctcctctgggaacctcaacaccctgagcagcctccacccaatgggagaccattactgggacttccacccccaccacgtgcacagcgagttcgagagcttcgccgagaacaactt

SEQ ID NO: 617486 - DNA, 83 bp, Homo sapiens
gccaactgcacggtgcgggaccacgtccactgcttggagtaaaggtgggattctatccaaagcttgtgattatatccaggagc

SEQ ID NO: 617487 - DNA, 101 bp, Homo sapiens
atgtgagccccaggctgcagaagaaaccacaacaaaggtgcttgcccatggctcctcgcttccctctgcctcatgactgatgccaattattccccttgtgg

SEQ ID NO: 617488 - DNA, 75 bp, Homo sapiens
ctcgattgtgccgcgagggctcagacccctcggagacagaaaaaactcttttgccgctaccatgatggaaaccgt

SEQ ID NO: 617489 - DNA, 83 bp, Homo sapiens
cgggaccccggagcccaaacccggggcaggcgggcagctgtgcccgggcggcacggccagttacagaatgtctgaaggggaca

SEQ ID NO: 617490 - DNA, 100 bp, Homo sapiens
aggagcctggagcgcgagtacagctgcaccgtgcggctgctggacgacagcgagtacacctgcaccatccaggagaactatcctatccctgaaccaggcc

SEQ ID NO: 617491 - DNA, 100 bp, Homo sapiens
ctctcgactcagaagattatagccttagtgaagaaggacaagaactctcagatgaagatgatgagctggtttaccatgcattgcaattgttagcatatac

SEQ ID NO: 617492 - DNA, 100 bp, Homo sapiens
gcactctccctgcccgagacccgcttttagtttggatgctgaacagcctgattatgatttggattctgaagatgaagtatttgtgaataaactgaaaaag

SEQ ID NO: 617493 - DNA, 82 bp, Homo sapiens
atcctggagctgcccggagttccgctcctgcgggcttagcaggaaagggtgcctaagttggaatcgaagcctcttaaaatgg

SEQ ID NO: 617494 - DNA, 100 bp, Homo sapiens
ccttatatcatgtatacaactgtagatgcaaatgggtatctgaaaaatggatcagcattgtcttcagtgttaagaaatgtggactcctgtgaggtgctgg

SEQ ID NO: 617495 - DNA, 76 bp, Homo sapiens
agcctcctcaacgaatacggcgacgacatgtatgggccagaaaaggtggagctgatcagaataatgttcagcatca

SEQ ID NO: 617496 - DNA, 106 bp, Homo sapiens
acctgcccgcgcgagggaggaagagaactactcctttttacctttggttcacaacatcatcaaatgctgcggcatgaagctgaacctggactatctgctggagatg

SEQ ID NO: 617497 - DNA, 100 bp, Homo sapiens
cttcggcctggtctacgtgctgaaccacgctgaggggctgggagccgcgcacaccaccatcacctgtgtgagccgctcccatccctggcagagtctagag

SEQ ID NO: 617498 - DNA, 98 bp, Homo sapiens
gacggggacacctacacgctggtggagcactccaagctgtactggaggagagttaatattgcccattatcacggaggactccttagacccccctcccg

SEQ ID NO: 617499 - DNA, 83 bp, Homo sapiens
cacagcctcccgcgcctcgctcagctccaacatggagagagaagctcttcagaaacagctggatgaagcaaatcgagaagcac

SEQ ID NO: 617500 - DNA, 82 bp, Homo sapiens
cgacctgctaacagaactggaccttttcgatcttgagccagatgattgtgcatccatttacatctttaatgtagatccacct

SEQ ID NO: 617501 - DNA, 87 bp, Homo sapiens
ggtgaccccgcccagttggcccagaggatctcttctaacatccagaagatcacacagtgttaagcgtaaaagatgtgttgttttcaa

SEQ ID NO: 617502 - DNA, 75 bp, Homo sapiens
gaccgccaggccaccaccggccgcctcagccatggacgcgtccctggagaagaattaaacaaccaccatgtcgag

SEQ ID NO: 617503 - DNA, 100 bp, Homo sapiens
ggccagatgtacatcaaggcctccggcagctatgcagcattcggcatcaacagcattttatatcagcgtggcatatatccatctgaaacctttactcgag

SEQ ID NO: 617504 - DNA, 83 bp, Homo sapiens
ccctcctcccctagcttcactcaatgttagtaaggccctccacgcccttcaggaggagcaggccagactcaagatgaggctgt

SEQ ID NO: 617505 - DNA, 75 bp, Homo sapiens
agaccccctccgcaaaccaacctcctggctccaaagctgcagttccagatccagggcagcgacgccggctggact

SEQ ID NO: 617506 - DNA, 75 bp, Homo sapiens
gtccggcggccgcgccgagggtctggcgggccgcaggaggaaaaggcttctcttttacatcgtactcaggaagaa

SEQ ID NO: 617507 - DNA, 90 bp, Homo sapiens
ctcacctatgggaagctgctagctctaacaatgatagcttgtcctgaaactgagactcctgccgtgataacgtgtgacccactgtcccag

SEQ ID NO: 617508 - DNA, 75 bp, Homo sapiens
gagcgcgtttcccgcctgagcgcaactagcggcgggtcgtgggcacctccagccgcctgtcttggttagatggct

SEQ ID NO: 617509 - DNA, 100 bp, Homo sapiens
aaaatgcaaactgaaacctgggaaacagtgcaggaatacttcattgctccatcagtagatatacaagaacaggtttatcgtgtccaaaaactccaccata

SEQ ID NO: 617510 - DNA, 83 bp, Homo sapiens
tgaaggaagaaaacacaggagccggagcagaagcaaagagatgatgaacaacatgggtggtgatgaggatgtagatttaccag

SEQ ID NO: 617511 - DNA, 101 bp, Homo sapiens
tgctgcccgccagggcccagatgaaacttgtggtggagaatgttgatgtgttaacacaaatgaggaccagctttgacaaaccagaccagatggctgcactg

SEQ ID NO: 617512 - DNA, 83 bp, Homo sapiens
tgcaggactgagtaccagcaggagagggagacaagagtcgtccttttattacgtccagtcctacaaatggggctgaaactgtt

SEQ ID NO: 617513 - DNA, 75 bp, Homo sapiens
ccttctgtatcttcatggtgcggctcatcttcgagagctcattgctgggatggatatggtgagttttcatgtaca

SEQ ID NO: 617514 - DNA, 76 bp, Homo sapiens
atccttgctcgacaaagtgatcagacaacaaaggaggctttgaaaatgttttagaagaaattgctgaacttcgacg

SEQ ID NO: 617515 - DNA, 95 bp, Homo sapiens
gaccaagacagtgcctggataccttcgaataggctgactggaaataccggcatgcaggattgatggccttatctgccattggtgaagggtgccac

SEQ ID NO: 617516 - DNA, 87 bp, Homo sapiens
agaataaaactccagcgagatccgggccgtgaacgaaagcagtgacggaggagcttgtaccaccggcatccgtgggctctgagaagc

SEQ ID NO: 617517 - DNA, 90 bp, Homo sapiens
attgtatacactggaacagaatcaacccagaacggagagctccctcctagaaaaggtgaatgaaaactttgccattgatttgatagcaga

SEQ ID NO: 617518 - DNA, 98 bp, Homo sapiens
aggaattgtaattcttatggtagatgaaaagatgagcccaacaattggaaaacaattacttaagcatcatggcagaacaggatgtggaaaacgatctt

SEQ ID NO: 617519 - DNA, 126 bp, Homo sapiens
cagctgcgaggctcggagaaacaggcgccgcgggctccgcgcccggccggacccgggcccgaggtgctggagaatctggtaaaagcaccattgtgaagcagatgaggatcctgcatgttaatgggt

SEQ ID NO: 617520 - DNA, 95 bp, Homo sapiens
ccaaacagtccagagactcatccccgccctgtgggagaagcacagtccacagtgagaaagatcagtctaaagaaaaggagaagaaagtgaaaaaa

SEQ ID NO: 617521 - DNA, 101 bp, Homo sapiens
gtccctgggcgcgtcagaacaggcgctgcggctgatcatctccatcttcctggctccaaagacaacaggccctccctctgccctcccgtctgtgagctccc

SEQ ID NO: 617522 - DNA, 74 bp, Homo sapiens
tctggagtgcgtgggggaccggctgttggcgggggcaatttgaaattcgatatgcaccgtggttccagtggaca

SEQ ID NO: 617523 - DNA, 100 bp, Homo sapiens
ccacgatttgcagcagaacattgccctacctgccaccaaactagtaggctatggttctgatggtctaaagttgttatcacatgaagaaagtgtatcattt

SEQ ID NO: 617524 - DNA, 100 bp, Homo sapiens
cggccgacgcaggcaccttcctcagtcgcgccgtgcaggaggatacgaagcgttttcggcttcctgcccggagctgtgcagcaaacagtcgacccccatg

SEQ ID NO: 617525 - DNA, 100 bp, Homo sapiens
gcagggctgaggacccaaagtcatttcccaggctggcggagagagcagatgtctcaagtattagatgccatgtttgaaaaattggtcaaagatggggagc

SEQ ID NO: 617526 - DNA, 74 bp, Homo sapiens
ccaagggagactggaggtgtcctaagtgtttggctcagattactgacagccctgtcctaggagcacaacgtccg

SEQ ID NO: 617527 - DNA, 100 bp, Homo sapiens
gtacctgtggactcagcagcagcaactgtgggactttttgactacaattctcaacaacaggatcggaaactccatggtacagctcagcaactgctccagg

SEQ ID NO: 617528 - DNA, 100 bp, Homo sapiens
tgtacctgccttgggatccggagggaggaagctgggacacccgggagtcaggaaatggactcagtggcttttgaggatgtgtctgtgagcttcagccagg

SEQ ID NO: 617529 - DNA, 100 bp, Homo sapiens
cactcctgtgatcgttgcggctggggctggaggggaggaagagctggactggccattatggaggaggagctgcagcattcccattgtgtgaattgtgtca

SEQ ID NO: 617530 - DNA, 83 bp, Homo sapiens
caaaaccctgcagaacggctgcctaatttacagcaaccatgaggtaatactgcattgcatgattgtgcagaatctggaagttt

SEQ ID NO: 617531 - DNA, 129 bp, Homo sapiens
gtcaatgctgctgatgcctttgatattggctcatttgatgaagaggataccaaagggattaaggtgcccaagggccgccgggatggcctgcctgcccacattggctccatggcacagcgggcatactgg

SEQ ID NO: 617532 - DNA, 90 bp, Homo sapiens
ccaaggaacacctgggcaacagaatattggtcaagttgctgaccttgaagttatgaagacagtatggagtttccagaccatagtagacat

SEQ ID NO: 617533 - DNA, 82 bp, Homo sapiens
gctgggagttcccgtccatgctggccctctctgtgtcaacagcatctccaccctggagcctgtgagccggtgccagcgcctg

SEQ ID NO: 617534 - DNA, 82 bp, Homo sapiens
cgttatactgcccctgcattgttggtattgaaagaactagaggctgctatccagccagatactagcctggtgtcagtcatga

SEQ ID NO: 617535 - DNA, 103 bp, Homo sapiens
ggccaccgagatgcagttacctgtgtggacttcagtatcaacacaaagcagctggcccgaaaatggcacagaaatggtatcaagaaaccccgatcacaaagat

SEQ ID NO: 617536 - DNA, 75 bp, Homo sapiens
tgtacagaacatgatcaagggtgttacactgttacggcagtcccagtcctactgcacagacacagagtgtcttca

SEQ ID NO: 617537 - DNA, 123 bp, Homo sapiens
aggccttctgacaattcagcccgggcagcctgcccttccccttcaacctcttgctcaagtcagagcaccataacatggtgtgggaagtgaagacaaatcagatgcctaatgcagtacagaaac

SEQ ID NO: 617538 - DNA, 90 bp, Homo sapiens
gacgaagttgatggcctggagaagaaagatgttttgcctactgttgatccggtgtcagttgtacccgaggcgttctcagcagcagcaagt

SEQ ID NO: 617539 - DNA, 75 bp, Homo sapiens
tgatggataggagcaaccctgtaaaaccagccttagactatttttcaaacaatcaagaagttggtatatgtttac

SEQ ID NO: 617540 - DNA, 75 bp, Homo sapiens
tcctgcatctcctcctgctccccatcgccatcccctatgcaggctatggaagaaatgaatggcaaagacttggag

SEQ ID NO: 617541 - DNA, 75 bp, Homo sapiens
cactggaaagtgaggaattttgaagtacaccgtggtgacattgtatcattggtacctggaatggccaaatatcaa

SEQ ID NO: 617542 - DNA, 100 bp, Homo sapiens
aaactgaatactccttccttcctccccacccattcctttaaatccggagggggaaaaaatcccaaggtctgcaaagcatcctgaggttagcattacactt

SEQ ID NO: 617543 - DNA, 100 bp, Homo sapiens
gttgagacctggtgaaagatcaggtataataatgttctgcagtgaaaagaaattgcgtggaatactctgaagatagtaactccgagccaaatgtggattt

SEQ ID NO: 617544 - DNA, 75 bp, Homo sapiens
tggggagtctgattcagatgacaactgtacagatgtcactggaaagcttgtggctcttgcagttattgatgagaa

SEQ ID NO: 617545 - DNA, 90 bp, Homo sapiens
gagtacctcaaccctgagctgcgtgagaacccgcccatgaagccagatttctcccagaaatatggctacacacacctttctgcaggagag

SEQ ID NO: 617546 - DNA, 100 bp, Homo sapiens
gcccgtcgtacctgatggtaggaggcagtagttccccgcttcccttccgcgggagggagagttagggtgcaaaaatgcagagtaataaaacttttaactt

SEQ ID NO: 617547 - DNA, 100 bp, Homo sapiens
agagactatagattacaaggacccgtgtaaagccgagcaacattttgcagatgttgtacttagtgaagaatttctcaatcttggcatcgaacaagtgtgc

SEQ ID NO: 617548 - DNA, 109 bp, Homo sapiens
ccctcttcactttcctcggcaagaaatgtgtgattattgctcagttgtaactattgtggaccagacaaatgtaaaactaacttgcctgctctttagtggaaactatgaa

SEQ ID NO: 617549 - DNA, 88 bp, Homo sapiens
cggccgcggggaggaggatgggggctaaccagttagtggtgctcaacgtgtacgacatggaccctgctttctcggctgtgattcacga

SEQ ID NO: 617550 - DNA, 75 bp, Homo sapiens
tcattggccacctacagaaacaaaatgtcaacaaattgatgggtcaagtttacccatgggggaactggttccagc

SEQ ID NO: 617551 - DNA, 95 bp, Homo sapiens
ttgtcgtaggacctggcttgggtagagatgatgcgcttctcagaaatgtccaggttgcccgaagctcagcagagagtcggaggctgctttttaaa

SEQ ID NO: 617552 - DNA, 74 bp, Homo sapiens
gccctcagcccccatgcccagcacatctcagtggatctcccagccatccagccccggctagtggcggtcagcaa

SEQ ID NO: 617553 - DNA, 90 bp, Homo sapiens
cagtcggcccaagaaatcaaaataaaggaaacacatttcatatactgcagttacaacattaaagcctgaacttggaaagataatgtacag

SEQ ID NO: 617554 - DNA, 100 bp, Homo sapiens
tgtatgttatgtctcgagtggatgatgtaataaatgttgcaggtcacagaatttctgcaggcgccattgaagagacggggtctggctctgtcacccaggc

SEQ ID NO: 617555 - DNA, 83 bp, Homo sapiens
ggcaccgaggaccagctcaatgacagcaatcccacagagtattgatgaggaaactgaagtttggagcgatcacatcattttcc

SEQ ID NO: 617556 - DNA, 129 bp, Homo sapiens
gtctgatattgaagaggaagaactgaccagagctgatcccgagcagcgtcatgtacccctgtgccagaagcccaggaagcacacatcaaggctcacttgccagcggggtgctgccaataaaatgtagtc

SEQ ID NO: 617557 - DNA, 100 bp, Homo sapiens
ggcgaccgagacggtggagctccataagctaaaggagtttccaggtgtctaggaaaatgccagaagaactcaccaggtgccaggaagcatcccttttccg

SEQ ID NO: 617558 - DNA, 83 bp, Homo sapiens
ccctcctcacgccagcctaggagaagaagttcgtagtcccagaggaatgggtaccacagaccatgtcatcgtcctggcgtcca

SEQ ID NO: 617559 - DNA, 82 bp, Homo sapiens
tgaggccctcaagtacctgtcccggaaccacatgcacggtgagcatgggtttatgcgtcttaggcattattgtgatggcgag

SEQ ID NO: 617560 - DNA, 88 bp, Homo sapiens
ctttatatagaagggagagtagatcctggccatgaggttggatgcctcaccttactgaaaggagacactggacctaaatggcgcagca

SEQ ID NO: 617561 - DNA, 90 bp, Homo sapiens
ctccagccagctcactgtccacctgcgatcccacacgggcacgtgtggttctcaaatataggcattctgatgggaacttgtgtgttaaag

SEQ ID NO: 617562 - DNA, 98 bp, Homo sapiens
gaagaaacacttcctataaatctcgcccaaacaggaaagtctatcagagttagaaacagatattaaaattttcaaagagtcaattttggagatcttgg

SEQ ID NO: 617563 - DNA, 90 bp, Homo sapiens
caagaaaagcctctgggagcagaagggaggctccaagacctcatcaacaattaagggcctccttggaggagagagccgtttccagaaacc

SEQ ID NO: 617564 - DNA, 100 bp, Homo sapiens
cgagcgtggaagtcgctgggcactcggaaggcccgcaggaccctatggcggcagggggggccctcagcctcttggccttgaacgggctgttcatcttgat

SEQ ID NO: 617565 - DNA, 100 bp, Homo sapiens
agataaaacttgcagactttggacttgctcgattgtatagctcagaagaaagaggatgtactgagtaaagatgctggggaatgtgcaatatgccttgaag

SEQ ID NO: 617566 - DNA, 50 bp, Homo sapiens
ctgcccggccgagaccccgtctgggaggatgtcattgacaaacagttctg

SEQ ID NO: 617567 - DNA, 49 bp, Homo sapiens
cgaaagagcactggactccggaagtgagtgagatcattggccgagacct

SEQ ID NO: 617568 - DNA, 82 bp, Homo sapiens
tccagccctagccaccaggaacctggaaccctgcagggtggtgaaggaggagatctttgatgacaatgccaagcttccctgc

SEQ ID NO: 617569 - DNA, 83 bp, Homo sapiens
ccactacaatacctcttgggactgggctcgatttgagactgagggagctggccgtgcgactgggcttcgggccctgtgcagag

SEQ ID NO: 617570 - DNA, 98 bp, Homo sapiens
tgtttgggatcccgctgtggtacttctcgcagtccccgcgcgtggtcatccaggacctgaaggagaagaaggagaaggtggaggagaaggcaagccgg

SEQ ID NO: 617571 - DNA, 121 bp, Homo sapiens
ggtggaggttcgagcgctgttctcgctccggagccgctgcacatttcgctgggctcaaaatgcagagaactcaaagatattcatttcggccagtgttacaagatctcagatgaaggcatga

SEQ ID NO: 617572 - DNA, 141 bp, Homo sapiens
ctcaggaccttcttgaacttcagcgtggacaaggatgcgcagaggctactgagggccattactggccaagcaccctgtggaggcaatttaacaggatcttcaggctttattctttcaccaaacttccctcatccatatccg

SEQ ID NO: 617573 - DNA, 75 bp, Homo sapiens
aacaataccatttttaagcaagccttttctctcttaaggctcacttatctaaagaatatgaggaggctaatttca

SEQ ID NO: 617574 - DNA, 100 bp, Homo sapiens
ggggttccctatgcaaatgccaaaggaattggttatccaggctggttttaacctacgcaaagttaacaaacacataaagtttccggaaatcttagatttg

SEQ ID NO: 617575 - DNA, 82 bp, Homo sapiens
tttttctcatggatgttcttcttcgagtatttgtagaaggatcacttaggaaaatggctgttggtatgatcctagcatgcct

SEQ ID NO: 617576 - DNA, 100 bp, Homo sapiens
tcctagtctccaatgctgctgtcaaccctttctttggaagcataatggatgtcactgaggaggtgtgggacaagagtttgctctccaaagctcggggaat

SEQ ID NO: 617577 - DNA, 101 bp, Homo sapiens
ggctgaggaggggccccagcagcccccgaaggccctatcaggacatggagtatgaaagacggtgtggacactgccagcggctgcagccgacttggaatgac

SEQ ID NO: 617578 - DNA, 74 bp, Homo sapiens
gttaaccagctaaagtttgctcgaagccttcagtccgttgcagaggagctgctggttgactgttacaaacccac

SEQ ID NO: 617579 - DNA, 96 bp, Homo sapiens
cgggacacgggtgtgcagggcgtcatgagcgcagagggcagaggtggctcagagagaggcggagaccttaagggaacagctctcatcggccaatca

SEQ ID NO: 617580 - DNA, 83 bp, Homo sapiens
gtcctggctcttgccctcatcctggttctggaatcctcagttcaaggtcgtcaaagtcctacattttagctttcagtgctgaa

SEQ ID NO: 617581 - DNA, 88 bp, Homo sapiens
gctcctttccgtggtgtgtagccggcttggcgtgaccctcgcctgatccagagcatctcattccccgagggattgaggactcctgcct

SEQ ID NO: 617582 - DNA, 75 bp, Homo sapiens
tttgtgaaacagagaaagataggcggccatggtccaaccttgaaggaaaggggcagaaactttgtgaaattgaga

SEQ ID NO: 617583 - DNA, 80 bp, Homo sapiens
attaacagttcaacatcaataaagggaagacctctggagatacattggagctgatggaggagtcactggacataaatctg

SEQ ID NO: 617584 - DNA, 75 bp, Homo sapiens
gcccaccggaatggagaaggaagaggagtcgaaatgttcccactgccaggaggcaggcgccaccttgggctgcta

SEQ ID NO: 617585 - DNA, 90 bp, Homo sapiens
aagcaaatgaagcaactgaaaaaccccttggaaatagtcagcatacctgatcctgataacttaagtgactctctcttttccggtgatgaa

SEQ ID NO: 617586 - DNA, 90 bp, Homo sapiens
ggaaaagggagcgatgttgatctcaggaagcacaaagggaccttcctagctctgactgaaccacggagtggtaagcatccgtggcattca

SEQ ID NO: 617587 - DNA, 87 bp, Homo sapiens
ggcttatcgaacagagccgggagttcaagaagaacactccagaggcgatatgagtctcatccagtctgtgctgatctgcaggccaaa

SEQ ID NO: 617588 - DNA, 50 bp, Homo sapiens
ggagaatgttgactctactgcagtccatgaaccagttcgaattgcctatg

SEQ ID NO: 617589 - DNA, 92 bp, Homo sapiens
gcacttttcacagcatcagcagtcatctcactagttatgttcaaaaaaggtgatgaattagaagacaatggaaagaatttctacgaatctga

SEQ ID NO: 617590 - DNA, 74 bp, Homo sapiens
ggaggattcagacagtgaagagcattccagatcagattctgtgacagatctcagtggttcaatagcatccccag

SEQ ID NO: 617591 - DNA, 51 bp, Homo sapiens
aggttgggaggagcggccgaaggtttacccaaggtccagcctagcccctag

SEQ ID NO: 617592 - DNA, 97 bp, Homo sapiens
atttgggagagacgctctgaactgactgccccgcatcaccggagcgtcccagctgcgaggaggaactctaatgaatcattgattgaccagcactatt

SEQ ID NO: 617593 - DNA, 75 bp, Homo sapiens
aggacgaggggctccgggtcttccagagcgtgaagatcaagatcgatgagcagcaccagcagtaagagggctccg

SEQ ID NO: 617594 - DNA, 80 bp, Homo sapiens
agaacgttgagggcacgagtcgggtcctgagaccaggagctcttgtccctggcaaagcgaaagcgcagtgactctgagga

SEQ ID NO: 617595 - DNA, 98 bp, Homo sapiens
ttgccgggcgcgggcgagaaaggtacaccaaaccgctcacctttgctgactgcattagtgatgagttgccgctaggatgggaagaggcatatgaccca

SEQ ID NO: 617596 - DNA, 90 bp, Homo sapiens
cgaagtgagcatcttgattagaagcagggtagagttggctttgtgggacacagctgggcaggaagattatgatcgcctgaggcccctctc

SEQ ID NO: 617597 - DNA, 96 bp, Homo sapiens
agcctctaacaaaactaggcttgtgatcagtttgtggcagagtacgagcccgtgctgatcgagatcctggtggaggtgatggatccttccttcgtg

SEQ ID NO: 617598 - DNA, 50 bp, Homo sapiens
taaagatgcaccggttccttttgcagggattcaactaatgaaactactgc

SEQ ID NO: 617599 - DNA, 100 bp, Homo sapiens
gtggcggtgatggcggaaagcgcctttagtttcaaaaagttgctggatcagtgcgagaaccaggagctcgagatgccttcgtgaacagccaggaatggac

SEQ ID NO: 617600 - DNA, 83 bp, Homo sapiens
ctcattcacttctagacgacaaaatgcaaaaaaggaggccaaagactttaatgtgaaaacctttgcatcttctgatagtctag

SEQ ID NO: 617601 - DNA, 83 bp, Homo sapiens
aacgacctgatgggcacggccgaggacttcgccgaccagatgtgcactcccagcaacacccctgccacgccgcccaacttccc

SEQ ID NO: 617602 - DNA, 100 bp, Homo sapiens
gatgtcgctgctggttcgggcagagtccgacggtcacggtctagatcacattctcgatccagaggaaggcgatactctcgctcacgcagcaggagcaggg

SEQ ID NO: 617603 - DNA, 49 bp, Homo sapiens
ctatcagataagagtgccgacgtcacactgctcagctccgcgaagagtt

SEQ ID NO: 617604 - DNA, 75 bp, Homo sapiens
cagtggaagatgatcacatcccaggacatgtattcctctgagaaaccttggacagcagattttggtttaatatct

SEQ ID NO: 617605 - DNA, 74 bp, Homo sapiens
gctggagtcagtggaagacggagctggtcggcccgaagaacttggagcgtgatgcccagaagtgtgtgaactgg

SEQ ID NO: 617606 - DNA, 102 bp, Homo sapiens
gagaaagccccccagcatcaagggtgggaccagggagattggatctgctctcaccaggatgtgcatgaggcacagaagcattgaagccaagctgaggcagtt

SEQ ID NO: 617607 - DNA, 73 bp, Homo sapiens
gaaggagaaggccaagaaggcagagcagatttcccactacacctcgggaagaatgtggtaggccgaatgcctg

SEQ ID NO: 617608 - DNA, 100 bp, Homo sapiens
aatcgaaaagagagaaagcagcaagtccgcaagagagaagtttgaaatccttagtgttgagggtgggaaagaacatggtgttccaatcctcatctctgag

SEQ ID NO: 617609 - DNA, 82 bp, Homo sapiens
cattgactggaaacaatggcatttacagaaagagtcaacagcagtggcaacagaaatgtccagaaggaagaccgcactccta

SEQ ID NO: 617610 - DNA, 75 bp, Homo sapiens
cagaacttgtacatatagatctagtgtattggaacaacacaaactaacaaaagaacagtgggaagaaagaataca

SEQ ID NO: 617611 - DNA, 75 bp, Homo sapiens
cgtctgcggaagtgcagctgcctcagttcttagcgcagtcatccgtccttggctcaggatttggagagcttgcac

SEQ ID NO: 617612 - DNA, 100 bp, Homo sapiens
caagaaaaaaagacgaaagaagaagaagagcaaagggccttctgcaggtggtatcacggaaaacttgacagaacgatagcagaagaacgcctcaggcagg

SEQ ID NO: 617613 - DNA, 100 bp, Homo sapiens
aaaaaacaattgcagagcaagcagttgcagcaggatgaagagactcggcacagccttgagtgcatccaggccaatcagatctttcccaggaagcagctga

SEQ ID NO: 617614 - DNA, 75 bp, Homo sapiens
agaagccacccaaaagtaatgttaacaataacccagggcaagttaaagtcttcagagccctgtatacgtttgaac

SEQ ID NO: 617615 - DNA, 75 bp, Homo sapiens
ctcatctcagcctccaaaagtgctggcattacaggctgtgggtgagcgtggaggatgctcagatgcacaccgtca

SEQ ID NO: 617616 - DNA, 83 bp, Homo sapiens
atcaacgtctcggagcagatttgagaggcccctgaatcgtcccgggaattttcttcgaaaaagagttaccttctcatgttcag

SEQ ID NO: 617617 - DNA, 97 bp, Homo sapiens
tggaaggaaacagttccctgtcttgggaaaaggagaactcctgactgattagcattcacaccaggattcaagttcgaaatatggcaactttgaaaga

SEQ ID NO: 617618 - DNA, 100 bp, Homo sapiens
agcacggcgagcagtctcaggcctttagtgatgatgagttatggtgaatggttgcatggatttgaaaaaaaggcaaaagaatgtatggctggaacttcag

SEQ ID NO: 617619 - DNA, 98 bp, Homo sapiens
ggacgagcagcggaggcggtcgggagcgatggtgactgaggagagaggcgcctcctcgctcccgccaccgccggacttcaatgcccagtccccagctc

SEQ ID NO: 617620 - DNA, 90 bp, Homo sapiens
gcggcgggggacaagtcggcgccccagagcggacgagaaaccaatagagccatggcgactccctctgctgccttcgaggcccttatgaat

SEQ ID NO: 617621 - DNA, 100 bp, Homo sapiens
atgcttcctgtacagcctgcaaaactgtctggagcccccaactcccttgacagtgtacgctggagcaggttccagggtggggctgccctgccgcctgcct

SEQ ID NO: 617622 - DNA, 80 bp, Homo sapiens
aaaatcagacctctgtggcagcattttttccagaacacaaaagacctgcctagagctggaacgttacctccagagcgagc

SEQ ID NO: 617623 - DNA, 100 bp, Homo sapiens
ctggaatgaagatatagaagcatttgaaatgatggagaaggatgagctatgacttgctaaacaatctgttggagacagaggagctggaggaggagaagtc

SEQ ID NO: 617624 - DNA, 95 bp, Homo sapiens
agctgttcagaagttcttccttgaagaaatacagcttggtgaagagttactagctcaaggctctgacgcccgctctgcggcttcggtgtttgaac

SEQ ID NO: 617625 - DNA, 90 bp, Homo sapiens
tcagctctcggcgcacggcccaggggcacagatgagctgctgggtgtgatggaccaggtcaccatcatcaactccaccctggggaaggcc

SEQ ID NO: 617626 - DNA, 125 bp, Homo sapiens
gacggggatggggacggtttcgtccgcatcgaggacttcatccagtttgctacggtctacggggcagagcagagtgtgaacatggctacgcctcttcattcccgtccatgccgagcccccgactg

SEQ ID NO: 617627 - DNA, 82 bp, Homo sapiens
ctcagccttcaggactctcttccagcatggccgaagacacctattcacacaagacacctatggctgccgatgaaggctcagc

SEQ ID NO: 617628 - DNA, 100 bp, Homo sapiens
agtagatgtggatgactgtcagaagccagctgaagatgagtggggtaaaaccccagacgccatgaaagctgccatggccctggagaaaaagctgaaccag

SEQ ID NO: 617629 - DNA, 98 bp, Homo sapiens
aactggagagcttcatcaaaaatagtgatagctttgataaaatgttgaaggtatccacctttcctgggaacctccaacctcaccttctggaaatattt

SEQ ID NO: 617630 - DNA, 100 bp, Homo sapiens
tgggcaccaaataccaggctaccatggtctacaagactctcttcgctctttgcatcttaactgcaggcaaggggctcaaatagtttacctctgctgagat

SEQ ID NO: 617631 - DNA, 83 bp, Homo sapiens
ccctcagcgcccccagcacgccgccgagtcccgctcgccatggcacaacatgcctttctggcggatatcctgccacgcagacc

SEQ ID NO: 617632 - DNA, 100 bp, Homo sapiens
gaggggcggccgggcagcgccgccaccatgttcctgggcaccggggagccggccttggacacgggtatttctcaagctgccagatacgtttaccaacgac

SEQ ID NO: 617633 - DNA, 100 bp, Homo sapiens
taccccggaccccaccactttgaggtcactttccagcagtccagcacggccaagtcagccacctggacggctatttctgccgggcgctccgcgaagatgc

SEQ ID NO: 617634 - DNA, 75 bp, Homo sapiens
ctgactacctcgcccacgagagtcggagcctcctgctcttcatggatgaagcagacgccttccttcggaagcgag

SEQ ID NO: 617635 - DNA, 99 bp, Homo sapiens
gtgccctacctgggcaccttcctgactgacctgaccatgcttgacactgcccttcaggactacatcgaggacaacaccatcgacttcctggagtacgtg

SEQ ID NO: 617636 - DNA, 89 bp, Homo sapiens
gaaagatgttgaagtgactaaggatgggacctgcaaaggataaactggtcattggacggatctttcatattgtggagaatgatctgtac

SEQ ID NO: 617637 - DNA, 109 bp, Homo sapiens
acccactcagggcaaccccctgccacctcagatatttaatggcgaccgatactgtggatctccagagaatacagagggcaaagatggatccaaagtaactaaacaggag

SEQ ID NO: 617638 - DNA, 95 bp, Homo sapiens
ccatggacgttcgccagtgggttgacacagatgagccaggtgagaatttcaaggattatcgacttcatattgcacattaaagttacaaattaaag

SEQ ID NO: 617639 - DNA, 90 bp, Homo sapiens
ataattaaagagtaaagttgtgctcaacggctgctgatactttggctgtgaggcaaaaaaggagaatttatgatatcaccaatgtcttag

SEQ ID NO: 617640 - DNA, 80 bp, Homo sapiens
gcccttcaccgcgggcgccaatggggagcagaaggactcggacacagagctagggccatgagtaccttgtttttgactgg

SEQ ID NO: 617641 - DNA, 100 bp, Homo sapiens
ggggatattatcaaatctactactgttcatggcagatggctattcatatgaaaaggaagcaatggaaaattggatcagcaaaaagaaacgtacaagtccc

SEQ ID NO: 617642 - DNA, 74 bp, Homo sapiens
ttctccccggacggcaagtacctgcccctcatatggaaaatttgaaatgcagaggggaaacagtagcaaaggag

SEQ ID NO: 617643 - DNA, 97 bp, Homo sapiens
agtagcaggacccggtctcgggaccagccgcagtatcctggtgtgaaccagctatcctccagtataggaggattgagtcttcagagttctccacaac

SEQ ID NO: 617644 - DNA, 98 bp, Homo sapiens
agagctgcaaccctcttgtcctctttgaagcagaaattgaaaagtactgcccagagaattttgtagacatcaaggctgacttcaaaatttctgaggag

SEQ ID NO: 617645 - DNA, 100 bp, Homo sapiens
ttcttctaaaagggccgtgactcaagggttcctccctgcacgtgggcagtgacttgctcaagttcatggagccggtgaccatgcaggaatctgggacctt

SEQ ID NO: 617646 - DNA, 88 bp, Homo sapiens
ctgttccagggccagtatcggagtttggcgtggtgtccctcgtggccgttcacccctccaccgtcaacccgctcgggaagcagctctt

SEQ ID NO: 617647 - DNA, 98 bp, Homo sapiens
ctcttcggatgaggagaccctggaagacaatctaaggcctgtatccggtgtccgaggcgaactcagtaagatgatgttaagaggaaacctgaagcaag

SEQ ID NO: 617648 - DNA, 90 bp, Homo sapiens
gccccgacgaacatttctgggtgacactcaacaggattcccggttatttggaaatagcggtgcttgcagcgcttgcggacagtcgattcc

SEQ ID NO: 617649 - DNA, 75 bp, Homo sapiens
ctgcggacgctcggtcccgcgctgcgcatccccgcggacgccacagcgctgcagccaacatgcctgactctgagc

SEQ ID NO: 617650 - DNA, 100 bp, Homo sapiens
ttgagttttatcattttcgttaagtgaccgtgcgcagcgctgtaactggtaccaccatcttaaggacagaaaagctacaggactctaggaggccaccgtc

SEQ ID NO: 617651 - DNA, 100 bp, Homo sapiens
agaacccggccctcaccgccctcaccacccctatccagacggctgcccttcaagtaccagaagattttcagtcaatgacttatggatttaaaatggctaa

SEQ ID NO: 617652 - DNA, 82 bp, Homo sapiens
aatgtagaaggttggaaaatcaattcctctttggtcctagagataagacatatctgaagagatggattaagaatgctttgga

SEQ ID NO: 617653 - DNA, 100 bp, Homo sapiens
caaccacagcaagagcacctggctgatcctgcaccacaaggtgtacgatttgaccaaatttctggaagaggtgtcgtgaaaactacccctaaaagccaaa

SEQ ID NO: 617654 - DNA, 48 bp, Homo sapiens
gcagaaccccggcgcggcccttgtgctggtcccaaaggcgataacatc

SEQ ID NO: 617655 - DNA, 83 bp, Homo sapiens
atcgcacttcctgcagtgggcattagccacgtccagtgcagagtggacctccagcaaactccagcagacctgcagcagagggg

SEQ ID NO: 617656 - DNA, 51 bp, Homo sapiens
gtgatactcaagattctgccaacgtattatgagcctcaaacaatttgtgag

SEQ ID NO: 617657 - DNA, 98 bp, Homo sapiens
cccgagtggatcggggacggagagaacacgagcccatcaggacggggaggtttactgcatcgacgcgcggttctacgggaacgtcagccggttcatca

SEQ ID NO: 617658 - DNA, 83 bp, Homo sapiens
ccgaaggcctcggcctttcacattcgggaagcgtcgggattaggtgaaagttcatctgcagaagccagcggacgcctctgttc

SEQ ID NO: 617659 - DNA, 75 bp, Homo sapiens
cagacactgaacgaggagccagtgtcagccatcgctcccagccccaacagccttcccagccccagcggaccctgc

SEQ ID NO: 617660 - DNA, 100 bp, Homo sapiens
ttggactcacactgctgtctctgtatatgttctgtgaggaatcccccatcccagaagacaaagaccgcagatttgtcttctcttactttctagctaccga

SEQ ID NO: 617661 - DNA, 100 bp, Homo sapiens
aaaagctgccctgagacggtgtcccgccgaaaggtagacgcaccctctgaagatggtgactccctcctgagaagctggaccccttggtaaaagacaaggc

SEQ ID NO: 617662 - DNA, 100 bp, Homo sapiens
ggggctgccctcccctgcgcactcccctcgctgcccgggcccggagcgcagcgcggccgcacaggccaagaagcttgagagaagaaaaatttcagaaaaa

SEQ ID NO: 617663 - DNA, 50 bp, Homo sapiens
tgcagctgctgcacaagaagatccagggaatgaaggatggcagcatgccg

SEQ ID NO: 617664 - DNA, 80 bp, Homo sapiens
ggacaggatttctccgcctcagcccaacggggagcaaaatgatgcttcaacacccaggccaggtctctgcctcggaagtg

SEQ ID NO: 617665 - DNA, 90 bp, Homo sapiens
gggggttccatctcccaacttgtccatgtgctggagaatctggtaaaagcaccattgtgaagcagatgaggatcctgcatgttaatgggt

SEQ ID NO: 617666 - DNA, 90 bp, Homo sapiens
atggcggtggactcggcgatggagctgttatttttagatacttttaaacacccgagcgctgagcctctactcttcatggatcttttggat

SEQ ID NO: 617667 - DNA, 83 bp, Homo sapiens
attggcagaatttggaagcaaatgtacctggagcgcagaaggccaatgatgaggccaatcagagtgatacaagtgtctccttg

SEQ ID NO: 617668 - DNA, 76 bp, Homo sapiens
aggagggatggctgccttaaacatgagttggatgcatcataatatggatctagtaggagacaaagccacaaaggaa

SEQ ID NO: 617669 - DNA, 121 bp, Homo sapiens
caaatgcctattggaggagatgttccagccttacagctccagtatgaccattgtaaggtattcttcagcggaaataaggaaacagtttactctcccaccaaaccttggccagtaccatcga

SEQ ID NO: 617670 - DNA, 90 bp, Homo sapiens
ggtgcagcttcacctggccgggctgcgtcgcttcgatgccgcgcagggccaattcctgtccccccagcagcatggcatcgtgtgctgaac

SEQ ID NO: 617671 - DNA, 82 bp, Homo sapiens
gcgcaacacttctccgagccagcgagccagcgagccgccgacccgccgagcaaaatggtacaagtatgagttctgcccgttc

SEQ ID NO: 617672 - DNA, 87 bp, Homo sapiens
tcgaggtgaactggaccgagcagcagcagatgggtgaaattgatgcccatgaagacagcttcaaatctgcagatgaatctggacagg

SEQ ID NO: 617673 - DNA, 98 bp, Homo sapiens
ccgcgactgggaggagcgccggaacgccgaggcccagagccccccaagatgaacccagtggtggagccactgtcctggatgctgggcacctggctgtc

SEQ ID NO: 617674 - DNA, 90 bp, Homo sapiens
gctgggcccgagccaggccggagctgaggagaacgactgggttcgcctgcccagcaaatgcgaagctcctgcccctcctaaagctgaagc

SEQ ID NO: 617675 - DNA, 75 bp, Homo sapiens
ccccaaggaaaccatggaggagcactgcaagcttgagcaccagcaggaatggcccccagaacatatacaaccttt

SEQ ID NO: 617676 - DNA, 96 bp, Homo sapiens
ttcgagtctccacgccgtcagctgagaagagtgaggagaactgggcaattttgaagcagccactgagagctttcaaaaggcactgttgctcaacca

SEQ ID NO: 617677 - DNA, 82 bp, Homo sapiens
ttactatgatgaatttgccaacctgatccaacatgaaaagctggatccaaaagccctgaagtggtccaaaggcaaagttcgg

SEQ ID NO: 617678 - DNA, 83 bp, Homo sapiens
aacccgagctatagagaaaggagatgaggtgtcgtgaaaactacccctaaaagccaaaatgggaaaggaaaagactcatatca

SEQ ID NO: 617679 - DNA, 107 bp, Homo sapiens
tcatcagaaaattgaagactccgaagaaagcagtgatgaaattcttgtgcgtctaacatctgcgatccctaaagaagtggctgacatctttaacgcccccagtgatg

SEQ ID NO: 617680 - DNA, 75 bp, Homo sapiens
ctgagcagcagccccgcggtgctgggtggcacaagaatggctcaactctccaaatagagagaatttctatcagtt

SEQ ID NO: 617681 - DNA, 101 bp, Homo sapiens
atcagcttctgttgtatcatcagattccatttcaacttctgccgacaacttttctcctgatttgaggttgatgcggatgaaattaaaaggctaggaaagag

SEQ ID NO: 617682 - DNA, 75 bp, Homo sapiens
ggaaaatactcagtttcctgcttactgcttcattatggattatacaggtgatgccatgctgctatgaatgggcag

SEQ ID NO: 617683 - DNA, 75 bp, Homo sapiens
cccacgctgctactgcctgggggctgaggatgacaaaaaagccttcataggatctgtgccagttcagaagcaggc

SEQ ID NO: 617684 - DNA, 51 bp, Homo sapiens
gtgctgcgcggcccccgcgcatgaattccatacgacataatctgtcattga

SEQ ID NO: 617685 - DNA, 87 bp, Homo sapiens
cttacgtctgcggaagtgcagctgcctcagttcttagcgcaggaaaaccagtagattcccagacatcgcgaagtgaatctgaaattg

SEQ ID NO: 617686 - DNA, 100 bp, Homo sapiens
gaggcggcgggctggagacatggaccgcggcgagcaagaagcatcaagtgtacctgatttgtgaacctatcttgcttcagttggtttcctcctaaatatt

SEQ ID NO: 617687 - DNA, 89 bp, Homo sapiens
tttcgcaacatcaagggagttttccggggccctctcagcaagaacgggaacaaaactctgccggaaaactcaaatatatgtgaggtgtg

SEQ ID NO: 617688 - DNA, 101 bp, Homo sapiens
gttagaacagataactggcaaaggtgcttcggggacattccagcatgccaatgaagatgtggaaagaatgttactaggaaacaagtgtgatatggacgaca

SEQ ID NO: 617689 - DNA, 104 bp, Homo sapiens
caacttcaaagacgttctcaaggagaaggcagacctggggagttgaccacatttggccatttcccagaagggccccaccccaagggtgagtggccaatggggag

SEQ ID NO: 617690 - DNA, 99 bp, Homo sapiens
gcgccgtggccctccccggaatatcttcttggaaacagaattgttctacaaaggtatccgccctgcaattaacgttggtctgtctgtatctcgtgtcgg

SEQ ID NO: 617691 - DNA, 85 bp, Homo sapiens
caagaagatcatcattaaggacggaggcacgacctgcctagagctggaacgttacctccagagcgagccctgctatgtttcagcc

SEQ ID NO: 617692 - DNA, 80 bp, Homo sapiens
gggaaattttctacagataccaaaggaaaaccaacttctcggacacaggtggttgtggcagcactgcctgaaggtatgag

SEQ ID NO: 617693 - DNA, 100 bp, Homo sapiens
tgccctcattaaagcagccggtgtaaatgttgagcctttttggcctggcttgtttgcaaagaaaattgacgtcctttgtggaattggaataaaaaaggtt

SEQ ID NO: 617694 - DNA, 83 bp, Homo sapiens
gaaatccttcggatggtgaactcattagaagctactgcagcactggggtgtcagttgttggtccgacccagaacgcttcagtt

SEQ ID NO: 617695 - DNA, 100 bp, Homo sapiens
aagcacacgattactttactcactgtgtaacacatgaggaacatggacgagatgggaaaaagactattgggaagaagttacctgcaactacagcaactcc

SEQ ID NO: 617696 - DNA, 100 bp, Homo sapiens
tttgaagacgttccttgaggaggtttgaaaaaagtgggaaaccacccatcaatgatatgttcacagacctcaaagatggaaggaagctattggatcttct

SEQ ID NO: 617697 - DNA, 100 bp, Homo sapiens
ggcggctccgcagtgaccggactcgggggaggtctatgttaacaatgaatgggcaaccagtgttggggaaggagggagctttggagaacttgctttgatt

SEQ ID NO: 617698 - DNA, 100 bp, Homo sapiens
agaggcagtctttggatctggaaagatgttcattctggacagagtggaaggtgatacttgttcccttaatgagtttaccataactggatcaacttatgca

SEQ ID NO: 617699 - DNA, 98 bp, Homo sapiens
gacaagctcagatacctcaacagcagccgtgccagcaccgatgagccccccgcagacacccaggatgaagatttgataaagtggaaggcactgtttga

SEQ ID NO: 617700 - DNA, 100 bp, Homo sapiens
atggacagagactaccacgtggcatgttaccactgtgagatggcttaatggtacaaataactccagagaccatgaatggcttgcggctagctttacgaga

SEQ ID NO: 617701 - DNA, 130 bp, Homo sapiens
ctgtgagccagttggagttgcggcggcgggaacgattgggctgagcagaggacgacatgttgcttttcgtggagggtgcaacaccggaggatttcagcaacctcccacctgaacaaagaaggaaaaagct

SEQ ID NO: 617702 - DNA, 98 bp, Homo sapiens
atggtgctgctctcttagctgtgattcactattattgcccagagcagatgaaactggatgccaaataggaagagctctggtctgcagctcccagtgtg

SEQ ID NO: 617703 - DNA, 101 bp, Homo sapiens
gtgagggggtgacgggttaagattcggagagagaggtgctagtggctggacttgacctggaaaggtctcccatgagtttgccatcaacttcaaccccacca

SEQ ID NO: 617704 - DNA, 75 bp, Homo sapiens
ttgtagcgtggtgcttctgttgctcacagtattttaataagcggaaaacctactttgctcacgatgcccttcagc

SEQ ID NO: 617705 - DNA, 82 bp, Homo sapiens
tggagagggggcgctgagctgttgggtctcttctgtatatacagaaatatgaatgtgaatgaagtggaaggaagaaaatcaa

SEQ ID NO: 617706 - DNA, 90 bp, Homo sapiens
tccatgcagtcagtggaagtggcggaaaagaagatttttcagatcccctggatgcatgcggctagacatgggtgggatgtggaaaaagat

SEQ ID NO: 617707 - DNA, 100 bp, Homo sapiens
ttctaactacggtccaatgaagagtggaaactttggtggtagcaggaacatggggggaccatatggtggagcagcacagcacccagagactcagctagat

SEQ ID NO: 617708 - DNA, 76 bp, Homo sapiens
cagaactgagcccaggccacagtaccctattcacgctctgtgcttgtgccaagagaaagcgtcgtggtggagcaat

SEQ ID NO: 617709 - DNA, 100 bp, Homo sapiens
ctggtgacatgcagttgtccaaaagtgaaattttacgaactcaggttttcaaatggaacattttgatgcatcacttagtacctatttcaaggcattgcta

SEQ ID NO: 617710 - DNA, 113 bp, Homo sapiens
ggctctgtaggaaggaacttggttccccctccctcagcttccgccccaaaagacaatgcagatcttcgtgaagactctgactggtaagaccatcaccctcgaggttgagccca

SEQ ID NO: 617711 - DNA, 128 bp, Homo sapiens
actcccgcaaagcctcgcctagctcctgctaccagttacgatggcaaaacagcagtgaccgagatcgtcaacaggtggctgggagcccgagccccacacctgccgggcagcaggtgctggacgtcgac

SEQ ID NO: 617712 - DNA, 95 bp, Homo sapiens
accatcggggagacaagcaagttggattagcttttcaaaacagaaattcttggaaagaattaaatgacattgcatcgaagccctcccaggaacac

SEQ ID NO: 617713 - DNA, 100 bp, Homo sapiens
ccactcgtactcccaaatgatgatctacccttactcatatgcttacaaactcggtgagaacaatgctgagttggtagctatagatttcactgcctcaaac

SEQ ID NO: 617714 - DNA, 99 bp, Homo sapiens
ctgacttcaagaatgaagccacggaccctcgcgcttgctcacttccgacagagaaaaacaaaaggtgacagttcgcattcggagaaaaagacggcgaag

SEQ ID NO: 617715 - DNA, 100 bp, Homo sapiens
atttgaagcactacaaacaagcagctgagtatggatggcagaacagaaaatatcatatgataagaagaaacaagaagaattgatgcagcaatatcttaaa

SEQ ID NO: 617716 - DNA, 100 bp, Homo sapiens
actgatttttttgtgcagtgggcaggaagaacccatcgggcagctacacatcttgaaagagaagctcttcctgtgaggagtactcagctgtgaagtccct

SEQ ID NO: 617717 - DNA, 83 bp, Homo sapiens
gtggagtttgcaaacaaattattgacggtcaaggtatttcatgccgagcatttaaatcaaacggtattgagatggattgggtt

SEQ ID NO: 617718 - DNA, 75 bp, Homo sapiens
tacagtctacaaaaagacctgctagagccattattgccccgaggaaaaggcttctcttttacatcgtactcagga

SEQ ID NO: 617719 - DNA, 145 bp, Homo sapiens
cagatgaggtgatggcaacggccaacttcggcaagatccagatcgggatttacgtggagatcaagcgcagcgatggacactggggttgggaaatcaagcatcgtgtgtcgatttgtccaggatcactttgaccacaacatcagcc

SEQ ID NO: 617720 - DNA, 100 bp, Homo sapiens
cttctccactggttcctgggcaccgaaagattacctctctagtgacccttcagctgttaaccctggttggccatgacgatcagcttgatggaccaaaata

SEQ ID NO: 617721 - DNA, 83 bp, Homo sapiens
ttacacagaggacaatgcttcccaggctcgagttgatgcccacagtgtgtggaccagttgacaaagatccaaactgaattaca

SEQ ID NO: 617722 - DNA, 75 bp, Homo sapiens
tccactttcgccagcccgtgccgcgagcgcggcctgcaggaggggctttgaccacgacctttgaagagcttcatt

SEQ ID NO: 617723 - DNA, 50 bp, Homo sapiens
ctgtgactccagccagagcccccccacggcccagctctgaccagactcca

SEQ ID NO: 617724 - DNA, 100 bp, Homo sapiens
taaagaaagagcaggacatctatacccatctggtcaaatctctgcaggaatcagacagcatcctgtgtgaagcactgcagcacaatctgcctccttttac

SEQ ID NO: 617725 - DNA, 100 bp, Homo sapiens
ctttgtttatttgtattgatgccctttgcctttttctttctggaatcagaaggctttgctggcctgaaaaagaatccaactcaagtcggaacagctcttc

SEQ ID NO: 617726 - DNA, 100 bp, Homo sapiens
taaaggtgaaaaatggtaccacttatgagggtatcttcaagacgctaagctcaaagggttccgagtctgaggaagacataaccttgtgcctgcctgccca

SEQ ID NO: 617727 - DNA, 50 bp, Homo sapiens
gagaagaggcagctgttcatagaaatgcaaatgcttcggttacccacagt

SEQ ID NO: 617728 - DNA, 76 bp, Homo sapiens
atactactctgaggggcttagaaattaacagggtataattgaaatcctcaaaggaatgcaagaattgggagtacat

SEQ ID NO: 617729 - DNA, 83 bp, Homo sapiens
caagaccatgctggcaagtctgaaggtcaaacaatgcagatcttcgtgaagactctgactggtaagaccatcaccctcgaggt

SEQ ID NO: 617730 - DNA, 74 bp, Homo sapiens
ggcggcggaggatgagcctgcagagcgcgcagtacctccggtttgagcacaaaatgaacataattagggaaaat

SEQ ID NO: 617731 - DNA, 82 bp, Homo sapiens
ctgttttgccggaggagcccctcaggcccacttgcacctcctgcgccgccgccccccatccaaggatatgccttcaagcctc

SEQ ID NO: 617732 - DNA, 82 bp, Homo sapiens
gatggcgcagaaaccccgttgacaaggcactgctttttcatgacgccacctgtctgtccagccacccttccacagactgagg

SEQ ID NO: 617733 - DNA, 50 bp, Homo sapiens
ctgaaatgtttgacgacactgatggtttgaaatacatgctacaggattta

SEQ ID NO: 617734 - DNA, 100 bp, Homo sapiens
ctgagtaaccctgaggcagtgggacgccaagactggagaggaagcgactgcggttctacagcgagtcgggcatgcctaccaaacatctttcagacagtgt

SEQ ID NO: 617735 - DNA, 82 bp, Homo sapiens
cccgccatgggctgctgcagctccgcctcctccgccgcgcaggtcatgatgatgggcagcgcccgagtggcggagctgctgc

SEQ ID NO: 617736 - DNA, 97 bp, Homo sapiens
aacagcggtcgcgccggcaagagcagcgggagcggcgcggggaagggggcggtgtccgcagagcaggaggcaagtgaggcctatctggttggccttt

SEQ ID NO: 617737 - DNA, 50 bp, Homo sapiens
caatgaaacagctccaatgctggagcaggaagcagaaattcattatgaag

SEQ ID NO: 617738 - DNA, 100 bp, Homo sapiens
cagtgacaacacggccgcgctgcaccacctcacggtccacaacatcgcctaccagttctttggggtgactttcaagatggactctactctaacagcaagt

SEQ ID NO: 617739 - DNA, 82 bp, Homo sapiens
ctgccctgagacggtgtcccgccgaaaggtacccaggcactccagctgatttcaatcctggttctttagcatgttctcagct

SEQ ID NO: 617740 - DNA, 100 bp, Homo sapiens
aagcaagaaggccctggacacagcaatatctctgggctttcacagctatttttcagctctgtcgagaggagatccacttcctgtaaaggacagaatggaa

SEQ ID NO: 617741 - DNA, 82 bp, Homo sapiens
cgtagtgttaaacactgtcgtgtatcgctggcacagcacaaggacattataggcttctctacagtttagcctttaatgccag

SEQ ID NO: 617742 - DNA, 96 bp, Homo sapiens
gtggcctggagcacggagaaccattaatcatctctaagggtgttttgaatgctgtatcaaatgcctggggggcattccctatgcctctctgattgc

SEQ ID NO: 617743 - DNA, 85 bp, Homo sapiens
aagttgttaccgaacatctcataaataagtatctctcagaagatagaagtgtgcaagaagtactacagaagcatttcaatatcag

SEQ ID NO: 617744 - DNA, 75 bp, Homo sapiens
ggcccagggcagcggagcacgcgggctgctcatcgtcagcagggagaggctggaggtgcgggagacgcggcggcg

SEQ ID NO: 617745 - DNA, 90 bp, Homo sapiens
agagagccagcaatgcctccatgaacaatctcacccaattactctgctcagatcaatgagctgagcaatgttcctgttcctgtcatgcta

SEQ ID NO: 617746 - DNA, 90 bp, Homo sapiens
aacgaattctactatcgctacccaagtatggcgtgagtcccgagaacattatcctctatggtcagagcattgggactgtccccacggtag

SEQ ID NO: 617747 - DNA, 100 bp, Homo sapiens
cagatatgaaaagacatcgtatccagttcaaatattctggtcctgaagatgatgctgctatcagcctgaattgcctaaggaggtgccagaaaagcttcca

SEQ ID NO: 617748 - DNA, 75 bp, Homo sapiens
ctcctggacttcgcctttcccgagccctggaggtggggagaaaaggatccagccgcagaagccaggatgaaggta

SEQ ID NO: 617749 - DNA, 83 bp, Homo sapiens
taaccccgccgcagctcctcggacgcaggcaccaggatcatctacgaccgaaagttcctgctggagtgcaagaactcacccat

SEQ ID NO: 617750 - DNA, 131 bp, Homo sapiens
tgagcttcattcagatgtggtggaatatgccaaggaaaaactggagagcttcatcaaaaatagtgatagctttgataacttaaagcttttcaagccaggccaagaagctgtgaagtaccagggtcctcggg

SEQ ID NO: 617751 - DNA, 83 bp, Homo sapiens
cttagccctctacttttcaagacaccaagtgagaggccaaccaggagccttcacgtaaatgggtccagtcatgcctcccagta

SEQ ID NO: 617752 - DNA, 100 bp, Homo sapiens
cagatcgctgtagtgggcggccagagcgccggcaagagctcggtgctggagaacttcgtgggccgtgtctctttctgcacattcctggcacatgagtacc

SEQ ID NO: 617753 - DNA, 83 bp, Homo sapiens
ggcatcttctacaaacccatttcagaccaatgccagaggagcaacagagttgtctgctggttctcagcttgaagaagattctg

SEQ ID NO: 617754 - DNA, 100 bp, Homo sapiens
gagaaggacattatttcggacacatctggtgacttccgcaagctgatggttgccctggcaaaggtggttagctcaaccaatggagagctgaatgttgatg

SEQ ID NO: 617755 - DNA, 100 bp, Homo sapiens
aaggaaagcaccatgacgtccatccatttcgtggttcacccgctgccgggcaccgaggaccagctcaatgacaggttctctacttaaaagacaatgacta

SEQ ID NO: 617756 - DNA, 83 bp, Homo sapiens
tctttccttctgtcaacggcaggggcaggcctagtttgactctgacagtcctcccactaaggagcacgtttgccgtggacggg

SEQ ID NO: 617757 - DNA, 75 bp, Homo sapiens
tgaacgggcggcccctggagatgattgagccgcgcacgctacagtacaaggtagacgaagagcggcggagtgcag

SEQ ID NO: 617758 - DNA, 98 bp, Homo sapiens
ggcgctgctgctgcacgggcggctgctggcggacgggagtatgacaaggacgggaacctccggccatggtggaagaactcatccgtggaggccttcaa

SEQ ID NO: 617759 - DNA, 98 bp, Homo sapiens
aaggaggagattctgaagataaggaggctatgtggaggagatatagagccaagaaatatttatgtaaagtgaaagctgcctgcaagattcaagcctgg

SEQ ID NO: 617760 - DNA, 100 bp, Homo sapiens
gctcaagctcatcgacttcggttcgggtgcgctgctcaaggacacggtctacaccgacttcgacggccaggtcagagcagcccaccatgggatggggagg

SEQ ID NO: 617761 - DNA, 100 bp, Homo sapiens
aacagaagagtgagagatggaacccgaagaagaaaggattcgttacagccagagattgggttttggccaaattgggcgagggcacaaaataaccacttac

SEQ ID NO: 617762 - DNA, 82 bp, Homo sapiens
ctcgcctcgggacccgcggtccccgctcttgctggagccttcacgtaaatgggtccagtcatgcctcccagtaagaagccag

SEQ ID NO: 617763 - DNA, 74 bp, Homo sapiens
cgccggccggctgcgaagacgcggtgggccgcccctccgagttgtggaaagtaaaaatgtagccctaccaaaag

SEQ ID NO: 617764 - DNA, 100 bp, Homo sapiens
agcaactgctacgatcctgagcgagtcaagaattttcttaaggaagcagagaaaggtgtgaaattcctaacattgccaccagtgttacatctacaactga

SEQ ID NO: 617765 - DNA, 96 bp, Homo sapiens
aagaatttcaagaacaaaggccgcgacttggaggtagcatctccgcccccacttactgatactcctgacactacagcaaatgctgaaggagattta

SEQ ID NO: 617766 - DNA, 100 bp, Homo sapiens
caggaggctttggagcggctaaaaacctccgagtcgtccggaaatccattgcccgtgttctcacagttattaaccagactcagaaagaaaacctcaggaa

SEQ ID NO: 617767 - DNA, 82 bp, Homo sapiens
ggtaccagatgggctgcgagtgcaaggttggatcgtcaaacgcaggctactaccttggtccatcaaatttttggagggtatc

SEQ ID NO: 617768 - DNA, 100 bp, Homo sapiens
ttgtgtggctgcagccgagggagaccaggaagatctgcatggtgggaaggacctgatgatacagaggaatgtatcctgtcaggtataatgtcagtgaatg

SEQ ID NO: 617769 - DNA, 75 bp, Homo sapiens
tccctggaggtcctgtggaatggtaactatggccaagatcaatcctccatgagtagtggtggtggcagtggtggc

SEQ ID NO: 617770 - DNA, 100 bp, Homo sapiens
ccggtacaggtgccctgcggacacgtgcacctccgctgagcttttaaaccaagtcattgggacttagcgtctttctacccggcagggaagggaggagttg

SEQ ID NO: 617771 - DNA, 74 bp, Homo sapiens
tgccctgagacggtgtcccgccgaaagattatcgacatgatggtcgagatcttcaaagctcaacattatcagtg

SEQ ID NO: 617772 - DNA, 127 bp, Homo sapiens
gggttctatcagtgcattgctgaaaatgatgttggaaatgcacaagctggagcccaactgataatccttgaacatgaccaaacctggaccacccaaaaagccgaagaccccttcaagaccatcagcc

SEQ ID NO: 617773 - DNA, 99 bp, Homo sapiens
aagacctttaagaaacatcagcagctgaaaatccatcagtgccagcataccaatgaacctctattcaagagttgttcctttggccacatatatgcgaat

SEQ ID NO: 617774 - DNA, 98 bp, Homo sapiens
taaggaactagaacaagaagaagaggagaggaaaaaggaagagagcactgcagccagtgaaaccactgagatgggtgttcctgataaagaagggttac

SEQ ID NO: 617775 - DNA, 100 bp, Homo sapiens
ggctgactacctgctgtacaccctcaacaaacaccagcgctttgggtgcagcggaactgctgcctgacgctctgcaacttcagcatccccgaggagctgg

SEQ ID NO: 617776 - DNA, 90 bp, Homo sapiens
gaggcaagacaagggtccatatcgcggcatccggctcccgcccgtcttcagaaacaagtgttgaaaatgttaaaggctgtgctgaagaag

SEQ ID NO: 617777 - DNA, 98 bp, Homo sapiens
tttctgccagtgaaaaccaccaaaacaatccagctgttccctcagggtggagggtccggggaggagcaactctatgctgactttccagaacttgacct

SEQ ID NO: 617778 - DNA, 83 bp, Homo sapiens
taaagtctgttggtgcacaaaaagacacttatactatgaaagaggaactgcaagcacatgttgaccagataactgaaatggca

SEQ ID NO: 617779 - DNA, 100 bp, Homo sapiens
ttgctacatcctaatgcttatgttaggaatggatggaatttactggattttgttatagtaatagtagggcgtggtgaccaagatgaagatgcagaggacc

SEQ ID NO: 617780 - DNA, 100 bp, Homo sapiens
cagcaactccagcctgtccggctcgtcggtgtcctccggatttaagtgccctgtatgctcaaaatttgtatcctcagatgaaatggatttgcatcttgta

SEQ ID NO: 617781 - DNA, 100 bp, Homo sapiens
ccgggggacagctgtagtgaagtaacaaatgtggcaattattttggatctatcacctgtcatcataactggcttctgcttgtcatccacacaacaccagg

SEQ ID NO: 617782 - DNA, 100 bp, Homo sapiens
ctctggttccggggcctgaaccgtatccagactcaggtacttgagctggatacactggtggataatttatctattgatccttcctcgggggacatctggg

SEQ ID NO: 617783 - DNA, 119 bp, Homo sapiens
gccgccaagctcctggccctggccctgatcatcctgctgggcttcgtccagatcgggaaggagacaagaggagcagcagcggcaccgcccctcaccctggagggtcctgtacaatctca

SEQ ID NO: 617784 - DNA, 142 bp, Homo sapiens
gactaggcggcggcggaagatggtgccgggggtcgctggctctgctgctgccgccggcgaaggaggaggcgttgccggattgcagagggaatggcatacatcgagcggaagaactacattcaccgggacctgcgagcagcta

SEQ ID NO: 617785 - DNA, 73 bp, Homo sapiens
aatggtggtcctcctgctgagacggacttcgggggagacactgatgatgcttcggatgcacaatctgcatggg

SEQ ID NO: 617786 - DNA, 51 bp, Homo sapiens
aaaccatctgaattggctcaatgatgagagaaaatgctgctgtgaagaccc

SEQ ID NO: 617787 - DNA, 75 bp, Homo sapiens
cgctcggcatggctctcctggtgctcgccttatgccagcctggaccatcttggaggcagtgtaggatcatggaag

SEQ ID NO: 617788 - DNA, 75 bp, Homo sapiens
cgagagcttcagccatcacgaggatgatttcggaacctggagaaaatgttctaccacagtgtccaggatttgtcc

SEQ ID NO: 617789 - DNA, 71 bp, Homo sapiens
ggaagctggtgggcactcagcaccctctgcttaccacagccaggtttctgcggcactgaaacaaggccaaa

SEQ ID NO: 617790 - DNA, 75 bp, Homo sapiens
ggcgaaccggccccccacagccactgcagtattaattttaaagacccacagtttgctgaagattacatttttaaa

SEQ ID NO: 617791 - DNA, 98 bp, Homo sapiens
gtggactacagtgacgccctcacggagaagcagtggctaaggggtgtggatgaatggaacatagctcgcctcaatacagtcttggatgtggttgaaga

SEQ ID NO: 617792 - DNA, 75 bp, Homo sapiens
tccgggggctccggaccctcggcgcagttccagggtctccctccactgctgtagtaacccgggtccggggcctcg

SEQ ID NO: 617793 - DNA, 75 bp, Homo sapiens
acaactaccgctgctggaccacaaaccgctgccagaaaagtgaatctggattgggaaagtcgacattaatcaact

SEQ ID NO: 617794 - DNA, 75 bp, Homo sapiens
ggaatattggtgggccagcaatcctcagacgcctcacttaggacaagtttcaggctctgtataactatactccca

SEQ ID NO: 617795 - DNA, 75 bp, Homo sapiens
caacatgatagttgatctggataatgtggtcaaaaagatgatacttgttgatgccactgttatcatcctcctagc

SEQ ID NO: 617796 - DNA, 97 bp, Homo sapiens
acacacacaggccattttgagtgcatctgtgaaaaggggtattacgggaaaggtctgcagtatgaatgcacaggctcatgcacaattagttcgagaa

SEQ ID NO: 617797 - DNA, 75 bp, Homo sapiens
ggctaagatgctgccgactctgggcggcgaggaaggcgtctcccggtgcccaccagaagtatgtccgacaagcct

SEQ ID NO: 617798 - DNA, 50 bp, Homo sapiens
ccaggaagagacgctgaaggccaaggctaccagggcatggtggacggagg

SEQ ID NO: 617799 - DNA, 50 bp, Homo sapiens
ggaagactgccgtggccacacaaggatggcttggaaagatgtgagacatg

SEQ ID NO: 617800 - DNA, 100 bp, Homo sapiens
gacctttctgtggaaatagatgacatcaataccagtgataaggcagaaggagaagacagcctgaagaagatgcagctgatggagcttgcgattctgaatg

SEQ ID NO: 617801 - DNA, 90 bp, Homo sapiens
gctgctggcgtgtctcctcctagtgcttcccgtctcagaggcaaacttttttggctttcacccccaaccagtgaccaaagacttgaccac

SEQ ID NO: 617802 - DNA, 74 bp, Homo sapiens
tctgctcatggctctcaaagaaccagcggacctgagtcttcaatgaaagaactgataaatttcaaacggaagag

SEQ ID NO: 617803 - DNA, 88 bp, Homo sapiens
ttttattgacgaaaatggaacagcaacaattagaggaaggatttttactgggagaggtaagacaagaggaaacgtttagcatcagtga

SEQ ID NO: 617804 - DNA, 101 bp, Homo sapiens
tgccgccgcttctcgccagcgccgttgctgcgggggattgtgggagtctccgcgtcccgctcgctgggagagagctattgtggacgatgaaaggctctctg

SEQ ID NO: 617805 - DNA, 82 bp, Homo sapiens
ccgctcttccccacctgcccggtgcccgaggaggcagccaagctcgtagcctgccactccatgccggtgcagctgacgacag

SEQ ID NO: 617806 - DNA, 121 bp, Homo sapiens
ccggcaccccgcacccgggcacacaaaaaacgggtcgcccgcgattctcagggattgatcgcctcttcaggctctgacgcccgctctgcggcttcggtgtttgaacaggccacagtccagg

SEQ ID NO: 617807 - DNA, 101 bp, Homo sapiens
aggcgcaaacaagccaatcccaggaggaaaaacggcttctggctgtgatgggtcggagattcctgatgaagtgaagctgattgggtttgctcagttgagtg

SEQ ID NO: 617808 - DNA, 83 bp, Homo sapiens
gcgacggcggcggtggcggcttggacgactcggagagccgttcctccgtgtcacaaagcagtacctgccccacgtggcgcgcc

SEQ ID NO: 617809 - DNA, 126 bp, Homo sapiens
ctgagaactactctgacaaatcagatattgaaaatgctgatgaatccagcagcagcatcctaaaacctctcagaggcgatcgagatcggatgacagcaaatcatgaaagctacctcctcatggcaa

SEQ ID NO: 617810 - DNA, 100 bp, Homo sapiens
agtgatcagttccctggaaaagtctagagattctgataagaaatatggctacacacacctttctgcaggagagctgcttcgtgatgaaaggaagaaccca

SEQ ID NO: 617811 - DNA, 100 bp, Homo sapiens
tttgcaacacagtattgaaagggatgaaggtttaaggctcagaaaggtagcacattcggataaacctggatcaacctcaactgcatccttcagagataat

SEQ ID NO: 617812 - DNA, 101 bp, Homo sapiens
ctttacttacaacttttttttttttataaaggaacttacctccatctgtcttttcaagacaggggcaagtgtccgagtggtgaatcagctacttacagaga

SEQ ID NO: 617813 - DNA, 82 bp, Homo sapiens
gtcattttactgtcaagacatttcttcggcattctgcaacaggtttttagaacttcagccataaaaatgggcagaattttcc

SEQ ID NO: 617814 - DNA, 90 bp, Homo sapiens
ggcgagaggcggcgccgctcccaagatgtcgcagacggccatgtccgaaacctacgctcgttctccgaaaatggtgtgaattgattcctg

SEQ ID NO: 617815 - DNA, 83 bp, Homo sapiens
ctttggatcagacttttgtgttgcagttcgggcttcactgtataaataggagaggatgagagcccagaggtaacagaacagct

SEQ ID NO: 617816 - DNA, 96 bp, Homo sapiens
ctgaaactggttggtgaagaaggatttgtagtgatcctgccatgaagcagtttctgctgtacttggatgagtccaatgccctggggaagaagttca

SEQ ID NO: 617817 - DNA, 49 bp, Homo sapiens
cctggatgtcttggccagcaagaagagacaaggtctcgccatgttgcct

SEQ ID NO: 617818 - DNA, 98 bp, Homo sapiens
aaaaacatatccgagggtgtcctgttacttccaagtcatcaccagaaagattctttcagtgacctgtatagttcctatgtaatcttttacttcctgct

SEQ ID NO: 617819 - DNA, 75 bp, Homo sapiens
gatggggattctagaagcagttcggttatacctgggttgtctttgaagcttggtgatgctggaaaccccagaagt

SEQ ID NO: 617820 - DNA, 75 bp, Homo sapiens
cccttctctattacctcaccttggcatcgacaggcgataggaagaactatgcctctgccaagctttctgagttgc

SEQ ID NO: 617821 - DNA, 75 bp, Homo sapiens
tcacggccgggacactcagggcaggatgaagcctgctgggagcgtgaatgacatggccctggatgccttcgactt

SEQ ID NO: 617822 - DNA, 90 bp, Homo sapiens
gactgaagtcgcccgtgggggctgagcccgccgtctacccgtggccgctgccggtctacgtttggtgcacctcgatttggaggaagtagg

SEQ ID NO: 617823 - DNA, 134 bp, Homo sapiens
agcgagaggatggtcatccgcgtgttcatcgcctcttcctcgggcttcgtggcggcctatggcatgtctgcgttacctttaaatctgataaaaggcactagaagcgctgcttatgaacgtttggaaaacactga

SEQ ID NO: 617824 - DNA, 100 bp, Homo sapiens
ccggcctagcctggcggagctccacgacgagctggaaaagaccccaagactgcttctgagacagaaacagatatctgtgctgaatgggagataaagacca

SEQ ID NO: 617825 - DNA, 49 bp, Homo sapiens
cagaattcaattaaagtggctcagtttggatttaggtggcgagtagaaa

SEQ ID NO: 617826 - DNA, 75 bp, Homo sapiens
ctggagtccaacaaggaaggaactcgtgggggcttatttggcctccccaggatggactggagcatcagtagtgcc

SEQ ID NO: 617827 - DNA, 74 bp, Homo sapiens
acgcctttcccggagagtacatccccaccgtaactgctggatttggttctcattggtccagacgaggaaggtat

SEQ ID NO: 617828 - DNA, 90 bp, Homo sapiens
aggttcagtggacgctgggagccattctatataaaacacgattcttaccactcagttggggaatggcggtcaatgtgtattctacctcga

SEQ ID NO: 617829 - DNA, 101 bp, Homo sapiens
ccattcttccaatagttctcccataggaaaaagtgttaaaacttctcctactacacaatctaaggacagaactgtaccgctctctttttggccagctccac

SEQ ID NO: 617830 - DNA, 90 bp, Homo sapiens
tctgaatctgcttacagatgcatgcttcaagcttttcgctgtggcctgcagtttttaggcaacattgcctcacggaatgaagattcccag

SEQ ID NO: 617831 - DNA, 51 bp, Homo sapiens
gcctactgagcagcctgagtgggtttggtgcacctcgatttggaggaagta

SEQ ID NO: 617832 - DNA, 75 bp, Homo sapiens
tttggttggtggaggctgtggcaatggaacaggcttgagaaacagattggatttgtcctgtatccccccagtgga

SEQ ID NO: 617833 - DNA, 90 bp, Homo sapiens
aagtcggggccctacaagcagtctacgagcttgagagaattctgaacaggagcatctgttaagaacatcttcagccagccggcctgcttc

SEQ ID NO: 617834 - DNA, 100 bp, Homo sapiens
ccggcttctgctgttgctcttctccgccgcggcactgatccccacaggtcccagtagggatggcacaatcagcgaggacaccatccgagcctctctcatc

SEQ ID NO: 617835 - DNA, 100 bp, Homo sapiens
cttccttgctactgcagaacttgcaggaacagagtttgtagctggaagaggtgaaaaacttcatcacccgagagaacctggaggcacgggtggaagcagc

SEQ ID NO: 617836 - DNA, 87 bp, Homo sapiens
tggaacagggctgcacacctttctgctttatctggtggagccgccaccaaaatgcagattttcgtgaaaacccttacggggaagacc

SEQ ID NO: 617837 - DNA, 101 bp, Homo sapiens
ggctggtgcccatcgggcgctgcatgtgcaaagcaggcttcgaggccgttgagaatggcaccgtctgccgaggtgaaaaactgcaatggtttcaaaatcat

SEQ ID NO: 617838 - DNA, 100 bp, Homo sapiens
tgacatcctctggattaacaaaccattgccatgtaccgagaaccatctttgcatgatgttggggaaacggtcccgaagcctggggtgacgccaagtaaaa

SEQ ID NO: 617839 - DNA, 100 bp, Homo sapiens
attgtcatcatgtaatagccagacatgagtatacattcagtatcatggatgaatttcagacttcctctgctaaattacctcgctgccgacagggaggctg

SEQ ID NO: 617840 - DNA, 75 bp, Homo sapiens
cagcagctaaggatattttgtgcaggaatatacagatgttgccacaggaatctaatctgaaatcgtacaaatgga

SEQ ID NO: 617841 - DNA, 100 bp, Homo sapiens
gctggagctttgaagccaccccggtcaaaggatgctgagtccggagcgcctagccctaccggactacgagtatctggaagatggcagtgaacgtatactc

SEQ ID NO: 617842 - DNA, 74 bp, Homo sapiens
cctcatgacaaatcatttctatgcagcgatcttgggatatgatgagctgcattaatactacattgtcaaagaca

SEQ ID NO: 617843 - DNA, 100 bp, Homo sapiens
cggtcccctcccacctcgtctgggctcgcggcgtctccggggaaagccgtggccccgagggcggatccgaggtcctaggcctacttacaagcctccagtc

SEQ ID NO: 617844 - DNA, 100 bp, Homo sapiens
atgagtgctctggggtgaagaaatgttgttcgaatgggtgtggacacacctgtcaagtacccaagactctgtacaaagctcctcagtgggtagtgcactt

SEQ ID NO: 617845 - DNA, 98 bp, Homo sapiens
aacgcggtcacggcccagcgcgttcggactaccgaccagactcccggaaatcatgttggtaggatcccagtctttttcgcctggagggcccaatggga

SEQ ID NO: 617846 - DNA, 80 bp, Homo sapiens
acacggccagatctgccctccagtgtcagaaactatttaaaagaagcactggtgaatataattgccgtgcatgcagaggt

SEQ ID NO: 617847 - DNA, 75 bp, Homo sapiens
atcctttaaggcataggttaattgaacattgtgatcacatatctgatgagaatctgtccctctgtacagctgccc

SEQ ID NO: 617848 - DNA, 100 bp, Homo sapiens
caaggccggcttcgcgggcgacgatgccccccgggccgtcttcccctccatcgtggggcgccccaggcaccagggtaatgatggtggcaaagaaattcct

SEQ ID NO: 617849 - DNA, 90 bp, Homo sapiens
aaggagggtctgcggcccctggaggaggtcatgcagaaatacatcagatacagaatttccgctgcctgtgcactcatgaaaagggctttg

SEQ ID NO: 617850 - DNA, 83 bp, Homo sapiens
cctggttgagggtctccagggttctttggggcccgaggaagactatgaccgtctgaggcctttatcttacccaatgaccgatg

SEQ ID NO: 617851 - DNA, 100 bp, Homo sapiens
cgctctgcttcgacaaggacgagttcatgaaggctgcaagaaagcgtaagattgccattcgaaaagcccaggggaaaaatgtggaggccattcgggagct

SEQ ID NO: 617852 - DNA, 75 bp, Homo sapiens
atcaacgttatccccacctctgatgattcctcagagacctgtcggccatggagcctaatgatagtaccagtaccg

SEQ ID NO: 617853 - DNA, 112 bp, Homo sapiens
tctgaaaagaaaagtaagaacaaacaaagaaacactggagatattcagaagtgcaagtgaaagtgtaggaaaacatatgcttgaagcgtgcaacaataatctggaaatggca

SEQ ID NO: 617854 - DNA, 82 bp, Homo sapiens
ggacaaactgatccagagcattgtcagacagggctctctaaatacgtacagattctgcgataatgtgtggacttttgtactg

SEQ ID NO: 617855 - DNA, 74 bp, Homo sapiens
gtcggagactttgccatcttggtccagtctggctgcagcaaaaagcagagagagcaggagattcggatgggtca

SEQ ID NO: 617856 - DNA, 73 bp, Homo sapiens
agagagctaacaagaggccagtggccaggttttgatggtacagtccaggtctatgatgccacatcttgggatg

SEQ ID NO: 617857 - DNA, 82 bp, Homo sapiens
gagagcaagaccatcatgctgcgcggccttcccatcaccatcacagagagcgatttgccaccttccagagaagaggtacgag

SEQ ID NO: 617858 - DNA, 50 bp, Homo sapiens
ctggaatcagaaagcactacgctaactcgagagctagccttgcagcagga

SEQ ID NO: 617859 - DNA, 75 bp, Homo sapiens
ggcggacagtgcggaactaaagataggaaccaaggctttagccttctcaactcattgactggaacaaaccatagc

SEQ ID NO: 617860 - DNA, 75 bp, Homo sapiens
gaagaattcgggaaaagcaacgtggggcattccaggttagagccacagctgaaacaactacaaacaaaatatgat

SEQ ID NO: 617861 - DNA, 101 bp, Homo sapiens
tgaatggattcaagacttcaaaacccattttcttgcaggggaaatgctgtctgtagctgagcacttcctggagcagcagatgcacccaacagtggtgatca

SEQ ID NO: 617862 - DNA, 82 bp, Homo sapiens
gccaagaagaacttaagcgaggccctgggggacaacgtgaaacaagagtaatgccttctagctttttcctgctgttgcggtt

SEQ ID NO: 617863 - DNA, 75 bp, Homo sapiens
cgcggccctggcgcccgccctgcgcactcaccatggcgaatcttctgctgactctcaacttttcctggaaaaaat

SEQ ID NO: 617864 - DNA, 76 bp, Homo sapiens
actctccagtgtaatgattattgacaacaggcatcaagcatgatggaaccatgtgtgatacctgccgccagcaacc

SEQ ID NO: 617865 - DNA, 50 bp, Homo sapiens
aggccgaggactcggagttcacctgcagatacccagaaagcggtactcta

SEQ ID NO: 617866 - DNA, 90 bp, Homo sapiens
ccacaggatgctgtagtagcaaatcaggaacttagtgatttggcccgtgaccctccagcacaatgttctgcaggtccagttggggatgat

SEQ ID NO: 617867 - DNA, 83 bp, Homo sapiens
cagaagagatggatattgaaatggacagtggagatgaagcctaagaatatgatcaggacagtctccgtaagaaggatgacagg

SEQ ID NO: 617868 - DNA, 75 bp, Homo sapiens
gggcgtccgagtcaacaaccgcttcgagctgcttgccttgcgccatggactggcagccagacgagcagggcctgc

SEQ ID NO: 617869 - DNA, 82 bp, Homo sapiens
gtctctggctccctcctcccagggccaggcgccgctcagaacgaagaaacattcatggtgtctcaagagaaaaaatccaccg

SEQ ID NO: 617870 - DNA, 48 bp, Homo sapiens
aataaaatagaacttccaactactggcatctccttggaaacaatgcca

SEQ ID NO: 617871 - DNA, 98 bp, Homo sapiens
caagaagggccttactccttcacagatcgatgccccttggtgtggccactgcaaggctctggcccctgagtatgccaaagccgctgggaagctgaagg

SEQ ID NO: 617872 - DNA, 100 bp, Homo sapiens
cccttttgtgcctgaccctactggagcccagcattacatcaacatgcccgtgcagttcaaaccgaagtccgcaggcaaatttgaagctttgcttgtcatt

SEQ ID NO: 617873 - DNA, 75 bp, Homo sapiens
ttgccctcagtgaaggagatattcacactttggtggacattgaagtggacctaattcggttttccttttaaaagc

SEQ ID NO: 617874 - DNA, 100 bp, Homo sapiens
ctcagttggaagcagccgatccagcctgcggagcctgtggggcagtttggcaatgaggagcagcagctggcgtgggccaagcgggagagcgagaaggcgg

SEQ ID NO: 617875 - DNA, 100 bp, Homo sapiens
aaaacaaaaactgatgaccaagagaatgtgtcagccgatgcaccgagtccagcccaggaaaatggagaggtattcctggagtggagagccactctttttg

SEQ ID NO: 617876 - DNA, 101 bp, Homo sapiens
agctaaaccagatggcatcaaacagtgaaatacaggcctggctttcagacttgatcatggaagggaagtggttgctgtgtatgttactggtgcttggaact

SEQ ID NO: 617877 - DNA, 97 bp, Homo sapiens
cgaaaagaactagagccgcatcacatggggacttctgcaaatacagagactcggattaaaggctcttaaagactctgaccaagtagcacagagtgat

SEQ ID NO: 617878 - DNA, 100 bp, Homo sapiens
ctgggcctcggcgggtcactcttgccggccggcttcgctgcgggtttgcactgcccggaagcatcaagtgtacctgatttgtgaacctatcttgcttcag

SEQ ID NO: 617879 - DNA, 75 bp, Homo sapiens
cattggaccacacaaagtcttactggtgctggagaatctggtaaaagcaccattgtgaagcagatgaggatcctg

SEQ ID NO: 617880 - DNA, 82 bp, Homo sapiens
cttttcatgagcatacctctaagtcgaaaggatgcattttttcagaacggcccgggatgttggacttcacgggcaaggccaa

SEQ ID NO: 617881 - DNA, 90 bp, Homo sapiens
gcgccgcgccctcggcctgcacggggaagtgcggctccttcgaagacaaacaaaaacatctttggaagtttctttgctagaaaaatatcc

SEQ ID NO: 617882 - DNA, 100 bp, Homo sapiens
caggtatcctcggaaacggtttgtggctggagtaggagcaaacagcaacaatggccaatgtacatggtggactatgccggcctgaacgtgcagctcccgg

SEQ ID NO: 617883 - DNA, 85 bp, Homo sapiens
gcaatgctgacctcggtttcctggacccattccgactcagttctttattggtgaaaacatgaatccagatggcatggttgctcta

SEQ ID NO: 617884 - DNA, 82 bp, Homo sapiens
gaattcgtgtgttgtacagacccttaagataacgaaggaggcccaacttcattcaataaggagcctgacggatttatcccag

SEQ ID NO: 617885 - DNA, 75 bp, Homo sapiens
gcctcccaaatagctgggactacaggtttttaatgaagataccagatccttggagatttctcaatcttacactac

SEQ ID NO: 617886 - DNA, 116 bp, Homo sapiens
gagagatacctgattgaaattgcaaagaattacaacgtaccctatgaacctgactctgtggtcatgggtgtccgcaatgttgccagtgtctgtctgcagattggctacccaactgt

SEQ ID NO: 617887 - DNA, 100 bp, Homo sapiens
cgctgtctgcccattgatagaggccagattgtcttggaagttccaaagttgcaacgatttctctattgcagatcccaaccccctgctagactaataagtg

SEQ ID NO: 617888 - DNA, 111 bp, Homo sapiens
cttattagatgaccctaattcagaaaagaagaagaagagggatactcccatgctgccaaagatggtgttatctgaaaaggttagtcagctgatggaatggactaacaaaag

SEQ ID NO: 617889 - DNA, 75 bp, Homo sapiens
aagattatttgcaacagctcacgggagcaagaacggttaagtgacccctgttcaagccgatgggatgaaagaagc

SEQ ID NO: 617890 - DNA, 100 bp, Homo sapiens
tggaattgcattacaacatggcagtccttaccgagatgttttttcacaaagcaaagttttgtggtgaccctggtatacctgcccaaggaaaaagagaagg

SEQ ID NO: 617891 - DNA, 98 bp, Homo sapiens
gcgaaagccatggagttgagctgcagcgaagcacctctttacgtgatgtgccttcaggacttttttggtgatgatgacatttttattgcatgtggacc

SEQ ID NO: 617892 - DNA, 75 bp, Homo sapiens
tcttcctccagcattcacaaaccaggaacggctagctttttgacctgtatcattgcccagtgcctaagatctttt

SEQ ID NO: 617893 - DNA, 51 bp, Homo sapiens
aaccaaggcagttggtggaaatgagccctttcttttcagaagacacattta

SEQ ID NO: 617894 - DNA, 115 bp, Homo sapiens
tgagtaaaataccttcaagcgaatgggccctattgtgctcacacattcagaacctgttacccaaggaattccctaaaggctagtgtgagaaacaccaacagcaggcccatctcag

SEQ ID NO: 617895 - DNA, 90 bp, Homo sapiens
cggagctgaaggagcagagcgtggactgccgggcaggatggttcgtggagacccaagggccattgtggaatatcgggacctggatgcccc

SEQ ID NO: 617896 - DNA, 100 bp, Homo sapiens
ttggaagagggagtcaccactggacctccaaggaagccacgtgcagacatctacaaccttcgatctcctgacgagaaaatgttggggcttttcaggaagc

SEQ ID NO: 617897 - DNA, 98 bp, Homo sapiens
gctggggaaatttcccacttcctctcctgagaccaggaactcagcagagaaactttgtggccttcctgatgcgcttgcctgctccctggtctctctgc

SEQ ID NO: 617898 - DNA, 100 bp, Homo sapiens
tcatgaaaactcaccagatcaacagcaacctgaggagcataggccaaaaataggactaagtcttaaactgggaattaggaccacaggatctacacagtcg

SEQ ID NO: 617899 - DNA, 101 bp, Homo sapiens
cgcgacgttgaggccgcgttgggcggttcagactcagggtgtttttgaaatcatgaatcctgtttatagtcctggatcttctggggttccctatgcaaatg

SEQ ID NO: 617900 - DNA, 80 bp, Homo sapiens
ggcggaagaaaatacaaatcacacgcataatggatgaaaggaaccgacagatggggacattggttttggacctttacaac

SEQ ID NO: 617901 - DNA, 101 bp, Homo sapiens
cgggagagtgtgcagccgagtcactactgcctgcctgcctgcctgctacggtgaaaggtgtagcagtcactcggcctacacccacagcatcgaccttgtga

SEQ ID NO: 617902 - DNA, 98 bp, Homo sapiens
tgtcgctcttgtgccctagcaccccgagaaccgtcagtttgagccagatggtttttcccactcggctttcacgtttgggattgagagccacatcagcc

SEQ ID NO: 617903 - DNA, 100 bp, Homo sapiens
tgcaggaacaccgtcacgctgctggaggagggcagactttgacgacactgcgacatactcagcagtggccaccaatgcccacggacaagtgtccaccaac

SEQ ID NO: 617904 - DNA, 80 bp, Homo sapiens
agctcagggaggcagcagtggcagtccatcgaggggaccaaactctccatcacccaggctcgagctgtaaaagccaaagg

SEQ ID NO: 617905 - DNA, 98 bp, Homo sapiens
atcagctggggctggatgagtatcgtaaaaaggaccttgtaaaactacaggcaggggaatatgtttctcttgggaaagtagaggcagctttgaagaat

SEQ ID NO: 617906 - DNA, 80 bp, Homo sapiens
gaagggaaggcgcgagtgaggaaaggaggtactgtagggtgaggtggctttgaccccgggttgcccggccagcacgaccg

SEQ ID NO: 617907 - DNA, 83 bp, Homo sapiens
ctgctgcgagccggcggcccggagtggggcggcgggctccctggggaagggaatgcagggttgctggggctgggcccagaagc

SEQ ID NO: 617908 - DNA, 100 bp, Homo sapiens
cgccaccctgcgctgccgccgctctgaggagttaaagaatggtagataacgcagatcatctctggaaaggatattgatccgcctcatgtaaagtatgctt

SEQ ID NO: 617909 - DNA, 74 bp, Homo sapiens
cgatcctcgcgtgagacagatcaagatcaagaccggcgtggtgaagcgacttatgaaaatatgcatcagtttaa

SEQ ID NO: 617910 - DNA, 100 bp, Homo sapiens
ctggaacaaggagaagaaccatggagactggaggaagaattcccaagccagagctttccagattctggaacttttcaaagcctgactctcttcttgaaac

SEQ ID NO: 617911 - DNA, 75 bp, Homo sapiens
attcacttgtgtgcggaactcctcggaaccatggttttatgacttacctagtggagcctttatttacagaatggg

SEQ ID NO: 617912 - DNA, 83 bp, Homo sapiens
tttcaaccataaagacatcttaattgggcacgaaagaggagaactcctggaagccccgtcttcctcctcatgcccattgcctg

SEQ ID NO: 617913 - DNA, 131 bp, Homo sapiens
gtttgcctgaatccatcattgcagctgcatgttcaagaagtggccggagagttctgcatgttgattcactattgggaagaagttacctgcaactacagcaactccagactcatcaaaaacagaaatggaca

SEQ ID NO: 617914 - DNA, 80 bp, Homo sapiens
agcggcggcacctgccggccgaggaattagcagttcacaaagcacattcgcatataagggcttgttttgaattgatcttg

SEQ ID NO: 617915 - DNA, 76 bp, Homo sapiens
tcttgaactggtgctgtctgggcttcatagcattcgcctactccgtgaagctgcccaaactccaaaatgatggtag

SEQ ID NO: 617916 - DNA, 96 bp, Homo sapiens
cttcacagcacagttcctgggaaggtggagccaccagcctctccctgtgtaaacaggaacatcgataagtagtgtaaaaacttgcacaatgaaatc

SEQ ID NO: 617917 - DNA, 75 bp, Homo sapiens
gtacacttgctctttctgtggcaaagtccaacctaaacatgtgaaggaagctttccggttactgaataaatcaat

SEQ ID NO: 617918 - DNA, 130 bp, Homo sapiens
gagagagctctcacatctgtgacttcatccgaaaaacactgaatgctggggcgtactccaaagttgttcaggaacggttcaaaaaggcatttgaatctgagccaacactacagtcaggaattaattatgc

SEQ ID NO: 617919 - DNA, 100 bp, Homo sapiens
ctgagctggcagtacctgaccactctctcccagcagaagatggctgtgccacccacgtatgccgatcttggcaaatctgccagggatgtcttcaccaagg

SEQ ID NO: 617920 - DNA, 100 bp, Homo sapiens
cgatgagctgcgggacaagctgctggagcgagtgtcagccatcgcttcggaggggaaggctgaggaaagggtgaggacgcttgagcggaagttagaagca

SEQ ID NO: 617921 - DNA, 90 bp, Homo sapiens
ggaccggacccagagaagaggaaaactctaccggtgcagcttgcccaacagaaggtggaaaaaatcactgaaagtaaaaataaactggcc

SEQ ID NO: 617922 - DNA, 100 bp, Homo sapiens
tggcctgcctggtgagagaggtcgccctggagcccctggccctgctggtgctcctggtgctgtaggtgcccctggtcctgctggagccacaggtgaccgg

SEQ ID NO: 617923 - DNA, 51 bp, Homo sapiens
atggaggacgagatgcccaagactctgatctaccgctaccagtctcatgac

SEQ ID NO: 617924 - DNA, 100 bp, Homo sapiens
acccctcagagcaggagaagctgagcctttctggacagaccaacctgtcagtgctgcaagccaaacgtaccaagaaagtcgggatcgtcggtaaatacgg

SEQ ID NO: 617925 - DNA, 98 bp, Homo sapiens
tcaaatgtcagcaagaagccgaagtgaccgcagtcaccatctcccttgccaaccgcctgacctgtggatgaagagccagagtcctctgaggtcgatgc

SEQ ID NO: 617926 - DNA, 51 bp, Homo sapiens
agctgctgcagaaaagctgtttggtgcccagcagaggagcacgcagctgaa

SEQ ID NO: 617927 - DNA, 100 bp, Homo sapiens
gagctttcgccaaagagcttttcctaggcaaaatcaagaaggagataaatctccccctaaacttgaaccatcagatgcattacctcttccttcaaactcg

SEQ ID NO: 617928 - DNA, 93 bp, Homo sapiens
gttccagaatgtcatgacctacctcaccagcatccccagacaatgcagatcttcgtgaagactctgactggtaagaccatcaccctcgaggtt

SEQ ID NO: 617929 - DNA, 99 bp, Homo sapiens
ggaagaaaagatagttgcttattcctctattgctgcaaaaaatgcagaactagaacaggagcttatggcagcggcaaaagtagtagaaagcaaaaggac

SEQ ID NO: 617930 - DNA, 83 bp, Homo sapiens
cgctgctcctgctctgctacctggtcctgggaactccaacaagggagcaaatcagagaaatgaacccaaactacacagaattt

SEQ ID NO: 617931 - DNA, 100 bp, Homo sapiens
gcagatgtgatctgcgctaggtggcatctcctctcacggatgcctcgggttatgatgatggctacgggggtgaatatgatgaccagacctatgagactta

SEQ ID NO: 617932 - DNA, 75 bp, Homo sapiens
tctggaccccaatggcaaaacctgcagccaaactggcgatggaatatgagaggagccctctggaaagaaaaggac

SEQ ID NO: 617933 - DNA, 72 bp, Homo sapiens
aggaggaggaggagaaaattcccccagattcgggcaggtgaaagcccagcctccgtggttcttaatgcctca

SEQ ID NO: 617934 - DNA, 75 bp, Homo sapiens
caggcgtgcgcggacggtgtgcggaaaatgtttcgatgaaagatcctccggacttattggacaggcagaaatgcc

SEQ ID NO: 617935 - DNA, 85 bp, Homo sapiens
caatggaaaggggatcctggctgcagatgaatctgtaggtaccggggagaccaggatgccactatgtctatattggacatatcca

SEQ ID NO: 617936 - DNA, 100 bp, Homo sapiens
cgagaaccgtttggcaatatgtacgacgcggatgagggttttcaaatggaacattttgatgcatcacttagtacctatttcaaggcattgctaggccctc

SEQ ID NO: 617937 - DNA, 98 bp, Homo sapiens
cggctggctacaccccgacgccagggtcctggggcccggggtctcctacgtcgtgcggcttgctgagcgagagcgagaagcggcccttcgtggaggag

SEQ ID NO: 617938 - DNA, 100 bp, Homo sapiens
aaataatccagagatttccacagaaggactgggatgatacaccttttccacagggaattgagttgatttgcaaactttatggcctattttggccttaatc

SEQ ID NO: 617939 - DNA, 75 bp, Homo sapiens
ccgagaccgcggccgggaccgagggaaaactactttggggaagatgacatgtatatggattttgaagaggttatc

SEQ ID NO: 617940 - DNA, 100 bp, Homo sapiens
gtgggctggaggaacagaagcggaacagccacagcagcctcccaaggagtctgcaagttggatgaatttcacccattcatcgaggcacttcttccacatg

SEQ ID NO: 617941 - DNA, 90 bp, Homo sapiens
ggggggagcggcgttggaggccaccgtttccagtggactcccgaaaaattgaccaggaagggaaaatcccagatgaaactttggagaaat

SEQ ID NO: 617942 - DNA, 50 bp, Homo sapiens
gccacacagaccagaacggcagcctggagatttgaaaaagagaattgaat

SEQ ID NO: 617943 - DNA, 100 bp, Homo sapiens
gactcaagcgatcctcccaccacctcagcctcctgagtagctggaaccatcatatgcaccagcacgcctggctaacattacagacatctttagttttttc

SEQ ID NO: 617944 - DNA, 100 bp, Homo sapiens
cgaccctcacagaagctgctgaaattcctgaataagcactacaatctggagaccacagtcccacagctaaacctattcgtcccgggcaacatccagcagc

SEQ ID NO: 617945 - DNA, 100 bp, Homo sapiens
gggacctattgttcagttacaagagaaactttatgtgcctgtaaaagaatacccagatgatttggagttccatggagtgatgagattttattttcaagat

SEQ ID NO: 617946 - DNA, 100 bp, Homo sapiens
gaggaggactcagcagaggcagagcgcctcaaaaccgaagcaacgaaaaatctgtctgatgcatgtaaaccactgaagaagcgaaatcgggcttccacgg

SEQ ID NO: 617947 - DNA, 83 bp, Homo sapiens
cacaggcccatcgacatcctggagatgctgagcagagccaaggatgagtatgagagggtaactataactacccaatattgcag

SEQ ID NO: 617948 - DNA, 107 bp, Homo sapiens
cccgtctgagaagtgaggagcccctccgcccggcagctgccccgtctgagaaactgcagccagcggagcccgcagccggcccgagccaggaacccaggtccggagcc

SEQ ID NO: 617949 - DNA, 80 bp, Homo sapiens
tgcaagtgttaaattgtgtgccttttgttcctgaagaaagagtgtgtgttttaatagaaaagttgtcactttccaaaatg

SEQ ID NO: 617950 - DNA, 75 bp, Homo sapiens
catttggctttgcctttctggacacagaagtatttgtgacagaattttccagttcatatgaagaggtgatctctc

SEQ ID NO: 617951 - DNA, 100 bp, Homo sapiens
ggaaaatgctgggcaaccccagccggctgcctgctaagtgccctggcaagggtgcctggaactcgccgtgtgtgtgtcagagaatgttgctcctgtgccc

SEQ ID NO: 617952 - DNA, 100 bp, Homo sapiens
agccgatccagcctgcggagcctgtggggcagaatctatctaccgccggggagccagaagatggaggaagctgtaccgtgccaacggccacctcttccaa

SEQ ID NO: 617953 - DNA, 101 bp, Homo sapiens
ggcatggtggctcaaattgatgctaactggaacttcctggtcctgctcaggttccaatgatgtccccaaatggttctgtgcctcctatctatgtgcctcct

SEQ ID NO: 617954 - DNA, 96 bp, Homo sapiens
gctaaaactggtcaaagtgctgactctggtaccattaaggcaaaattgacttcacagagaatgcagttgtcttgacttcaggtctgtctgttctgt

SEQ ID NO: 617955 - DNA, 100 bp, Homo sapiens
ttactgaagtgaaatatcaaaatcctcactatggatgggctcattgaggacattaagcatcggcggtattatgagaagccatgccgccggcgacagaggg

SEQ ID NO: 617956 - DNA, 100 bp, Homo sapiens
ttgtaaattgagctctgcacgctggggagtttgttggggacttggagaaccagatgcatatagcggagcagcggaggagaaccctgctgaaagatttcca

SEQ ID NO: 617957 - DNA, 50 bp, Homo sapiens
cttcactttcctcggcaagaaatgtgtgtatatctctctaccgggggaat

SEQ ID NO: 617958 - DNA, 97 bp, Homo sapiens
ccaggtgctgcggacgtggtgcgggctgcaggacgtgtaccaggaacttacaatgtctcagaaaaatggtgggaatgttcttcagatgatgtatgag

SEQ ID NO: 617959 - DNA, 100 bp, Homo sapiens
atcaacttcaaggacattcaggtcattgtgaatgatattggctccaataattgtggatactatgacttacaagcagtactaacacaccagggaaggtcta

SEQ ID NO: 617960 - DNA, 75 bp, Homo sapiens
ttccagagtctgctggacgcccaggcggacgaggccgtgttaggtattttggcctctccccagtctgctcctgga

SEQ ID NO: 617961 - DNA, 100 bp, Homo sapiens
cccgctccgaggactacgtggagctggtgcagcggaagcgagtgtgtggggatattcagctttgccaggtatggcagtgatttttatagcatgcactata

SEQ ID NO: 617962 - DNA, 90 bp, Homo sapiens
ggaaggaggaggaataatatttatggagcatatattatggaacacagtgaagaacaaattggttttgagctagtggagaaattatttcaa

SEQ ID NO: 617963 - DNA, 93 bp, Homo sapiens
gccaccctgcggtggattgactacggcaaagtggccactcagggtcctggcggcagagaccacgtcccagcaggagcggctgcaggccatcgc

SEQ ID NO: 617964 - DNA, 100 bp, Homo sapiens
gagcctgccgccaagatgccggcctattttcagaggccggaaaatgccctcaaacgcgccaacggccttgaaaagaggatagaccaggctgtggaggagt

SEQ ID NO: 617965 - DNA, 83 bp, Homo sapiens
gttcccaacccccaaggggaagtgcatcagagtggatggcctccccagccccaaaattgcacctggacttgatatgaaagtaa

SEQ ID NO: 617966 - DNA, 83 bp, Homo sapiens
ctatagtgggaagcagacccatgaggttaagaatagacccaccagcatttcgtgggatggtcttgattcagggaagctctaca

SEQ ID NO: 617967 - DNA, 75 bp, Homo sapiens
taggagacatggacgaagccttcaaatccatcaagctcatcaaaagtcaccacgttctgcgcttttccgagtcgg

SEQ ID NO: 617968 - DNA, 100 bp, Homo sapiens
accattgttcagctgggtggccaaggtatatgactgatgggatgttacttcgtgaagctatgaatgatcccctcctggagcgttatggtgtaataattct

SEQ ID NO: 617969 - DNA, 100 bp, Homo sapiens
gtgtactgtgacatgcgcacggacggcggcggctggacggtgagtgtcccagcccggggcgcggtagcgccgccaagcggaagaagaagcagcggcggaa

SEQ ID NO: 617970 - DNA, 96 bp, Homo sapiens
accggggacgccagcaagtgcactgtcacagatgcagaggccgtgaagaaggcagccttggaaaagaaggaggaggagctggtgagcgagcgcaca

SEQ ID NO: 617971 - DNA, 98 bp, Homo sapiens
gcggctgcggcacatcgggcctgaggagtttgtccaggcctttgtgaacaaggaccctctggccagcacaaagacaatgcctgtggaagacaagtcag

SEQ ID NO: 617972 - DNA, 98 bp, Homo sapiens
tgtgatccctcaagactggtccacggagtgtatgaccacaaacagccatcaagacagggtcttggtggcgcatacctgtcttggtggcacgcacctgt

SEQ ID NO: 617973 - DNA, 90 bp, Homo sapiens
ctgtcccagaattcagctataaagcagttcaaactggaaacaagatggatgatgtgtcaagaagactaacagctgaaggaaaagacatag

SEQ ID NO: 617974 - DNA, 89 bp, Homo sapiens
ggataggagaaggatgtggactgcagtgctgcagtgccagggatctaccgaacagaaagggacaaagggacattgtatgagctcacctt

SEQ ID NO: 617975 - DNA, 88 bp, Homo sapiens
cagagctgaggtacttcgtgaagcactctacacccccaagtgcatatgggtctgtcaaagcctatactaactttgatgctgagcggga

SEQ ID NO: 617976 - DNA, 75 bp, Homo sapiens
atgagagtgttctaatggtcagcatcgatcaattattggtttaccgacaagactgtgaaactttcgggatggtgg

SEQ ID NO: 617977 - DNA, 90 bp, Homo sapiens
ctcataataattcagatggagaatatatggctggacagctagctgcttatggctataaaattacaggtcacactagacacaaagtggaag

SEQ ID NO: 617978 - DNA, 98 bp, Homo sapiens
gtgcctgcacctcggccgtcccggcgcccctggggacgccgccctcccgggccccagggagcgccatggcccgcgcacgccaggagggcagctccccg

SEQ ID NO: 617979 - DNA, 82 bp, Homo sapiens
caggagttcgtctcttacgtctgcggaagtgcagctgcctcagttcttagcgcaggaacgaatgacctgaagatccttccag

SEQ ID NO: 617980 - DNA, 100 bp, Homo sapiens
gtctgagactcctgctcagtgtagcattaagtctcggaagggtgctgacctggaccgggagaagaaggctgccgagtgcaaggtggacagcatcgggagc

SEQ ID NO: 617981 - DNA, 75 bp, Homo sapiens
gacccgggtgccgaggagcgggaagagttgctgggaccatggtgaatccgggcagcagctcgcagccgcccccgg

SEQ ID NO: 617982 - DNA, 100 bp, Homo sapiens
ctgtcagtggctctcttggccctcctgaaatgggggtgaagccagccagttttgacaaagtagcaattcctgaagtgaaggaaattattgaaggatgcat

SEQ ID NO: 617983 - DNA, 78 bp, Homo sapiens
gcggatgccctgcagtacctgcagaaggtctctggagacatcttcagcagaacaaagtgttcatctaccgcgggaagg

SEQ ID NO: 617984 - DNA, 101 bp, Homo sapiens
gtacagtgttggttcgacaagtggcaacagctggatgaactgcagctttgcaagaattgcttttacttgtcaaatgctcgtcctgacaactggttctgtta

SEQ ID NO: 617985 - DNA, 74 bp, Homo sapiens
cgggcgctggtctgctcccagccgcacttgcacctcctgcgccgccgccccccatccaaggatatgccttcaag

SEQ ID NO: 617986 - DNA, 87 bp, Homo sapiens
aacatcaaattcttgaccaatctagggtggccactaacacggacaccagccgaaatgccggaaatgcggtcctgtttgagacagtac

SEQ ID NO: 617987 - DNA, 90 bp, Homo sapiens
gagggatacagcagtttggtcaatattgtcttaacatgcttcaaataaatcagaaaaggcgacggcggattgacagaagtatgattggag

SEQ ID NO: 617988 - DNA, 50 bp, Homo sapiens
gggtgtctcgtgtgtgaacatcacaggagccttcacgtaaatgggtccag

SEQ ID NO: 617989 - DNA, 100 bp, Homo sapiens
ccctgttccaaagcctcctggaccgtccaagaacaaacggggattcagcgtccgatcctttggaacagggactcacgtgaagcttccaggaccagctccc

SEQ ID NO: 617990 - DNA, 100 bp, Homo sapiens
ggcatgttcatgaaaaagccatacttctagcaattctcccaatgaggtttgcatcgccagcttctatatattacggcctttttttttgctggatattatc

SEQ ID NO: 617991 - DNA, 75 bp, Homo sapiens
aacaaattgtacatttgcccattctcaggaagagcttgaaaagacattgccgagaatggctgcgcccccacccca

SEQ ID NO: 617992 - DNA, 75 bp, Homo sapiens
ccgaactggaatctggatgagcagctcaagcaggtaagaattctctacgcctgtggttttagcgttttgttgacc

SEQ ID NO: 617993 - DNA, 100 bp, Homo sapiens
gaactctttgtctgggtcagtcaagaaccatttccaaacaaggacatggagggaaggcttcctaaggaagccagttgagggaagttctccatgaatgtac

SEQ ID NO: 617994 - DNA, 80 bp, Homo sapiens
gtaccacatgcagctggccaaacaactggctggaatattgcaggtgcctttagaggaatcttcctcttcagtgaatacat

SEQ ID NO: 617995 - DNA, 100 bp, Homo sapiens
acacccaatgaagtattattcagcctaaaaaggaagaaactcctctccgctgcagacaaaatggatgagattgcaggcgatggaagcttgcaaagacgct

SEQ ID NO: 617996 - DNA, 100 bp, Homo sapiens
ttctggtctcaggcaaggtggggactgggcacatcatcaatacgtccctagagcgtccaagatttttggtttcaaaccaatttcctgctgaccagaatga

SEQ ID NO: 617997 - DNA, 74 bp, Homo sapiens
gatcggctccttaccagctcacctctcaccgcgcatgtttggagattttaccaaatgttgcaagaactctggag

SEQ ID NO: 617998 - DNA, 82 bp, Homo sapiens
taccttacccaactctactgctgcttccagaccaagacactggaagaattgtcttaccaagctcttgccctgttttctggag

SEQ ID NO: 617999 - DNA, 80 bp, Homo sapiens
gaccacccgactctcatagaaaacgagagtatatgcgatgagtttgctggcattcctcgttcagtattgaaagattggcg

SEQ ID NO: 618000 - DNA, 89 bp, Homo sapiens
atactccacaggaaatgaaacagaatgacaattctaggtacaacttttggcatggttttttctttacttcaagtcgtttctggagaaag

SEQ ID NO: 618001 - DNA, 50 bp, Homo sapiens
tgaccgagaccgcggccgggaccgaggagatggctccgaagtcaaaaaag

SEQ ID NO: 618002 - DNA, 100 bp, Homo sapiens
cccaaacaactggcagaatttgctagctcctgcctgaagagtcactaagtgtcttttctcaagaatgtcataaacaagccatgcaaggtttcaagctcta

SEQ ID NO: 618003 - DNA, 100 bp, Homo sapiens
cctcaaggccatgatcaaaacgaggcgcatgaagcgtgtctgggaccgagctgtggagttcctggcctccaacgaatcccggatccagacggagtcccac

SEQ ID NO: 618004 - DNA, 100 bp, Homo sapiens
acgtgatgctggagaacctgacacttatatcttctctagatgggaaagggctccttcaagtatgcctgggtcttggataaactgaaagctgagcgtgaac

SEQ ID NO: 618005 - DNA, 90 bp, Homo sapiens
gtggaatcctccctcagttcctgcagaaacagtagtagcactgtgtcatacctgaaaaagttggctggatctattattggcaaaggtggt

SEQ ID NO: 618006 - DNA, 100 bp, Homo sapiens
cttggatgttcttggacttgacggtgtggatgaggtcaccattgtcaacattttgaccaaccgcagcaatgcacagagacaggatattgccttcgcctac

SEQ ID NO: 618007 - DNA, 97 bp, Homo sapiens
acctctccagctcgccctctgagcctcccgagccctctctccatttcccacaattgtgctgagcagcccgacggccatggaggctgaagagacgatg

SEQ ID NO: 618008 - DNA, 75 bp, Homo sapiens
gacgagggcgccgccgcggccgccccagtacaaggcgagtggataattccaacacaagactggcagtccaaattg

SEQ ID NO: 618009 - DNA, 113 bp, Homo sapiens
tgaggatgaagattcaccaaataagctatatactttggttacctatgtacctgttaccactttcaaaacaaaccagtccagctacgggggcccagccagccagcagctgagtg

SEQ ID NO: 618010 - DNA, 101 bp, Homo sapiens
cgagtgcagccactcggccctgcgccgcgacaagtacgtggccgagttcctcgagtggggtggagttggcatgaacttaacagcagcagatactgtgattt

SEQ ID NO: 618011 - DNA, 100 bp, Homo sapiens
gcagactcagactggccaaaattcaatccctgctttagctcagtttttcagaagaagtgaagtcaagatgaagaaccatttgcttttctggggagtcctg

SEQ ID NO: 618012 - DNA, 82 bp, Homo sapiens
ctgcagcccgagcgcggtggtgccctcagccccgtcctcttgtcctcctcagcctcggccaccagcttgggctccccacgga

SEQ ID NO: 618013 - DNA, 97 bp, Homo sapiens
tccgcagaatttctgaaggtgttcattccatctctcttcctttctcatgttttggctttggggctagggggttccagaaactttagcagttgcagtg

SEQ ID NO: 618014 - DNA, 73 bp, Homo sapiens
agaccaagtcctcgctggactgctcagggtgccagacctcatcaacctatctacaagacctcttgtgctttga

SEQ ID NO: 618015 - DNA, 100 bp, Homo sapiens
ggatgtttccaaagtcctgctaggccctctctctccctacacaacattaaccaggtggtatttgttggaaatttcttgagaattaatacgatcgccatgc

SEQ ID NO: 618016 - DNA, 100 bp, Homo sapiens
ctcaggctgcatcaggatgaatgatgacccaagtatggaagtccctccttgtggtccatttctgggcaccatgggctccacagtgtgcacagatgaacga

SEQ ID NO: 618017 - DNA, 75 bp, Homo sapiens
aaccctatcctgtccgagcaaagattacctattaccagaacacactgacatttgatctaggagaagatggtggcc

SEQ ID NO: 618018 - DNA, 82 bp, Homo sapiens
gaagacgaggccacagacacttctgatagtgaagattctcaagtccaaagatttaacatctccaacccagcgctacatcgac

SEQ ID NO: 618019 - DNA, 50 bp, Homo sapiens
gtgctgagtgcagccatgcaagtcggaagctttgaggttcctgaagactt

SEQ ID NO: 618020 - DNA, 88 bp, Homo sapiens
tgtggttgccgaagttggatttctcgcaaaccacgtatctggtgcaggccgtgagagcagcgggcaagtgcgatgcggtcttcaaggg

SEQ ID NO: 618021 - DNA, 75 bp, Homo sapiens
agggggactgcaaaggccaatgttggtgctggcaaaaagatcttcagatccctacctgttggctataacatctct

SEQ ID NO: 618022 - DNA, 75 bp, Homo sapiens
tgggaaagatctaccttctggaagctactactacgtggtgcttggaaaggtacatgtcccagagcaagcacacgg

SEQ ID NO: 618023 - DNA, 75 bp, Homo sapiens
gcccgtggacatctacatcccagtcaggatggctaaaggtgaccccaagaaaccaaagggcaagatgtccgctta

SEQ ID NO: 618024 - DNA, 51 bp, Homo sapiens
gaagaatcccttttggagccaggagagaaggatattcctggactgactgat

SEQ ID NO: 618025 - DNA, 101 bp, Homo sapiens
tcaggaatagattctcttgaccatgtgacatctgatgctgtggaacttgcaaatcgaagcacaatctctgctgtgacaactgccactcgcacgtggcattg

SEQ ID NO: 618026 - DNA, 75 bp, Homo sapiens
agccggaaggacaccaagatgcggatccgggcctttccgacatgccttgaattggaacgctacctacagacggag

SEQ ID NO: 618027 - DNA, 75 bp, Homo sapiens
gagtatcttgtcgctgcagtggaactattggaaaggccttcactgcacagacaaatggtggcccggagtttgctc

SEQ ID NO: 618028 - DNA, 101 bp, Homo sapiens
ctctgaagcacaaaaagttaatcactttcccaggtacctagtcgatagtcgctggttcaaacagtggaaaaaatatgttggctttgacagttgggacaaat

SEQ ID NO: 618029 - DNA, 84 bp, Homo sapiens
acagagcctcgcctttgccgatccgccgcccgtccacacccgccgccaggctgctctttggcgtaaattgcaatcgattaggga

SEQ ID NO: 618030 - DNA, 89 bp, Homo sapiens
cctcctgtcggggaggcaaggtggttttggaccagacaggcgtgtctaagaaactgttaaggcagcaataatagaagagcagaaacgaa

SEQ ID NO: 618031 - DNA, 96 bp, Homo sapiens
gccttggcagcagtggcccttgaaccagcaacaatggatgcagtcattccagcaccaacaggatccaattggcccgccacaataaactgttgcagc

SEQ ID NO: 618032 - DNA, 100 bp, Homo sapiens
attctcctgcctcagccccctgagtagctgggattacaggcacgcgccaccactcccagttccaagattatcccctaaaactcatagacccaggtctccc

SEQ ID NO: 618033 - DNA, 75 bp, Homo sapiens
gctcgacgtgttgcagcacatcctcatccgagcctttgatttgagtggcacacagcaagaaggaggccatcagca

SEQ ID NO: 618034 - DNA, 50 bp, Homo sapiens
gggctccggctggtctgtggtgaggtggaaaaggagggagctgctctcag

SEQ ID NO: 618035 - DNA, 98 bp, Homo sapiens
gcacggacgacagaagcgactttggtgagactctgcagcagtgttgtactgctacttctataaacggacagccgtaagactaggcgatcctcacttct

SEQ ID NO: 618036 - DNA, 80 bp, Homo sapiens
ggtctctcgcgggcgggagaacggaaaactcccaacttcctgacggcaaatggatacatcttgttttttcatattacatc

SEQ ID NO: 618037 - DNA, 82 bp, Homo sapiens
acgtcgtgatccagaagtccagagctgaggactgcctgtttgcagggctgaaatctctttaatgatggagggaagcaggcag

SEQ ID NO: 618038 - DNA, 101 bp, Homo sapiens
catgggctcctcgcaaagcgtcgagatcccgggcgggggcaccgagggctaccacgttctgcggacctgtcatttactccatcctttatagtgatgctaca

SEQ ID NO: 618039 - DNA, 100 bp, Homo sapiens
ccgcggcgagaagccccagctgcactacgcgggcttccggctgctcctggccagccccaggtcctgctacaaactgttccaggagcagcagaatgagggc

SEQ ID NO: 618040 - DNA, 50 bp, Homo sapiens
ttcctgtggatatcttgatattgcagagtggctgatggccaagagtctac

SEQ ID NO: 618041 - DNA, 97 bp, Homo sapiens
gacggggaccattttaccatcaccacccaccctgagagcaaccagggcatcctgacaaccaggaagtttcaacgaaccaaacttttaaatggaccgg

SEQ ID NO: 618042 - DNA, 100 bp, Homo sapiens
atggaggaaacagctatatgggaacaacatacagtgacgcttcacagggttggtgttcgaggaagagacattgttgttcttggtgtggagaagaagtcag

SEQ ID NO: 618043 - DNA, 108 bp, Homo sapiens
tttctctccctctgcccccccttccccacgcaaccccagatccatttacactttacagtcaaaatgcagatcttcgtgaaaacccttaccggcaagaccatcaccctt

SEQ ID NO: 618044 - DNA, 100 bp, Homo sapiens
ggcccagcagctgcagccgcagcctgtggctgtgcagggccccgagccggcccgggtcgaggtccagtggcattgcagagcacggatggttgcaggagcc

SEQ ID NO: 618045 - DNA, 50 bp, Homo sapiens
cgttacaaggccttctacattaccgcacttgcactattactcagcagcag

SEQ ID NO: 618046 - DNA, 75 bp, Homo sapiens
gtcttagcaaggctgtcatcacagcgcagtgagcctgcaggccgacctcactcgtggcacacaactaaatctggg

SEQ ID NO: 618047 - DNA, 100 bp, Homo sapiens
taccatcggtagtcaacgggtctgctttcccctcgggatcaactcttccaggaccaccaaaaataactttggctggattacgtgtgaaaatgaacttgtg

SEQ ID NO: 618048 - DNA, 75 bp, Homo sapiens
taagaagttcttcgatgtatctaaacttggcaccaagtatgggaaatcctcattgacgattcaatttgttgaagg

SEQ ID NO: 618049 - DNA, 90 bp, Homo sapiens
gatgaagtgcagaggtttttttctgggcctcggcttcacaggatggggctgccagtgtcctgggcccctcctgccctctgggttctaggg

SEQ ID NO: 618050 - DNA, 98 bp, Homo sapiens
actgacccccagcgcctaggggggttggatactcggccccactatagtaactggaatgagattgttgacagctttgatgacatgaacctctcggagtc

SEQ ID NO: 618051 - DNA, 118 bp, Homo sapiens
ccgggatcgtgaccgagaccgtgaccgagagcgtgaccgagagcgcgaatatcgtcatcgttagaagaattttcctgcatggagtgctacatcctcttgttccagtctcagctggctg

SEQ ID NO: 618052 - DNA, 75 bp, Homo sapiens
tatgtcctaaagtaaggtttcaggtacaggtttgcagattccgccagcagcacagcaagctctacagatgagtgg

SEQ ID NO: 618053 - DNA, 98 bp, Homo sapiens
gtggaacctggatgaatgtagagagaaagtacttcaagatattgcggtggtggagatgagcgatgccttccggcagccgtccttgttttaccaccttg

SEQ ID NO: 618054 - DNA, 90 bp, Homo sapiens
attgtgcacaaatgaagatgtttccagccctgcctcggcggaccaaaggtgtgtagcccacaatgccctggagtgtgcacgagccatcta

SEQ ID NO: 618055 - DNA, 83 bp, Homo sapiens
gtgcgctcgatccagcaccatggggaagcgggacaatcgggtggtcatgatgatgggcagcgcccgagtggcggagctgctgc

SEQ ID NO: 618056 - DNA, 87 bp, Homo sapiens
gaaacatggagtcctgtaggcaaggtcttacctgaatcagggaactctaatgatccaggacaaagaagttaccctggagtatgtatc

SEQ ID NO: 618057 - DNA, 75 bp, Homo sapiens
cggatagcgagggcggccgcgccggctccagatctcacattcttgaaggtggcattgaagagcactaagatcgga

SEQ ID NO: 618058 - DNA, 98 bp, Homo sapiens
cgcggctccgtgtttctggaaagtgacagcaggttaaacccatccagagtaatggctgcggccttacccaggaccctgggggagttgcagctgtatag

SEQ ID NO: 618059 - DNA, 83 bp, Homo sapiens
agctttcagtgtttttgaactcttcatatacctggatggtgcctttgtatgtgccaagagttgtaacctctgcacaacagaaa

SEQ ID NO: 618060 - DNA, 75 bp, Homo sapiens
tctgcatcagcctcccgaatagctgcgattacagttgaacaagagatttttcaatcaagactttggaactacgaa

SEQ ID NO: 618061 - DNA, 97 bp, Homo sapiens
aatcaaagacggcaacgcgcttatcagcgctatgagaagcatgttatttgaaagcaattgagacgcaaccgaactttgcagtagcttggagtaatct

SEQ ID NO: 618062 - DNA, 50 bp, Homo sapiens
acctgaaactctacgaggataaccagacatctcacagaaagttctccgct

SEQ ID NO: 618063 - DNA, 98 bp, Homo sapiens
gattgtgcagcacgtgcacagccagctggaggagacccgtcgcagcatggtgtttgccaggcacctgcgggaggtgggagacgagttcaggagcagac

SEQ ID NO: 618064 - DNA, 75 bp, Homo sapiens
caagaacctccaaagagcattgaagaattcttaaagtttcaaaattggtctcagaccagtatccttcaggggttc

SEQ ID NO: 618065 - DNA, 98 bp, Homo sapiens
tcactcataagcgcgctcaagagttccagcaacagatagaaatgctttaagttcactctggggaaagctggcctctgaaatcttaatgcagaattggg

SEQ ID NO: 618066 - DNA, 51 bp, Homo sapiens
gtcaaacttccgccaggctccccagagagccggagaattttcatccttggg

SEQ ID NO: 618067 - DNA, 75 bp, Homo sapiens
accaagataaaaaaagtttcctataactggagttttaaggtgaccttgtacaaggactctgacatggaggacttt

SEQ ID NO: 618068 - DNA, 50 bp, Homo sapiens
cttcatgcttagatacatgtataacaagatattgtactccaagatacttg

SEQ ID NO: 618069 - DNA, 50 bp, Homo sapiens
aaaggcctgtagcctggcaaaaacgtatgaagtgctcctttgtgtacaag

SEQ ID NO: 618070 - DNA, 88 bp, Homo sapiens
cacgtcatccgcggctacgtgggcaaccgggcggccacgttcccgctgcaggtgctgaaggtcgccatcctggctgagaagtacgcgg

SEQ ID NO: 618071 - DNA, 97 bp, Homo sapiens
cccagcggagcctgagcaaggagcgggtccgtcgcggagccggagggcgggaggaacatgacatcgcggaggagtcttcggaggatgtctcaggagg

SEQ ID NO: 618072 - DNA, 75 bp, Homo sapiens
ccttgggtcttccggtaggagctgtaatcaattgtgctgacaacacagtgtgacaagtacaagactggagttatt

SEQ ID NO: 618073 - DNA, 89 bp, Homo sapiens
gctgtaaccacctcacagattccagcttcggaacaagagaccctgaacgctgtccaactgggcgtacgagtttgacaagtgggccccct

SEQ ID NO: 618074 - DNA, 89 bp, Homo sapiens
ggtaacgacggcctcagcaggcggggaagatgaaagggcatgctgaggtgatgaagaaaatcattgagactgttgcagaaggaggggga

SEQ ID NO: 618075 - DNA, 100 bp, Homo sapiens
gctccagcccggcccggcagcgacatggaagagtctccaaaaagcctagggaaatgaaaggaaagaaaagcaaaaagatttctctgaaatatacagcagc

SEQ ID NO: 618076 - DNA, 100 bp, Homo sapiens
ccttatgaacttggtcggctcttccagctacaaactctaggtttgaaaggaaaatgtttataggaggccttagctgggacactacaaagaaagatctgaa

SEQ ID NO: 618077 - DNA, 100 bp, Homo sapiens
aagctcaccatgtctctctcagaacttggtgctgctagaatgcaggaacagcagctcctcacagccagtgaccttgcagccagtgacctcaaaggatttc

SEQ ID NO: 618078 - DNA, 83 bp, Homo sapiens
gtcagctgcaaatattctcttctgttctacagacctctctcctcttcctgctcatggattttccgcagatttccagtggcccc

SEQ ID NO: 618079 - DNA, 98 bp, Homo sapiens
cctttcatgatattcctctgaaggtgaactctaaagagattccttacatggcttgacagatggagtattcatctttgaagctgtttccacagaagata

SEQ ID NO: 618080 - DNA, 51 bp, Homo sapiens
ggcggcggcgggtgttgtgagcgggaagcactttcatttggacccgtggat

SEQ ID NO: 618081 - DNA, 98 bp, Homo sapiens
tcaaagccatcaaccagggcaactatgggtggaggaaggagaggccagtctaccctcccctgccatgaccctgtcatcagccattgacagtgtggaca

SEQ ID NO: 618082 - DNA, 83 bp, Homo sapiens
cttcttctcttctctgcttggaggggatgtggtttccgttaagctggacaacagttaccggtattgtaagaacaagccgtacc

SEQ ID NO: 618083 - DNA, 75 bp, Homo sapiens
accagtttataagtgctgttaaatatgtgacgccaaggacttattgttgtgctaacactgaagacttggagacag

SEQ ID NO: 618084 - DNA, 100 bp, Homo sapiens
cgccgccgcctgaggaggcgagctagccgggagttacaccgccaccgccagatatttgaatggtggtacttccataagcatggcacatcttttattgagc

SEQ ID NO: 618085 - DNA, 50 bp, Homo sapiens
ccggcctgcgctcccatccacacgctcgggccaattcctgtccccccagc

SEQ ID NO: 618086 - DNA, 90 bp, Homo sapiens
ggtcccattccgcctcatgcaccctcagcctgaggacccagaccatcatcaaagaggggatgctgaccaaacagaacaattcattccagc

SEQ ID NO: 618087 - DNA, 74 bp, Homo sapiens
cgccactgcagagcctgtccgtcagtccctaggtatccgcactgctcaggggcgcagacggggaagcggagcca

SEQ ID NO: 618088 - DNA, 50 bp, Homo sapiens
gcgaatatcgtcatcgttagaagattccttctctgccggggagccccgtg

SEQ ID NO: 618089 - DNA, 90 bp, Homo sapiens
ccgcgaggcgggcagccggggcgtccagttcgatcctttggtacagaagacagaccgacagatcgtccaataccacctcgagatgaagtc

SEQ ID NO: 618090 - DNA, 75 bp, Homo sapiens
aaaaaagagaactggtattcaaagaggatggtcaggcatccaggatattgcagtcctcttcaacatcatcatcat

SEQ ID NO: 618091 - DNA, 100 bp, Homo sapiens
aattgaagaatattcccaagtccttcacccggggctggatcttcaacgtggttccttggttggtggcgattccggccagtctattcagcgggtttctctc

SEQ ID NO: 618092 - DNA, 90 bp, Homo sapiens
ccgcgagcacagagcctcgcctttgccgatccgccgcccgtccacacccgccgccaggttcctgcacttggccatcatccatgaagaaaa

SEQ ID NO: 618093 - DNA, 82 bp, Homo sapiens
cacacgccacggggagccagagaacgtgtggtgggggtggcgaaggtgtggacactgccagcggctgcagccgacttggaat

SEQ ID NO: 618094 - DNA, 88 bp, Homo sapiens
ggagaattgtccagaagacttggctcaggtggacaacgcgtactggctgtggactttccagggacgcctcctgcagaagaacaacaag

SEQ ID NO: 618095 - DNA, 75 bp, Homo sapiens
tcattgccatcgaatccgggccagtgggctacgactccgaggatgagctggagtcgcctggtcggcgctctggat

SEQ ID NO: 618096 - DNA, 78 bp, Homo sapiens
ggcagcattaaaacttaagcagtgaagtaagaactctgctagagaggaaatggctgcttcatcatcatcctcctcagc

SEQ ID NO: 618097 - DNA, 75 bp, Homo sapiens
gttaatatcattaagattctgcttaatgctggggcagaaattaattcaaggcttttattgagatggagacaagag

SEQ ID NO: 618098 - DNA, 100 bp, Homo sapiens
ctcttcctctggcccgaagccttcctttatcgctttcagagcgatcgtcttctgatcaaaggaggtaaaattgttaatgatgaccagtcgttctatgcag

SEQ ID NO: 618099 - DNA, 82 bp, Homo sapiens
tcgaaaatgtgtgtgaattggatttgatcttccatatggataagatcctgcagctcctgaaaggcaagctggtggtgggtca

SEQ ID NO: 618100 - DNA, 75 bp, Homo sapiens
ctgaaggctgtcaagtatgtggagtgttctgcacttacacaggcatgtgacgtccttttctccaagcttgtcaag

SEQ ID NO: 618101 - DNA, 100 bp, Homo sapiens
tttgcctactggctgggaagaagcatatacttttgaaggtgcaagatactatataaaaatggccaaagttttctggtcttggatgagcaacgatttgcaa

SEQ ID NO: 618102 - DNA, 88 bp, Homo sapiens
gcggcagtggcggcgcgtaggaggcggtgagaagccctaccactgcaactgggacggctgcggctggaagtttgcgcgctcagacgag

SEQ ID NO: 618103 - DNA, 48 bp, Homo sapiens
agaaacttagtgatggacaagttggttacccggctgtatgtgaattct

SEQ ID NO: 618104 - DNA, 75 bp, Homo sapiens
gtttattggagcgcagactgatggcgcaaaggtagttgggacttccactatgatgttgaaaggaaatgaagaaag

SEQ ID NO: 618105 - DNA, 82 bp, Homo sapiens
gcggactgtcctttcgtggctcactccctttcctctgctgccgctcggtcacgcttgaatttaattccttttcgaccttcaa

SEQ ID NO: 618106 - DNA, 96 bp, Homo sapiens
gctggccaagaaggcggagaaggactccaaggcggagcaggccaaagtgaagaaggaagcggctcagccccagggcagcacatcagagacaccatg

SEQ ID NO: 618107 - DNA, 90 bp, Homo sapiens
tcatatgaccatgctcacaagcaggcttctgactttggccaggtaggacttgacttagaggcagaatttgaaaaagatctcaaagacgtg

SEQ ID NO: 618108 - DNA, 90 bp, Homo sapiens
cccgctcgggaagcagctcttgccaaaaacctttggacagtccaatgtcaacattgcccagcaagtggatcaccccttctgtgtcattct

SEQ ID NO: 618109 - DNA, 75 bp, Homo sapiens
ccaggtcctcaactttgaagagatcgactacaaggagatcgaggtggaagagacttacaataacagcactaggag

SEQ ID NO: 618110 - DNA, 90 bp, Homo sapiens
gcagagtgtaatgctgtccgccaggccctgcaggacctgctttcggagtacatgggcaatgtgaaaggtgtagcagtcactcggcctaca

SEQ ID NO: 618111 - DNA, 75 bp, Homo sapiens
cctgttggttccaatgctgggattggctgcttttcgtagcccagccatgacccataggaatctgacttcctccag

SEQ ID NO: 618112 - DNA, 75 bp, Homo sapiens
caggccacgattgaatctctgaagtgaaactggaacgccaagctgaagaagaacgaatacggaagcacaaagcag

SEQ ID NO: 618113 - DNA, 74 bp, Homo sapiens
tacgtgattgctggttattatcaagctaatgagcgagtaaaggatgccagatcaacaggcggtccttcgggtcg

SEQ ID NO: 618114 - DNA, 100 bp, Homo sapiens
ccaggaggggaacactggagactgggagatggcagctgcacttcttgcggctggatcacaggcttctctacagtttagcctttaatgccaggtttctgag

SEQ ID NO: 618115 - DNA, 101 bp, Homo sapiens
cggtcctgcgcctcgggagtcggcgtccaggctcggagcgcgacacggagactaggtggcaggtctgccatcatggatgttctcgcagaagcaaatggcac

SEQ ID NO: 618116 - DNA, 90 bp, Homo sapiens
gatcgctgcagcaaatggcaacttgtgcagtatacactgcgctgtgacatgaagcggtctctgttggccaaggacttgacaaagacctgt

SEQ ID NO: 618117 - DNA, 51 bp, Homo sapiens
ctggagggtacctggccctgctgaaggggtggccctgctcgaggatgtcaa

SEQ ID NO: 618118 - DNA, 98 bp, Homo sapiens
gaacccccagtacttccgtcagggacacaactgccacaagccggacacgtcaacatctgaatgaattgatgacgaagaagtggctattagggtcaaac

SEQ ID NO: 618119 - DNA, 90 bp, Homo sapiens
agcatggctacttcatattttggaaagcagtttttaagacaagcaaaatgtttagaaagtgagaaggatggagtgcttaataaagtcata

SEQ ID NO: 618120 - DNA, 129 bp, Homo sapiens
agcccacccatgccgtgtgtgtgctgggcaccttgactcagcttgacatctgcaggtttttcgttggaatatacgttgcacatttatggcgattctgagtgtgagggcagacttctgccaggctcagca

SEQ ID NO: 618121 - DNA, 100 bp, Homo sapiens
tgattttcagaggggaatgctaagagattcttcaggagatgatgaaagagattgactatgatggcagtggctctgtctctcaagctgagtgggtccgggc

SEQ ID NO: 618122 - DNA, 51 bp, Homo sapiens
gtgaaaacagaagctgtggctccaaaagaatgcaatggtgtaaagattcca

SEQ ID NO: 618123 - DNA, 100 bp, Homo sapiens
cctagctttctgggctgccgggagctcgcggcgagcgccccagccaggcctgcgccggcatcctccgagaggctgggaggcggcagaatgcagccagagg

SEQ ID NO: 618124 - DNA, 75 bp, Homo sapiens
tgcaggacccctgggcagacctcttcagaaatagcaggtgttgacttcaaaatcaaaactgtagagctaagagga

SEQ ID NO: 618125 - DNA, 75 bp, Homo sapiens
aaatggctgcgagaccctagaggcctgcggcctgcgcttcgagagctgtgcccaggagtgaacaaccagccctac

SEQ ID NO: 618126 - DNA, 88 bp, Homo sapiens
gctgcttgcacggatacctcagcgggcgccacggtggctcccagattccagcaagattatggaagagcatagctacatacaaaaggag

SEQ ID NO: 618127 - DNA, 100 bp, Homo sapiens
ttaggagtccgggggttcgcccgcggaggccggggagcagccgaccatggagccccagaagagagtctacaaggagattgaacaggtggttggcccacat

SEQ ID NO: 618128 - DNA, 136 bp, Homo sapiens
gccgcagtaccagacctgggaggagttcagccgcgctgccgagaagctttacctcgctgaccctatgaaggctattttggcattctgctggatatatgttcgtaaataccaaagtcggcgggaaagtgaagttgtc

SEQ ID NO: 618129 - DNA, 82 bp, Homo sapiens
aaacgctgtcactgtggaaacgtacctggagtagaacagaaaaattattatgtctgtgttcccttgggactcattggaaatt

SEQ ID NO: 618130 - DNA, 75 bp, Homo sapiens
ttctgtcatgagaagtggcgatcaaaattggccccgagaagctgccatcactggagcaccgggactccccttggc

SEQ ID NO: 618131 - DNA, 100 bp, Homo sapiens
ctccactcgaacagatgtgagcgagaaagccgttgcctccagcaccacttctaatgtttgccaaggcacgagtaacaagctcacgcagttgggcactttt

SEQ ID NO: 618132 - DNA, 130 bp, Homo sapiens
ccggacatctgctttatatttctctcagaccattcccatcagtgagcattacagcggcaacctttggcactgcatccatgagcatgcccacaggattcggcactcctgctccctacagtcttcccaccag

SEQ ID NO: 618133 - DNA, 50 bp, Homo sapiens
cttgtcttccactgtttccaaaagacattcctctgaatattgatttgctg

SEQ ID NO: 618134 - DNA, 88 bp, Homo sapiens
cacaatagggtatcatttttacgggccttctggagatgcttccgaactgtgggcaaaaatggcgagaccatttgtttgtgactatgaa

SEQ ID NO: 618135 - DNA, 74 bp, Homo sapiens
attacaaggactggcagtctgctgtagagtgtatcgcagtgttggggctttatcagacctaaacaaggatggga

SEQ ID NO: 618136 - DNA, 75 bp, Homo sapiens
gcggcgctgccgctcccgggcggccgcgggcgggtcgcaatggaagaagagatcgccgcgctggtcattgacaat

SEQ ID NO: 618137 - DNA, 83 bp, Homo sapiens
atcttgtcactttagccactgctactacagatggtggccagcagagatctgcaaccccaggtctgtgccactgaacatccagg

SEQ ID NO: 618138 - DNA, 74 bp, Homo sapiens
tccgtgctgtttgtgtgtctgggtgcgcgcggagccatggttatcatgtcggagttcagcgcggaccccgcggg

SEQ ID NO: 618139 - DNA, 100 bp, Homo sapiens
ctgcaacctttagactaatgactgtccgaaacatcgcctccatctgtaatatgattctttcttgtggagaagttattcatgtgaagatccttggaatttt

SEQ ID NO: 618140 - DNA, 75 bp, Homo sapiens
cggccaggtccctgctgaatcacacgccgccatccgggaggcccagggaagattgccccagtggaaaatgacaat

SEQ ID NO: 618141 - DNA, 82 bp, Homo sapiens
ccgctgtcccgcggcctggagtacaacgaggtcaacgtcaccctggacctgggccaggctgaccccgcactacatctaccca

SEQ ID NO: 618142 - DNA, 75 bp, Homo sapiens
ccacaaacaaactacccattttcttttttggaactcatgagacgcccgatgagagaaagggaaagttaaggatgc

SEQ ID NO: 618143 - DNA, 83 bp, Homo sapiens
agccagcacagaagtgtctggagtggttgattcacagttggttgaatctggcgatgtggaacccatggatatggagggctgac

SEQ ID NO: 618144 - DNA, 75 bp, Homo sapiens
cctgtatctggagctgggagacaagcccgcgcccaacaccttctatgtaggaaagaccacagcaagattctttca

SEQ ID NO: 618145 - DNA, 74 bp, Homo sapiens
gacagtcctcgtcagcactgactttcagctatggaatcggtttgggaaaagttcttaagttctgaaacgccgcg

SEQ ID NO: 618146 - DNA, 96 bp, Homo sapiens
gccaccccggcatcccaagccgcctcccgccgccccggcccggcgcgcaggagcagcatttctttctattactactatctatgctgagactggttc

SEQ ID NO: 618147 - DNA, 90 bp, Homo sapiens
ttcaagttggagcaaggagaggggccatggacattggaaggggaagccccacatcagagctgttcagactattgggaagaagttacctgc

SEQ ID NO: 618148 - DNA, 101 bp, Homo sapiens
aagagattgcagtgggggctgccagtgctaccctgagaaaggtggacgtgtgctgctggtgagtagcagccggtacccagaccagtggattgtcccaggag

SEQ ID NO: 618149 - DNA, 73 bp, Homo sapiens
gagaagaacagtacttcacttaaactttggaatcccaaagcccaaagaggaagtgaggagccccaggtcccac

SEQ ID NO: 618150 - DNA, 102 bp, Homo sapiens
aggtgtgtgtctggggaagagacttacagaagtggagttgctgagtcaaagctgccgaacccttcagccctccgcgaggagactcagctcagagcacagcgt

SEQ ID NO: 618151 - DNA, 95 bp, Homo sapiens
ggggaccagaatggacacactgaccctaggtggcggggcgactggactgggtagcggattctcgcggtaaaatggtgtaaatttgatgacgacgt

SEQ ID NO: 618152 - DNA, 100 bp, Homo sapiens
ttttgagccatttcgaatcacttaaaggagtggacattgctagcaatgagctcccaaagccatccaggaagattgttgatcgaatcgacaatgatgggga

SEQ ID NO: 618153 - DNA, 82 bp, Homo sapiens
atggacaggaactgtggacagtgaagagaggcctctcccaaagcacctgcgcagaattaaatgtgagggagtctgacgtaag

SEQ ID NO: 618154 - DNA, 98 bp, Homo sapiens
gataaaaattacaaggactggcagtctgctgtagagtgtatcgcagtgttggatgatggtggtgctaccccagtacaggatgaacgggattcagggtc

SEQ ID NO: 618155 - DNA, 98 bp, Homo sapiens
ctgctattctcctgcccgcaccgcctgcgggagcacctggagaggggccgcggaaacctggagtggaagggctggagtgcaatggcatgatctcggct

SEQ ID NO: 618156 - DNA, 82 bp, Homo sapiens
gtcttggtagcggaggcacccgaatgctgcccgggtgagggaagacactgatcaaggtggcagaagctgaaaagcaactggg

SEQ ID NO: 618157 - DNA, 100 bp, Homo sapiens
aatcaaccagagggaagaaaatgcaaactgaaacctgggaaacagtgcaggtaaacaacgtagattttacaaatatcataagagaagaagccgtcctttt

SEQ ID NO: 618158 - DNA, 100 bp, Homo sapiens
tggaagcgaagccgaaaaaggcagcagcgaagggtttgccttcccggattgggcctacaagccagagtcgtcccctggctcaaggcagatccagctgtgg

SEQ ID NO: 618159 - DNA, 100 bp, Homo sapiens
cgcaggatccggctgccgaaggtcctcgccaggctaatggtcgatttgaagtgggcaagaaaatctgtttgagcatctcaggccatcatcctgaaacttg

SEQ ID NO: 618160 - DNA, 83 bp, Homo sapiens
cagattctgcgcgtcaacgacaaatccctggcccgggtgacccacgcggaggccgtcaagaggctaagaatattgtacacaaa

SEQ ID NO: 618161 - DNA, 100 bp, Homo sapiens
tgtgccccaggtgaaggccagtgctctcaagcatcagcgagagctttctaactgtcaaaggtgctgccctttttctaccacggggaaatggctcatccac

SEQ ID NO: 618162 - DNA, 83 bp, Homo sapiens
cttttctcagatgttggatatttgcttggaaaaacgtgtgggtacgaccttggtctgctaccgctgccacggccccccctgct

SEQ ID NO: 618163 - DNA, 100 bp, Homo sapiens
aagaccaccatcaacaatgagtacaactaccgctgctggaccacaaaccgctgccagaaaattttagttactatccagcagaaaacttgatagagtacaa

SEQ ID NO: 618164 - DNA, 100 bp, Homo sapiens
caagactgaggatagtttagaaggatgcttggattgtctgcttcaagccctggctcaaaatagttgtctgcattcaaaagagcattctattaaagctacc

SEQ ID NO: 618165 - DNA, 82 bp, Homo sapiens
ttaggctgtgctgtgaactgtgaacagaagcaagctttggacatcagacagtgcaggagaagaatgtgatgcggcagaaggg

SEQ ID NO: 618166 - DNA, 100 bp, Homo sapiens
cggcggcggccggagcttctctcagccgatcgcccaggaccacaccgcagcgtaactgcaggcctctcagcgaaaaagggggaaagcaaagacccgggtg

SEQ ID NO: 618167 - DNA, 90 bp, Homo sapiens
gagagaagctgccgctcccagttcacagcagatgaggctcgggacctgattcaacgttacctgacagagcaccctgaccccaataatgaa

SEQ ID NO: 618168 - DNA, 75 bp, Homo sapiens
acagagtctgtggaagaggtggttcgagattctggacaatcaggaagtccaagccacaatgatcctgccaagaat

SEQ ID NO: 618169 - DNA, 74 bp, Homo sapiens
acgtgcagacatctacaaccttcgatctcctgacgagtatgaaaatgaaagtcttcagaatggaaggaagtcaa

SEQ ID NO: 618170 - DNA, 98 bp, Homo sapiens
acgaaagcagtgacggaggagcttgtaccaccgggccaattcctgtccccccagcagcatggcatcgtgtgctgaaccctctgagccctctgccccac

SEQ ID NO: 618171 - DNA, 147 bp, Homo sapiens
ttcatcctcaccactgactggatttggtactggagtgatgagtttggttcttggcaggaatatggaagacaggtacctgcaaggtgtggagttacagtccgagacagtctaaagaaagcactgatgatgagaggtctaatcccagag

SEQ ID NO: 618172 - DNA, 98 bp, Homo sapiens
ccggagagccccggagtgagcggagtagcgagtcggcaacccggaggttgtttgcattcgctccacttggaatgctctctctccaaagctgagttgtg

SEQ ID NO: 618173 - DNA, 100 bp, Homo sapiens
cgtggcatgagggtggtgcacagctacgagatgctgcgccggcgggtggggggtactctgagacgctcagacagccagcaagcagtgaagtccccaccac

SEQ ID NO: 618174 - DNA, 100 bp, Homo sapiens
ccgttgtccatcacaaacaagacattgatttatatattgggactgcagctggcgctacgtacatctttgggaaaagtggtgggcttatcctctacacctg

SEQ ID NO: 618175 - DNA, 83 bp, Homo sapiens
tgcctggaatgatgatgtctcatatgtctcaggcttccatgcagcctgccttaccggagtccttcaataatgttaaacagtgg

SEQ ID NO: 618176 - DNA, 101 bp, Homo sapiens
caggaaaataattaaatattcttaccgagaatcccacgtggcgaagtctcgattttggaattatgccagaccgtcttgatacatctgtgtcttgtttcgtg

SEQ ID NO: 618177 - DNA, 90 bp, Homo sapiens
ccaaagtgaaagaggaagaggaagagccattaccatcttacttatttaagattcgagaaatgatggagtccttcgaaggccctcagcctg

SEQ ID NO: 618178 - DNA, 75 bp, Homo sapiens
cactttaatattggattcccttatacaggcaaagcagagagcagaggttcttcagtccacgcaacggttcttctc

SEQ ID NO: 618179 - DNA, 75 bp, Homo sapiens
tatacagggccgtgatgttggagaactacaggaacctggagtctgtgggtgccgtgagcgatgtggagatgcagg

SEQ ID NO: 618180 - DNA, 82 bp, Homo sapiens
gctaaacgtgccctactctgccccgggggagagacggcgggcgctaacaccaccgacaaggagctagaggttctctccttgc

SEQ ID NO: 618181 - DNA, 75 bp, Homo sapiens
tgctgtattaaacccgagcgcgcccaccactgcagagatgacctgatcagagccatcaagaaactaaaggcactt

SEQ ID NO: 618182 - DNA, 83 bp, Homo sapiens
agataccaacttatacttcctggcgctgaccttctttgtcgcagcgttccatgttgtggcagcactgcctgaaggtatgagac

SEQ ID NO: 618183 - DNA, 100 bp, Homo sapiens
caacatccagaacttccagctgcccccagcatttaaatcaaacggtattgagatggattgggttatgaaacataatggtccaaatgacgctagtgatggg

SEQ ID NO: 618184 - DNA, 75 bp, Homo sapiens
gacagaagaatgcactcaccttgtcatggtatcagtgaaagttaccattaaatgtgtgctatcagcgggttccat

SEQ ID NO: 618185 - DNA, 100 bp, Homo sapiens
gcgggggcctgatgtagaagcatactgtctacgctgtgaatgcaaatatgaagaaagaagctctgtcacaatcaagtttcagtcattcagtcagtaccgc

SEQ ID NO: 618186 - DNA, 74 bp, Homo sapiens
agaagccgagttcaacatcctcctggccaccgactcctacaagagctttcagcagaggccaaggcagcattgct

SEQ ID NO: 618187 - DNA, 50 bp, Homo sapiens
ctcagagcttggagacagacgaagcgtaaaagatgtgttgttttcaatca

SEQ ID NO: 618188 - DNA, 101 bp, Homo sapiens
gccctggccctctcgctgttgctggtctctggctccctcctcccagggccaggcgccgctcagaacggacccagatgatgtggtaccagttggccaaagaa

SEQ ID NO: 618189 - DNA, 100 bp, Homo sapiens
gtgcagtacgtgattcaagggtatcacaaaagaagagagtatattgctgcttttctcagtcactttggcacagttcagaaggaacagctggctgccatct

SEQ ID NO: 618190 - DNA, 101 bp, Homo sapiens
ccagaatcggagccccaaccgcgctgccgaatccaagcaaaaatccctggattgaagcgcaaagctgaatgaaaacgcccaaaataattagtaggagttca

SEQ ID NO: 618191 - DNA, 100 bp, Homo sapiens
gtccatgttgcccatgaccttatccagaaactctctccttattgcggaatgctgcagcactccttactctcttttgggtttggtcttcacggtttctttt

SEQ ID NO: 618192 - DNA, 123 bp, Homo sapiens
acggacgaggatgaggaggagggggacgagcagcagcggctcctcaacacccctcgaaggcaccgatgaagacgccattattagcgtccttgcctaccgcaacaccgcccagcgccaggagat

SEQ ID NO: 618193 - DNA, 100 bp, Homo sapiens
ttactgacatccaaggaggacccaaaggagcagaagcttctgttaaggattctcagaagaatgattttggctatggaaaggggaaatgttctaagcagag

SEQ ID NO: 618194 - DNA, 80 bp, Homo sapiens
gcaaaacagatcttgactgcatttttgggaaaagacagagtaagaagactcccgagccctccagaatacccatcatatag

SEQ ID NO: 618195 - DNA, 98 bp, Homo sapiens
gaaaagctgccaagttgaaaatggacgagtaatcgcctgctttgattcattgaaaacctgcaaatccaagagacacatctttggaagataagagagct

SEQ ID NO: 618196 - DNA, 74 bp, Homo sapiens
tcgacacctcggactggggaaggagggtgtccgcaatgttgccagtgtctgtctgcagattggctacccaactg

SEQ ID NO: 618197 - DNA, 90 bp, Homo sapiens
cggagctgcagtcggcactgctactgcgaagacagctggcagcccaatattggccacctgggcctgccccatgggccgtccggggaaaag

SEQ ID NO: 618198 - DNA, 75 bp, Homo sapiens
ggcttttctgaaacagccaaatgtcaggccatgaagaaggccaaagaggtgctgaaaaaatatttggagtccaag

SEQ ID NO: 618199 - DNA, 83 bp, Homo sapiens
ctgaagcctccagcgtccacacgaaaccagatttgcctgaaaatggctcggccaagttcaaggactgtttcaaggccttctac

SEQ ID NO: 618200 - DNA, 105 bp, Homo sapiens
atgatgtgcctgaatctataatgctggagatgaaaggattatggccactgcggtctgaccctaatcgtgagactgatgacactttggtgctctcttttgtgggcc

SEQ ID NO: 618201 - DNA, 74 bp, Homo sapiens
ccccaagccctccttcgtgtcgtacgtacgccctgagctgatcttgcatctttaatggataaaacatttgagag

SEQ ID NO: 618202 - DNA, 96 bp, Homo sapiens
tttggggcagaatacagagatatggaatcagcaatgtacaatgcctgccgggatgtggaggccccctcaagtaatgacaaggccctgggactcctg

SEQ ID NO: 618203 - DNA, 51 bp, Homo sapiens
ggaaataaggctaaacttgcaatatgggtctctgttctaggatgtcccgac

SEQ ID NO: 618204 - DNA, 90 bp, Homo sapiens
tgatcatctgtccaacgcgcccatttacagatatgtcttctccgactactatgaagaagcctgaaaagccattgttcagctctgcatctc

SEQ ID NO: 618205 - DNA, 82 bp, Homo sapiens
tgtgattggtggtcgcttggggtgatcatgtatgagatgctcatcgttggtgacaaagttcctgctgatataaggttaactt

SEQ ID NO: 618206 - DNA, 75 bp, Homo sapiens
gtggcagctctcacagatgtgaatacacgcgcgggcggtgatgaactttgtggttcgctaccggccagacgagca

SEQ ID NO: 618207 - DNA, 83 bp, Homo sapiens
tattcaacgcatccccagcttaccgcccagtacgcagactctgtcaacgtattgaaacttactgttgaagacttggagaaaga

SEQ ID NO: 618208 - DNA, 101 bp, Homo sapiens
ctcccagtgttgggattataggtgtgagccaccacacccagccactaagtgctgggctttgacaaacttcctctgtggggtaccatcctcatctcggtggg

SEQ ID NO: 618209 - DNA, 75 bp, Homo sapiens
attctgtggaagagtggacaacagaagactggactgaagatagcatgaataatctttcatttagtgagctatgtt

SEQ ID NO: 618210 - DNA, 50 bp, Homo sapiens
ttcgaaacctgctataaccccaaaggcatccattctggacttgcactcag

SEQ ID NO: 618211 - DNA, 51 bp, Homo sapiens
gcgtggaacggctgcttttggaagggggaaatttgcagtggtgagaaaatg

SEQ ID NO: 618212 - DNA, 90 bp, Homo sapiens
cagcatgcccatggtggtactgtgaaaggttgtaggtggcctagatatccacaaaaagatggtggtagatgtgtgactcttatcagagag

SEQ ID NO: 618213 - DNA, 100 bp, Homo sapiens
acaagctatgtactctagcactgacacgtttacccacttgaaacagagccacctgagctgaagattcccttgagaacaagtactgtcctgtggtttcatg

SEQ ID NO: 618214 - DNA, 97 bp, Homo sapiens
agccccaactgtgggagtgtctgtggctctgcagagagaaggcatagactcccagcttagcagtgtctgcaaaaacgaatcttttcctacaacctgt

SEQ ID NO: 618215 - DNA, 50 bp, Homo sapiens
caggaggatgggcccgttgtgccacaagtatatggttatgatgacttgca

SEQ ID NO: 618216 - DNA, 75 bp, Homo sapiens
atctgtgccatcatcgtggtagttattgtaaatgttctcaaatagtgatgaagctgtaatcaataaaaaacttcc

SEQ ID NO: 618217 - DNA, 99 bp, Homo sapiens
agcggaccttctggaactcatgccactctcagaggatgataatgaagataattcaaatgatgggacccagccatccaaaaggaggcgaatgggctcagg

SEQ ID NO: 618218 - DNA, 90 bp, Homo sapiens
tcttacaaggaaatcctaccttgcatggattgggttttcagctgaagtggaatttgaactccgaagggaaatcaagaggctccaagaata

SEQ ID NO: 618219 - DNA, 83 bp, Homo sapiens
accccaccacggagttccggtacaagctcctgcgggccggcgggccacggagaccgcccagcagttgaagcggagcgccgggg

SEQ ID NO: 618220 - DNA, 74 bp, Homo sapiens
cccagtggggcattcgtcttggtaaacttggttattcaagtcaaacaacgttgaaatggattgggtgttgaagc

SEQ ID NO: 618221 - DNA, 100 bp, Homo sapiens
agaaggctgtcgcagcacctgttgagctgttttccaaggtgatggttgctgaagccttggatatttccagagaaacctacctggcaattctgatggaccg

SEQ ID NO: 618222 - DNA, 75 bp, Homo sapiens
ggccacgcgggtggaggtgtccgtgtcctgcagacaaaatgttccttttgaagactatacaaggcttcaaaaaag

SEQ ID NO: 618223 - DNA, 75 bp, Homo sapiens
aaattacaactgaagatataaaagctgcttttgcaccatttggaagaatatcggccatcccacttgccattttcc

SEQ ID NO: 618224 - DNA, 75 bp, Homo sapiens
gtcgctatgcatgaactgttactgcaataccatctgcctgtgggacatcagtgccgttccaaaggagggaaaagt

SEQ ID NO: 618225 - DNA, 112 bp, Homo sapiens
ctgcagccgaaggccaaggaatcactgaagatcggcgagggaggacagggggttcatcatgggcaccatactggacataccttttatgtgcactgggactttttatttacca

SEQ ID NO: 618226 - DNA, 100 bp, Homo sapiens
gtcttctatgacctggacagctgcaagcattccagctaccctgattcagagggggctcctgactactcgaaatggcgtccgcctctgcttgtccggtttc

SEQ ID NO: 618227 - DNA, 90 bp, Homo sapiens
tttgcttccaaaagaagttaccaacatttagaatttctacttattctgaggcacagatagatcattatctaggacttgcaaataagaatg

SEQ ID NO: 618228 - DNA, 91 bp, Homo sapiens
cgggagctggacggcgagcgcgagcggcgcgagaaaggatacccacccaccatcccagggtctacaacatccacagccggaccgtcacccg

SEQ ID NO: 618229 - DNA, 101 bp, Homo sapiens
gagctgatcgagcaggcggcgcagtacaccaacgcggtgcgcgaccgggagctggacctccggggcgtggtgtccctcgtggccgttcacccctccaccgt

SEQ ID NO: 618230 - DNA, 99 bp, Homo sapiens
cgggggccggaggaggaggagaggatgatttttggatcctgagaattgatctatgttggatcatgattcgcctttgccagtctcatctcgtgtctgctt

SEQ ID NO: 618231 - DNA, 89 bp, Homo sapiens
gagcgggcggcttcctggcctgggcgctccggtggcggcggaggccgggctctcgccatgggtcactgtcgcctctgccacgggaagtt

SEQ ID NO: 618232 - DNA, 100 bp, Homo sapiens
ctcacagtttgctctgctcttccaacaccagtggaagatgatcacatcccagaatttgaacctcccgctccctttgtcactcgctttttgaacacaagag

SEQ ID NO: 618233 - DNA, 76 bp, Homo sapiens
tgcctgagagatctccaagaattacaggtactttggtcaataatgtccgactcccaagaggtcacaggctggaatt

SEQ ID NO: 618234 - DNA, 75 bp, Homo sapiens
taaactctgcacattcattctcaaaaacccacctggacgactgggtttggattcagaagaggattattatacacc

SEQ ID NO: 618235 - DNA, 87 bp, Homo sapiens
cgaaggtgaagagttgtcccagctcggcccgcgggggagccccgggagccgcacgacaaatttacatgtattggagaccagaccaga

SEQ ID NO: 618236 - DNA, 82 bp, Homo sapiens
ctcgcctttgccgatccgccgcccgtccacacccgccgccagactatgttaggtcttaatggtgggaggacgcccgagtgct

SEQ ID NO: 618237 - DNA, 98 bp, Homo sapiens
ggagcaaaaccaacgcctggctcggagcagcagcctctgaggttggacgtgataagtatgagcctgcagctgtttcagaacaaggtgataaaaagggc

SEQ ID NO: 618238 - DNA, 100 bp, Homo sapiens
aaggttgcgactattaccaaataggcgagtagcttgcattgccatggagaagaccaaacaggagcagcaggccagctgtacttggtttggcaagaaaaag

SEQ ID NO: 618239 - DNA, 82 bp, Homo sapiens
cgtatgcaggagctggtttccctcccacctttgccattcctcaagctgcaggccgccatggcatcagatgaaggcaaacttt

SEQ ID NO: 618240 - DNA, 75 bp, Homo sapiens
cctgggatcagatgtgcattgaggaatgctgtctctgcaatttgagaggaggtgctcttaagcaaacgaagaaca

SEQ ID NO: 618241 - DNA, 98 bp, Homo sapiens
agcccatcagaatggcagatggcttatgaaccacagagacgagttgtactgctgtcacaggaaatggacgctggattacaagcatggcagctcaggca

SEQ ID NO: 618242 - DNA, 75 bp, Homo sapiens
aaaggcagggcaaggaaactggccacaactgagtcagtgctgattctctcaaatagagcttgaaggataaatctt

SEQ ID NO: 618243 - DNA, 120 bp, Homo sapiens
cgccaaccgcaaccattgacgccatgtcgggttattcgagtgaccgagaccgcggccgggaccgaggagaagcctgtgtctcccaaatcaggaacactgaagagccctcccaaaggattt

SEQ ID NO: 618244 - DNA, 75 bp, Homo sapiens
agaacatcggtctgggcttcaagacacccaaggaggtgggatgcagatcttcgtgaagaccctgactggtaagac

SEQ ID NO: 618245 - DNA, 80 bp, Homo sapiens
ctcgcgatgagtggtctcggcaggctcttcgggaaggaattacatgatgcgtaatgctgtgctggcagccatggcggaga

SEQ ID NO: 618246 - DNA, 95 bp, Homo sapiens
cttcaactacgctgtgcacgagggtctcggcctcgcggtgcaggttggtgggacaagtgatgttgaagtgaatgaaaagaaagacagagttacag

SEQ ID NO: 618247 - DNA, 90 bp, Homo sapiens
tggacctaccatgaaagacttctgaatccaggaagagagactgactgggaaacatgttattcagaaatgattctggggaccattctgacc

SEQ ID NO: 618248 - DNA, 50 bp, Homo sapiens
ttcgtcttcccctccaacatggctgccattcgatttcacatggaagatgc

SEQ ID NO: 618249 - DNA, 75 bp, Homo sapiens
atacggagtacaaaaacggcccttggatgatggaggacattgccgagaatggctgcgcccccaccccagaagagc

SEQ ID NO: 618250 - DNA, 100 bp, Homo sapiens
gacccagacccggacgacccccattgctgagccagcggagctgcttggctcttcgtcagattgggcagaggacgataagcactgcttcccgcaggcattt

SEQ ID NO: 618251 - DNA, 75 bp, Homo sapiens
ctcaggtcctcgggggcggcggccacgccaaggacggagcatatcatgtcccgagtgggaaaatattagctgtaa

SEQ ID NO: 618252 - DNA, 95 bp, Homo sapiens
catcgacggcatgactactggctgctagccggcattataaaatctccatccagttcctggtgtacaggcgcagcaccgccgcctcggagcttgag

SEQ ID NO: 618253 - DNA, 100 bp, Homo sapiens
gtacaacgtgcgatccatgcccatccgaaaggatgatgaagttcagctcctacagaagaagggaaaaaagagctgctgttcctaagtaacgcgaacccct

SEQ ID NO: 618254 - DNA, 100 bp, Homo sapiens
cttcctcctccttataaagctctgactgatgacagtgatgaaaatgaagaagaagatgcctttaccgaccgtgaccaagaatatggcccaggtgaccaaa

SEQ ID NO: 618255 - DNA, 100 bp, Homo sapiens
cttgaggatctcaaaccgcttagcgaggaaaggaataaacattacaacggtggctattccattggtgctccttgttgtcctggtgtttgctggaatgggg

SEQ ID NO: 618256 - DNA, 82 bp, Homo sapiens
cggggctgctggtgggccgcgtcgaagacatggaccagggctacggaggggaacgcccttttgcttgtgactggcagggctg

SEQ ID NO: 618257 - DNA, 76 bp, Homo sapiens
ggaaggtgcgcgagctggtggacaaagcggatgcttgaagatggaaagaaatttgattcctcccgggacagaaaca

SEQ ID NO: 618258 - DNA, 90 bp, Homo sapiens
cagttcaaggaggagaagcttgcagagcagctgaagcaagctgaggagctcaggggtatactctagttgaatatgaaacatacaaggaag

SEQ ID NO: 618259 - DNA, 75 bp, Homo sapiens
gggacagtgtctttccacctttggatccgcagaaatcgaggcctcctgaattgcaagatgccacctgctgagaag

SEQ ID NO: 618260 - DNA, 83 bp, Homo sapiens
ccgggacccccaggacgacgtgtacctggacatcaccggctgaccccgcactacatctacccaccagccatcgtgcagcccag

SEQ ID NO: 618261 - DNA, 100 bp, Homo sapiens
gaatctcctatagatccacagcctctcaggctttcagtccagtgtaaagctgttggagcgcgggagcaaaggtaaagaatgatgtaatgcgctggctgct

SEQ ID NO: 618262 - DNA, 88 bp, Homo sapiens
acgagcgacggcggaacccgtgggcctgtggactgcagcctcggcggtcagcagctggccagctcagcgtccctggaagggaagggac

SEQ ID NO: 618263 - DNA, 100 bp, Homo sapiens
aggaaacccagccgcttctggggcctcctggcggcaggttgactgcattcagccagtgccaaaagaggagcccagtcccgctaccaaattccagtccatc

SEQ ID NO: 618264 - DNA, 83 bp, Homo sapiens
cagtcagccaagctgctcattaaagcaggagccaacgtgcttgccaagaacaaggtattgatgtcaagctgaaccatcgtagg

SEQ ID NO: 618265 - DNA, 73 bp, Homo sapiens
attccacgaagtccatctggaagacggtcctttccctgctgcccccagccttgaaaatcctatgagaagaata

SEQ ID NO: 618266 - DNA, 51 bp, Homo sapiens
cccggttggcccgggacgagtggaatgatagcaaagccattgtggatggga

SEQ ID NO: 618267 - DNA, 75 bp, Homo sapiens
aagggcctccgtctggatttccaaggaagaatttcctctgaagcaccgcaaattgtggctactaatttgccccct

SEQ ID NO: 618268 - DNA, 96 bp, Homo sapiens
cgaaggcccgcggcgccccgtgctgcagggatatgggattagaactgtttagaacccatattattagtgataaaatggttcagagtaaaaccattg

SEQ ID NO: 618269 - DNA, 90 bp, Homo sapiens
ccacctcctcagattcccctgcacccgccagctctagctcacaggttacagccagcacatcggttgtaaacatgttaaaggcatcctgtt

SEQ ID NO: 618270 - DNA, 75 bp, Homo sapiens
agtctctcttcaccctgccgtcatgtctaagtcagagagcttcatctttatgacggttgtgtattttggtcccct

SEQ ID NO: 618271 - DNA, 101 bp, Homo sapiens
cggaacagcacgagcacgtagcaggtctccttgcaagacttcgaaagtctcccatcaaaggacgtgcacagccttatgatcccaatttttacgatgaaacc

SEQ ID NO: 618272 - DNA, 100 bp, Homo sapiens
taacactcaagcctttctacatgagggataatgaagatggccctcagcacacggtttttgtcatccattggagggacactgtatgaggttggaaagcctg

SEQ ID NO: 618273 - DNA, 98 bp, Homo sapiens
cagctaccctcacacggcggccctaaaccctcagctgagagtgacatgatgccctcaccgtggtggtggatgacctccgcctgtgctctgtgaagccg

SEQ ID NO: 618274 - DNA, 74 bp, Homo sapiens
ctactccagagctccgacttatttctgtgggcagacattaacattcaggttacagtgtacagcatgtatgtttc

SEQ ID NO: 618275 - DNA, 75 bp, Homo sapiens
gccgtcgccgccgccaccatgcccaagagaaagagtccggcagcgtcttctcttgagggagcaatttggagaaga

SEQ ID NO: 618276 - DNA, 101 bp, Homo sapiens
gttccgcgaggacatcacgtggaggcggccccaggttcatctgcagaagccagcggacgcctctgttcaacttgtgggttacctggctcatgagaccttgc

SEQ ID NO: 618277 - DNA, 100 bp, Homo sapiens
cgccgcccgcagcctgccgcccgccgcagggcgctgacggtcccgcacgtctgccgctgccaccggcgcgcccgatgggacacagcaggccaggaaagat

SEQ ID NO: 618278 - DNA, 95 bp, Homo sapiens
tataacaccaagaattctcaaccacagtgcattgtatgtgtgaattacgttgtgagaaattccgggtagatatgcctggctcaggcagtgcattc

SEQ ID NO: 618279 - DNA, 83 bp, Homo sapiens
gctgaagtaatgcaatggtctcaatctctggaaaaacttcttgccaaccaaagatccaggtggacccagaaatggaaccagtg

SEQ ID NO: 618280 - DNA, 98 bp, Homo sapiens
ggcgggggtcggcccggggctcggagaatgggcaggtggctgcaaaattcgggttcagggggactggatcagagagcgccgctttgaaatccctgatg

SEQ ID NO: 618281 - DNA, 90 bp, Homo sapiens
ccttgctgcactttattatgccggagaagttatgaagacagtatggagtttccagaccatagtagacatttgctacagtgtctgagcgag

SEQ ID NO: 618282 - DNA, 101 bp, Homo sapiens
gccgctgagccgtcgcggagccgcgcagccctcggagcacgaacccagcgggtgccgcttctccacccgaggcttccacctccaacgagccatgttccagg

SEQ ID NO: 618283 - DNA, 50 bp, Homo sapiens
gggaggttgaacttattaatgtgttcaaagctgaaacaggagagaaactt

SEQ ID NO: 618284 - DNA, 75 bp, Homo sapiens
gcgcgggaggcaggttccgcacggttgtcttcaaccaccttactcctccaccgcccgatgaacacctggatgaag

SEQ ID NO: 618285 - DNA, 89 bp, Homo sapiens
acagtttggcgtgcaacatggggcttgagaaaggaatgtacatggcaagtcaaagcaaacgatcgcaagtaccacgaacaacctcactt

SEQ ID NO: 618286 - DNA, 82 bp, Homo sapiens
cgccatgaaggcctcgggcacggtctcggcgcggaagatggccggcggcgtggacggccccatcgggatcccgttccccgac

SEQ ID NO: 618287 - DNA, 76 bp, Homo sapiens
caaagaaacaagccgtggaataggtgtatcaagtaatggtgcaaagcctgaatcggtcctcggtaacaccagcggc

SEQ ID NO: 618288 - DNA, 76 bp, Homo sapiens
ggggagagaggagagaaggggagcagagaaagtggctcatgccaaagaagaaaaccttagtatgcatcagatgctg

SEQ ID NO: 618289 - DNA, 74 bp, Homo sapiens
ccactgcgcagaccagacttcgctcgtactcgtgcgcctcgcttcggaaggttgtgcaggaccagcgttccctg

SEQ ID NO: 618290 - DNA, 100 bp, Homo sapiens
gagcccgccgggaccccccggagcgcggccacggcgcagggtgtcctgttcccaaagctgagctgatctgccacctagagcatgggcaggagccatggac

SEQ ID NO: 618291 - DNA, 83 bp, Homo sapiens
acagctctttcctttccgtctggcggcagccatcaggtatgccttgcaatagctcattattcccagccaacagacctccagct

SEQ ID NO: 618292 - DNA, 75 bp, Homo sapiens
ggaagatggcgcctgttgtgacaggaaccttcgagatctgcggtctggggtctggttgaaagatggcggccctca

SEQ ID NO: 618293 - DNA, 76 bp, Homo sapiens
tgaaaatgtgatctcccttaaaaagatggacggggagtccgaggaggagcaggagtccgtggacaccggggaggag

SEQ ID NO: 618294 - DNA, 74 bp, Homo sapiens
gctgtcaaagccattgaagactctgatatgttacaggagactgaatgtggatgtcagttcacgtcaaaactgga

SEQ ID NO: 618295 - DNA, 100 bp, Homo sapiens
aagagcactagtgtctagaaggcactaaggagcttgatgcattagatgccaatgatgagttgactcctttgggacgaatcctggctaaactccccattga

SEQ ID NO: 618296 - DNA, 96 bp, Homo sapiens
cacaaagcctgcgaaagtgctcgggaagagggagagcaaacttggctcagcccactaatgttctctatgggccactccacaccaagcaggcagtga

SEQ ID NO: 618297 - DNA, 82 bp, Homo sapiens
gaaaaattaatcaacagagtgggacctaatggtgagaggagtttgaccactttctggccaccaagttctcgacagtgaagcg

SEQ ID NO: 618298 - DNA, 82 bp, Homo sapiens
tgacggagctgcagtcggcactgctactgcgaagacagctggcagccattgagacccagagcagcagttctgaagagatagt

SEQ ID NO: 618299 - DNA, 82 bp, Homo sapiens
cagaagtggaacagccaaaaggaacagaagttgtgagagatgctgtaaggaaactaaagaggctgcaggggagtgagaccca

SEQ ID NO: 618300 - DNA, 75 bp, Homo sapiens
atggtggtctggggcaacgcggaaggtgctcagcagggagaccccctttcccgctatatcttcaggaaggctggg

SEQ ID NO: 618301 - DNA, 75 bp, Homo sapiens
gaggcgttcagctgcttcaagatgaagaccagaccagctttctccatgcagctctggccatgcgtattggccatg

SEQ ID NO: 618302 - DNA, 73 bp, Homo sapiens
gacgattcagagactgaaaaacctgaggctgatgacccaaagggagactgccagactcgggaggaggcagtgg

SEQ ID NO: 618303 - DNA, 75 bp, Homo sapiens
gcccagggcagggctcctaaggaaggacccgcctttaggggctgcagtcttgcagtgatatctggagtactctat

SEQ ID NO: 618304 - DNA, 90 bp, Homo sapiens
gtgttaatttgggcgcttcttggattctaccctgaggaggaggcgcgtggtgagaggagaggcgacgttgtggacgtttaccagcgggag

SEQ ID NO: 618305 - DNA, 98 bp, Homo sapiens
ctcttggctttactgaaattgaagctgaaaaaagtatgtcatctggaggaattttgcggcagtgtctccgactagaaattgcatctgatggtctcaag

SEQ ID NO: 618306 - DNA, 50 bp, Homo sapiens
cggcgccttcggcaaggtttacaagggccttcctccggatgctcttcccc

SEQ ID NO: 618307 - DNA, 104 bp, Homo sapiens
acaacccgtacatcaccgacggctaccgggcctacctgccgtccaggctgtgtatcaaaagcttttggaaagaacaaacagtggatttgaagaatcagattctg

SEQ ID NO: 618308 - DNA, 51 bp, Homo sapiens
ggagcatggaggcgcacaacatcctcaggagagaagatgactgaggaggag

SEQ ID NO: 618309 - DNA, 75 bp, Homo sapiens
ctggaatctctgcacgggccttggcccttcataacacaaggcttttatctgcttattccgccattgatcccagag

SEQ ID NO: 618310 - DNA, 87 bp, Homo sapiens
cggagcgccccttcgcgtcccctgcaccatgagctggggcaccgagctctgggactccctggaggaaaagcggaagcggcagcggtc

SEQ ID NO: 618311 - DNA, 100 bp, Homo sapiens
cagtgatgacagaccgacttaagttcggattcggcttccaccgcttcttagtgaaaactacccctgagtgtggtcccacaggatatgtagagaaaatcac

SEQ ID NO: 618312 - DNA, 101 bp, Homo sapiens
agaaagtgaagctgtttcgggccagcgacccgctgctcagcgtcctcatgtggggggtaaaccactcgatatatgtaatcgacagtgcagacagaaaaaga

SEQ ID NO: 618313 - DNA, 51 bp, Homo sapiens
ccgacgaggaggcagccgtggtccaaagtggagaaaaaagggcatcatccc

SEQ ID NO: 618314 - DNA, 80 bp, Homo sapiens
ctctacgcctcctacgtttacctgtccatgcctgggctctgagcagagcttccggattcacttctccagagaggaccagg

SEQ ID NO: 618315 - DNA, 100 bp, Homo sapiens
aggacgaagtgctcggcggcatggtcgtgatgtctcgggagtcggatgttgaggctcagcagtctcatggcagcagtgcctgttcacagccccatggcag

SEQ ID NO: 618316 - DNA, 90 bp, Homo sapiens
tgaggcagagcctaagagaactatggcaacatcaggtgactgtcccagaagtgaatcgcaggtgagccgttctccaaccctttggccccc

SEQ ID NO: 618317 - DNA, 84 bp, Homo sapiens
agcaagctgaagacatcaagaagatcttcgagttcaaagagaccctcggaacgttttaaaatcaaagatgggaaaatcggagaa

SEQ ID NO: 618318 - DNA, 50 bp, Homo sapiens
aaagattggatcaggaccatgtgaggttagcatggcctcattgaaagaac

SEQ ID NO: 618319 - DNA, 100 bp, Homo sapiens
ctgccctttaggatttgttagaaaggagacccgactgcaactgctggattgctgcaaggctgagggacgagaacgaggtgtcatggagaaactccagctg

SEQ ID NO: 618320 - DNA, 100 bp, Homo sapiens
gcagttcatcttcctccctgtgtactttccatttgccttcctggggctgatcccttatccaacatggttctaaccttcagtactaaagaagatgcagttt

SEQ ID NO: 618321 - DNA, 95 bp, Homo sapiens
gtcaacaaccgtggctcacaagatgaaagagcacggtccacatatagcctcagttacattagctgcttatgaatgcaattcagttaattttcccg

SEQ ID NO: 618322 - DNA, 51 bp, Homo sapiens
aaaagaattcttcgaaaattggtgaaacctgctgtggaccctgctgctgcc

SEQ ID NO: 618323 - DNA, 83 bp, Homo sapiens
atgaggatgacgtctttgcccgggagccatttgtggcccagttctctttgcccagcaatggaactgctcaaacctgtgcccca

SEQ ID NO: 618324 - DNA, 100 bp, Homo sapiens
tcgaccagtccaagctgcctggagtcaaggaagtgaagaactgaatgtcatcatgtctggaatcaagcgaaccatcaaagaaaccgaccctgattacgag

SEQ ID NO: 618325 - DNA, 75 bp, Homo sapiens
agaagctacaaacaagaaatgggaaaactcgaaacagattttatggcagatgatcagggctgtattgaagagcag

SEQ ID NO: 618326 - DNA, 80 bp, Homo sapiens
accgagccggagctgctcgacgaccaagaggcgaagagtgccctctggtggtcagaagatgctgtgctgtctcgttagga

SEQ ID NO: 618327 - DNA, 76 bp, Homo sapiens
gctccttctcctggagacgcaactcaagatgatgaagaacgagagcttcaaatggatcctgcagactatggaaagc

SEQ ID NO: 618328 - DNA, 100 bp, Homo sapiens
ccggcggcggcggcggcggcggcggcggcgcaggagctacagggagctggccgactgcacctggcacatggcggagaagctgggctgcttctggcccaat

SEQ ID NO: 618329 - DNA, 90 bp, Homo sapiens
cgagaaaggtcccactgcagccctccaagcagaaaccaggcgatgcggaagaagctaatcttgtacttcaagaggaggaatcacgctcgg

SEQ ID NO: 618330 - DNA, 98 bp, Homo sapiens
ttggtggttaagaaaggaaatcaaaccgaaaatgtgtatatagtggcctcatcctgcatgactcgcctgtcccggtctcgtacagcctctctgaccag

SEQ ID NO: 618331 - DNA, 100 bp, Homo sapiens
tgtggaagactccaagccctactgggaggcacggagggtggcgaggcagcatttttgaaacgttggggttgttggagtggttggattttccctggaattg

SEQ ID NO: 618332 - DNA, 100 bp, Homo sapiens
agcgcaacctggtagtggccgggacctcgcagctctacgtgtaccgcctcaaccgcgacgccgagtctcatataatggcagcaaaggctgtagcaaatac

SEQ ID NO: 618333 - DNA, 100 bp, Homo sapiens
tgctcaccaagccctgttggagactatgcaaaacaagtttatcagtgctagactggatcgagaaccacggagaagcatttctgagcaaacatacaggtgt

SEQ ID NO: 618334 - DNA, 73 bp, Homo sapiens
tggaagaagcatcctccagggacatgcaaatggccgacgcccccaacccatccctcatcccagagactgatgc

SEQ ID NO: 618335 - DNA, 100 bp, Homo sapiens
aggcgaaaggaagcaagcagttcagaagagccaaggaataaacatgcaatgaacccaaaagggaatgatgagaagacagcagctgattacaagattttag

SEQ ID NO: 618336 - DNA, 73 bp, Homo sapiens
agccactgattagcaatttaaagatcctctccaaggaaacagagcaaatgcagcgttacaatcaaagacttat

SEQ ID NO: 618337 - DNA, 80 bp, Homo sapiens
gcccagttggcccagaggatctcttctaacatccagaagatcacacagtgttggcaccattcccaaactcacagctaaat

SEQ ID NO: 618338 - DNA, 100 bp, Homo sapiens
gagaccaagaacccaccaattccggacacataactagcaaagctacctcaggatggagcagaaagaagatgctgatatgctacaacacggatgaacctgg

SEQ ID NO: 618339 - DNA, 74 bp, Homo sapiens
gtacaagcactcaaggagctgatattacataacccgaacactcgggtgcctcgcctgcccgaatttgctgactg

SEQ ID NO: 618340 - DNA, 128 bp, Homo sapiens
tagtgatcccattgggggttgatacagcagagacgtcatacttggaaatggctgcaggttcagagccggagcctcaacagaaagctcctttagttcctcctcctccaccgccaccaccaccaccaccg

SEQ ID NO: 618341 - DNA, 100 bp, Homo sapiens
tcggcgcggtcctgtactggctgctgctgccctgcgcgctgctggctggtgtcatggagaaactccagctgggcccagagattctgcagcgggaaaatcc

SEQ ID NO: 618342 - DNA, 100 bp, Homo sapiens
cgcgttcccgccggccccagctccagccccgcagcccaccggatagtggctacccagagacgctggtcaacctcatcgtcctgtcccagcacctgggcaa

SEQ ID NO: 618343 - DNA, 51 bp, Homo sapiens
aagatcagtgtgtggaaatcagtacaagcaaatgctggtgaatgctttcac

SEQ ID NO: 618344 - DNA, 100 bp, Homo sapiens
ccaagtctctacagttaactggcaaagaagcaaatggttatgagccttagagtttctgaactccaagtactgttgggctacgccgggagaaacaagcacg

SEQ ID NO: 618345 - DNA, 75 bp, Homo sapiens
agcctccaagtctctgacttgtgcttggcagcaacatgaagatcattttggaaccttgggtaatgtggaacatgg

SEQ ID NO: 618346 - DNA, 100 bp, Homo sapiens
gaaattgttaatgttaattgattctagcacgctagaacctaccaaatccctccacctgcatatggtgctgcagaaattggggaaagctgtagaaaccaaa

SEQ ID NO: 618347 - DNA, 96 bp, Homo sapiens
gaagctgtattccctagagggttacgggacagatgcagttatctacattaagtgaactgaattcaaagctgcaagatactttggaacagattgagg

SEQ ID NO: 618348 - DNA, 98 bp, Homo sapiens
acgccggggccacggcaggggcggcggccttacggaaagggctattgcaagacacgaagtccgagaaattgagcagcgacatacaatggatggccctc

SEQ ID NO: 618349 - DNA, 97 bp, Homo sapiens
agtgcggagagaggctgcctcctgcagcccccatagcagggcagagcggcttgggtaaatccaccttaatcaacaccctcttcaaatccaaaatcag

SEQ ID NO: 618350 - DNA, 90 bp, Homo sapiens
gtttcagtgatactctgaaaacgtattttaaagatggcaaagatcaatggcttttcaaaagcagcacaccaaactgtcaaagtggtgatc

SEQ ID NO: 618351 - DNA, 98 bp, Homo sapiens
atccaagtgcgcgccctggcgggtccggaccaaggtgatttgatgaaggctgctgcaggagagttcgcagatgatccctgctcttctgtgaagcgagg

SEQ ID NO: 618352 - DNA, 100 bp, Homo sapiens
ttcatctccagcccggagtcttggggacacaggaataacgcctctgtccccctcccatattgtggcgcgcctcaagttccccatcgactacccatactct

SEQ ID NO: 618353 - DNA, 81 bp, Homo sapiens
gcagagcaagcgcggggaaccaaggagacgctcctggcactgcagaggctattttagcctgcaaaaccccaaagaagactg

SEQ ID NO: 618354 - DNA, 100 bp, Homo sapiens
ccaactagtattatgagaggagtcaatcagaggtttctataatccaggaacttgttactaattatgaagcctctcttaaaacgtgtgacttttttagccc

SEQ ID NO: 618355 - DNA, 75 bp, Homo sapiens
tttgatgcataaaggcagctttgaaacaaaaataatgttgagtttccatgaagaacaggaagtactgccagaaac

SEQ ID NO: 618356 - DNA, 83 bp, Homo sapiens
aatcggcagctgagacggccttggccgagcaccatcaatcagacgcctgtgaccctgcaagtgccgggcttgatgagctccca

SEQ ID NO: 618357 - DNA, 108 bp, Homo sapiens
ggctacttctttgctcctttgaatttctatctctacgaggcagaggaagccacaacactccaaggactggcgcctttggggcgtggttgctctccagaccctacgaaa

SEQ ID NO: 618358 - DNA, 87 bp, Homo sapiens
aagatctacatccaccgagtcggccggacggcccgtgcagagcactgcagtttcctcctgaaggctggctccggctctccctcaata

SEQ ID NO: 618359 - DNA, 75 bp, Homo sapiens
atgattatgaggcatgggcaaaacttgatgtgtacaaacctccagggaacctggctggctagaagggactctgaa

SEQ ID NO: 618360 - DNA, 107 bp, Homo sapiens
gagatggaacccgaagaagaaaggattcgttacagccagagattgtatggcatgcagctgtaccagaattatatgcatccatatcaaggtagaagtggctgcagttc

SEQ ID NO: 618361 - DNA, 75 bp, Homo sapiens
gctcacgcagcttcaggacgctgtgaattcgttccatactaccatcttgcaagtttccatcccttcattattgcc

SEQ ID NO: 618362 - DNA, 98 bp, Homo sapiens
ttttagggtcctttatatagaagggagagtagttgaaaatgaagatgaggctgaaagggttcttttttcctacggctatggtgctaatgttcccacaa

SEQ ID NO: 618363 - DNA, 49 bp, Homo sapiens
gatttaaccttagctctctctgtaaaaacaactctgctcatggtgatta

SEQ ID NO: 618364 - DNA, 73 bp, Homo sapiens
gctttgccaagaagatggacaagatggtgcagaagaagaacgcgaataatcatgggccagactgggaagaaat

SEQ ID NO: 618365 - DNA, 100 bp, Homo sapiens
tcttctgacagcagtggaggcagaagttcggcaccttatttctctgctgagtgtccagatcctccaaagacagatctgcacaaacgtgcagatatctgat

SEQ ID NO: 618366 - DNA, 98 bp, Homo sapiens
ctgcctcagcctccggagtagctgggattacagaaagaagattggcccatgcacaagctggaatgttctcccatggttgtttttggggaaaactggaa

SEQ ID NO: 618367 - DNA, 100 bp, Homo sapiens
gccatcaaagaagggaaaaccagctgaggtgtccgtaaagattccagagaagcctgtgaacaaacagcctcccgcgacgatgcccctcaacgttagcttc

SEQ ID NO: 618368 - DNA, 99 bp, Homo sapiens
tagactgaatccacatagagaaagtgatgggatttgaacatggaattcaatccttcagatcatcctcgggccagcacaatattcctcagtaaatctcag

SEQ ID NO: 618369 - DNA, 98 bp, Homo sapiens
gtgtcagtgttaaaggaacctctacaacgaaggtgaagccacggaagataaggccccagggagcgccatggcccgcgcacgccaggagggcagctccc

SEQ ID NO: 618370 - DNA, 74 bp, Homo sapiens
cccacgctacctgctcttggagaagcacaacgaggcaagagctgtgaaagatattaataaggcagcggaaagaa

SEQ ID NO: 618371 - DNA, 99 bp, Homo sapiens
gaaggagcggaagaatggcagtgctcaaactcaccgaccagtagtattattgattccacagaatacagccaacctccaggtttcagtggcagttctcag

SEQ ID NO: 618372 - DNA, 82 bp, Homo sapiens
ccggagcgtcccagctgcgaggagaggttgacggatatattcagacgttacgacacggatcaggacggctggattcaggtgt

SEQ ID NO: 618373 - DNA, 100 bp, Homo sapiens
ctatactccaagcaagatctcagtcagagtaggaaataattttcacaaccttcaagaaattcggtgcacttgcaggaaagacatggtgaagatttcaatg

SEQ ID NO: 618374 - DNA, 90 bp, Homo sapiens
gcagcatggaggacgatgcaccagtgatctacgggctggagttccagacccaacatgagtgaagtttcctgcaagaaacgggacgactat

SEQ ID NO: 618375 - DNA, 83 bp, Homo sapiens
gggaggtgttcgagaacgaccccgagacggtgcagagcattgtagaccaaggagccatggataggagaagtatgggtgaaaca

SEQ ID NO: 618376 - DNA, 100 bp, Homo sapiens
gcggacgggctcccgctggccgcctcgatgcaggaggacgaacagccacctgtctttaccagtttccaagactatgttactgggcttcagactttaattt

SEQ ID NO: 618377 - DNA, 83 bp, Homo sapiens
atccgagaagagcagagcggagggagccccagacacgggacttgccatgaggtgttgaagccttgtttcactgagttggagag

SEQ ID NO: 618378 - DNA, 97 bp, Homo sapiens
actgtggtgaagaaagtgagcgaggagtcagaaactcagccactggttgccttggtaggcaataaaatgcacagccagagaacaacacatcacacac

SEQ ID NO: 618379 - DNA, 100 bp, Homo sapiens
agatatttatgcttatctgagacaacttgaggaagatgcccaggaagaatttggctggaaacttgttcatggtgatatattccgtcctccaagaaaaggg

SEQ ID NO: 618380 - DNA, 75 bp, Homo sapiens
tgtggtctctgcacctcctttctattcacaatgacatcctttcaagaagtcccattgcagacttccaactttgcc

SEQ ID NO: 618381 - DNA, 73 bp, Homo sapiens
cccggccttactgaggaacaaagggaaaaccaattctgtgtcctcggaggaccacagcccagttgggccccag

SEQ ID NO: 618382 - DNA, 75 bp, Homo sapiens
aaacacatatactcaaagctcatgctggtgctgatagtctgcagcacaggtttagctgggattatgctgctcaac

SEQ ID NO: 618383 - DNA, 100 bp, Homo sapiens
agaaagaggacagtctggcccaggctggcgagaaaaatggctacaaacttcctagcacatgagaagatctggttcgacaagttcaaatatgacgacgcag

SEQ ID NO: 618384 - DNA, 80 bp, Homo sapiens
ggcctgcagcacccgccaccgtcgccggccgcccgcacgtccgtccgccacccgcgagtcggccttcgttcacgccatcg

SEQ ID NO: 618385 - DNA, 96 bp, Homo sapiens
gccgattccacggatgctcgcagcactctcagccaggtggagccagaaagtttcctacactactgaggtttaggggcactgtgaagcaaaagccac

SEQ ID NO: 618386 - DNA, 50 bp, Homo sapiens
tttcaacgggactattatgataggttccagatgtggaatctcgtgaagac

SEQ ID NO: 618387 - DNA, 90 bp, Homo sapiens
ccaagaccaaggacaaccctggcagcatcgggaaggtgctggagaatctggtaaaagcaccattgtgaagcagatgaggatcctgcatgt

SEQ ID NO: 618388 - DNA, 100 bp, Homo sapiens
tttacaaatcttcagggaatggccaagtgacaaagttgtggacatcggatacccaaggagacgaagctgaagcaggagaaggaggggaaaattaaccggc

SEQ ID NO: 618389 - DNA, 100 bp, Homo sapiens
gccccaagacagagcgctactcctggcagtgcgtcaatcagagcgtcctgtgcggctgttttggagtcagcggaagatcaccaaggccagggagtggttc

SEQ ID NO: 618390 - DNA, 85 bp, Homo sapiens
gcattcactgctcagtgttccaaagattctccgcatctcctctggatccgagagactgaggtcatcgacccccaggacctcctag

SEQ ID NO: 618391 - DNA, 100 bp, Homo sapiens
tatctttgcaggttgtagggaagacttttgctgcagttgcaggaagaggcagaggaagaggaagaggaagaggacgtggccgtggcagaggaagaggggg

SEQ ID NO: 618392 - DNA, 101 bp, Homo sapiens
cgcacctcagccgcctcctagcggcgcggcgctcgctcctacgaatgtgacagtgatgataacatgggtgccaaaaatacttcaataggagaagaatttat

SEQ ID NO: 618393 - DNA, 100 bp, Homo sapiens
gtgaaaccatctgaccttttagaagaaaataagataaattcatcggtgaaattcgcttctggtaatactgtagtggttggcacttaccatggttccccag

SEQ ID NO: 618394 - DNA, 83 bp, Homo sapiens
tatcacttctgatgactccctggagcacactgacagttcaggtagtgtgatcaagctggaggaacagaagtcagacctggaga

SEQ ID NO: 618395 - DNA, 98 bp, Homo sapiens
gggaagatctttttcctcaattgaaaacatagctctgctggcagaaacagctctgagattcctggaattagtacagttaaaaaatcttaatatggaaa

SEQ ID NO: 618396 - DNA, 116 bp, Homo sapiens
tgccgccgccgccgccgcggtttgtcgccagaaggaagatggcggatctggaggagcagttgtctgatgaagagaagtttttcagaagaagtgaagtcaagatgaagaaccatttg

SEQ ID NO: 618397 - DNA, 50 bp, Homo sapiens
cgacagcgaacatgtcgcggcctgtcagatatggccgcgtggaaagtgtc

SEQ ID NO: 618398 - DNA, 90 bp, Homo sapiens
gcggggccaggaagtcggagtttgagccccggaggcagagcggctgccatgggcgccctgcgtccggcagaggaggcgagcatcccgctc

SEQ ID NO: 618399 - DNA, 74 bp, Homo sapiens
tgaatcagatggtacagattgctgcagtggaaaatcaggcaaaataatcctatggtgaaaaaaatcaacaagat

SEQ ID NO: 618400 - DNA, 50 bp, Homo sapiens
ggaggagtttcagcggatgcagggccccgagcacgacagccgcagtctcc

SEQ ID NO: 618401 - DNA, 100 bp, Homo sapiens
ggagtgatcagccagctggaagacacctgcaaaactatcgagatatgaggccccaggattcctggcgaggtcctcctccccttttccagcagcaaaggtt

SEQ ID NO: 618402 - DNA, 100 bp, Homo sapiens
gactttagggctgtggtgatggatgaggtggtgctgacaatcgagcaaggaaacctgggccagaaatgtacacacaggagagctggctgcagtaaaaatc

SEQ ID NO: 618403 - DNA, 75 bp, Homo sapiens
ctgcccatgagaagttctgtttctggccagacagcccatccccagtacgcctgcctcacaccttgcgatgcgcca

SEQ ID NO: 618404 - DNA, 90 bp, Homo sapiens
gccggcagaggatccagtgttcaccatcctggccccggaagttagctgctatcaccaaattaagggcaaaaggccaggttcttacaaaaa

SEQ ID NO: 618405 - DNA, 82 bp, Homo sapiens
gaggacgagggccagctgacggagatggtgcagaagatggaggagcagaaaaatatggctcaggagactaaccagaccccgg

SEQ ID NO: 618406 - DNA, 75 bp, Homo sapiens
gcaaatcgagggtctcggggatgcggatccaagaccctgggaaggaagctcttcgtgggcggtcttgactggagc

SEQ ID NO: 618407 - DNA, 82 bp, Homo sapiens
aaaaatccagaagtacaagcagtctggtaccgatgggcctttattccagaagcctcagatgattcaggtttggaagtcagaa

SEQ ID NO: 618408 - DNA, 94 bp, Homo sapiens
ctgtcttcggtggactccttcggcagtccacccaccgccgccgcctcccagtgtcacccgcaactacctagactggctcacgtccatcccttgg

SEQ ID NO: 618409 - DNA, 100 bp, Homo sapiens
cgcagccctgcaggccaagcgcagcctccaccagggcttctatgaggaggtggccaacccactgctgacgggtgtggagatggagtaccccgagaacgct

SEQ ID NO: 618410 - DNA, 100 bp, Homo sapiens
gtcttgctgaaagccagggaaggggttgtagaaggtgatttagctgccatagaagcatacaagtcatcaggaggagacattgcacgtcagctcaccgcag

SEQ ID NO: 618411 - DNA, 100 bp, Homo sapiens
tgtttcccggttaggactcggtgtaggagatccatcgaaccactcgctcaggatggtctgtcttctgctgatcccaactctgattggaatgcaccagcag

SEQ ID NO: 618412 - DNA, 100 bp, Homo sapiens
tgacctgtttgaacagcatcacacacctacctttaaccacagatcctgaggaggatgaaggggctggccctggaggccgagagtgagctggagagacaag

SEQ ID NO: 618413 - DNA, 100 bp, Homo sapiens
catgaggagggacgtgaacggagtgaccaagagcaggtttgagttttaacagtgtatgccagggaacacacattctctttcgagaattcagcttcgtcca

SEQ ID NO: 618414 - DNA, 100 bp, Homo sapiens
ctacatgtcggaggagaagctgcaggagaaaggcactggtgaggtggattgatgatgaatcttctggcacacctggagcaactccagaacacagtcgtga

SEQ ID NO: 618415 - DNA, 100 bp, Homo sapiens
ggacatcctggaagctgggaaatgagcaccatgtggcggagcacactgctgagagctacatgctgcagtggcagcgtggacacctttccaactatcagta

SEQ ID NO: 618416 - DNA, 100 bp, Homo sapiens
tggatgaccttttccgaaagaccaaggcagctccctgcatctattggctcccactgactgacagccaggcatccgtgtcattctggaccttactcccaac

SEQ ID NO: 618417 - DNA, 90 bp, Homo sapiens
agctcacccactgccagcagaggtcagcccaagactaccccgtcggtcattctgttcctgccgtcctgtgaggagccccaagccaacaag

SEQ ID NO: 618418 - DNA, 75 bp, Homo sapiens
ccgccaaccccttcgagcaagacgtgggtagcacaggcggagtgcagcggaggcccctgccgctgccgtcatgcc

SEQ ID NO: 618419 - DNA, 80 bp, Homo sapiens
tggaaggtgcgtgtggggctgggtctcggagtgggagacgtggagtgcaggtccgccgcgatggggaagccctggctgcg

SEQ ID NO: 618420 - DNA, 75 bp, Homo sapiens
gacaaagaaaaccccagtggatgttcagatcgcccaggaccacaccgcagcgtaactgcaggcctctcagcgaaa

SEQ ID NO: 618421 - DNA, 90 bp, Homo sapiens
gaggaggcgagctagccgggagttacaccgccaccgccagggacgcactctctgagatattttcgcctgggcgtttcggatcccatccat

SEQ ID NO: 618422 - DNA, 83 bp, Homo sapiens
aactggttcaccttcctcttgtataagttcctcaagcgggaacttcattgcaggccgtgtgtcaccctgaccacgtctatctc

SEQ ID NO: 618423 - DNA, 129 bp, Homo sapiens
cgagatcctgcggctccccaaggctctgcgcgagatgaactggcttgactacttcggaggaatcttcgagtatgcggacggccccaacgcccaggtcatgaatgccgaggagcatgcctttcgattttc

SEQ ID NO: 618424 - DNA, 75 bp, Homo sapiens
cgcattcgcagcactgtggctgagaaaaccatgagctgttttccaagagcttcatctccatggaagtgcctgtca

SEQ ID NO: 618425 - DNA, 95 bp, Homo sapiens
agcgcttctttaagggctacgggaagatcctggaggtggatctgaagaacgggaccgtataatagacgctggccccaaaggaaactactctcgat

SEQ ID NO: 618426 - DNA, 98 bp, Homo sapiens
ctgcagaaaccacagtggtagaggcctgatcttttggccagaaggagattaaaaagatgcccctcaagatggctgtgcctgtcagctgcatggagctt

SEQ ID NO: 618427 - DNA, 101 bp, Homo sapiens
tctcaggatgttctgagattgcatcaggatattaatgattataaccggagattctcagggcaacccagatctggaactgggaacagccaggtgccccaaag

SEQ ID NO: 618428 - DNA, 51 bp, Homo sapiens
cgcaacgtaaaatccttggaaaaggaatatcctccgaatcctaaatctaga

SEQ ID NO: 618429 - DNA, 74 bp, Homo sapiens
ggatgcagttatgggctctgtcgccgtgggctgtaccagtgcaggtcctcactttaatcctctatccagaaaac

SEQ ID NO: 618430 - DNA, 73 bp, Homo sapiens
tgtaatacatcatgaactgcaggtgctgttccctcgtcacaccaatgccagtgctcgagacaacaccatcaac

SEQ ID NO: 618431 - DNA, 90 bp, Homo sapiens
agaaatgtcagctgtctatatagaattcacagaatattactatccagatggaaaggattttccaaagcaccaatatggcctttgggaagg

SEQ ID NO: 618432 - DNA, 100 bp, Homo sapiens
atcattttaggaatatcctcaaaatatgctccagatggaaacccagcgtttgctggcagaaccagttcctggcatcaaagccgaaccagatgagagcaac

SEQ ID NO: 618433 - DNA, 90 bp, Homo sapiens
agactgcatcaacaagtatgggtctccgtacaccaaaaactcaggcttcgccacctgcgtgcaaagggagaagccgttccagtgtgagtt

SEQ ID NO: 618434 - DNA, 100 bp, Homo sapiens
gtgaaaacgacccggcagatcacctgtggccttgccgaagaactggaaaaagagaagtcaagggaacagatgagctcccaacccaagtcagcttgtggaa

SEQ ID NO: 618435 - DNA, 100 bp, Homo sapiens
gttctttctgaaaaagtacacatcgtgccttctctacttcgctcttggaacataatttctcatggcagtacgctggggaggaggaggaggaagggagcgg

SEQ ID NO: 618436 - DNA, 75 bp, Homo sapiens
gctccagtgagtccagctcctctgacagcgaagactccgaaacagaggctgggaggcggcagaatgcagccagag

SEQ ID NO: 618437 - DNA, 75 bp, Homo sapiens
ggaggcgctggccatcccccagcttcccagagccatgtccattggagcccgttcccaatcagctcgtacttactt

SEQ ID NO: 618438 - DNA, 83 bp, Homo sapiens
caaaggaattttgaagtcaccactgaggaggaattcaccctgttcgtctatggtactgtgagaatagagatgtttcgaaatat

SEQ ID NO: 618439 - DNA, 82 bp, Homo sapiens
atcatcatctacttcacaggaattgccatttcctaccgtatgtgaacgggagctgtgtgtgtttgcttttcaaaccctggga

SEQ ID NO: 618440 - DNA, 75 bp, Homo sapiens
agccccaaagccactggagtctttaccacacgcccaggcatccccatttccacccttcatgatggacgcactgat

SEQ ID NO: 618441 - DNA, 100 bp, Homo sapiens
tttcttcatgacaacatggttgaaattccaaaccggatcatgttctcagaaatgaagcgagtcacacagacctgcttggactgtaagaaaaatttttgca

SEQ ID NO: 618442 - DNA, 100 bp, Homo sapiens
gccgagatgtctcgctccgtggccttagctgtgctcgcgctactctctctttctggcctggaggctatccagcgtaatcattaccaaatgaggaggaaag

SEQ ID NO: 618443 - DNA, 48 bp, Homo sapiens
ttggctctggaacaactcctaattctaactctaaaatagagctcaagc

SEQ ID NO: 618444 - DNA, 90 bp, Homo sapiens
ttgtgctgccttggccaaaagaggtgctgacctggaggggaagcggcagatgaaggtcagtaatcggcacctggatttcctgccgccggg

SEQ ID NO: 618445 - DNA, 100 bp, Homo sapiens
ccacccatgccatgtccggcaccgccatccccatttctatggtcctcctcacctatggccgctggcagaataagaaagccttgagttttgtgaaaaaccg

SEQ ID NO: 618446 - DNA, 75 bp, Homo sapiens
acggagcggccgggggctcggccgggccgtcccggcctgcgcagcctgaggtacatggtgcagtggccgggagca

SEQ ID NO: 618447 - DNA, 90 bp, Homo sapiens
gaacctcagaacatacccaagaggacaaatcccccagatgacaatctgggagtgtgctggcaggaagtgggggctgacctcgtgtgcagc

SEQ ID NO: 618448 - DNA, 100 bp, Homo sapiens
gagtaaccctgaggcagtgggacgccaagactggagaggaagcgactgcgggctgagttggctgtcattcttaaatttgtgctggaccatgaggacgggc

SEQ ID NO: 618449 - DNA, 100 bp, Homo sapiens
tgctggaacttgtgattgagcagtttgaagacttgctagttaggattttattactggcagcatgtatatcttttggaggaaataatgctggccatacagt

SEQ ID NO: 618450 - DNA, 76 bp, Homo sapiens
aactactatattcagtggctaaatggctccctgattcatgggtgggctttgacagcgagaatcccggggacgacgg

SEQ ID NO: 618451 - DNA, 75 bp, Homo sapiens
ccgggggcagccgccatcggcagcgccagatctgccgacaccccaggccatcgagccccaggccatcgtgcagca

SEQ ID NO: 618452 - DNA, 100 bp, Homo sapiens
gacaccgggacctcctggaagccaaaaatgctcaaaacactggaatttcaactttgtataggaattcttatggtgcgcccgctgaagacatcaaacacaa

SEQ ID NO: 618453 - DNA, 75 bp, Homo sapiens
tctgtctccgtgggtttgactgctcatgtatgtgccagtcaaagatctactgggaatttatgagaaactgtatgg

SEQ ID NO: 618454 - DNA, 95 bp, Homo sapiens
aggagcagtagatgatgatgtagcagaagcgatctagggcagccctgcagaggtacctgttctactgtaatcgctatatgaaccacatgcagagc

SEQ ID NO: 618455 - DNA, 83 bp, Homo sapiens
ccgccctgttccccgcgctgcggcctggcggcttccaggcgcactaccgcgtactgtaagattgatgttaaaggcatggtgtt

SEQ ID NO: 618456 - DNA, 100 bp, Homo sapiens
gtctcagggcttgtgccctctcgcttcctgacgctcctggcgcatctggtggtcgtcatcaccttattctggtcccgggcaaaagagatttcactagcag

SEQ ID NO: 618457 - DNA, 100 bp, Homo sapiens
cgccagcctaggagaagaagttcgtagtcccagagttacttgctggacagaagaaaagctcccccttctggacatttgaatactaccaaacattctttga

SEQ ID NO: 618458 - DNA, 75 bp, Homo sapiens
gctgaaaacatgaagctcagagaggacacccatcatttgggtatgttatgcataaaagtggataatttacatgat

SEQ ID NO: 618459 - DNA, 85 bp, Homo sapiens
tggcgcgtcttctggagcaatgggaggtgggcttatctaaatcagatcccaaatagtatttaaaaagcctctaccaaaagaagag

SEQ ID NO: 618460 - DNA, 75 bp, Homo sapiens
tggaacgttaccatttcaacatggggctgctgatgggctgcagatgatcacccaggaagagaatgcagaatgccc

SEQ ID NO: 618461 - DNA, 75 bp, Homo sapiens
gccttcaatactacctttatttccaccatagattcgacttccacctgaagtaaatcggatattgtatataagaaa

SEQ ID NO: 618462 - DNA, 100 bp, Homo sapiens
ttcaagaagattgaactttattgtgaacaggtagagtacctgttgttgcagagttattttctgagtcagtttcaggtttttgctgcagagggtttaaagc

SEQ ID NO: 618463 - DNA, 83 bp, Homo sapiens
gtcactgcctgcgcagctccggccgcctggctccccatactagtcgccggaagctcttcgtgggcggtcttgactggagcacg

SEQ ID NO: 618464 - DNA, 100 bp, Homo sapiens
gttctatgctccctaatgaagatgctattaaggagcatggggctgcttttggtccaccgcaaggtggatttcatcctccttattggcaaccaggacctcc

SEQ ID NO: 618465 - DNA, 82 bp, Homo sapiens
cgcaggcagtggccacaagagcgaggagaagcgagaaaagatgaaacggaccctgacctgggatccagttggaggacggcgg

SEQ ID NO: 618466 - DNA, 100 bp, Homo sapiens
ccacagcagtggggcctcctctcccctctttgacagcggtttgcatctgaacggaaactccagtaccacaagccctaaataagtcacacagcaccctgaa

SEQ ID NO: 618467 - DNA, 60 bp, Homo sapiens
tcatagtcaacatggccctggccctcaaggacgttttgttctgaagactctcatattcag

SEQ ID NO: 618468 - DNA, 90 bp, Homo sapiens
ctaaagctagcattaacagaatggttgcaagagtttggtgtgcctcatcaatacagcactcccatggctattgaagaacaagtggctgtt

SEQ ID NO: 618469 - DNA, 101 bp, Homo sapiens
tcgaatgcaaccaggaggccaaagagttgtaccgagactataaccacggtgtgctgaagataaccatctgtgcccaagaaacagatattttcaagaaaaag

SEQ ID NO: 618470 - DNA, 100 bp, Homo sapiens
gggcctgctcttcgggaagattggctactacctggtgctgggctggtgctgcgtagccatctttgtgttcatggagggcatcctggctgtttcacccgtg

SEQ ID NO: 618471 - DNA, 97 bp, Homo sapiens
cagggcagggctcctaaggaaggacccgcctttaggtggattctccacagttttcctcgtgcgtactcacggtggaatccgatgtgcattgaagcga

SEQ ID NO: 618472 - DNA, 100 bp, Homo sapiens
ctgctctgtaccaactgccggaaagtgctgcggaagctgttccatttcctccaagtcaccggcttacagcaaaagaagtgtttgataatgatggaaaacc

SEQ ID NO: 618473 - DNA, 100 bp, Homo sapiens
cgtgatcgtgcccaaagaggagggcgtcatcagcgtctccgaggacagctctgttgttattgaaaaggtctcggattcctatttttaaagcagatcggcc

SEQ ID NO: 618474 - DNA, 101 bp, Homo sapiens
tggcggccggcggcggctgcgggctgagcggcgagtttccgatttaaagctgagctgcgaggaaaatggcggcgggagctgaactcctttgaacaactttg

SEQ ID NO: 618475 - DNA, 100 bp, Homo sapiens
gcctaacctgatcgcaattgggtctagtgaatctgcacagaaggcccttaaggctgtccggagtacacatggcttagaagttccattaagccataaggga

SEQ ID NO: 618476 - DNA, 75 bp, Homo sapiens
aaagaatagagttgagcctgtgggacacttcggaagtccattggaatattaagcccaggagttgctttggggatg

SEQ ID NO: 618477 - DNA, 87 bp, Homo sapiens
ggaagaggccccacattggaactaagacaggaaacgtaaatattttcaccacgatcgattagactgggatgaacacagttctgccgg

SEQ ID NO: 618478 - DNA, 82 bp, Homo sapiens
aacgaccaagagggtgttcgactgctagagccgagcgaagcgagcttactccacgggaacagcctctagataatctgagttg

SEQ ID NO: 618479 - DNA, 90 bp, Homo sapiens
cgcgatgtggagctggaagtcagtgatattgatgatcctgacacagtcctaggataaggaactggataatttctgtaaccccatcattta

SEQ ID NO: 618480 - DNA, 95 bp, Homo sapiens
gggagggcactctggctctgccctggctgctgaacaaggagctgccctgcatcaacaccgaagctggagaagcttcgagagaaggagcgtaagaa

SEQ ID NO: 618481 - DNA, 100 bp, Homo sapiens
cggagacctcgctgcgctcatggcgtcgcccggtgagccccatgcccgtttctacgcggcccagatcgtcctgacctttgagtatctgcactcgctggat

SEQ ID NO: 618482 - DNA, 100 bp, Homo sapiens
ggaaaagcaccacttgctactggagaggatgatgatgatgaagttccaggctgtggatgagatgaacggaaaggagctcaatggaaaacaaatttatgtt

SEQ ID NO: 618483 - DNA, 95 bp, Homo sapiens
gggtgtaataatgttaactgagcaatttgcaacccaaaatgtctttatggaggcagatgcatatttcccaatgtgtgttcctgccgcactgaata

SEQ ID NO: 618484 - DNA, 75 bp, Homo sapiens
gtggaggaggagtccatcaccaagggagacctggaggtgtggagggcgcagctttccagagccgacttcctcatg

SEQ ID NO: 618485 - DNA, 50 bp, Homo sapiens
ccaggtgaaggccagtgctctcaaggagaagaatttggattggtttcctc

SEQ ID NO: 618486 - DNA, 82 bp, Homo sapiens
ccgggcagcgtgggtgagcggcgcagcggcggcagcggagagcgagagaggggagcagcattccaggatgccttgaagattt

SEQ ID NO: 618487 - DNA, 99 bp, Homo sapiens
aacaccagatagtggaaagaaaccatgtgctgaaatgtttgacgacactgatggtttgtctttcccagggaactccgatgaagtgttccaacaaaatga

SEQ ID NO: 618488 - DNA, 82 bp, Homo sapiens
ccaagtcaccacaaaaacctatcgttagagtcttcctgcccaacaaacagaggacagtgatctattaatgagatgaagcggt

SEQ ID NO: 618489 - DNA, 100 bp, Homo sapiens
gcgccggctccatggcgaccgggctcggggagccggtctatggactttccgaagacgaggtgcactttacaggtccccgatgaaccaagagaaccctcca

SEQ ID NO: 618490 - DNA, 87 bp, Homo sapiens
ccagagtttttactaagaagtatgaaaaaggaacccctttcttctacagcaaaaaagcttcagaggatgattccgaagaagacggag

SEQ ID NO: 618491 - DNA, 101 bp, Homo sapiens
ctttgcagcggggacttcggcggcggcgcctcaggcacctcggcccgggctgaaggtgatgtggccgccctcaaccgacgcatccagctcgttgaggagga

SEQ ID NO: 618492 - DNA, 111 bp, Homo sapiens
gtccccagccgccatggatagcgacgacgagatggtggaggaggcggtggaagacaatgcagatcttcgtgaagactctgactggtaagaccatcaccctcgaggttgagc

SEQ ID NO: 618493 - DNA, 108 bp, Homo sapiens
gctgcctccaggtgacagcaatcagctggcctggtttgatactgacctgtaaatcatcctttaggaagcagtcaattatagatttcttcaaaccagcttcaaaacaag

SEQ ID NO: 618494 - DNA, 100 bp, Homo sapiens
cagaggaaaattcaggcaacgcctcgcgttgatggagacagaaacttgactgggctcaggaatatgtgtttttaaaattctccagaagattttaatgcag

SEQ ID NO: 618495 - DNA, 75 bp, Homo sapiens
caaactgggaaaaagtctacagggtgatccagcagcagctctgcttgagcctcctgacaaggtgatccgggcggg

SEQ ID NO: 618496 - DNA, 98 bp, Homo sapiens
cttacgcaacggtcactgggctcctgggccgctcccgggccagcgagggctgcgaaagaagttgtaggaacttagtgatttggcccgtgaccctccag

SEQ ID NO: 618497 - DNA, 99 bp, Homo sapiens
ctttcctgtaccgaacagatttgcttgttgggtcgaacttgtggctattcatttattctcaccaggaaatgcactcggtgatggaaagagagccactat

SEQ ID NO: 618498 - DNA, 80 bp, Homo sapiens
acgcagaggacgccggaacaccctggaagccgagaaatgcaaaatgatgcttcaacacccaggccaggtctctgcctcgg

SEQ ID NO: 618499 - DNA, 83 bp, Homo sapiens
ctacaagatacatagaaagtgaattttgtagaaggagaagttgtggacatcggatacccaaggagacgaagctgaagcaggag

SEQ ID NO: 618500 - DNA, 100 bp, Homo sapiens
ttgtcttcctgagagtgattggaggtctccttgccttggctggacatccccttgaatttttacggaatcagcctcagtttcaacagatgagacaaattat

SEQ ID NO: 618501 - DNA, 82 bp, Homo sapiens
tcgcgggagtcgtagggaggacgccgggacacctggaagccgagaaatggttctgtccacggtgtgtccaggaaaagaggaa

SEQ ID NO: 618502 - DNA, 75 bp, Homo sapiens
cttttgggctgcgccaccgacagagacatctggaagccggagctagtggaagatgctcttaaagttccgtacaga

SEQ ID NO: 618503 - DNA, 100 bp, Homo sapiens
actcctccaagaaccaacccccaaattggctgggacagggaaagtgaaatcgtggagcttaagtcccagctggcccgcatgcgagaggactggattgagg

SEQ ID NO: 618504 - DNA, 82 bp, Homo sapiens
cctgcgtaactttctcccttgatccgggagtctttccactggtgttctaagaacggaagcatctgggctggatggaatttag

SEQ ID NO: 618505 - DNA, 116 bp, Homo sapiens
caactgtacaacttggaaaccttgttacagtccagttgtgattttgagctctcgatgttctgaagtatgaggaagttgacatggattcattagccaaggctgttccagagcccttg

SEQ ID NO: 618506 - DNA, 100 bp, Homo sapiens
ccccggatttgctccaagctatggctatcagttcccagagtgaagatgaagctggatgtagctcagttgatgaagaaagttacaagactctgaagcagca

SEQ ID NO: 618507 - DNA, 75 bp, Homo sapiens
gagcttcaagaacaagggccgcgatgtggaaatcagtgtgcgtgtgaccaccatggatgcagagctggagtttgc

SEQ ID NO: 618508 - DNA, 82 bp, Homo sapiens
gactgtgttcgggagtccttggaactgtggtccatggtaaagttttacagaatttcgaggatgtcagatgtaaatgtatctg

SEQ ID NO: 618509 - DNA, 90 bp, Homo sapiens
gggggacccgcggtccccaccgtgcagcggggcatcatcaagatgcttattgcaggagtgaccaggacactacctcctagaagtaatgcc

SEQ ID NO: 618510 - DNA, 100 bp, Homo sapiens
aggctgatatgcaatgtcacttacaacattaatcagatactgcatttaaggcgtgcaatggaattgagttttgccctggtaaatgggaataatatccgag

SEQ ID NO: 618511 - DNA, 75 bp, Homo sapiens
aattgcgggtgatgacagcactatagtgcaggtgttggaagtgaaaggggtcaccagtcgttggcacaccaagaa

SEQ ID NO: 618512 - DNA, 98 bp, Homo sapiens
ttctgatattgatttgaaaaagcctctcaaagtaaacaaagctaactgtcgactaccagaaaatactttcaacataaatgaactctccaacttattaa

SEQ ID NO: 618513 - DNA, 98 bp, Homo sapiens
atgaaggcaaacgtgttgcagagaccatgtgctatgcctacatgaagcaggcaagataacccctgtgacagaaggctactgttgctgtaacaaagggc

SEQ ID NO: 618514 - DNA, 100 bp, Homo sapiens
tggcacttcattggccacctacagaaacaaaatgtcaacaaattgatggttccaagatgagatgggattctccaacatggaagatgatggcccagaagag

SEQ ID NO: 618515 - DNA, 102 bp, Homo sapiens
tccagcaggaatgagtgctaaaatgctgggaggtgtctttaaaattgactggatttgcaggttctcctgaaaagaaagctgaacattcatctataaatcaag

SEQ ID NO: 618516 - DNA, 75 bp, Homo sapiens
gaaggcagaggctaacatgggtctcacagaaagttctccgctcccagacatgggtccctcggcttcctgcctcgg

SEQ ID NO: 618517 - DNA, 101 bp, Homo sapiens
cgcgcattcggccccggacgaaggtactcgcagcacttggagcgcagaaccggccgcgcccggattaccgagaggatgggatggatctaggcagtgacgcc

SEQ ID NO: 618518 - DNA, 83 bp, Homo sapiens
attcccaagccaaagctttccagtccaagccttatgcatttgatcgggtgttccagtcaagcacatctcaagagcaagtgtat

SEQ ID NO: 618519 - DNA, 90 bp, Homo sapiens
gttaatgtttacggcgaagtctactcaacgtttccaagggctccttggtaatgaccagtctaagggattaggaccagcatcagaacagtc

SEQ ID NO: 618520 - DNA, 100 bp, Homo sapiens
tgactactgatgactttgtaaaaatgttttcagaccaggatgaaagagcagctgagctcagcagggagcagaacgagaaaaccatccggagcacgcagac

SEQ ID NO: 618521 - DNA, 98 bp, Homo sapiens
gggcgagcgtcgacccgggccgctcctggaggaggaggtgggaggtatctactaagcattttactaaaaagtacagctcgtgttcaaccatataccta

SEQ ID NO: 618522 - DNA, 75 bp, Homo sapiens
tcggacctttcccgctggcgcgcagcctcagctaggtacatcaggaacgtctctatcaagaatacaatttcagca

SEQ ID NO: 618523 - DNA, 51 bp, Homo sapiens
gagctgcccaagcgtggctatccccctgggttccgagtctgaggaagacat

SEQ ID NO: 618524 - DNA, 95 bp, Homo sapiens
cgaggaggaggaggaggaggaaaaagccaacattggtactcagaccacaggacccagtggggtaggatgctgtacaccaggccggccgctcctgc

SEQ ID NO: 618525 - DNA, 75 bp, Homo sapiens
tccactttcgccagcccgtgccgcgagcgcggcctgcaggaggacactcatgaggaccatgatacttccactgag

SEQ ID NO: 618526 - DNA, 82 bp, Homo sapiens
tctcccgggggcgggggcggatccgactacaactacgagagcaaattcagttcgctatcctgatcgcatcacactgatccgg

SEQ ID NO: 618527 - DNA, 98 bp, Homo sapiens
cagaacagttaatcctcaatttaagcctgatctaacccctagaaacaggatggcttctggaaacttacaccagaactgggacttatattaaatcttaa

SEQ ID NO: 618528 - DNA, 76 bp, Homo sapiens
gactggatggggttaccgggttatcgcttcccagaaatcctggatagaaagcactttgaccaagagggaatgtgta

SEQ ID NO: 618529 - DNA, 100 bp, Homo sapiens
aaatggcagcctgcccaccacccacgcttgcccagcctttcttcacgcaggcttcataaacttcacttaccaaatacttcaagggattcagaaacagcca

SEQ ID NO: 618530 - DNA, 74 bp, Homo sapiens
ctgccgcctgaccctgtgtccaagagactccagatctcattgccccggatcatctgcgacaacacaggcatcac

SEQ ID NO: 618531 - DNA, 75 bp, Homo sapiens
gcggccggggcctggggctgcctgccgggcggccgggcgcggcgagcccagggagattcttcaagcaatcactat

SEQ ID NO: 618532 - DNA, 101 bp, Homo sapiens
ctgggtcactttcagtgagtcatcgctgacagctgaggaagtctgcatccacattgcacataaagttgggacatctctacaccgttcccatccgggaacag

SEQ ID NO: 618533 - DNA, 50 bp, Homo sapiens
ggaggacacgacgcgcttaaagggaatactctgaagatagtaactccgag

SEQ ID NO: 618534 - DNA, 98 bp, Homo sapiens
ttagcagttttagagcttcagaacaaattgccaaaagccagagttgtttatgctagtgcaactgatgctgagggttggaaaagcaaaagcagatgtgt

SEQ ID NO: 618535 - DNA, 75 bp, Homo sapiens
agggagccgtgggcgctcggtgcccgggccgggcaggtcgcaatggaagaagagatcgccgcgctggtcattgac

SEQ ID NO: 618536 - DNA, 75 bp, Homo sapiens
tgcagggcatcatcaatttcgagcagaagttcttttctgtgggccaggccgcgtccagcagtgcgcattcctcca

SEQ ID NO: 618537 - DNA, 74 bp, Homo sapiens
ctgcctggtgctctgcgtcctcatcgggcttatgttcgagacccaacatgagtgaagtttcctgcaagaaacgg

SEQ ID NO: 618538 - DNA, 75 bp, Homo sapiens
cagatgtcaaaactgatttcagaaatgcatagttttatccagccaaaagaatgcaatggtgtaaagattccagtt

SEQ ID NO: 618539 - DNA, 50 bp, Homo sapiens
ggccccgagccggcccgggtcgagcttgtctccaatgttctcattttctc

SEQ ID NO: 618540 - DNA, 74 bp, Homo sapiens
ttatcataaccttgaatggcgactagatgtacagaaactggaagagaagttccggctgaacaggcgagaactga

SEQ ID NO: 618541 - DNA, 75 bp, Homo sapiens
gggagatccatagggaggacggcggaacatctggaggctgggaaatgaaggagaacttatggattgtgatggaaa

SEQ ID NO: 618542 - DNA, 80 bp, Homo sapiens
gtgggatcgatgtttcaatattggaagcgctttgatttacagcagctgcaggtattgttgcagcatctggcagtgagact

SEQ ID NO: 618543 - DNA, 82 bp, Homo sapiens
ggcggggtcggcgggagccagcgagccacgggagcgagccaggtaactaggatttctacctcaaccgcgagacctatgcaag

SEQ ID NO: 618544 - DNA, 82 bp, Homo sapiens
ctgggctgccggcacttcgcggcagaaaccaaggtgtatgttggtaacctgggaactggcgctggcaaaggagagttagaaa

SEQ ID NO: 618545 - DNA, 96 bp, Homo sapiens
agaagaggacgacgacgacgaggaagaggaggtttctgaggcctttggacaagcacacacaaaccacaagaaggtggctgctgacggagagagccg

SEQ ID NO: 618546 - DNA, 100 bp, Homo sapiens
cgccgccgccgccgccgccaagcgcccgtcggacggggaggaggagcaggagctggaggaggagccgccgccgccagggagttgaccacatttggccatt

SEQ ID NO: 618547 - DNA, 100 bp, Homo sapiens
cttgtcttctccactgttcctggaggaatccgagaagagcagagcggagggagccccagacacggctctgtgtgctccgggatggagcaggtgtgcagag

SEQ ID NO: 618548 - DNA, 88 bp, Homo sapiens
cggctgcgaagtctgtaaacctggtggccaagtgaatcttggaagcaaccagtaccttttctctgtcatagtggatcctaaagaaatg

SEQ ID NO: 618549 - DNA, 100 bp, Homo sapiens
atgaccctcttccaggttacatacagcttacatcttgcatcctcaagcggatgctctggagttttggctgcaagctggcgtggatgggttccaggttcgg

SEQ ID NO: 618550 - DNA, 80 bp, Homo sapiens
tgtccaatcttgaaaaacagtttaccgatctcaaagatcaaatctccctggggtgccctccccaggcagcaatgccagga

SEQ ID NO: 618551 - DNA, 50 bp, Homo sapiens
aggctgacctggcctatcagcttcagaaattccaacagaatgggtttcct

SEQ ID NO: 618552 - DNA, 96 bp, Homo sapiens
cctttgttgctgctgcacattaggttgcagtatgtggccagttatttgcctcagtaaaagagagttattcctgatgaagctaaagctttgtctctg

SEQ ID NO: 618553 - DNA, 50 bp, Homo sapiens
gccgggagcccgccgcgctggtagcggtcatccatgcctggcttattata

SEQ ID NO: 618554 - DNA, 82 bp, Homo sapiens
cggccggcccggagcaccgagctcgcggcacggtaggagtcccaggggcagccactggcctcccagcccccggtcgtcgacc

SEQ ID NO: 618555 - DNA, 120 bp, Homo sapiens
catcacccttacttcctacccggacctcactacttcccatcaaggaggaagtgaggaaggcagccccaagctgcagcatgaacttatcatacctcagtggaagacttcagaaagccccgt

SEQ ID NO: 618556 - DNA, 100 bp, Homo sapiens
cacgcagctggctggcttcagtggaccagttgaaaggattgtagacaagaggaagaacaagaaaggaaaatgggagtatcttatccgatggaaaggctac

SEQ ID NO: 618557 - DNA, 75 bp, Homo sapiens
caacgccaagcagcccaccgacatggcccggaggcagcagaaggcaatggatcacttggagtcctttattgctga

SEQ ID NO: 618558 - DNA, 96 bp, Homo sapiens
cgggatctcaggtcctcgggggcggcggccacgccaaggacgggtattctgagagaagcctcacaaagtgtattggaattactattgaaaccagac

SEQ ID NO: 618559 - DNA, 100 bp, Homo sapiens
tttccttcggagcagcagccctgtccggcatctgtcttgagctcccagcaagaagcctggaatggtcccccctccgccgggagaagaaagccagacggtc

SEQ ID NO: 618560 - DNA, 99 bp, Homo sapiens
tatcacaagatgaacaatgagaagcaggcagaagattgcatcacacgaacaccaatcagggtcttcaggcctggaagattgaagacattccagccaaca

SEQ ID NO: 618561 - DNA, 101 bp, Homo sapiens
atgggaaaattaagcagatgctccagtttgagaaacctggatctgcgatctgtttgtggtgtctgacttccagcaactgctggcctgtgccagggtgcaag

SEQ ID NO: 618562 - DNA, 74 bp, Homo sapiens
ttgaaagaagacattcagaaagcagatcttgttattagtcacgcagggagaaacaaaggcagcgctgccctcgg

SEQ ID NO: 618563 - DNA, 100 bp, Homo sapiens
agaaagtaaaggagtcgtgaagtttggctggatcaagggtgtattagacttaaccaccaccatgtcgagcaaaagaacaaagaccaagaccaagaagcgc

SEQ ID NO: 618564 - DNA, 140 bp, Homo sapiens
accctctgccgagtctcaatatctgtcttcggtggactccttcggcagtccacccaccgccgccgcctcccaggtactccaaagattcaggtttactcacgtcatccagcagagaatggaaagtcaaatttcctgaattg

SEQ ID NO: 618565 - DNA, 75 bp, Homo sapiens
aatcttcaagaagatccggaggaaaagggagtttcgggctgatgctcggcggggatctgacgagcttttctctac

SEQ ID NO: 618566 - DNA, 75 bp, Homo sapiens
ggacttccccgttagaactcgcgtttccacttcagagatctgctctaagcgaaagacatgaggcctcagcctgaa

SEQ ID NO: 618567 - DNA, 87 bp, Homo sapiens
atggaactattacagaattctgcactgaagcaagctgtccagtcatgtctgcaggtccgagttgccctcaaattggctgtagccaca

SEQ ID NO: 618568 - DNA, 100 bp, Homo sapiens
ggccaccaccctggagagtaatgtgaagaaaaataatcgtgtggaatttcgtgaacctttggtttcttataggtatgtgacgcattcccagactcttcag

SEQ ID NO: 618569 - DNA, 83 bp, Homo sapiens
cgggcagcggcgtgccctatttctacctgagcccgctgcagctctccgtgagcaacctgcagtccattggaaatgctaaaaca

SEQ ID NO: 618570 - DNA, 75 bp, Homo sapiens
ggaaaacaaaagctgctacttatggaagatacaaagggatagagggaggaatcagcagcttggaaattcaagcac

SEQ ID NO: 618571 - DNA, 75 bp, Homo sapiens
agcggagctcccccaagagccggaaaggaatgtttacccttgcggaagttgcatcacttaatgacattcagccaa

SEQ ID NO: 618572 - DNA, 51 bp, Homo sapiens
atcctgttttgctccaagggtgcctgatagaacaagttgaaatcatcgcag

SEQ ID NO: 618573 - DNA, 101 bp, Homo sapiens
gaattatgcaagcacagatttgcttttacaccaagattcttacagaagcagagattgatgctcaccttgttgctctagcagagagagactaaacattgtcg

SEQ ID NO: 618574 - DNA, 75 bp, Homo sapiens
agaaaatagaggaccctcagtatgggacatactatgttgaaatcctcactatggatgggctcattgaggacatta

SEQ ID NO: 618575 - DNA, 83 bp, Homo sapiens
gggctgtttggaaagacccaggagaagccgcccaaagaactggttcctcaagccaggacctacgcacctgttgtgagtggtgt

SEQ ID NO: 618576 - DNA, 89 bp, Homo sapiens
ttcaggcacctgaagctgcccacggagtggaatgtattggggacagatcagagtttgcatggtcgagtctatgctgtcttgtcaaagag

SEQ ID NO: 618577 - DNA, 91 bp, Homo sapiens
agcaggctcctggagaccaggtaacaggacccacgcagccacccagcctcagcactcatctgcgcagccatggaggccctgggacctgggg

SEQ ID NO: 618578 - DNA, 100 bp, Homo sapiens
agcacagccgggccgctgcgaagaaagaatcttcaagagggagacatagggaaaaggaagacataaaaatcactaaggaaagaactccagaaagtgaaga

SEQ ID NO: 618579 - DNA, 98 bp, Homo sapiens
cgagctgggtggtctggagaccatggagaccctcacggagctgggcgacgagctgaccctgggagacatcgacggactttccttatcccagttgattg

SEQ ID NO: 618580 - DNA, 97 bp, Homo sapiens
gatagaccactgcctgtgtctcgtcttgtatctctaattggaagcatcatgtttataactactgtactagtgttcaccagtcaaaccaagcacgagg

SEQ ID NO: 618581 - DNA, 115 bp, Homo sapiens
taaatactcatctactaggcaagcatggagttggcaccccaaaagaaagggatttgtcttggctgttactatgacacgggaagcaattgatgaatttcggcgttttcagcgtgac

SEQ ID NO: 618582 - DNA, 82 bp, Homo sapiens
cgcacagctgctcccttcgccttcgccctttccacctcgcggcagttcggttaacagaaccttctggatatttaacagatgg

SEQ ID NO: 618583 - DNA, 97 bp, Homo sapiens
agagacctcattggctgtctccagaagctgctgtttggaaaggtggcaaaggatagcagcagagagaagaagaaggaggttcctgctgtgccagaaa

SEQ ID NO: 618584 - DNA, 99 bp, Homo sapiens
gcttgctgtggaaggcaatctttttgaaataaagaaacttcgagaactggaaggctatgataaggccctgtgacctccctcctgtcttgcagctcctcc

SEQ ID NO: 618585 - DNA, 100 bp, Homo sapiens
ccaacatcccattcagcagggtgaaccacagcaagttcatggtcacggagaaggcagcctacatagcgggctgacgcacgaggcacacaggaaggaggtg

SEQ ID NO: 618586 - DNA, 100 bp, Homo sapiens
gccctgccagctgcgccgggacggttatgcctccgcctcgttgccctgaaagccgcagcgacagcgaaaagggctaagattcggccatgagcagcgcccc

SEQ ID NO: 618587 - DNA, 142 bp, Homo sapiens
cctgtgacctgcatgtactgggggattcgcagggaggatgtcgggacaccccggaagctgggaaatggctatttttatgattcccacaaatccaccaccaacattcagaaagccagaactttggtccgatgatttcaccgat

SEQ ID NO: 618588 - DNA, 98 bp, Homo sapiens
aaggttgaagcagaagaataaggagaaggataagtcgaaggggaaggcgcctgaagaggacgaaggtgatactgtgcttgtccaccgagttcacagtt

SEQ ID NO: 618589 - DNA, 83 bp, Homo sapiens
gacagatgcagttatctacattaagtcagctcctagacctagactatccgtctaagagggaagctacagggcaaggctaggtc

SEQ ID NO: 618590 - DNA, 51 bp, Homo sapiens
gttgttggcgactgtgcttcaagcgcaaatccagtttgctgatgacatgca

SEQ ID NO: 618591 - DNA, 82 bp, Homo sapiens
gctggattctgaggaccagcagatggccagtcacgagaacccagagcttggggcttccttggtcgcacccaccacctgcctg

SEQ ID NO: 618592 - DNA, 96 bp, Homo sapiens
tgaccgagagcgcgaatatcgtcatcgttagaagctgaacggcacggaccccgaggatgtgattcgcaacgcctttgcctgcttcgacgaggaagc

SEQ ID NO: 618593 - DNA, 100 bp, Homo sapiens
ctcgaacgagacgagaaatcctggagaccctaatcaaaggccttcagagactggagtacagaggatatgattctgctgttgctgttgctgatgcaaagaa

SEQ ID NO: 618594 - DNA, 74 bp, Homo sapiens
gttggttggagatgtggattttgaagtggctgacaagattttgaaaaagaaagaataccctctttatataaatc

SEQ ID NO: 618595 - DNA, 100 bp, Homo sapiens
agctaaacaagtagaagagttcctgcagcgaaaacgggaagctatgcagaataaagctcgagccgaaggacatatggagtggcaaaattctattcagaag

SEQ ID NO: 618596 - DNA, 100 bp, Homo sapiens
aaagcgaggcaaggcaggcggtactatactggcaattgctggagaagattttgcaattgttgcttctgatactcgattgagtgaagggttttcaattcat

SEQ ID NO: 618597 - DNA, 51 bp, Homo sapiens
aagaaggcaaagtcgcgtttaataacgttttatgacttacctagtggagcc

SEQ ID NO: 618598 - DNA, 87 bp, Homo sapiens
gccccagccccacagaccagcccagcattcaggtgatcatggagctcagcttggtctccatggggctggtggtgatggaatacatga

SEQ ID NO: 618599 - DNA, 82 bp, Homo sapiens
gcagaggaagccttgaggacctactcacagataggaattgaagctctctggaccttcctgtggtttgttggtttctgcttcc

SEQ ID NO: 618600 - DNA, 126 bp, Homo sapiens
gcacctcgtcagtgccacctacaggtgcaccctggacctgctgacacggtgccgggagcatgtggagaaggtggaggagcatgtcagccgcatccgggaggagctggaccgcgagcgggaggaacg

SEQ ID NO: 618601 - DNA, 90 bp, Homo sapiens
ctgcaacgtggacatctccttggggctggtcagttgcatccagagatgcctccctcagggtacacctccagcatgagagccaaatacctc

SEQ ID NO: 618602 - DNA, 101 bp, Homo sapiens
aggaaagaagatcaagctacagatatgaaatctcctgcaaagaagctgagccatgcaattagtaaatctttggggtgtgtacccacgagagaacccccgca

SEQ ID NO: 618603 - DNA, 75 bp, Homo sapiens
cgctgcgcatccccgcggacgccacagcgcttatatttaaagttggagttcgttgctaaagatggcagacccaga

SEQ ID NO: 618604 - DNA, 99 bp, Homo sapiens
ggtgatctccggtagcactcgggccggcggacagtgagggcgcgggagattctacagtggttggaacgagtaggcttcgtgacttatatgacaaatttg

SEQ ID NO: 618605 - DNA, 100 bp, Homo sapiens
tgaggacggaaccagacagtcccactgtggtgggcagagggtcgcggcgagcgcgcctatgacatctactcgcggctgctgcgggagcgcatcgtgtgcg

SEQ ID NO: 618606 - DNA, 75 bp, Homo sapiens
gggaccacggtcaccgtctcctcagtggaagaagttgttccgaatgtaattgaaccttccttcggcctgggtagg

SEQ ID NO: 618607 - DNA, 85 bp, Homo sapiens
acgcataggagtggtcatatcatcctacatgcatttcaccaacgtctcagccaggttcagattgaaggcagtgtggtgtacagca

SEQ ID NO: 618608 - DNA, 97 bp, Homo sapiens
gcctgaccacacacaactccaagaagaactcacaagttccatgccattgcagtgtcaactaggcctcagttacttttcagtttgcccaaattgagcc

SEQ ID NO: 618609 - DNA, 100 bp, Homo sapiens
actgactctgaagaggacctggaccctatggaggacttcgattctttggaatgcatggagggcagagctcccctgaacagcagctgcagcagccatggcc

SEQ ID NO: 618610 - DNA, 89 bp, Homo sapiens
gcgaacgagcctgccgtacttctgattttgaaacacctgggtctgggcttcccgggcgagcggtgggtctatgaaaattatcctactta

SEQ ID NO: 618611 - DNA, 100 bp, Homo sapiens
aactgtacaaccaccatttcactgtggacattactccctcttacagatatgggagacatgggagatccaccaaaaattcacttcttcaactgagatggac

SEQ ID NO: 618612 - DNA, 101 bp, Homo sapiens
ctttgtgtcatcctccacagctccagggaaggcactcaaaagtggggggcaggaaaggtcgtccttggtggaaggaaccatgaactggcatctccccctct

SEQ ID NO: 618613 - DNA, 100 bp, Homo sapiens
cggcgaccggagcggtaggagcagcaatttatccgtgtgcagccccaaactggaaagaagatgctaattaaagtgaagggctggtgaaaagaacagggaa

SEQ ID NO: 618614 - DNA, 100 bp, Homo sapiens
tatgtaatggacacatcgagaagtaccaacccagtgaccttcatgtccaacatgctctatgcctgcagttggataacagggcaagattcagaggaagaaa

SEQ ID NO: 618615 - DNA, 100 bp, Homo sapiens
cagcacttctaccagtggatatatttttggtttcttacatgaaaaatcaaaatggtacatttaagatccaaaaggaaagtcctcggccgtagagattcag

SEQ ID NO: 618616 - DNA, 120 bp, Homo sapiens
gggtaaagtcgagtatctggtgaagtggaaaggatggcccccaaagtgagaagccctaccactgcaactgggacggctgcggctggaagtttgcgcgctcagacgagctcacgcgccact

SEQ ID NO: 618617 - DNA, 74 bp, Homo sapiens
ggctgctttcaggaacattgctgtggattcccagtctcacagaaagttctccgctcccagacatgggtccctcg

SEQ ID NO: 618618 - DNA, 75 bp, Homo sapiens
cctgcctcagcctcctgaggagctgggattacaggagcagcatggacctgtcagcaactaaggaacaaaagtaat

SEQ ID NO: 618619 - DNA, 100 bp, Homo sapiens
agggacggaccctcattcctcccagggaccccagacctctgtctctctcggagcaggcttctttgggacggtggtggagtacggagctgagaggaagatc

SEQ ID NO: 618620 - DNA, 90 bp, Homo sapiens
catcaagccagacaacttctggcagaaacagaggactaattttggcagttctaaatttgaatttgagctctcaaaggtctatggccctgt

SEQ ID NO: 618621 - DNA, 90 bp, Homo sapiens
ttcagatgagaccagaggtgcggaaggaacagaaaggttctacgatgaaatcaggaccccgctcctctctgacatccgcatcgattatcc

SEQ ID NO: 618622 - DNA, 100 bp, Homo sapiens
cccatataatatgcatacgacaaaatattgaagcaaactttattaaaccaaactttcagcagttatttagggtctaccttctgcttccctggaaaggatg

SEQ ID NO: 618623 - DNA, 100 bp, Homo sapiens
aggtctacgtgtatgtgtgtgccagcgatgtccccatccgccgccgagaggaggcctatgagaatcaggtgcctttcctgaagactatcttctggtctcg

SEQ ID NO: 618624 - DNA, 75 bp, Homo sapiens
atcatctgggcactgctggatactgagtcatcatcagatttgaaatatttaaagtggatacaaaactatttcagc

SEQ ID NO: 618625 - DNA, 76 bp, Homo sapiens
gtcgcttgggggccacggcgcggacgccatgggtaaactagcgctcctttccgtaaccacgggaggcacggccgag

SEQ ID NO: 618626 - DNA, 74 bp, Homo sapiens
gccaacatggcagcggggttcgggcgatgctgcagggtgactctgttttgagaagtgcaaccagatctctcctg

SEQ ID NO: 618627 - DNA, 82 bp, Homo sapiens
ggaagcaccatgtccggatgagatcgcacttcctgcagtgggcattagccacgtccagatacccattgacaacatgaccaat

SEQ ID NO: 618628 - DNA, 82 bp, Homo sapiens
catccgtgtggtgtccatggacagagactaccacgtggcatgttaccactgtgaggagcaggaactcaaagcagccgctgat

SEQ ID NO: 618629 - DNA, 96 bp, Homo sapiens
tcaattcggaaccgaagattaaaaaactggagccagtccttttgccagagccaaagccttggctggacagtcagtacgaatctgtaaaggccccag

SEQ ID NO: 618630 - DNA, 98 bp, Homo sapiens
ccagaacgcagatcagaggtagtcggacctttcccgctggcgcgcagcctcagctagaaatgacagactttttcattgaatgatgaggacacagcagc

SEQ ID NO: 618631 - DNA, 103 bp, Homo sapiens
gaagaataaggagaaggataagtcgaaggggaaggcgcctgaagaggacgaaggcgatgtaccaattttgacaactgaagacgacatggtttctcagccagca

SEQ ID NO: 618632 - DNA, 98 bp, Homo sapiens
ctcaggcggcgctcccggagatgccccgcggcagccgcgctcggggctctaagaatgagaagactttgggacatttcatgagtcattcaagcaacatt

SEQ ID NO: 618633 - DNA, 101 bp, Homo sapiens
gtttggcagggagttctgttacgccatggaaaccgctctggtcacaccaatactgttgcagattgcggttaagaagattgtctaccaaatatagaacagaa

SEQ ID NO: 618634 - DNA, 90 bp, Homo sapiens
gtactgcaagaccaaggcctggaccgagttccacaagaaggactgcggggacctggtggccatcgtagtggccacagaagaagtagttac

SEQ ID NO: 618635 - DNA, 83 bp, Homo sapiens
atcatttcccgggaatgctgtgcaggcaaaaggaaaacaaaggcattcaggagccacatgcttagcgaatgccacagacggcg

SEQ ID NO: 618636 - DNA, 97 bp, Homo sapiens
cagtatgatgaactggaggctgagtacgacagcctcaaacaggagctggagcagctcaaagagataacgaaggaggcccaacttcattcaataagga

SEQ ID NO: 618637 - DNA, 74 bp, Homo sapiens
ctcccaagtggctgggattacaggtgagaaataagaaaggctgctgactttaccatctgaggccacacatctgc

SEQ ID NO: 618638 - DNA, 100 bp, Homo sapiens
gcgcgagtgaggaaaggaggtactgtaggccctgccctgggagaagccctgccacacgtcgtgcccacgctgagggcctgtctgcagccctcccaagacc

SEQ ID NO: 618639 - DNA, 75 bp, Homo sapiens
tctagaaggacaaatgaacttcaatgcagattctagccaacataaagtgccagcgccacagcccttcaatcattt

SEQ ID NO: 618640 - DNA, 90 bp, Homo sapiens
ccgccatgcaaggctggcgcgtctccatggagagagttaagaaagacgtggacaagggcacacggcactcagacatgttcctgctgaagc

SEQ ID NO: 618641 - DNA, 100 bp, Homo sapiens
tacggttttgagaagccttccgctattcagcagagagctattattccctgtattaaagctgtccgcaggcttgtccaaaaggaaacatcggaatgaccac

SEQ ID NO: 618642 - DNA, 74 bp, Homo sapiens
caggaaaatcatattatagatggagtaaagtcttgccacttgcctagtgaggcttttccgaacctggaaggaga

SEQ ID NO: 618643 - DNA, 75 bp, Homo sapiens
ctggatatgtgcatggatctgaaagttcatcctgaacaggaaaaggtctggacaaagactgtcgcctaactgaac

SEQ ID NO: 618644 - DNA, 100 bp, Homo sapiens
acagtccacgaggtgagaccctggcggagacatggaccagagggaagaaggagaaagggccaacccctgaagaagcaatacagaaactgaaggagacaga

SEQ ID NO: 618645 - DNA, 75 bp, Homo sapiens
ctcagaggtccatggcagtatcccagccaaatctcgatgaagtggccattctgcctgcccctcagaacctctctg

SEQ ID NO: 618646 - DNA, 98 bp, Homo sapiens
cctcggtcgcgagtatctccgtttcctggatgtgaacagacttcgagggtccgaggggccacggcggggggctggcctctccttggcacccttgaatc

SEQ ID NO: 618647 - DNA, 100 bp, Homo sapiens
ttttgtccgacacttacactgttgagaaagtggaagttcatcgtctgattaggaagaagaggagtcggagccataataaaagcagggatagaaagcgcag

SEQ ID NO: 618648 - DNA, 100 bp, Homo sapiens
ttgagtcctcgagtgaatgggcggatctcatatcttcacttggcaaactcaacaaggtctccaattgagaaacatggcactgtttttcctgcactctacc

SEQ ID NO: 618649 - DNA, 141 bp, Homo sapiens
ctttgccacttcttcacggaccagtttcagttcgccgatgggaaacccggagaccaaatccttggtaaaataccatgaagattttgaaaaaacaaaggggagaggctttactcccgtcgtggacgatcctgtgacagagag

SEQ ID NO: 618650 - DNA, 89 bp, Homo sapiens
aatattcccaagtccttcacccgggaaagaccacagcaagattctttcattcgtctcctcctagcctgggggaccaggctcgaactgac

SEQ ID NO: 618651 - DNA, 89 bp, Homo sapiens
ctctagcagaggaaaataagaacacagtggatgtcgagaacggtgcttctatggcaggatatgccaaaactggacaagccaaggcatct

SEQ ID NO: 618652 - DNA, 50 bp, Homo sapiens
aatgaagatgaagacataggaggaagcaatgcctgtgtgcccaggccatg

SEQ ID NO: 618653 - DNA, 50 bp, Homo sapiens
cctccaacaacatccgcgagatcgagttcagacttggttccttcaaccta

SEQ ID NO: 618654 - DNA, 75 bp, Homo sapiens
tcatctctcacacagacttttgatggacaggagctgactggaaataccggcatgcaggattgatggccttatctg

SEQ ID NO: 618655 - DNA, 121 bp, Homo sapiens
ccgtctgtcaggaggtgctcaaaacgcccgtgcggaccacggcctgtcagcacgtctcgaattacatctttacaagaggaggtgaagcatctcaaacataatctcgaaaaagtggaaggag

SEQ ID NO: 618656 - DNA, 82 bp, Homo sapiens
aggcctcccgggctccgggaaaactacactggccaggagtcagaaataccatcagaggaggggtactgtgactttaatagta

SEQ ID NO: 618657 - DNA, 50 bp, Homo sapiens
aatgacaaacaaccagctcttcagatcctgcactggatggatcagcggac

SEQ ID NO: 618658 - DNA, 50 bp, Homo sapiens
cagcatttgcatggaacacatgacttcccaagtaagaagcggaagaggag

SEQ ID NO: 618659 - DNA, 100 bp, Homo sapiens
gaatcttgaaaatctgtgacattgcaagggaaaaagtaaataaagctgctgtttttgaagagaaaacatcggttgtgaagagaaagccaaaaagaatgcc

SEQ ID NO: 618660 - DNA, 100 bp, Homo sapiens
cctggtcgtggtcattgttgcttccttcttcatattgaagaacttcaaccccacagtgaaacatgacagctgccctacaggcagctctgaagaacccccc

SEQ ID NO: 618661 - DNA, 100 bp, Homo sapiens
gaaagattcatcaggccaatggttttgcactgattgcaaaaataaagtcctccgagcatacaatatccttattggtgaacttgactgcagcaaagaaaag

SEQ ID NO: 618662 - DNA, 98 bp, Homo sapiens
cagaggaatgaccaccatggcagatggcaacagaggatgtcaacaattttttggagatgttgaaactaagggtatgaggatatgaaagatacagccac

SEQ ID NO: 618663 - DNA, 85 bp, Homo sapiens
gagagtaaaggccggctggaaagtccccaagcggagctcttgtccctggcaaagcgaaagcgcagtgactctgaggagaaggagc

SEQ ID NO: 618664 - DNA, 88 bp, Homo sapiens
attttagggtcctttatatagaagggagagtaggccttcccttcttcttggtggtgttcttgagtaagataatctggactggcccccg

SEQ ID NO: 618665 - DNA, 83 bp, Homo sapiens
tttttggatgatgatggatccatttctcctattgaggagtcaacctttcactcaggcccatttctaatgaaagtcccaaggag

SEQ ID NO: 618666 - DNA, 100 bp, Homo sapiens
ttcagtcaccacaggatgcctgccattcatgaacaggaaggagaggacgggctttgaataaaaaacagcaaatcatgaaggacaggtggatcaatgcagg

SEQ ID NO: 618667 - DNA, 100 bp, Homo sapiens
gctgtggcgccggcgacggaccagcgacccaagcgccgcggttaaccacgtctcgtccacgacctccctagaatgtgacagtgatgataacatgggtgcc

SEQ ID NO: 618668 - DNA, 98 bp, Homo sapiens
tggcaagaaaaatgggaagttctcgcagcaagatgaagagcgacgtcggcagctgagagagagagctcgtcagctaatagcagaagctcgatctggag

SEQ ID NO: 618669 - DNA, 110 bp, Homo sapiens
tggaggaaaacatcccagtccttaaggccaaactgacagaaatgcgtggcatctatgccaaagtggaccggctagagctctgcagcgcttcagcgagggtgccctggagt

SEQ ID NO: 618670 - DNA, 75 bp, Homo sapiens
gaccatctcgggaagtgaggagagcccccattggaccagtgtttgcttagagcatcctggccagaacaagccaag

SEQ ID NO: 618671 - DNA, 90 bp, Homo sapiens
aaggtctctcgcgggcgggagaacggaaaactcccaacttcctgtgccggtggtggtgtgcacattgagccccggtatagacagttcccc

SEQ ID NO: 618672 - DNA, 100 bp, Homo sapiens
taccagtacaccttggccagcactgtgggcctttggagtgacgctgtgggaactcatgactctgggccagactccctacgtggacattgaccccttcgag

SEQ ID NO: 618673 - DNA, 83 bp, Homo sapiens
gtttgtggatcgctgtgatcgtcacttggctcacagaacatttcctgcctgttgctcacactctgttgtccacagcatacccg

SEQ ID NO: 618674 - DNA, 83 bp, Homo sapiens
ctaactagctccaggttaggccgagctttgcgggaaagcagcgcacccaccaaggctccggatgtgttccccatcatatcagg

SEQ ID NO: 618675 - DNA, 98 bp, Homo sapiens
tgccgctgacagcagccatcgaggcgagccagagcctgcagtcccacacggtatcatgatattagctggtttgacatcaagtcatttgtgagtcatca

SEQ ID NO: 618676 - DNA, 80 bp, Homo sapiens
tgctgccgggcagccgggcgctgcggccgggcgactgcgaagatttgcctgaagacctggataatctccatttttgtcat

SEQ ID NO: 618677 - DNA, 76 bp, Homo sapiens
ctcctcctccactgccactacagggaagtgcatcacatgtcaggttatgatgtgattgctcaagcccaatctggga

SEQ ID NO: 618678 - DNA, 98 bp, Homo sapiens
tggagtctgcgaaggccgggacccggttccccggcccacagtgggggtgtgcaaacccgagagaactggatctcttccctgaagaacaggctgaaaaa

SEQ ID NO: 618679 - DNA, 100 bp, Homo sapiens
aaattagacaagaaacattggaaaagaaatcctgataagaactgctttggccatcgatgcacccctcggagctaatagcggagatgagaaacagtgggtt

SEQ ID NO: 618680 - DNA, 80 bp, Homo sapiens
gactgcgcccccgggagcgggcgcccagagatagccttggataccagttactggactttcattaatcacgtcttcatctg

SEQ ID NO: 618681 - DNA, 100 bp, Homo sapiens
gactagccactttgcattgactggaaacaatggcatttacagaaagagtcaacagcagtggcaacagaattctagcaaattggttaaaagtcaagttcat

SEQ ID NO: 618682 - DNA, 98 bp, Homo sapiens
atcaagcttggaatgatcatcaaacagctatggtgatgattagagacatactaatgtacatggaattagcttaccgaaaggagatggtgagagctgac

SEQ ID NO: 618683 - DNA, 100 bp, Homo sapiens
caggagggagccggcgctcgagggcgtgctcagcaaatacaccaacctcctccagggctggcagaacaggtttaagaattgtttaagctgcatcaatgga

SEQ ID NO: 618684 - DNA, 82 bp, Homo sapiens
gatcttaagcgcgcatctgtggaaacaattaactgaatgcaatatccatacatctccttctccgggaattcaagtaaggcat

SEQ ID NO: 618685 - DNA, 100 bp, Homo sapiens
tttttcagaaagttgctggtgaataaaagcattcggcagcgtcgtcgcttcactgtggctcatacatgcgcttctctgaagtagctttggaaagtagaga

SEQ ID NO: 618686 - DNA, 75 bp, Homo sapiens
cggggacccaggagtttcctgtgtccagcgctgccggagccgcctgagtacgagctcaactggaggcagtcctgt

SEQ ID NO: 618687 - DNA, 109 bp, Homo sapiens
ctcaatatctgtcttcggtggactccttcggcagtccacccaccgccgccgcctcccagatcatggaagggaagtggttgctgtgtatgttactggtgcttggaactgc

SEQ ID NO: 618688 - DNA, 75 bp, Homo sapiens
ggagaacgaacatcttctggacctttgtccaggtttggaaggtttgcagttgctgctcttcagtccaaagtagaa

SEQ ID NO: 618689 - DNA, 75 bp, Homo sapiens
ttgccgtggtttttatcaccacacgactgggtatatttcctctctggcacttcgtcttagtaacatggccatggg

SEQ ID NO: 618690 - DNA, 50 bp, Homo sapiens
aacgcggccaaggtgccggccgacaccggggcctagaagacagttcccag

SEQ ID NO: 618691 - DNA, 87 bp, Homo sapiens
cggcccggcgcggcccagcgccctcaggtactccaaagattcaggtttactcacgtcatccagcagagaatggaaagtcaaatttcc

SEQ ID NO: 618692 - DNA, 73 bp, Homo sapiens
aaactgtatgatatggcagatgtatgggtgaagatccaagatgttctacagttttttgtagcatcagatccaa

SEQ ID NO: 618693 - DNA, 83 bp, Homo sapiens
cagacgctgccagcatcgccgccgccaggatgatcggctgaatgtaacagaggaactaacgtccaacgacaagacgaggattc

SEQ ID NO: 618694 - DNA, 83 bp, Homo sapiens
agaagagcgaccagctcactaagaacatggctcatcttcaggtggaactaatctggttaagattcctacagaaaaaagaactc

SEQ ID NO: 618695 - DNA, 100 bp, Homo sapiens
ggcatccgtctgctggacagcggctccgtggagaacgtgctgcaagtcggacacaactcagatgggaagttcatcgcccgggcacagcggatagagtacg

SEQ ID NO: 618696 - DNA, 100 bp, Homo sapiens
ctacgacatcgtgactgacctgcgcgcccgcctcggcccgcacgccaagcacgtggtgggctatggccaccttgaattctgcccaacctgtcctgtatgt

SEQ ID NO: 618697 - DNA, 98 bp, Homo sapiens
ccccctcctgcaagatccagaagctgagacagtactactggtatgacgagcgggggaagaaggtcaagtgcacggccccacagtacgttgacttcgtc

SEQ ID NO: 618698 - DNA, 96 bp, Homo sapiens
cgccagtgggttgacacagatgctgtcattatttgtatcaaaaacaaagaatttgaaaaggcttcaaaaattttgaaaaaacatatgtccaaggac

SEQ ID NO: 618699 - DNA, 96 bp, Homo sapiens
aggtcccagagcacgacgagcgcggaggaccgggaggctcccgggcttgcgtgggtcaaaatgcagatcttcgtgaaaacccttaccggcaagacc

SEQ ID NO: 618700 - DNA, 78 bp, Homo sapiens
ttcgctacacagcaatgcatcgaggtgatgatcctgcaggaagtgcaggagagacccccgggtggctttcgagagaac

SEQ ID NO: 618701 - DNA, 74 bp, Homo sapiens
gccccgcccgcgccggaagagccacgccggcagcagcccagacgcggcacagagagggcctgggagcttgctgc

SEQ ID NO: 618702 - DNA, 80 bp, Homo sapiens
cagaggctgcggagccccaggagggtatttctgggaaaagccagcttctgtttgcactggtcttcacaactcgttacctg

SEQ ID NO: 618703 - DNA, 100 bp, Homo sapiens
ctgatgctctctctccagtccttgctgaagagactttccgttacatgatactgccaaatctgtcgaaagggagataatgaagaactgcttcttctttgtg

SEQ ID NO: 618704 - DNA, 74 bp, Homo sapiens
aaaggatgggttttaactacagacccagtctctgccaagattctcaaagttggattggtggaaacaatgaacca

SEQ ID NO: 618705 - DNA, 99 bp, Homo sapiens
atacactcaagctgttgaaaatgagcagctgtcctcatgtctctccagcaggcagtaacagagaagaattttgaaacaaaagattttcgagcctctcta

SEQ ID NO: 618706 - DNA, 100 bp, Homo sapiens
caaatagtctatgtataaaagtaaatgggaagctatttcctttgcctcttgtggagagactccagagcaaatacgagcaccaagtggcataatcacaagc

SEQ ID NO: 618707 - DNA, 82 bp, Homo sapiens
gaatcaagttttaaagaggaaggagcagactctcctctgctaatgcaaagaacaatgggcttaggtcacgagcaaggatttg

SEQ ID NO: 618708 - DNA, 97 bp, Homo sapiens
cgcaccgccctccgcggccgccccctggggatccagcgagcgcggttattcttggacagtataattggctttcctatgaagatgtctttgttcgagc

SEQ ID NO: 618709 - DNA, 75 bp, Homo sapiens
ctacgacccggagcacccgacccctgaggtgtcagcctgaccatggcgcgggagcgtgggcagcttgtgttcctt

SEQ ID NO: 618710 - DNA, 75 bp, Homo sapiens
tgcagagagcgcccctcccggacagttgctctaggtcgtaaccagcctttgaaaaaggagaaaccaaaatggaaa

SEQ ID NO: 618711 - DNA, 100 bp, Homo sapiens
aaaagagaggtgcctttatctgatgatgatgaaagttacacaggtagcaggtaccatgaagctggaattggctcagtatcgtgaggttgctgcttttgcc

SEQ ID NO: 618712 - DNA, 83 bp, Homo sapiens
ccccagccccgacctggcggggccaggacgctggttcatacactccaagatgatgatgtgcctgcagatatggttgcagaaga

SEQ ID NO: 618713 - DNA, 82 bp, Homo sapiens
tgaggctccagtcaaaaaccattaaggctcagacctcggcatgtcggttacaagaagaattggagaagctccgcacagccgg

SEQ ID NO: 618714 - DNA, 102 bp, Homo sapiens
gttttgagcttcctgtaccgctggatatatgatggggagcttgaggacacttaccacgaagttttgatgatgatggttcagaatttcatgaacatatatttc

SEQ ID NO: 618715 - DNA, 75 bp, Homo sapiens
atggagatggctcagcaggatgaggcctacccgttccatcccgggctatcccagttccccactgccagggaaccc

SEQ ID NO: 618716 - DNA, 100 bp, Homo sapiens
cgcaacctcaaccctggcatggaccttgccgcactgctggagcagatcgggtgtctgaagtacctgcaggtgtttgaggagcaggacgtggacctccgca

SEQ ID NO: 618717 - DNA, 90 bp, Homo sapiens
aaactttgatctacgacgccctggagagaccgcggggctgggcgctgctttaccacgcgttggtatgcgagtaaaatttggtgccatgac

SEQ ID NO: 618718 - DNA, 75 bp, Homo sapiens
ctacggaccttaaaatacccgcaacagccccttcgtcccaaactcagcaggcatgactggagagggaagtcccaa

SEQ ID NO: 618719 - DNA, 100 bp, Homo sapiens
gcggaaagcatgttgtggctgttccaatcgctcctgtttgtcttctgctttggcccagtgtgcaaagatccaccttacaaagtagaagaatctgggtatg

SEQ ID NO: 618720 - DNA, 74 bp, Homo sapiens
gctcaggtgctgcaggcacagcccgagaaaccgcagcactacacatgcagtggcagaacgtggagcacgttggt

SEQ ID NO: 618721 - DNA, 100 bp, Homo sapiens
aacagaaattccatgctcacaaggcagtcctagcagcatgcagtgactatttccgggatattggtgctggaaaaggcaaatactatgctgtcaattttcc

SEQ ID NO: 618722 - DNA, 100 bp, Homo sapiens
ccgctcctggcgcccctgctctgcctggcgctgctgcccgcgctcgccgcacgagggctctggaggccacgggcatgatgcttcgggtcctggtgggggc

SEQ ID NO: 618723 - DNA, 96 bp, Homo sapiens
tgcaggcagcggcggatcatattccttcatctaccatggctcagccgggaactctgaacctcaataacgaggtttggacatatttgactcttttcc

SEQ ID NO: 618724 - DNA, 100 bp, Homo sapiens
ggattggaggacggtaaagaacacacttcccagaggattcttggagattcacttgtcatggattagtgactggtcagagttatattttccgggtcagagc

SEQ ID NO: 618725 - DNA, 49 bp, Homo sapiens
ccagccggaatttctttatgaagcttttccttccctccatgagaaagaa

SEQ ID NO: 618726 - DNA, 99 bp, Homo sapiens
aagagacagaaggcaccaagatcaaaattgataagtgtgcttaagggtgagaaggactggcagaaatacgagactgctcggcggctgaaaaaatgtgtg

SEQ ID NO: 618727 - DNA, 51 bp, Homo sapiens
acacttttggccctgtttgatagataagaccatcatcatgtggaaactgac

SEQ ID NO: 618728 - DNA, 100 bp, Homo sapiens
agcaggtgccgacttctgctatgccatcgaggttttggagtgtcacagaccaaagccatcatgactctggtctctgggattccaatgggcccaccccggc

SEQ ID NO: 618729 - DNA, 100 bp, Homo sapiens
ctgatcgctcagctagaagagaagcagcagcagcccaccagggagctcctgcagcatgcatatgcgctagaacttctatttgatcagttgcatgaaggag

SEQ ID NO: 618730 - DNA, 74 bp, Homo sapiens
ctttcccttccagcctggaagtgttgcagaggaatcagagatcattgatttcttcctgggggcctctctcaagg

SEQ ID NO: 618731 - DNA, 75 bp, Homo sapiens
gaccatagccagagaacagccctccatcttgcagcccagaaggtgcggctctatgagtggacaacagagaaggag

SEQ ID NO: 618732 - DNA, 100 bp, Homo sapiens
atgtcgcttaatgcctatgcactggatttctacaaacatggttccttgataggattagtccaggataacagagggagacgatggactgagctgatccgca

SEQ ID NO: 618733 - DNA, 75 bp, Homo sapiens
gacagtggacatagaggacaacgcagatatagaacatttcttttatcacagtctggtgagctgtaccttctttct

SEQ ID NO: 618734 - DNA, 75 bp, Homo sapiens
catggagacaagagtcaaccagaaagagattgggtacttaatggttggatggcaagcatgtggtgtttggcaaag

SEQ ID NO: 618735 - DNA, 97 bp, Homo sapiens
tgcgccccaaagtggaagatcctttgactatcatggagggcccgccagctcatcctgcagtatggcttgaccctcagtgatctggatcgacacccag

SEQ ID NO: 618736 - DNA, 90 bp, Homo sapiens
ttccagtgcagcgcggagtgggcgatgccagcgtgccagaatgacagcccatatcaaggcggtgtattctttttgacaattcattttcct

SEQ ID NO: 618737 - DNA, 105 bp, Homo sapiens
caaataccaggctaccatggtctacaagactctcttcgctctttgcatcttaactgcagatgaaggatttgggggcagagcacttggcaggtcatgaaggggtcc

SEQ ID NO: 618738 - DNA, 107 bp, Homo sapiens
ggcaggattcattttgacatgcatgggttcctgaccaatgtcatccttgcagacctcaacctctcaggtcctcagtttgcagaagacccctcccagttgccttcaac

SEQ ID NO: 618739 - DNA, 100 bp, Homo sapiens
tcttcatggtgcggctcatcttcgagagaccaagatcactccatggatgaaatgacagctgtggtgaaaattgaaaaaggagttggtggcaataatgggg

SEQ ID NO: 618740 - DNA, 101 bp, Homo sapiens
cgacagtaacccgtttgccgacccggatctcaacaatcccttcaagatcaatgaactgagccatgttcaaatccctgttatgttgatgccagatgacttca

SEQ ID NO: 618741 - DNA, 100 bp, Homo sapiens
cggagacatggccaacatcgcggtgcagcgaatcaagcgggagttcaaggaggtgctgaagagcgaggagatgaaggatttgggggcagagcacttggca

SEQ ID NO: 618742 - DNA, 75 bp, Homo sapiens
caaccaaaggttgcaccaacaaccgcttggaatgctgcaacaatgacatttgcctgaaaaaattaaggatgacca

SEQ ID NO: 618743 - DNA, 100 bp, Homo sapiens
ttagtgatgcaaacgaacctggagagagccaaagtaccataggttagaaaatggatttctgactggaatctcaccactgaaaaaaagcacacccttttaa

SEQ ID NO: 618744 - DNA, 82 bp, Homo sapiens
ctggagcccctcctcctccacatgtgcgaatccaggagccacagaaggccctgggaggagcggggacactgaggacctctct

SEQ ID NO: 618745 - DNA, 50 bp, Homo sapiens
gggggatgtgagcgctgagcccttggcagctttgaaaagtccagccgcat

SEQ ID NO: 618746 - DNA, 50 bp, Homo sapiens
aaaggacgcaaagttctccggcgaggaccctgatgcttggtgtgacctga

SEQ ID NO: 618747 - DNA, 100 bp, Homo sapiens
gccagttgtgcccatcctcagctgctaaaaggaagaagcatttttgctgttagcccagatggctttgtgtgtgagccattgctgctgagattgttctaaa

SEQ ID NO: 618748 - DNA, 80 bp, Homo sapiens
ggaaaacaacttcgagggcagagaagcggggagaggtggtgagagatgacccctgttgaggatttcattggtgtctgcca

SEQ ID NO: 618749 - DNA, 82 bp, Homo sapiens
agtccacccaccgccgccgcctcccaggaacagacaacgcaagctggggacgaaactgcagtgaccagtgggtgtggctggg

SEQ ID NO: 618750 - DNA, 74 bp, Homo sapiens
aaaaggaatattcaattttcctgcaagaatatctacagcttaaagcttttcaagccaggccaagaagctgtgaa

SEQ ID NO: 618751 - DNA, 75 bp, Homo sapiens
actttattgatcaacatccttcatagataccccatcagcctgagtctcttaaaggcctttatacacatatgtcta

SEQ ID NO: 618752 - DNA, 101 bp, Homo sapiens
acactagtggagccttgtatgccccactcctgcccctgccctatggagtcagcgccccaggaaagaaagaaatctcgttttgggaatgctttccacctgtg

SEQ ID NO: 618753 - DNA, 76 bp, Homo sapiens
cgggcgccgggagcgagctgggagggagccgcgcgcctttgtgcgcgcgccgagacttccttgtgaaacctcctag

SEQ ID NO: 618754 - DNA, 100 bp, Homo sapiens
ggggccctcagggaagagaccctgcaaagatcctgggagaccaagcattcctgggagatggtcgggaagaagaagggagtctcaggccagaaggatggtg

SEQ ID NO: 618755 - DNA, 100 bp, Homo sapiens
acatctacgtgctcaaccaggtggaccacttcaggtacttacaatttcatcagaaattcctaaaagaattcgaagtgccttaaaaaatgcagaagaatca

SEQ ID NO: 618756 - DNA, 100 bp, Homo sapiens
ctacagcaagaagacggaaatccaaaggcagacagtacgggctcccttcgccaaactcttcattttctctttgctctaggtcgtaaccagcctttgaaaa

SEQ ID NO: 618757 - DNA, 82 bp, Homo sapiens
ttcagatcttcacagcacagttcctgggaaggtggagccaccagcctctccttggtcaaaatgcagatcttcgtgaaaaccc

SEQ ID NO: 618758 - DNA, 97 bp, Homo sapiens
acagccaccagtgtagatcttagagatattaaaatagttaagaagcttggttgggcaaaaaaatcaaggtatttggtcccggaacaaagcttatcat

SEQ ID NO: 618759 - DNA, 75 bp, Homo sapiens
taccaaatacttaccctaattcatcatcaccagtattgaaatggctgatggcaagtgcaggaagatccttttcta

SEQ ID NO: 618760 - DNA, 100 bp, Homo sapiens
aaaatacgaaggtttctggctggcaagtctggaaaagtttgaaattccagtaaaaattcgtttgagtcctgaaccgtggacccctgaaactggtctggtg

SEQ ID NO: 618761 - DNA, 100 bp, Homo sapiens
acgccctgtgcggttccggggagctcggctccaagttctggttacatccttgctaagccccactccggctacagctcttgctgtcagatacgcatccaag

SEQ ID NO: 618762 - DNA, 74 bp, Homo sapiens
acgcctctgcaatcatgggtcaccaagagaggctgagagaccaggtggaaatggatattgttgaaaaactggtg

SEQ ID NO: 618763 - DNA, 82 bp, Homo sapiens
cacaggcggggggcgtaggcgcgcggggcccgccatggctgcgtcggagctctacacaaagtacaacagggtctggattccc

SEQ ID NO: 618764 - DNA, 100 bp, Homo sapiens
gttataccttattggtgtggacgttgtctaaatttcggtagccatggcacaagaatataagcctggcccaactagagaatctgtgcaaacagctgtatga

SEQ ID NO: 618765 - DNA, 96 bp, Homo sapiens
cttagagattgaacattcggtgcccaaaaaacaaagtgggccccatgctgattgagtttaacatgcctgtggacctggagctcgtggcaaagcaga

SEQ ID NO: 618766 - DNA, 100 bp, Homo sapiens
atttttgttccagaggatgatgatgatgatgactaacagaatgtggccccgtcccagagcaccacccgagacatcaggagcccatcgtgggctagggaag

SEQ ID NO: 618767 - DNA, 83 bp, Homo sapiens
tattcagagaaggaaggatcttctcatgcacagaggcaacaaatggcaactttctgagtgcaatggatgagcttcatagtctg

SEQ ID NO: 618768 - DNA, 82 bp, Homo sapiens
cggaaccagacgatgagacagagttgcgaccgcgcggcagggatataactggtgccatgaccggaatgtagtaacgattttc

SEQ ID NO: 618769 - DNA, 100 bp, Homo sapiens
tgatgactgtggctctgctcctgctgttggaatcgaagcctcttaaaatggcagatgacttggacttcgagacaggagatgcaggggcctcagccacctt

SEQ ID NO: 618770 - DNA, 100 bp, Homo sapiens
catgtggaaagaaaccccgacttgcctccagaagaacttgaagatggcgtatgtaaggaggaagaacgtgcaaaacgtgaggagctagagcgaatactgg

SEQ ID NO: 618771 - DNA, 142 bp, Homo sapiens
ctgtgacaccatgaaggtgggaggtaacttggattccaaaggctatggcattgcaacacccaaggggtctgccctgaggaggagagttaatattgcccattatcacggaggactccttagacccccctcccgtggccacccg

SEQ ID NO: 618772 - DNA, 100 bp, Homo sapiens
acctctttgaaattgtaacaacgtctcgaactttctatgtgcagctgaagaaatcaggggagaaacccctgcttggtggaagcctgatggaatatgcaat

SEQ ID NO: 618773 - DNA, 98 bp, Homo sapiens
ctgagctttttggcggccacaggcgatgacggtcagcctagaatatattgatctgatggaaacaacccagtacatgaatgagggagaactccgtgtcc

SEQ ID NO: 618774 - DNA, 98 bp, Homo sapiens
aggagcagctagagcaagagaccagacagcctctggagatcctgtgttgctacttgtcatgtttcttaggatcagctatcaagaataatctacttgct

SEQ ID NO: 618775 - DNA, 88 bp, Homo sapiens
cagcaagcggggcgctgtgtccccaagctccccgtcctcggattctcgctgaagtctgttaattctactttttgagtacttatgaata

SEQ ID NO: 618776 - DNA, 100 bp, Homo sapiens
tataaaacaaatgctgctgctatgaatatgggtcgaccattccaaaaaaatcgatacgtaggtaacctttccagagatgtgacagaagtccttatacttc

SEQ ID NO: 618777 - DNA, 51 bp, Homo sapiens
agcagaagaagctgaggatgaagaagatgagaatagtgacagtggtacagg

SEQ ID NO: 618778 - DNA, 80 bp, Homo sapiens
gcggcctggcaggggaaggatcgagcacatgattaagtaccggtacatcccgttcacacatgggaagagaaggtacagag

SEQ ID NO: 618779 - DNA, 75 bp, Homo sapiens
gagcctggcgggcgtgggaacccaggccccgccgaggcggccaggcctcatggcggtccgagcttcgttcgagaa

SEQ ID NO: 618780 - DNA, 98 bp, Homo sapiens
tgacatcgctaccatggtctccggcagcagcggcctcgccgccgcccgtctcctgtcgcgcagcttcctccattcaaccctatgaaaagataaaggcc

SEQ ID NO: 618781 - DNA, 75 bp, Homo sapiens
accaatgagtcgaaggtctcgtagagcttccttaacatttgaagacagtgatttgttccatttgattggtgttat

SEQ ID NO: 618782 - DNA, 51 bp, Homo sapiens
ttgctgtgctgcgcgctcgtgctgttcgggggtcttgtctggattttggtt

SEQ ID NO: 618783 - DNA, 74 bp, Homo sapiens
ccacgtccaagcaaaccgggaaaggagaggatcccggagccggaatgggtaccacagaccatgtcatcgtcctg

SEQ ID NO: 618784 - DNA, 87 bp, Homo sapiens
tcttccaagcaaggaagtcgacagcggacaaggcaaaatctcagcaagttcggacctctagtacaataaggcgaacctcctctttgg

SEQ ID NO: 618785 - DNA, 90 bp, Homo sapiens
atgccctttatcttgggcctcttgtctggaggatgaccattctgccccccttggagaaactgcggctgctgctggagaagctgagcaggt

SEQ ID NO: 618786 - DNA, 90 bp, Homo sapiens
ggagcatggtcagccccgtcccctccccgacgggcaccatcaggccctgctgctcctgggggccgccgccctggcctgcctcgccctgga

SEQ ID NO: 618787 - DNA, 78 bp, Homo sapiens
tgatatccttctcaaccttgtgggatgtgaaaactctgttactgaaggagaagaaggaagttgtggaagaggcagaaa

SEQ ID NO: 618788 - DNA, 100 bp, Homo sapiens
gtgaaggagtgcagaggcatcacctgaaaggaaaaacagcactggaggcaatgtttctataaatcaaagaagagacagtgtgagaatgtcagccctcaac

SEQ ID NO: 618789 - DNA, 81 bp, Homo sapiens
gagggcctcggccatccaagggtctcccaggcagaagtcaattcatctggaaagactatctctgagtcagacttaaaccac

SEQ ID NO: 618790 - DNA, 90 bp, Homo sapiens
ccagaccatcatcagcgacatgaagtttcctcactgcttggaggaagatgagaattctcagaggtccttatgctgccctttttgctgcag

SEQ ID NO: 618791 - DNA, 98 bp, Homo sapiens
ggggaacgactgcggcgcgctgctggacgaagagctctcctccttcttcctcaactatctcgctgacacgcaggagaacgtatttaccgggcagtcaa

SEQ ID NO: 618792 - DNA, 90 bp, Homo sapiens
cacaggcctcccctcaagcctggcctccattcctggaggaaaaccatagcagaagactgctgcctgacgattgtgggcagcctggtaaca

SEQ ID NO: 618793 - DNA, 83 bp, Homo sapiens
gcccgctgagcttggcgcacgggccgaccagggacccagacatggagctgcgggaagaagcctggtctccggggccgctggat

SEQ ID NO: 618794 - DNA, 98 bp, Homo sapiens
cgagaaccgtcagtttgagccagatggatgaatttcacccattcatcgaggcacttcttccacatgtccgtgcaattgcctatacttggttcaacctg

SEQ ID NO: 618795 - DNA, 82 bp, Homo sapiens
cctggagcctcagttggaagcagccgatccagcctgcggagcctgtggggcaggcttgtgagtggcaattccattgaagaga

SEQ ID NO: 618796 - DNA, 80 bp, Homo sapiens
ccgccctggccatctaccatgtggtcagcccaaggccaaccccactgtcactctgttcccgccctcctctgaggagctcc

SEQ ID NO: 618797 - DNA, 51 bp, Homo sapiens
tcgagccagaagcagtatttgtcctgaaaacattgagagccatgctggtat

SEQ ID NO: 618798 - DNA, 90 bp, Homo sapiens
gatgaaatgagtgccaataaaataaattcttttgaactagatcgagctgatagagaccctagtaacatgatggaacttgctaaggaagaa

SEQ ID NO: 618799 - DNA, 83 bp, Homo sapiens
atcatcacaccatcagcttcagagaatggcagccatttatttgtcccgtggcacaggaggaagctcgtcggaacaggctcatg

SEQ ID NO: 618800 - DNA, 75 bp, Homo sapiens
ccggcccgtggccatcggcagctgcggccacacttccagggtctccctccactgctgtagtaacccgggtccggg

SEQ ID NO: 618801 - DNA, 73 bp, Homo sapiens
tacggtcacgtctacaaggcgaggcggaaagatggtactatactggcaattgctggagaagattttgcaattg

SEQ ID NO: 618802 - DNA, 51 bp, Homo sapiens
tcaagtactaccggccaactgaagtgaccactctggctcacatcatagcca

SEQ ID NO: 618803 - DNA, 50 bp, Homo sapiens
cctgtgtggtggactgtggcacgggggcatggtgctgatgtgaaatgtgt

SEQ ID NO: 618804 - DNA, 98 bp, Homo sapiens
ggatcgtgaccgagaccgtgaccgagagcgtgaccgagagcgcgaatatcgtcatcgttagaaggtgaaagacccctgacaaaagacaatcatcttct

SEQ ID NO: 618805 - DNA, 80 bp, Homo sapiens
gcctcccgagtggctgggattacaggggcattttcaggtttctgccacggaggagatgctcttcacgaagggagagtcag

SEQ ID NO: 618806 - DNA, 74 bp, Homo sapiens
cacgactactagaaggggaggggagtggaaaggctctcagtgaaaaaggtaacctgtgtatggtgactggaggt

SEQ ID NO: 618807 - DNA, 75 bp, Homo sapiens
acggaatgctggagtcagtggaagacggagctggtcggcccgaaggcatcaacttctaactcatctcgccaggag

SEQ ID NO: 618808 - DNA, 101 bp, Homo sapiens
agagcctatcgtctccaagaggagtttgaagctacccttggggcatctgatcctaattcccttgctgatgatattgggcacccaactccgacaatgctgtc

SEQ ID NO: 618809 - DNA, 75 bp, Homo sapiens
ccaccaaagggggctgctgaccgagagagctcactcagccagctgccaatttgtggtgtctgaagaccaagacta

SEQ ID NO: 618810 - DNA, 100 bp, Homo sapiens
taactggctgtgtctcgtggtttttcactgtcctggaaaaggcctgaagtggcactgaaatgaggcatagatgaggagtgggaatagctttgcgaaaaat

SEQ ID NO: 618811 - DNA, 101 bp, Homo sapiens
ccaagtttcacatccttgtctgtgaagctaaactcaatgctgctgtgtgggaagaagatttgtaaagaaaactcttaggttcgtcacaaggcatcgcagaa

SEQ ID NO: 618812 - DNA, 74 bp, Homo sapiens
ccaactttgcgacggaaatgtgtcatcgaaagccaggcctcatggcggtccgagcttcgttcgagaacaactgt

SEQ ID NO: 618813 - DNA, 100 bp, Homo sapiens
cagctgcagataccttagtgacaaagtttaatcagcttcctgttgagagatggctaacaggggcccgagctatggcttaagccgagaggtgcaggagaag

SEQ ID NO: 618814 - DNA, 100 bp, Homo sapiens
tccccccgaagaagactcccccacatctggatttattcaggagattgagcatgctctgggtcttggcccagccaaacagtgtcctcttcgagagtttctc

SEQ ID NO: 618815 - DNA, 100 bp, Homo sapiens
tcaaccacaggtgtactgaatgagtacattgtagagtagaagaagtaggttagaagggtgcagcagttggaggaagaaaatacagagcttagaacaacag

SEQ ID NO: 618816 - DNA, 99 bp, Homo sapiens
cagcaagagcaaactatcagaatgggaagaacaatgtgccaaggctgaaattatcctacaaagaggtggaatggtgcaaaccagtgagcagtatgaatt

SEQ ID NO: 618817 - DNA, 50 bp, Homo sapiens
cccatctgtaacgaggtgttgagacgaggggtttgttaaagttgttaaga

SEQ ID NO: 618818 - DNA, 74 bp, Homo sapiens
tggagttcacgactctgagtgctgatcgtctggtagaatcaacttccttgagaaaagccatagaaacagtgtat

SEQ ID NO: 618819 - DNA, 100 bp, Homo sapiens
cccgagtccgcgggaagatggcggcgccgctcatccccctctcccagcaggcattgaagttgatatcgatgtggagcacggagggaaaagaagccgcctg

SEQ ID NO: 618820 - DNA, 83 bp, Homo sapiens
cttctgaaacgtcagctgcgctcccctaggagtgctgagcccgcggaaccgcagccatgaaggaccctctattgtcccaggcc

SEQ ID NO: 618821 - DNA, 100 bp, Homo sapiens
gtttatgagcaggtgcttcggagtgcttatgccaagaggaacagcagtgtaaatgactcagctcagtcgtttactagaaagcaataggaagcttgaagac

SEQ ID NO: 618822 - DNA, 75 bp, Homo sapiens
tagagtctgagaaggcccttgtggaaattgagagtcagattgacagaatctgtgaaatgggagaagtgatgagga

SEQ ID NO: 618823 - DNA, 98 bp, Homo sapiens
cccactcctgacatcagctggagcaagggtgtggggctggcctcgctcgtggcacctctgctgatctcacaggccatgggactggccctctatgtcct

SEQ ID NO: 618824 - DNA, 82 bp, Homo sapiens
gccgcgaggaggcgcgggaggtgttcgagaacgaccccgagacgggctccacgtgttccccacgtttgtggcgtacgagctc

SEQ ID NO: 618825 - DNA, 100 bp, Homo sapiens
agcaacagattgaagcccagcaacaattgctggcaactaagtacatccagcagtggtcattcgacaacgaaagtcataccgtagaaaagatggcgtgttt

SEQ ID NO: 618826 - DNA, 100 bp, Homo sapiens
ttttggaagtgtgccagaattgggaatgggtactgttcaaaaaggaatgccccacaagtgttaccatggcaaaactggaagagtctacaatgttacccag

SEQ ID NO: 618827 - DNA, 75 bp, Homo sapiens
ttcagggctcccactgattctacattatgctgcagaaccttggcctgaaaatgctacattatatcagcaattgaa

SEQ ID NO: 618828 - DNA, 75 bp, Homo sapiens
gcccaacggtcggtgtccccggctgaggcagcgcggccgcagcagccctcttccatgaggcaggctgaacctgca

SEQ ID NO: 618829 - DNA, 96 bp, Homo sapiens
acagactttttgttggatccattccgaagaataagactaaagaaaacattttggaagaattcagtaaagtcacagacgatgacagtgagcctattt

SEQ ID NO: 618830 - DNA, 101 bp, Homo sapiens
aagccagacaacttctggcagaaacagaggactaattttggcagttctaaatttgaatttgagggttacacatcattttggaatgactgtatatcatctgg

SEQ ID NO: 618831 - DNA, 50 bp, Homo sapiens
ttgagacttattcatgctgtcagagggttggactccatgaaagaattgca

SEQ ID NO: 618832 - DNA, 50 bp, Homo sapiens
gtgcaaacccgagagaactggattactacaatgcagctagaacgtgaaaa

SEQ ID NO: 618833 - DNA, 73 bp, Homo sapiens
gcagccccagaagtccaggaagatgtgaaggctttcaagacaggtcagaatggcggcagtggagcatcgtcat

SEQ ID NO: 618834 - DNA, 88 bp, Homo sapiens
tgtcggcccttgccttggcagagctgaggtatttaacatgaagtcgctccagattgtgttacctgcccgagcagaccccgaaagcccc

SEQ ID NO: 618835 - DNA, 90 bp, Homo sapiens
agtaacagggtcaggcgcggagaggagcggcgggagagccaggagggccgcccagggtaaaataccatgaagattttgaaaaaacaaagg

SEQ ID NO: 618836 - DNA, 98 bp, Homo sapiens
gggagactcagaggctgtgagcgtgaggaagctggctggagacatgggcgagctggcactcgagggggcagttgggatgaatgggttccggagagcag

SEQ ID NO: 618837 - DNA, 75 bp, Homo sapiens
ccggatattcagttgcacatccccacatcaatgcactgccaatggtcagatgtaccaacagtaccagcaacaggc

SEQ ID NO: 618838 - DNA, 100 bp, Homo sapiens
gaagatatgctgggcttctgatgatggctgcactgcatgattgcacagccaggagcagcatatttttatgttgaacttgacacaggagaaaagcttttcc

SEQ ID NO: 618839 - DNA, 107 bp, Homo sapiens
agaagtgctgcaaggctgacgataaggagacctgctttgccgaggaggcttccgaggaggcagaggaggaggaggtgaccacaagccacaaggaaagaagacgaagt

SEQ ID NO: 618840 - DNA, 100 bp, Homo sapiens
gactccctgcacctcaactataccaagatagaacagctttgttcaggtatgagcagcagcgggacaatcttgcccaacagtcattcaacatggaacaagc

SEQ ID NO: 618841 - DNA, 75 bp, Homo sapiens
gcctcctgagtagttgggattacaggccttgaggagctggttctctcagagatgaactcaccaagccggacccag

SEQ ID NO: 618842 - DNA, 80 bp, Homo sapiens
tcttcgtcaccttcgacctgctcttcatctccctgctctggatcatcgaactgaatgtttggtgcacctcgatttggagg

SEQ ID NO: 618843 - DNA, 99 bp, Homo sapiens
tcggaagcctgcgtaactttctcccttgatccgggagtctttccactgggtggtgctgtcacaggggacccactgggaccgcctcccgctgataccctt

SEQ ID NO: 618844 - DNA, 75 bp, Homo sapiens
cgccactggaaagctgaaatccttcgcccggaaattcatcaatgtgaccgcaacaagggaaaacatggcttatac

SEQ ID NO: 618845 - DNA, 99 bp, Homo sapiens
agcccctcacaccctggatccttgacctactaggtgtccgcaatgttgccagtgtctgtctgcagattggctacccaactgttgcatcagtaccccatt

SEQ ID NO: 618846 - DNA, 100 bp, Homo sapiens
gggaggtgcccgagcgttaccagaacctgtctccagtgggctctggcgcctatggctctgtgtgagtccttggtataaatgaatggcagaatacggggtt

SEQ ID NO: 618847 - DNA, 100 bp, Homo sapiens
ctagctttctccttctggtgtggggcccgagttccatgttaactgggctgtttggggcctcagcaggcaccatttttgtatatggaaaagatatcaaaac

SEQ ID NO: 618848 - DNA, 100 bp, Homo sapiens
aagaaggtcaccattgactttgcaggaaggaagatcctggaagaagaaaattcactagcagagtatcatagcaggctgacacattaaaagagagatatca

SEQ ID NO: 618849 - DNA, 88 bp, Homo sapiens
tttgatctttgcgtagtatgtggagacaaagcatcaggacccacctccaggacctcaaggaagtgacacacaacatccactatgagac

SEQ ID NO: 618850 - DNA, 49 bp, Homo sapiens
gcggcgccatggcagggcttgcaggtgaatgaaaactttgccattgatt

SEQ ID NO: 618851 - DNA, 49 bp, Homo sapiens
ttgtggcgctctgcgtcccctgaaggttagcatggcctcattgaaagaa

SEQ ID NO: 618852 - DNA, 96 bp, Homo sapiens
acagacgctccctgtgatttatgtcaaggaaacgtaaatattttcaccacgatcgattagactgggatgaacacagttctgccggcagatatgttt

SEQ ID NO: 618853 - DNA, 100 bp, Homo sapiens
ttaatgctaaatttgtgaatgctgtgtatgataccttacttaatactgttgctccttgagggcaggacagttcttatggctttatccgttgcgtaagcac

SEQ ID NO: 618854 - DNA, 90 bp, Homo sapiens
actttgcgacggaaatgtgtcatcgaaagccagactgtgccctgtccacggtgcctcctgcatgtcctgctgccctgagctgtcccgagc

SEQ ID NO: 618855 - DNA, 83 bp, Homo sapiens
aaaaccacgactgtggttgagatcattcttcaagctgtgaaacaaggcttaaagacaatgcagatcttcgtgaagactctgac

SEQ ID NO: 618856 - DNA, 98 bp, Homo sapiens
cttcgaaggcgacttcaagacgcggcccaaggtgtcccttggcggcgcgagcaggaagggactttgaacatgtcggggatcgccctcagcagactcgc

SEQ ID NO: 618857 - DNA, 96 bp, Homo sapiens
tcgagggaccatggccgatcctcgcgtgagacagatcaagatcaagaccggcgtggtgaagcggtatgaaagatgccgccgagcttctgggccacc

SEQ ID NO: 618858 - DNA, 87 bp, Homo sapiens
ccatatctggacatctggaacatccatggaggcgatcgagatcggatgacagcaaatcatgaaagctacctcctcatggcaagcacc

SEQ ID NO: 618859 - DNA, 76 bp, Homo sapiens
ggaagacctattatcagatcaaccaccaaagtgggaaacattgaaatcaagaaagacagcacactggatgctgctg

SEQ ID NO: 618860 - DNA, 131 bp, Homo sapiens
ctaaacctatcctttgacacaggactgaggaataagatggtacaagttggactgcttcccaagctcactgcactcctagattctgtgtcaactggttctgtatttggaagaagcacgactctaaatatgca

SEQ ID NO: 618861 - DNA, 100 bp, Homo sapiens
cgcagaaggactgcctcactgagcaaccaagaccaacttctctttgcctgaaaaatgcgactatatggatgaggtgacatatggggagctggagaaggag

SEQ ID NO: 618862 - DNA, 95 bp, Homo sapiens
ttaagactctcaggcttactgtggatctggattctaaggcaacacttccttgaagaaacaagcttacagagaccatgaaacgtatggtgcaatag

SEQ ID NO: 618863 - DNA, 85 bp, Homo sapiens
agtccgccctggactaccgcctggatcctcagctccagctgcactgctcagacgagagttcttcagatgctatatatttggcaag

SEQ ID NO: 618864 - DNA, 75 bp, Homo sapiens
gtccacatgagtgcctctcccagcagatccagtgtaaacaggaacatcgataagtagtgtaaaaacttgcacaat

SEQ ID NO: 618865 - DNA, 134 bp, Homo sapiens
aaaggacaaaaaaattcctggaaaaagaagtccaagaagcaaaaaagggactgctaagaagataccaccaggttgcaaaagcttctcatttcagagagatgccaggatcctaagtgcctgccaaacttaccaat

SEQ ID NO: 618866 - DNA, 82 bp, Homo sapiens
aagaaggaagtcatcatgggccggcctggaacaggactgatcctttgaaatactccagccatgactaaaagagaagcagagg

SEQ ID NO: 618867 - DNA, 100 bp, Homo sapiens
tcgtgatccagaagtccagagctgaggactgcctgtttgcaggagcactcactgtgggcctcgtgcgacagtgtcaaacaatccatggacgagaccggac

SEQ ID NO: 618868 - DNA, 73 bp, Homo sapiens
agcaagctgaatggaggccagatagtaccatgatagctgtatcaattgtggtggtgccatgcagcaagaatca

SEQ ID NO: 618869 - DNA, 98 bp, Homo sapiens
gctgggcctgtgtgcctggaaaggaattgttttggcctaggatcatccagggcaaatccagacagaacctttgacttggtgttgaaagtgaaatgtca

SEQ ID NO: 618870 - DNA, 98 bp, Homo sapiens
gggcgagtagtcgtccgacgtctggccgtgagacgtttcgggagccggagtctctccaccgcagacatgacgaagagggtggttttcctgaagcagct

SEQ ID NO: 618871 - DNA, 97 bp, Homo sapiens
ctacattttgttgcttagaaaagcctaggcatttctgtaacatttggtcatcatggtcacaggagaccatccaatcacagctaaagctattgccaaa

SEQ ID NO: 618872 - DNA, 100 bp, Homo sapiens
tgggaggccggccggtgccagcacctttcggcttctgagacggcggcagcagcggcattcaggtggagccgccaccaaaatgcagattttcgtgaaaacc

SEQ ID NO: 618873 - DNA, 101 bp, Homo sapiens
aaagtatcttgatgtctttacctctaactgcccgcaaagctggaatcagtgagatgtttgaggggcatcaaggaccaatcactggcatccattgtcatgca

SEQ ID NO: 618874 - DNA, 99 bp, Homo sapiens
caggaaagaaacttcctcctggaggaatacctggcattgacctctcagatcccaaacaactggcagaatttgctagagcatatcggtatctccaaaagg

SEQ ID NO: 618875 - DNA, 97 bp, Homo sapiens
taataatgcgagctgcttccgaaggctgaccgagtgcttcctgagccccattcctgggcttcccgatggactcgagtttttactatgtgagcatccc

SEQ ID NO: 618876 - DNA, 98 bp, Homo sapiens
ctacctcaacctggtgcagtgcgagacgctagagggcttcatgcagtttatccagtcagttcctgtggctgaagttcttgatacagagggaagcattc

SEQ ID NO: 618877 - DNA, 90 bp, Homo sapiens
atgttactgtgggctgtgggattaatttcaacgagaaggcgatccataaggagggcgacatggagtccaatgggaaatacatcaccaaat

SEQ ID NO: 618878 - DNA, 75 bp, Homo sapiens
ttttgcaggaaatgtgaatctcaggagagagcagccagagtggtctggctctgggagaggagtggacagcagctg

SEQ ID NO: 618879 - DNA, 83 bp, Homo sapiens
atatgaagagacatgcgatggtagatcaacccccagtttttggtgttgagccagacttgaccagggaaggcggcagtattccc

SEQ ID NO: 618880 - DNA, 83 bp, Homo sapiens
cgcagccccctcctggcgacccgcaagtcagggaagtcaaagatgcatccctgagttcttcctagcaggcaagcagccgtgca

SEQ ID NO: 618881 - DNA, 100 bp, Homo sapiens
tgcacttcgcattttggcattgacatttaattttagggtcctttatatagaagggagagtaggcagcacgctggctcttctcctgaacttcctcgcctgc

SEQ ID NO: 618882 - DNA, 75 bp, Homo sapiens
tcggaatgtgatcacagagcctatttacccagaagtagtccatatggattctaacattttcagagaaccttttgg

SEQ ID NO: 618883 - DNA, 75 bp, Homo sapiens
gtctgtagaggatcctttccccattgacacaactcagatgggaagttcatcgcccgggcacagcggatagagtac

SEQ ID NO: 618884 - DNA, 100 bp, Homo sapiens
tgagcaagcggaggacctacgccggcctgggagtggctgagcagtttgccatcgcggaagccaagctccgagcatggtcttcggtggatggcgaggactc

SEQ ID NO: 618885 - DNA, 100 bp, Homo sapiens
atctaaaccggaaaatagctgaactggaaaagaacattgttggtgaaaagaccaaggtgtttgatcagtatgtaaagaccagggcagaggaagaacgcag

SEQ ID NO: 618886 - DNA, 100 bp, Homo sapiens
cgacgcgcagctgcaggctgagaagcagaaggccaggctgttccggagacttcaaggcactagctcgatggtctgaaaaacagagatgagctccttgaac

SEQ ID NO: 618887 - DNA, 90 bp, Homo sapiens
ggagcagccaacgtggtgggacccaaaatctgcctggaagataatgtatacagtttatgtaacttgatggaagaaaatggaattactcca

SEQ ID NO: 618888 - DNA, 100 bp, Homo sapiens
ttcaccgagaagcgggtgtatctcaacagctcgagatttctgtggctcctcaagatattggtcataatcctggtacttggcattgttggatttatgttcg

SEQ ID NO: 618889 - DNA, 49 bp, Homo sapiens
gccaaaacagttcattcatattcagcttgaccagatataccatctggca

SEQ ID NO: 618890 - DNA, 75 bp, Homo sapiens
gtggctggtcaccaggaggtggccaccaggctcctcctttccccgctggtgtttgttgaaagctccgagactttg

SEQ ID NO: 618891 - DNA, 75 bp, Homo sapiens
agaagggcgactgagtactcaacatattgactgtatttgggctgcagcacagaataaccaagtgctgggaattgg

SEQ ID NO: 618892 - DNA, 75 bp, Homo sapiens
gcgggagaggcggaggcggcccgtggccaaagcacccgccaggctccgagggaagctgccacttttgctagagag

SEQ ID NO: 618893 - DNA, 75 bp, Homo sapiens
tcaaaaacaaaattctgaactcaggacttggcaaggtagatacaacaagaattgaatactccattcctttaagag

SEQ ID NO: 618894 - DNA, 97 bp, Homo sapiens
gacgtgtcgtcactatgtggcccatgtgaagtgtcgacttcttccactacaaaatctccagcgtccagtgcctcaggtttagtaatttcctgcttat

SEQ ID NO: 618895 - DNA, 75 bp, Homo sapiens
tttattccaggccaaggatgaggcaatgagaagagctatctccaggaacactgccatgctcgtctgttctacccc

SEQ ID NO: 618896 - DNA, 82 bp, Homo sapiens
gctcacacaaagcctgtttggtggtctcttcccacggacgcgcgagacaatgaggagttcactttatccaaatgcatagatg

SEQ ID NO: 618897 - DNA, 109 bp, Homo sapiens
tgaggcgccgggaccggctgcagagacaggcgttcgaggagatcatcctgcagtcaaaggcgccagcagagggagttgatgaaagctcttcagcagcagcagcaacagc

SEQ ID NO: 618898 - DNA, 74 bp, Homo sapiens
tccaagtcttcagaattcattaaatggatcttctgctggcaggctccctgaaacaacagtaacctacccctgtg

SEQ ID NO: 618899 - DNA, 100 bp, Homo sapiens
tgctcatcccggtggccgccgcgcaggagcctcccggagctgcctacttctgcttcctcctggccgctctgggtgtgacagctggtgcccatcgcttgtg

SEQ ID NO: 618900 - DNA, 75 bp, Homo sapiens
cgaacttagacttccggaaggactttggcgaggagagatcttggtagaggagagcaacgtgcagagggtggactc

SEQ ID NO: 618901 - DNA, 98 bp, Homo sapiens
ggcgcgcgcctgcccagctttgcagcccccgaacgcggcctcgcacagggatcgcttacacctgagacgaactacagaacagcacgtaccagaggtgg

SEQ ID NO: 618902 - DNA, 100 bp, Homo sapiens
tatgagaaggacaacacctacttagtcacgccgatgatggagctgaagcccaacgcaggtagcgaccgtgcctgggtctggaacacccacgctgacttcg

SEQ ID NO: 618903 - DNA, 100 bp, Homo sapiens
aggatccctatggcatcttctgcctcgtcctgacacccaccagggtgtccgcaatgttgccagtgtctgtctgcagattggctacccaactgttgcatca

SEQ ID NO: 618904 - DNA, 95 bp, Homo sapiens
tcatcgggagaatccaagcaggaccgccatggaggaaggtcaatattcagatttaacaacctgggtgtcctgcatgtgactaagaagaacatgat

SEQ ID NO: 618905 - DNA, 75 bp, Homo sapiens
agccggacgggcactgggcgactctgtgcctcgctgagggttgtggcagcactgcctgaaggtatgagaccagat

SEQ ID NO: 618906 - DNA, 100 bp, Homo sapiens
agagattggaacaattatcaggtcattaggatgctgtcctacggaaggagagctgcatgatctgattgcagaggagttgtaagacgttcatcgccgtgtt

SEQ ID NO: 618907 - DNA, 100 bp, Homo sapiens
gtcgcctagtaaacggggctgctggtgggccgcgtcgaagacatggaccagggctacggagatagcctgggctggaagctcttctacgtcacaggctgcc

SEQ ID NO: 618908 - DNA, 98 bp, Homo sapiens
caagatttgtaagaaacaaatttatttccaaggaagccagttgagggaagttctccatgaatgtacgtcacaatgatgatgaccgaccaaatccctct

SEQ ID NO: 618909 - DNA, 82 bp, Homo sapiens
gcctgccaggcgctcgggggccgaactggccctggactacctctgcagcctgtcaggattggagctgctttccgagcacctg

SEQ ID NO: 618910 - DNA, 82 bp, Homo sapiens
ggaaaaggaggaattcgccgtgcccgagaatagctccgtccagcagctgctgatgcaaggaatcccctgggctcccgtccac

SEQ ID NO: 618911 - DNA, 83 bp, Homo sapiens
agaaggcgctgcgcaggcaggcggaggagtttggcaatgaggagcagcagctggcgtgggccaagcgggagagcgagaaggcg

SEQ ID NO: 618912 - DNA, 80 bp, Homo sapiens
ctgtccttcaagaaaggcgagcggctccagattgtcaacaacacctgctgccttccagggtcttctgctgctgttgccgc

SEQ ID NO: 618913 - DNA, 83 bp, Homo sapiens
cgcagacatggacaccaaacatttcctgccgctcggtttcagaagcaggcaacaggaacaagatgtgaactgtttctcttctg

SEQ ID NO: 618914 - DNA, 83 bp, Homo sapiens
gaggatctggtgtaccaggcgaagctggccgagcaggctgagcgatacgacgtattgactcggagacaaaaagaggccaagac

SEQ ID NO: 618915 - DNA, 75 bp, Homo sapiens
gagagagagaagagaggagattgcagcagcgaaccaatcccaagattgggctaatggatactacagacaacagag

SEQ ID NO: 618916 - DNA, 98 bp, Homo sapiens
agcttttgtccccaaaccagaggtggcaagaagactttctttaataaaacatccagagtgctccaccatgagtggtgggaaagccatagaacatttgg

SEQ ID NO: 618917 - DNA, 50 bp, Homo sapiens
ctcgcagtgagtgttacagctcttaagctggatctaccatgaaagacttg

SEQ ID NO: 618918 - DNA, 83 bp, Homo sapiens
tgcccgctcacctgcgctgtgatgcctgcagagctgtggcttaccaggttgaagatgacagcgatgcagagacctatggagaa

SEQ ID NO: 618919 - DNA, 100 bp, Homo sapiens
gtagaaaaatacgatcctacgatagaagattcttatagaaaggtattatccaaagagatgagtcacccatggaaaaagggctctctggtctacgaggaag

SEQ ID NO: 618920 - DNA, 51 bp, Homo sapiens
cggcggcggccggagcttctctcagccgcccatgaaacccctgaaggccac

SEQ ID NO: 618921 - DNA, 98 bp, Homo sapiens
tgccgtctgctcttctgcctcttgatctccgccaccgtcttcaggccagagaattcggtcaacagtggatgaaaaagaacaaaaacaacttcttatgg

SEQ ID NO: 618922 - DNA, 101 bp, Homo sapiens
tggagttcttacaacatggcagacattgacaagaagaattttaaatcgtttctccaaagacattggacacttggatgatttgctgccgctgacgtttttag

SEQ ID NO: 618923 - DNA, 100 bp, Homo sapiens
ctcgacctcctggtcagcacttaccggctgccccagatcgcgcgcctggacaacggtaccagctggaggatgagtctgcgcatttggatgaaatgccact

SEQ ID NO: 618924 - DNA, 83 bp, Homo sapiens
ctcaaactcctggactgaaacgatcctctcatctcagcctccaaaagtgctggcattacagattaaaaggagcccaagcccca

SEQ ID NO: 618925 - DNA, 82 bp, Homo sapiens
aagaaaacagatcttctccagattggcagaaagttgatataggtggacttttttacaggttgaatctccagtgatctgtaaa

SEQ ID NO: 618926 - DNA, 50 bp, Homo sapiens
atgtactacaatctgctaaaactgtatagatctagtgaaaagccatttga

SEQ ID NO: 618927 - DNA, 100 bp, Homo sapiens
tatcctgaactcatggacctcagatctcggacaacccccattgcaatgagctttgcacagtttgaaaatctactgcttgacaaaagtaagctgaagccag

SEQ ID NO: 618928 - DNA, 75 bp, Homo sapiens
ggaaaatcgcttggttaaaacctgacacttttaacagaaaagaggcacagttagatgaagaaggacagtttcttg

SEQ ID NO: 618929 - DNA, 73 bp, Homo sapiens
gcggcagcagctccagagctttgtcaaagagaaccgagctgtggcctggggttccatggagcaggtggggcgc

SEQ ID NO: 618930 - DNA, 80 bp, Homo sapiens
gctgctccaggagcacagcggcatctttggcttcagcgtgtcccagactcaccgcactgtgttaaaccagatcctacggc

SEQ ID NO: 618931 - DNA, 97 bp, Homo sapiens
taaaatggctgaggagagagtcgcgacgggtcctgtcagaagtggacttcgaagagcgctttgctgagttgcctgagtttcggcctgaggaggtgct

SEQ ID NO: 618932 - DNA, 75 bp, Homo sapiens
accggaatgtcatccagcgagtgattagagctggtgatgctgctggagtggtggtcgggcacggaatgcaccatc

SEQ ID NO: 618933 - DNA, 90 bp, Homo sapiens
acccaatggtgggcaagtggctggagaaacaagaacaggctgcctctaagaatcaaacttcactcttgggagaaccaccaaaagaaattc

SEQ ID NO: 618934 - DNA, 75 bp, Homo sapiens
tgggggtcgagcacataacggggttcgggtgtctcgtgtgtgaacatcacagaggatgttaagcaagtttttgga

SEQ ID NO: 618935 - DNA, 100 bp, Homo sapiens
cggccgcccagacgctgcccgcgggcccggccacggcggagccaagctttgtaattaatctgggccaggggacagacaagctgaacctgcatttcaaccc

SEQ ID NO: 618936 - DNA, 82 bp, Homo sapiens
aaccctggtcaccgtctcctcagttgatcatggccttgccaggttggtgacagtatattgtgagcatggtcataaagctgcc

SEQ ID NO: 618937 - DNA, 75 bp, Homo sapiens
caagcacaaactgaccaagcacagagtcaccagtttccatatgtaatgcaaggcctgaatatgccaatatttgct

SEQ ID NO: 618938 - DNA, 82 bp, Homo sapiens
cagacggcgacagtggcggcggcgccatggcagggcttgcagggtgcttcaaggatgaccgcatcgtcttctggacttggat

SEQ ID NO: 618939 - DNA, 77 bp, Homo sapiens
gcattgaggactttccttacctgtttttccagctcacccactgccagcagagttgggcatcgatgggctgattgtta

SEQ ID NO: 618940 - DNA, 101 bp, Homo sapiens
ggaaaacatgacgtctccagccaaattcaaaaaggataaggagatcatagcagagtacgatactcaggtcaaagagcaattctgcaagagagcttcagcaa

SEQ ID NO: 618941 - DNA, 100 bp, Homo sapiens
ctgggattcggagcttcagcgggaaggagcattcgcaacgacaggcgcctcctctgccaaccggtttgtcagcatcggaccccgggacggcaactttctg

SEQ ID NO: 618942 - DNA, 100 bp, Homo sapiens
gggatggggacggtttcgtccgcatcgaggacttcatccagtttgctacggtctacggggcagagcagagctcttcagtatccccatcagccagtttccg

SEQ ID NO: 618943 - DNA, 113 bp, Homo sapiens
cggaagaccgcgcgcagggcctgcagcgggagctggacggcgagcgcgagcggcgcgagaaaatgccatggacaatattaccaggcagaaccaattctacgatacccaagtca

SEQ ID NO: 618944 - DNA, 100 bp, Homo sapiens
ttggaaaataccacaggatggagactacgagtttatctcagtggttcaatagcatccccagatgtcaaattaaatcttggtggagattttatcaaagaat

SEQ ID NO: 618945 - DNA, 90 bp, Homo sapiens
cctgtacgcgctgctaggcattgaggagaaggcagcggacaaagaggtcctaatctacccatggctacagttgatataaaaaatccagaa

SEQ ID NO: 618946 - DNA, 82 bp, Homo sapiens
cccagaccctggagcctcagttggaagcagccgatccagcctgcggagcctgtggggcagcttcctgcagatttcacaaaac

SEQ ID NO: 618947 - DNA, 50 bp, Homo sapiens
cgcggcggccgcagctgccacaaaccaggagagaaaatacaggctcagga

SEQ ID NO: 618948 - DNA, 50 bp, Homo sapiens
ggtcttccactgattcttcattgtgccttatgccagcctggaccatcttg

SEQ ID NO: 618949 - DNA, 50 bp, Homo sapiens
cctcaccatgcccttctgcttcaaacagaatagcctaacatggcagacca

SEQ ID NO: 618950 - DNA, 140 bp, Homo sapiens
ctgggctccagagtccctcgggtctcaggtcatggcggtcgcggggcccgcgcccggagctggcgccagagtattgggaaagggtcgttgtggtgcatagacccagagtatagacaaaatctaattcaggctttgaaaaa

SEQ ID NO: 618951 - DNA, 51 bp, Homo sapiens
tcgaatgggcacacctgtgtaggccccttcacagatgtagtcactacaaat

SEQ ID NO: 618952 - DNA, 92 bp, Homo sapiens
agaccgaaatccagactctttttaagaggcttcgcgcagttccaaccaacaagctcaaactggaggattataaggatcgcctgaaaagtgga

SEQ ID NO: 618953 - DNA, 83 bp, Homo sapiens
cgcagagccgagtgcagaagatctgggtgcccgtggaccacaggccctcgttgcccagatgatttggggtggaaggcaggcat

SEQ ID NO: 618954 - DNA, 83 bp, Homo sapiens
gtactgagcctgttggaggaactggcccggaaacaggaggacgtcctcagccctcgctctcgctggcggagcagcacctggag

SEQ ID NO: 618955 - DNA, 90 bp, Homo sapiens
agaagaaaacctttaccaaatggataaatgctcgattttcaaagtctatgcagatggtagtatatgtctggacatacttcagaaccgttg

SEQ ID NO: 618956 - DNA, 87 bp, Homo sapiens
tagtggtgtataaccttggactcacactgctgtctctgtatatgttctgtgagtgctgccaactgtccctattcagaaatcaatttg

SEQ ID NO: 618957 - DNA, 90 bp, Homo sapiens
tgcttatacagaatgaatattgtaatggaatctaagtcctttgctgtgggaatgttcaaaggccagctcaccacagatcaggtgttccca

SEQ ID NO: 618958 - DNA, 50 bp, Homo sapiens
cgtggcgcggcggcggggaggcgagttttcggctttgtgagaaaccttac

SEQ ID NO: 618959 - DNA, 90 bp, Homo sapiens
ctttcaattactggcatccagaaattgtgtattcaggtgtctgaaaaccttgtgcagcgagatggtgacttcctagttcgtgactctctg

SEQ ID NO: 618960 - DNA, 96 bp, Homo sapiens
agtggatacgttcagggtataaatgatctcgtcactcctttctttgtggtcttcatttgtgaatacatagggcactgtgtttagtcttgagtcaga

SEQ ID NO: 618961 - DNA, 100 bp, Homo sapiens
aacttaatacagcaagaaagaccatcaagtttaccagcaagaaactatattcagtctttgactcagatgccgaagatgaactttgcgaatgtatttattg

SEQ ID NO: 618962 - DNA, 100 bp, Homo sapiens
ggcacctgcacacctggatccaggataacggaggctgggttgcacactgggccacagaggatccagcaaggatgaagaaatggagcagcacagacttggg

SEQ ID NO: 618963 - DNA, 75 bp, Homo sapiens
accctggcaggaatcccaatttgcctccacttagtgagcggaagaatgttgtcatttacgtgctgaagcatattg

SEQ ID NO: 618964 - DNA, 51 bp, Homo sapiens
cccactgatgaggatcagcccatgaatcaaagaattccatcggacatggtg

SEQ ID NO: 618965 - DNA, 83 bp, Homo sapiens
gcgatgaagtcgagatctcaaatactggaagtgctctctggcgtggtggtcatatcgagtaaggattcagtccaacaccaggg

SEQ ID NO: 618966 - DNA, 90 bp, Homo sapiens
tctgtctctatgaatgtgactaccctggttacctcatataaagccttgagccgggccatgcttctcacatcttacctgcctcctcccttg

SEQ ID NO: 618967 - DNA, 75 bp, Homo sapiens
aactgaagcaaggaatgccttaattgaacaagaccctgatgctcccataagacagaaaatgccccttgatgatct

SEQ ID NO: 618968 - DNA, 50 bp, Homo sapiens
aagtctcgagagtggaaacaactctcaccacaagcagcgctgccctgtgc

SEQ ID NO: 618969 - DNA, 106 bp, Homo sapiens
ctccctctgcccccccttccccacgcaaccccagatccatttacactttacagcagaaatggtgcacagtgctttccaggcccagcgggctttccttctgatggcc

SEQ ID NO: 618970 - DNA, 100 bp, Homo sapiens
ccctcgcggccgtgggcagcggctgccgcgcctgtctgcccgagggaggtgtcatggagaaactccagctgggcccagagattctgcagcgggaaaatcc

SEQ ID NO: 618971 - DNA, 82 bp, Homo sapiens
ctcaacgacgaggacctgacgcagattctgagaacaataactccacaatggcgtcggcctcggagggtgaaatggagtgtgg

SEQ ID NO: 618972 - DNA, 74 bp, Homo sapiens
gcggatgtggcagccccgagccatggctctcgccgtccgagtcgtttattggccctgattcccctggctttgga

SEQ ID NO: 618973 - DNA, 90 bp, Homo sapiens
attctgtatgttcttcgccattatattcagggccgttgttcgagagagaactgcaagtatcttcaccctccgacacacttaaaaactcaa

SEQ ID NO: 618974 - DNA, 100 bp, Homo sapiens
agaggagtgcggaacccgcgggaggcctccggtgtggctgtctctgatggtgtcatcaaggtgttcaacgacatgaaggtgcgtaagtcttcaacgccag

SEQ ID NO: 618975 - DNA, 101 bp, Homo sapiens
cttagaagtgcttaaggaagagtgatgaaggatgttttcactccagaatgcaaattcaaggaatctgtgtttgaaaactactatgtgatctattcttccac

SEQ ID NO: 618976 - DNA, 101 bp, Homo sapiens
ctgttctcccactctgttccctcctcaggaagtccttttattaccaggagggcgaactttctgaccaagtatacaactacccagagggcctaggagaagtg

SEQ ID NO: 618977 - DNA, 98 bp, Homo sapiens
agaattgcagacactgcacaaccttcggaaactctttgtccaggatctgaccacccgagttaaaaaacatggcttctcgctgtttctgggatgctgac

SEQ ID NO: 618978 - DNA, 101 bp, Homo sapiens
gagaaattacgcttaaggaatgactgggaaattgtggttttgctacttgagaagatagaacatgatgacatctgcaataaaactttgaagattacagattt

SEQ ID NO: 618979 - DNA, 75 bp, Homo sapiens
ttgtttacagctctaacaaaatagacgagcttgatgcattagatgccaatgatgagttgactcctttgggacgaa

SEQ ID NO: 618980 - DNA, 90 bp, Homo sapiens
ccaaaatgcatgtgttgcagataagcacagctattcctctacacagccgactagttatgatcagagcagttactctcagcagaacaccta

SEQ ID NO: 618981 - DNA, 75 bp, Homo sapiens
ggactatttgtagtcatgtacagaacatgatcaagggtgttacactggacttccaatagtagtcagacattatca

SEQ ID NO: 618982 - DNA, 88 bp, Homo sapiens
cggagtttgagccccggaggcagagcggctgccatgacccccagaggagcccaccacctggaccgggtacttcgggaaagtgctcatg

SEQ ID NO: 618983 - DNA, 100 bp, Homo sapiens
gcagtaaaaatcattaaattggagcctgggcgtctctggccgagcctctttttgtggaaaacgacagcagcagcagtggcctggaagacgccaccgctaa

SEQ ID NO: 618984 - DNA, 98 bp, Homo sapiens
cgaggaggaaggagagaaaatggcgtccacgggtgaaatgacaatggatgctctgttggctcgattgaaacttctgaatccagatgaccttagagaag

SEQ ID NO: 618985 - DNA, 90 bp, Homo sapiens
cgctccaaggcccgcccgggagggccggggccgcgctcaggtatccagctcacatagaagacattgactacgaggaaggaaaagtactca

SEQ ID NO: 618986 - DNA, 76 bp, Homo sapiens
aaggcctgctatccctccagtatttgtatctccatacagccaagaataaagaaagaaagggatagatggaatgagt

SEQ ID NO: 618987 - DNA, 50 bp, Homo sapiens
caagtctccagatggatgacagtcctctcagggtgcgccatcattgtccg

SEQ ID NO: 618988 - DNA, 100 bp, Homo sapiens
agtatttctttggcatcactgcagctagtaatttgccttctggattaatggactgctgaattatgaagtatttcagacccagtagtagaacatcactctg

SEQ ID NO: 618989 - DNA, 75 bp, Homo sapiens
aagcggattgagccaggacacaacaccgcggagccctgcaggcggaagggaaaaggccgaggcatcagcgtgtga

SEQ ID NO: 618990 - DNA, 83 bp, Homo sapiens
ccgcctggaggagcgtcctcagggtctccccgcgcccagataagaccatcatcatgtggaaactgaccagggatgagaccaac

SEQ ID NO: 618991 - DNA, 100 bp, Homo sapiens
cgagagtggcagaggagctggcggagagcggcctgcgggcgatcgggccgaggcgtccgacctccgatcatgaacgggcccctgcacccgcggcccctgg

SEQ ID NO: 618992 - DNA, 98 bp, Homo sapiens
agcaccttcgccctctccagccaggtacctatgtctttggtggacttgggaaagaggttgctagaagcagcaagaaaaggccaagatgatgaagtgag

SEQ ID NO: 618993 - DNA, 75 bp, Homo sapiens
ctaaaaaagcagaatggaatgggccttagcattgttgcagcaaagagtcttgctgtgtcgtccaggctggagtgc

SEQ ID NO: 618994 - DNA, 106 bp, Homo sapiens
tttgatccctaaaataatgagagaaaaggccaaagagaggtgttctgaacaagttcaagggtatttgaagtataccatacaactgttttgaaaatccagcgtggac

SEQ ID NO: 618995 - DNA, 100 bp, Homo sapiens
aaagggggagatatcatgctctggaattttggcatcaaggacaaacccaccttcatcaaaggggaggaagagttcatcgattggtggagcaaattctttg

SEQ ID NO: 618996 - DNA, 100 bp, Homo sapiens
gggccccgggccccgatggccccgaccgcgtgctggagctcttcgacccacccaagcccagcagaccgggttatcccagtccgaggtccagcgaaggatt

SEQ ID NO: 618997 - DNA, 83 bp, Homo sapiens
caatgagatatgggcatacagagggacacacggaggtctgttttgatgattctgggagaccattgccctcttgaacatttacc

SEQ ID NO: 618998 - DNA, 51 bp, Homo sapiens
ctccgtttctgtatccccacgagctccagaacctgggtatcaacccagcaa

SEQ ID NO: 618999 - DNA, 120 bp, Homo sapiens
aaggtgaacagtgtggcccgccatgttcttctccgcggcgctccgggcccgggcggctggcctcaccgcccactgggccgccagatcccacccttggacccccatgaaaatggaaacaat

SEQ ID NO: 619000 - DNA, 100 bp, Homo sapiens
aacctgttcaagcaacgactagataaagatggcatccccgtgagctcagaggctgagcggcatgatacttgccagaactaatacagctgatgaaatacct

SEQ ID NO: 619001 - DNA, 83 bp, Homo sapiens
ctggtgctgacggacgaccaggatgtggagctgggatcaaaatacttgctggatggtggactcagagaccaataaaaataaac

SEQ ID NO: 619002 - DNA, 101 bp, Homo sapiens
ctgtatcgagatgatgtcttgataaagcccagtcgagttgttgccattttggcagcagcttgtttgctgcagttgaaccctcacacggacgcctggaagag

SEQ ID NO: 619003 - DNA, 82 bp, Homo sapiens
ctgcgcagaggcggcagcaccaccggggttgactccgggggcgcggcgaggagacaatgcagatcttcgtgaagactctgac

SEQ ID NO: 619004 - DNA, 114 bp, Homo sapiens
gccagccgcaccatgccgctcctaagcctgcacagccgcggcggcagcagcagtgagagcccgcggcgccatggctcacgtcggctcccgcaagcgctcgaggagtcgcagccg

SEQ ID NO: 619005 - DNA, 100 bp, Homo sapiens
gggatccagtacgagttgaatcattgttcaaataaggttgcacactgggccacagaggatccagcaaggatgaagaaatggagcagcacagacttggggg

SEQ ID NO: 619006 - DNA, 100 bp, Homo sapiens
aaggacatccgaggtgctgtggaggccgctcaccaggctttccctgggtcttattagtaggtaagaaacagctgctcctccacctccaccccagccccat

SEQ ID NO: 619007 - DNA, 82 bp, Homo sapiens
ggaccagcgacccaagcgccgcggttaaccacgtctcgtccacgacctccctagccctgaccctctattctgcaccctgtga

SEQ ID NO: 619008 - DNA, 90 bp, Homo sapiens
cacaaatgtttttctgttttgcctgaatacatgatttaaacaagagatttccacagaagggtgtcaaattgagaaccaggtagatcccca

SEQ ID NO: 619009 - DNA, 95 bp, Homo sapiens
aaatagaaaagcggtttcagatcagttgaagaaacatggatttaaattgggtcctgcaccaaaaaactcagatatcagtgatcttattagctttt

SEQ ID NO: 619010 - DNA, 75 bp, Homo sapiens
ggactcaccaatctggttcggctctcattatcaaattatagtgatttgaagaaagagtctgctgtgaacctaaat

SEQ ID NO: 619011 - DNA, 75 bp, Homo sapiens
gccggtgctgcagaaccagatccgggagcacgtcatcgccatcgaaggtgatggcatcagctgagaagggaagga

SEQ ID NO: 619012 - DNA, 100 bp, Homo sapiens
caaaaaactggccctttctgccaagaaggttttgcggctagttggctattcaagaaacctcgcccctctgaatgtcatactgtaatctttaaggaagaaa

SEQ ID NO: 619013 - DNA, 83 bp, Homo sapiens
gactgttccaaaaacagtggataattttgtggccttagctacaggagaggagtctactcttcatcttgtgttgagacttcgtg

SEQ ID NO: 619014 - DNA, 111 bp, Homo sapiens
gggggtccgctgcccgagaatgggaattctcttcactagaatatggagactgttcaatcaccaggctgcagaaccttggcctgaaaatgctacattatatcagcaattgaa

SEQ ID NO: 619015 - DNA, 75 bp, Homo sapiens
agcaggctaccaaggacagagtcagtgatttccataaattgaagcaaaacaggggcaagtgtccgagtggtgaat

SEQ ID NO: 619016 - DNA, 75 bp, Homo sapiens
gctactctctctttctggcctggaggctatccagcgtctgcagcccagagggcaccttctgcaaacatgtctgtg

SEQ ID NO: 619017 - DNA, 82 bp, Homo sapiens
taacaacctggatcttcgaacttttgacacggctttggaaacgacgtcatgtgttaggaggagcaatctcagaactgttatg

SEQ ID NO: 619018 - DNA, 83 bp, Homo sapiens
cctcatctccactcagcgggcccagatcctgaccaagatgaagcagcagggtcatgagacagccgcctgtccggagactgaag

SEQ ID NO: 619019 - DNA, 82 bp, Homo sapiens
gccggcggcagagaggatatcttgggcgggggatgtgagcgctgagcccttggcagctcttttgaaacagatggtcaccatg

SEQ ID NO: 619020 - DNA, 124 bp, Homo sapiens
gtcagaatctggctcggaggaatctcagtagggacaacaggcaggagaattatgggagcgcatttccccagggtgctggagaatctggtaaaagcaccattgtgaagcagatgaggatcctgca

SEQ ID NO: 619021 - DNA, 51 bp, Homo sapiens
atcgacatcagtgaagaagatcaggtgcagtacagaaggtttctaaaaaat

SEQ ID NO: 619022 - DNA, 83 bp, Homo sapiens
catgcggctgtgtctgccgacgcacaaggtgtcttccaggcaccagagaaggaggaattcctggcctggcagcatgatctgga

SEQ ID NO: 619023 - DNA, 51 bp, Homo sapiens
caagcagcagtgaggacaccaaagttgttgacctcctgtactggagagaca

SEQ ID NO: 619024 - DNA, 83 bp, Homo sapiens
gaaccgctccttggaaggtcgctgggaggtggcattcaaaggataaagataaagtttctctaaccaagaccccaaaactggag

SEQ ID NO: 619025 - DNA, 83 bp, Homo sapiens
cgccagcctcatcgaggacattgacatgttctaagaacggaagcatctgggctggatggaatttagcatcaagcagagtcccc

SEQ ID NO: 619026 - DNA, 80 bp, Homo sapiens
ccctggaagcggatcgaagtgatggccctgcccaaaccgggcggggcccacagcctagctccagccctggtcttgtcttt

SEQ ID NO: 619027 - DNA, 75 bp, Homo sapiens
ggtcctttatatagaagggagagtagttcctggcacagagtgaggagaagccacatgtggttgctcacttccatg

SEQ ID NO: 619028 - DNA, 100 bp, Homo sapiens
ttgaagctcaagcagagcttacagtgcaagcagtccagagcgtgagtccattcacatcctgagtgttgatgagaagaacaagttgggagccaagattatc

SEQ ID NO: 619029 - DNA, 90 bp, Homo sapiens
aagcagcagagtttctacaaatgctagaagctatcaaagcccttgaagtcagtctttcccagggaactccgatgaagtgttccaacaaaa

SEQ ID NO: 619030 - DNA, 90 bp, Homo sapiens
cgtccgccgattcctcctccttggtcgccgcgtccttggctggcgtatcctcctggccaacttcttggcccagacagaggccctgatgag

SEQ ID NO: 619031 - DNA, 75 bp, Homo sapiens
ggagtgatgggaagatgttcaatgcactcattcaccgataccggggatgttcgtctaaccccagaagactttgct

SEQ ID NO: 619032 - DNA, 88 bp, Homo sapiens
ggccctggctgggggaaccactatgatcatcataccctaatgatcccagcaagataatgtcctgtcttctaagatgtgcatcaagcct

SEQ ID NO: 619033 - DNA, 100 bp, Homo sapiens
caaggtgtcccttggcggcgcgagcaggaagatgagctttgatccaaaccttctccacaacaatggacataatgggtaccctaatggtacttcagcagca

SEQ ID NO: 619034 - DNA, 100 bp, Homo sapiens
aaggaggtccagattccaagctgaagaagagcaaaaggcggagctgtagccactgtagcagcaaggtgaattttaccgggaaggccgagatgggaggacc

SEQ ID NO: 619035 - DNA, 90 bp, Homo sapiens
agcttctgtatgggaaccatgtagtggtcttcgtgtgcccagggaccctgcagaaggtgctggagcccacctcgacacacgagtcagagc

SEQ ID NO: 619036 - DNA, 90 bp, Homo sapiens
agattttgatgtggatgatgccaaagttttattagtatcaccttttgccatgatagcatttctttcattggacagttccttacaagggct

SEQ ID NO: 619037 - DNA, 98 bp, Homo sapiens
gtgcagacatattccttgagagcatttgagaaaccccctcaggtacagacccaggctcttcgagactttgagaagtgacagtgatgaaaagcctctca

SEQ ID NO: 619038 - DNA, 83 bp, Homo sapiens
ccaaccagctccgcgagctgcccgaggtcctcgaggccacacgggttaatcgaagaaagagcgcactggctttgcgctgggaa

SEQ ID NO: 619039 - DNA, 101 bp, Homo sapiens
atggcggacgggaaggcgggagacgagaagcctgaaaagtcgcagcgagctggagccgccggagatatgttgatgatgtgatcagccgcattgacaggatg

SEQ ID NO: 619040 - DNA, 90 bp, Homo sapiens
gatttctgcatttccatctgaggggcccttccgagatatcaccgaagtattagaacaacgctacaggcctttggagccaacgttgcgggt

SEQ ID NO: 619041 - DNA, 75 bp, Homo sapiens
ggaaattgtcccgaatccctgcagaaatatggctacacacacctttctgcaggagagctgcttcgtgatgaaagg

SEQ ID NO: 619042 - DNA, 100 bp, Homo sapiens
gcgtacgcgatgatggatgagccgtggtgggaagggcgcgtcgcctcggacgtccactgcaccctgcgcgagaaggtttgggccccatggtatccctgtg

SEQ ID NO: 619043 - DNA, 73 bp, Homo sapiens
tttaatgcagattctggctattccatccattctgattcagaaagtcaggatcaaaaccattcaagtgcaagat

SEQ ID NO: 619044 - DNA, 100 bp, Homo sapiens
ccggctacaaggctgtgacacacaagcaccacaccggctgggcaaggatggcaaagactgggctgcccgagaaggtgctggctgctgtctacaaggctct

SEQ ID NO: 619045 - DNA, 75 bp, Homo sapiens
aaattggtcaactatcctggttttaatatatctactcccagaggaattccagacatagttggttgccactttagg

SEQ ID NO: 619046 - DNA, 90 bp, Homo sapiens
ctcaaaacgcccgtgcggaccacggcctgtcagcacgtgaacaagcacatcatgattgacttggggactggcaacaacaacaagattaac

SEQ ID NO: 619047 - DNA, 75 bp, Homo sapiens
gaaggcgcgagtgaggaaaggaggtactgtaggatccattccaaggagcacttcaaggagaagtatgccgtggac

SEQ ID NO: 619048 - DNA, 50 bp, Homo sapiens
cttggagttaatggtctaatttatgatagtgaaaagaagagattggacct

SEQ ID NO: 619049 - DNA, 100 bp, Homo sapiens
agactgcctcgatgccatccagcaagacttcgtgatttttaacagagaaaagtccggcctctttggcctacccccgttggctccgctgccccaggtcgat

SEQ ID NO: 619050 - DNA, 80 bp, Homo sapiens
agaaaccgctgaggcttatttgggaaagaagcttcctgcctgacacagctcacttcaagaagtgcacaatgtcagaacgt

SEQ ID NO: 619051 - DNA, 100 bp, Homo sapiens
acgaggggctccgggtcttccagagcgtgaagatcaagatcggggttcggtccgagcccggtgggaggctcccggagcgcagcctgggcccagcccaccc

SEQ ID NO: 619052 - DNA, 83 bp, Homo sapiens
cgacttcttgtatgcatactccacagcacctggtattatagctgcaaatgtccttgtattctgtttatggagagtaccttctc

SEQ ID NO: 619053 - DNA, 83 bp, Homo sapiens
ctcaactttctgggcgttcatgatcctggccagcctgctcatcgcctactgcaatcggatcaacatcaagaggaagggagcgt

SEQ ID NO: 619054 - DNA, 80 bp, Homo sapiens
tattagttgcgttgagtcatcaggcaaaaaactagacacaatgtgcgacgaagacgagaccaccgccctcgtgtgcgaca

SEQ ID NO: 619055 - DNA, 100 bp, Homo sapiens
caaagtggtacctacactcccagagggtctacctgtacttcttgaaaaacgtatcgaagaccttcgtgtactccctagatctttagcttctactcccact

SEQ ID NO: 619056 - DNA, 82 bp, Homo sapiens
ggataagagatgaagagacaggccaggtcaggctcaccaagcagcaagagtgagccatggagctacgtgtggggaacaagta

SEQ ID NO: 619057 - DNA, 80 bp, Homo sapiens
agaagagatatgtttgagatcctcacgagatacgcgtttcccctggctcacagtctgttgacgaaggatcagagattggt

SEQ ID NO: 619058 - DNA, 100 bp, Homo sapiens
gaggagcgggcacagggcaaggcggcggacggctgcgtcgcccgaggcgaggaggagcgctggcgggaaacttcgtggcttgcatgacagctattttacg

SEQ ID NO: 619059 - DNA, 100 bp, Homo sapiens
tggagagaatctgcctcctttaacttatgaccaggaagatgagaatgtgcctactgctcctgatcctccaagtcaacatttacgtgggcatgggacaggc

SEQ ID NO: 619060 - DNA, 75 bp, Homo sapiens
tcccatcattgatgtggtgcgatcgctacaggaccgcactcagttcagtgaccgagacttagccacccttaagaa

SEQ ID NO: 619061 - DNA, 82 bp, Homo sapiens
attgtagctgacgaagcattttgcaacgcagttcggagttattatgagcaggaacgaatgcaggaatttgggaactgagctg

SEQ ID NO: 619062 - DNA, 87 bp, Homo sapiens
cagcagttccagtccgttgctttactttttgcttcaccgacatagtcattatgccgaagagaaagattttcttcatctcaactcacc

SEQ ID NO: 619063 - DNA, 100 bp, Homo sapiens
cccgggtcctgggcagcgaaggggaagaggaggatgaagcccttagccctgctaaaggccagagccccagtttgagggacagcgggatatccaccatgct

SEQ ID NO: 619064 - DNA, 75 bp, Homo sapiens
cctgaggagccattttgagcaatggggaacgctcacggactgtgtgggatccccagcagcaagacgggcctttgt

SEQ ID NO: 619065 - DNA, 75 bp, Homo sapiens
agagtcaccacaaggccaaggaagtttgcctgcaatggtactgtaattgagcatccggaatatggagaagtaatt

SEQ ID NO: 619066 - DNA, 77 bp, Homo sapiens
ccgccagtcaataggaagtacgagtaatttggaggttttggttcagttagtggaaaaattgaaatagaaatcaagat

SEQ ID NO: 619067 - DNA, 51 bp, Homo sapiens
cccgagtgtgcgaagctagccaaggatcatccagcagctcgtcaacggcat

SEQ ID NO: 619068 - DNA, 100 bp, Homo sapiens
gcagaaggcatgggaccacttcacaaaagcccagcggaagaacatcagcgtgtggtgcaaacaagctgaggatgtctccccgttcaatgttgtggcctgg

SEQ ID NO: 619069 - DNA, 100 bp, Homo sapiens
agactttcagctacttgaagatagccatcagccgctacgtgactcttttctccagccaaatttgtatcctactgtggggcttcaaacaccaggagaagtg

SEQ ID NO: 619070 - DNA, 74 bp, Homo sapiens
cggaacctgcgcggctactacaaccagagcgaggccggactcgaagtgtcgtttcggggccgctgtctacgggg

SEQ ID NO: 619071 - DNA, 82 bp, Homo sapiens
cctatccagacggctgcccttcaagtaccagaggcagtggagaaggtgacacagcacatccacggcctgtctgggaagaagg

SEQ ID NO: 619072 - DNA, 100 bp, Homo sapiens
cacggcccgcgagcgcgccaagctgcagatcgagctgggcaagtgcaaggcggaacacgaccagctgctcctcaagctggtgcagtggtgtcatcttggc

SEQ ID NO: 619073 - DNA, 100 bp, Homo sapiens
ctcccagtcaacagccggctgagcagcgtccagattcctgtgaaagtttgagtgttcaagagtcaatgcatgtgttgatgtggtgctctcaggggtgaag

SEQ ID NO: 619074 - DNA, 82 bp, Homo sapiens
ttttgatgagaatgagcttgagaaccaaaaacttttgctagaaaatcagcttttacgagagaaaactcatggccttgtagtt

SEQ ID NO: 619075 - DNA, 100 bp, Homo sapiens
gcgcgcgcccgccccgctctgggaggaccgcgagtgccactttctgcgactcccagcttcgtcttctgttcaccatgctggaaaagtctccacttcccat

SEQ ID NO: 619076 - DNA, 82 bp, Homo sapiens
gctcacctggcggtgcccgaggagtagtcgctggagtccgcgcctccctgggtcatcatcagatttgaaatatttaaagtgg

SEQ ID NO: 619077 - DNA, 100 bp, Homo sapiens
gcgaaaagggacattatgcttatgattgtcatcgttacagccggcgaagaagaagcaggtgccagatagattggaaaaaaggaaagaatgtcactttgaa

SEQ ID NO: 619078 - DNA, 51 bp, Homo sapiens
ttgccgatttcatgactaaccagtacacacgatagtaaggagcatttagca

SEQ ID NO: 619079 - DNA, 75 bp, Homo sapiens
gcctcctgtacagcctgtggaactctgatacagaaggcaataataaaacagtgctaaaatataaatgccatacaa

SEQ ID NO: 619080 - DNA, 100 bp, Homo sapiens
cagcagtggttctagcgtcctatgccgtacaatacttaattcagtgcacaaatgagatgaatgtgaacatcccacagttggcagacagtttatttgaaag

SEQ ID NO: 619081 - DNA, 76 bp, Homo sapiens
ggaccccccgattcaccaacgagccctagccctgggaggagcggggacactgaggacctctctccaaattggcctc

SEQ ID NO: 619082 - DNA, 75 bp, Homo sapiens
taggcaggtggctcccaaattaccggaaaggactgttcttgaggtattcaggtttttggattcaaagcataaaaa

SEQ ID NO: 619083 - DNA, 75 bp, Homo sapiens
gacagcttccacagcttccaccaaagggaacgttggatagaaggattgcttggcattttgtacagaaccagtttt

SEQ ID NO: 619084 - DNA, 74 bp, Homo sapiens
tcaggacagctgttccttggccatcccaaagctattctgggggcaacagaggacttctgtaacgataagagtta

SEQ ID NO: 619085 - DNA, 114 bp, Homo sapiens
ctcctgagcatcagtgagcgcccggagccgtggccgctgggggttgcggcggcgctgagccagcggggccggttccagagagattcctggaagttgctcagatcacattacggg

SEQ ID NO: 619086 - DNA, 100 bp, Homo sapiens
gcgagccgtgcgatctggacgcggcgctgctgaccgacatcgaaggtcccgagcagccccgcccaacatggacccagacccccaggcgggcgtgcaggtg

SEQ ID NO: 619087 - DNA, 75 bp, Homo sapiens
agacattgattttgttgaagatgactcggacattttacatgggagccaagagaaaggctgtatcaggataccagt

SEQ ID NO: 619088 - DNA, 100 bp, Homo sapiens
ccgagctggacccggaccggttttgggaaccgcagattggaggagaaggaatgaggggagctgggctctcatgtgaacagttgaaacagctgcagcgatt

SEQ ID NO: 619089 - DNA, 50 bp, Homo sapiens
catttctcctattgaggagtcaacttcgtaatggacctgaaagtggcagc

SEQ ID NO: 619090 - DNA, 100 bp, Homo sapiens
caagctgattaccctcatagtgtccatcattgaggaagacaagaattcctacactccctgcctcaaccattgtatcacggactgattcaccgagcccaac

SEQ ID NO: 619091 - DNA, 75 bp, Homo sapiens
ttgacatttaattttagggtcctttatatagaagggagagtagtccttatccagcagccctcaagcccagccccc

SEQ ID NO: 619092 - DNA, 75 bp, Homo sapiens
ccgcctgccggcctgcctgccacagccggactccgccactccgttctcctgtgcctcctgttggctctctttgca

SEQ ID NO: 619093 - DNA, 90 bp, Homo sapiens
gcggcttatcgaacagagccgggagttcaagaagaacactccagagtgcctccggagccagcgtggtggccatagacaacaagatcgaac

SEQ ID NO: 619094 - DNA, 98 bp, Homo sapiens
tggagcccattttagaggcatctgttctatcttcccatcataaaaaaggtacggcagctggagagaactggccaaggctctggccagcaggaacattc

SEQ ID NO: 619095 - DNA, 74 bp, Homo sapiens
ggttctctcctgcccccaagctggcatcctgaggttagcattacacttctcccagtggagcccatgacttctga

SEQ ID NO: 619096 - DNA, 100 bp, Homo sapiens
gtccggtgccatctgaagcccccttcccagctgctgtgacttactcgaagcctcgattggccacattttggtactacgccaaggttgagctggttcctcc

SEQ ID NO: 619097 - DNA, 95 bp, Homo sapiens
gccttcgactggctgcttggggagattgagtccaagttcaaccaagccattatgcgtctgttactagagtggagagtctaccttcgtctcacatg

SEQ ID NO: 619098 - DNA, 100 bp, Homo sapiens
tagggccaagtcaattctggacagctgggtatggggcaagcaaccaggaaacggtggacatgctcaagagtcacattaaagaggaactgatgcacgggga

SEQ ID NO: 619099 - DNA, 100 bp, Homo sapiens
acatccaggttttggcccgaaggaaatcaagggaaatccagtccaagttgaagagggtacaccacccggactacaacaatgagttgacccagtttctgcc

SEQ ID NO: 619100 - DNA, 100 bp, Homo sapiens
ctggcccagtgagagccttggatgtgaacattttccagaatgtggagagtaaaggaatgagggaccagcgattagatcttcagagaagagcagcagaaac

SEQ ID NO: 619101 - DNA, 101 bp, Homo sapiens
agctagacctggtgcttggagaagagacatctttggaagaatcatctgggatttaaggacaatgtctatcgacagagaagaaagtattttgtggatgtggc

SEQ ID NO: 619102 - DNA, 75 bp, Homo sapiens
agtggccccagccgggccagaagcaggtagacgttacatccaagaggaaataatccaggcaaggaagcacaagct

SEQ ID NO: 619103 - DNA, 100 bp, Homo sapiens
ggctccctcctcggtggtcgcggcgacctccggcggcgggaggcccggcctgggcaggatggcaatgattcagatgaattcatgtaaaaggagaaaagga

SEQ ID NO: 619104 - DNA, 83 bp, Homo sapiens
gagaaggtctacagagcggcctgcgccagcgagtgagaagccctaccactgcaactgggacggctgcggctggaagtttgcgc

SEQ ID NO: 619105 - DNA, 100 bp, Homo sapiens
tgaagatggagatgatggggatgatacagccagcgaatcttatttgcctggaggcgaccatggccttgctgggtaagcgctgtgacgtccccaccaacgg

SEQ ID NO: 619106 - DNA, 106 bp, Homo sapiens
ttcaccgcgggcgccaatggggagcagaaggactcggacacaggtttacccaaggtccagcctagcccctaggcaccatgtcggacagtgatctaggtgaggacga

SEQ ID NO: 619107 - DNA, 101 bp, Homo sapiens
gcatcatggcaaagtgagactgttgtcttgccacctggttcagcttggccagatcgagcggagaaatggtgattatcctgaaccatccaggccaaataagc

SEQ ID NO: 619108 - DNA, 100 bp, Homo sapiens
cgtcgctgaggggcttgcctgaagcgagggcagacggttgatgatgaagcgccggccgtgtaaatgaagatcgggtgaggagcaggacgatgcccaaggg

SEQ ID NO: 619109 - DNA, 75 bp, Homo sapiens
gaacaacgtcgtcatcaactataagaattatatccagatcgagagacagaagattctgaaagggttcaatgaaat

SEQ ID NO: 619110 - DNA, 98 bp, Homo sapiens
gctggctgctgctggccgaagcgaagggcgacgccaagccggaggcctgtcccaagccagatgatttaccattttccacagtggtcccgttaaaaaca

SEQ ID NO: 619111 - DNA, 74 bp, Homo sapiens
ggaattccagcaccgcagcaaccactccagaaactttccctccttcaggaacgtcaaggtcgtgggaaataaaa

SEQ ID NO: 619112 - DNA, 100 bp, Homo sapiens
aggaagaagaatttggacttgatgaagaagatgaagatgaggatgaggatgaagaggatggagatgaagatgaggaagctgagtcagctacgggcaagcg

SEQ ID NO: 619113 - DNA, 90 bp, Homo sapiens
tcgaagtgacctcagcagggcatccaggggcaagattcttgccaagagaattaatgtgcgtattgagcacattaagcactctaagagccg

SEQ ID NO: 619114 - DNA, 100 bp, Homo sapiens
gttccccttttactgccaggacactgagatttggagagcatctacttgtttccaaagttatttgggtcagcattttcctccacccaccacttaaaactga

SEQ ID NO: 619115 - DNA, 75 bp, Homo sapiens
ggagagcagctgcattgcaggcacagggcccgatgagccagagaagcttggtatgtctccctgcaacacagctgt

SEQ ID NO: 619116 - DNA, 82 bp, Homo sapiens
gggaatggagctcggaggcggcgaggagcgcctgcctgaggagagcagagaagatggcgaattagaagatggtgaaatagac

SEQ ID NO: 619117 - DNA, 82 bp, Homo sapiens
cgcctcggccgaacccctccgcagcaggtacggacattgctgcaggagaagaggttgccatcaagcttgaatgtgtcaaaac

SEQ ID NO: 619118 - DNA, 97 bp, Homo sapiens
cgtggactccccatcatccaagacgtcatgctagccgaggcccaggtgtgggcccatcgctggatggatctgtcagaacacggctttgggctggccc

SEQ ID NO: 619119 - DNA, 84 bp, Homo sapiens
agctaaagcagcgtgcgttcagccctgggagttgcatgctgagaatttgaaaaatgaagatgatgtagacactggactattagg

SEQ ID NO: 619120 - DNA, 75 bp, Homo sapiens
tgaagcaagtgcagatagatggccttgttcagcagactgtacaggatctttttggcagagccccaagtaaagctg

SEQ ID NO: 619121 - DNA, 75 bp, Homo sapiens
tgagcacatgaccagcttagcttctgtcctaaaggtgttcagtggaatcacacttacaaaatttggagggattgt

SEQ ID NO: 619122 - DNA, 100 bp, Homo sapiens
gtcccgcctccctgggagctccgcacggtggccaatccgccatggtatagttgaagattgggacttaatggaaaggtttatggagcaagtgatctttaaa

SEQ ID NO: 619123 - DNA, 83 bp, Homo sapiens
cggcgtcacctccttctgccccaccctggtcacttccccaccggaggtttatcacaagatcctctccggcccctggagttcct

SEQ ID NO: 619124 - DNA, 98 bp, Homo sapiens
acacctcctaggactatgcaggaatcaccactgggcctgcaggtgaaagaggagtcagaggttacagaggactcagtctgcgggccaggcatcgacat

SEQ ID NO: 619125 - DNA, 98 bp, Homo sapiens
tcccagcggggcagcgagttgccgtgctgtgccagacgtagaggaatttcgctaaggagtttgtgatcagtgatcggaaggagctggaggaagatttc

SEQ ID NO: 619126 - DNA, 97 bp, Homo sapiens
gccagatgaccttcgagaacgagagagagatccaaatccacgttgccaaccacatgattgacgacaggatctgctcgccacccttcatggagctcac

SEQ ID NO: 619127 - DNA, 100 bp, Homo sapiens
tatttgagagtccaactggcactgttgcactgctgtgatccatcctcatctcctaaagatgcatcctgacttatctccacacttgcacactgaagaatgc

SEQ ID NO: 619128 - DNA, 90 bp, Homo sapiens
cggctgcaggcaccatggaccgagcccccacggagcaggacaaggctcatcccaggaggatccatgatgctttatgaagacagtcccaac

SEQ ID NO: 619129 - DNA, 80 bp, Homo sapiens
ccagaatcagttgttggagaaaattaaaggcataagatgcacatttttctgctctggagccgggaatgaaatattcttga

SEQ ID NO: 619130 - DNA, 97 bp, Homo sapiens
accgagagcgtgaccgagagcgcgaatatcgtcatcgttagaagtccaaaagaaactcttccttcaaaacctgtgaagaaagagaaggaacagagga

SEQ ID NO: 619131 - DNA, 100 bp, Homo sapiens
gtttgcacccgcggtgatgcgtgcttttcgcaagaacaagactctcggctatggagtccccatgttggctctggcgttacgacgtattctgtacaccctg

SEQ ID NO: 619132 - DNA, 100 bp, Homo sapiens
cagctcagcagccgccgccagagcaggacgaaccgccaatcgcaaggcacctctgagaacttcagggtttccaggcctgaggtgcccgccctggccccag

SEQ ID NO: 619133 - DNA, 75 bp, Homo sapiens
gaagggctggtgggcgatgggcccgtggacatgcgcacctcacacagataccacttgaaagatgtcattgtaggg

SEQ ID NO: 619134 - DNA, 122 bp, Homo sapiens
atgtactccagttgctggatatccaagcctctcagcttcggagaatggagtcttccatcaatcatatctcacagaattgagcggctggccaaggatattatgaaagacataggatatagtga

SEQ ID NO: 619135 - DNA, 98 bp, Homo sapiens
ccgtctggagcaaagacaggagccctggaatgtgaagagacatgagaccatagccaaacccccaggaagcgagtcacgtcccagcgctgctccctgga

SEQ ID NO: 619136 - DNA, 48 bp, Homo sapiens
gtggccgagtcctccctgatgatgacagtcgtctagaggagctcaaag

SEQ ID NO: 619137 - DNA, 82 bp, Homo sapiens
ggctgtagccaagaactattcggttctctacttccaacagaagtactatactggcaattgctggagaagattttgcaattgt

SEQ ID NO: 619138 - DNA, 78 bp, Homo sapiens
aagcaagatctcagtcagagtaggaaataattttcacaaccttcaagaaattcggggtgaagcagaaagagactgtga

SEQ ID NO: 619139 - DNA, 96 bp, Homo sapiens
gcctgtcaccaacgggaagggccggcccgcctccctggccggggcgcagttcggaggttcagacgcaaacatgcagatctttgtgaagaccctcac

SEQ ID NO: 619140 - DNA, 108 bp, Homo sapiens
gatgaaatgaacattcgcctgtggaaagctaatgcttctgaaaaattgggtgtgatgagcccattattgaagagccaagccgcctccaggagtcagtgatggaggcca

SEQ ID NO: 619141 - DNA, 88 bp, Homo sapiens
tcccacgtctacaatggagtcgagtctagaattcacacagagccacctaggctttatcctgtggataaacgcagagtgaacgagtttg

SEQ ID NO: 619142 - DNA, 98 bp, Homo sapiens
gtgccgccctggggttgagggccctcgatgtgatacctgccgctctggtttctactcattccctatttgccaagatttgataatgggctgcattaaaa

SEQ ID NO: 619143 - DNA, 100 bp, Homo sapiens
tgcccagaggtccctcagcaaagatggtacaaaagagtctttggaggatgcggctttgatgggaagatgagaatgtgcctactgctcctgatcctccaag

SEQ ID NO: 619144 - DNA, 82 bp, Homo sapiens
gatggtccagaattcacttttactaccccaaagtttggaaggcactgatcctgaaactgaagaccccaaccacctccctcca

SEQ ID NO: 619145 - DNA, 95 bp, Homo sapiens
tatgatcaagttctcgtggagtcagacaatgagatttgataatgggctgcattaaaagtaaagaaaacaaaagtccagccattaaatacagacct

SEQ ID NO: 619146 - DNA, 119 bp, Homo sapiens
tgtcaggatatctttggtaggcatcatgttctgtttacttgaaccagtgagaagatggccgagcaagcaaggataagtccttggaatggatggctttggccaaccagttggcattcttg

SEQ ID NO: 619147 - DNA, 90 bp, Homo sapiens
ggcagtgaagcgaagaaaaggatcccagaaagtttcagacgttggaacttgccaggaatccagcaatgatgcaggagatgatgaggaacc

SEQ ID NO: 619148 - DNA, 100 bp, Homo sapiens
ggccttggccgaccctgagaacaggtatgattatcgggaaatgctgcacaatgccactttctgtctggttcctcgtggtcgcaggcttgggtccttcaga

SEQ ID NO: 619149 - DNA, 95 bp, Homo sapiens
ggaactgttctgccggaatttgaaaagtgcctgcagcacacttctgcttttgttccttcatcaggacgaatttactcttttgggcttggtggtaa

SEQ ID NO: 619150 - DNA, 75 bp, Homo sapiens
gcggcgctctgagctggtcttctggcggtggatgatcgtgcagaatggacgtctcatcgtttccacagaatgcgg

SEQ ID NO: 619151 - DNA, 97 bp, Homo sapiens
gcagatcagcgcaaggcaaagttgggtgactcccacgacctgcagcgcttccttagcgatttccggcttattcaaacctccttagagctaacatgga

SEQ ID NO: 619152 - DNA, 75 bp, Homo sapiens
gcgaggcctttcaccaagtccatggttcgagaacttgtcttggacaattgcaaatcaaatgatggaaaaattgag

SEQ ID NO: 619153 - DNA, 75 bp, Homo sapiens
aaaaaggctgtctctagacagcagtcttgtggtgcctggaaggggtccagatgggaatgcacacaacctccgctt

SEQ ID NO: 619154 - DNA, 51 bp, Homo sapiens
gctgtatactccacaggaaatgaaacagatctgccttctggagactgcgcc

SEQ ID NO: 619155 - DNA, 90 bp, Homo sapiens
ctgagtactcaacatattgactgtatttgggctgcagcacagaaattccgggtagatatgcctggctcaggcagtgcattcatccccacc

SEQ ID NO: 619156 - DNA, 73 bp, Homo sapiens
tgtgccaccagaacccaagaagattccgataagaaacacgaaggacagaataacgggctcccagattcacaag

SEQ ID NO: 619157 - DNA, 82 bp, Homo sapiens
agaagatcatcattaaggacggaggcacgaagaccagtatggtgctgtgaaatgttgcaaaacatgacctgatgacaaccca

SEQ ID NO: 619158 - DNA, 100 bp, Homo sapiens
gggagtggggagtggagagagggagcccagagttacagacggcggcgagagaattatatccagatcgagagacagaagattctgaaagggttcaatgaaa

SEQ ID NO: 619159 - DNA, 100 bp, Homo sapiens
agaatctggcaatgggggcaggagctgttggagctttgcagctgacctacatctcgaaggattactcttgctgctgtcttgctgtactgtatgccactgg

SEQ ID NO: 619160 - DNA, 88 bp, Homo sapiens
ttggtcccagagtcatcatgaaggcacccaggcatgtggaatatgctcatagtggcgatgtgcttggcccttctgggctgcctgcaag

SEQ ID NO: 619161 - DNA, 75 bp, Homo sapiens
catttccacggaccctccgactcctaggaggcagctgcatccagtggaactaaagccgttccaggattatcaaaa

SEQ ID NO: 619162 - DNA, 98 bp, Homo sapiens
gtcggaggagaagctgcaggagaaagcatacacgtcgtgacttggaacgtggcttcggcagcgccccctctagatctcagtgacctgcttcagctgaa

SEQ ID NO: 619163 - DNA, 74 bp, Homo sapiens
gtaaaaccgaggtccatatcagcaaagctgtggggatgccttcccctgtttctccaaagctgtcaccaggcaat

SEQ ID NO: 619164 - DNA, 113 bp, Homo sapiens
ggcccttgttcccccaaatgtctgactctgactctcggactgagaaacgcaagcaaccatgtccaagggacctgcagttggtattgatcttggcaccacctactcttgtgtgg

SEQ ID NO: 619165 - DNA, 90 bp, Homo sapiens
ggaagaggttaccagaaaatgcctgggggttatgtcccggaaataggaaaggaaacagattcattgtctgtctgaggatgagttaagttc

SEQ ID NO: 619166 - DNA, 100 bp, Homo sapiens
ggaaaaagtcggacgccaaggagcgcgcctggcacctgtgtttgctctgtttgtaccattttactgctccataccaagagtccaagtggcacaaattctg

SEQ ID NO: 619167 - DNA, 100 bp, Homo sapiens
taagcaagttaaagaaggaggacctgcttttgaagctggattatgtacaggttacgccaaggaggccctgaatctggcgcagatgcaggagcagacgctg

SEQ ID NO: 619168 - DNA, 75 bp, Homo sapiens
gcctcggaggatgcagcctttggactcaaggttgaagatgacagcgatgcagagacctatggagaagagaatgat

SEQ ID NO: 619169 - DNA, 90 bp, Homo sapiens
cgagaagtgtgccatcggagttacccacttccagctggccataggaaaaggatacagagtagagtttcatgaacctgaaacttggtggaa

SEQ ID NO: 619170 - DNA, 90 bp, Homo sapiens
gaggttgagccgggcacagaaacacagcagcgggagcagcaacaccagcactgccaacagattgcattctcacaacacaatacaatcatg

SEQ ID NO: 619171 - DNA, 100 bp, Homo sapiens
gtcctcccggcaggacaatacggaggagctgtggctcctccattcaaacatcgacgccatcgacaagcgaaggacagaataacgggctcccagattcaca

SEQ ID NO: 619172 - DNA, 90 bp, Homo sapiens
ctgagcccggcgagcaggagaggaggtcttccgggccgcggcctccgagcgcgcgggatttgcaggtaatagcctgcagctggtgttttg

SEQ ID NO: 619173 - DNA, 89 bp, Homo sapiens
tcgcagtctggaaagctttaggagttcacagtgaattgaatgatctggcacgggaccctccagcacagtgttcagcaggtcctgttgga

SEQ ID NO: 619174 - DNA, 117 bp, Homo sapiens
acaacatcaccgtgaggcagggggacacagccatcctcagaaccttgtgaaacatcttcctgagcagaagatactcaacgaattagcagagcttaagaatgaatatgatgacctctg

SEQ ID NO: 619175 - DNA, 100 bp, Homo sapiens
aagagagcagtaccctgatggagtcccttgcaggttctccgagtagttcggctgattaagatttcacctgcattagaagactttgtgtacaagatatttg

SEQ ID NO: 619176 - DNA, 100 bp, Homo sapiens
cacattggaaccatctacggtgacctgaaagtgggggatcaggtctggctgtttattgatgagatgtaccggctcacgctgcgcacaagtaaggaagccg

SEQ ID NO: 619177 - DNA, 82 bp, Homo sapiens
cggcatgctgaaactcagagagggaagatgtcttgcaagtacagcagccacacccagatttgcttgtaaatgcatcacgaag

SEQ ID NO: 619178 - DNA, 139 bp, Homo sapiens
cagaacggcgacctcaagaagcagctccacgaaaggcagccgcggatcgccgcgctcagcgacaaacaatctcacagaaagttctccgctcccagacatgggtccctcggcttcctgcctcggaagcgcagcagcaggc

SEQ ID NO: 619179 - DNA, 73 bp, Homo sapiens
ggtcggtcccggggtcacccgctacgggaagcaggcctcgccacaggtaccctcacatccatcaccaacctcg

SEQ ID NO: 619180 - DNA, 96 bp, Homo sapiens
cagctacgccattggtggactcctcagtattctgctgattttggtggtgattgcagctttgatgctgtacagtggaggtgaagccggtgctgccaa

SEQ ID NO: 619181 - DNA, 96 bp, Homo sapiens
aattacagaggaagcagtaacaactgtggatgaaggtgagatttgtggatttaaaattcacgggcagaatgtcccctttgatgcagtggtagtgga

SEQ ID NO: 619182 - DNA, 83 bp, Homo sapiens
cgccgggccccgggccccgatggccccgaccgcgtgctggagctcttcgacccacccaaggcctccaagcagcatcgtcttaa

SEQ ID NO: 619183 - DNA, 82 bp, Homo sapiens
gctggtccaggccttccagtacacagacgagcatggggaaggtgcccagtcccctggaaggcagtgaaggggacggagacac

SEQ ID NO: 619184 - DNA, 100 bp, Homo sapiens
cacagagaccgtgaagattccaagttcaggagaactcgaccgtgatattgtggtccagatagtagatgctcgaaacccactcctgtttagatgtgaggat

SEQ ID NO: 619185 - DNA, 100 bp, Homo sapiens
tgcgcaccaaagagttggatcccaggctggtacacacccccaaaagaagacggctaaccctggagtatcacccttcctccctccccaggcaccactggac

SEQ ID NO: 619186 - DNA, 83 bp, Homo sapiens
agagcagacaccatcctgtgtctagggtccagcctgaaggagaactgtgtttatgaaactgtagttttgcctttggatgaaag

SEQ ID NO: 619187 - DNA, 80 bp, Homo sapiens
aacagggcagacgttagcgtgagtgatcactctcaatcccgggtcgtttatacgcaatgcagactggaatgaagatcgat

SEQ ID NO: 619188 - DNA, 100 bp, Homo sapiens
atggcaatgggtccaagtgcgaccttaatgggaggccccgggaggccgaggttcggctgaccatgaatgacttcagcgtgcatcgcatcattgggcgcgg

SEQ ID NO: 619189 - DNA, 80 bp, Homo sapiens
cggggcggcggcggcggcggctgcggcccaatataggtcagatttaatgtactacaatatgttgtcccagaagtgaaaga

SEQ ID NO: 619190 - DNA, 98 bp, Homo sapiens
gcccagcctcacctggggccggcaggacagacggccctgatgctggccgtcagccacgggcgggtggacgttgtcaaagccctgctggcctgtgaggc

SEQ ID NO: 619191 - DNA, 101 bp, Homo sapiens
tcacgagcatgcgaaggcgaagcggcacaacctgggttccatgcctctgcagcggtgcctcatgtttgctgtgtagttgctgtcctaacagtaagaattcc

SEQ ID NO: 619192 - DNA, 100 bp, Homo sapiens
acagacactgtcactggagtggccttcaacccatcagcgccccaggacgcagtgatgactgcagtgagggcatgggagttctggaacctgaagaccctgc

SEQ ID NO: 619193 - DNA, 83 bp, Homo sapiens
ggcggaatgacagcggcgaggagaacgtcccgctggatctgacccgaggtttctttacctccagaaagaagaatattggcccc

SEQ ID NO: 619194 - DNA, 100 bp, Homo sapiens
caacaagctgaaccccaaacccaaattcttcgttctgtgcggcgacctcatccacgccatgccaggtgctgtgggcgcctgtactctctctgtcacacaa

SEQ ID NO: 619195 - DNA, 90 bp, Homo sapiens
gcagcctgcggacgaggccgggacttggccgagcggatcctaataaggggaaaatggttatggccattgcaccaacccattatatctggc

SEQ ID NO: 619196 - DNA, 83 bp, Homo sapiens
tgaagagcgacaagccgctggcagccgcggatctcaccgccgctcaggacgagccaaactcaggctgtaccttgagcagctca

SEQ ID NO: 619197 - DNA, 75 bp, Homo sapiens
atgtattggagaccagaccagaagcccttctgaattaagctaatttctatctcccagcatggaggatgacggcag

SEQ ID NO: 619198 - DNA, 75 bp, Homo sapiens
ctcgggtcggtgcaccgtccgggattttatccaccggcactgccaagatcagggtctgagtgcccggaccgcttg

SEQ ID NO: 619199 - DNA, 82 bp, Homo sapiens
ccgcggggacccagacgaggctcgggactttgcagccggccttagtgctcgcgcaggagaactacgatgacccgcacaaaac

SEQ ID NO: 619200 - DNA, 74 bp, Homo sapiens
cgcggcagcgccgagggcccctcccccaggcctctgggctctgaggtcgtgtatgagaggtgtgaaaagctgcg

SEQ ID NO: 619201 - DNA, 74 bp, Homo sapiens
tagccataaatgtctggctaatggcatttacaggaggcataaacttggaggaggcagtggagagagcatcctgg

SEQ ID NO: 619202 - DNA, 75 bp, Homo sapiens
tggactaaattaccagaatgcaggggagacagcaatatgttgggaaggtcaagtttgcctccttggaattttccc

SEQ ID NO: 619203 - DNA, 116 bp, Homo sapiens
ctcaaagccagacacttgccgaagatggatatcaccggtctctcaggtagtctggttccagaacgcccgagccaagttcaggcgcaacctcttacggcaggaaaacacgggcgtgg

SEQ ID NO: 619204 - DNA, 98 bp, Homo sapiens
tgactttggatgccacaggaaggatctgtcttggctgagggtaaaaagctgggattggtaggctgggtccagaacactgaccggggcacagtgcaagg

SEQ ID NO: 619205 - DNA, 101 bp, Homo sapiens
tttgaaaaacattcaggactactttaatccagctactctacctctaacacagtacctgttaacaacgtttccggggagttggtgtctgtggcacatgcgct

SEQ ID NO: 619206 - DNA, 75 bp, Homo sapiens
gatttacttggcaattgaaatgtatgctgatggtagcatatgtttagatatccttcagaatcgatggagtccaac

SEQ ID NO: 619207 - DNA, 78 bp, Homo sapiens
tttcctgcacttcacctggcatgcgaagtccaaggtggtcctgccatcatggctgtcctctgcaaaggtctcctcgct

SEQ ID NO: 619208 - DNA, 107 bp, Homo sapiens
agtatgctgcaagtgagaacatatttaacaggcagactgccagattcacttacagccccagctaattccaccaaacatggaggagtacatgaacagccttctctcag

SEQ ID NO: 619209 - DNA, 100 bp, Homo sapiens
gagaagtttatgaatgagttgcataaaattccatcagatatatggagtgatcactcatttcagactgatccagatttgccgcctggctggaaaagagtca

SEQ ID NO: 619210 - DNA, 100 bp, Homo sapiens
agaagataggatgtgggaacttcggagagctcagattaggcaaatgttctgaaaaagactctgcatgggaatggcctgccttacgatgacagaaatggag

SEQ ID NO: 619211 - DNA, 100 bp, Homo sapiens
ctgcgtggtgaccttcaaaggtcacaaaggagaggcatacatcacaatttggaattatgcattggtttatcaatttacttgtttattgtcaccctgctgc

SEQ ID NO: 619212 - DNA, 76 bp, Homo sapiens
ctgagcctcctcgtctggatcctcactctctccgatactttctcccaaggctttcaaggatatgctgtattcagct

SEQ ID NO: 619213 - DNA, 76 bp, Homo sapiens
taagctatatactttggttacctatgtacctgttaccactttcaaaagaggagatgttaaagtaacccatcttgca

SEQ ID NO: 619214 - DNA, 83 bp, Homo sapiens
tgaaaggctctccttgcagctgcttagacgctggatttttttcgggtagtggaaaaccaggttgtgaccgagattcccgacga

SEQ ID NO: 619215 - DNA, 83 bp, Homo sapiens
tgtgcctctggctcaagcccaggctttggtcaccagtgagctggagaagttccaggtttaccgacaagactgtgaaactttcg

SEQ ID NO: 619216 - DNA, 101 bp, Homo sapiens
tgtgatgctggagaactacagccacctcgtctcagtggctacaaggctttggcccaccaagtgtgtaccatgctgctattgtcatcttccttgaattcttt

SEQ ID NO: 619217 - DNA, 101 bp, Homo sapiens
ggagccgcagtgggaggcacgtcgtcttctacccaaccctgaagggatgcgctggatgccctgggcctgaagcgctactgctgccgccggatgctgctggc

SEQ ID NO: 619218 - DNA, 88 bp, Homo sapiens
ttcgcagctgggcgacaagtggctgtattgcctaagtgtaatcttgaacatgggcggtgctgtgagtgctggtgaagacaatgatgag

SEQ ID NO: 619219 - DNA, 98 bp, Homo sapiens
agagaagcacctgcacctcagagtaaagctgctggacaacaccatggaaatatttgacattgaggctgtagtacatgagcgagctagagaaatcacca

SEQ ID NO: 619220 - DNA, 75 bp, Homo sapiens
gtgagcttgaccagttacggcaggaggccgagcaacttaagaaccagattcgaggagaagatgtcaaccggacac

SEQ ID NO: 619221 - DNA, 96 bp, Homo sapiens
gtcagcctcccgccggccgtctccttaacaccgaacaccaacaagttgaaatcatcgcagaaggataaagttcgtcagtttatgatcttcacacaa

SEQ ID NO: 619222 - DNA, 98 bp, Homo sapiens
caaacccccagttcattgtggatggagctacccgcacagacatctgccagggagcactggggtcaaagaaggctcttccaagaaacatgtagaagaga

SEQ ID NO: 619223 - DNA, 95 bp, Homo sapiens
ccccacccctctccgtccatggccccagatgacacttcaggaagaagaagaattttcagttcttgccagctgcctgggacttctgccaacgtttt

SEQ ID NO: 619224 - DNA, 50 bp, Homo sapiens
cagaaggtggcagcttccatgccggacactgcccatctctaagataagaa

SEQ ID NO: 619225 - DNA, 80 bp, Homo sapiens
gcagccgtccggagccagccaacgagcgggttcatagtggcgtcatgcacgcagactcctgcaagttcccctaagttctt

SEQ ID NO: 619226 - DNA, 83 bp, Homo sapiens
agcaagagagacaaaaatatcttcatgaggaagagaagatcgtcaagaagttgtggtactggatgtaagcagagaaggcaaag

SEQ ID NO: 619227 - DNA, 100 bp, Homo sapiens
gcgctgccgccgcgtcctcagccaccgctccctcttcccacggtgactgcttagaaaactgcacagcatctgatgaaattagcgaataagaacatcaacc

SEQ ID NO: 619228 - DNA, 82 bp, Homo sapiens
ggcgagagatgtattcagtggaggaagctgcatatgaaacactctcagatgctaatagacgaaaagagtatgatacacttgg

SEQ ID NO: 619229 - DNA, 98 bp, Homo sapiens
catggctgctgctcttcatcctcttctgcattgggatggatgttgcttcagagtgtgaagtcaaatgcatgccaacattccagttttttaagaaggga

SEQ ID NO: 619230 - DNA, 83 bp, Homo sapiens
cactagtcgcgggagccacgcagaggacgccggaacaccctggaagccgagaaatgggtgagccactgcgcctgatcaaggca

SEQ ID NO: 619231 - DNA, 97 bp, Homo sapiens
caattttgatatgccttcaagtatggatgagtatgtccatcagaggccattgcccaagtctggccaggctgatgggaccagcgaggagtctctgcac

SEQ ID NO: 619232 - DNA, 101 bp, Homo sapiens
agcgaggaatcctggagcacagagaagctcccagctttgaaggtcttgcggtgatcttggcatatacagaagggctgcatggaaaatggctgttcacagag

SEQ ID NO: 619233 - DNA, 110 bp, Homo sapiens
ggcttctcgactcggtcctgtttcgacagcgaacatgtcgcggcctgtcagatggcggacttccaccacaaatggagggattttgactgtatctattgacaatcctggag

SEQ ID NO: 619234 - DNA, 75 bp, Homo sapiens
gaaaatcaacgacaacttgagcacaggttggtactaagaagtgcctttcctgacgtctctgctgcttggaaccgc

SEQ ID NO: 619235 - DNA, 115 bp, Homo sapiens
aaagaatacattcctgattacctgccacccattgtgtcttctcaagaagtttgtagactatgaagatcttgtggaactggccccaggcaaatttcaattggtggcagagaaccgg

SEQ ID NO: 619236 - DNA, 100 bp, Homo sapiens
ttcctctccttctggtcctacatcatcatcctcaacaccgttgtgcccatttcactctatgtcaggtggacccaagtggagagattgtggaactggcgaa

SEQ ID NO: 619237 - DNA, 75 bp, Homo sapiens
tggggatggcgtgcagcgcaaccacgagacggccttccaagtcaggatggctaaaggtgaccccaagaaaccaaa

SEQ ID NO: 619238 - DNA, 83 bp, Homo sapiens
cttgtcctggctcttgccctcatcctggttctggaatcctcagttcaagctgtttttggaaggaagaaagatggaaagcggtg

SEQ ID NO: 619239 - DNA, 74 bp, Homo sapiens
ccagaccatgctctccatcctgctcttcttccacagagatggaattctgtgaaacctctcacactctgtgctct

SEQ ID NO: 619240 - DNA, 100 bp, Homo sapiens
cggggccttccacaccccctccgtgggtgtgtgatgccttcaattaagttgcagagttctgatggagagatatttgaagttgatgtggaaattgccaaac

SEQ ID NO: 619241 - DNA, 107 bp, Homo sapiens
ccgaggcccagagatgaccccttatgaagcgcagccgtgtgtgctgtggagccgaggccgtcctgcaggaagccgcgtgactcccgcctcctccctgtgctctctgg

SEQ ID NO: 619242 - DNA, 100 bp, Homo sapiens
tttagcgctcgcccagctagccgcagccaagaaggatcaagaaggtggagaagaaaagaaatctgtgcaaaagaaaaaagtaaaagagttaaaggtgttg

SEQ ID NO: 619243 - DNA, 100 bp, Homo sapiens
tcgccccgccggttcctcaccctcggggagcaacatggcacctgttcttcccggagcctatcagcaaagccattcccaaggctatggctacatgcaccag

SEQ ID NO: 619244 - DNA, 51 bp, Homo sapiens
gtacctgttaccactttcaaaagtctccaattgagaaacatggcactgttt

SEQ ID NO: 619245 - DNA, 90 bp, Homo sapiens
ctattactaaagacttggatttccaactccaggaccctttccttctctacagaaatgccagatggcgcaccctacgacgcgcacaccacc

SEQ ID NO: 619246 - DNA, 119 bp, Homo sapiens
gcagattgggccttgcgatggatagcagatagaaaatctacttttgacggggtctggctctgtcacccaggctggagtgcagtggcacgattatggctcattgcagcctcgacttctcg

SEQ ID NO: 619247 - DNA, 100 bp, Homo sapiens
actacagacctcacagtgccaaatggagctggaagcagtccagtggttattttaccaagaaaatggtttgcacgactttgaacatatactatccatgctg

SEQ ID NO: 619248 - DNA, 82 bp, Homo sapiens
ttggactgagtcctgcaggacacagtgccagccatttttggagtctcctttggtatccgcaaactctacatgaaaagtctgt

SEQ ID NO: 619249 - DNA, 90 bp, Homo sapiens
gacctttcccgctggcgcgcagcctcagctaggtggagccgccaccaaaatgcagattttcgtgaaaacccttacggggaagaccatcac

SEQ ID NO: 619250 - DNA, 98 bp, Homo sapiens
tcaagactggtccacggagtgtatgaccacaaacagccatcaagctttaccgatttgttacaactcaagcaagggccagcagaaattctcttttgaca

SEQ ID NO: 619251 - DNA, 100 bp, Homo sapiens
gggtgtcagccctgaccaaccatgaccgagagccggacaatggcaaggaggagcaggaacgaaagctcctcctgagcttggataaactgcaggagcgaag

SEQ ID NO: 619252 - DNA, 83 bp, Homo sapiens
tggatttaaaagacagtcctcgtcagcactgactttcagctatggaatcgggtacccagtgtgttgaacaaattcaagagttg

SEQ ID NO: 619253 - DNA, 97 bp, Homo sapiens
ggtccccgcaccacctcctgctgccttcccgtcgccgctcccgaagcttttccaggaacactttggtcttagtaacctgactggaatgaactgcctg

SEQ ID NO: 619254 - DNA, 100 bp, Homo sapiens
tttacacatgtggtttgaacaccaaggggcaactgggccatgagagggaaggaaacaagccaggacatccataaaaattcatcagagagcattttactac

SEQ ID NO: 619255 - DNA, 75 bp, Homo sapiens
caaggacacacaggatcaattacatctttacagattggtgctgaagacatggacggcttccaggcagacacggag

SEQ ID NO: 619256 - DNA, 87 bp, Homo sapiens
agtgagcatcttgattagaagcagggttgctgtgagtctaggtactccaattatgaagccagaatggatttataaagcttgggaaag

SEQ ID NO: 619257 - DNA, 100 bp, Homo sapiens
agtttgaatagtaatttaaaaaaggatgaatttctagctgcattggaactagtgacagttgatggatccatccaacctacaaggaaaagtacagaagcat

SEQ ID NO: 619258 - DNA, 100 bp, Homo sapiens
gccacgcgtcccccagtaggagaatgactccgattcgtgaccctcagcgccggtgcatgtcgattcaatcgcaggccactctgctgagcatcttctccca

SEQ ID NO: 619259 - DNA, 103 bp, Homo sapiens
ccaagaagatcatcattaaggacggaggcacggttttaaaatcaaagatgggaaaatcggagaaaattgcccttccccatggccagcttgttcatggtataca

SEQ ID NO: 619260 - DNA, 100 bp, Homo sapiens
caaaactttacaagttaattgaagagtcttgtccacagctggcaaattcagtgcagatcagtgatattctaatggagttcctgctcaatgtcaccacagc

SEQ ID NO: 619261 - DNA, 96 bp, Homo sapiens
tcagtaatgcctggaatgatgatgtctcatatgtctcaggcttccatgcagcctgccttaccgggtcagttaaatgaaagcatggaccatggggga

SEQ ID NO: 619262 - DNA, 75 bp, Homo sapiens
ggctgactacctgctgtacaccctcaacaaacaccagcgctttggcttcctgcctgacacagctcacttcaagaa

SEQ ID NO: 619263 - DNA, 87 bp, Homo sapiens
gcggcgagccggagcgcggagcccggctcccgcaccatggaggaggacgacagctacggggcaccacttcacaggccacagaagccc

SEQ ID NO: 619264 - DNA, 100 bp, Homo sapiens
atgcagtggaggccatcaggggccttgataacacagagtttcaagaatttggaggttttggttcagttagtggaaaaattgaaatagaaatcaagatcaa

SEQ ID NO: 619265 - DNA, 98 bp, Homo sapiens
ttgaatatgcactctttggaaaattcccttatcgatattatgagagcagagcatgatcctcttaagggtataatacttctccacgtctgcttcaggaa

SEQ ID NO: 619266 - DNA, 100 bp, Homo sapiens
agaaactagcaccagccccaaatttcctccttcccgaactcacaaatcctgacgagctcctgtcttatctggacccccccgacctgccgagcaatagtaa

SEQ ID NO: 619267 - DNA, 115 bp, Homo sapiens
gccgagtgcagaagatctgggtgcccgtggaccacaggccctcgttgcccagatgattttttatcaagcagaaatgcatcgaacaacgagaatcaagatcactgagctaaatccc

SEQ ID NO: 619268 - DNA, 100 bp, Homo sapiens
atgctttttattacaagactacggagcataggaggaaaattcatcatctggccagaagccaaggagtcctcagtgacggtgggatccacaacatctccac

SEQ ID NO: 619269 - DNA, 98 bp, Homo sapiens
tgttaagtgtcaagttttacagtcgccagggacaagaacaggtaacccaggtttttctgccttttatgtgccatttgcaaaggctttatactctttga

SEQ ID NO: 619270 - DNA, 97 bp, Homo sapiens
gggatcgtgaccgagaccgtgaccgagagcgtgaccgagagcgcgaatatcgtcatcgttagaagctgcactgacaccctggtcctgacttccctgg

SEQ ID NO: 619271 - DNA, 124 bp, Homo sapiens
agcaggaagacaatgaggatgaagacctttatgatgatccactgccatttaatgaatagtcacctttggctcttcagagatgcagggacacacgatgggcttctggttaaccaaactgaattat

SEQ ID NO: 619272 - DNA, 113 bp, Homo sapiens
cccagaccctggagcctcagttggaagcagccgatccagcctgcggagcctgtggggcagatatgcacccaatgtccagggagcgtgcaaaatttgtcaaaagtggcctttta

SEQ ID NO: 619273 - DNA, 98 bp, Homo sapiens
ctcttcggaaagactgttccaaaaacagtggataattttgtggccttagctacaggagaggtccagaggtgtccttctaaagctggtagaggtttcac

SEQ ID NO: 619274 - DNA, 50 bp, Homo sapiens
agtgtgtacaccgaacacagcagataaacttcttgcggaataaacacaaa

SEQ ID NO: 619275 - DNA, 75 bp, Homo sapiens
tccaatgtcaccccaggatgatgaagcagaagaggattcgcttcaagctcagcttatcaatatgggtgttattcc

SEQ ID NO: 619276 - DNA, 100 bp, Homo sapiens
aaaacagggaagatattagccaatatggaattgccaggttcttcactgaataaagctaaaccagccccagaaatatttgaaaatgaagtcatggccctgc

SEQ ID NO: 619277 - DNA, 100 bp, Homo sapiens
caagctcgtagcctgccactccgtgcggtttgaaattcctgatatagatgctgaaaagttaatgtgtccacaagaaattgtagattacattgcagataag

SEQ ID NO: 619278 - DNA, 97 bp, Homo sapiens
cgacattagtagcagatgaaactgatgaggatgaagaagtatacaagagagatttcagcgctcctaccctggaggatcatttcaataaaaccattct

SEQ ID NO: 619279 - DNA, 74 bp, Homo sapiens
gttactgccctgtggggcaaggtgaacgtggatgaagttggtggtgagagcacagtaaggactattgctatgga

SEQ ID NO: 619280 - DNA, 98 bp, Homo sapiens
tcgtccagagggtcggcagcggcacctacggggacgtctataagttgagacatttgggaaatgatgaagtgcacattgtttggtcagagcatactaga

SEQ ID NO: 619281 - DNA, 50 bp, Homo sapiens
cttcgcctcctaatccctagccactatggccgccatggcatcagatgaag

SEQ ID NO: 619282 - DNA, 82 bp, Homo sapiens
caaggagctaaagcagcgtgcgttcagccctgggggaaccttctgaccagcctcatgggctcctcagagcaggaggatgggg

SEQ ID NO: 619283 - DNA, 102 bp, Homo sapiens
gccttcctgatccgggagagtgagagctccccaggggagttctctgtgtctgtgaaaccggaacatgaacattttgcagtactgcccctcttccgacatgtg

SEQ ID NO: 619284 - DNA, 100 bp, Homo sapiens
attttggctgctgcaggagccattttagatatttcagcagttgaatcagttgaattcacttcatcaagaaactatcatgaaatgcgtgaaaagtaggaaa

SEQ ID NO: 619285 - DNA, 75 bp, Homo sapiens
tgtacatttgcccattctcaggaagagcttgaaaagaacgtcaaggtcgtgggaaataaaaggcagttctacaca

SEQ ID NO: 619286 - DNA, 98 bp, Homo sapiens
cggtacggacctgtgcaggtgaggacaggccaggtggaaatggatattgttgaaaaactggtgaaaatgataccttgtgagcatgaagacctgctgaa

SEQ ID NO: 619287 - DNA, 94 bp, Homo sapiens
ggtccgcagcttctggcggttcgggcggtcggcgaagcggccggcagattgccacggcagtgaagtttctacagaattcccgggtccgccagag

SEQ ID NO: 619288 - DNA, 100 bp, Homo sapiens
gttaaccttgcaccactggctgggaggccgctgcagctcatggttgatgttcttaaggcaacagcactccctttgttgaaacaatttgggattgatggtg

SEQ ID NO: 619289 - DNA, 90 bp, Homo sapiens
gaagaatattatcccttctcagagagtgttctgccagttctggataatccactgtccaagaaggttcgaggcctcattgatagcttacgg

SEQ ID NO: 619290 - DNA, 133 bp, Homo sapiens
caagttcaaggagtattgtccccaggtcttcaggaacctccgtgatcgatttggcattgatgaccaagattacttggtcgcagaacttgaaaagcgcctgacagagctggagacagctgtacgttgtgatcag

SEQ ID NO: 619291 - DNA, 100 bp, Homo sapiens
acctgaacgaattttctttcgatggcattaccagagtatagggtttcatcaccttaaatggttttgaaccaatgaaggtgtattcccttaaaaagacgga

SEQ ID NO: 619292 - DNA, 100 bp, Homo sapiens
ccaggccccacaagtggccccagcccaggaacgaatctctcaggctgcatcaggatgaatgatgacccaagtatggaagacccagatgatgtggtaccag

SEQ ID NO: 619293 - DNA, 75 bp, Homo sapiens
gtacttcctccagcggcacgagctgctgcgcaagcatgagaagacgtccacacggaagctgtccaggcggctctg

SEQ ID NO: 619294 - DNA, 104 bp, Homo sapiens
gacaagaacaacgacggccgcattgacttcgacggtctacaaggaagtcttcacgaggagcagtgagaactcagcgtcgtcgacgttctaagtctcctgtcctt

SEQ ID NO: 619295 - DNA, 98 bp, Homo sapiens
tcctgtaattgcacgtaaataacgtttcctgcacgctctcctcttcagctggaaagcgctccctatttaccaacagcatgaatcaagaaaagttagcc

SEQ ID NO: 619296 - DNA, 82 bp, Homo sapiens
ccagaccctggagcctcagttggaagcagccgatccagcctgcggagcctgtggggcagcagcccactcacccagtgtacaa

SEQ ID NO: 619297 - DNA, 75 bp, Homo sapiens
aaagcccctgcaggccccaggtttccgagcctaaaatgaccaatgtgtgatttcagtggaataaatggcgtccaa

SEQ ID NO: 619298 - DNA, 75 bp, Homo sapiens
ccgagagccgcgagccccagggcgccctggagcgccccccagtgtcattcttccacttcctcagaatgtgaagga

SEQ ID NO: 619299 - DNA, 75 bp, Homo sapiens
ggaatgcttgaatatagccagttccattgagactattgggaagaagttacctgcaactacagcaactccagactc

SEQ ID NO: 619300 - DNA, 75 bp, Homo sapiens
ggctgattctggaagttctgaggaaaagcagctgtgcaaccatattgcttctgggaaaaaatgtcaatatgttgg

SEQ ID NO: 619301 - DNA, 97 bp, Homo sapiens
gggactggaaccatctcagaagccatgcccctcaggctggaacttgccctgtctcctcgcagatgagaattaaacaaccaccatgtcgagcaaaaag

SEQ ID NO: 619302 - DNA, 100 bp, Homo sapiens
cgaggttcctgtgcaactcttcacagggtcagagcacttactctaggcagatcaagcaagttgaagatgacattcagcaacttctcaagaaaattaatga

SEQ ID NO: 619303 - DNA, 100 bp, Homo sapiens
gatttgttaaggattccaagtaactcttatttgaagacagcgacagctgtggcgcactgcaaacgcggcaatggtctcatcaaggtgaacgggcggcccc

SEQ ID NO: 619304 - DNA, 131 bp, Homo sapiens
ctctgcatttgtctgtttgatatcaccaaactggaggatgcctatgtattccctggggatggcgcatcacacaccaaaggaaaaccaattctgtgtcctcggaggaccacagcccagttgggccccaggcg

SEQ ID NO: 619305 - DNA, 75 bp, Homo sapiens
gctagatgaagatactggaacattcagaatctacggagagccctactgccaataaagggaaaataagagatgctc

SEQ ID NO: 619306 - DNA, 116 bp, Homo sapiens
acccgcggccccggcgccaagccgccgtcatcttcttcctgtgccaggtactccaaagattcaggtttactcacgtcatccagcagagaatggaaagtcaaatttcctgaattgct

SEQ ID NO: 619307 - DNA, 100 bp, Homo sapiens
gccaggacctccctggatgccctgaagatcagcatccgccagctcaagtggaaggagggacttcaaaatgagcgtccctgactacatgcagtgtgctgag

SEQ ID NO: 619308 - DNA, 87 bp, Homo sapiens
gcattgaggactttccttacctgtttttccagctcacccactgccagcagaggcaaattgcaacttgatctgtggtgatgaatatgg

SEQ ID NO: 619309 - DNA, 96 bp, Homo sapiens
ctggaacttcatcatcatctacttcacaggaattgccatttaaatgcactcggtgatggaaagagagccactattctgaagaacacttggccaaag

SEQ ID NO: 619310 - DNA, 83 bp, Homo sapiens
cctggagcagctgcggcggctcggggtgctctactggaagcggagctggagtttgttcagatcatcatcatcgtggtggtgat

SEQ ID NO: 619311 - DNA, 90 bp, Homo sapiens
ggctggtgcaactttcagaagtggtcccagaagatgaatccggcctcggcgccccctccgctcccgccgcctgggcagcaagtgatccac

SEQ ID NO: 619312 - DNA, 100 bp, Homo sapiens
catgctttttattacaagactacggagcataggaggaaaattcatcatctggtactccaaagattcaggtttactcacgtcatccagcagagaatggaaa

SEQ ID NO: 619313 - DNA, 101 bp, Homo sapiens
gaagtgcagctgcctcagttcttagcgcagaagatcctcaggaacgggaacgtcgggaacgcagggagaggatggaacgggagaccaatggaaatgaggat

SEQ ID NO: 619314 - DNA, 119 bp, Homo sapiens
gcagagaatatgatacagatgtattcaaatggatcttcaaaggttgtggtttctcgatcaggaccatcaacccctcatgtgaattttctcctggactcccatccagtgtctccagaagt

SEQ ID NO: 619315 - DNA, 83 bp, Homo sapiens
ggtcccgcagtcgcccgcaaccggggcgaatcatggcggccgccaagggatgtgagctcatttcaactcctgatcaagaccac

SEQ ID NO: 619316 - DNA, 74 bp, Homo sapiens
ccggcatctcagacaagctgatggtgcacctggtggagcgagtgcagaggacagagcgggatgccaccagcttg

SEQ ID NO: 619317 - DNA, 80 bp, Homo sapiens
gtcctcagcgactcttctgacctccgcgcgacgtacccgccgccgccgttggctggagtactatactggcaattgctgga

SEQ ID NO: 619318 - DNA, 83 bp, Homo sapiens
atataatccattctcggattctagaacaggatcatagacggtatttctatgtaaacgaacagtcgggcgagtctcagtgggag

SEQ ID NO: 619319 - DNA, 82 bp, Homo sapiens
ggccctggcgggtgccctggctaccatggaccatcctgctggtcagcactgcggctggtgatgatgaacagtctacacagat

SEQ ID NO: 619320 - DNA, 50 bp, Homo sapiens
agcaaatggtggctttcattgggtgccttgtccacattttgcgagagaca

SEQ ID NO: 619321 - DNA, 100 bp, Homo sapiens
aatctgtcttttgatgaaatcaacaaagcctttgaactgatgcattctggaaagaggtggaaccgtcccaaaatgtcccttgctcagaagaaggatcggg

SEQ ID NO: 619322 - DNA, 101 bp, Homo sapiens
attatggctgctgttgtccaacagaacgacctagtatttgaatttgctagtaacgtcatggaggatgaacgacaggcaagaaactatattcagtctttgac

SEQ ID NO: 619323 - DNA, 89 bp, Homo sapiens
ggcgttgccaccaggggccaattaagccttaccagcaggggcgacaacagcatcagacaatgcagatcttcgtgaagactctgactggt

SEQ ID NO: 619324 - DNA, 51 bp, Homo sapiens
cgggctcggaacgagactgcacgccttttttccggctgctgaacttgcgca

SEQ ID NO: 619325 - DNA, 50 bp, Homo sapiens
ctttccaagtctggggatggccaggctactgcagcactggggtgtcagtt

SEQ ID NO: 619326 - DNA, 75 bp, Homo sapiens
gccgccactgccgcaggaggcgtgaggagtcgttcacgcctactgaggagcatgtgttggtggtgcgcctgctgc

SEQ ID NO: 619327 - DNA, 101 bp, Homo sapiens
cttcaacaaagttgagatagtcagcatgttgcaggtcacgagaagagaatgccttctagatgcaaaatcacctccaaaccagaccacttttcttgacttgc

SEQ ID NO: 619328 - DNA, 90 bp, Homo sapiens
atcaaatctgaggtcttattttgttgagtcgaaagtgaaattttcctttggccaacgtgacaggggtggcactgaatcaacaagacaagc

SEQ ID NO: 619329 - DNA, 80 bp, Homo sapiens
gacatcggcctctgcaggcttgccgaagaagggaggtgctgcagggtgcacagctgatcgccgtggcctcctcggacccc

SEQ ID NO: 619330 - DNA, 83 bp, Homo sapiens
cagaaatgcgcagagcaaacatctttcaaagataacgaaggaggcccaacttcattcaataaggagcctgacggatttatccc

SEQ ID NO: 619331 - DNA, 98 bp, Homo sapiens
agggctctgacatcaacatccgagacaacctgaagacctaactgcagcatgtctgtatttggagatggggcctctacagaagtcattaaggttacatc

SEQ ID NO: 619332 - DNA, 100 bp, Homo sapiens
cagaccctggagcctcagttggaagcagccgatccagcctgcggagcctgtggggcaggttgacctgacagttcaagaaaaggagaaatatcttaatgtg

SEQ ID NO: 619333 - DNA, 98 bp, Homo sapiens
tcaaaggagttgtatttagtgtgacgactgttgacctgaaaaggtcaaaatgcagatcttcgtgaaaacccttaccggcaagaccatcacccttgagg

SEQ ID NO: 619334 - DNA, 74 bp, Homo sapiens
atcctcctggccatgttcctcgtccactacgggcatcgggttacacatcattttggaatgactgtatatcatct

SEQ ID NO: 619335 - DNA, 50 bp, Homo sapiens
gcgcgcagcgcggggagctgccaggtttggcagtgtcaaccatctcatca

SEQ ID NO: 619336 - DNA, 75 bp, Homo sapiens
ggttacctgcctgtccagacagttcttgaaggtgacaacttagagaccccactccatgctgggaatagacaactc

SEQ ID NO: 619337 - DNA, 90 bp, Homo sapiens
cagaccctgggctgcagctgcctaatgagcaaatacttccctggacaagaaagccagatgaaactgatctaccagggccgcctgctacaa

SEQ ID NO: 619338 - DNA, 100 bp, Homo sapiens
ggggccgctggattctgaggaccagcagatggccagtcacgagaacccagactagacgcttgaagcaaagctgccatcccagaagacgacatgctctcag

SEQ ID NO: 619339 - DNA, 100 bp, Homo sapiens
ccctcggcactaggcagcggaggagcccgaccgacccgagagcagagctgacatctgataaagacatgtaccttgacaacagctccattgaagaagcttc

SEQ ID NO: 619340 - DNA, 100 bp, Homo sapiens
ggagcgtcaacagcagcaccatgggcagttgtgaaaaacttcaggacaaaaatgtttcatttaaggacttgtgctgctaagttgaggccattgacggctt

SEQ ID NO: 619341 - DNA, 90 bp, Homo sapiens
gcggcggcggccggtgagcgtcccgcgctggagccctcagaggcgggcccgtcagctccgtgaagttgagaagagtcacaaatctgtaaa

SEQ ID NO: 619342 - DNA, 100 bp, Homo sapiens
ggaacgcggcgaccgccaagaaaggcagcgaggtggagagcggttggtcaaagaaaaagtgatgtatgaaaaagaggcaaaacaacaagaagaaaagatt

SEQ ID NO: 619343 - DNA, 82 bp, Homo sapiens
aaaaggcaaaaatcccatctaccgcaactctcagttcgagagtaaagccgccaccggcacggccaggccagcatggtggacc

SEQ ID NO: 619344 - DNA, 100 bp, Homo sapiens
ttggatccttcagagcctcagccactagctgcgatgcatgtgatcaagcgaggtcactgcagccagaggggtccagaagagagaggaggcactgcctcca

SEQ ID NO: 619345 - DNA, 80 bp, Homo sapiens
gactgtgtgcagagttcccggacagattgaagtgctaagaggctttctaggagaacaaggggtctgtggaaatcatgaga

SEQ ID NO: 619346 - DNA, 100 bp, Homo sapiens
ctccatgaacaatctcacccaattactctgctcagaatgtggaggctgtggacccacgaggtcgaacattattgcatcttgctgtttccttgggacattt

SEQ ID NO: 619347 - DNA, 100 bp, Homo sapiens
gatgctgaggaccacgggggtactttctgcttaggggagctggtggagctggctgtgaccatggagaacaaagcagagagtaaatgtgtcaaatactggc

SEQ ID NO: 619348 - DNA, 90 bp, Homo sapiens
tggaaatccccaaagagctctggatgatggttgattacctgtaccgaaatgctgtccagcagatgtccaacatcacagtcacatacagag

SEQ ID NO: 619349 - DNA, 100 bp, Homo sapiens
ccagcatgttggccagtcaagttcctccactgagctcgctgcgtataaggaggaagcaaacaccattgctaaggtaccaggatcatctatgaccggaaat

SEQ ID NO: 619350 - DNA, 50 bp, Homo sapiens
agtctctgcacctcgcgccccagcagtgacaaccatgagtggaaaaaact

SEQ ID NO: 619351 - DNA, 100 bp, Homo sapiens
agaatcgtttggtctcctgccgtgcccgtgtaaacaggaacatcgataagtagtgtaaaaacttgcacaatgaaatccgaagccaaggatggagaggagg

SEQ ID NO: 619352 - DNA, 90 bp, Homo sapiens
ccgggcgccgccaagatgccggagagcgacttgcagttgtggaggtacagtgtgaacggctgaggatgctctaccgggactgtgctcggc

SEQ ID NO: 619353 - DNA, 100 bp, Homo sapiens
ggcgccgtgagttcgccgctggtggctccggatgacgtccggttgtttgccttcgtgcgcttcaccaccggggatgccatgagcaagaggtccaagtttg

SEQ ID NO: 619354 - DNA, 83 bp, Homo sapiens
cgaaggcaccgacgtcatcatgctgaccaccaatcagatccgtaaggtctcggcgcggaagatggccggcggcgtggacggcc

SEQ ID NO: 619355 - DNA, 112 bp, Homo sapiens
tagaccggagctgttcctatttggccatcttggctcctcgcccccagttttgactgctgagaaggaagaatttgaacatcaacagaaagagctggagaaagtttgcaacccc

SEQ ID NO: 619356 - DNA, 100 bp, Homo sapiens
aggacaaaggtgccttctgtagacactcctgctctcttccatccccatcttacagatgtattaagaagcctcagggaagcagagactttcaaggaacaag

SEQ ID NO: 619357 - DNA, 82 bp, Homo sapiens
gacttcttgtatgcatactccacagcacctggaataatgtatttgtggccttggacatgaggcagtcagtcctctgttgctg

SEQ ID NO: 619358 - DNA, 99 bp, Homo sapiens
atggctcactatgtgcctgatatcatgccaattgaatctgttattgcaaggtaaataggatttgtggccgccctgtaagaacacccacacaaagccccc

SEQ ID NO: 619359 - DNA, 85 bp, Homo sapiens
agaagaaaatctctgccacgtccatcttctttgaatctatgccctacaaggacctgaaggagaagaaggagaaggtggaggagaa

SEQ ID NO: 619360 - DNA, 75 bp, Homo sapiens
gaagtaggggtgcacctcagcactatcccaagactgctggcaacagctctctccttcctgcttcctccttgctgt

SEQ ID NO: 619361 - DNA, 82 bp, Homo sapiens
aagcaaggcaaaccccagcacttaagcaaacgggaattctcgcgtttaactatagatcaacacatcatcttgcatctcatgg

SEQ ID NO: 619362 - DNA, 101 bp, Homo sapiens
tttgtggaccgtggcttctatagcgtcgaaacgttcctcctgctgctggcacttaagtgtggggtgatcagccccagatttgacgtgcaactcaaagacct

SEQ ID NO: 619363 - DNA, 100 bp, Homo sapiens
agaatctggctcggaggaatctcagtagggacaacaggcaggagaattatgggagcgcatttccccagggtgtgggttgctgaccgaggaaataaaagaa

SEQ ID NO: 619364 - DNA, 90 bp, Homo sapiens
gaatgatgtatttgatcctgattctacccaagtacatatgatttcagctgcaatggcaggaattgaatgatctggcacgggaccctccag

SEQ ID NO: 619365 - DNA, 90 bp, Homo sapiens
ccctttagccatgtggatacctacggagcacgagaaatacggcgtggagcaatgctaagaagacgtttggtttaaagaattaaaaggaag

SEQ ID NO: 619366 - DNA, 75 bp, Homo sapiens
tgaacatctgcagtgtcgtctcgctgtccgcgtctcccaggacgcatgaagacaaggcgaccagccagctcctgt

SEQ ID NO: 619367 - DNA, 97 bp, Homo sapiens
tctggagcaaagaaaagagccctacaatgtgaagatacataagatcgtagccagacccccaggaaacttttgagaagaactttgaaagagaaaccca

SEQ ID NO: 619368 - DNA, 100 bp, Homo sapiens
gtactgttgaaagcgacaagtggaggcgccgctctagcggccgggactctgaactatggcgcactgaacctaccagatgtatttgggttggtcgtcctcc

SEQ ID NO: 619369 - DNA, 100 bp, Homo sapiens
agtcaaatatacaaatcactttagaatcttggctctaagtgccacaccaggtagtgatataaagggtccaccaaaatatactaaatctgttctgaaaaag

SEQ ID NO: 619370 - DNA, 90 bp, Homo sapiens
ggcgcagcggcggcagcggagagcgagagaggggagcagctaatggcagcattagccgctgttgggcctcctaatcctcgggcagatcca

SEQ ID NO: 619371 - DNA, 83 bp, Homo sapiens
ctcaacagaatgcttcaagtgtttgtgaagggagccatggctgccacgtactccgcactcaacagctccaagcccacccccca

SEQ ID NO: 619372 - DNA, 90 bp, Homo sapiens
gctggaacccctggagcaggaggaagcggtgattctccaggccttggaggcaaggccagaggaactgactccccacgtgatggtgctcct

SEQ ID NO: 619373 - DNA, 100 bp, Homo sapiens
atcccagaggaaactgacggagacgcagatgtggacttgaaagaagctgcagcggaggaaggcgaggctattgagggcacctacattgacaagaaatgcc

SEQ ID NO: 619374 - DNA, 75 bp, Homo sapiens
caccagcaggacccgaggccaggagccaggggcccagaagaggcaattgcttttggatcgttccatttacaatgg

SEQ ID NO: 619375 - DNA, 50 bp, Homo sapiens
catggaggctgagcatttattcagctatgttagatactaaagaaggcttc

SEQ ID NO: 619376 - DNA, 50 bp, Homo sapiens
taaacttgaggatgttgctcagggaggcttcctgggaaactggaaggcag

SEQ ID NO: 619377 - DNA, 74 bp, Homo sapiens
gtgattttcctgcatggattgggagatactgggagatacaactcgtcaacgaatcaaattcagtgatgacagag

SEQ ID NO: 619378 - DNA, 82 bp, Homo sapiens
gaatccgagaagagcagagcggagggagccccagacacgggtttgccttcccggattgggcctacaagccagagtcgtcccc

SEQ ID NO: 619379 - DNA, 90 bp, Homo sapiens
aaagcagtctaaacctgtgaccacccctgaagaaattgcacagaataactgaagtgaagtgatggactccgatttggagagtagtaagac

SEQ ID NO: 619380 - DNA, 74 bp, Homo sapiens
cgcggatttccatcaccagggccgagaacgacagggcgccctgcgtccggcagaggaggcgagcatcccgctca

SEQ ID NO: 619381 - DNA, 101 bp, Homo sapiens
cgcccacgtagccccgcagctgcagccgcctgaccacggcgactggacttacgaggagcagtttaagcaggaagctcttcgtgggcggtcttgactggagc

SEQ ID NO: 619382 - DNA, 101 bp, Homo sapiens
cttcagcagcgcaggcggtggtccctgaggcccgtggaaggagtcaaacttgcgggaattttgcagcaattctgtggtgttcttggtcacacatttatgga

SEQ ID NO: 619383 - DNA, 78 bp, Homo sapiens
gccagcagccgtccggagccagccaacgagcgtgcaagaagaaacacacgctgctgtgccccgactttgcccgcaggg

SEQ ID NO: 619384 - DNA, 100 bp, Homo sapiens
agcagctgttggttactccaaagctgatatccccgcactagtgaaaggaacgctgccccagaagacaaatctgaccttgaaaacagtgtgatgcagaaga

SEQ ID NO: 619385 - DNA, 82 bp, Homo sapiens
cccacccggagttcagcgcggactcccccagcccaggtccggcctctttggcctacccccgttggctccgctgccccaggtc

SEQ ID NO: 619386 - DNA, 100 bp, Homo sapiens
tgcattttctaagctgaaggagaagtttatgaatgagttgcataaaattccatgatttaaatgtggatgaatttgaggaaatattcaagacaaaagccca

SEQ ID NO: 619387 - DNA, 78 bp, Homo sapiens
aaggagagcaattagtgagacaggttttcaagctagaaatgcccttcttcagtcaaatctttctcaaactcagctggc

SEQ ID NO: 619388 - DNA, 99 bp, Homo sapiens
ggaaaactgtaaaggcaaagaggggagtgcactgagccatgtacgcaaaatatcctattttgtaacggattatgatccaaccattgaagattcttacac

SEQ ID NO: 619389 - DNA, 51 bp, Homo sapiens
gcccagttttccggagttgcgagagaagaagaaggaggttcctgctgtgcc

SEQ ID NO: 619390 - DNA, 100 bp, Homo sapiens
gccggccgcccagacgctgcccgcgggcccggccacggcggagccaagcaggttacgggcaggacttgagtggcttcggacagggcttctcagaccccag

SEQ ID NO: 619391 - DNA, 100 bp, Homo sapiens
aaaactgtagagctaagaggaaagaaaattagattacagatctggcctccccatggccacccatggaccagtcggcattcacttcctcccttctgcggcc

SEQ ID NO: 619392 - DNA, 73 bp, Homo sapiens
tgaactgctccgatcccactagtgagagtgatggccaaaaaatgagcaaacggaaaaagaattatccagatcc

SEQ ID NO: 619393 - DNA, 83 bp, Homo sapiens
cgccgcgggacctctccgggccatggtatggtttgaagtggtgaacatggatttttctcggcttcacatgtacagtcctcccc

SEQ ID NO: 619394 - DNA, 98 bp, Homo sapiens
cgagcgcccctccgagctggggttggacgctgccagtttgcacagcagcagggactttgaacatgtcggggatcgccctcagcagactcgcccaggag

SEQ ID NO: 619395 - DNA, 100 bp, Homo sapiens
gtgtatgggcctgacctcgtgaacatctcccatttgaatctcgtggctttccaagaagaagtggccaagatcccagattacaggaatgcagtaatcgtgg

SEQ ID NO: 619396 - DNA, 101 bp, Homo sapiens
cacctgaaaatgagcaagaaaatcgcccagctcaccaaggtggtgcccaggcaacatgggtgactggagcgccttaggcaaactccttgacaaggttcaag

SEQ ID NO: 619397 - DNA, 73 bp, Homo sapiens
caccgacatggaacagggactcactgggggtacaatgttagctgttctaaaaaatttgcacttagtcgttgga

SEQ ID NO: 619398 - DNA, 100 bp, Homo sapiens
gatgcgctgccgtattttgatcaaggtgatttgatgaaggctgctgcaggagagttcgcagatgatccctgctcttctgtgaagcgaggcaacatggttc

SEQ ID NO: 619399 - DNA, 75 bp, Homo sapiens
acctacagccccgacgaacatttctgggtgacactcaacaggattcccgaaactggcgatggaatatgagaggag

SEQ ID NO: 619400 - DNA, 50 bp, Homo sapiens
aatcattgagctctatgataggttactggaccattatcagaattgcaaat

SEQ ID NO: 619401 - DNA, 75 bp, Homo sapiens
tgacagcactgtagaacagctttatgaaacagcttgcttcctacagttttacaggcgtttatcagaggaaatgac

SEQ ID NO: 619402 - DNA, 75 bp, Homo sapiens
gaacctctatgccgacatcgacgccgcctggcaggccctgcgcaccaggttgcccccaagtttcctggcagtgtg

SEQ ID NO: 619403 - DNA, 83 bp, Homo sapiens
ggaccatgcagagcagcccctcccctgctcaccctcagctcccagtcctacagacacaggccaaaaagcaaatggatttccac

SEQ ID NO: 619404 - DNA, 87 bp, Homo sapiens
agaaggtggtggtccaccccctggtgctgctcagtgtggtggatcatttcaaccggatgaaaactttcggaagagaaagttgcctgt

SEQ ID NO: 619405 - DNA, 50 bp, Homo sapiens
gcactgcctctggcatccccgacttcaggccagagaaggatagctcagcc

SEQ ID NO: 619406 - DNA, 78 bp, Homo sapiens
cgaaaagtcagtgcagcgccgagtccccggctggagggtccccggggagggccaggtgaatcagctcccggccgactt

SEQ ID NO: 619407 - DNA, 74 bp, Homo sapiens
aacctgggaagtggaaccggatatttaagtacaatggtgggcttaattttaggcatcaagcatgatggaaccat

SEQ ID NO: 619408 - DNA, 97 bp, Homo sapiens
gtcttgcaaagtgttggaggacagacattaacagtatttactgagagctcatcagtgatgctacaggacgaagaggaatggataaaaacattggcga

SEQ ID NO: 619409 - DNA, 100 bp, Homo sapiens
ccaagatggacgccgagcaggatcccagtggcggcgggaaggccaaggtctctggcagacccagcagccgaaaagccaagtccccggccccgggcctggc

SEQ ID NO: 619410 - DNA, 100 bp, Homo sapiens
ctgtacttctcgagcttctcagtcagtcctgcctcatcccagccatgtcatcttatctacgaaatgattcaggtccaggggcaagttcatcctactctcg

SEQ ID NO: 619411 - DNA, 75 bp, Homo sapiens
gaatacattcctgattacctgccacccattgtgtcttctcaagaagtgtaactcacacagcaaaagtgacaatat

SEQ ID NO: 619412 - DNA, 60 bp, Homo sapiens
catcgatgcaggggcctcaattaatgtatctggatacaagaccctcctgaaaggaatttc

SEQ ID NO: 619413 - DNA, 100 bp, Homo sapiens
aggaaactgaagactctctgcttttgccacagcagttcctgcagcttccttgaggtgtgtgagcagagctgcgcggccctgtgcttcctggccctgcgta

SEQ ID NO: 619414 - DNA, 85 bp, Homo sapiens
gcttgccctggtcttgctcggccgatgaagtgcagaggtttttttctgggctgccagaggaacccgaccagaacctgtccagccc

SEQ ID NO: 619415 - DNA, 83 bp, Homo sapiens
ctccaatgggcctttccagcccgtggtccttctccatattcgagctagccacagtgcagcctggccagaatttccacatgttc

SEQ ID NO: 619416 - DNA, 75 bp, Homo sapiens
agcttgagtttggggccttctgcagctgaaatcaatcaaggctaacagagaccctgatgctggaattgatgaagc

SEQ ID NO: 619417 - DNA, 83 bp, Homo sapiens
atgagcgcccctcgccaccccgtgtcccaggcccggcctttctgacaagaggaactgtggctgcaccatctgtcttcatcttc

SEQ ID NO: 619418 - DNA, 82 bp, Homo sapiens
ctccactttcgccagcccgtgccgcgagcgcggcctgcaggaggctaaccttgccgcgggccgagccctgcctcgccatgga

SEQ ID NO: 619419 - DNA, 101 bp, Homo sapiens
cggaatggagaaggaagaggagtcggaaacttggatttaactggccagaagcaggtattcaaagcagagaacaatccctgggtgacccccattgcagacca

SEQ ID NO: 619420 - DNA, 100 bp, Homo sapiens
gctgcgcttgtcaccatcatcaccgtgcccgtggttctgctgaacaaaggcagatttacttaaatccattgtttcaagaatgaaaaaggcagtagaagat

SEQ ID NO: 619421 - DNA, 97 bp, Homo sapiens
cagaagcatctgaagaccatggatcacaaccggaaccgcagggtatggcactaggtgccccagaagtgtgcaaccaggtcacctcatcccagtctgt

SEQ ID NO: 619422 - DNA, 75 bp, Homo sapiens
acaagcagtttgaattggctctgcagctcgcaattcatggttgtcaaatcctggaaacagtctacaaacacagct

SEQ ID NO: 619423 - DNA, 102 bp, Homo sapiens
ccatcgtcaccgtgtgggagcgggagctgcggaaaggccccttcacagatgtagtcactacaaatcttaaattgcgaaatccatcggatagaaaagtgtgtt

SEQ ID NO: 619424 - DNA, 100 bp, Homo sapiens
acttttaatcatctttattatctcattgaagcttggaattacatagctggaaaggatcttacagggatgaagacatggatggagaatgggaggctcctca

SEQ ID NO: 619425 - DNA, 83 bp, Homo sapiens
gggaaggggcacgggcacccccgcggtccccgggaggctagaggttaaagctgaagctcaacaaagatatagtgatctctgtg

SEQ ID NO: 619426 - DNA, 75 bp, Homo sapiens
gcgaggcagctgtactaggactgggaacgggtaaaatgtcggttccaggaccttaccaggcggccactgggcctt

SEQ ID NO: 619427 - DNA, 80 bp, Homo sapiens
cagggcctgcagcgggagctggacggcgagcgcgagcggcgcgagaaaagctggaagtcgagtgtgctactcaactcagg

SEQ ID NO: 619428 - DNA, 100 bp, Homo sapiens
aagcaaaacagagtcggagtgaaaagaaggcacggaaggctctgtctcccacaagttcctgtcactaccgatgttggttcgccagctttgggactctgcg

SEQ ID NO: 619429 - DNA, 90 bp, Homo sapiens
atagtgagccaaccacctgggccagtattatcaggcatggagatgctactgatgtcagggttcatcatgcctagtggcgtataagaagac

SEQ ID NO: 619430 - DNA, 100 bp, Homo sapiens
cgtctgaactaggatgtcccgacatgaagggaaatcctcattgacgattcaatttgttgaaggccaatttgtggactcctacgatccaaccatagaaaac

SEQ ID NO: 619431 - DNA, 90 bp, Homo sapiens
aatgaacctgccacaaccaaattagaagaaatgcttggtattgatgaagatgaccctactgctgatgataccagtgctgctgtaactgaa

SEQ ID NO: 619432 - DNA, 75 bp, Homo sapiens
cgacccgcagtccatctgactcctgcttcccgggtgttgctcgtgtcagataccaggcccaggttccatgatgcc

SEQ ID NO: 619433 - DNA, 98 bp, Homo sapiens
aagagagaaacagcagcaacatttttgaaaaagtgggttgccagcgttgatgtggtggagaatgaagaggccagcgctagcatcattgttaaaatgac

SEQ ID NO: 619434 - DNA, 99 bp, Homo sapiens
cagcattgggagcggccgagccatcccaattaaacagggaacctcaggacctgacccaaccactgtctacgtggacatgagagccctgagacacgacag

SEQ ID NO: 619435 - DNA, 134 bp, Homo sapiens
cgttaattaacgtgccaatggattcagaaccaccatctgaaattagcttaaaaaatgatctagtcaaggatgctatctaaatgggccttttaattcaaatctactgactatcccgaagcaaaggtcatcttctg

SEQ ID NO: 619436 - DNA, 98 bp, Homo sapiens
gcaggagccacacgtcggtccctggacgacttgtcggcgccgccgcaccaccgcagcatccccaacggcctgcacggcccctccagccagcgtcaggt

SEQ ID NO: 619437 - DNA, 49 bp, Homo sapiens
gcactgccgcttcggtcactatgcacagccagagaacaacacatcacac

SEQ ID NO: 619438 - DNA, 100 bp, Homo sapiens
cagtacctgcagaaggtctctggagacatcttcagcagcagaaagatgaaggtcttagaatcattgattggaatgatccagaaattcccttatgatgacc

SEQ ID NO: 619439 - DNA, 75 bp, Homo sapiens
cagaagatgaggagactatgtatctgcggagggtgaaggttgccgaactgtccccctggctggacatgtggggtt

SEQ ID NO: 619440 - DNA, 51 bp, Homo sapiens
tcactgcagaggtgctggagctggcagaattactgggagatgtactcaaag

SEQ ID NO: 619441 - DNA, 116 bp, Homo sapiens
tgaacaagactttcaataggggccagtatgcttcgcttcatccagaagttttctcaagcatcttcaaagtctcttcaagaaaatgaggaggaggagattgggaacctagagcttgc

SEQ ID NO: 619442 - DNA, 100 bp, Homo sapiens
gcgggcagcaggatggtggtggatgcggccaactccaatgggcctttccagcccgtggtccttctccatattcgagggggacttgatctcatcttcatgc

SEQ ID NO: 619443 - DNA, 100 bp, Homo sapiens
gccaagagccaggaccccctagaagtctagaaatgctggtagcagtgtttgatgagcaggatccacatcacggaggtgatggcaccagtgccagttccac

SEQ ID NO: 619444 - DNA, 80 bp, Homo sapiens
gggtgaaggaaagtggctgcagtgacacaggacatggatttgattgacatactttggaggcaagatatagatcttggagt

SEQ ID NO: 619445 - DNA, 100 bp, Homo sapiens
tgtggtcagaaatcagctggtgccgaggtgaaaggccagaagcggactcctagaagaggggagcagcaaggatggaatgacagccgtgggccggagggga

SEQ ID NO: 619446 - DNA, 82 bp, Homo sapiens
atcagttcaggcatccgtgagaccattcgctaccttgtgcagcacaacatggcctgtcctcctcggtacacatgctgtccct

SEQ ID NO: 619447 - DNA, 100 bp, Homo sapiens
ccgtactataatggtccccatcttaatttgaaagcgtttgagaatcttttaggacaagcactgacgaaggacgaaatagattgtttacagaaagaagtag

SEQ ID NO: 619448 - DNA, 76 bp, Homo sapiens
gggagtcgcgcttcttccccactcccgagacagctgctctgttaaaagcgaaaatgaaacaattgcctgcggcaac

SEQ ID NO: 619449 - DNA, 75 bp, Homo sapiens
cacagaaattaatgcgaacagacagacttgaggtctgctaaaaggtcagagtaatgcagaatgcgtgccttcatc

SEQ ID NO: 619450 - DNA, 50 bp, Homo sapiens
ctgaaggaccctggtggaggaagaaagcatccagcacgtgtatggtgccc

SEQ ID NO: 619451 - DNA, 80 bp, Homo sapiens
acgctgcacctcccgcgccgcacggtggacgagcaaacggggattcagcgtccgatcctttggaacagggactcacgtga

SEQ ID NO: 619452 - DNA, 83 bp, Homo sapiens
ctcccacggctccccccaccaccagcccagctcctctcctccaaacaagctgtcaggaggggcaactgaagacggaggtgccc

SEQ ID NO: 619453 - DNA, 98 bp, Homo sapiens
ccaccttgccagccccagttctccttgacggagcccatgaaggccagtcggagagcgtgcgggacgtgcagttcagtatccgggactacttcaccttc

SEQ ID NO: 619454 - DNA, 100 bp, Homo sapiens
tttaatgtctgaatctggagaaggggaaatctccccacaaagagaagtctcaagatcccaggcatcgttggcttcacagtatgactgatgatcctccaac

SEQ ID NO: 619455 - DNA, 74 bp, Homo sapiens
aagaggcagcaaagctgtatgaccttgccaagatcaagcttcaggagtctccggaagacatgcctgcagggcag

SEQ ID NO: 619456 - DNA, 75 bp, Homo sapiens
gggacaagtactggaaccgctttcgagacagccttgcaaaggaccatcgcatgaaacttatgcaacaacaacagg

SEQ ID NO: 619457 - DNA, 97 bp, Homo sapiens
agatcacaacccaccacctacatgagcagcatgaggctgaaatcttccagctgaagagtgaggtacagtctttgcccgctgcctgatttttcctctc

SEQ ID NO: 619458 - DNA, 74 bp, Homo sapiens
tttgttccctgcagccctcccacgagcagcccgacggccatggaggctgaagagacgatggaatgccttcagga

SEQ ID NO: 619459 - DNA, 74 bp, Homo sapiens
aaaccattaagcttgtgcgtcaagtcatgtgagggatgtccactgttggagcagttgaacatttcctggtgtga

SEQ ID NO: 619460 - DNA, 83 bp, Homo sapiens
gaacgaggcaaggagctaaagcagcgtgcgttcagccctgggtggtggtcgtggtgacaggactggccgctatggagccactg

SEQ ID NO: 619461 - DNA, 50 bp, Homo sapiens
gctgaccgctctggcccagggtggtctgcctcagccacctccctgacgct

SEQ ID NO: 619462 - DNA, 90 bp, Homo sapiens
ggcgtattctggtaatttcgaggagaacctaaaggcagacccagaagagctttttacaaaactagagaaaattgggaagggctcctttgg

SEQ ID NO: 619463 - DNA, 75 bp, Homo sapiens
tggaacccactcggggactctgccttttaccggtgagccctattcccagaggcaggtggtgctgaccctgtaacc

SEQ ID NO: 619464 - DNA, 98 bp, Homo sapiens
ctcttgtcctatgatggcagcagttatactacgtatatgaaagaggaagtggataggtccaaactaaatgacatgatagatgctattccaaaaagtaa

SEQ ID NO: 619465 - DNA, 100 bp, Homo sapiens
cggggaccgtccagcccagcgattctcagtcagcaattctgtggtgttcttggtcacacatttatggagtttctgaagggcagtggagattactgccagg

SEQ ID NO: 619466 - DNA, 100 bp, Homo sapiens
ataacgttgaacagtcctgtatcaaaactgaagatggtttgaaacagcttcacaaggttatgaagacagtatggagtttccagaccatagtagacatttg

SEQ ID NO: 619467 - DNA, 90 bp, Homo sapiens
ggatcgtgaccgagaccgtgaccgagagcgtgaccgagagcgcgaatatcgtcatcgttagaagaccctgcacttgatggaccagctggc

SEQ ID NO: 619468 - DNA, 80 bp, Homo sapiens
aaacaagaaaacatcaaagaggtctagcaaagcttggatttacactgggcaacgtggttggaatgtatctggctcagaac

SEQ ID NO: 619469 - DNA, 98 bp, Homo sapiens
tgaacattcatgcacaaatttttatgtggagctcggtcaaggagtgtgatgactggcgagcagatggctgccttccatccatcgtccacccccaaccc

SEQ ID NO: 619470 - DNA, 100 bp, Homo sapiens
caaggactcacagtggctgcaagtaagttcttggagacgtgctgatgacaggaaagatgaccgggtggaagagcgggaccctcctcgtcgagttcctccc

SEQ ID NO: 619471 - DNA, 100 bp, Homo sapiens
cagctggtgtcatcctctggggtgacgcggggtacaccacaagcacggtttccatccttggggaatgaccacgcaactgggcccagccctggtgctgggg

SEQ ID NO: 619472 - DNA, 74 bp, Homo sapiens
gatcagccgcccggccaagctatcttctcgctagcaggaacaagatcactcaaggtgaaggataatctactaat

SEQ ID NO: 619473 - DNA, 50 bp, Homo sapiens
tttcagttcaaccaaaatctcttgtacgatggagtctcgctctgtcaccc

SEQ ID NO: 619474 - DNA, 82 bp, Homo sapiens
cggcctggagatggagttcgactgcgagggcctgagacggctgcttggcaagaatcagcatgattcttcagaggctcttcag

SEQ ID NO: 619475 - DNA, 101 bp, Homo sapiens
attctgattcttgtcactttaattacttgagaatttataatggaattggagtcagcagaactgaaatagatttttgatgaaattgagtcatgaaactgtaa

SEQ ID NO: 619476 - DNA, 82 bp, Homo sapiens
cccggacctctggagtgcccccagcccagagcccggccactcttcacctccaccatgagcctggacatccagagcctggaca

SEQ ID NO: 619477 - DNA, 124 bp, Homo sapiens
cgagtcccctgatccccaaccgcactgaggataaggaggagaacaggaagagcacgatgggctttttctcctccgtgacagccagagtaatccaaaggcatttgtactcacactgtgtcatcac

SEQ ID NO: 619478 - DNA, 83 bp, Homo sapiens
cttagaactttaggaaaaggagactggtttggagagaaagccttgcaggggagctccccagtgtcctcctccttcatcagctg

SEQ ID NO: 619479 - DNA, 117 bp, Homo sapiens
accgcgcgcagggcctgcagcgggagctggacggcgagcgcgagcggcgcgagaaagtgtgaacccacatccctgcccccagggccacctgcaggacgccgacacctacccctcagc

SEQ ID NO: 619480 - DNA, 96 bp, Homo sapiens
cggagcttgacccgtccatcgctgtgatgccactgccgccaggagccctgtaacatcagccatcgtcaaccccaccgtgttcttcaacatcaccgt

SEQ ID NO: 619481 - DNA, 90 bp, Homo sapiens
ggaagatgcaagcggtttgggaccttgaacaaggcaaatatggttttgactcacagatgaatgcttctcacccggaaacaaacttgccag

SEQ ID NO: 619482 - DNA, 100 bp, Homo sapiens
tgaagaccacaataaaagagacctctacttagctcagcaattcttaccttattcaagaaatccatggtgaaaggtttggattcctatgaagaaaaggagg

SEQ ID NO: 619483 - DNA, 100 bp, Homo sapiens
gtcggacctctatgccatgaacttcaatcccatcatttccagaaaggacatcacaggatattggccctcctacaatgttcctttccatgaaaaaatctac

SEQ ID NO: 619484 - DNA, 75 bp, Homo sapiens
attggagaaaatttgcctcaaagcgagtctcaaaggtgttcctggatttgatctcagtggttcaatagcatcccc

SEQ ID NO: 619485 - DNA, 75 bp, Homo sapiens
ccgcgggtctgctctgtgtgccatggacggatatgcacccaatgtccagggagcgtgcaaaatttgtcaaaagtg

SEQ ID NO: 619486 - DNA, 103 bp, Homo sapiens
gataagcctggcgcggaacggtcgtggagaagaagagctgctgatgaggactgggacagggaaatcctcattgacgattcaatttgttgaaggccaatttgtg

SEQ ID NO: 619487 - DNA, 75 bp, Homo sapiens
atatgactctctgcctgaaaatagcgagacagctctactgagatgaagaaagaaaaagaatacctgctcagctcc

SEQ ID NO: 619488 - DNA, 100 bp, Homo sapiens
gggggcaaaggctaggcgctagggcggcggcgccagcgtagagcggcggtttggaggaaagatgagacggcagaggtggaggagacactgaagcgactgc

SEQ ID NO: 619489 - DNA, 100 bp, Homo sapiens
cgaggctcggcacggagatggcggcgcgctcggcgcaggtggaagcagggaaaggcctggagatgaggaagctggttctctcggggttcttggccagcga

SEQ ID NO: 619490 - DNA, 109 bp, Homo sapiens
cgggcacctccgagcgcaaggacagcgcgaggtccgcgcagcccagcgcagccatgtgagaagccctaccactgcaactgggacggctgcggctggaagtttgcgcgct

SEQ ID NO: 619491 - DNA, 97 bp, Homo sapiens
ccccaactacacggagttcaagttccctcagattaaagctcacccctggacaaagatgttccagcaggtcgacttcaacaggaagccagggcgcatg

SEQ ID NO: 619492 - DNA, 100 bp, Homo sapiens
tcacaccttctttgatcaccaggatcaggtctgggagaagaaccggaagctcaagagcttcaacctgtcagcgctggagaaacatgggcctgtttatgag

SEQ ID NO: 619493 - DNA, 100 bp, Homo sapiens
acggtcccagcaccggggaggactggagagcgcgcgctgccaccgccccatgtctcagccaggcctggtccagatccctgtgagcatgtaccagactgtg

SEQ ID NO: 619494 - DNA, 75 bp, Homo sapiens
cctcttgaggatcgaatcttcactcccgctgtctcagcagtctacagcacgaaaacatgtctcaacttagcgagg

SEQ ID NO: 619495 - DNA, 100 bp, Homo sapiens
ctgagcggagtcgtgcggttggtgggggagccctgccctcctggttcggcctccccgcgcactagaacgacctggagtggaagatcatttatgttggctc

SEQ ID NO: 619496 - DNA, 100 bp, Homo sapiens
gacgggctcagggaagacatacaccatgggggaggccagtgtgggttgtccccccggcacgctccacagctggtgacccgacagttcctggctccttgtt

SEQ ID NO: 619497 - DNA, 75 bp, Homo sapiens
tcatatgctaggccactatacagatgatttggagttccatggagtgatgagattttattttcaagataaagctgc

SEQ ID NO: 619498 - DNA, 101 bp, Homo sapiens
cctcctagaaattccccccgaagaagactcccccacatctggcaggaacgaatttcatatacacctccagagagcccagtgccgagttacgcttcctcgac

SEQ ID NO: 619499 - DNA, 75 bp, Homo sapiens
attgtacaccgggtacaaggtgttttccagcgtgcctcagcaaaatggaaagcatttcagaagatggacacaaag

SEQ ID NO: 619500 - DNA, 74 bp, Homo sapiens
cagcagttggcacacatggttaaggaacaggaggaaaccattcagagtctattatcctcccagtccacaacgct

SEQ ID NO: 619501 - DNA, 90 bp, Homo sapiens
taagaacacctgaacaaggatctaatgggactgatggggcatctcaaaaaactcccagtagcactggccgggtgagagcaaaactttcag

SEQ ID NO: 619502 - DNA, 90 bp, Homo sapiens
cgcctgccccgccatgaatgaggagtacgacgtgatcgtgctgggcaccggcctgacggtcttcaataaactcatcaggagatataagta

SEQ ID NO: 619503 - DNA, 100 bp, Homo sapiens
gagtggcgaacgcagtatgcctgcccacctttcgatctgactgaatgttcattcaaatgggcaaaacatgtagctgagaaaaatggctacttgggccatg

SEQ ID NO: 619504 - DNA, 50 bp, Homo sapiens
gctgttgtcccaggacagaaaccatatgttttctggcaaaggccttcctg

SEQ ID NO: 619505 - DNA, 75 bp, Homo sapiens
acccagccaaagcccgggacctgtacaagggccgccagctacaagagctggtgatgctgctggagtggtggtcgg

SEQ ID NO: 619506 - DNA, 100 bp, Homo sapiens
tggaagaaccatcctataaacgggaaagattgactagtttcacaggtggataattactgtaccttcctcatggaaaaagttttatttaaagtgttatttc

SEQ ID NO: 619507 - DNA, 90 bp, Homo sapiens
aaaagctgcgcgtcccttaatttcctcggcgggcaatgctggacgtggctgcaaaccagggctggctggtgactgtcctgaatatcacca

SEQ ID NO: 619508 - DNA, 50 bp, Homo sapiens
accaggagaggagggaactgcggagcggctgcagatctgggacacggccg

SEQ ID NO: 619509 - DNA, 96 bp, Homo sapiens
gtcggggggcacgcagctgaagctcatcatgaccttccagaattacgggcaagcgctgttcaaacccatgaatgcttttatgggaccaacgctggg

SEQ ID NO: 619510 - DNA, 100 bp, Homo sapiens
ttcacctctagtcactgtcgcagggacaggagtactccacagaggataaatttcaacctccggggccacaatagcgagatgccacctcagtatggacagc

SEQ ID NO: 619511 - DNA, 100 bp, Homo sapiens
gacaatgagaccgactgtggctgggcaccgtttgatcctttctctgctactgtagatgctgttgatgatgccattccaagcttaaatcctttcctcacaa

SEQ ID NO: 619512 - DNA, 100 bp, Homo sapiens
tcaagccaaactttgtgattcaggagaactggtcgccatcaagaaagtattgcaggacaagagatttaaggcatttatgtttgaatcatctttaagtctg

SEQ ID NO: 619513 - DNA, 75 bp, Homo sapiens
agtggagcgtgtcctgaaggagttccaccaggccgggaagcccatcgggaaaccacccctactcctaatcccccg

SEQ ID NO: 619514 - DNA, 82 bp, Homo sapiens
ccgagggtttgatgaaggtggaggcagcgcggctctcaggagggtgtgaagacagagaatgaccacatcaacctgaaggtgg

SEQ ID NO: 619515 - DNA, 50 bp, Homo sapiens
ggagtgattgcccggcagagcgcgatttacattggtgcagaagcatacag

SEQ ID NO: 619516 - DNA, 50 bp, Homo sapiens
tggcaaagtggaaaaatgtgcggcttcaagatatatgcctgatatttgtg

SEQ ID NO: 619517 - DNA, 82 bp, Homo sapiens
gacagccgcccctggtgcacacaccctcgtattctcctgcccttccccagatgcgagccacccctctggctgctcctgcggg

SEQ ID NO: 619518 - DNA, 88 bp, Homo sapiens
tccattggatttaaaagacagtcctcgtcagcactgactttcagctatggaatcggtcttcatcctccaggtccacctttagcaagac

SEQ ID NO: 619519 - DNA, 100 bp, Homo sapiens
gtgggggagagaataaaactccagcgagatccgggccgtgaacgaaagcagtgacggaggagcttgtaccaccggctgaagaaatgtcaacaattgggag

SEQ ID NO: 619520 - DNA, 98 bp, Homo sapiens
gcaagaaggccctggacacagcaatatctctgggctttcacagggaaatgatgtcactctgaaactcaggctggaatacactggcatggtcatacctc

SEQ ID NO: 619521 - DNA, 100 bp, Homo sapiens
ggaagatgggaagaaagaagcagctgccaggatgctccagaccttgtatgattacttctggtgggaacgtctgtggctgcctgtgaacttgacctgggcc

SEQ ID NO: 619522 - DNA, 82 bp, Homo sapiens
ggagactttagctgtaaggaggagccagaaattgacagcccaggggactttctgctgctgaagtaatgcaatggtctcaatc

SEQ ID NO: 619523 - DNA, 99 bp, Homo sapiens
atcacaagatgaacaatgagaagcaggcagaagattgcatcacacgttgcaggagaaataacaaggcattgaagaatggcagatgaacggaaagatgaa

SEQ ID NO: 619524 - DNA, 100 bp, Homo sapiens
cctcaacaatggtcatgctttcaacgtggagtttgatgactctcaggacaaagcagatgtggaagatgtcaagtttgtgatcaactatgactatccaaac

SEQ ID NO: 619525 - DNA, 83 bp, Homo sapiens
cctgcatatctgaagcggctcccagtccctgaaagcattaccgggttcgctaggctcacagcattttgaaagcgaagcagaag

SEQ ID NO: 619526 - DNA, 90 bp, Homo sapiens
gcgaagtccccggagaactctaccctggaggagattctggggcagtatcaacggagtctccggggaaaatatgagagccacacccgtgtt

SEQ ID NO: 619527 - DNA, 75 bp, Homo sapiens
ctgcagcataagaaagtggatgaatacacagacactgacctgtacacagagtctcgctccgttgcccaggctgga

SEQ ID NO: 619528 - DNA, 96 bp, Homo sapiens
gagcaacactccggatcagacactggaagtgtagaacgtcattcagagggccgagatggacgaaaaaatgtggttccttgtgttctctctgtaaat

SEQ ID NO: 619529 - DNA, 100 bp, Homo sapiens
tttacttggtgcaggaaggcagtctttgctacgtacagcaaaaggttttggcttgtggttaacgggcatgttgataaacatccattcagatcatatccta

SEQ ID NO: 619530 - DNA, 100 bp, Homo sapiens
atcaaaagaatatttagaatgcaggatggagagagctggtggagttgagatctataatggagatcgtaaaataaaggtttccaacaccctggaaagccgg

SEQ ID NO: 619531 - DNA, 76 bp, Homo sapiens
ctaaatgatgggcagtcatggtcccagaaacgtcactatcaagaaggtacaggtttgcagattccgccagcagcac

SEQ ID NO: 619532 - DNA, 80 bp, Homo sapiens
gcaaggagctaaagcagcgtgcgttcagccctggggtactaactagggagctctggcagtgaaccttattgacgtggaaa

SEQ ID NO: 619533 - DNA, 132 bp, Homo sapiens
ttaggaactgggtccccaaagtcttggaacagcgacgacaaggcttggaaacatacttacagagatcctacaagccataagactttgcagaaatgtccttctacagaaccagaagaaaaaggaaatatcgtg

SEQ ID NO: 619534 - DNA, 82 bp, Homo sapiens
cgaagctaaagtggattcaggagtacctggagaaagctttaaacaaacaatgcagatcttcgtgaagactctgactggtaag

SEQ ID NO: 619535 - DNA, 100 bp, Homo sapiens
ccgcctgcgcctggagaggatggaccgcatcgagaaggagcgcaagcaccagaagtgagaaagatcagtctaaagaaaaggagaagaaagtgaaaaaaac

SEQ ID NO: 619536 - DNA, 75 bp, Homo sapiens
caacagaacaaaggaagagtatggctcctgaacctacacagccaagggaagagatggtgttgagtggaaaataca

SEQ ID NO: 619537 - DNA, 144 bp, Homo sapiens
taaatgtagcatatatcctaaaggagatggaagtgatgtaccatcatgggtagcctttgataaacagagatgcccgagtggtaaaagacatggcaacaggaaagtctaagggatatggctttgtctcctttttcaacaaatggg

SEQ ID NO: 619538 - DNA, 100 bp, Homo sapiens
ggcggttcctgcacatactcggtacacagccccagagccactgagcactggacagtcagagaggccaaacagatccagggcctggagcaaagagcggatg

SEQ ID NO: 619539 - DNA, 101 bp, Homo sapiens
aggtgaacaattaggtcctccacaatgaagacaggtaatgtggaggaaagagagcttgtcatgcaaattgaaccatctttgtatcctaagttgtttcagaa

SEQ ID NO: 619540 - DNA, 100 bp, Homo sapiens
tcagcgaggagcagcagcagctccagcaggcgctggctcctgctcaggttcctgctgctcaacagatgctaaattttcctgagaaaaacaaggaaaaacc

SEQ ID NO: 619541 - DNA, 103 bp, Homo sapiens
gaaaaagtcaagaaagcattggctcaggtcttctgtgaggaatctggattgtcacctttgctgcaaaaaattacggtgcagtttgacagtccagagtgggaga

SEQ ID NO: 619542 - DNA, 75 bp, Homo sapiens
ctggatgggggaccacaagatcctcatcgacagctctcacctgtgcacagttccaccctgacggactcatctttg

SEQ ID NO: 619543 - DNA, 75 bp, Homo sapiens
tattttgtgatcgcagcgatgaaagcgggtccatatggaatatttgctggtagggatgcctccagaggactggcc

SEQ ID NO: 619544 - DNA, 100 bp, Homo sapiens
gcggcgtgggaggaggaagatggcggccggcaagagcggcggtagcgcaggggagattacttttctggaagggcgctattttcttggaaggtgttactgt

SEQ ID NO: 619545 - DNA, 86 bp, Homo sapiens
ttgttagggcgtggcctgaggcttggataagtggggagatgttggcacacctgaaaccatggccccaaccattgtggttcccccgg

SEQ ID NO: 619546 - DNA, 75 bp, Homo sapiens
gcctccgaagtagctgggattacagatcattcatttttctgaagccagaagatgagaactatcaaatgtgtgaag

SEQ ID NO: 619547 - DNA, 83 bp, Homo sapiens
aaacaaaccctgaaaaaacagaagacgctctgcaaaagatcaagaagctactctagaagtcggagcagaggatggtacagcag

SEQ ID NO: 619548 - DNA, 100 bp, Homo sapiens
tcgtgccagcctcctcccccatgtaccacacctgtgtggccttcgcctggcttgcgcgatctctggcctcttcaactgcatcaccatccaccctctgaac

SEQ ID NO: 619549 - DNA, 90 bp, Homo sapiens
gcactgctggagtgtgaccacctgaggagtggggtgccaggtggaaggagaagaaagggtcacagtaaatcgatccagtgtctgacggtg

SEQ ID NO: 619550 - DNA, 100 bp, Homo sapiens
cgcagagtgccctacaactacctgcagcgggcctacatcaagatcagcttgaacgggtctttttacgacttggccatgctgaaacagatgaacaattaca

SEQ ID NO: 619551 - DNA, 75 bp, Homo sapiens
cccaccaagcccatgacgacgctgctggccagggtccaggatttgttgagaaagagataagaaaagctaacattc

SEQ ID NO: 619552 - DNA, 87 bp, Homo sapiens
atcaatgtgaacaatattctcaagtgttgaacagtcatcggatctacaggaccagttgaatcatctgttgaaatagaatgacatgta

SEQ ID NO: 619553 - DNA, 83 bp, Homo sapiens
gaagtgaaagctcggctccagaaattcattcacaaacctggcagggtgaaggttgccgaactgtccccctggctggacatgtg

SEQ ID NO: 619554 - DNA, 100 bp, Homo sapiens
agtcattacaacagccagccacatccactacagaaactccggggccatggcacctgcaaggtgtttctcagcaagattgaggaccgtgtttcagggcgtg

SEQ ID NO: 619555 - DNA, 131 bp, Homo sapiens
tgggagaggtaagacaagaggaaacgtttagcatcagtgactcacaaatcagcaacacagaatttctgcaagtaattgctgataggaagatgtcttcaggaaatgctaaaattgggcaccctgcccccaac

SEQ ID NO: 619556 - DNA, 90 bp, Homo sapiens
cgaggatcgtggtgccggaaatcaaggatttgtcccatgccaccattgaaatgtatacaagcattgggaggattcgatctgctaagtttg

SEQ ID NO: 619557 - DNA, 80 bp, Homo sapiens
cctgcccgccctgcaggaggccctgcgggacagctcgggactggtgattgcagctggaagtgcccatgaccgagctggcg

SEQ ID NO: 619558 - DNA, 98 bp, Homo sapiens
cagcctccggcagcgcatggacatcctggatgacatagtggaagatgaagatgatgactttctgaaaggcgaagtgccccagaatgataccgtgattg

SEQ ID NO: 619559 - DNA, 100 bp, Homo sapiens
aaagggactttggaaaaaggctgtctctagacagcagtcttgtgggctgattgttgtgacattggccgtatgctggatgcccaaccagattcggaggatc

SEQ ID NO: 619560 - DNA, 100 bp, Homo sapiens
ttggacttcctagcctccagaaccgtgagaagtaaatttctgtttgtccggtttatcactaaaatatggcatcctaatattagttccgtcacaggggcta

SEQ ID NO: 619561 - DNA, 97 bp, Homo sapiens
tgtggcccttccaaataagcggcataaagcaattgagaattcaggttatcaatactctggctgaccatcatcatcgtgggactgactttggtggaag

SEQ ID NO: 619562 - DNA, 100 bp, Homo sapiens
cacctgggccccagaccgtgctgatcttcgatgagctctcggattccttatgcagagtggccgacttggtgctggagaatctggtaaaagcaccattgtg

SEQ ID NO: 619563 - DNA, 75 bp, Homo sapiens
cgggtggcggctcgggacggaggacgcgctagtggggggccctcagcctcttggccttgaacgggctgttcatct

SEQ ID NO: 619564 - DNA, 74 bp, Homo sapiens
cctgaggtttatagaaaggattcatgactttgtaatggaggcaatgaatcgctccctggctaatgtgattcttg

SEQ ID NO: 619565 - DNA, 100 bp, Homo sapiens
ccgaaatccttcctgtaccgcttatgccaggccgatcccgacctggactcagacaaggagagcactgtgaggtggatgcccgctcaggccgctgtgccaa

SEQ ID NO: 619566 - DNA, 96 bp, Homo sapiens
cggagccggagggcgggaggaacatgacatcgcggaggccaccgaatcccttttggagtcatctttggtggaactgatgtaaatgaagatgccaac

SEQ ID NO: 619567 - DNA, 75 bp, Homo sapiens
ccaccctcccagccacctctgaagttgccaggcttcccaacattcttgtctgtgcctgcaagaggacctccgggg

SEQ ID NO: 619568 - DNA, 101 bp, Homo sapiens
gccgtcgtccccgctgcgggtggcggtggtgtgctcgagcaaccagaaccggagcatggaggcgcacaacatcctcagcatgctttggatcttcaacttgc

SEQ ID NO: 619569 - DNA, 89 bp, Homo sapiens
gcatctttgtctagccccagtgcaggcaaatgaagatgtgacacagattgtggagattctccattctggacctagtaaatggaactggc

SEQ ID NO: 619570 - DNA, 82 bp, Homo sapiens
cagacctgcaagctctttgacacacagcagttcttgtcagattttgctggaggagcttgccaacagcgatcccaagttagcc

SEQ ID NO: 619571 - DNA, 80 bp, Homo sapiens
ggcccacctgagccgcgtctaccccgagcgtccgggtgatctggaccctctggcatctctcaaatcgctgacttacctaa

SEQ ID NO: 619572 - DNA, 98 bp, Homo sapiens
aaaggtctgatcatcaattgtctctctgggcggccacctatgagacttcatctgtgtgcgaacacttgccaagtatttcaatccttgctatgccactg

SEQ ID NO: 619573 - DNA, 100 bp, Homo sapiens
cccgcatgctctttgtcactccccggcggcagcacgaaagtaccatgacatggatttgattgacatactttggaggcaagatatagatcttggagtaagt

SEQ ID NO: 619574 - DNA, 100 bp, Homo sapiens
tgcgttcggctccgcgcccgccgcgccgggagcagcaccgcggggccaggaattgattatggattaagtttaccacttggagaagactatgaacggaaga

SEQ ID NO: 619575 - DNA, 74 bp, Homo sapiens
ctgggagctggcatgctggagccgccgttcaagcctgacttttttgctccactcaagcctgttagaatcaccat

SEQ ID NO: 619576 - DNA, 102 bp, Homo sapiens
gaggcagatcctgccccgtggccgcggccgtctcgtagagccgatgatgagcaccccacctcctgccagcgagctcccgcagccacagccgcagccgcaggc

SEQ ID NO: 619577 - DNA, 51 bp, Homo sapiens
cagggtggtggactatttaacaaaagttggatgtactggaaaagtcatagg

SEQ ID NO: 619578 - DNA, 50 bp, Homo sapiens
gccgaagtacagaaaccatatttacaggtttccaatacttatctacagga

SEQ ID NO: 619579 - DNA, 75 bp, Homo sapiens
tgccgttctttaatatgctggatgagctgctgaagcccaccgaattagcccgagcgggaagaagttccgcagcaa

SEQ ID NO: 619580 - DNA, 141 bp, Homo sapiens
tgaagctaccggccagggttttctttactctggggtcccggctgccctgtggcctcgctcctcggaggtgctctacggaaacgtattcgagaggacagaaaggccaccacagctcagaaggtgcagcagatgaaacagagg

SEQ ID NO: 619581 - DNA, 75 bp, Homo sapiens
gaccccttcaaggacgacctcaaggttatggaaacaaaggacatgctttacatcgtcactgaatttgctaaaaat

SEQ ID NO: 619582 - DNA, 97 bp, Homo sapiens
gcaagagttaccgcggggaccgagagatgtccagctcgccgctgtccaagaaacgtcgcgtgtccgggcctgatccaaagccgggttctaactgctc

SEQ ID NO: 619583 - DNA, 90 bp, Homo sapiens
gaagtaccccaggcacctatacagcccttctatagctctccagaactgtggatcagctctctcccaagtcttgggcgtctttggtactgg

SEQ ID NO: 619584 - DNA, 100 bp, Homo sapiens
attttatggctgtggccttcttatcagcacagagaagcaaagatccaaattcccaggtaacaagaatgtggtaaccagagagcacttggaccgtatgaag

SEQ ID NO: 619585 - DNA, 110 bp, Homo sapiens
ggggcggagcggaggggaggccgtgccaggcagggccggttcgtgcggaaccgccatggccgagccggcttcggttcagcagctggacatggagaaccaacgctcatcac

SEQ ID NO: 619586 - DNA, 119 bp, Homo sapiens
acgatctgcacttcgcattttggcattgacatttaattttagggtcctttatatagaagggagagtaggcattgctaccatttatgttcgttataagcaagttcatgctctgagtcctg

SEQ ID NO: 619587 - DNA, 50 bp, Homo sapiens
gaagtcactcataagcgcgctcaagagaattcgaatttagagtttaattt

SEQ ID NO: 619588 - DNA, 100 bp, Homo sapiens
aaacatttgtagctttagcggcacaacttcagtctattcatgaaaatgtaaaggatcacagaagtgaggccaagatgcccatgtcaccagagccagaaga

SEQ ID NO: 619589 - DNA, 141 bp, Homo sapiens
gcaagattaacaatacaaaaaagtgacaatgcaaatggcttgtttggtttcacaggagcttgtataccagaggaaatcttactgatgaggggcagcagtattgttgtagattagtggaaatggattcaaaaagtggtccag

SEQ ID NO: 619590 - DNA, 100 bp, Homo sapiens
cgtcacttgcctcccgggagtcgctgtggcaaaaggtttgtgggggagagaaaccttatttgtctccagacattctagaggagaagcactgtgaattcaa

SEQ ID NO: 619591 - DNA, 100 bp, Homo sapiens
ccgggctcggcgggggagcgactcatggagctgccgtaagacacctggatttcattagcatcatgacctacgattttcatggagcctggcgtgggaccac

SEQ ID NO: 619592 - DNA, 74 bp, Homo sapiens
ggagccggcagcccagcactccgcttgtgaacaccttcttcagcttccttcgacgcaaaacagactttttcatt

SEQ ID NO: 619593 - DNA, 74 bp, Homo sapiens
tcgcctggctctcggcggcctgatggagtaagaggggttggctgtgaatgatgtgatggagctgcttgaagaag

SEQ ID NO: 619594 - DNA, 74 bp, Homo sapiens
gcctgggggacggtaggagcctccgtgcggagaccactgttcaaggccacagctgaaaatgtgtgtctgacatg

SEQ ID NO: 619595 - DNA, 100 bp, Homo sapiens
aggtgctgaagaccaattacggcatcccctccgcctgcttctctcagcctcccacagcagcccaactcctgagaggtgtcatggagaaactccagctggg

SEQ ID NO: 619596 - DNA, 74 bp, Homo sapiens
tcagttggaagcagccgatccagcctgcggagcctgtggggcagtgtcaacagcatctccaccctggagcctgt

SEQ ID NO: 619597 - DNA, 100 bp, Homo sapiens
ggtcaagatagacctgaaaaccaagtcttgtagtggagtgctcaaagaacaagctgctgattctattttggtactagaagcagccctaaaattaaacaag

SEQ ID NO: 619598 - DNA, 83 bp, Homo sapiens
cgcacagaggaacgagctgagctggcagagtcgaactgtggctgcaccatctgtcttcatcttcccgccatctgatgagcagt

SEQ ID NO: 619599 - DNA, 106 bp, Homo sapiens
tgaggcctctccagccatgtggaactgtcacctgaatggttgagcatggaccctgttgctacccacagctgccatctgctccagcaactgcatgagcagcgaatcc

SEQ ID NO: 619600 - DNA, 75 bp, Homo sapiens
ggagaaggtggcctaccaggcctacgagcgctcgcgggacatccaggttgcagaatgaacatgtaaagttacaaa

SEQ ID NO: 619601 - DNA, 83 bp, Homo sapiens
catgccgctcctaagcctgcacagccgcggcggcagcagcagtgagaggagggagccatggatttgctgcgggagctgaaggc

SEQ ID NO: 619602 - DNA, 83 bp, Homo sapiens
cttcacttcgaggaaccttttccctccaggccaaccaggatctcccaacccgaagacagcaggcagcccaataatgtgatcag

SEQ ID NO: 619603 - DNA, 100 bp, Homo sapiens
gatgaagtgcagaggtttttttctggccctacatcattcgaggaatggcgcccccgacgacgccctgcagcaccgacgtgtgtgacagcgactacagcgc

SEQ ID NO: 619604 - DNA, 100 bp, Homo sapiens
tgacgattctaccaggcatatcacagatacactcgccctcaagcctatgaactgccctgcacactggtgtttgatttcaccaccatagacttgacatctg

SEQ ID NO: 619605 - DNA, 82 bp, Homo sapiens
gcacaggccgtcgctatgagcgggaccaccctgggcacagcaggcatcggagatctgactgcagccatgagcagcaatgagt

SEQ ID NO: 619606 - DNA, 100 bp, Homo sapiens
aggacagcaacttcagggatctgtaaagatcatttaaatggagtgctcatctcattgaggagcagattaattttgcttctctacagaaagaaccaatgaa

SEQ ID NO: 619607 - DNA, 98 bp, Homo sapiens
ggcggaccctacactgtctgatgaaagtagttcgaggggagaaggggaaccttggaatgaactgccagcaggcgggtctcctatggacagaagtgcgg

SEQ ID NO: 619608 - DNA, 133 bp, Homo sapiens
cagtctgatttctccaaccgagttgaaatttccaaagcaagtgcttctttaaatggggcctgtaaaagaggaaattcagacatcgtacgactcgtaattgaatgtggagctgactgcaatattttgtcaaagc

SEQ ID NO: 619609 - DNA, 100 bp, Homo sapiens
ggccgagatgtctcgctccgtggccttagctgtgctcgcgctactctctctttctggcctggaggctatccagcctgagctgactgctgcccactttgga

SEQ ID NO: 619610 - DNA, 82 bp, Homo sapiens
gccgatccagcctgcggagcctgtggggcaggttcaaaccttgtactactcagctgatcacaagctgcttgatgggaaccta

SEQ ID NO: 619611 - DNA, 83 bp, Homo sapiens
cgcgttcctcccgccggccccaaagacgctaaacgtgccctactctgccccgggggagagacccaacatgagtgaagtttcct

SEQ ID NO: 619612 - DNA, 75 bp, Homo sapiens
aaggatgacatatttttggacctgaaacagaaattctggaacacctatatgaccttacacataggaagctcacac

SEQ ID NO: 619613 - DNA, 98 bp, Homo sapiens
ggcaccgggatcgtgaccgagaccgtgaccgagagcgtgaccgagagcgcgaatatcgtcatcgttagaagcagagtcttgctttgtcacccaggctg

SEQ ID NO: 619614 - DNA, 96 bp, Homo sapiens
tcttcctccgggaactcgccaaggtgaagcaggtcctcatgctgataccgccagtggatgccagaatttgcagtgtggttttcgagcctgctgccg

SEQ ID NO: 619615 - DNA, 100 bp, Homo sapiens
aaaactgcaagcagtagagaaataagacaagctttcaagaaattggcattgaagttacatcctgataaaaacccggtttaactgaactgaatgacagtcc

SEQ ID NO: 619616 - DNA, 75 bp, Homo sapiens
gcgcctgcctgctccgccccagacctgtcggcgaaagggatcctaagcacttcaagtcagagaagacaggacggg

SEQ ID NO: 619617 - DNA, 98 bp, Homo sapiens
ggcgcccctcggcctcggagcaacgagcgcagcgccgagtaacagttacccctcaatgagcgacccctacctgtccagctattacccgccgtccattg

SEQ ID NO: 619618 - DNA, 96 bp, Homo sapiens
atgggggcggcgcagagcctcccgggccacaggatctctctaggagctgacactcgaaccttcacgacccattcggatttttccaggactcaggag

SEQ ID NO: 619619 - DNA, 100 bp, Homo sapiens
tgcgctctgcccggcgagtcgggctctggaggaaaagaaagttgctgcaatagtattattctgctccacttctagcccacacagcatacctctgacagag

SEQ ID NO: 619620 - DNA, 107 bp, Homo sapiens
gtaagatgttcgcctgcgccaagctcgcctgcaccccctctctgggtactagatggaaacttgagaaaggactgcttattgataacagctaaggtattcctggaagc

SEQ ID NO: 619621 - DNA, 89 bp, Homo sapiens
ggatctgaaagtgaggaggaggcccctgcagggacacgaagccagtttttcaggaattgttcaaatggatgaagatacacattacgata

SEQ ID NO: 619622 - DNA, 82 bp, Homo sapiens
gagaagtgtccggggtagccccgttacaggtttactcctggcttgggggcattaggaagcactggaggctcttcgggaacta

SEQ ID NO: 619623 - DNA, 95 bp, Homo sapiens
gatttattggaggcctacttgcagcatattacctatcaggagaggagggagaagttatagcactggataaaatcttcaacaaagtagaaaaaatc

SEQ ID NO: 619624 - DNA, 83 bp, Homo sapiens
ctctcatctcgctcggctgcgggaaatcgggctgaagcgactgagtccgcgatggaggttatcaacgaaacttctcagcatca

SEQ ID NO: 619625 - DNA, 50 bp, Homo sapiens
ggacggcgacgcagcccgcggcagaaggacactcatgaggaccatgatac

SEQ ID NO: 619626 - DNA, 88 bp, Homo sapiens
ccgagatggtgcttgggacaacatggttaaaagggaccctgcagtgggacacagacccctcagtgctccagctgcagtcagactcaga

SEQ ID NO: 619627 - DNA, 83 bp, Homo sapiens
cctgggcaaaggcaacttcgcggtggtgaagctggcgcggcatcgagtcaccaaaacgcagaacacaccacagccatcagcac

SEQ ID NO: 619628 - DNA, 100 bp, Homo sapiens
cacatttccagcaggctgcagatacgagtggacaagtgcatgtgagggaaccctggcttgttcaacctgtcacctcatctttgaagatcacatatatgag

SEQ ID NO: 619629 - DNA, 95 bp, Homo sapiens
ttagccaagagtctgggtctccgggccaacctgaggttggtttccctttcctggacaagcgttataggaagattgttgatgtcaattttcaatct

SEQ ID NO: 619630 - DNA, 50 bp, Homo sapiens
gcagacgtcaacgtcaaggacttcgcagaggacgggaggggcaagctgcg

SEQ ID NO: 619631 - DNA, 100 bp, Homo sapiens
ggtgccgaaccccttcgtgcagcagacgcagatcggctccgcgaggcgggtccagacaggggcaagtgtccgagtggtgaatcagctacttacagagatg

SEQ ID NO: 619632 - DNA, 98 bp, Homo sapiens
ctggagtctgcgaaggccgggacccggttccccggcccacagtgggggtgtgcaaacccgagagaactggatgatgttgaatttgaagtatcatcgga

SEQ ID NO: 619633 - DNA, 50 bp, Homo sapiens
gctcgaattccagaatgatgaaattgtgcggtggtgctgtggttctgggg

SEQ ID NO: 619634 - DNA, 98 bp, Homo sapiens
tatgaatttatacaaggagaagcactggatccaaagcatgtctgcaacccagccattttcagacaaaacttacctggggtccctacttatggttttac

SEQ ID NO: 619635 - DNA, 82 bp, Homo sapiens
tcagttggaagcagccgatccagcctgcggagcctgtggggcaggtaagatcctgaggaggcaggagagggacagggaagga

SEQ ID NO: 619636 - DNA, 50 bp, Homo sapiens
cagagctgaggactgcctgtttgcaggagcctgtgtgaaatgcagcaaag

SEQ ID NO: 619637 - DNA, 98 bp, Homo sapiens
gggaaccagtgggccccacgtgggtaaaaagtatcatcgagaaaggagaagaacactgtggacatctaattgaggcccacaaggaatgcatgagagcc

SEQ ID NO: 619638 - DNA, 111 bp, Homo sapiens
ccgttttagtcttgggggtagagtgactgcttgcgaaccagttcagcagtgcctcaggtcagttcaccgggacctggaggcccagattgcgatcgtgacggagaaccaggc

SEQ ID NO: 619639 - DNA, 50 bp, Homo sapiens
gatgtggactgcagtgctgcagtgccaggcttctccagggaaagtgaccg

SEQ ID NO: 619640 - DNA, 90 bp, Homo sapiens
gtcgcgggagtcgtagggaggacgccgggacacctggaagccgagaaatggtgggaacatccagttgcaggaaaacaagcttaacacgcc

SEQ ID NO: 619641 - DNA, 50 bp, Homo sapiens
ttgggcttctctgtctaatgctgttcctgctggagtgcagtggcgtgatc

SEQ ID NO: 619642 - DNA, 83 bp, Homo sapiens
accaagaagccagtcaagcggccagaatccacattcatctcaatggaaggatcctgccttaagtcaacttatttgtttttgcc

SEQ ID NO: 619643 - DNA, 74 bp, Homo sapiens
gctgtgggtattgctgcggctggtgcgtcgtcgctctagatggcgggtgaaaaagttgagaagccagatactaa

SEQ ID NO: 619644 - DNA, 75 bp, Homo sapiens
cgaggacagctggccgccgatattcaccaagcgcttcgctacaagatctttaatctcatgaagtacgacagctac

SEQ ID NO: 619645 - DNA, 74 bp, Homo sapiens
atcccggcgacatactacctctggccccgagatcagaatgccgcagaatggggaaatggagagagaacctgaaa

SEQ ID NO: 619646 - DNA, 101 bp, Homo sapiens
gagcaggatgcagaggagaacgcctcacgattttgatgaatgtcgatttgatattagtgtaaatgatagtgtttggtatcttcgtgctcaggatccagatc

SEQ ID NO: 619647 - DNA, 90 bp, Homo sapiens
gaacaatccgtctggatcacggatgtaggaagtggaggttcaaaatggaagactgtttaggctcctagcaaaattgggaacaatcaatga

SEQ ID NO: 619648 - DNA, 50 bp, Homo sapiens
tgaccagtttttagttgtagcacgcagccaactcttcctgccaaataaat

SEQ ID NO: 619649 - DNA, 100 bp, Homo sapiens
cacagtggcttggccaatggcacagagagatcgatgtcttattgtgatgagtctcgactgtcatatcttcttcggaggatcacccgggaaaacgaccgag

SEQ ID NO: 619650 - DNA, 85 bp, Homo sapiens
aaggttgggttcagaagaggggatgaaattgattctgcagtaaagatgttggtgtcattaaaaatgagctacaaagctgccgcgg

SEQ ID NO: 619651 - DNA, 75 bp, Homo sapiens
ggctgctactgtgggcttggggataaagggatccccgtggatgacactgacaggaatataaatagtttctggaaa

SEQ ID NO: 619652 - DNA, 98 bp, Homo sapiens
gcggtcttcagttgtgaggcccacaatgacaaagggctgaccgtgtccaagggagtgcagatcaacatcaaaggattccaggaaggctatccttaccc

SEQ ID NO: 619653 - DNA, 74 bp, Homo sapiens
agttgcagtttgaagaggaggactttaacttcagtgaagatttcatacattggcctcatgacccagagctcctt

SEQ ID NO: 619654 - DNA, 74 bp, Homo sapiens
gggaggcaacggagctaccagccgagtggagactgctgcacggactctggaaccatgaacatatttgatcgaaa

SEQ ID NO: 619655 - DNA, 75 bp, Homo sapiens
ttccagaccaaaattgaaaaaatggttgacctcacccaggtgatggcatcagctgagaagggaaggaagcccatg

SEQ ID NO: 619656 - DNA, 98 bp, Homo sapiens
tgtacgccgtggtgtcggaggagcccatctacatcgtgaccgagttcatgtgtcacggattggaacatcagttaacatctgaccactgccagcccacc

SEQ ID NO: 619657 - DNA, 118 bp, Homo sapiens
agagcattaaggaactagaacaagaagaagaggagaggaaaaaggaagagagcactgcagccagtgaaaccactgaggctgaccccgcactacatctacccaccagccatcgtgcagc

SEQ ID NO: 619658 - DNA, 90 bp, Homo sapiens
gctgtccgcaacctccgccagcgtcggtccctgggcaggtgtggaccgagacatgggtgcccggcaccgcgcccgagcccactccattca

SEQ ID NO: 619659 - DNA, 75 bp, Homo sapiens
ccctcgtcctcgccatgcgctgtgatttgagccctctggcacaaatggaagaagaaagaagggagcaagtagcta

SEQ ID NO: 619660 - DNA, 75 bp, Homo sapiens
gggaagccaagtgccatcttcaaaatttcaggtcttaaatctggccatttatttctcagaaaatccattttcctg

SEQ ID NO: 619661 - DNA, 100 bp, Homo sapiens
ctctctacgtccctgcggagcagccgctcggggtgtggttttctctcggttgtgcctatttggccttggaagactatcaaggttcagcaaaggcatttca

SEQ ID NO: 619662 - DNA, 93 bp, Homo sapiens
cccccactctttccgccctaatggaggtctccagtttcggtgacaccggaaactggtactcaagtgatgaggatgagggtggaagcagtgtca

SEQ ID NO: 619663 - DNA, 99 bp, Homo sapiens
acgggctccaccctgctgcagcccctcagcaacgccgtgcagctgcccatcgaccaggagatacaactcgtcaacgaatcaaattcagtgatgacagag

SEQ ID NO: 619664 - DNA, 73 bp, Homo sapiens
ttgcagctgccgccgccgccaccgagccgccgccagaagatggctgtgccacccacgtatgccgatcttggca

SEQ ID NO: 619665 - DNA, 75 bp, Homo sapiens
gcgcccggcccggagcccccagcgcagcggccgcgagcaatatactttgctgcttattcaaactgcaaggaaaag

SEQ ID NO: 619666 - DNA, 89 bp, Homo sapiens
aaaaaaccaaaagagaaagtggatgctctatcacagtttgatctcaacaattatgcaagcagctagtacaccactgaatcctttaagct

SEQ ID NO: 619667 - DNA, 100 bp, Homo sapiens
tctgggacgcacagagaccgtgaagattccaagttcaggagaactcgaccgaaggaacccagccagccggcggaatgcaagcagcagtaggaagcggagg

SEQ ID NO: 619668 - DNA, 100 bp, Homo sapiens
ccggaaggggtcccgaagccccctgcaggaactctacaacccaatccagatgacaacaatggaagcagtggagtccccggagtccctggccgccgttgct

SEQ ID NO: 619669 - DNA, 75 bp, Homo sapiens
ccggtactacccaaacgtcagtcgaatcacaggcaggagaaactgattattgatgagaagaagtattacttattt

SEQ ID NO: 619670 - DNA, 99 bp, Homo sapiens
caaaattctgaactcaggacttggcaactttaaggaagcctcctatttcagtttctcaacatgaaagtcatcaagcaatctcccatcttccaactggac

SEQ ID NO: 619671 - DNA, 99 bp, Homo sapiens
tgtctgaggattacggcgtgctgaaaacagatgagggcattgcctacaggccgtcgctttcgggttctctcatcgcttcgtcgttcgccaatgtttgag

SEQ ID NO: 619672 - DNA, 83 bp, Homo sapiens
cgccaggcgccgctcctttacaggatgaaacaggcgcctatttaatcgacagagaccccacctactttgggcctgtgctgaac

SEQ ID NO: 619673 - DNA, 100 bp, Homo sapiens
cgccgtcctcaagcagttcggcatcctggagcccatatccatggaaggtcatttattggggaggcagtgttccctaaacaccttaccagcagcttccatt

SEQ ID NO: 619674 - DNA, 100 bp, Homo sapiens
cccatggcatcttttgttaccactcctgttccaccagactttaccaggcaagtgtcaattgaggagggagagaggaaagccaaagagctgaatgttatgt

SEQ ID NO: 619675 - DNA, 74 bp, Homo sapiens
cgccgagctggttgattctgtcctggatgtggtacggaaggaggagctaaattgaagaaggagcgagcgcagct

SEQ ID NO: 619676 - DNA, 98 bp, Homo sapiens
agcagtccatcaagcaactgaagggtcaaggctacaataaggcagtggattggtgggcattaggagtgctaatctatgaaatggcagctggctatccc

SEQ ID NO: 619677 - DNA, 75 bp, Homo sapiens
agtggatcttcgtcgggggcaagggtggtgtgggcaagaccacctgcagctccaggcgaggacacacctaggatg

SEQ ID NO: 619678 - DNA, 101 bp, Homo sapiens
cgagtatgcttcgtttttcgccgtcatgggcgcctcggccgccatggtcttcagcggtcgcaatggaagaagagatcgccgcgctggtcattgacaatggc

SEQ ID NO: 619679 - DNA, 98 bp, Homo sapiens
tgtgccaggaacacaacctcaccttgatcaggaggccagatgctccagtgcctgatggcgaaagtgagaaaactgtagaagaaagttcagatagcgaa

SEQ ID NO: 619680 - DNA, 101 bp, Homo sapiens
tggagtcgctttcatggtcttgctgattccactcaacggagctgtggccgtgaagatgcgcgccttccagtgccccgagccagaaggttctcgtctggagg

SEQ ID NO: 619681 - DNA, 90 bp, Homo sapiens
gtttgtcctgtcctggatcagtttctttgtcatgtagccaagactggagaaacaatacaatgcaggcagttaacaagaagatggatccac

SEQ ID NO: 619682 - DNA, 101 bp, Homo sapiens
agttcggagacatctagtggaagcggcaagcagagaaaacctgccaatcaagatgagtatggggcaaacttgaagataaatcttttgactccagctcttta

SEQ ID NO: 619683 - DNA, 88 bp, Homo sapiens
gcgggaggagcctgttcccctgagctcttgcaagcttaggatatgaaaagagctgtgtgttgttcaattgtgcagccttagctagcca

SEQ ID NO: 619684 - DNA, 82 bp, Homo sapiens
cagcctgcggagcctgtggggcaggagctggccctcagcgcactcctgaagttcgtgcagctggaaggagcgcaccccctgg

SEQ ID NO: 619685 - DNA, 100 bp, Homo sapiens
cgcagagcgccgaggaggctttcctgctggtggcaaccgcctacgagacactcaaggtgcactacatcctccaggaggtggtgatgggtgggatggtgtt

SEQ ID NO: 619686 - DNA, 51 bp, Homo sapiens
agagactattttcgttattacaagccatggactttccccagcacagccagc

SEQ ID NO: 619687 - DNA, 101 bp, Homo sapiens
tgcagaccggcaggtctagttggcttgtggggaaaagatacctctttgtacgtcagaagaaactgaggcagctttggtgtcatccccagcactcctctggc

SEQ ID NO: 619688 - DNA, 82 bp, Homo sapiens
cggtgagctgcggcgagcggagcttcgcggggatcctgctggactgcacgaaaaagccggctggatcctgcaggcagctgta

SEQ ID NO: 619689 - DNA, 82 bp, Homo sapiens
aggcgaacagccatcccgggcactatgtgaatttgggggtgcttcaaggatgaccgcatcgtcttctggacttggatgttct

SEQ ID NO: 619690 - DNA, 75 bp, Homo sapiens
tgaagagctatggtgaaacaccactgaagcattgccaagtttggaaattttagcattcaggtgccaggaatgcag

SEQ ID NO: 619691 - DNA, 100 bp, Homo sapiens
gatgagctgtcctttcaggaaggagccattatttatgtcatcaagaagaatgacgatgacttcaccacaagcaggaatgcagactcagcctcagatagca

SEQ ID NO: 619692 - DNA, 75 bp, Homo sapiens
ctcgcgcctctcccaggacccgcctggctgcgagatatggacacggccaacacggtgaaggaaaagttcgggagg

SEQ ID NO: 619693 - DNA, 100 bp, Homo sapiens
gtcactattatatcagatcctagatggtattcactacctgcatgctaactgggtgttgcacagagatttgggaatagcatttcaaggttcagtggaggag

SEQ ID NO: 619694 - DNA, 100 bp, Homo sapiens
ccgggagtccgcaccaggggccctcagggaagagaccctgcaaagatcctgggagaccaagttttttgctccactcaagcctgttagaatcaccatggaa

SEQ ID NO: 619695 - DNA, 98 bp, Homo sapiens
acatggaggatgatttcatgtgcgatgatgaggaggactacgacctgggcaatctagagcagccatgatacctcccaagcagccacgacagcccaagg

SEQ ID NO: 619696 - DNA, 74 bp, Homo sapiens
taaccacctcacagattccagcttcggaacaagagaccctggagactggtctctgtgctgacttccacccgagt

SEQ ID NO: 619697 - DNA, 88 bp, Homo sapiens
accgcgagctcaaggaggacctcacgcccttcaaggatgaccgctactacagtgcctacaccaactaatgttacaattgaatcctata

SEQ ID NO: 619698 - DNA, 75 bp, Homo sapiens
taatgagccaactgctgctgctattgcttacggcttagacaaaaagaacgctgccaagaagagagaccaggagca

SEQ ID NO: 619699 - DNA, 75 bp, Homo sapiens
cactgtatttgtccctcagtggagaacaaggcgtgatcctaatgtcacaggctcagtttatgaacctcttaaaag

SEQ ID NO: 619700 - DNA, 95 bp, Homo sapiens
tggattccagtgggcccgacagcgcaacagcatgtagatgtagcagctctactaataaagtataatgcatgtgtcaatgccacggacaaatgggc

SEQ ID NO: 619701 - DNA, 83 bp, Homo sapiens
tccaaaaacagtggataattttgtggccttagctacaggagagcctcttccccaccatgccccggcacaacttacacaagatc

SEQ ID NO: 619702 - DNA, 74 bp, Homo sapiens
acgccagtatgaatctctgcccgcaacacatatcaggatggtgattgctcacaccaaagccttggacccctccc

SEQ ID NO: 619703 - DNA, 98 bp, Homo sapiens
aaaggatcatgaactagtgacctggaaagttttcggctttgtgagaaaccttaccatcaaacacgatggccagcaacgttaccaacaagacagatcct

SEQ ID NO: 619704 - DNA, 100 bp, Homo sapiens
cggcgagcagggagcggagtaccagcacttcatccagcagtgcacagagatcgcggattcaggtgtggctctatgagcaagtgaatatgcggatagaagg

SEQ ID NO: 619705 - DNA, 74 bp, Homo sapiens
accaccgccctggccatctaccatgtgggaacggcaggagcagctgatgggatatcggaagagagggccgaagc

SEQ ID NO: 619706 - DNA, 83 bp, Homo sapiens
cgactcgcttctttcggttctacctgggagaatccaccgccatccgccaccatgtaccccccaggcatgcggcagcaggtgtt

SEQ ID NO: 619707 - DNA, 88 bp, Homo sapiens
ggagcacgtccaggctgaccacgagcttttcctccaggcctttgagaggaagaaggagaaagggccaacccctgaagaagcaatacag

SEQ ID NO: 619708 - DNA, 121 bp, Homo sapiens
tcaagatggcggccaatgtgggatcgatgtttcaatattggaagcgctttgatttacagcagctgcaggtcaaaatgcagatcttcgtgaaaacccttaccggcaagaccatcacccttga

SEQ ID NO: 619709 - DNA, 100 bp, Homo sapiens
tctacacagagcacgcccatcaggtggtggtggccaagtatgcgcccagcggattctacattgcctccggagaacacccagtgcatcccagaaggcttgg

SEQ ID NO: 619710 - DNA, 80 bp, Homo sapiens
caaaggtctggacactgaaaccaccgtggaagtcgcctggtgtgaactgcagaaagcgaaattattattgacgatggaca

SEQ ID NO: 619711 - DNA, 98 bp, Homo sapiens
tggctgtcgccaactccatggctttccagatggcccactgcgtgaccttggttcagctgtccatttcctgtgaccatctcattgacaaggacatcggc

SEQ ID NO: 619712 - DNA, 100 bp, Homo sapiens
ttctgagcctgttcagaaagtccttagcaacaggtaccactccaaaggcaaggaaccatgattgacaacagtcaagctgtggatgaaatgaccaggaacg

SEQ ID NO: 619713 - DNA, 82 bp, Homo sapiens
atggtgctgtaaccacctcacagattccagcttcggaacaagagaccctggttggtcaaagaaaaagtgatgtatgaaaaag

SEQ ID NO: 619714 - DNA, 82 bp, Homo sapiens
cctctccgcagcttccggccaagttggactgcagctcgcggtttcctggcttctaggtgactgaaaactcctgaggcatttc

SEQ ID NO: 619715 - DNA, 100 bp, Homo sapiens
attgactatggaaaagttgccaaattgtcaagagaatccatcccattaaatgacctgaagtcagaagtatcaccacggatttcagcagaggacctgattg

SEQ ID NO: 619716 - DNA, 50 bp, Homo sapiens
ctgaggccccagaactatcttttcgaaggtgcttcctggaggggcctgcc

SEQ ID NO: 619717 - DNA, 155 bp, Homo sapiens
tgcgggtcggtgctgaagctgctcaatacgcaccaccgcgtgcggctgcactcgcacgacatcaaatacggatccggacaaccctccatatgataagggagccttcagaatcgaaatcaactttccagcagagtacccattcaaaccaccgaaga

SEQ ID NO: 619718 - DNA, 97 bp, Homo sapiens
agctgacgaagctcgggacaggatcaaccggttcctcccaggcggcaaggatgacccctccggcgaaggtgtcctgccctcggcccgcggcccagcc

SEQ ID NO: 619719 - DNA, 100 bp, Homo sapiens
agatcatccacagagatctgaaggctggcaacattctctttaccttagatggagatatcaaattggccttaattccagatactccagagatcttgaattt

SEQ ID NO: 619720 - DNA, 62 bp, Homo sapiens
ccaacgttaccctgctcacatcactagtagagggtacaactgtaactgctttaagattattt

SEQ ID NO: 619721 - DNA, 100 bp, Homo sapiens
gctggagacagtggtggtgactggtactgtgtgcagaaatgtgattgagattcaagtcagggcctctctgcccttttccctccagaaacaaaaccaagat

SEQ ID NO: 619722 - DNA, 90 bp, Homo sapiens
cgcgtccgccgattcctcctccttggtcgccgcgtccttggctggcgtagccaccagcaacaaccgggtgagagagacggtcgccctgga

SEQ ID NO: 619723 - DNA, 75 bp, Homo sapiens
cgaggccaggagccaggggcccagaagagttgtctgctggttctcagcttgaagaagattctgcagtccttattg

SEQ ID NO: 619724 - DNA, 105 bp, Homo sapiens
cagaaaaacgagccatttctccgtcgattaaagagccatctgtggtgccaattgaagaacccagcgggtgccgcttctccacccgaggcttccacctccaacgag

SEQ ID NO: 619725 - DNA, 96 bp, Homo sapiens
ccgctgtgcccgggcctgcaccatgagcgtcccggccttcatcgacatcagtgaagaagatcagtctacaggtgtatccagcagctccaaagagac

SEQ ID NO: 619726 - DNA, 100 bp, Homo sapiens
cctgtacctacagccacccgctccaaaagcgtttgaacaatacttgaatctggaagatggcagactgctgactcatctgaggatgtgttccgcggcgccc

SEQ ID NO: 619727 - DNA, 75 bp, Homo sapiens
gctaccaccaccacaccagaaactagcaccagccccaaatttcggacttgcacttaggaatctgttacagtgagc

SEQ ID NO: 619728 - DNA, 82 bp, Homo sapiens
tgatcttccagctcccctcacccaacgtcgtgattttttatcaagcagaaatgcatcgaacaacgagaatcaagatcactga

SEQ ID NO: 619729 - DNA, 100 bp, Homo sapiens
tgcaccctcagccattgggatagctggccttggtggaggatttgaaataggaattgagagctccttaataagcatttatagtcagtttttggcagcaata

SEQ ID NO: 619730 - DNA, 90 bp, Homo sapiens
cgttaaggaccgttacgtttcccggttgctctatatgcaatcagtgctgtctactttgctggagtgatggtgcgactgatgttgactttg

SEQ ID NO: 619731 - DNA, 100 bp, Homo sapiens
cttgtggagccggagctgggcgcggattcgccgaggcaccgaggcactcagaggagacggggcgggcaccatgaacaagttacggcagagcctgcggcgg

SEQ ID NO: 619732 - DNA, 100 bp, Homo sapiens
agcggggggaggaggacccagaagccctgggcgctgcctatggcacagccaagagcggtaccggcattgcggccatgtctgtcatgcggccggagcagat

SEQ ID NO: 619733 - DNA, 50 bp, Homo sapiens
gcgcgcgggagcccggggaacagcgatatgaggccccaggattcctggcg

SEQ ID NO: 619734 - DNA, 83 bp, Homo sapiens
gtgcagaagatctgggtgcccgtggaccacaggccctcgttgcccagatgcacggaatgttaacactggtgaattagcagcaa

SEQ ID NO: 619735 - DNA, 100 bp, Homo sapiens
atttaagaagtttgccacagaggatgaggcctgggcctttgtcaggaaatctgcaagcccggaagtttcagaagattaagatgttctacgaggagcattt

SEQ ID NO: 619736 - DNA, 100 bp, Homo sapiens
ccagctctactccaggccccgtccgcccgggggcgccgcccaccgcgcctcgctcgtgtctgcgagattaatctctcatggccgctgcacaagaacctgg

SEQ ID NO: 619737 - DNA, 100 bp, Homo sapiens
cgacaggaaccagctcgggggccaactctgaggagtccactgcagcaggtgctatcagtgctaaagcattcattgctgtccttcaagcaacccagagtca

SEQ ID NO: 619738 - DNA, 74 bp, Homo sapiens
actccttcaagcatataagtggtcaaacaagatccgtacaggtttacagcaccaaataatctggccctgtcagc

SEQ ID NO: 619739 - DNA, 75 bp, Homo sapiens
aacactcctagccaatggtggtcatggagtagaagggagcgatactacagatttggataagtgaagacagtaata

SEQ ID NO: 619740 - DNA, 50 bp, Homo sapiens
gttgggctgtgacgctgctgctggggtcagatggagtctcgctctgtcac

SEQ ID NO: 619741 - DNA, 150 bp, Homo sapiens
caaggcaagaccgaattcagaaggatatcgacgtcgtgatccagaagtccagagctgaggactgcctgtttgcagacaagagtgagaatggtgaggcatatcagagaaagaaggcggcagccactggccttccagagggtcctgctgtcc

SEQ ID NO: 619742 - DNA, 101 bp, Homo sapiens
cttgcaagaaacctcaggacttgagtaacagcaacatgctattgtggacgatgaaaggctctctgcagaggagatggatgagaggaggcggcagaacattg

SEQ ID NO: 619743 - DNA, 100 bp, Homo sapiens
aggtccggggcttgccctggtcttgctcggccgatgaagtgcagaggtttttttctggaggagatgttaaagtaacccatcttgcaggacgacattgaag

SEQ ID NO: 619744 - DNA, 88 bp, Homo sapiens
cctacccgcagggcctggcactggccaaggagattggattttttatcaagcagaaatgcatcgaacaacgagaatcaagatcactgag

SEQ ID NO: 619745 - DNA, 98 bp, Homo sapiens
gccgccccgcccaacccctcctcccagtgctgaagtcccaaggagccgccctgcagaggagaccttgcctattttgatggacttagtgagactattct

SEQ ID NO: 619746 - DNA, 75 bp, Homo sapiens
tgaaacaccactgaagcattgccaagaaaccaccatcatgggttcgggtcccatagaccccaaagaacttctcaa

SEQ ID NO: 619747 - DNA, 50 bp, Homo sapiens
tcaggcctgcacggacggtgttggttgggcttgcattggacacacactac

SEQ ID NO: 619748 - DNA, 100 bp, Homo sapiens
aaagactttcacagagactttcttcatgagattgaaacaggtgtgtgcagtggcctcagggatccggaaagtctaggactgaacttctcctaacatccag

SEQ ID NO: 619749 - DNA, 98 bp, Homo sapiens
tgaaaagtcgcagcgagctggagccgccggaggcatgttatttgaaagcaattgagacgcaaccgaactttgcagtagcttggagtaatcttggctgt

SEQ ID NO: 619750 - DNA, 74 bp, Homo sapiens
tttacatgacagaaatcacctatgtttacagcgacagacttgggaagatccccatgaaaaagataagagcacga

SEQ ID NO: 619751 - DNA, 98 bp, Homo sapiens
ggagaagtaccagttctaaatgtcagttataagccacagaaaattagtcccaaatcaactggtagaagagcagaggatggctctgtcattgattatga

SEQ ID NO: 619752 - DNA, 75 bp, Homo sapiens
gaaccatcttcctgcacacagccacgatttgcaaagattttaggtgatgggcaagtcagaaagtcagatggatat

SEQ ID NO: 619753 - DNA, 75 bp, Homo sapiens
gactacggacctgtctgggtctcagccgccaaagaccccgtccggtatagtcgtctccccctccaccacggcaag

SEQ ID NO: 619754 - DNA, 75 bp, Homo sapiens
gccaaatcgtgacaccatgaaagtcctctttggacatctaactaaattagtgggatggtttggccatgaactcag

SEQ ID NO: 619755 - DNA, 100 bp, Homo sapiens
tacactgacagaagcagtggtcgaatccagtagaaaactggtcaaggaagctttttcggctttgtgagaaaccttaccatcaaacacgatggccagcaac

SEQ ID NO: 619756 - DNA, 100 bp, Homo sapiens
cacaagtccctggaggatgctctgagctcagacacatctggccacttcaggaggatcctcatttctctggccacggtttattaacaaaactaggataccc

SEQ ID NO: 619757 - DNA, 98 bp, Homo sapiens
tgaagcttcctcatccttcatacgactgaccctggagctgaaggccaggttttgcagtggtctgaggaccctttgtggaggagttgtttgaagtgaca

SEQ ID NO: 619758 - DNA, 75 bp, Homo sapiens
actttactgagaattttccacctcctgacacaacaccactcaggtgtgaccgagtgttatgagtgtcatcctaag

SEQ ID NO: 619759 - DNA, 93 bp, Homo sapiens
gcctcagttggaagcagccgatccagcctgcggagcctgtggggcaggtgaagccaaaaaccttccctcttacccggggccgagcaagatgag

SEQ ID NO: 619760 - DNA, 75 bp, Homo sapiens
gcctggaggccgagcgcgagcagttcgacaagacccaggctcttgcagccaatgccggaacaggatttgctgttg

SEQ ID NO: 619761 - DNA, 101 bp, Homo sapiens
cgatgagacagagttgcgaccgcgcggcaggcgccatggctgcggagcggacccggccgctgcaaggctctggcggtccgagcgtgcctagtagctgtgaa

SEQ ID NO: 619762 - DNA, 96 bp, Homo sapiens
ctaccccccaaagtcctggagctgtgggctccatgaagaaggagttcccgcagaacctgggaggcagcgacacatgctacttctgccagaagcggg

SEQ ID NO: 619763 - DNA, 100 bp, Homo sapiens
gcgtggaggagattccagtcgctgctcctgcttctcgggctgctggtgctgtgcgcgaggctcctcactgcagcgaaggcgctgtgcttcgccgtgagcc

SEQ ID NO: 619764 - DNA, 75 bp, Homo sapiens
atattattcgcctgtttgatcaacctggagtccttcaataatgttaaacagtggctgcaggaaatagatcgttat

SEQ ID NO: 619765 - DNA, 100 bp, Homo sapiens
aagcgatgaaatccaaaggtgaatcttttggttggtgattttgatgatagccacaaagcaagcagggtcagaagccaatgacctggccctgaggctggct

SEQ ID NO: 619766 - DNA, 100 bp, Homo sapiens
ttttagctcctcttgttactgagtatgataaacacctaggagaactaaatgggcagctgaaatattaccagtgaatattacttcagtgtagaaaatttgg

SEQ ID NO: 619767 - DNA, 75 bp, Homo sapiens
aggcgaagctggccgagcaggctgagcgatacgacgatgttgctgctgctgctactggcgccactcttcctccgc

SEQ ID NO: 619768 - DNA, 100 bp, Homo sapiens
ggaggcggcaagcccggctgcagaaagagcttgcagaagcagcaaaggaacctctaccagtcgaacaagagaagaagaaggaggttcctgctgtgccaga

SEQ ID NO: 619769 - DNA, 99 bp, Homo sapiens
gacgagagagtcccaagtacgtccacggtcagccttgcgcagtgtatgtatgaggaagtgcccacaggagtgtgcctccgggatgaagcaaagcaacag

SEQ ID NO: 619770 - DNA, 88 bp, Homo sapiens
cagggccttcgcaccccttcctgtcaggggccgagggtcaccgaagtccccacacgctggctctccacacccctcctgttccagaaag

SEQ ID NO: 619771 - DNA, 82 bp, Homo sapiens
ctagctttctccttctggtgtggggcccgaggtgaccatggaggaagaagatgagtctcgagggaagacagaggagtcgggg

SEQ ID NO: 619772 - DNA, 83 bp, Homo sapiens
ccggcttcccgcaatgaggagggcccttcacagaaccggggtgcgagaagatgtactaaattcattgaataacaactttcttc

SEQ ID NO: 619773 - DNA, 100 bp, Homo sapiens
acgagggccccgggcggacgccgcagagcgccgaggaggctttcctgctggtggcaaccgcctacgagacactcaagggatcgcttacacctgagacgaa

SEQ ID NO: 619774 - DNA, 100 bp, Homo sapiens
aacttttaagtggagtggtggatcagaccaaagatggatgtgaatttcttcggagtaagaaatcctcagaggaaattacccagtatattcaaagctacaa

SEQ ID NO: 619775 - DNA, 83 bp, Homo sapiens
ccgaggaggttgggatcttcttcactgcctctggcatggatgaggctgaaggtgatgtggccgccctcaaccgacgcatccag

SEQ ID NO: 619776 - DNA, 97 bp, Homo sapiens
aaaatgctggcgtcagcatcggaagatcattttattgacattgctgaagtggagacaggtcagccaagatgggaagtcgctccttgacaagctccag

SEQ ID NO: 619777 - DNA, 100 bp, Homo sapiens
cctctttaagacgaattaaagggagattacacagaagcaaaagccttgatagcatggatttctgtgagctcactgtgtcatggagaaactccagctgggc

SEQ ID NO: 619778 - DNA, 90 bp, Homo sapiens
aaagaagcccaggatagaagagtcaataactgaagacttaagaattttctgcgtctgctaaataccggggaaaacccaatctagaaatcc

SEQ ID NO: 619779 - DNA, 100 bp, Homo sapiens
cagattggcttcaactgcagttggtgtagtaaacttcaaagggtttgaatgccggtgtggaaatgtttactgtggtgtacaccgttactcagatgtacac

SEQ ID NO: 619780 - DNA, 73 bp, Homo sapiens
aaccccggggtgcgagaggtggtgtgcatgacactcctggaaaacaggtgaatctggattgggaaagtcgaca

SEQ ID NO: 619781 - DNA, 75 bp, Homo sapiens
aggcattagcgcagctcgagaaggccaagtgagcagcggttccatcgcagtgaacgccgactcttcggtgcagtt

SEQ ID NO: 619782 - DNA, 100 bp, Homo sapiens
gacaaaggcacagctggatgaatggaaagcaaagaagaaagcttctaatggggtcatccatgcctggcttattatatcatctctattgttgctgttcttt

SEQ ID NO: 619783 - DNA, 50 bp, Homo sapiens
ctccagaacatgctacaaaactgctccagaatgcctatgtcaacatcaac

SEQ ID NO: 619784 - DNA, 75 bp, Homo sapiens
gacgtgtttgaaggaagacgagaatttacatagtacatgacgaagttaaggataaagcttttgaactagaactca

SEQ ID NO: 619785 - DNA, 89 bp, Homo sapiens
gaagaaagtgcgcagcctgcaagattgtggtgcacacgccctgcatcgagcagctggagaagagctgctgcccaaagggagcaaggagg

SEQ ID NO: 619786 - DNA, 100 bp, Homo sapiens
gaaatcgacttcggtttcagttggagttggaatttgtgcaatgtttagccaacccaaattaccttaattgagtataacatgtatggctggtgggtgggag

SEQ ID NO: 619787 - DNA, 75 bp, Homo sapiens
gcttgtccaacagtatgggatgctgctggaacacagcttcactttgctggtgcatcatttctggcatggcttcag

SEQ ID NO: 619788 - DNA, 100 bp, Homo sapiens
agtttacaggccctctattgccaactgttaatacttcgggatgacttcagacaaaacccttcggatgtcatggttgcagtaggagagcctgcagtaatgg

SEQ ID NO: 619789 - DNA, 85 bp, Homo sapiens
aactggggatgattacagttcttcctaaaaaagatacaagaaacccactgactttaaaagaaagaaattgcaattattgaccaag

SEQ ID NO: 619790 - DNA, 100 bp, Homo sapiens
cattctcatcagagaaaccagtcccattttcaactggcgcggctagttgaaagttccacatgtttccccagtcagattgttcgatatggtgagattccag

SEQ ID NO: 619791 - DNA, 89 bp, Homo sapiens
tacctcctaggactctatgacacggccggacagataacaattggtgtatatgatccctgtaacttagcccagtaccctggatggccttt

SEQ ID NO: 619792 - DNA, 75 bp, Homo sapiens
agcaagaaagaccatcaagtttaccaaaactatgttccaacttcctgtcaacaatcttggcagtttaagaaaagc

SEQ ID NO: 619793 - DNA, 82 bp, Homo sapiens
agaccctggagcctcagttggaagcagccgatccagcctgcggagcctgtggggcaggtaccagctggaggatgagtctgcg

SEQ ID NO: 619794 - DNA, 100 bp, Homo sapiens
tgttggatgaaggaacaaaccttggaaatgttattgataactatgtttatgaacataccctggagtatgctgctgctgttccgctttgcgtcctcgctac

SEQ ID NO: 619795 - DNA, 90 bp, Homo sapiens
ggaatacatggaagtccgggagagaatacacagagccagtgaaatgacaatggatgctctgttggctcgattgaaacttctgaatccaga

SEQ ID NO: 619796 - DNA, 82 bp, Homo sapiens
ccagcaaggtcggcagagcaaggggcttacgcagaaggacctggccacgctcaagaggtttggatatggaccttcttcaatt

SEQ ID NO: 619797 - DNA, 100 bp, Homo sapiens
caaacagttatacctgaaggggaatgctgcccggtctgctccgctactgctattgacctgaaaagtggttctggaaaagtgtaccaaggccctgcaaaag

SEQ ID NO: 619798 - DNA, 100 bp, Homo sapiens
ttgctccaaaacctaagtacaacccatacaaacaacctggaggtgaggctcaccagcgactggaaccagcaactctgtcagggattgtaggatttatcct

SEQ ID NO: 619799 - DNA, 99 bp, Homo sapiens
cggagataaattcccggaaccgcgattcggcgtgtcagactggagcgctgctcagcgctttcgttcagctgtgccacatttccacgacgctggcagaga

SEQ ID NO: 619800 - DNA, 99 bp, Homo sapiens
ctccaccacatctagcagaacctcatgatgatcctgagacttgtcttgttgctgctctgagcatctggaggaacagaaaactaagttcatgtcatcctg

SEQ ID NO: 619801 - DNA, 75 bp, Homo sapiens
gatgttggacacaatatctatattctggcccatcaggcatttggctttatgtcccgagttgccctacaagcagag

SEQ ID NO: 619802 - DNA, 100 bp, Homo sapiens
ttaaggaacagcgagctgtttgacccctttgacctcttcgatgtgcgagactttggaaagtctgttctctggggaggcagtaaggggccgtggagctggc

SEQ ID NO: 619803 - DNA, 100 bp, Homo sapiens
aacctacggaagaagaatgtgaatggaaaccagatgaagaagatgagatttcggtggtgaagcagtattttccaatttgaagattcatttgaaggtggct

SEQ ID NO: 619804 - DNA, 100 bp, Homo sapiens
ggcaccgggatcgtgaccgagaccgtgaccgagagcgtgaccgagagcgcgaatatcgtcatcgttagaagttaagtgggcagaccaacatccacctcag

SEQ ID NO: 619805 - DNA, 51 bp, Homo sapiens
ccaagctcgtagcctgccactccgtgcgtactctatcatcacccccaacat

SEQ ID NO: 619806 - DNA, 80 bp, Homo sapiens
agaccctggagcctcagttggaagcagccgatccagcctgcggagcctgtggggcaggcaccagttagaagacaaatgaa

SEQ ID NO: 619807 - DNA, 82 bp, Homo sapiens
tggagatgggcagacggattcatttagagctgcggaacaggacgccctctgatatatcagttttagagaatgtggcgtggag

SEQ ID NO: 619808 - DNA, 100 bp, Homo sapiens
gcgctggaattatgggcgtgagccactgtgcccagatatcagttttagagaatgtggcgtggagaaattctcaaggaaagagtaaaatgctggtgatgtg

SEQ ID NO: 619809 - DNA, 75 bp, Homo sapiens
ctattcctggattcaatgtcatccagagcccagagcagggctaagacagtgcctgtccctgaaaagtggaccact

SEQ ID NO: 619810 - DNA, 75 bp, Homo sapiens
taatgccaacccaaattatacctggttctgatgcaaagtacagttcgagagcacagagatggaggtcatgcaggt

SEQ ID NO: 619811 - DNA, 90 bp, Homo sapiens
ccagagtcacacacggtcctaagagctgggcaccaggaagcgaaggctgaacatccagtcatggataaaaatgagctggttcagaaggcc

SEQ ID NO: 619812 - DNA, 83 bp, Homo sapiens
gaagatggcggcagccgaggccgcgaactgcatcatggaggtgtggacactgccagcggctgcagccgacttggaatgacctg

SEQ ID NO: 619813 - DNA, 82 bp, Homo sapiens
ttgagtcttctctgcatcccagccatcacctggatttacctgttttctgggagcttcgaagtctgggttctgcccgcacaca

SEQ ID NO: 619814 - DNA, 100 bp, Homo sapiens
cgagaagcctgaaaagtcgcagcgagctggagccgccggaggcctgtcccaggctctctatcttctctgctacatctccacaacagacagagacagccca

SEQ ID NO: 619815 - DNA, 100 bp, Homo sapiens
gtgagaggcctctcgcgggacctgggccattttggtctccctttggtgaagcacaatcaggtcacagatgtgacattgatgtgtccactgaagccatgta

SEQ ID NO: 619816 - DNA, 82 bp, Homo sapiens
gctggagtccgcgcctccctgggctgtccagaagggaagaaaatggagtttatcaccagcctactggatgctctcaccactg

SEQ ID NO: 619817 - DNA, 75 bp, Homo sapiens
ctttcatgggcctcttctttatgaagcaaagatctacgaactgcgtgtgatggagaccaaacccgacaaggcagt

SEQ ID NO: 619818 - DNA, 90 bp, Homo sapiens
cgttgcttgtggaggcgtgggattccagtaatgacaccgttcgtgcagcagtaccgcgtcgccatgactgccaaggactgctccatcatg

SEQ ID NO: 619819 - DNA, 101 bp, Homo sapiens
ttagcttggcctctgtccctgaagatcttacagactctttcagcacctacgaaaaatttagaacagcaggtgaatcacagccagcagggacatacaaatgc

SEQ ID NO: 619820 - DNA, 75 bp, Homo sapiens
ctttgccgccaccatgcccaaaacgctgcaaactggatcttcaaaagctagtggagactttggaagaccaggaat

SEQ ID NO: 619821 - DNA, 115 bp, Homo sapiens
gaggagtctctgtccgggggcctggctaaggaaaccctattacctccaggtggcgacagacaaagttgcagaaaagctgagctctactctctcatgggtgaagaacacagtatcg

SEQ ID NO: 619822 - DNA, 97 bp, Homo sapiens
gagtcattcctgcctttgagcggactcccttttaaggtatgatctcgtgaaatcttgagagaaactgaatgacgaatgaaactattgttcctgtttc

SEQ ID NO: 619823 - DNA, 75 bp, Homo sapiens
ggatggaactgaggttcaacactctggcaaaatgcccacactgcaaaaaaatgctaaaagagatgctaagagaat

SEQ ID NO: 619824 - DNA, 83 bp, Homo sapiens
ggctggaggccccggcggctaggtttgactttgagggtctggaaagtggtgacgatggtgcatttgacaaactccggtcctgg

SEQ ID NO: 619825 - DNA, 83 bp, Homo sapiens
ggcgtctcatggcgttggaataccggctctcagcggctgaagatgagaatgtgcctactgctcctgatcctccaagtcaacat

SEQ ID NO: 619826 - DNA, 74 bp, Homo sapiens
atggtgaatgccacacccttcaagattgctcgaggccagaccccatgccacagctggatgtgactgaggccaac

SEQ ID NO: 619827 - DNA, 100 bp, Homo sapiens
cgcctgcgctatgccctgctgtagtcacaggagctgtagagaggaccccggtacatctgaaagccgggaaatggttgggcccgaaggcatcctgcagaac

SEQ ID NO: 619828 - DNA, 75 bp, Homo sapiens
tggtaacccgagaatacaccatcaacattcacaagcgcatccatggagtaattcccctctgtgccctgataaatc

SEQ ID NO: 619829 - DNA, 75 bp, Homo sapiens
ttgctcctccctgcaactaactccattcttaattgaactcaagacatggctgcccagtgtgtcacaaaggtggcg

SEQ ID NO: 619830 - DNA, 83 bp, Homo sapiens
ttcagtttccagaatcagcagctccggcagcagtgtcctgtgctgatggtgttggcagtgctgaagctgctgaaagatggcag

SEQ ID NO: 619831 - DNA, 100 bp, Homo sapiens
tgccagtgtacttcagttggtgcacaaaatactgtcatttgctcaaagcgtgtgatgaatgcagactctgctaccattttggctgtttggatcctccttt

SEQ ID NO: 619832 - DNA, 95 bp, Homo sapiens
cgtctttgctcaaggatcccagttttctctggatgacgtgagaggtggagaagagcgagtacttgagaaagaagaggaagaagatgatgatgaag

SEQ ID NO: 619833 - DNA, 75 bp, Homo sapiens
gaaagacgtttcaaaagccaagccagttaacgcgacacattaggatacacacagattgcaacacctgctcggtat

SEQ ID NO: 619834 - DNA, 88 bp, Homo sapiens
tcagctgacatatgaaggactcattgatgaaatttatggcattcagaacaagcccataggcagcatgtcatccatggaagtgaacgtg

SEQ ID NO: 619835 - DNA, 100 bp, Homo sapiens
cgcccgccgggcacacaagaatggtcactattctgggacatagaacgaggagagaattatatactgagtccagatgagaagtttggctttgagaaaggag

SEQ ID NO: 619836 - DNA, 100 bp, Homo sapiens
gtcttcgcccaggtggccggcgcttcagatggcccactgcgtgaccttggttcagctgtccatttcctgtgaccatctcattgacaaggacatcggctcc

SEQ ID NO: 619837 - DNA, 100 bp, Homo sapiens
ctcctctatgatgaagaagaccttgaaatgcatccgctggtcgctgccggaaatggccagcgggcgatgatgagatctcatttgaccctgatgacatcat

SEQ ID NO: 619838 - DNA, 122 bp, Homo sapiens
cgaaactcctgcacctgtatatagggccaagtcaattctggagacctgggtgtgggtcaagcaaccagaaagatttgatcaccaggagatttttcgggacattaccaaaccactcattttag

SEQ ID NO: 619839 - DNA, 91 bp, Homo sapiens
ggtggactccttcggcagtccacccaccgccgccgcctcccagcaaccatgtccaagggacctgcagttggtattgatcttggcaccacct

SEQ ID NO: 619840 - DNA, 75 bp, Homo sapiens
gccggtctagatccaagcaaccaggtgacacttggacagaaacactggcctatgtgctcttctggggagttgcaa

SEQ ID NO: 619841 - DNA, 83 bp, Homo sapiens
gattgcctcaaggatgtcatatctatgagtaccgcgagagcaacaaagcttggggcttccttggtcgcacccaccacctgcct

SEQ ID NO: 619842 - DNA, 100 bp, Homo sapiens
caacatagagctgacattaactgtcaggtgacttaagagattaaaattaatttggttgctgttggttctgaacaaataatgagttcttttatttgaggta

SEQ ID NO: 619843 - DNA, 101 bp, Homo sapiens
ccatggaagtgaaagtcctctttttctttgtaccacttactgaggtttcagccatgccacagagctccggcagtcatgggcccgctatagcagcagttcat

SEQ ID NO: 619844 - DNA, 100 bp, Homo sapiens
agaagagtgagagagagctattagagattgtgaagaagaatttcgatctccgccctggggtcattgtcaggaacttgtcgagatggtaaaagcaaagaaa

SEQ ID NO: 619845 - DNA, 108 bp, Homo sapiens
cagcaaggtcggcagagcaaggggcttacgcagaaggacctggccacgcaaattgtggctactaatttgccccctgaagatcaagatggctctggggatgactctgac

SEQ ID NO: 619846 - DNA, 90 bp, Homo sapiens
tgggcgtgtggagccaggcagtctcgaatcctctcctggtttagggaggggaagtgttctagaacagatcagacattttgtaatgatgcc

SEQ ID NO: 619847 - DNA, 74 bp, Homo sapiens
aacagagaatacaagaggattatcttagaattttaagatacttcaggtctcaagtattcccatgtgttttaaaa

SEQ ID NO: 619848 - DNA, 98 bp, Homo sapiens
atccaaagcacacatgaactcagtgctcatggggatgaagaaccagctcggtgaaattgatcttcaaattctctccaaagttcaggctcaatacccag

SEQ ID NO: 619849 - DNA, 50 bp, Homo sapiens
ccacagaccagcccagcattcaggtacaatggcttggtgaccggcacgag

SEQ ID NO: 619850 - DNA, 82 bp, Homo sapiens
cagctccgaaatcaccaccaaggagaactatgccatttttgggtcaggactggagatctcctggatggagttggattaagac

SEQ ID NO: 619851 - DNA, 99 bp, Homo sapiens
gccagcgtgatcctccgtgacattgcgagagccagagagaacatccagaaatccctggctggaaccgtgcagtccctcggcttcgccatctaccgcgcg

SEQ ID NO: 619852 - DNA, 80 bp, Homo sapiens
acctacgacgatcgggcctacagcagcttcggcggcggcagaggtgaaactggaacgccaagctgaagaagaacgaatac

SEQ ID NO: 619853 - DNA, 100 bp, Homo sapiens
tagaaaatgaagattttgacagtcgtagatacaaatttttggatgatgatggatccatttctcctattgaggagtcaacattgctcgctgtaagcagctc

SEQ ID NO: 619854 - DNA, 74 bp, Homo sapiens
agcccctggcctgcccggacgagttcgatgacttcgtcacctatgagactccgtgggaaggaggcttgtttaaa

SEQ ID NO: 619855 - DNA, 50 bp, Homo sapiens
gcttgaaatgctacatttccaagatcggatcaacatcaagaggaagggag

SEQ ID NO: 619856 - DNA, 75 bp, Homo sapiens
gcagtgtcactactgttaaggccagatccagggattctgatgaatctggaggcgacgttgtggacgtttaccagc

SEQ ID NO: 619857 - DNA, 97 bp, Homo sapiens
tgcatcttccccagagaaagccaagggtagacatactgtgccttgtatgccacctgcaaatgaagttattgccagtggactgtgagagaaaaacaga

SEQ ID NO: 619858 - DNA, 88 bp, Homo sapiens
attcgcggctcttcccgcccgccttccgccgtctcttcgagttcttcgtgctgctcaagggtgagaactctgtctcagtcgacgggaa

SEQ ID NO: 619859 - DNA, 82 bp, Homo sapiens
ctcaatatctgtcttcggtggactccttcggcagtccacccaccgccgccgcctcccagattaactgctgaagtactgatcg

SEQ ID NO: 619860 - DNA, 75 bp, Homo sapiens
cgcaggacttctcctggcggcgctgcggatccagggggtcggctgccagattacatgaagcagatgacatttgaa

SEQ ID NO: 619861 - DNA, 90 bp, Homo sapiens
gcagaattccgacatgactcaggatatgaagttcatcatcaaaaattgctatgctgggactcatgtatgtctactggactcagctcaaca

SEQ ID NO: 619862 - DNA, 75 bp, Homo sapiens
ctgcctcctgcagcccccatagcagatcatggaagggaagtggttgctgtgtatgttactggtgcttggaactgc

SEQ ID NO: 619863 - DNA, 82 bp, Homo sapiens
ggggcgcttcgccccgggccccccagcatgaagaccccggcggacacagggtcctcactgagcagcgagtcgtcccccgtgt

SEQ ID NO: 619864 - DNA, 90 bp, Homo sapiens
gaatcccctgtttgagaaaaggcctaagaattttggcattgggaatgggtactgttcaaaaaggaatgccccacaagtgttaccatggca

SEQ ID NO: 619865 - DNA, 50 bp, Homo sapiens
gcagaggtcaatctttatgtacaggtctacctgcaagtcggatttcccag

SEQ ID NO: 619866 - DNA, 100 bp, Homo sapiens
ccggcctcctaggcgcgctgcacctggtgatgaccctcgtagtggctgcggcgcgggccgagaaggaagcttgcagtgagctgcatactccatcgctaga

SEQ ID NO: 619867 - DNA, 97 bp, Homo sapiens
aatgtgtgtgaattggatttgatcttccatatggataaggaatacaaacagaagcttgcacgagtaacccaggtccgcaaggaactgaaatcccata

SEQ ID NO: 619868 - DNA, 80 bp, Homo sapiens
caagacgacgagtatgaagatctttatgatgatccacttccatggtaatctacagttgctgcagaactgcctggcagtgt

SEQ ID NO: 619869 - DNA, 75 bp, Homo sapiens
gcccaagcacttgacctggagctgagcagggccaaaaaacagggtctattgacattcagggatgtggccatagaa

SEQ ID NO: 619870 - DNA, 97 bp, Homo sapiens
tccggataagccgggcgggagcccctcggccagattcggaggaacctgagtgcctcagtcatcgccgtcaccatccaggggggagcgcaccacctcg

SEQ ID NO: 619871 - DNA, 100 bp, Homo sapiens
aggctcgggctccggaggacaggaccgcgcgactggccggccgatccctgggccggccgcgggagcaggaaccgaatattgtatctgacgcatcctgtaa

SEQ ID NO: 619872 - DNA, 90 bp, Homo sapiens
tggccttctacgttgtgaaaatggcagacaccacccatcctttaaccaagcacagaaaaatagcctcttcttttcgcgattcatcattat

SEQ ID NO: 619873 - DNA, 75 bp, Homo sapiens
cttcttcaaaaatgaccagtgggcttgggaaacgctccgagacaagtcccctttacttggtaaatcacggcgaga

SEQ ID NO: 619874 - DNA, 75 bp, Homo sapiens
acgatccagacggcagggagtgcatcaaaggtgtgaacacagcccagcagaccgggttatcccagtccgaggtcc

SEQ ID NO: 619875 - DNA, 51 bp, Homo sapiens
agagctgcagaaaatgatcagcttccaggaggcagttcccatgttatacgc

SEQ ID NO: 619876 - DNA, 100 bp, Homo sapiens
caggctcggaggaaccggcagctctccacgcccctgcccgaagcctgacccgactgcctctctcagtgaggcgagtgttgtgtataaaggaagttgaaat

SEQ ID NO: 619877 - DNA, 97 bp, Homo sapiens
attattttggcacaacaggaaggttggtactaagaagtgcctttcctgacgtctctgctgcttggaaccgcttctagagcagtctctgcttttgcct

SEQ ID NO: 619878 - DNA, 90 bp, Homo sapiens
ctcaatttaagcctgatctaacccctagaaacaggaacgaatgcaggaatttgggaactgagctgtgcaagtgctgaagaaggagatttg

SEQ ID NO: 619879 - DNA, 99 bp, Homo sapiens
cttgcctgggtccatgccactgtctactcccagggttccagaccatcaggatatagcttttggggccttgcagcagggaactaactgcctcgacacttt

SEQ ID NO: 619880 - DNA, 98 bp, Homo sapiens
gctgccctctcgaaggcaggacagcggtggcggcaggttgtggcagcactgcctgaaggtatgagaccagattctaatctttatggttttccatggga

SEQ ID NO: 619881 - DNA, 75 bp, Homo sapiens
cagtggaggaagtcagcggtcaacgttgcttcaattcagaattatttgggaagaacagtgattattgagcagagt

SEQ ID NO: 619882 - DNA, 51 bp, Homo sapiens
aaagggggcctttggtgacatgcatatgaaaactgcttcatcaacctcatc

SEQ ID NO: 619883 - DNA, 139 bp, Homo sapiens
cggcaggagcgggtagtgccagctacggtccgcggctggggttccctcctccgtttctgtatccccacgaggaagaaatgcagagtaacgtggaagtggtccacacctaccgccagcacattgtgaatgacatgaaccc

SEQ ID NO: 619884 - DNA, 100 bp, Homo sapiens
gtctttgccttcttcaccacggccgagacgctcacggatatagtgctctcctgccttcggtggcaagctgaagaacccactccaagttgtcctggtggcc

SEQ ID NO: 619885 - DNA, 101 bp, Homo sapiens
gcaggctcggcgccggtaggaagagtcagaggggtgaccagagagcccaacgcctggtgctcaagactttctccgaggttgctgcttttgctcagaggaca

SEQ ID NO: 619886 - DNA, 100 bp, Homo sapiens
gtttttggcaactatgttatacagaagttttttgaggataagtgcaagaaggctgcttccagctccaaagcacctaagaatggaggtaaagcgaaggatt

SEQ ID NO: 619887 - DNA, 100 bp, Homo sapiens
tgaagacatctggcgtggactactctgatgaaagaagagattttatcgacatcgaaagtaaatttgccctaaggacccctgaagacacagctgaggacac

SEQ ID NO: 619888 - DNA, 76 bp, Homo sapiens
gaggacacagtgcagcctctgctccaggagcaggtggattcaccaatgaacttgaagcatcctcatgacctagtca

SEQ ID NO: 619889 - DNA, 75 bp, Homo sapiens
catggaggagcactgcaagcttgagcaccagcaggtgaaatcttgtgctgagtgggtgtctctctcaaaggccag

SEQ ID NO: 619890 - DNA, 100 bp, Homo sapiens
ggtctttgtcaattatggaggaggaaaatattggtacttcaaacatgcaagttggaatggttgtgcccacgtgcctcagggccttggtagaaatggcccg

SEQ ID NO: 619891 - DNA, 82 bp, Homo sapiens
gtcatcagctttgctactgtcacagaggtccagttccggccgtaccgcacagacgacttcatcacgcgcctgtactatgaga

SEQ ID NO: 619892 - DNA, 50 bp, Homo sapiens
ccgacagccaggcccgggagaattacagaatgtctgaaggggacagtgtg

SEQ ID NO: 619893 - DNA, 87 bp, Homo sapiens
cgttcaagcgaaaacatgaccgctgagcccatgagatgggaaatttggaattaagccttcccagaggagaatttctgggaaatctac

SEQ ID NO: 619894 - DNA, 86 bp, Homo sapiens
tcgctccctctgctcttcctcccttcgctcgcaccatgggcgaccattgacgaggtggagacggacgtggtggagattgaggccaa

SEQ ID NO: 619895 - DNA, 100 bp, Homo sapiens
tttgagctgatgcgggagccgtgcatcacgcccagtggcatcacctacgaccgcaaggacatcgaggagcacctgcaggaagtgcacctttgacatgttc

SEQ ID NO: 619896 - DNA, 75 bp, Homo sapiens
atcagcaccggaggtggaagactggaaaaagtgacccattttgtgtggtagaactgaacaacgatagactgctaa

SEQ ID NO: 619897 - DNA, 97 bp, Homo sapiens
cgtgaggctcacagccgaacaggcacgcttcttcctgggatttggacatttggtgccatcttcagaagatccaggagtcctgggaatcgtgtatgac

SEQ ID NO: 619898 - DNA, 98 bp, Homo sapiens
gatggaaacaccattccagaaaatgggattgcccaccacgataatgcagttcttattactagctattgacctgaaaagtggttctggaaaagtgtacc

SEQ ID NO: 619899 - DNA, 100 bp, Homo sapiens
cacggtgtgggctgaatgaagagctgccagatcccacaggaaattcggcgccttcatcagtatgtgaaatttgctgtccaagatgtgaatgatgttctag

SEQ ID NO: 619900 - DNA, 74 bp, Homo sapiens
tgcatccttaactgagaatgaggtgttggagagcacaatggctgaacaagtccttcctcaggctttgtatttga

SEQ ID NO: 619901 - DNA, 98 bp, Homo sapiens
gcttgaggaaatgactcggactgaacaagaggacaagttggatggcttgaggactggtactaaaaggaaacgtgactgggaggccattgccagcagaa

SEQ ID NO: 619902 - DNA, 96 bp, Homo sapiens
tggagtgaaccggagaccccgaaaacggaagcgcagggagaaggaagaggtgtttgaaaagagaaacagcacccaggactatcttccaaagagttc

SEQ ID NO: 619903 - DNA, 82 bp, Homo sapiens
gaagatgaggaggtcgctgagagctgggaagaggcggcagacagcggggtagatttcgggcagacaacttgaacaagctgaa

SEQ ID NO: 619904 - DNA, 75 bp, Homo sapiens
ttgcctggctccacgccctgctgggtcctacctgtcagagccccaaggatctcaaagatttcatgagacaagctg

SEQ ID NO: 619905 - DNA, 100 bp, Homo sapiens
ggaacttgtgacaatctggtgaatggatacaggtgtacttgcaagaagggctttaaagaatacagattctgttcatcttgctctgaaattaaataattct

SEQ ID NO: 619906 - DNA, 71 bp, Homo sapiens
ctgtccacagtgggctctgccatcagcaggaagcttggagacatgagaccatgccagatgatgtccaaggc

SEQ ID NO: 619907 - DNA, 75 bp, Homo sapiens
cccacacgtccgttcgagctctgactgcagacctaccaaaacagttttttgctccactcaagcctgttagaatca

SEQ ID NO: 619908 - DNA, 78 bp, Homo sapiens
agcatacaaggcaccacgttcacatcactgcagaaagtgtaacaggcaggagaccgggtgatggtgttgaaccggtca

SEQ ID NO: 619909 - DNA, 100 bp, Homo sapiens
gccaggagccctcttccttcaggtcgctctggtgcagtggacagagagtgtgggcctcacgctggtcagcagggacctcacctccatgcagctgaagacc

SEQ ID NO: 619910 - DNA, 96 bp, Homo sapiens
aagtacattctcaggtggagaccttgtgaaactgcagcacaacagaaatttgctgaagaacttcaaaagcgagaacgttttttacttgaaagagaa

SEQ ID NO: 619911 - DNA, 88 bp, Homo sapiens
gggcggcaccgcggtgcgcaagcgcaaccgtcggtgggtcggggatcggtcgcctgagagacacgcagcccaagaaggtccggaaggt

SEQ ID NO: 619912 - DNA, 51 bp, Homo sapiens
ggagaacttcaggaacctgctgtcagtggatgctctctgtgtgggtatgtg

SEQ ID NO: 619913 - DNA, 100 bp, Homo sapiens
tggagaagctgagagagcaactgtgcacctcagaaaactcaatgacaggtagaacaagtcagccagttggctgtgttcatagaggcagcattagactatc

SEQ ID NO: 619914 - DNA, 90 bp, Homo sapiens
ggatgtggagtcctgccatgatatgatcccatgagctgcgttccaaggtggtttccctgcagctgctcctctctgtgttgcaaaatgctg

SEQ ID NO: 619915 - DNA, 74 bp, Homo sapiens
ctgcaaggagaagctgcacgacgtggacttctacaaggcccgcatggaggcgggagtcatggatgtagatgctg

SEQ ID NO: 619916 - DNA, 73 bp, Homo sapiens
ctgcatggtttcaagggacgtaccaggaggatggtgcccagaggagaaggcagagcccccccaggctatgaat

SEQ ID NO: 619917 - DNA, 100 bp, Homo sapiens
ctgccttccctgacccccagttacgcctggaatatgaaggcttccccgtcccggctgtattcatcaccaaagaaaaaacttacaccaatgcagaaatcgg

SEQ ID NO: 619918 - DNA, 100 bp, Homo sapiens
attgaaattcttcttcgttatggacagcatccaaacattatcactctaaaggatgcagggaaacatgaagccattgtgaagaatgtacatgatctcctgg

SEQ ID NO: 619919 - DNA, 90 bp, Homo sapiens
cccgcgagagccggggccccaggcccgccggacaccatgaaccacctggtgagcccgtggtagcagcagaagcaggcattatgggataac

SEQ ID NO: 619920 - DNA, 100 bp, Homo sapiens
gcgagagagcgcggccctcaggagcaaggcgactgctgcagtaagaatgtcttttccacctcatttgaatcgccctcccatgggaatcccagcactccca

SEQ ID NO: 619921 - DNA, 82 bp, Homo sapiens
ctggcagccgcggatctcaccgccgctcaggcttttcttgcctggagaagagggaggggagaggacaagggccctggctact

SEQ ID NO: 619922 - DNA, 75 bp, Homo sapiens
tggccttgaggaagaagacatgctctacagtgctcagtctttgagctcctggtaacgtttttatccatggatgac

SEQ ID NO: 619923 - DNA, 113 bp, Homo sapiens
cttccccgcaggcacccggcacgcgccttccccgccgccacgatgcccaagaggaagttgttgccgaagagattggactgggagggcaacgagcacaacaggagctacgagga

SEQ ID NO: 619924 - DNA, 89 bp, Homo sapiens
ctttggatgttgccaacaaaggagccccagactctggtaaatgctctgcttcctcctgcctggatacttctaatgaccctgacgacctg

SEQ ID NO: 619925 - DNA, 100 bp, Homo sapiens
cttctcgggcttctcgccccggccgcggccgggtcctcaggttctggctccttggcagcaatggctgtatttgaagataagtttaggccagacatggagg

SEQ ID NO: 619926 - DNA, 100 bp, Homo sapiens
tgggaagttcaagatcaaagtgccagcagattcagtgtcatgtgaggacgtgcttcctgcttcatagataagaggccactattgaactctgcagtaccca

SEQ ID NO: 619927 - DNA, 101 bp, Homo sapiens
atatttggagttcttacaacatggcagacattgacaagtgaaggagtacctcctggcaactatgggaactatggctatgctaatagtgggtatagtgcctg

SEQ ID NO: 619928 - DNA, 98 bp, Homo sapiens
cacttccacagccaagtgcgggagtccacgacccttttgaggacttctttgggaatcgaaggggtccccgaggaagcagaagccgagggacggggtcg

SEQ ID NO: 619929 - DNA, 74 bp, Homo sapiens
gaaagcctggtccacgccgtggccggagccgtgattgccatcacgaaagccaaagtggatttctccagtgtggt

SEQ ID NO: 619930 - DNA, 98 bp, Homo sapiens
ctggctccgggtgacagccgcgcgcctcggccaggattggttgccgtggtctttactgcttttctccctgatgtgtgaaacaagcgccttctatgtgc

SEQ ID NO: 619931 - DNA, 75 bp, Homo sapiens
atccacgcacctgcagctctgctgagagagtgcaagccgtgggtatttaggtcagttaacgtccataccaggata

SEQ ID NO: 619932 - DNA, 100 bp, Homo sapiens
accccgacctgccgcgcccggaggaatagccaggtctggctgggtcggcacaacctgtttgagcctgaagacacaggccagagggtccctgtcagccaca

SEQ ID NO: 619933 - DNA, 100 bp, Homo sapiens
aaaagatgtcacaaaggaaaacgaggaaagtcccaggatgactactgtgtcaagtggataagattgtggaccagctgcagcagttaatgcaggtgtatga

SEQ ID NO: 619934 - DNA, 82 bp, Homo sapiens
cggcgcgactcgcttctttcggttctacctgggagaatccaccgccatccgccaccatggagcttactccacgggaacagcc

SEQ ID NO: 619935 - DNA, 98 bp, Homo sapiens
ctgttgacaagactgaggatagtttagaaggatgcttggattgtctgcttcaagccctggctcaaaataaaaagaggcacagttagatgaagaaggac

SEQ ID NO: 619936 - DNA, 74 bp, Homo sapiens
gctgggagcgtgctttccacgacggtgacacgcttccctggattggacaaatttacatgtattggagaccagac

SEQ ID NO: 619937 - DNA, 98 bp, Homo sapiens
gatctcgttccagttccagagaacgttcgagatctcgtgggtcgaaatcaaggcacttcagacaccacctccaacaacacagcaaccgtgatttccac

SEQ ID NO: 619938 - DNA, 100 bp, Homo sapiens
tgttattaaggcagctcacctttgtgctgaagctgccctacgcctggtcaaacctggaaatcaggcacctcattgtgaacatgctttctgcaacgcctgc

SEQ ID NO: 619939 - DNA, 136 bp, Homo sapiens
accttctggaccgagtgatgataatccggaccatgctgtatactccacaggaaatgaaacaggttgggagaagaacaatcaccaaaaatgcagagtggggagcgggcctgagtgttggacctctccttaaacaaac

SEQ ID NO: 619940 - DNA, 98 bp, Homo sapiens
gaattcgccgtgcccgagaatagctccgtccagcaggtcactttggaacttcttgggtgaagcactactgtacatatcaacgggattccaaacaaatc

SEQ ID NO: 619941 - DNA, 105 bp, Homo sapiens
atgacaatgtagaggatgacttctctaatcagttacgagtggtggacatgacaacagagtcaactgcatacagtggcatcaagacagtggctgtttatatagttg

SEQ ID NO: 619942 - DNA, 74 bp, Homo sapiens
tgatcgtcttcctcttcagccatccaggtgctccatctcgaaaagcgagaaaggcctccagaccaccaacactc

SEQ ID NO: 619943 - DNA, 75 bp, Homo sapiens
attgcaggctccaaagtgaaggatatggctggagactggcactgggctctgaggtgcctcaacctggtgttcctg

SEQ ID NO: 619944 - DNA, 105 bp, Homo sapiens
ctgcccggtgcccgaggaggcagccaagctcgtagcctgccactccgtgcaaagcgtggatacccatcaacgaagttttgatattggaattcagattggctatca

SEQ ID NO: 619945 - DNA, 99 bp, Homo sapiens
aacctgctccggcacgaggaccggccccagcgccgcagctctgtgaagaagattgagaagatgaaggagaagcgtcaagaactagaatcagaaaacaaa

SEQ ID NO: 619946 - DNA, 100 bp, Homo sapiens
gtcttaagagctgccatcccggctggattttaggtgatgggcaagtcagaaagtcagatggatataactgatatcaacactccaaagccaaagaagaaac

SEQ ID NO: 619947 - DNA, 92 bp, Homo sapiens
gctgaagagcgacaagccgctggcagccgcggatctcaccgccgctcagggtactccaaagattcaggtttactcacgtcatccagcagaga

SEQ ID NO: 619948 - DNA, 82 bp, Homo sapiens
gcacgggatccagagcgccgcgcacttcgtcatgttcttcgcgccctgggaacccgagcgtcatgttagggtgaagcagagg

SEQ ID NO: 619949 - DNA, 100 bp, Homo sapiens
cagatatactaaagcaggctaccaaggacagagtcagtgatttccataaattgaagcaaaggccaagattaacacccctcctgcaggaggaagacagcca

SEQ ID NO: 619950 - DNA, 90 bp, Homo sapiens
ccccggagccgccggccgctagcgtcagcgccagccagctaaaagatggcggcaaggcagcccaggcaaatgtaagaataggcgatgtgg

SEQ ID NO: 619951 - DNA, 95 bp, Homo sapiens
gaactggctaggcaaataagctttaaggccctggccaacgtcaacattgggagcctcatctgcaatgtaggggccggtggacctgctccagcagc

SEQ ID NO: 619952 - DNA, 101 bp, Homo sapiens
ctaaagccccacatttgcagctcattgaaggaaagatactggaggagtctctgtgtgaactggttgcgaaacaattgaagcaacatcagaatactatggag

SEQ ID NO: 619953 - DNA, 100 bp, Homo sapiens
aaaagattgaaggaaggtgatacaatgatggggcagcaagtggccaatttcggagcaacatcccctgtcacctggttgatatctcttgcggattaccctg

SEQ ID NO: 619954 - DNA, 117 bp, Homo sapiens
agaatcacgccttgtgaagagatcatccctaagcaggagagaagctactaaagtgtatcgcattaagttcaaggagagctttgctgagatgaacaggggctcgaacgagtggaagac

SEQ ID NO: 619955 - DNA, 98 bp, Homo sapiens
aaggaagcaacaacataatgcccagagttggagccaattaaaccagagagatggaaaacttgatgactagctccaccctaccgcccctttttgcagat

SEQ ID NO: 619956 - DNA, 101 bp, Homo sapiens
ccaggctggtggctccactggctcctgatacccaagaggatatcgacaaggatcttgtgatctaaatccactccttccacagtaccggattctctctttaa

SEQ ID NO: 619957 - DNA, 100 bp, Homo sapiens
cgccaagctggccaacaacacgcaccaggtacagaactggaacagtgaaattcttgctaagcaaaaacctcttattgccaaaccttctgcaaagctactc

SEQ ID NO: 619958 - DNA, 76 bp, Homo sapiens
aaggaaaaatcgagcagaaagaatgtctttcagtattggtaaaggttttcaaggtgtcatgaaaagatggggattt

SEQ ID NO: 619959 - DNA, 75 bp, Homo sapiens
cagacatgaatgatgcttacttggtggagaccatcctgggcctcacaggagcgaccatgggaagcctcatctgct

SEQ ID NO: 619960 - DNA, 85 bp, Homo sapiens
ccagcatgtcaataaggggtcataggtggaaaagacatggtgttgacagctcttctaccacaagcagtgcttctccaatgcccaa

SEQ ID NO: 619961 - DNA, 100 bp, Homo sapiens
ttggaggtggacaatggacctgcgcagatggggactgtggtgccatctttgcttcatcaggacctggcagccttgggtattgttgcagcatctggcagtg

SEQ ID NO: 619962 - DNA, 127 bp, Homo sapiens
ggcaagaagcacagcatcatcctaaggacgcagctgtctgtgagggtccatgcctgcatcggattccctgtcaattccaattctaatggtggaaatgaactctgtccaaagatcaggattggccaag

SEQ ID NO: 619963 - DNA, 100 bp, Homo sapiens
tcctcctggggaggctgccgtggaggccatggagatccctgccccggagcccgagaagacagaagtctggaacgttttttcttagagttccagaattgag

SEQ ID NO: 619964 - DNA, 100 bp, Homo sapiens
gccgacaaggcgttcaagcgaaaacatgaccgctgagcccatgagggaccactgacatttagggatgtggccatagaattctctctggaggagtggcaat

SEQ ID NO: 619965 - DNA, 51 bp, Homo sapiens
agaattctttgatgccgtcacaggatggccaggccatgttatgggatctca

SEQ ID NO: 619966 - DNA, 148 bp, Homo sapiens
tcattttcacctcgcgtcgcgcccgggaggaaggaacgaggcaaggagctaaagcagcgtgcgttcagccctggggtttggtgcacctcgatttggaggaagtagggcagggcccttatctggaaagaagtttggaaaccctggggag

SEQ ID NO: 619967 - DNA, 97 bp, Homo sapiens
ctcatggctgccctgtggggcctctacatgtccctggttaatgtgggccatgtctgcaagccctcgcagggagcctggtagcaggggccggaagcac

SEQ ID NO: 619968 - DNA, 75 bp, Homo sapiens
cacagagggcgctgccctcggcggcagcggcagacctcaaaggaagaccttctgcaggctgattttgaaggtgct

SEQ ID NO: 619969 - DNA, 147 bp, Homo sapiens
tgaaggatgtgctgtcggtggagagcgcggggacgctgccgtgcgcgccagagatcccagactgcgtggagcaggtagagttggctttgtgggacacagctgggcaggaagattatgatcgcctgaggcccctctcctacccagata

SEQ ID NO: 619970 - DNA, 51 bp, Homo sapiens
ccgaagcccacccagggagttgatggaagcaagaggctactatgagcagac

SEQ ID NO: 619971 - DNA, 100 bp, Homo sapiens
ctggaaattaactgcctccattacactgctgagtcacacacaacgcttgttatgttttcatcacttctctccagaagcattggttggatggtacaaaaag

SEQ ID NO: 619972 - DNA, 90 bp, Homo sapiens
cgccactttccccggagctgggccgcgaacacctcactattgatggtgtagcgctttaggggaaggtctcttcagagctgctgtgcccag

SEQ ID NO: 619973 - DNA, 88 bp, Homo sapiens
tgcttgaatgtctgccgaaatgttcaagtttaccaaaagagaggcaccgctggaacactaatgagtaattcgccaaaatgacgaacac

SEQ ID NO: 619974 - DNA, 83 bp, Homo sapiens
tggctgactacctgctgtacaccctcaacaaacaccagcgctttgggtatcatgatattagctggtttgacatcaagtcattt

SEQ ID NO: 619975 - DNA, 74 bp, Homo sapiens
gccccccagacaaagatgaggcagaggccccgtcccagaaggtgactgaggggcagcaggagcgcctggagcgg

SEQ ID NO: 619976 - DNA, 100 bp, Homo sapiens
ccgcggatggggagcgtgagtggcgagagagaagaagaaggaggttcctgctgtgccagaaacccttaagaaaaagcgaaggaatttcgcagagctgaag

SEQ ID NO: 619977 - DNA, 100 bp, Homo sapiens
aggatctcctcctatgatgacaggtttgaagatgccgcatttggattggatgaattccaaattctgcttgcttgctttttaatattgatatgcttataca

SEQ ID NO: 619978 - DNA, 71 bp, Homo sapiens
aatggagggcagatccttatcgccgacctcaggggaatgccagctgatgaagaccgagaggccgcgaccca

SEQ ID NO: 619979 - DNA, 90 bp, Homo sapiens
ctctgccaacctgcccctggctaagcggcagcagccgtgcttcctcaaagactgggaaatgcacgtccacttcaaagtccacggcacagg

SEQ ID NO: 619980 - DNA, 50 bp, Homo sapiens
aagacgactcaataggaggaagttgtctgttttgatgccaagataaactt

SEQ ID NO: 619981 - DNA, 114 bp, Homo sapiens
caaaagctttattgggcagatgcaaaacttaatttcatccacaaatcaaatctggatggaacaaatcggggatgtggagacgctggtagcggggccaggaaggctccggacgga

SEQ ID NO: 619982 - DNA, 100 bp, Homo sapiens
ccatgggggacgtgctgtccacgcacctggacgacgcccggcgccagcacatcgcagccaaggccacctttgatgccatttctaagacctacagctacct

SEQ ID NO: 619983 - DNA, 100 bp, Homo sapiens
cagagaggagcggggagcaatgcaggtcctgaattctataacagaagaagtcctcgatcatatgggtactttccgcagtatactggatcagctagactgg

SEQ ID NO: 619984 - DNA, 109 bp, Homo sapiens
ctactatccatttcaactacagatactttgaagtagaagaagctgatgggaaatgtttcaacgtgcgcaagcgttgcggcggcgggcagaggactactacagatgcaaa

SEQ ID NO: 619985 - DNA, 100 bp, Homo sapiens
tgtcatcctcattgctactgccctctgcgctcctgcatctgcctccccatgacccagatgatgtggtaccagttggccaaagaagagcctggtgttggtg

SEQ ID NO: 619986 - DNA, 100 bp, Homo sapiens
ttatcaaacttgggaataaaaagtattgtaacagctgaagtgtcttcaatgcctgcttgaaccttcagaagtttagtctttttggagacataagtgttct

SEQ ID NO: 619987 - DNA, 74 bp, Homo sapiens
gcgggcctgtcagttatcgggtgtgaccgccgccgcccaggggacaggcaaatggtatgaattacaagacctcc

SEQ ID NO: 619988 - DNA, 75 bp, Homo sapiens
cgcttttgagaggacaagcccagattccaaaacttatgtcaaacaagttggatggcttgaggactggtactaaaa

SEQ ID NO: 619989 - DNA, 75 bp, Homo sapiens
gactggcaagattactgatttcatcaagttcgacactgaaagtgaaattcgttattctacatggaagaaagctgt

SEQ ID NO: 619990 - DNA, 75 bp, Homo sapiens
aggaatctggaggaaagctgaccaggcggcttgtgaacagtcagggcccctcagcagaaggcagaacagaaccga

SEQ ID NO: 619991 - DNA, 100 bp, Homo sapiens
tgaagacaatttcttcttccaaaatcctcggattctctacttctgctttctttaaggaaaaacagtagtgctctgcatagtttactgaaacgagtggtca

SEQ ID NO: 619992 - DNA, 80 bp, Homo sapiens
gctcagtctctgtcagaggaagatcccttggtctgcctcagccacctccctgacgctgtcccactgtgtggatgtggtga

SEQ ID NO: 619993 - DNA, 98 bp, Homo sapiens
caagaccacagctggtgaacagtccagcctcgggcccccacggcgccttcaatgggaactgtgaagcaaaactctccgtggtccctaaagtgtcgggc

SEQ ID NO: 619994 - DNA, 90 bp, Homo sapiens
ggatttgggtcgcagttcttgtttgtggatcgctgtgatcgtcacttggtgagaagccatttaaatgtgatcagtgcagttatgtggcct

SEQ ID NO: 619995 - DNA, 88 bp, Homo sapiens
agccctgcatatgattggctctttagctgaaatacttctgaaggttacccatgcagttgttactgtaccagcctattttaatgatgcc

SEQ ID NO: 619996 - DNA, 98 bp, Homo sapiens
aaaatcggtgaagagaggttttgaattcacgcttatggtagtggcctactttggggataaaggattatttggtcttctggatttggaggcaatcagcg

SEQ ID NO: 619997 - DNA, 100 bp, Homo sapiens
gagtccattgagggcaagcagggcaagccccgcctgaagccccccttccccgcagacgtggagcatcatggagcagtttaaccccgccctggagaacctg

SEQ ID NO: 619998 - DNA, 75 bp, Homo sapiens
ccctgttggttccaatgctgggattggctgcttttcgcctcatgcattgtgcgtcagcagcaatgtttatggtga

SEQ ID NO: 619999 - DNA, 95 bp, Homo sapiens
cctatagaccagtgtaataccctgaatccccttgacaaaagtaagctgaagccaggaacaagagttgctttggatatgactacactaactatcat

SEQ ID NO: 620000 - DNA, 75 bp, Homo sapiens
tgctctgcctgctccacaagcggcgccgcgccctcggcctgcacggaaactgtcaactaagtgaagaagaccact

SEQ ID NO: 620001 - DNA, 100 bp, Homo sapiens
gatccaattgtgtccattgatctctcagagtggctgaggataataggactaaaccactttaaaggcaaatgcttccacagcagggactataaagaaccag

SEQ ID NO: 620002 - DNA, 99 bp, Homo sapiens
aagaaacattctgaccctcacttgcttgaaaggaatgaacaatcaaccatgacgaccgaatctggatcagactcggaatccaagccggaccaggaggcc

SEQ ID NO: 620003 - DNA, 90 bp, Homo sapiens
aaatatacaacaaggccattttctcaaacgagagtcagcctttaacgggaaactttatggtgatgttccttttatagaagaaagacacag

SEQ ID NO: 620004 - DNA, 100 bp, Homo sapiens
atcagaggcaactaacactgcggcttcctgagaaaaactaagacgcagtcttccaaacctgtcccgaacatctaatacacaagttgactcagtgaaaagc

SEQ ID NO: 620005 - DNA, 115 bp, Homo sapiens
ggataattgggatgatgacaatgtagaggatgacttctctaatcagttacgcggacaaggcaaaatctcagcaagttcggacctctagtacaataaggcgaacctcctctttgga

SEQ ID NO: 620006 - DNA, 100 bp, Homo sapiens
gtccggagcagataggatgggctgggaaggtacccgcgaactgccgccggaattcgctggcagctgtgcgaggctcagatgaggtttatataactttcca

SEQ ID NO: 620007 - DNA, 98 bp, Homo sapiens
tgttgaaacaaatggagcgggagaaaatgcctcctcctccaaagccaaagcgggaatgcatatcagtccacgtgggccaagcgggagttcagattggc

SEQ ID NO: 620008 - DNA, 90 bp, Homo sapiens
ccctgcagcccgagcccatcaaggtgtacggacagccaatggagatcttcgtggatgatgagacgaagttgacgctgcatgggttgcagc

SEQ ID NO: 620009 - DNA, 90 bp, Homo sapiens
ttcgcagtggtcgcttcttctccttgcgatctattgggcttcctgatgtccattcaggatatgggtttgctattgggaacatggcagcct

SEQ ID NO: 620010 - DNA, 74 bp, Homo sapiens
cggctcttccagctacaaactctaggtttgaaaggtgatctgtgaaaatggttcgctattcacttgacccggag

SEQ ID NO: 620011 - DNA, 75 bp, Homo sapiens
ccttcgtacccacagtgcttcatgagagaatactacaacacatctttgcaggattctttgcaaattctgccattc

SEQ ID NO: 620012 - DNA, 95 bp, Homo sapiens
gatctcttctgttctccactgctaggacgggctctacgagtgcattctctgtgcctgctgtagcaccagctgccccagctactggtggaacggag

SEQ ID NO: 620013 - DNA, 100 bp, Homo sapiens
gtccaccagcgaccccagccggaagccgctggacagccgggtcctgaacgctgtgaaatgcttcagcaaccaggagggattgactgagatcttaacaaca

SEQ ID NO: 620014 - DNA, 100 bp, Homo sapiens
gctgcacaactgcaggaacaccgtcacgctgctggaggagaactctcttgatagagcccaagcagccaagaataaaggcaataaatattttaaagcagga

SEQ ID NO: 620015 - DNA, 82 bp, Homo sapiens
cgacgggcggccagcagaaggagaacacgctgcttcacctcttcgccggcggctccatgtccatccgctggccgggccgccc

SEQ ID NO: 620016 - DNA, 114 bp, Homo sapiens
acatactgctgacggcccagaactggcagagagaagattggctcacagtggttgattgatcaaccccattggacgttggttctgtggtacaaatggagtacaggactcagtcgt

SEQ ID NO: 620017 - DNA, 98 bp, Homo sapiens
gtcccatcactggtcgcactgagggtgaagtggcaggaggaggaggaggggctccggctggtctgtggtgaggaaagaccacagcaagattctttcat

SEQ ID NO: 620018 - DNA, 89 bp, Homo sapiens
taacaatttcaggaaaagactaaaatgcttccgatgtggagcagacaagtttggttacttcttgctgcagattctgcgcaggatcggag

SEQ ID NO: 620019 - DNA, 100 bp, Homo sapiens
ggcggagggtctgaggcggcgcggccatggctcacctccggggatttgccaaccaggtgctggagaatctggtaaaagcaccattgtgaagcagatgagg

SEQ ID NO: 620020 - DNA, 75 bp, Homo sapiens
ttggaagcagaattccattttactcatctcataatgactttcaagattaacgtcttcaaggacccagttgctgat

SEQ ID NO: 620021 - DNA, 98 bp, Homo sapiens
gacgcttgatgagaaggacccacggcgtctgttcgaagattgggagtatgtatttaaaaacagtgaattttcatcaaagcaagagacatatgaagaat

SEQ ID NO: 620022 - DNA, 78 bp, Homo sapiens
gtcagacacggggcaggctgagttcctcttgctcacagagctctgtaaaggttaaacccatccagagtaatggctgcg

SEQ ID NO: 620023 - DNA, 88 bp, Homo sapiens
gggtggacgtggttggtgattggcaggatcctggtatccgctaacagtgtggggtgatcagccccagatttgacgtgcaactcaaaga

SEQ ID NO: 620024 - DNA, 98 bp, Homo sapiens
gctgaacgagagggacacggagcaggatcttcaccaaggttgtgctggaggcgccactcatcacagagagtgccctggaggtggtccgcaagtactgc

SEQ ID NO: 620025 - DNA, 100 bp, Homo sapiens
atgctcggacgggaccctgaagctcaacacagcagcctccacggaaggtatgctgccccacaaaaccaagcgaggccaggccgctctggaccgtctcaag

SEQ ID NO: 620026 - DNA, 100 bp, Homo sapiens
ccctgaactacttcctcggtggctgcgccggaggcctgactctgggagcacgcaagctcgtccgcatggtgctgaatggctgaggaccttcccagtctcc

SEQ ID NO: 620027 - DNA, 100 bp, Homo sapiens
tggtactactgcttgctgtggcatttggacatgctttagagagagcacggcagcaatttgataggtatgtctgatctcaatgtgcctgagcagctctatc

SEQ ID NO: 620028 - DNA, 95 bp, Homo sapiens
gataatgatcattaacatcagcctctctgatcaaagggcaagaatatcacggcatgggcatgagtagcttgaaactgctgaagtatgtcctgttt

SEQ ID NO: 620029 - DNA, 51 bp, Homo sapiens
aagaaattgttcagttcttctcaggccgtttgagcaaggaagacattgaac

SEQ ID NO: 620030 - DNA, 60 bp, Homo sapiens
aaaatgtaaagactcttaagacaaaattagactcattctccaaggttaattcctccacag

SEQ ID NO: 620031 - DNA, 100 bp, Homo sapiens
gaaagggataggagaaggatgtggactgcagtgctgcagtgccagggagtgaccttcacaatggcatcataggattcagtgaggagtcccagagtggact

SEQ ID NO: 620032 - DNA, 91 bp, Homo sapiens
atgtgaagcggggcagagccgggggagcccagcccagccagcctccaggattttttatcaagcagaaatgcatcgaacaacgagaatcaag

SEQ ID NO: 620033 - DNA, 82 bp, Homo sapiens
gagcatttttggagcggctccccatgatgcttcaggagcagtatgcctatgaaaagaacactctgctccagccaaggtggtg

SEQ ID NO: 620034 - DNA, 90 bp, Homo sapiens
gagaaaagcgagaccgcgtgcgaggaccgccccctacagaagctaagcagcatggacccggccatgctggagcgcctcctcagcttggac

SEQ ID NO: 620035 - DNA, 83 bp, Homo sapiens
cttggctacgtggtgcaagagtcaggccagaacttcagcaccctggctgagaagccattgagacccagagcagcagttctgaa

SEQ ID NO: 620036 - DNA, 78 bp, Homo sapiens
ctcgtgcccttcgccttcgtgcgcttcgaggacccccggtgtgggcaagagcagtttactgttgcgttttgcagacaa

SEQ ID NO: 620037 - DNA, 99 bp, Homo sapiens
acctgcagcgacctacccactacaatacctcttgggactgggctcgatttgagttccgccatggagtcatagttgcagctgactccagggctacagcgg

SEQ ID NO: 620038 - DNA, 97 bp, Homo sapiens
catctgcctgtccagccagcatggaaccaaagcggatcagagagggctaccttgtgaagaagagacgatctgccgaccctctgggagaaaatccagc

SEQ ID NO: 620039 - DNA, 83 bp, Homo sapiens
atttaaccgctctctgcctcccagttactgtaaaatggggaaaggagaaatttgaaggtgtagaattgaatacagatgaacct

SEQ ID NO: 620040 - DNA, 100 bp, Homo sapiens
ctgagatccgcaggtcccttggagaggattcactggcaaaatttgctggcagaaaactgaaagactgtggagaagatcttcttgtagagatatctgaagt

SEQ ID NO: 620041 - DNA, 100 bp, Homo sapiens
tgggccgaccccagagaggcgctggacaggagctgacatggacccaaatcctcgggccgccctggagcgccagcagctccgccttcgggagcggcaaaaa

SEQ ID NO: 620042 - DNA, 75 bp, Homo sapiens
caagatggcgtccctggatcgggtgaaggtactggtgttgggagactcaggaaaggcagactacaagttactgag

SEQ ID NO: 620043 - DNA, 98 bp, Homo sapiens
cggttccccggcccacagtgggggtgtgcaaacccgagagaactgggttgtgaccgagattcccgacgagagagactgaggggaagagaggaaggagg

SEQ ID NO: 620044 - DNA, 83 bp, Homo sapiens
ctccgcggcgtcctcggcgctgaaggggttaattcaacagttcaccaccattaccgatgcagacagacatgctgaactatctg

SEQ ID NO: 620045 - DNA, 97 bp, Homo sapiens
gcaaggaaggtggagatctcctgtgctgcgaccactgcccggctgccttccacctccagtgctggctggagctattggccagaaactccctccattt

SEQ ID NO: 620046 - DNA, 51 bp, Homo sapiens
tgacactggacatgcagatgactgtgtaggtgccccaccttagaacagtat

SEQ ID NO: 620047 - DNA, 82 bp, Homo sapiens
gctgctgaagcccaccgaattagcaagagtgagccatggagctacgtgtggggaacaagtaccgcctgggacggaagatcgg

SEQ ID NO: 620048 - DNA, 51 bp, Homo sapiens
gaaaatggctctgtcggtgtaaaaaaaaaatgccaacaggtgagattgaaa

SEQ ID NO: 620049 - DNA, 88 bp, Homo sapiens
atgaaataaacccaaggaaagtttttgaacttatgggaagcattgtcactgagattgcttgtggacgataaccttctgttcggtgatg

SEQ ID NO: 620050 - DNA, 74 bp, Homo sapiens
ggcgtgcgcggacggtgtgcgggttgtttgcattcgctccacttggaatgctctctctccaaagctgagttgtg

SEQ ID NO: 620051 - DNA, 75 bp, Homo sapiens
actcagtgatcctgattatattaatcagtatgtcatatggatgccgttggacataccagatggtcgaagagctcc

SEQ ID NO: 620052 - DNA, 83 bp, Homo sapiens
tgtccccagagcctcagtttgtgcaggacaccgacatggaacagggactcactgggggttcccattaaggatgtcgaggcggg

SEQ ID NO: 620053 - DNA, 100 bp, Homo sapiens
gaagctcttcacagatctcagagaaattggccatggaagctttggagcagtgtattttgtggtagaggacattgaatacctgaagttcgataaagggccg

SEQ ID NO: 620054 - DNA, 71 bp, Homo sapiens
aaagcaagaaagaaacaaaagttcacctctgcgaaggccctggagggacaggaaagccagaaatggacttc

SEQ ID NO: 620055 - DNA, 71 bp, Homo sapiens
accaagagggcgggagaactcactgaggatgaggtggaacaagtcaatcagatatttcaactcttcctacg

SEQ ID NO: 620056 - DNA, 100 bp, Homo sapiens
ctggagcagatcccccagccggctgagacaggtgtcatggagaaactccagctgggcccagagattctgcagcgggaaaatccaaggcttatttatgcca

SEQ ID NO: 620057 - DNA, 75 bp, Homo sapiens
cccgcttaacatcctacctccagtcccagttaaaaagcaatcactgcttgagaagcagagagtcctgatccagca

SEQ ID NO: 620058 - DNA, 72 bp, Homo sapiens
tttgtttgactccagtgttaagagaagaaatgaggacatatcagtatcgcttctcagatgaccaagatggtg

SEQ ID NO: 620059 - DNA, 90 bp, Homo sapiens
atttgattccacagctgggctatgtggcaacaaccggcccaggcctttgtggtgaagcggggcgtccacgtgtcaggagcgtctcccgag

SEQ ID NO: 620060 - DNA, 100 bp, Homo sapiens
tcccatctggatgccagccacctcacagagaacctgcccaaagctgcatcagagctggggcaacaacccatgactgacgtaaaattcatcctgatcagaa

SEQ ID NO: 620061 - DNA, 90 bp, Homo sapiens
gcgcgagcttgaacgcagcgtggcccccgaggtcatcatgtcccagcactacgacgggaaggcggacctgtggagcatcggcaccatcgt

SEQ ID NO: 620062 - DNA, 90 bp, Homo sapiens
tctcgatccagaggaaggcgatactctcgctcacgcagcaggagcaggggacgaagtcgtgatgagaggagatggattgaaaagcagaac

SEQ ID NO: 620063 - DNA, 100 bp, Homo sapiens
caggaccaaagccgtcctgtgtatggtggtggcaggggccatcgctgccgtctttcacacactgatagggtcccgggattcttgagctgtgcccagctga

SEQ ID NO: 620064 - DNA, 83 bp, Homo sapiens
aagcccgcgtcgaggtggagcgcgacaacctggccgaggacatcatgcgcctccgggagaaaatggtttcgctgtggtgcggc

SEQ ID NO: 620065 - DNA, 75 bp, Homo sapiens
gcactcggagatgcagccgctgacaatgcagatcttcgtgaagactctgactggtaagaccatcaccctcgaggt

SEQ ID NO: 620066 - DNA, 100 bp, Homo sapiens
ccttatcaaaacaagaatgctatcaataatggtgttcgaatatctggaagagaaactgggagtgatttttccatgtttgaagctttgcgagatactattt

SEQ ID NO: 620067 - DNA, 90 bp, Homo sapiens
aggaaatctaccaggaggtccattcgactgccagaaaccattgacttaggttcccagtgacctgacagcagaggagcgtcaagaactgga

SEQ ID NO: 620068 - DNA, 75 bp, Homo sapiens
ccggcctggtgcgcaaggccccgaacaacaggtaactaggatttctacctcaaccgcgagacctatgcaaggacg

SEQ ID NO: 620069 - DNA, 76 bp, Homo sapiens
cgggctgcaacctgcagcacatcagcgaccgggagaacatagacgaaactgaggcttcttgaagagcttgaagaca

SEQ ID NO: 620070 - DNA, 75 bp, Homo sapiens
ggccggaggagtcagctgtgtgtccagaacgtgccatggagacgcttaacggtacatcaggaacgtctctatcaa

SEQ ID NO: 620071 - DNA, 80 bp, Homo sapiens
gtgtaccaggcgaagctggccgagcaggctgagcgatacgacggtctggcggcttctctgttgacaactcagctggttcc

SEQ ID NO: 620072 - DNA, 74 bp, Homo sapiens
tccattgcaaaccttattaatctcagggaactggatgtcagcaagaatggtggctgcctctttgatgagccgta

SEQ ID NO: 620073 - DNA, 95 bp, Homo sapiens
gcggcagcggctgcgctacggcgtctatgtcatcaaccagatcaacaagttggagaaagctgttgctgcagcacacaccttcttcgtgggcaatc

SEQ ID NO: 620074 - DNA, 90 bp, Homo sapiens
tcgtcgacatgagtgatgtggaggaaaacaacttcgagggcagagatctcaaagatttcatgagacaagctggggaagtaacgtttgcgg

SEQ ID NO: 620075 - DNA, 100 bp, Homo sapiens
ggctaccatgttctctcgcgcgggtgtcgctgggctgtcggcctggaccttgcagccgcaatggccatggctgttatcttctcaaattttagcattataa

SEQ ID NO: 620076 - DNA, 90 bp, Homo sapiens
tgcatttttttgtggagtggtttgaatatcgtaagcgcacgtttaaacatctcaagagcagcccgacggccatggaggctgaagagacga

SEQ ID NO: 620077 - DNA, 97 bp, Homo sapiens
cttcttggtgatagcaaagatgtccttgggccatcaagtgtcatggagaaactccagctgggcccagagattctgcagcgggaaaatccaaggctta

SEQ ID NO: 620078 - DNA, 74 bp, Homo sapiens
cgcggcccgccggccacgcgccctgggacaaccacgtctccggccacgactctgaagcggctcatggcagatga

SEQ ID NO: 620079 - DNA, 101 bp, Homo sapiens
attaaactgaatatagaaacaaatgctaccacattattattggaaaacacaacttttaaactgtcaactaagtgaagaagaccactggatttaccaggcta

SEQ ID NO: 620080 - DNA, 50 bp, Homo sapiens
ctgaaggccattgtaaatgtcataggctttgaaatagacaccccagataa

SEQ ID NO: 620081 - DNA, 95 bp, Homo sapiens
aaggaattgtcaatgggcatactttgttggttgcatctgctaaagaggatcctgccaacattttacagaccaagatcactccatggatgaaatga

SEQ ID NO: 620082 - DNA, 88 bp, Homo sapiens
ggcgcctccactccgtcccccgcgggtctgctctgtgtgccatggacgggatgaccgagtgggagacagcagcaccagcggtggcaga

SEQ ID NO: 620083 - DNA, 100 bp, Homo sapiens
attagtgtggaacaatctatcagcctcctcctcaactttatgattgctgcatatgacagcccacatatgacagtggacatagaggacaacgcagatatag

SEQ ID NO: 620084 - DNA, 96 bp, Homo sapiens
ccccaagccatgcacaccccgggggatgcagccggagagaacacggccgaaggaaggatgggatgataaggatgccttctatgtggcagacctggg

SEQ ID NO: 620085 - DNA, 99 bp, Homo sapiens
cgggggttcgctggctgcggccccggctccggcccccgcaggagcagattattcagagctgggagagcttcccccacgatctcctttagaaccagtttg

SEQ ID NO: 620086 - DNA, 147 bp, Homo sapiens
tgccctctgaatctttgtgtttggctgcccaggctcgcctcgactccaaatggttgaaaacagatatacagaaaagaggcacagttagatgaagaaggacagtttcttgtcagaataatatatgatgactccaaaacttatgatttg

SEQ ID NO: 620087 - DNA, 99 bp, Homo sapiens
gaaaaaccatcgaagaatgaaaccggcttgttgtcttcaattaaaaaatttattaaaggaagcacacctaagatacctcaagaagaacatgctgctaat

SEQ ID NO: 620088 - DNA, 95 bp, Homo sapiens
acacagttacatagtaaaaggaggcctaaagtccgatgggtggtccttttattcctgctgctcctgtcaaaactgccttgcctgctggcccccag

SEQ ID NO: 620089 - DNA, 50 bp, Homo sapiens
cttggaacttctgaaagaacctggaaacaatgtgatgagaaccattcatg

SEQ ID NO: 620090 - DNA, 75 bp, Homo sapiens
ctgaagacctgcaagttattttggaaaagagtcctgtgtatggaaactcacatgagtcagctcagtctagaaggg

SEQ ID NO: 620091 - DNA, 100 bp, Homo sapiens
ttaatcaatcctgagttgattatttcacggctcttcactgaggtgctggatcacaatgaatgtctaattatcacaggcaactgcgatgtctgtggactgt

SEQ ID NO: 620092 - DNA, 75 bp, Homo sapiens
ccgaacgacaggacgttggggcggcctggctccctcagaaatgcactcggtgatggaaagagagccactattctg

SEQ ID NO: 620093 - DNA, 90 bp, Homo sapiens
gaggaagatagtcttgggacccttgcatggtgtttcaaagggtggtgaagaactaagctgcactgggtgttcaacagccatcactccttg

SEQ ID NO: 620094 - DNA, 75 bp, Homo sapiens
gcttgggcgcccggacggcgaatggagcaggggcgcgcagcatgacgacagagatgatggtgtggattattgggc

SEQ ID NO: 620095 - DNA, 100 bp, Homo sapiens
caggtgcaggtgtctcttctcgccctggcggggaaggcagaaaatctatttcaggaacttcaggaacattttcaagctctgacggcaacattaaacctca

SEQ ID NO: 620096 - DNA, 95 bp, Homo sapiens
agccccctgaggccccagaactatcttttcggcagaagctcctcctggggtagagacagatcttattgatgttggattcacagatgatgtgaaga

SEQ ID NO: 620097 - DNA, 82 bp, Homo sapiens
gtgtaccaggcgaagctggccgagcaggctgagcgatacgacgctggtaggtgagtgctgtcctcggctcactttcctcaag

SEQ ID NO: 620098 - DNA, 90 bp, Homo sapiens
agaagtcagagacaagaagaggctaacatgactgataccactataatttagtctctgctttcccagcacgctgcctcaccaagaaagaat

SEQ ID NO: 620099 - DNA, 98 bp, Homo sapiens
ccgccgccacccccgggctcggggtggcccccgcttcagtcccagggcagcttttaatctagacaacgagcaaccagattatgatatggattcagaag

SEQ ID NO: 620100 - DNA, 50 bp, Homo sapiens
ttcagctgcggggacttgaattcagagctttggtcgtccaggagtagaat

SEQ ID NO: 620101 - DNA, 98 bp, Homo sapiens
caaacctggacaggacagatattttacactgggtttaccaacaggcatggaggagtgacggcaggaactttctgtgctctgacaacccttatgcacca

SEQ ID NO: 620102 - DNA, 83 bp, Homo sapiens
atcgacgcggacagcgggctggagcctgacgagctggcggggtggcccagttgaaatccttcccttcctctaccttggaagtg

SEQ ID NO: 620103 - DNA, 75 bp, Homo sapiens
gcgccgcgccgcacgagcaccagcctagagccaggtctcccacacattctccaactacccgcccggcgtccgcta

SEQ ID NO: 620104 - DNA, 101 bp, Homo sapiens
cgagcgcagcaaagcgcccagcctgccgcctcgctgtccctgcggcttctggggggattttatattggaagacatggatcttgctgccaacgagatcagca

SEQ ID NO: 620105 - DNA, 108 bp, Homo sapiens
gcggaggggccgccgctcacagatgacaacaaggcgcagcagctggaatgggtgaagagccgctaccctggcctgtactcccgcatccaggagtttgcgtgccgtggg

SEQ ID NO: 620106 - DNA, 141 bp, Homo sapiens
gccgacgaatgttaatgaaacgattagatgtgactgtacagtcctttggatggtctgatagagcaaagatgtccctggtagatttgggaaagaagcttttagaagcggcacgagcaggtcaagatgatgaagttcgtattt

SEQ ID NO: 620107 - DNA, 96 bp, Homo sapiens
cgaggggctacacagtatataaggtcaccgcccgggatttggatgtagctttgcccattattgagaattataaggatcggttgttggcaattggag

SEQ ID NO: 620108 - DNA, 83 bp, Homo sapiens
cgaggcctccatgtcccacgtggacaagttcgtcaacatttaaatcaaacggtattgagatggattgggttatgaaacataat

SEQ ID NO: 620109 - DNA, 98 bp, Homo sapiens
ctggaaccatctcagaagccatgcccctcaggctggaacttgccctgtctcctcgcagatgagagtcgggccacaaaaagttaaaaagtaccatccag

SEQ ID NO: 620110 - DNA, 80 bp, Homo sapiens
tcaaggccaagtatccgccagtcaataggaagtacgagtgcatctccttggaaacaatgccatctttgaatgtgagagat

SEQ ID NO: 620111 - DNA, 97 bp, Homo sapiens
ccatacctgatgcctctaagctgcaattcatcctagcaggccgaggacgatgatcccgccgggggagtgcacgtacgcgggccggaagcggaggagg

SEQ ID NO: 620112 - DNA, 75 bp, Homo sapiens
ttctggtggtcctctggtgaacttgacctttgcattgcagctgtaattaaagaatgccatctcgtcatactgtcg

SEQ ID NO: 620113 - DNA, 101 bp, Homo sapiens
atgaaactcaagtcagactaactgcagatggttgctgtactttgccaacaagcgcttcagcatggaagggatctcaaatgtcattcagaatggcctccgcc

SEQ ID NO: 620114 - DNA, 82 bp, Homo sapiens
gctgagtattggagccaggagcctgccatgaggaactgtggctgcaccatctgtcttcatcttcccgccatctgatgagcag

SEQ ID NO: 620115 - DNA, 100 bp, Homo sapiens
ggggagcggggccttccacaccccctccgtgggtgtgtggtatacccgaaatcttgtggatcaaggaaatggaaaatttaatctgatgattctctgttgg

SEQ ID NO: 620116 - DNA, 101 bp, Homo sapiens
gaaggagttctgaatcctgagacgacagtggtggccatcttcccatctcccatgatgtatgctggaccaactgagtttgcagctcaccttgtgaagatgaa

SEQ ID NO: 620117 - DNA, 99 bp, Homo sapiens
ctgggcctgcaggtctctgtcgagcagcggacgccggtctctgttccgcaggatgaagaggactgtcagaaggacgtagaaggcacggttttactgtga

SEQ ID NO: 620118 - DNA, 75 bp, Homo sapiens
ccggcgccgtcgcgccactcctccgaaattggttccttccattatgagcaacttgttgaatccagatgccatttt

SEQ ID NO: 620119 - DNA, 102 bp, Homo sapiens
gcaacagcagcgtcctccccaccccacctgccaccgaggccccctcttcgcctcctccagtgctcccaaatgtgtcagaagaaacagtgtctcccaccagag

SEQ ID NO: 620120 - DNA, 76 bp, Homo sapiens
ggacgaggggaagtcgtacagcgttcttggccaggctgactgagagatttgtgctgggagtggatatgttcgtgga

SEQ ID NO: 620121 - DNA, 100 bp, Homo sapiens
taagaaaatcagataacttgtactggagagaaatcctacaagtgtggtggacccaagtggagagattgtggaactggcgaaaggtgcatgtccctggaag

SEQ ID NO: 620122 - DNA, 87 bp, Homo sapiens
ctaaacttgatccaaagacaatgaaggtttttgatgagaagtactttctggtggaaatggatgacttgcgtcctgagaaccacgcac

SEQ ID NO: 620123 - DNA, 100 bp, Homo sapiens
catctgccaccacctccaaagttgcttgcacagcagctcattcttggaatcccagaacaggccttaagtcttctccacatggccatcgagcccatcttgg

SEQ ID NO: 620124 - DNA, 50 bp, Homo sapiens
ccagtctgcgtgtacacgagggatgagattcctggtcgggtggcttccag

SEQ ID NO: 620125 - DNA, 88 bp, Homo sapiens
gtggttaagaaaggaaatcaaaccgaaaatgtgtatataggacaggacatccagcccaaaagagacctcacccgctttgtgaaatggc

SEQ ID NO: 620126 - DNA, 100 bp, Homo sapiens
accaaggtacccaatgcctgtttattcaccatcaacaaagaagaccacacactgggaaacatcattaaatcgatcccctaacaacagtgagagagcaatg

SEQ ID NO: 620127 - DNA, 71 bp, Homo sapiens
ctggcctccctggccaagattgctccggattttcgagcttacttgataggagggcttatcgccttggtggc

SEQ ID NO: 620128 - DNA, 100 bp, Homo sapiens
acacatggagagatgcaagaccagtccatttggggaaatccttcggatggtgaactcattagaagagcccagtttcctccaattgcagcacaagaccttc

SEQ ID NO: 620129 - DNA, 100 bp, Homo sapiens
tcctgacagtgttaatggaagtgaaccaagcattcctcaggcaatctgaaagcaaatcctgtttagatgcaggcgaaggttcctggtgacccaggctctc

SEQ ID NO: 620130 - DNA, 100 bp, Homo sapiens
cgcaggtgcaggtgtctcttctcgccctggcggggaagcaagagtgagccatggagctacgtgtggggaacaagtaccgcctgggacggaagatcgggag

SEQ ID NO: 620131 - DNA, 100 bp, Homo sapiens
atgaacctggagagaggggctgtggtggaggtcatccagaaaaacctggaaggctggtggaagatcagggttttctagtcttgaactactggctacgtgg

SEQ ID NO: 620132 - DNA, 75 bp, Homo sapiens
atgtcagagaaatctttgacaaggccctttctggttactgtggctttatggcagccaacctttatgctcgttcca

SEQ ID NO: 620133 - DNA, 101 bp, Homo sapiens
gactttgtctctgatgagctgagaaacaaagccacccagccaatgaaggtcctgaggcacgtgaatggccaggatcagattgtgcccggcctgtacgcctg

SEQ ID NO: 620134 - DNA, 83 bp, Homo sapiens
cgggtccccgcaccacctcctgctgccttcccgtcgccgctcccgaagcttttccagctctattaccaggttttaaacttcgc

SEQ ID NO: 620135 - DNA, 78 bp, Homo sapiens
tgaactcaagtcaccgtggagctccgccgccccgaaactttcaccgcgagcggggcgaactttctgaccaagtataca

SEQ ID NO: 620136 - DNA, 98 bp, Homo sapiens
cagaagagccacccagaaggagacaacaatgtccctgctacccgggatgaggcccagccccagaacctggagtgcttctttgacggggccgccgtgct

SEQ ID NO: 620137 - DNA, 75 bp, Homo sapiens
gcctggaggattgtcactccaacctcttttcgctgcttaacaaacaacagttgcagttactgaaagaacggttcc

SEQ ID NO: 620138 - DNA, 84 bp, Homo sapiens
ctggggccagggaaccctggtcaccgtctcctcagggggtcctgatgacaacttaattgaaggtggaggaacaaaatttgtctg

SEQ ID NO: 620139 - DNA, 75 bp, Homo sapiens
cctggtgctggagatgctgaaggtactgtctgatgagcgtgaaaggttgtttcaccgacttccacatcgactttg

SEQ ID NO: 620140 - DNA, 83 bp, Homo sapiens
gtagaaggccagagtcacacacggtcctaagagctgggcaccaggaagcgaaggctgcgttacagtgtttctgccacctctgt

SEQ ID NO: 620141 - DNA, 100 bp, Homo sapiens
ggccaatgtgggatcgatgtttcaatattggaagcgctttgatttacagcagctgcaggttgggcccgaaggcatcctgcagaacggggctgtggacgac

SEQ ID NO: 620142 - DNA, 75 bp, Homo sapiens
agagtgtgtcttaatcaaaacccacagagacatcatcctggagagcattcccactgacaacccagaggcgcacag

SEQ ID NO: 620143 - DNA, 74 bp, Homo sapiens
actccggagccgcacaaaccagggctcgccatgaagccagagtgcctggtgaagaatgtgatgggatcactagc

SEQ ID NO: 620144 - DNA, 90 bp, Homo sapiens
gactcaccttgctggctgctgccagcattgcttacatcagccggcaaacaagcatgcatttaggatccttatgcacgggagatatcaaac

SEQ ID NO: 620145 - DNA, 97 bp, Homo sapiens
gcactgtgtgtcttggcttcggagcattcagcaggtgttacaggctccttctcctgaaaaagccgaggaggagagtgagaggcttctgagggaactc

SEQ ID NO: 620146 - DNA, 98 bp, Homo sapiens
cccttcgtgaacggggtcctcttctgcaaggtccggctgctggatggaggggattttgtcagcttgtcgtcaagtggtagtcgctcttctaaaacttt

SEQ ID NO: 620147 - DNA, 75 bp, Homo sapiens
tgaaacagaaattctggaacacctatatgggtccgagtgattggaagctccacattggcactctgccacctggcc

SEQ ID NO: 620148 - DNA, 89 bp, Homo sapiens
cccagcatctaactaacacggtttttattgacagagctctgatagttgttccttgtgcagaagctctcttatttagtgcaacttttcgg

SEQ ID NO: 620149 - DNA, 100 bp, Homo sapiens
gataagaaagtacggaccataataatcaggagtgaagtcccagggatattctgtgctggctgaccggttccctgatgtgttacctgcttctgctactgat

SEQ ID NO: 620150 - DNA, 98 bp, Homo sapiens
tgcaaaccataatcctgtcttaatactgcaaacaaatcatagtggaactaaggggaacttaatttactggaaaattgcctaagaattatgacccaaaa

SEQ ID NO: 620151 - DNA, 82 bp, Homo sapiens
gtcgcgtgtctaggtgagtcgcggtgggtcctcgcttgcagttcagcgaccacggtcctgtccaaaatgcattgctgtcttc

SEQ ID NO: 620152 - DNA, 80 bp, Homo sapiens
ccgcgaacccctctgggatccccgccgctctgtctacaacccgagcaaattcaacacccaacagcttccttaatagcaaa

SEQ ID NO: 620153 - DNA, 97 bp, Homo sapiens
aatgtcacttacaacattaatcagatactgcatttaaggacatggatttgattgacatactttggaggcaagatatagatcttggagtaagtcgaga

SEQ ID NO: 620154 - DNA, 100 bp, Homo sapiens
cgcggccctgctgaaagtggcgcaaatgggaatttgaagtactgccttgtaattcttaatcagcctttggacaactattttcgtcatctttggaacaaag

SEQ ID NO: 620155 - DNA, 83 bp, Homo sapiens
aataatgacaatctcctcagggaaggggcagcacactttcagcttatgtggagaagtcgctgtgaagccacctataaatccat

SEQ ID NO: 620156 - DNA, 76 bp, Homo sapiens
ctacatcatcgacctgcagtccatgcaccagtttcgccaggacacagtgagttattctccccacctcagaagtacc

SEQ ID NO: 620157 - DNA, 83 bp, Homo sapiens
ccttctcacaatgaggctccctgctcagctcctggggctgctaatgctctgggtctctgtaagcaatggcctcagttttgctt

SEQ ID NO: 620158 - DNA, 100 bp, Homo sapiens
accgtactgtgcgtatctggcgtcagtatctaccaggcaatgaacaagtttccctccctaaagtacatccacgttatgatttagacggggatgctagcat

SEQ ID NO: 620159 - DNA, 88 bp, Homo sapiens
ccttaaaacatcatccctgccctggatcggcctggagccagtgcccaagcacgtgtggttctcaaatataggcattctgatgggaact

SEQ ID NO: 620160 - DNA, 100 bp, Homo sapiens
gatttactccggcttatgatttgagtggaaaggaccatgctagactttccccagcatgtatcctctgacaaagaagtacgagcagcaagtacagaagcag

SEQ ID NO: 620161 - DNA, 50 bp, Homo sapiens
caggtgtggcagtgacagggagagaaagtggacttcagtagttcctctga

SEQ ID NO: 620162 - DNA, 96 bp, Homo sapiens
agaggatggctactatttcaccaatctgaataactgaagtgaagtgatggactccgatttggagagtagtaagacgtgaaaggaatacacttgtgt

SEQ ID NO: 620163 - DNA, 75 bp, Homo sapiens
gccatcctcttctgcctcctcatagagcaagctctgctgagatctgtatctgtggacctgaatgttgatccctcg

SEQ ID NO: 620164 - DNA, 82 bp, Homo sapiens
gcggatttagataaactcaacatcgacagcattatccaacggctgctggaaggtgaagaagatgggcgggcttgggcttctg

SEQ ID NO: 620165 - DNA, 92 bp, Homo sapiens
cggcgatccgggcgctcgagacttaccagagccacaagcaattctgtggtgttcttggtcacacatttatggagtttctgaagggcagtgga

SEQ ID NO: 620166 - DNA, 98 bp, Homo sapiens
cacttgattctcttatacgctacttttactcagagtttgaaggttgtgaccaaaagaggctccgaatgtaaaaagggcagctctctggcatgttcctg

SEQ ID NO: 620167 - DNA, 78 bp, Homo sapiens
ggctgtggcgacatgtcgacctgacgctctacacgggtgcaacaccggaggatttcagcaacctcccacctgaacaaa

SEQ ID NO: 620168 - DNA, 87 bp, Homo sapiens
gatttttgagctggtggaagtggttggaaatggcacctatggacaagtctataaggtagatatagttgtaggtactccgggaagact

SEQ ID NO: 620169 - DNA, 82 bp, Homo sapiens
aattgtagctgacgaagcattttgcaacgcagttcggagttattatgaggatttaagaggggtgcagatcccggaatgcctg

SEQ ID NO: 620170 - DNA, 75 bp, Homo sapiens
cctcagcctcctgaggagctgggattacagatacactgcctctaggactgggacagatagccactgagtacctgc

SEQ ID NO: 620171 - DNA, 97 bp, Homo sapiens
ggggctgctcccatcattgatgtggtgcgatcgttggaaatggaggatgaagatacaattgatgtgttccaacagcagacgggaggtgtctactgaa

SEQ ID NO: 620172 - DNA, 101 bp, Homo sapiens
ccgccgtgagcgcccggagcggtccgcgagccaccgaggcccagatgccatggacaatattaccaggcagaaccaattctacgatacccaagtcatcaaac

SEQ ID NO: 620173 - DNA, 75 bp, Homo sapiens
ggaaagacacacctaccaagaagccagtcaagcggccaggagggtgaggacaaaatcttcttaatcaacaagctt

SEQ ID NO: 620174 - DNA, 74 bp, Homo sapiens
aatcattcctgcagatgaaaaagtgtgacttggcagctgattgagaggatccagaatccagatctctggaatag

SEQ ID NO: 620175 - DNA, 100 bp, Homo sapiens
ctcgctgtgacagagacaacaccgagtatgagaaggacctgagcaacaacaagatcagttccttaagcaattcctccttcaccaacatgagccagctgac

SEQ ID NO: 620176 - DNA, 90 bp, Homo sapiens
aaagcggcttatcgaacagagccgggagttcaagaagaacactccagagctggatcgccatacctaccctgtggtcctcatcttcctggc

SEQ ID NO: 620177 - DNA, 76 bp, Homo sapiens
aatgcttaaaaatcatcttcgaaatgacaatcaagagttaaacatgaagtttctggagagacagtggtatttcaag

SEQ ID NO: 620178 - DNA, 101 bp, Homo sapiens
cacgcgagattataagaagcttgggttcatttgtttgctttcacaaccaaagttctgggccattcagacatcagccttgatcctccggacaaaacttgaga

SEQ ID NO: 620179 - DNA, 90 bp, Homo sapiens
agggtggcggccggataggtgcggagcttcctgaacgaggcactaaccaggctgtatctggacaaggccaccttaatatggaatggaaat

SEQ ID NO: 620180 - DNA, 100 bp, Homo sapiens
ggcgacggcggggtccgcgcggccagctgggcgccgtgtacacagaaggtgggttcgtggaaggcgtcaataagaagctcggcctcctgggtgactctgt

SEQ ID NO: 620181 - DNA, 100 bp, Homo sapiens
tgttcaatataagaaatattggaaagacgctcgtcaccaggacccaaggaaccagtttgctctatgctgtaggaggttatgatggagcatcacgtcagtg

SEQ ID NO: 620182 - DNA, 89 bp, Homo sapiens
cctcctcggagtccttggggacggagcagcgcgtcgtggggcgagcggcagatccagacatttaatgtggatgcaccatgccagaccgt

SEQ ID NO: 620183 - DNA, 98 bp, Homo sapiens
ttgaagatgtttcaaggagaggcccagcatatacaaaggcatggaagtatgaaaatgttttccttccagcagggtggatggggagcatcgctggctga

SEQ ID NO: 620184 - DNA, 82 bp, Homo sapiens
gactgtacaaaggataataaactagttgagaagcagaacccagctgaaggactgttgttgacctcctgtactggagagacat

SEQ ID NO: 620185 - DNA, 100 bp, Homo sapiens
tgaagtatacaagtataattttcctcacacacagttacttgccaagacgattgaaattcatgatgttgctatcaaaagttgagaaattgtcagaagaaat

SEQ ID NO: 620186 - DNA, 50 bp, Homo sapiens
gtgcagctgcctcagttcttagcgcagttggtcaagtctgcagttttctt

SEQ ID NO: 620187 - DNA, 100 bp, Homo sapiens
gaggaccatcctgggtgctggccctgtgctggaggtactgcttctccgagatggccccagtgtgtgcggtggttggagggattttggcacaggaaattgt

SEQ ID NO: 620188 - DNA, 75 bp, Homo sapiens
caggaagatgaaggttctgtgggctgcgttgctggtcacattcctggcagggattggttttcagagacatttcgg

SEQ ID NO: 620189 - DNA, 83 bp, Homo sapiens
ccctgagttcccaacccccaaggggaagtgcatcagagtggatggcctccccagccccaaaatggccgatatgggcaggctgg

SEQ ID NO: 620190 - DNA, 83 bp, Homo sapiens
gtcctacaccaggcagcccccaaatcccggcccagaacgaggtcactcggacactatggtgttcttttacctgtggattgtct

SEQ ID NO: 620191 - DNA, 84 bp, Homo sapiens
cggacagccgcgcgctgagggtctcggggcgggcgccgcgggacctctccgggccatggggtggcccagttgaaatccttccct

SEQ ID NO: 620192 - DNA, 75 bp, Homo sapiens
acctgcagaaggtctctggagacatcttcagcaggtgctgggtaggccaggtttcagcatcgcagacaagaagcg

SEQ ID NO: 620193 - DNA, 95 bp, Homo sapiens
ctgggcacagcaaatgctgaggactcagaccagtctctgcaagaccttctactagtcgaaagcggccccgtgaaggggaagccgagggtgccgag

SEQ ID NO: 620194 - DNA, 82 bp, Homo sapiens
cgtccatgcggaagatcgtcgccacctggatgctggagtctctgctttctatccgtcaagatgataaagtcgtgtgcccgag

SEQ ID NO: 620195 - DNA, 75 bp, Homo sapiens
gcggcggcagcggagagcgagagaggggagcaggctcttgcagaccaatttgaagataaaactacatctgtattg

SEQ ID NO: 620196 - DNA, 75 bp, Homo sapiens
cgtgcgcggtaagaagctgcgcggtagcgcggtgaggagtgaacatggaaaggtttgcagaagaagcagatgttg

SEQ ID NO: 620197 - DNA, 50 bp, Homo sapiens
ccctccgccaggcaaaaggaaggttcctgatgttattagcagcataaggc

SEQ ID NO: 620198 - DNA, 90 bp, Homo sapiens
cgcgagtggagctctgaagaagctctgagcggagttgtgttcttccccagatatcagttttagagaatgtggcgtggagaaattctcaag

SEQ ID NO: 620199 - DNA, 90 bp, Homo sapiens
ccctgctctggcctcgcttgttgctcttcggggactccatcacccagactattgcagatatcatccgaacatgtttgggacccaagtcca

SEQ ID NO: 620200 - DNA, 74 bp, Homo sapiens
cgacgttcgagaggaagattcttacctctttgatctcgacaataagccattgagacccagagcagcagttctga

SEQ ID NO: 620201 - DNA, 96 bp, Homo sapiens
ctgtcagaggcgatggagaaacgcaaagggctgatggagttatgagaacaatgaacacagaaaaactcctaaaaactgtaccaattattcagaatc

SEQ ID NO: 620202 - DNA, 75 bp, Homo sapiens
cagccgatccagcctgcggagcctgtggggcaggtggacaagagcaaggaccaagtgtggaaggtcttaatgtac

SEQ ID NO: 620203 - DNA, 90 bp, Homo sapiens
ctcggcagcatggcgtccgtgacgctgagcgaggcggagaaggtgtacatcgtgcatggcgtccagtctgcagatctccaggggagccca

SEQ ID NO: 620204 - DNA, 50 bp, Homo sapiens
aagattactctgcaacagctaaaggtggggaacacagccttgattgtgtt

SEQ ID NO: 620205 - DNA, 95 bp, Homo sapiens
tgaagatacatgagacagcagccaaacccccagccttgttagatgacttggataaagaactaaacaactacattatgcgatgtagagaatggtat

SEQ ID NO: 620206 - DNA, 100 bp, Homo sapiens
gcactttataactccaaacgagtggctgaaactgcctacaagatacatagaaagtgaattttgtagaaggagaagagtgcttgtgatttcacgtattttt

SEQ ID NO: 620207 - DNA, 83 bp, Homo sapiens
catgaagcagagctgcatcatgcggcagtgcatcgcggttgacatcatggacatatgtgagtccatcctggagaggaagcggc

SEQ ID NO: 620208 - DNA, 125 bp, Homo sapiens
gcccttgttgcctctcagcaggtggctgcccaggcatctgcatctggaatgtttcctggacaaagaaggtctgctccagctcagccacctgctgaagggacagaagggactgccccaggtggggg

SEQ ID NO: 620209 - DNA, 74 bp, Homo sapiens
cacgcaaccccagatccatttacactttacagtgggccatgcacagacacagctcatgtctcattaatcacacc

SEQ ID NO: 620210 - DNA, 90 bp, Homo sapiens
acttactgcggccgcccggctcttgggaaccaagttgtcgagatgtccacagaaggaggatttggtggtactagcagcagtgatgcccag

SEQ ID NO: 620211 - DNA, 74 bp, Homo sapiens
ggaatctgtcttggaggacatcagaagatggctgatcactgggaaactgcacctcgtcacatgatgcgtctaga

SEQ ID NO: 620212 - DNA, 100 bp, Homo sapiens
ctcagccgccgaggagccatcagcttcagctccagctccgctctcttcggctgccccaatccccggcagctctctcagcaaatggttatgagccttagag

SEQ ID NO: 620213 - DNA, 90 bp, Homo sapiens
gggccatctggaggactggctggagaagagagccaagcggctgagctcagccccaagtagcagttgtatcacggactgattcaccgagcc

SEQ ID NO: 620214 - DNA, 87 bp, Homo sapiens
catgtggcagtggaaaatgcgctcgggctggaccagcaggttgatgataattagaagcatgctttccactgaacttcccgacaacat

SEQ ID NO: 620215 - DNA, 97 bp, Homo sapiens
cagtgaggaggacggagaggatgtgttcgaggtggagaagatcctggacatgaagaccgagggggtgaatccgccatactacatcccgctggttgag

SEQ ID NO: 620216 - DNA, 74 bp, Homo sapiens
caaggagctaaagcagcgtgcgttcagccctggggccatttggatatggttcgctttctacttgaagctggtgc

SEQ ID NO: 620217 - DNA, 75 bp, Homo sapiens
gtgtggataaatgagtcagatggaagtacaccaattattggagaggttcaggaagatttgactgaagagaaaaaa

SEQ ID NO: 620218 - DNA, 88 bp, Homo sapiens
ggcgacgcggggccatgtgcaggaccctaacgacaggcgcctccggcccatttacgcttttaggagagtatgagtcccttggaaaaga

SEQ ID NO: 620219 - DNA, 74 bp, Homo sapiens
caagctggccttggcagtttcggtgcatagaaaatcaggtgatagaccattacaggacttgtcaaataccagtt

SEQ ID NO: 620220 - DNA, 101 bp, Homo sapiens
gacttgggcccagtttatggcttccagtggaggcattttggggcagaatacagagatatggaatcaggtggtcttcaagctgacagagaagctgacggaac

SEQ ID NO: 620221 - DNA, 90 bp, Homo sapiens
gccaggccagctcgaagaaggcgagcagggtgcgggagagccccttgcagaagacgccgtacgagctgcagaaccttggcctgaaaatgc

SEQ ID NO: 620222 - DNA, 100 bp, Homo sapiens
tggaaaggactgttttattgcatgtggatgcaggacaagccactcctccaggttgggtatctacagccattggttgctgttcaggtcagctttgctccta

SEQ ID NO: 620223 - DNA, 100 bp, Homo sapiens
gtaactatgctcatcattgttcttgtcaatgcctttgtgtctatcacagtggaggaaaagcacaatagtgaggctattatttcgcttctatgagcctcaa

SEQ ID NO: 620224 - DNA, 87 bp, Homo sapiens
ctgcatagtttcggtcatctaaaggaggttttaaacagtataacaggtgctgatcggattgaattatgttctggtttatcagagggg

SEQ ID NO: 620225 - DNA, 50 bp, Homo sapiens
ctttcaaatgctgtatgcatatgatcagttctcaaaagtctatggtcctg

SEQ ID NO: 620226 - DNA, 100 bp, Homo sapiens
gaagcagcgtgtcctccgtgggagcccgaggtagttttgcagaagtgcaaagtcaagtctctcttgcacagtcctggagactacatcctcttaagtgcag

SEQ ID NO: 620227 - DNA, 51 bp, Homo sapiens
agggagactgtattgtgtgcgagaaggttagctttatacgtctacgaatat

SEQ ID NO: 620228 - DNA, 99 bp, Homo sapiens
ctgtatctgatatcattcgattacgaaataaaacgattcatgatgttgctatcaaaagttgagaaattgtcagaagaaatcatggagataatgcaaaat

SEQ ID NO: 620229 - DNA, 97 bp, Homo sapiens
aataagctatatactttggttacctatgtacctgttaccactttcaaaacgagtgatagacagccaagcagagaaactgaaggagcttgacaaggag

SEQ ID NO: 620230 - DNA, 101 bp, Homo sapiens
gtgactaccatgacgaaaacatgtactacagccagtcttctatgtttccacatcggtcagaaaaagattctggctcttgctgattgaattcctttggtgca

SEQ ID NO: 620231 - DNA, 74 bp, Homo sapiens
caattcccagaccttcagcccgtggcccggatgcaggacagacccctcaggtgggaaagcagtgccactctccg

SEQ ID NO: 620232 - DNA, 83 bp, Homo sapiens
cgaggaatcagctttgaagtgggagcccagttggaagcccgggaccgtttaaaaaactgatcttgagtcacagtgaagcaacc

SEQ ID NO: 620233 - DNA, 80 bp, Homo sapiens
ctgggaggtggaacgggccgaactgcaggtgaagaaagctttttttgctttggtgactaacggtgtacgagctgcccctt

SEQ ID NO: 620234 - DNA, 75 bp, Homo sapiens
gaaaagttctctgtgaatcataatcaaagaatctttgacctgaattacagatgaggacacagtaaagaggtattt

SEQ ID NO: 620235 - DNA, 82 bp, Homo sapiens
ttccatgtgatggtggagtaggaggcaggtctccgcgaacgctgtccaactgggcgtacgagtttgacaagtgggccccctc

SEQ ID NO: 620236 - DNA, 75 bp, Homo sapiens
gggaagtgggcaatgccatcctcttctgcctcctcatagagcaagctctgaaggaccctctattgtcccaggcct

SEQ ID NO: 620237 - DNA, 100 bp, Homo sapiens
tgagacgaacgcttcactggggcagtctctgcatatcatggggagatagacgctgctgcctgtgcagcggaactgctgcctgacgctctgcaacttcagc

SEQ ID NO: 620238 - DNA, 82 bp, Homo sapiens
aagaattcagaaggaacttgcagaaatcacattggaccctcctcccaactgtagctgtcaaagctcgaaaaacagcagcaga

SEQ ID NO: 620239 - DNA, 75 bp, Homo sapiens
agcaagtgcgcggttggggccactgcgaggccgttttagatgcttgcacataccacccaggtgttccggtctttc

SEQ ID NO: 620240 - DNA, 48 bp, Homo sapiens
tctacctcacccccaagaccagctgctctttggcgtaaattgcaatcg

SEQ ID NO: 620241 - DNA, 100 bp, Homo sapiens
tgagaagcctggtgctatctcagagcaagtacattgtgaagtgccatggcaacacgcttctgccccagttcctggggatgtaccgagtcagtgtggacaa

SEQ ID NO: 620242 - DNA, 75 bp, Homo sapiens
ggaaggcagatgtatctttcgttctcttttttgactgtaataatgagattggcacttctctgtttgatgaagagg

SEQ ID NO: 620243 - DNA, 83 bp, Homo sapiens
ggaagaagggcaggacctgggcggaggccgccaagacgtatgacttctctttggaaaagaaaaccattgagtgggctgaagag

SEQ ID NO: 620244 - DNA, 82 bp, Homo sapiens
ccgccgagtcgcgcggaggcggaggcttggggtattaatctctggagaagacacatccacagttagcactttcttcagatgc

SEQ ID NO: 620245 - DNA, 100 bp, Homo sapiens
tttgccatgccctatttcatccaggtcatgaaggagtacttgacaaagggctggtgaattaccatatctccgtcaagtgcagtaaccagttcaagttgga

SEQ ID NO: 620246 - DNA, 49 bp, Homo sapiens
cagtgttccaagttctaaagaggtgatggaggacgaggagaaggcagtg

SEQ ID NO: 620247 - DNA, 100 bp, Homo sapiens
ttcctgtacagcctgcagaactgcagcccttggctggtccctgcgagcccgtggagactgccagagatgtcctctttcggttacaggaccctgactgtgg

SEQ ID NO: 620248 - DNA, 100 bp, Homo sapiens
ctacacctttctctcctgcctgggcaagcctcggttccacgcaggcgcgggggacgacggcgggggctacacggtggaggtgagcatcaatgactacctg

SEQ ID NO: 620249 - DNA, 98 bp, Homo sapiens
tgtatatgcacatgctgggctaccctgctcactttggacagggtggagagattcaaccagttagcgtgaaagttggagataaagttcttctcccagaa

SEQ ID NO: 620250 - DNA, 100 bp, Homo sapiens
tgcgctcccagctggacctcaaggacaaccggatgaaggagctggaggccgagctggccatgggtcttgacaatgttcacaaacagagggtggcagaagt

SEQ ID NO: 620251 - DNA, 75 bp, Homo sapiens
acacatcagttttacaggaaatatatgtgtgacttggaaaaggagagtgacacacccctccagcaagtatccatt

SEQ ID NO: 620252 - DNA, 100 bp, Homo sapiens
tacgtgttaatggtgtgctgtaagctgatgtccgcctcaagccagcacctccggggacatgcagagataaggtctcaccatgttgtccagactggacttg

SEQ ID NO: 620253 - DNA, 83 bp, Homo sapiens
cttacttatcctctaggtcccaggaatgaagatctcaggatggacccaagctctgccggacatggtggtgtcccacctttttg

SEQ ID NO: 620254 - DNA, 85 bp, Homo sapiens
agaactctaaggaaagatcaagtagaactgggccagaagcggactcctagaagaggggagcagcaaggatggaatgacagccgtg

SEQ ID NO: 620255 - DNA, 100 bp, Homo sapiens
ctctactgtgacttcagagacactgccaagcagccttagccctagtgtagagttttcggctttgtgagaaaccttaccatcaaacacgatggccagcaac

SEQ ID NO: 620256 - DNA, 114 bp, Homo sapiens
ctcagccgcaagtacccgtccatcatagtcaactgcgtggaagagaagggtgagaaggactggcagaaatacgagactgctcggcggctgaaaaaatgtgtggacaagatccgg

SEQ ID NO: 620257 - DNA, 100 bp, Homo sapiens
tataaagccttctgaactgagtgaaaatacagccaagatcttggcaaagcttctccctcagtatttagaccagccatatgcagttcagaagctcaaagca

SEQ ID NO: 620258 - DNA, 50 bp, Homo sapiens
ctccgccctcccttttccctgagccaaatctcctcagccacctgttgaag

SEQ ID NO: 620259 - DNA, 90 bp, Homo sapiens
gcggcacagagagggcctgggagcttgctgcagcttcaggcgaacctcttcccggccgctctggtgcacttgggagccgaggagccggca

SEQ ID NO: 620260 - DNA, 83 bp, Homo sapiens
ggagcgcaaggtcgccctcaaggccatgatcaaaacgacccacgaggaggaaccaggctactttccccagtactgaggtggtg

SEQ ID NO: 620261 - DNA, 130 bp, Homo sapiens
ccgagtcctcgccatgccggcccggcggctgctgctgctgctgacgctgctgctgcccggcctcgggggaaagcaggcaggatgggagagtcgccgatagaaccacctcttccctgcctcctgggcttgg

SEQ ID NO: 620262 - DNA, 72 bp, Homo sapiens
gaagtggagcaccaggagactgcctatgtggaaaggtgaaatccaggaattttgtccaaataccaaaatgct

SEQ ID NO: 620263 - DNA, 74 bp, Homo sapiens
acgggatttgtcggtgaacaacgcagagctgatgcagacatcttcgagagctgtgcccaggagtgaacaaccag

SEQ ID NO: 620264 - DNA, 83 bp, Homo sapiens
ggccttcaacctgctctgcttgtacattgggcaaaatgccttcagaaaatggacagagcgggatgccaccagcttgtccaaag

SEQ ID NO: 620265 - DNA, 100 bp, Homo sapiens
ggccatggccagcgacggggccaggaagcaattctggaagcgcagcaacagcaagctcccgggcagctccatgatgcgttatctgggtctggaaacccaa

SEQ ID NO: 620266 - DNA, 74 bp, Homo sapiens
gcggaggtggcgctgccccttcagacaaaaagtaaccttcctgaagaggacatgtgattggaagttgtcaattg

SEQ ID NO: 620267 - DNA, 96 bp, Homo sapiens
ggcggcggggccgcgggagctggcgcggggtccgccgggggaggcgggatcagatgtggccgcccagcagttgtgcacataggaggagaaggggcc

SEQ ID NO: 620268 - DNA, 76 bp, Homo sapiens
gtctttctcaggatggcttccttctcaactgtgacaagtgcagatcaacaacccctccccgtcgtaaacgctgagg

SEQ ID NO: 620269 - DNA, 98 bp, Homo sapiens
cagacatcaagctctttgggaagtggagcaccgatgatgtgcagatcaatgacatttccctgcagattctctcgggcctagccgtccttggaacccga

SEQ ID NO: 620270 - DNA, 100 bp, Homo sapiens
gcaaattcgaccctcacacaactcacgactggttaagatttttgcacagatcttcttggaaacagaattgttctacaaaggtatccgccctgcaattaac

SEQ ID NO: 620271 - DNA, 82 bp, Homo sapiens
gtcgggttattcgagtgaccgagaccgcggccgggaccgagggtatcgagaaccttccctgcgaacttcagaggaacttcca

SEQ ID NO: 620272 - DNA, 100 bp, Homo sapiens
gaaaatttcgatattgaagtgtcaaaatccatagatggaaaagatggtgtaatcctgagagattcacatggtgttgcacaagtacgttttgtgacaggca

SEQ ID NO: 620273 - DNA, 75 bp, Homo sapiens
atgccaagaagaatctagacagacaggcctttctagggaacagagttcagaggcagcagaaactggagttagtga

SEQ ID NO: 620274 - DNA, 51 bp, Homo sapiens
gaagatctcgaaggatttcatagatgagcccattattgaagagccaagccg

SEQ ID NO: 620275 - DNA, 90 bp, Homo sapiens
atcgacaagtccgggagctgggcggccatttaccagattcgagtgagggttgaaaaggatccagaacttggatttagcatatcaggtggt

SEQ ID NO: 620276 - DNA, 99 bp, Homo sapiens
gcagcgggggcagtcagagcggagccaagatgcgaatgggatgttaactcattccagcaaactacaaagtggattgatgatgtcagaacagaaagagga

SEQ ID NO: 620277 - DNA, 96 bp, Homo sapiens
ctcatgcgggcagaaagtatctctagtctttatgggaaacctcagcttgatgatgtatctcaggagtccaatgtgctgattgctgctaacagtcag

SEQ ID NO: 620278 - DNA, 115 bp, Homo sapiens
ctgttattaggaaaaatctggcccctttttccagtttttcaccaattcttagaggcttaagcaggtaaagcagtcactgtgaagaaaataacattttaagaaacttttctgtcac

SEQ ID NO: 620279 - DNA, 100 bp, Homo sapiens
ccaaactggaggatgcctatgtattccctggggatggcgcatcacacaccaaaggacgagattgaggagctgcgggccgagatgctggagatgcgggacg

SEQ ID NO: 620280 - DNA, 101 bp, Homo sapiens
tgcccctggtggtccggcttgaaggtacctggcaaagaattctgcaactttgttcagtgccagcgattatgaagtggctcctcctgagtaccatcggaaag

SEQ ID NO: 620281 - DNA, 102 bp, Homo sapiens
acgtcaccccgctgtgacgcgcacgctgtaggaaaactgaacaccagatgcattttcacaattactcacctgtccatattgtgatagaggctataaacgctt

SEQ ID NO: 620282 - DNA, 82 bp, Homo sapiens
ggatactcagttgtggagagctgattcccaaatctaaagcatattcctctgcagacactattgaagttcatggtggatattg

SEQ ID NO: 620283 - DNA, 88 bp, Homo sapiens
aacctgtacgccacctgggaggtggaccggagctcgtccagctgcgtgcctaggacagaactgtaccgctctctttttggccagctcc

SEQ ID NO: 620284 - DNA, 115 bp, Homo sapiens
ttctattaaagatcaccagtggcatatccaggcatgctgtgctctaactggcgagggataacaacgaacttgatgcaagtgataggtttgccaaggtcagacctctcatcatccg

SEQ ID NO: 620285 - DNA, 82 bp, Homo sapiens
aggggctgagcttttgaagaaaatctcctcagagtctccgcttgatggcattgaaacgaatgggaattgtaagcgactatga

SEQ ID NO: 620286 - DNA, 82 bp, Homo sapiens
gtccaactacaacgccctgcgggctgctgccggcatccagccgccagtgatcagggccaaagcggtcagtgagaaggaagtg

SEQ ID NO: 620287 - DNA, 80 bp, Homo sapiens
agaagaaagtaaagttggaagttaagggagacaaagttgaaaacaaagtgctgatgtcatctgggtgattctcagtgtgg

SEQ ID NO: 620288 - DNA, 82 bp, Homo sapiens
agtgggggtgtacgagtcggccaagttgatgaatgtggccaagttctctgcagcctgtggtccccctgtgacccccgagtgt

SEQ ID NO: 620289 - DNA, 112 bp, Homo sapiens
gcggaggctgagccggccgcgggcgcgaccggaggcaggagaagaatttggattggtttcctcggatgcgagccatgtccctcgttagcaatgaaggcgacagtgagcaaaa

SEQ ID NO: 620290 - DNA, 131 bp, Homo sapiens
agcaagacattctacagcacactcagactcaagatctgcaagttttcctaaaagtgagatcggactggaactgttcggctgcgaccagaaatttattttcctgagtaaattgccgagaattaagaatgaag

SEQ ID NO: 620291 - DNA, 100 bp, Homo sapiens
tgaacctctacgacacggccggttatgatgtgattgctcaagcccaatctgggactgggaaaacggccacatttgccatatcgattctgcagcagattga

SEQ ID NO: 620292 - DNA, 75 bp, Homo sapiens
catgcatctcctcggcccctggctcctgctcctggcattagtgccagcagtagttcccaagggctgtctcagcca

SEQ ID NO: 620293 - DNA, 75 bp, Homo sapiens
tgggcttccagagacagctccaggagtttgagaagcatgaggtccatcaggacgtcttcctcatctgcttctccc

SEQ ID NO: 620294 - DNA, 51 bp, Homo sapiens
cctgagacggtgtcccgccgaaagcttttggacttcttggatcagcatcct

SEQ ID NO: 620295 - DNA, 90 bp, Homo sapiens
tctaccgtcaccagcagaagataaaggatgaagcctgctgggagcgtgaatgacatggccctggatgccttcgacttggaccggatgaag

SEQ ID NO: 620296 - DNA, 101 bp, Homo sapiens
gtctttgttagatgattcgaagtttcctatagaggataccccattggttccaagaacgatctcctcagcagaatatagtatcttgtgtaagtgtaagcacc

SEQ ID NO: 620297 - DNA, 98 bp, Homo sapiens
ggcacctggataaccttttgctaacaaaaacaggagtacaagcgcaagctagccagagtttccctggtgcgcaaagaactcaggtcccggatccagag

SEQ ID NO: 620298 - DNA, 100 bp, Homo sapiens
ctcttatcgtcgaaatgaatttgtcctgatgaagctgccgaagtatgcattgccaaaggtcaacaaaaatctctcatttacttcaccaccagcagtttcc

SEQ ID NO: 620299 - DNA, 50 bp, Homo sapiens
tgatgctggggtgggagcccgtgggccatgaagcccccaggaggagaatc

SEQ ID NO: 620300 - DNA, 98 bp, Homo sapiens
cagggccaggcgccgctcagaacgaaatggtggagtcaatgaagaaagtagcagggatggatgtggagctgacagttgaagaaagaaacctcctatct

SEQ ID NO: 620301 - DNA, 112 bp, Homo sapiens
aaacatgctgaaatcttacaggaagtccttggagagtgcttgttgaaagcttggttaaccgaaaaagaagaggctttaaataaagtccagacaagcaacttcaaagaccaaa

SEQ ID NO: 620302 - DNA, 86 bp, Homo sapiens
caggatatgaacttgaggaagatggcgttcattgcagtggtcagcccaaccccagggtgtatccgtgccctcatgaagatgctgta

SEQ ID NO: 620303 - DNA, 76 bp, Homo sapiens
tgaagctgcccgtagatttcagcaatatccccacataccttctcaaggtatcgaagacaagacacactagagaaac

SEQ ID NO: 620304 - DNA, 76 bp, Homo sapiens
ggtgcaggtatgagcaggtctgaagactaacattttgtgaagttgtaaaacagggtcagcagcctctggacccgtg

SEQ ID NO: 620305 - DNA, 100 bp, Homo sapiens
tccgtctccgcaggtcagctccgccgaaggcgccgccaaggaagaggtatgatctcgtgaaaccttgagagaaactgaatgacgaatgaaactattgttc

SEQ ID NO: 620306 - DNA, 74 bp, Homo sapiens
atggaagttgattactcagtctctaaaaagctaagggccatgttctgcaacgatttaaaggaaaagtatgagaa

SEQ ID NO: 620307 - DNA, 144 bp, Homo sapiens
gaagagaacgcgagaagggaagatgggggccgtcctgaggagcctcctggcctgcagcttctgtgtgctcctgagaggctttcagtccagtgtaaagctgttggagcgcgggagcaaaggtaaagaatgatgtaatgcgctggc

SEQ ID NO: 620308 - DNA, 75 bp, Homo sapiens
gtgccatcatcgtggtagttattgtaagttggtggttctgtcagatgaaagcaaagcgaggctggatcccagcgt

SEQ ID NO: 620309 - DNA, 48 bp, Homo sapiens
caaagacctgcgactttgctcagggtctggctctgtcacccaggctgg

SEQ ID NO: 620310 - DNA, 98 bp, Homo sapiens
aaagatcccccgcttgctcctcgctgaccccatcactgtgcaagctggggctgcagcaaagagagcaggatgaatggacagtaccagcagcccacgga

SEQ ID NO: 620311 - DNA, 98 bp, Homo sapiens
caggtggcgacggcagaggaaccagagtgaactccgagcaggaacacttcctcattgtcccttttgggcttctttacagtgaagtgactgcatccagt

SEQ ID NO: 620312 - DNA, 75 bp, Homo sapiens
gcagtggtcgcttcttctccttggatctgaagaagatgatgaagttgtggcaatgattaaggaattgttagatac

SEQ ID NO: 620313 - DNA, 98 bp, Homo sapiens
caccgggatcgtgaccgagaccgtgaccgagagcgtgaccgagagcgcgaatatcgtcatcgttagaagatgtgaatttggacattggctctggacat

SEQ ID NO: 620314 - DNA, 75 bp, Homo sapiens
ctggaaggggccagtctggagacagtcaaggcaaggggatcaggcgagtgaagccgaagcgcaccacatccttct

SEQ ID NO: 620315 - DNA, 50 bp, Homo sapiens
tgacgactgttgacctgaaaaggctaatctagacgaaatccagatgagtt

SEQ ID NO: 620316 - DNA, 50 bp, Homo sapiens
cggggcgctgactgcgtgttaacatcaggccggaaggtggtggtcgtacg

SEQ ID NO: 620317 - DNA, 95 bp, Homo sapiens
gattgatgtgcaacaagtgtctttggttataaattatgatctacctaccaatcgtgaaaactatattcacagaccctcaggcagtttgattgcat

SEQ ID NO: 620318 - DNA, 100 bp, Homo sapiens
gtcctggatcgctgatacctatgccagcaccatagggcactatatgttgttattcatgaggaccaatggattggcgagacagtactacaatcaacattta

SEQ ID NO: 620319 - DNA, 75 bp, Homo sapiens
gtgccatccaaactgcacctacggattggtgctgaagacatggacggcttccaggcagacacggaggaggaggaa

SEQ ID NO: 620320 - DNA, 82 bp, Homo sapiens
cctggccacatgatgaaccgaggaggaatgtcagggccacgtgctgtacgccgacatcaagatggagaatgggaagtccaag

SEQ ID NO: 620321 - DNA, 127 bp, Homo sapiens
agaattcagatctataaatactgaagtggtagcatgctctgttgattcacagtttacccatttggcctggaaactaaatatattttgccaactttggaaaaagaattattcttggcagagcacagtg

SEQ ID NO: 620322 - DNA, 100 bp, Homo sapiens
ctaacttcaaggtcaaccagaggcgctttgttacgttcagccaaggcagttatttggcagaaaagcagagtatcagatcacaagatggctctcatgtcag

SEQ ID NO: 620323 - DNA, 100 bp, Homo sapiens
ctggccaaagcctgcccagacggctcacctgtgcgggatggaacaaaagcgtgagtgcatctccatccacgttggccaggctggtgtccagattggcaat

SEQ ID NO: 620324 - DNA, 82 bp, Homo sapiens
ccgcgcacttcgtcatgttcttcgcgccctgtttttgaaatcatgaatcctgtttatagtcctggatcttctggggttccct

SEQ ID NO: 620325 - DNA, 100 bp, Homo sapiens
tagaggtgtatggcacaggcgtggccagcaccaggcatgaaatgggaaaatgactcaggcactttggacacggtaggcgctgtggttgtggaccacgaag

SEQ ID NO: 620326 - DNA, 75 bp, Homo sapiens
tcatagttgattactgccttctgctgcagcgaaatgccaggtggagctcaacaggaaagtcctagcggatctggc

SEQ ID NO: 620327 - DNA, 82 bp, Homo sapiens
gcaccagggaaagggaatatgatgagcaacttttttggaaaagctgctatgagttgaaacagttcctcaggctacagtgaag

SEQ ID NO: 620328 - DNA, 100 bp, Homo sapiens
aaagaaactaaaaaatggcagctctcagaatgggaagaatgagagaagtcatatgcccggcacacaagatggattctggatatactctgagtattgtaac

SEQ ID NO: 620329 - DNA, 100 bp, Homo sapiens
cggaaggactcctggaatgccacaaatgcaaatacttgtgcactgggagaggtacatgtcccagagcaagcacacggaggcccgggagctcatgtactcg

SEQ ID NO: 620330 - DNA, 83 bp, Homo sapiens
agttgaagattactggatgcacgtacagaatacattcagccgtcagcccaccaagaaaacacattgtggagcgctatacagag

SEQ ID NO: 620331 - DNA, 78 bp, Homo sapiens
caggacttcagactaggctcagaatctatgacacagtgtactttcggctccatgcttccatcctgaagctcctgggga

SEQ ID NO: 620332 - DNA, 101 bp, Homo sapiens
ctgcgcaccaagtgcgctgtgtccaacgacctcacccagcaggagatacggaccctggagatgaagatgtgtgtgtctttaagtgctcagtgtcccgagag

SEQ ID NO: 620333 - DNA, 83 bp, Homo sapiens
agcgcaaccacgagacggccttccaagggaacccaccaagaccaacctggtcacattcttccataccgacctcagcggttacc

SEQ ID NO: 620334 - DNA, 75 bp, Homo sapiens
ggctgaaaaggaaaatctgcaaagaactttcctgcttacaacctcaagtaaatacgctggggaggaggaggagga

SEQ ID NO: 620335 - DNA, 100 bp, Homo sapiens
catctccatggagatcccccaagaatttcagaagactgtatccaccatgtactacctctggatgtcggatgtgatgctggtacaacccagagtagaattt

SEQ ID NO: 620336 - DNA, 100 bp, Homo sapiens
ttactggttgggaatccaaagttaatgccaagaagcagccgccagttgggatcaaatgtgagcctatggatcaagccggaaatcactgtggaaaatcttc

SEQ ID NO: 620337 - DNA, 100 bp, Homo sapiens
ggcgccgagggacaccgcagtatgaggcagagagcaatggtggaacaaagcggcaaaagatatcccatcaaaattatatagcctatcaaaagcaagttat

SEQ ID NO: 620338 - DNA, 75 bp, Homo sapiens
ctgatgatgtggaggttaacagctatctttcttgtctgccaatgattttggacaacaaactgagccacccattgt

SEQ ID NO: 620339 - DNA, 49 bp, Homo sapiens
tcaagtccctccggcacatgaggcaggcctcagtgaccccacaccccct

SEQ ID NO: 620340 - DNA, 75 bp, Homo sapiens
ttcgccttcgccctttccacctcgcggcagttcgagcttttatctcagttatcaggagtgagacgttctgcagga

SEQ ID NO: 620341 - DNA, 98 bp, Homo sapiens
atatggaaaacatatattggagctacatggatactcactgccacaacgacattgtcaaccttctcctggactgtggggccgacgtgaacaagtgctca

SEQ ID NO: 620342 - DNA, 95 bp, Homo sapiens
ccattcagatgggatctttccggatcaatccagatggcagccagtcagtggtggaggtgccagtcattgaaatcccaggttttggaaatctttct

SEQ ID NO: 620343 - DNA, 75 bp, Homo sapiens
ttccagaaagggtttgactggaggaacctctggagcagctagttctccggggtgctgcaccagtgtcacattttg

SEQ ID NO: 620344 - DNA, 90 bp, Homo sapiens
gctggctcccatcacctacccgcagggcctggcactggccaaggagattggacttgggaccctggaggactgacgctgctggcctgggcg

SEQ ID NO: 620345 - DNA, 82 bp, Homo sapiens
catgcagcggaggtgggtcttcgtgctgctcgacgtgctgtgcttactggtcggggacggcaaaacagaacagaaaggcgga

SEQ ID NO: 620346 - DNA, 100 bp, Homo sapiens
ttatgaaaagcgtcaagaagaggaggaagccatgcgtagggttcccgtgtcagtggctatgatgacacctcaagttatcactccccagcaaatgcagcag

SEQ ID NO: 620347 - DNA, 111 bp, Homo sapiens
attgacgcggtgaactctgtccagttttcaaaccacacagaccctgagacagggaagacctgtctgctgaaagccatgctcaacctgcacgacggacagaacaccaccatc

SEQ ID NO: 620348 - DNA, 75 bp, Homo sapiens
cgctatgaagacacgcttcttctggaagaccagccaacagaatgaagaatccccacctgagggccaaactagcag

SEQ ID NO: 620349 - DNA, 96 bp, Homo sapiens
gtcttctgcagtgattttaaccaaggcagttggtggaaatgagatgcacaaagcagggtcatcagaagcctctcgattcaaaagatgataataccg

SEQ ID NO: 620350 - DNA, 75 bp, Homo sapiens
ggtcattctcgctaacaactgcccagctttgaggatgttcttgagtcgaagaacagcaccatcaaggacctgcag

SEQ ID NO: 620351 - DNA, 75 bp, Homo sapiens
aaagaccccagttatggatgggaggttcacctttccttgccagtgaagatggcgtgcttggcggagtgattgtcc

SEQ ID NO: 620352 - DNA, 100 bp, Homo sapiens
aaaattcatctgggcggtatctggaacttggctattcaagatctctggcagtggaggaagtctctttaagaaaatagtttaaacaatttgttaaaaaatt

SEQ ID NO: 620353 - DNA, 98 bp, Homo sapiens
aaaaatttttacatttggatcttacagattaggagtgcatacaaaagatttaatccagagactgacttcactatagaacccacagttgtatcaatggt

SEQ ID NO: 620354 - DNA, 97 bp, Homo sapiens
ccgccgggggcctgctgcgcccggcgcccaccaccttcttgctgttcagccagaaatctgccatcagtcggatgatcccggacgaccagcacagccc

SEQ ID NO: 620355 - DNA, 101 bp, Homo sapiens
ctctctgggctttgttgaggcggcagtatgaccgggtttctttgatgcgacctcaggaaggagatgaggcacaattggtgaaagaccgaaactcaatgcta

SEQ ID NO: 620356 - DNA, 115 bp, Homo sapiens
gaatgtgtctgtccccagcaataatgttcacgcgccttattccagtgacaaaggccccttcacagatgtagtcactacaaatcttaaattgcgaaatccatcggatagaaaagtg

SEQ ID NO: 620357 - DNA, 95 bp, Homo sapiens
ggccgcggacgaagatggcgaccgccatgtacttggagcactatctggacacatatatagcagtgacgaggatgatgaggactttgagatgtgtg

SEQ ID NO: 620358 - DNA, 75 bp, Homo sapiens
cctggctccccatactagtcgccgacctgatggccaaaagaaaggaagaaaatttttcctctcctaaaaatgcca

SEQ ID NO: 620359 - DNA, 76 bp, Homo sapiens
taaacgaggggctggaacacctcgccaaagcagagaaatagtggtgatgatgtccagcaactctgtgaagcaggag

SEQ ID NO: 620360 - DNA, 98 bp, Homo sapiens
cggctcatgcgcggtgcacagaggcttgtttcacatctgtaacaacaggaagatgaagatcctgccaaaggtgatcagagtcgatcagttgaccttgg

SEQ ID NO: 620361 - DNA, 96 bp, Homo sapiens
ctctgtccagttttcaaaccacacagattctggctacattggagattggttgctttctaaaactgaaggagaagcccatgaagagatggtggattc

SEQ ID NO: 620362 - DNA, 75 bp, Homo sapiens
tgctggaggaaacacctcaggacacggcctacaacaccaagagatcgccggggagtggcctgtacagcaacctcc

SEQ ID NO: 620363 - DNA, 75 bp, Homo sapiens
ggaatcctcccaccacagtctctcaaatacttgggactacagagtatggtgtttgcgaaaacttgcggaagctgg

SEQ ID NO: 620364 - DNA, 97 bp, Homo sapiens
cccacgagatcatggggcccaagaaaaagcacctggactgtagtgtgccagtatttgaaaaatcccaatgtatctgattcactgctgctgcagaata

SEQ ID NO: 620365 - DNA, 100 bp, Homo sapiens
ggatgccctaaatgccatcactaagtggctgagcacggtgccaggttccagattccattgcttggagccatggccgcgacgctggtggtcatctgcacag

SEQ ID NO: 620366 - DNA, 50 bp, Homo sapiens
gtcctcctcacctatggccgctggcaggagagagaagctcttcagaaaca

SEQ ID NO: 620367 - DNA, 50 bp, Homo sapiens
cacagatccagaaggcaccagacgtgattcttgagtatcagaacaccacc

SEQ ID NO: 620368 - DNA, 74 bp, Homo sapiens
gcgcagtgaagtggtgagcctttttgtcactggtgatgtccttgcaaatatcaatggtgtgagcacagaaggtt

SEQ ID NO: 620369 - DNA, 82 bp, Homo sapiens
caacgccccccttcacacacagtaagttccagtgtctcgccccatcctcaccctcagggttcccagggcccaggctgtggtg

SEQ ID NO: 620370 - DNA, 100 bp, Homo sapiens
aaaaaccacatagcaacaccagaaaactgggaagcattttgaatgaatttggacatcacaagaaaccagcaaatatcctagtaatgggagaaggtcctga

SEQ ID NO: 620371 - DNA, 90 bp, Homo sapiens
gtttccgggaattaagtccagtttcttttcaatataggaatatgcttttaaggctattaaccagggtggccttacatcagtagctgtcag

SEQ ID NO: 620372 - DNA, 89 bp, Homo sapiens
ccgcaggcgcagacccacccgccatgaagccccccgcagctctccccaaagctcccgggactcccatggtgactgagaacacagccacc

SEQ ID NO: 620373 - DNA, 83 bp, Homo sapiens
ggctgggacagcgagcccttcaccctggtggagcgagacgacctgcctagagctggaacgttacctccagagcgagccctgct

SEQ ID NO: 620374 - DNA, 90 bp, Homo sapiens
ctccgggctccttcggccccgccatgggctgctgcagctccgcctcctccgccgcgcagttggattggctagtgcttccagtattaaata

SEQ ID NO: 620375 - DNA, 75 bp, Homo sapiens
cctttctggcaaagatgagggggattcttaagattacaggctgtgccagccctggaaaaacagttacaattgttg

SEQ ID NO: 620376 - DNA, 60 bp, Homo sapiens
ccatcgacatatttcctgtcaccaacaaagatttcaggtgcccgtcctgtagctttccgg

SEQ ID NO: 620377 - DNA, 100 bp, Homo sapiens
ctggctgagatgcttgaagaccttcatatttcccaagatgccactggtgaagaagctgctcgactgatccaaaacatggatgccaccactgagccttgta

SEQ ID NO: 620378 - DNA, 100 bp, Homo sapiens
cacatacatggcagcaacaggtctgagcgctgtgcccagccaggagcactcccaggtctgcaattaaggccttacgtcctggagggatacttgtatactc

SEQ ID NO: 620379 - DNA, 52 bp, Homo sapiens
gtctttgggacaaaactgtatttaccttgaaatggcaagttccaatcctgtg

SEQ ID NO: 620380 - DNA, 96 bp, Homo sapiens
gatcctggatgccacggatcaggaaagcctggagctgaagccaacctcccgagcagcaaatatttccatggttcaagctgcttcagcaggaccccc

SEQ ID NO: 620381 - DNA, 118 bp, Homo sapiens
gacagagttcacatccatgtgaaaggccagccaccagttcaggagcacttgggagtgatctaggtggcgacatgtctaagaatgtgagccagtcacagatggcaaaattgaaccaaca

SEQ ID NO: 620382 - DNA, 73 bp, Homo sapiens
cggaagcgacacaaaacagacccctcaggtatgtgcactgcgcgtgaccagccgggcccgcagccgcatcctc

SEQ ID NO: 620383 - DNA, 100 bp, Homo sapiens
ggacattttggtgccaagccgaaccgagccggggcgccgggagctattgggacctgcgggccgtctatacccaggattgccccctggcagcagcgaaagc

SEQ ID NO: 620384 - DNA, 96 bp, Homo sapiens
ttattgctacagatgtagcctcccgtgggctagaggccagtaatagtagccatgagtctcgtattggtctagctgaggggttggaatccgagaaga

SEQ ID NO: 620385 - DNA, 75 bp, Homo sapiens
gaccaccgggcgctggtctgctcccagccggttttacacatccataagtagacctttttggagcctcaccagcca

SEQ ID NO: 620386 - DNA, 75 bp, Homo sapiens
attttggtgatgctttcaaacagtgtcaatacaaagatactctccccaagaataactgaagtgaagtgatggact

SEQ ID NO: 620387 - DNA, 75 bp, Homo sapiens
ccccgaagggagcctgctctcatgattggggcctgctggactgaactcttagggtcacctggagcaccttgggag

SEQ ID NO: 620388 - DNA, 99 bp, Homo sapiens
gttcaccacctacaaccacagagctgtcatggctgccatctctacttccatccctgtaatttcacagccccaggactcacaccacccggcaagaactgc

SEQ ID NO: 620389 - DNA, 99 bp, Homo sapiens
aaagcagcagccttctcgacagccttttactgtgaacaggtatctcttaaatattccaggaccaattgacattccatctcgtttatgtaaagggaattt

SEQ ID NO: 620390 - DNA, 75 bp, Homo sapiens
tgcaaagctgcagaaaccacagtggtagaggacctgcgcgaagtctggctcaattatcctctccacccactccaa

SEQ ID NO: 620391 - DNA, 82 bp, Homo sapiens
cagaagtgcctgcagttcagacccttctctcccctccactttctcccggggcgaactttctgaccaagtatacaactaccca

SEQ ID NO: 620392 - DNA, 83 bp, Homo sapiens
cccggagtggggtgtcggcgcctcattcgggtggagctgagccggagacaggagccttcacgtaaatgggtccagtcatgcct

SEQ ID NO: 620393 - DNA, 97 bp, Homo sapiens
cttccctaacatcgacagagagaaggcaatgagccgacccatcttgtacagcaactggctgtcaaagatttggagcaagaggtggtggtggccttcc

SEQ ID NO: 620394 - DNA, 100 bp, Homo sapiens
gccttcagtgggactcccccagcagatacattctcactgtgattgggttattatacccctgcattgacagacatctaggagaaccacataaatttaaaag

SEQ ID NO: 620395 - DNA, 90 bp, Homo sapiens
cgaggcctgcccttgccagccagactctgggtcgcccttgcctgcagaggaggtgaagtgtccggacgcaccctcatcgacattggttca

SEQ ID NO: 620396 - DNA, 75 bp, Homo sapiens
tcagttgtgcgttgcggccagtcgccactgctgtatgaggatacatgggctgcacttcacagaagagccaaagac

SEQ ID NO: 620397 - DNA, 154 bp, Homo sapiens
ctgtggggaatcccagttcttccacaccaccagtgaggcgcttggttccttacttctagagtctggaatatttaaaaagcatttctggaaaggagtccattatcgctgggcatttttcatggccagtggcccatgtttagatgacattgcagaa

SEQ ID NO: 620398 - DNA, 51 bp, Homo sapiens
aagtcgttagcaaaccctggtcttatgaagacacatcatctcagagttgga

SEQ ID NO: 620399 - DNA, 80 bp, Homo sapiens
gaaaacatattgcataccacccagacagactgctataacaatctagctggtttttcgttggaatatacgttgcacattta

SEQ ID NO: 620400 - DNA, 153 bp, Homo sapiens
cctgtgagccagttggagttgcggcggcgggaacgattgggctgagcagaggacgacatgttgcttttcgtggaggttaaccagcttcgtggcatcctcaagcttctgcagctcctaaaagttcagaatgaagacgttcagcgagctgtgtgt

SEQ ID NO: 620401 - DNA, 93 bp, Homo sapiens
gtggaggccagtggagggggtgcctttctggtgctccccctaagcaaggacacagcattgttggttttgccatgtactattttacctatgacc

SEQ ID NO: 620402 - DNA, 90 bp, Homo sapiens
attatctttgccagttggagtgctggagactttggatcggttggtgccactgaatggctagagatactattcgttacttgtccttgcatg

SEQ ID NO: 620403 - DNA, 100 bp, Homo sapiens
acacctacagccccgacgaacatttctgggtgacactcaacaggattcccggaacatctaaaggcctttgatgatgaaatcaatgcttttttggacaata

SEQ ID NO: 620404 - DNA, 90 bp, Homo sapiens
atgaaaaaaacaatgagtcatctgatagctcatcatggatgaggatcgcagtacggaacctgaccgattgcaggtgtttcacaagagagc

SEQ ID NO: 620405 - DNA, 96 bp, Homo sapiens
tgcacagccgcggcggcagcagcagtgagagttcctgggcttcccgatggactcgagtttttactatgtgagcatcccggtgcctgcacagcaagg

SEQ ID NO: 620406 - DNA, 75 bp, Homo sapiens
agcacttacctttgaaaaatgctgggaacattgaagtttatttggatatcaagctgttctaaagaaatccaaatg

SEQ ID NO: 620407 - DNA, 100 bp, Homo sapiens
tgcggaggctgcctcggcggagcagaggaaccacacgctgatcatggaccagctctcagagccccgctccccagccaatggcgactatagagacactggg

SEQ ID NO: 620408 - DNA, 97 bp, Homo sapiens
aaaatggccgccgccgccgccgccgcgccgagcggaggaggaggaggaggcgaggaggagagactctcccctttgaattggagatttactacattca

SEQ ID NO: 620409 - DNA, 82 bp, Homo sapiens
gcactttgtggagaaagtcgtcttccacttgcacgaaagctttcctaggccaaaaagagcatgctacaagtgaaaactgatg

SEQ ID NO: 620410 - DNA, 75 bp, Homo sapiens
agatgctatgtgagatcttgaaagtgggcgagttgcttgacgaaggatcagagattggtgtattcgggcagactg

SEQ ID NO: 620411 - DNA, 98 bp, Homo sapiens
cgcggaggtgcggagagactccttgggggtcgagcacataacggggttcgggtgtctcgtgtgtgaacatcacagcaccaaatgtggctccttcagat

SEQ ID NO: 620412 - DNA, 82 bp, Homo sapiens
cgcgcggagaagaacggggagccaggcagcggaggaggagaaagagatggacctcccggactcggcctcgagggtcttctgc

SEQ ID NO: 620413 - DNA, 82 bp, Homo sapiens
gcggcgctggcgctgccggagctgtcgacccggcctggcgccggactaggcgtccgagctgggccacagcctgaacgagaac

SEQ ID NO: 620414 - DNA, 98 bp, Homo sapiens
gagcagcagaagccggcgtcgtcggatgttgtgttgcccgccaccatgagctacacaggaggacacgctctcttcatgggccatgcccggtgaccact

SEQ ID NO: 620415 - DNA, 73 bp, Homo sapiens
tccaggacagcacctagtcgtggccggaggagtctcagagctgtcagaaagtttactaaagcagtgaagcact

SEQ ID NO: 620416 - DNA, 75 bp, Homo sapiens
ccacgagttccaaactctagcgtgaatcaaactgaggaactgtggctgcaccatctgtcttcatcttcccgccat

SEQ ID NO: 620417 - DNA, 51 bp, Homo sapiens
taccaggaggcgttggccaaggttctgctgatggaacagccagccatgaac

SEQ ID NO: 620418 - DNA, 100 bp, Homo sapiens
gtggttgcggtaacctggcctgggcctgaagtcccagtagggatggcacaatcagcgaggacaccatccgagcctctctcatctctgcggtcagtgacaa

SEQ ID NO: 620419 - DNA, 50 bp, Homo sapiens
gcggtggagcgggacacgaacgtggggaggagccccagccccgcgacgag

SEQ ID NO: 620420 - DNA, 75 bp, Homo sapiens
aaattgaaaggcttcaaagctagcaggctgaagactttaagtgacaagtcaagagaagcaaaagtgaaaagcaaa

SEQ ID NO: 620421 - DNA, 75 bp, Homo sapiens
ccagtgacaccatcgagaatgtcaaggctgagaacgggaagcttgtcatcaatggaaatcccatcaccatcttcc

SEQ ID NO: 620422 - DNA, 48 bp, Homo sapiens
cccacttgttcgcggcctataggtggaagcagggaaaggcctggagat

SEQ ID NO: 620423 - DNA, 98 bp, Homo sapiens
cagaatgctgccagctggggctatttcaacacgcagagccaaagctggaacgtagagacaaaccagcctggacaccaagtctgtgtcagaaggccacc

SEQ ID NO: 620424 - DNA, 82 bp, Homo sapiens
tgaagtcttttgtacagtggttaggtgtgtgagaaagagaaactgttgtcagagaggaatcaactgaaagcatgcatggggg

SEQ ID NO: 620425 - DNA, 75 bp, Homo sapiens
gctgctggtagttccatgctgtctgttcagacttcagcttggtcacttttcaggattagaagaggctgtgtatag

SEQ ID NO: 620426 - DNA, 80 bp, Homo sapiens
agaggctctcggaggaagagctcaggggaacccgagcgtcatgttagggtgaagcagaggacctcagtgctgaacatgct

SEQ ID NO: 620427 - DNA, 83 bp, Homo sapiens
cgggatctcggctgtccttcctcccggcccggcctgcatgcctacgaaaaggaggacagtgatgaagtccacctggaggagtt

SEQ ID NO: 620428 - DNA, 83 bp, Homo sapiens
gttttcttagccctctacttttcaagacaccaagtgagaggccaaccaggttatcaatactctggctgaccatcatcatcgtg

SEQ ID NO: 620429 - DNA, 75 bp, Homo sapiens
gctgaagaggaacgatatttccggctttatcctgtggataaacgcagagtgaacgagtttggggagtcctacgag

SEQ ID NO: 620430 - DNA, 75 bp, Homo sapiens
agaaatacagacctgcagagttccactggaagttgaatcaggaccctgatgctcccataagacagaaaatgcccc

SEQ ID NO: 620431 - DNA, 83 bp, Homo sapiens
acgccatgtcgggttattcgagtgaccgagaccgcggccgggaccgagggactggatggaggacctgaagacgtgaggtggag

SEQ ID NO: 620432 - DNA, 96 bp, Homo sapiens
gatgctcgagcaattggctctgcttcagagggtgcccagagctccttgcaagaagtttaccacaagcgtttgctgccaattgatggggcaaatgat

SEQ ID NO: 620433 - DNA, 82 bp, Homo sapiens
agaaacaaaatgtcaacaaattgatgggctcaggggagagagaaagcccagaaagaaagctactccagggtcctatggatat

SEQ ID NO: 620434 - DNA, 83 bp, Homo sapiens
gtctgactctgaatgtagtttgggtctcagtggtggactggcatttgaagcttgcaggccgctacctgtctgaggaacccgag

SEQ ID NO: 620435 - DNA, 74 bp, Homo sapiens
caacagtgaccatacagcttggcaacacccaggacacctactgtgtgaaagaatactagaagatcttcctattc

SEQ ID NO: 620436 - DNA, 83 bp, Homo sapiens
ctctaaagacggaaccgccacagcactcaaggtgtcttttatgaataatcaaaagcagcaaaagccaacgctatcaggccagc

SEQ ID NO: 620437 - DNA, 89 bp, Homo sapiens
cccgatggccctgggtcctcgctgtggggcaatccgggcttgcagacgagtgtctttctcgagaagcaggtggaaacatgagcattcag

SEQ ID NO: 620438 - DNA, 75 bp, Homo sapiens
tcctctccggaagcccccaggatggtgagggaaatcctcattgacgattcaatttgttgaaggccaatttgtgga

SEQ ID NO: 620439 - DNA, 90 bp, Homo sapiens
gccgcctgggaccttgcggtgaggctgcgcggggccgaggccgcctccgagcgccaggccaagatcaaggctcgagatcttcgcgggaag

SEQ ID NO: 620440 - DNA, 96 bp, Homo sapiens
caagtgccaccagtctgcagatttgcaaggatgtcatggatgccctcattctgatatggccgccttaaaagatgcagatgctgttgtgatcagcat

SEQ ID NO: 620441 - DNA, 100 bp, Homo sapiens
gggactggaacaagacttcaggtcacgctcggatgtacagttacccagcacgtgtacctcctcctcctcctattgctcgggctgtagtgccctcgaaacg

SEQ ID NO: 620442 - DNA, 100 bp, Homo sapiens
ctcggcccccaggtctgggatgtggctgactacgtcttcccagcccaggtgctggagaatctggtaaaagcaccattgtgaagcagatgaggatcctgca

SEQ ID NO: 620443 - DNA, 100 bp, Homo sapiens
gaaagaagatacacagcagttgtcttaaacaggagttggtaatgcttctcttagaatataatgctgatactactattgttaatgggagtggacagacagc

SEQ ID NO: 620444 - DNA, 100 bp, Homo sapiens
gagagcagtgcagcgtgtgtggggtcgagcttcctgataacgaggctgtggagcagcacagacgtttgatgcaaatgatttgtatcaggggcagaatttt

SEQ ID NO: 620445 - DNA, 90 bp, Homo sapiens
cgaacacctaaaacgccacttcagggagaaatcccagagataatcttctgctgactctcaacttttcctggaaaaaatggatcattccca

SEQ ID NO: 620446 - DNA, 78 bp, Homo sapiens
gcctccccagctatgtggaactatacgtaggtaacctttccagagatgtgacagaagtccttatacttcagttgttca

SEQ ID NO: 620447 - DNA, 109 bp, Homo sapiens
gagagagcgagctgagtggttgtgtggtcgcgtctcggaaaccggtagcgcttgcagcatgattgtcactgctgttccaagggcacacgcagagggatttggaattcct

SEQ ID NO: 620448 - DNA, 100 bp, Homo sapiens
gccgaggtggacctgcgggatctgcaccgcgaccagggccgcaggaagacgcatgatgtggagccaactgcaccgatggaggaacccacagtggtggagg

SEQ ID NO: 620449 - DNA, 76 bp, Homo sapiens
ttcatcaaaaatagtgatagctttgataaggcaagtgtccagagaatggctgggatgaaagtacacttgaactctt

SEQ ID NO: 620450 - DNA, 100 bp, Homo sapiens
cttacatggactaaagatgaaactttaaaccgcaaacgaaatctcacaaaactgtcccttatcttcagtcacatgctggcagaaatcaaagcaatctttc

SEQ ID NO: 620451 - DNA, 137 bp, Homo sapiens
cttttttcatttccatttctaccttgtatgcctcaatttgctggatttaagcactgctgcactttatgagtgcaccaattccagctggacatcactgtgaaaatgggacgggataaagtccgagaaatgtttatgaa

SEQ ID NO: 620452 - DNA, 87 bp, Homo sapiens
tttgctatactcctgttctggggacagtttggtattaaaactttacttttagaagcccagtcaacaccatttcaggtcacaccttca

SEQ ID NO: 620453 - DNA, 75 bp, Homo sapiens
tagaacccggctctgagggcactggcctagttcccgacttgtttctcagcaattaccagctctggctgggtcgcc

SEQ ID NO: 620454 - DNA, 75 bp, Homo sapiens
cttcatcacagacaacagcctggtggcagcgagggtggtgaaggcagatattgtaaactacaaccaggaacctat

SEQ ID NO: 620455 - DNA, 89 bp, Homo sapiens
ctccgcctgcttctctcagcctcccacagcagcccaactcctgagaggcacgttgcccctggcctcgcaggagtcggccgtggtggagg

SEQ ID NO: 620456 - DNA, 73 bp, Homo sapiens
ttcgagaagattagcaaaggtgctaatccagtggaaatcaggagaggtgattatcctgaaccatccaggccaa

SEQ ID NO: 620457 - DNA, 75 bp, Homo sapiens
agcagggaccttatcccagcgtctaccgcggcgcccgtcacctagtctcctctgagcctccggcctccataagac

SEQ ID NO: 620458 - DNA, 100 bp, Homo sapiens
gtcaaatctgaatcgacagtttcttttccggccctgggatgtcacggtgtgttaccgagtggaatgggccaaattccaggaacgtgagaggaagaaggaa

SEQ ID NO: 620459 - DNA, 100 bp, Homo sapiens
cgggcgtcggtcaccaaggtcacaggacccaggaattgcgccctccggcattgtggtcttcaagctgacagagaagctgacggaacagaaggagtggatg

SEQ ID NO: 620460 - DNA, 96 bp, Homo sapiens
cgtccttactgcggaaagcttgtcctggtataaagatgatgaggtgtgggttgctgaccgaggaaataaaagaatccaagtatttgataaagacac

SEQ ID NO: 620461 - DNA, 78 bp, Homo sapiens
ttgaatcttcctttgagctccggaaagttggaatgggtaccacagaccatgtcatcgtcctggcgtccacgaaccgag

SEQ ID NO: 620462 - DNA, 111 bp, Homo sapiens
ctggcggctctagggaccccccccgcgcctgcacttagccccgcgcccgagacaatgcagatcttcgtgaagactctgactggtaagaccatcaccctcgaggttgagccc

SEQ ID NO: 620463 - DNA, 73 bp, Homo sapiens
cgctccctctgctcttcctcccttcgctcgcaccatggaagctcttcgtgggcggtcttgactggagcacgac

SEQ ID NO: 620464 - DNA, 74 bp, Homo sapiens
gcagatctgggacacagcggggcaggagcgcttccgcaccatcacctccacgcgaacctcttcccggccgctct

SEQ ID NO: 620465 - DNA, 89 bp, Homo sapiens
cgccgcgcgaccaggaggcggcggcgccgccggctttggtatatgactgatgggatgttacttcgtgaagctatgaatgatcccctcct

SEQ ID NO: 620466 - DNA, 80 bp, Homo sapiens
gagaaaggaaggaatatatcctgactgatttatggtttgaagtggtgaacatggatttttctcggcttcacatgtacagt

SEQ ID NO: 620467 - DNA, 82 bp, Homo sapiens
ccagaccctggagcctcagttggaagcagccgatccagcctgcggagcctgtggggcaggtgcattcatccctggagcgccc

SEQ ID NO: 620468 - DNA, 50 bp, Homo sapiens
caggggccactcagagtcgcccgagaaaattcaattcgtcataatctgtc

SEQ ID NO: 620469 - DNA, 98 bp, Homo sapiens
gtgatccgtgtatatattgcatcttcctctggctctacagcgtactatactggcaattgctggagaagattttgcaattgttgcttctgatactcgat

SEQ ID NO: 620470 - DNA, 100 bp, Homo sapiens
gagaagatctccattcctgaggaggagtgttgacccgaatgatcagaaaaagacagcttgttatgacattgatgttgaagtggatgacaccttgaagacc

SEQ ID NO: 620471 - DNA, 100 bp, Homo sapiens
ctggatccaggataacggaggctggggcatcattcagaagatagtggacagtcacaaagtaaagcatgtggcctgctatggattccgcctcagtcacctg

SEQ ID NO: 620472 - DNA, 87 bp, Homo sapiens
aaaatggcggtgtctacagtgttctcgacttcgtcgctgaacaactctgctcatggtgattacatgcaaaataacgagagcagctta

SEQ ID NO: 620473 - DNA, 100 bp, Homo sapiens
ctcacccaacaacagctccgggagcgtcagcgcggagaacggtatcgcgcccgccgtccccagcatcccggcggagattctggatgaaattgaagaacat

SEQ ID NO: 620474 - DNA, 100 bp, Homo sapiens
gtcagtccgccgctcaccccgcggccgcaccttcccgccttctcagttacagaatgtctgaaggggacagtgtgggagaatccgtccatgggaaaccttc

SEQ ID NO: 620475 - DNA, 100 bp, Homo sapiens
agttgtcatatgtactgtgtcagccatcatgtgtgtcagcatgagaggtgtcagctgtgatgcatgtttaaaaggaaattttcgaggtcgcagatataag

SEQ ID NO: 620476 - DNA, 74 bp, Homo sapiens
gtttggggttggtagaaggtgttattgggaaaattcaacttcattcagactttcttgtctgcacagaaagtccc

SEQ ID NO: 620477 - DNA, 112 bp, Homo sapiens
ggaggagctgtgcagccgcgaggaggcgcgggaggtgttcgagaacgaccccgagacgggtttccaggcctgaggtgcccgccctggccccaggagaatgaaccagccgcag

SEQ ID NO: 620478 - DNA, 100 bp, Homo sapiens
acgtgcagacatctacaaccttcgatctcctgacgattctgctgagacacaacttcccctgggaagcctcctgacccatcaagtccagagtagatggtcc

SEQ ID NO: 620479 - DNA, 75 bp, Homo sapiens
cgcactcctccgcatccctctttaacagcctgtagtggtggagacacgcccagtggatgatcctactgctcccag

SEQ ID NO: 620480 - DNA, 100 bp, Homo sapiens
aaccccttcgcggacccagtggatgtaaaccccttccaggtgctggagaatctggtaaaagcaccattgtgaagcagatgaggatcctgcatgttaatgg

SEQ ID NO: 620481 - DNA, 50 bp, Homo sapiens
taagatcgtagccagacccccaggcgcagatcaggcctctataaccgcca

SEQ ID NO: 620482 - DNA, 75 bp, Homo sapiens
gaggttcagatcaacaacgaggaaatatttccaacatgcgtgggcattaccacaggagtcttggttcgagaacac

SEQ ID NO: 620483 - DNA, 100 bp, Homo sapiens
ccctgttccgaggtcaggaggatgcaagtcctgacagattcagcaacactgttttactgcaatcacagcaaccaaccccatttggcttataaagactcgg

SEQ ID NO: 620484 - DNA, 98 bp, Homo sapiens
tgctctacaactgctggcagcgccggctgcccaagctcaagcacgtggaccctgatgctcccataagacagaaaatgccccttgatgatctggataga

SEQ ID NO: 620485 - DNA, 100 bp, Homo sapiens
tgtgggaagcccctgggaggccgaatgtgcaggatcaccgaggggaaagtgagcttgacagatttcacagagatgatgagagccctgggataccctcgac

SEQ ID NO: 620486 - DNA, 75 bp, Homo sapiens
gaagttccctcttttaacataaagttgcaggacgaggagcggaggcggcagcagcagttagaagagatgcgcaag

SEQ ID NO: 620487 - DNA, 117 bp, Homo sapiens
cctgcatgtgtgtgcgcgcgaaggagcggaagaatggcagtgctcaaactcaccgaccagatgcaacaaggagacgcgcctttgccctggtctctcaagcgtatacttcaatcatcg

SEQ ID NO: 620488 - DNA, 82 bp, Homo sapiens
cgggacccggtgtctgctcctgtcgccttcgcctcctaatccctagccactatgagctcaggccccggggcctccagcggca

SEQ ID NO: 620489 - DNA, 50 bp, Homo sapiens
tgactttcagctatggaatcggattcgctaaatattgtaatggatcaagg

SEQ ID NO: 620490 - DNA, 96 bp, Homo sapiens
cctcccatccgtccgcgggtccgtggagctggagcagatcccccagccggctgagacaggtcgtccttggtggaaggaaccatgaactggcatctc

SEQ ID NO: 620491 - DNA, 82 bp, Homo sapiens
ggttcatcgagcagaggctgctcatgttctccttcgtcaacgaccggatggatagaatgacagaagatgctcttcgcttgaa

SEQ ID NO: 620492 - DNA, 82 bp, Homo sapiens
ggaaagcattggtgggaatatgtggatcctacagttactctagaattattagatgtgagaaagatcagtctaaagaaaagga

SEQ ID NO: 620493 - DNA, 100 bp, Homo sapiens
gcgccaggctggggtgtcccagaagagccaggaatcgaaatgcttcatggaacaaccaccctggccttcaagggacagaagatgagcctgtcggtcctgg

SEQ ID NO: 620494 - DNA, 50 bp, Homo sapiens
gacaacttcgcccgggacttcatggtgggcagtgtcaaaccgggaaatgc

SEQ ID NO: 620495 - DNA, 97 bp, Homo sapiens
cctatgtggtcaagtggaagttcatggcaagcacatctgggcttcttgtggaggggaaggtagagtgaaagaaagagggcccactttctaacagggt

SEQ ID NO: 620496 - DNA, 75 bp, Homo sapiens
agcacaagccaaaggtgctcctatcaggcattatccaattggtttgctatttgatcttcttgcatcaagttcagc

SEQ ID NO: 620497 - DNA, 100 bp, Homo sapiens
gttggttcgtgctggactacaatgcaggactgctctcctactacacggaggaggacttcatccaacccagcagccgagaagaggcccagcagctgtggga

SEQ ID NO: 620498 - DNA, 50 bp, Homo sapiens
gcagtggtcgcttcttctccttgaactgttcgtcaggtggcacaggagca

SEQ ID NO: 620499 - DNA, 75 bp, Homo sapiens
tcactgggagcaaatatccagaacaggtgctgctacccccgtatgatgatgccactgtgaatggtgctgccaagg

SEQ ID NO: 620500 - DNA, 100 bp, Homo sapiens
gtgtgcaaacccgagagaactgggaccgcctgtattttcatcctacaacaacacgcttgattaaacatccttgcgagaaaaatatagcactatatctagg

SEQ ID NO: 620501 - DNA, 89 bp, Homo sapiens
agcagctccgtcatgagtctaggtctgtgcagacttttgcagacaaatcaaaacaagaagctctgaagaatgacctggtggaggctttg

SEQ ID NO: 620502 - DNA, 100 bp, Homo sapiens
gttaatagaaagaagaatgtagatcaagctattaaaaatggtcaggctcttctaaaacaaaccacaggtggatgtgtttcgtgaagacctctgtaccaag

SEQ ID NO: 620503 - DNA, 100 bp, Homo sapiens
tgtcactgcagctttaaaaagcagtgggctctggaacaacacggtgttcatcttttctacaggtggccagagaacacagacaaaaagtggaccagttatt

SEQ ID NO: 620504 - DNA, 90 bp, Homo sapiens
ttttcctcctcggctgcgccgcgtgtcctcggagcgcggtccctgtattggtctcctgctcctagagatgagcagcaccagcagtaagag

SEQ ID NO: 620505 - DNA, 75 bp, Homo sapiens
tgacatttaattttagggtcctttatatagaagggagagtaggccaagaagacgctggagggaggctgttaggag

SEQ ID NO: 620506 - DNA, 99 bp, Homo sapiens
gggaaacctgtagggtatggtccagctgtgccgcaccgaggcgagcaggagcagggaacagattctctttgtggccagatgggtttgtatggacaggct

SEQ ID NO: 620507 - DNA, 98 bp, Homo sapiens
aacaatggcatttacagaaagagtcaacagcagtggcaacaggatttgaagcattcattaccatctggacttggtctctcagaaacccaaattacatc

SEQ ID NO: 620508 - DNA, 101 bp, Homo sapiens
tctgtttgagcagcttgtgcgccgggtggagattctcagtgaaggaaatgaagtccatttggtgcttccagatgtgagttatcaggtggaatccagtgagg

SEQ ID NO: 620509 - DNA, 75 bp, Homo sapiens
ctctagtgcaccaactgcaatcaagtcctattttgtaacggattatgatccaaccattgaagattcttacacaaa

SEQ ID NO: 620510 - DNA, 100 bp, Homo sapiens
cggcgtacgccctcatggggaaaatctccccggtgactttcaggttacctgtcctgctgccgattcctggatgacaatcagatcgtcaccagctctggag

SEQ ID NO: 620511 - DNA, 87 bp, Homo sapiens
ttgatttgggaacaactggtcgtcttcagttaatggcaagacttgcagagggtaaaagttttgtttgtgagaaacttggctactacg

SEQ ID NO: 620512 - DNA, 83 bp, Homo sapiens
cctagccgccatggaggacggcgtctatgccaccctgaagtccaagcaagatgaattgcaccggaaggcactgcagacgctgg

SEQ ID NO: 620513 - DNA, 90 bp, Homo sapiens
gaaaataatagacaaaactcagctaaatcctaccagtctacaaaagtgaaagcaagttgaatacattggtgcagaagcttcatgacttcc

SEQ ID NO: 620514 - DNA, 96 bp, Homo sapiens
ccggggcctggctttcagcgtagcaattctgccggcgaagaagctaacccggaaaagagccgatttgaaaaagaagttaaaagttacatttgtagg

SEQ ID NO: 620515 - DNA, 95 bp, Homo sapiens
ttcagaattgcaattccaaaatgtgtaagacgggatattctcttctgtgctgtcaagggtttaagaaaatctacgaagaaacgcagtgagtctcc

SEQ ID NO: 620516 - DNA, 100 bp, Homo sapiens
cagacggcgagacctcctgcacaggcgcagacggggaagcggagccaacatgccagtggcccggagctgggtttgtcgcaaaacttatgtgaccccgcgg

SEQ ID NO: 620517 - DNA, 100 bp, Homo sapiens
gaaggtccttagggaggaccccagacaccggagactgggaaatgtatttgtgtggaagtaatcgaaaagacaacatatttattgatcctggataccaaac

SEQ ID NO: 620518 - DNA, 75 bp, Homo sapiens
atctacttggaaatctttgggatgctcaatgcatgttggcagataaattgaacatgactccagaagaagctgaaa

SEQ ID NO: 620519 - DNA, 75 bp, Homo sapiens
ccaggacatgtgtgcaaccattggcgtggatccgctggcctgccagaagcggactcctagaagaggggagcagca

SEQ ID NO: 620520 - DNA, 50 bp, Homo sapiens
caagattccttatataaaatatgcaagctgtcggaaaaggtaacagaaga

SEQ ID NO: 620521 - DNA, 100 bp, Homo sapiens
gccggccggcccggaccctggacaccatccagctggctttcaaggtccccttcccctgagcccatctacaatagcgaggggaagcggcttaacacccgag

SEQ ID NO: 620522 - DNA, 75 bp, Homo sapiens
atgatggcctggcgacccattcaggcacttatggccatttcagccaagacgagttgtactgctgtcacaggaaat

SEQ ID NO: 620523 - DNA, 75 bp, Homo sapiens
tttgacacaactgtagagcagctgtatagcatcttcactgtaaaggaggactccaagccccctgatccttgatca

SEQ ID NO: 620524 - DNA, 76 bp, Homo sapiens
cctaatgacagtctccaaattcgcctccatctgtaccatgttcccagtgacctgacagcagaggagcgtcaagaac

SEQ ID NO: 620525 - DNA, 100 bp, Homo sapiens
cccagtgacaggaaggtgaggcctcgtcccacctgccggttcttcatgaaagggatcgactacaagaccaccaccatcctgctggacggccggcgcgtga

SEQ ID NO: 620526 - DNA, 100 bp, Homo sapiens
ccgactcgctacgcgggtcttgcgagatatctggccgcctctgccgcagctggagaggctgaggggatctggcggtggagcgctaggatcagacgccccc

SEQ ID NO: 620527 - DNA, 50 bp, Homo sapiens
cctctctctctgcttggtaccacagacctgtgttgcgtggtgggtctgct

SEQ ID NO: 620528 - DNA, 98 bp, Homo sapiens
ctcctctatgctggacatcaaatttccaggtttacaggtacatacattacacccctatttctacaaagcttggctattagagcattatgaacattaat

SEQ ID NO: 620529 - DNA, 100 bp, Homo sapiens
ctttgtcgtatttgggttttgaaacttaccaggttatctctcaggctgctgtggttcatgccacagccaaagctattattcatggactatccagtctaac

SEQ ID NO: 620530 - DNA, 74 bp, Homo sapiens
gggcacagaaacacagcagcgggagcagcaacaccagcactgccaacagcggagaccctgttaactactacgtt

SEQ ID NO: 620531 - DNA, 82 bp, Homo sapiens
ctctctggacagggacagtgggcagtgctcccggaacacaagctgtgaaacactagaaataggaaggttgttgattactcac

SEQ ID NO: 620532 - DNA, 100 bp, Homo sapiens
ctggggtcccttttgcctcagatactattttgaaggttacaggaggttccagtggcatcgggaagtgcattgctatcgagtgctataaacaaggagcttt

SEQ ID NO: 620533 - DNA, 120 bp, Homo sapiens
ggtgctgacgagacggagctcctggcccccgaggaggagcagaggatcaatgcggttcaagaatcgattccagcggttactataacaacagtaccaaggtggctgtgaaaaccctgaagc

SEQ ID NO: 620534 - DNA, 100 bp, Homo sapiens
gagatacatatccagcctcatcttgcatctcttgcaaatgtcttgtggcttcaagcactcagcagtggtcacttcagatggcaaactgttcacctttggg

SEQ ID NO: 620535 - DNA, 51 bp, Homo sapiens
ggattttgtcagcttgtcgtcaagactctgctaacaccagatagtggaaag

SEQ ID NO: 620536 - DNA, 100 bp, Homo sapiens
ggagcggaagaatggcagtgctcaaactcaccgaccagttaacaagcacaagccctggctggagcccacctaccacggcatagtcacagagaacgacaac

SEQ ID NO: 620537 - DNA, 100 bp, Homo sapiens
caaaaagtctcagatgagctcatgagtgaaaggtgtctgctttttcaacgtgggagaaggagttgcacaagatagtttttgatccccggtacttacttct

SEQ ID NO: 620538 - DNA, 97 bp, Homo sapiens
tcagtggttctcgtctcaaactctatttgccaaaggaaacttgccttatcaccttcttgcttgcagctgtgaaaaagggctcctatgacatggtgtc

SEQ ID NO: 620539 - DNA, 83 bp, Homo sapiens
cggagaggctgggcggctgccggtgacaggtgaggcggaaccaaccctcctggccatgggaggggccgtggtggacgagggcc

SEQ ID NO: 620540 - DNA, 75 bp, Homo sapiens
gtggccacctctgcagtgtcttccacaacctgggtgtgatgaatgcagactctgctaccattttggctgtttgga

SEQ ID NO: 620541 - DNA, 100 bp, Homo sapiens
aagcaaggttccttggaagaagatgtctgcagaggtgtgctccatcctctggtctccccattacaaggagctcatctcaggccatggctttgcacagaac

SEQ ID NO: 620542 - DNA, 96 bp, Homo sapiens
aaaagcagtgcaactggctcagtattcacagggaaagctgtgaggatatgaattgagaattcgttatttgccaaaaggatttctaaaccagtttac

SEQ ID NO: 620543 - DNA, 100 bp, Homo sapiens
acagctaccacagtgcagtccagcaacagccagttcagagtgtcatccaagagacctccttcagtaggaacgaggcccagcaaaaagcagagacggtaca

SEQ ID NO: 620544 - DNA, 88 bp, Homo sapiens
aaaagctcaaaatgaggaaattctgtatgttcttcgccattatattcaggttcagcagactgtacaggatctttttggcagagcccca

SEQ ID NO: 620545 - DNA, 100 bp, Homo sapiens
gacaatatcctctgtggagaacacccccccatggaggcgaggtagagttggggtcgcaggttgtagcagataccaatataagcgccatagcagctcagct

SEQ ID NO: 620546 - DNA, 100 bp, Homo sapiens
agagatatttcaggagttccaagttcaggagcctcctcaacaagcccaagagtgagatgaccccagaggagctgcagaagcgagaggaggaggaatttaa

SEQ ID NO: 620547 - DNA, 100 bp, Homo sapiens
ccgagccgtgtcacacagggacagccgcaatccggacctggcggtgtgttcatcctcgaggtggtgtgattcagagtgtttcttcatggaagcatggctc

SEQ ID NO: 620548 - DNA, 75 bp, Homo sapiens
agccgaaacacacccagacgcacacttctgccaagcatagccaccacgatatgctgtgatagcatttggatgtgc

SEQ ID NO: 620549 - DNA, 100 bp, Homo sapiens
gagatcctgatgtttctcagtgccattgtgatgatgaagaaccgcagatccagaaaggagatgtggcattactgaactgtacagccattgtgaataccag

SEQ ID NO: 620550 - DNA, 100 bp, Homo sapiens
agaagaccaccatcaacaatgagtacaactaccgctgctggaccacaaaccgctgccagaaaaattccgaagaggctcaatctgtaaatccttctagtgt

SEQ ID NO: 620551 - DNA, 101 bp, Homo sapiens
ttggagcaagggaaagaaccctggctggggaaaagggaagtgaaaagagatctgttttcagcttcgagagctgtgcccaggagtgaacaaccagccctacc

SEQ ID NO: 620552 - DNA, 106 bp, Homo sapiens
tgaatacaaaaagcataggcggaccatgataatttccccagagcgtcttgatccttttgcagatgcttttggaaagaacaaacagtggatttgaagaatcagattc

SEQ ID NO: 620553 - DNA, 82 bp, Homo sapiens
ccgggagatcccaggcggtgacagagtggagccatggctagaggggtgagcccctccagactccgaataggagatcaagagt

SEQ ID NO: 620554 - DNA, 75 bp, Homo sapiens
atgaattcacctttgattccagtgtgaactgtcaatcataagcaaaacctggaaatccaccggaagataaaacag

SEQ ID NO: 620555 - DNA, 75 bp, Homo sapiens
gacgccactacagttcatcaacatcaactacgtccctctgaaggcccgacaacaagctcaaatacgtcaccaaat

SEQ ID NO: 620556 - DNA, 125 bp, Homo sapiens
gagactggaggctgagtgctaaactgtgtggggcgcggatgggatccagctgttagtcgggtaggcataggatgctcacaactgtattcctgagctggacagtgagacagccatgttttctgtct

SEQ ID NO: 620557 - DNA, 100 bp, Homo sapiens
catgaggccaaaggcagttgtattggtgtgatgaatgcagactctgctaccattttggctgtttggatcctcctttgaaaaagtctcctaaacagacagg

SEQ ID NO: 620558 - DNA, 100 bp, Homo sapiens
ctgttactgacctcaacataataatggagcccacagaatgctcagaattaagtgaatttgtgtctagataacaacgaacttgatgcaagtgataggtttg

SEQ ID NO: 620559 - DNA, 83 bp, Homo sapiens
ctcaattacacttcgactctcaaagcaataccaggatagctgttgtttcagagaaagagtggagactgctgcacggactctgg

SEQ ID NO: 620560 - DNA, 100 bp, Homo sapiens
gcccacgctcatgatcgacttcctcacccgcgcctgcgacctcgacatgctgctgctgaagaaacacacggaggacatcagcagcgtctacgagatccgc

SEQ ID NO: 620561 - DNA, 100 bp, Homo sapiens
gcagcttcatgctaaaactggtcaaagtgctgactctggtaccattaaggcaaaattgggccttcatcctagaataatcactgaaggatttgaagctgca

SEQ ID NO: 620562 - DNA, 96 bp, Homo sapiens
atctgggctacgtgggtaacctacaggagaaggaagaaatgttggctatttggcgatgagaggtggtgaacagtgaccatactggtatacaacact

SEQ ID NO: 620563 - DNA, 100 bp, Homo sapiens
aggcactggatgatgcaatcaaagctcgacttctcaatcccaagtggccaaagacagttgaaccaactggaaaacgtttcttactagctgttgatgtcag

SEQ ID NO: 620564 - DNA, 90 bp, Homo sapiens
ctttggacaaaattgagaagaactcataaacttggcttcctcgcttctgctcctcagatacctgatcagagaagcagtttgatgtactaa

SEQ ID NO: 620565 - DNA, 98 bp, Homo sapiens
ggaaagctccacaaacaggacctggaacatccagggagcgtctgggctgcaggggctttgttatgcacctaaagccatattggaagctccagaagaaa

SEQ ID NO: 620566 - DNA, 100 bp, Homo sapiens
aagaaacttaaagcctggaatgatatcaaaaaggtttctggccagaagaaccaactccacattcaaccaggttgtgttgaagaggttgtttatgagtcgc

SEQ ID NO: 620567 - DNA, 75 bp, Homo sapiens
gatcacagagcctatttacccagaagtagtccatatgccaatggagatcttcgtggatgatgagacgaagttgac

SEQ ID NO: 620568 - DNA, 88 bp, Homo sapiens
ctcagtggggaggccttcgactggctgcttggggagattgagtccaagttcaaccaagccattaaattcattgtacaacacacgaacc

SEQ ID NO: 620569 - DNA, 120 bp, Homo sapiens
ccgacccgcgaacccctctgggatccccgccgctctgtctacaacccgagtgatgtcttggcattgcccattttcaagcaggaagattccagccttccattggatggtgaaacagagcac

SEQ ID NO: 620570 - DNA, 100 bp, Homo sapiens
tctgctccttcgaaatctcttctcttcattcccctcactgcaagcggcaaccaagtctgggcaccacaagcagccctgtgtctaggtcgtttgggaaacg

SEQ ID NO: 620571 - DNA, 83 bp, Homo sapiens
ctgaccatctggacggtgtgtggggtcctgtcactatttgataaatttgcgcctcattttggtaagcggaaaaacaaaagagt

SEQ ID NO: 620572 - DNA, 100 bp, Homo sapiens
ccagtcgcctccaggccaagagggatccttcacccgtgtctgccaggtgctgcccacctacgacagcctggatgagccgtcagtgaaaaccatgagctcc

SEQ ID NO: 620573 - DNA, 83 bp, Homo sapiens
tccgcctcagcccaacggggagggtttccaggcctgaggtgcccgccctggccccaggagaatgaaccagccgcagaggatgg

SEQ ID NO: 620574 - DNA, 82 bp, Homo sapiens
gtatttgatggagttgatgcaaggaatggaaattaagtccaatgaaagatgctgttcttttgatggagatgcagacagaatt

SEQ ID NO: 620575 - DNA, 75 bp, Homo sapiens
atagcaagcgagtccgcattgcccccaagctggaagctctttgacatcctttggaacagaaacatcaaacagtgg

SEQ ID NO: 620576 - DNA, 97 bp, Homo sapiens
tggtcatcaagatgtacgtggtggccatcatcacgggccaagtgaggctgcggaagaaggtttactcatggggtagcaatacctttggtcaacttgg

SEQ ID NO: 620577 - DNA, 75 bp, Homo sapiens
ttgaactggtgctgtctgggcttcatagcattcgcctactccgtgaagacggtgagcgtgatcgtgcaggacgag

SEQ ID NO: 620578 - DNA, 100 bp, Homo sapiens
tcgattctttggcagttggtgaaaattactgatggctctccttccaaagtgtggaaacaggaagagaactagaactggaagtaaagcattgaagatgtga

SEQ ID NO: 620579 - DNA, 100 bp, Homo sapiens
accggcagatcctcaggggcaagtacagttactctggggaggagccatgtctgaccaggacgtttggaagatcatatccatgccagaggctcttgtgagg

SEQ ID NO: 620580 - DNA, 75 bp, Homo sapiens
cttacagtttctggctactactggtggaaaatgatgggctcagacaaggcttcatggtgtattagataaacttcg

SEQ ID NO: 620581 - DNA, 82 bp, Homo sapiens
ctttcccagaacgcaccgcaagctccctcctcggggcaacaccctccactaaagagtcaagccagccggacgcattctcatc

SEQ ID NO: 620582 - DNA, 50 bp, Homo sapiens
cagcgctggacacccagcctccagaaatctccgagaagcaagggataatg

SEQ ID NO: 620583 - DNA, 75 bp, Homo sapiens
gggatcgctacggaccttaaaatacccgcaacagccccttcgtcccaagtattacatcaaataccaataacggat

SEQ ID NO: 620584 - DNA, 100 bp, Homo sapiens
agcttttttaaatgaccttcttgaaagaatggatattggtcctaaacagacacaggactcagcccaaaaccatgtttgcccaagttgaatctgatgatga

SEQ ID NO: 620585 - DNA, 101 bp, Homo sapiens
cattgctgtgcctacaccttcgccacccactattggaccagagccctaatttgtttagaactgtaatatgcacagttaaaacaacttgtcctctcaggacc

SEQ ID NO: 620586 - DNA, 95 bp, Homo sapiens
gaatacactgagacccggaatcagttccttgatgagctcatggaggtcagccgtcagatccaggagcatgagcaggactctgcgctgcgggagca

SEQ ID NO: 620587 - DNA, 75 bp, Homo sapiens
cgggacctggtgggcatagagaacctcattgctcctggcaggttgttagagttggaagcttggcagttggcctcc

SEQ ID NO: 620588 - DNA, 83 bp, Homo sapiens
aatcacagtggtggtggtgggggtagcaggaggactgacaaatggtagtggtcgatatatctctgcagcacctggagcagaag

SEQ ID NO: 620589 - DNA, 100 bp, Homo sapiens
tgtaaaaacacacaccacttggcagctggttatattctgggcactaaatgaaggcgtttctaggcaatttgattcgttcagagatggatttgaatcagtc

SEQ ID NO: 620590 - DNA, 75 bp, Homo sapiens
ttctgtgaccaacagctgcgcaaggaggaagagaatgcatcagatgtgcactcccagcaacacccctgccacgcc

SEQ ID NO: 620591 - DNA, 85 bp, Homo sapiens
gtcggcagagcaaggggcttacgcagaaggacctggccacgtctctgctttctatccgtcaagatgataaagtcgtgtgcccgag

SEQ ID NO: 620592 - DNA, 74 bp, Homo sapiens
ctcaccctcatctatatcctttggcagctcacaggattccttagcaaaatcaccttctgtaaaaaatgatcctc

SEQ ID NO: 620593 - DNA, 83 bp, Homo sapiens
ggcatttacagaaagagtcaacagcagtggcaacagagtttatgtggccgaggcagacaagtggaattaggccttgctgcagg

SEQ ID NO: 620594 - DNA, 74 bp, Homo sapiens
tctaaaggagcccatcgtgcgggtcttgcaaagcattcacagctctgatggagggcaaaatcaataagcagctg

SEQ ID NO: 620595 - DNA, 83 bp, Homo sapiens
gtgctggcaagagcgatgtctactacttcagctgtctgcttttctgtggagactgcgggttgcagacaccagcagccccctat

SEQ ID NO: 620596 - DNA, 75 bp, Homo sapiens
tccctgacccccagttacgcctggaatatgaaggcttccccgtcccggtgtggggacgagattgtggaaatcagt

SEQ ID NO: 620597 - DNA, 98 bp, Homo sapiens
aagagccatggaaacaggaggaagaattcccaagccaaagctttccaggaaacttggatttaactggccagaagcaggtattcaaagcagagaacaat

SEQ ID NO: 620598 - DNA, 112 bp, Homo sapiens
tcttccaccatgcagatgaagacgatgaggaggaagatgattctgattgtgcagactggtgcttaaaatggaagtcgatattaatggagagtctagaagtaccctgaccacc

SEQ ID NO: 620599 - DNA, 80 bp, Homo sapiens
tgttcagcttttgtgaaagcaacagagaacaactgtcaatctattatatatttgtacaatctggtattaaaatgctttcc

SEQ ID NO: 620600 - DNA, 75 bp, Homo sapiens
agccggtctatggactttccgaagacgaggttttcctaggacattaggacaagccgaagccctggacaaaatctg

SEQ ID NO: 620601 - DNA, 87 bp, Homo sapiens
cagacgcagccgtagacaccagctccgaaatcaccaccaagacctgatggccaaaagaaaggaagaaaatttttcctctcctaaaaa

SEQ ID NO: 620602 - DNA, 141 bp, Homo sapiens
ctggccgtggacacctgtgtcagcatgtgggacctggttctctccatcgccttgtctgtggggtgcactggtgtcatggagaaactccagctgggcccagagattctgcagcgggaaaatccaaggcttatttatgccagg

SEQ ID NO: 620603 - DNA, 75 bp, Homo sapiens
gtagcggccgcggtgaggagagccatgggacgggcagtcaagactatctgttatagtccctgggtcaagacaaca

SEQ ID NO: 620604 - DNA, 74 bp, Homo sapiens
tttaaacaagagatttccacagaaggttctaagctggtctatgtccatcaccttcttggagaaggagcctttgc

SEQ ID NO: 620605 - DNA, 100 bp, Homo sapiens
ggggccctcctcagtgttgacctatgcctctccgccactcatcaccaatgtcacggcataatcaccagcaacacccgggacaataatacgggggccacct

SEQ ID NO: 620606 - DNA, 82 bp, Homo sapiens
ctggagagcttcatcaaaaatagtgatagctttgataataattacaagtagtggctacagccccagatcagcacatcagtat

SEQ ID NO: 620607 - DNA, 93 bp, Homo sapiens
taggaatattcatgtgagttcattcctccctgctcagattcttcagctcctcgtggttggtttattcaggtctcgctctgttgcccaggctgg

SEQ ID NO: 620608 - DNA, 87 bp, Homo sapiens
tcgtggatgccctgcaccgggtccggcaggccaaccccttcaaggagcgaatctgcagggtcttctccacatccccagccaaagaca

SEQ ID NO: 620609 - DNA, 75 bp, Homo sapiens
tcacctcaccatttctagcttgttgaaacccaaaactacattgaagataatgatgatgacagcaaaatggcagat

SEQ ID NO: 620610 - DNA, 74 bp, Homo sapiens
cagttgcttgatcaggtggaacagattcagaaggagcaggattaccaaaggaccaagaggatgctggtggaaaa

SEQ ID NO: 620611 - DNA, 100 bp, Homo sapiens
gaagccatggtcaaaaagtgggcagactttgctggcagacctgagccacttacctgtgtcctgtcagaagaacagatccgcctgaagaaactgaagcggc

SEQ ID NO: 620612 - DNA, 100 bp, Homo sapiens
gtggtgctggagacctctgcctcctactgccccgccgagcgtgttgccaacaaccgcggggacttcaggttgaaccctcggatacgatagaaaatgtaaa

SEQ ID NO: 620613 - DNA, 100 bp, Homo sapiens
gagaccagtggaagcagcaccatcggggagacaagcaactgtcttgtcgacggtctcactgatgcctcttctgcattcaaagttcctcgacccgggccag

SEQ ID NO: 620614 - DNA, 80 bp, Homo sapiens
atgaaatatggaaacgactcctcggccgagctgagtgaggactaatggctgaaggataaatcaacatggcaactatgatt

SEQ ID NO: 620615 - DNA, 100 bp, Homo sapiens
cccacacctcttcccggcccctgaagttggcactgcagcagacagctccctgggcaccaggcagctaacaggacttgattattcttagaaatgcacttga

SEQ ID NO: 620616 - DNA, 75 bp, Homo sapiens
atcacctccagccccatttttatcaccttctacatcctggtaatttcatctgtgccaaagcctccagaggacaag

SEQ ID NO: 620617 - DNA, 90 bp, Homo sapiens
ccaaatagtctatgtataaaagtaaatgggaagctatttcctttgccttaagagatgctaaaaaccttgtacctatggaccccaatggcc

SEQ ID NO: 620618 - DNA, 83 bp, Homo sapiens
atttgcttggaaaaacgtgtgggtacgaccttgatttaatccagagactgacttcactatagaacccacagttgtatcaatgg

SEQ ID NO: 620619 - DNA, 96 bp, Homo sapiens
gaaaatccacgcctagctggcaaagaagtgaggatagcattgctgaccagatgggtgcgagtactccagaaggaactggctgcatccacctctgaa

SEQ ID NO: 620620 - DNA, 138 bp, Homo sapiens
aagaggtggccccggatgctgcggcgcccgctggccgggctggctgcggccgccctgggccgggccccaccggacgacaatgcagatcttcgtgaagactctgactggtaagaccatcaccctcgaggttgagcccag

SEQ ID NO: 620621 - DNA, 96 bp, Homo sapiens
cacaaggggaaatttggcttgcaattcatcactttgaaaaggttccagatgtggaatctcgtgaagacttaattaaaaatcactacatggcaagga

SEQ ID NO: 620622 - DNA, 96 bp, Homo sapiens
ttcgcagtggtcgcttcttctccttgtacgtttcaggagacggcagcgaggctaccttgcatggtgtggtggacgagctggtgcggttccggcaga

SEQ ID NO: 620623 - DNA, 87 bp, Homo sapiens
acctctgccactaattcgacatcagtttcatcgaggaaagctgtggatttcttcaatcagatcaacatgctttatggaactatcaca

SEQ ID NO: 620624 - DNA, 101 bp, Homo sapiens
gtgcagaaataccagtccccagtgagggtgtacaaatacccctttgaattaattatggctattggaaagaagactgatgaagaaaaataacagcatgattc

SEQ ID NO: 620625 - DNA, 100 bp, Homo sapiens
taacctcatcagacattattgcagccagatgacgcagctgctgactgtctctttcttcgtcctgggttgcctggtgtgccccctttcctcctgcaccgtg

SEQ ID NO: 620626 - DNA, 75 bp, Homo sapiens
ggagcccggcaccccccgccgacaaggaggatcattgagaagcagccaggccacattcggagcagggttttcagg

SEQ ID NO: 620627 - DNA, 100 bp, Homo sapiens
ctctgctcctctatgctggacatcaaatttccagtgatgtcttggcattgcccattttcaagcaggaagattccagccttccattggatggtgaaacaga

SEQ ID NO: 620628 - DNA, 95 bp, Homo sapiens
agcagatgctggcgacctatccagaatgatcaagaaaaaagcttggccagaccacaagcgggaatgcaaatgccttaaaagctgcaaacccagat

SEQ ID NO: 620629 - DNA, 100 bp, Homo sapiens
tccagaactacctgtaaattatgtgaaacctccaaatgtgggtgcaacccagtttatgcctgaccccaagctcatggatcacgggcagtcccacccagaa

SEQ ID NO: 620630 - DNA, 95 bp, Homo sapiens
atgctcatgatcggcgtgtttggatgtactttacagcttgaagctcaactagagaaaaaggaccaacaatttaaagaacaagaaaagactatgtc

SEQ ID NO: 620631 - DNA, 98 bp, Homo sapiens
ggacaccatgcagtcggatgatatatgagtaaaattagcctaatcagaatgttagttcctgaaaacattgacacgtaccttatccacatggcaattga

SEQ ID NO: 620632 - DNA, 90 bp, Homo sapiens
gaagccctacgagtgcaacatctgcaaggtccgcttcaccaggtcccggtccttctcttcgtccccgtccccgtccccaacaccttcccc

SEQ ID NO: 620633 - DNA, 75 bp, Homo sapiens
tatcatgagcagcaactcggcttctgcagcgggacctggacttcaccatcgacctggacttcaagggccagctgt

SEQ ID NO: 620634 - DNA, 98 bp, Homo sapiens
agctgccgaagtcagttccttgtggagccggagctgggcgcggattcgccgaggcaccgaggcactcagaggaggttaaacccatccagagtaatggc

SEQ ID NO: 620635 - DNA, 83 bp, Homo sapiens
cgcagcccacgctcatgatcgacttcctcacccgcgcctgcgacctcggagctgaaggtggtggatcatcgtctggaaatgtg

SEQ ID NO: 620636 - DNA, 90 bp, Homo sapiens
caagaccggccacatcccagcactgcccacctctggcgtaaaactgaggaagaacgtcagaagaaagaagatgagagagcacgcagagaa

SEQ ID NO: 620637 - DNA, 101 bp, Homo sapiens
ttatctctgtgcttcgtgaagctaatcaagcaattaatcccaagttgcttcagttggtcgaagacagaggttcaggagtgaaaaggctctcagtgtctgag

SEQ ID NO: 620638 - DNA, 100 bp, Homo sapiens
agcatgtattgaaaatggagccagttgtatcgacatcagtggagaacctcaggcgagcagacctgaacggcagcaacatggagacagtgatcgggcgagg

SEQ ID NO: 620639 - DNA, 100 bp, Homo sapiens
tcactaaatactactctgaggggcttagaaattaacaggggaggttcccctgaaggatgctaaggaatacgctgaatccataggtgccatcgtggttgag

SEQ ID NO: 620640 - DNA, 100 bp, Homo sapiens
tgtgcctctgacatcattcaggaaaatgacttaattcagtgcacaaatgagatgaatgtgaacatcccacagttggcagacagtttatttgaaagaacta

SEQ ID NO: 620641 - DNA, 100 bp, Homo sapiens
tcttagagcacaggctgctttgtttggatcctacagagatgcactgagatacaaacctaatgtgacagtgatgataacatgggtgccaaaaatacttcaa

SEQ ID NO: 620642 - DNA, 100 bp, Homo sapiens
gtcgactccctagcagcagccgccgccagagaggcccgcccaccagttcgcccgtccccctgccccgttcacaatatgtacggagcgcaagaggacggca

SEQ ID NO: 620643 - DNA, 100 bp, Homo sapiens
cgtgggggtcgtgggccggagcgcctccttcgcaggcttcagcagtgcacagagccggaggatcgctacaagccagctgccatgttgtgagcacatacca

SEQ ID NO: 620644 - DNA, 75 bp, Homo sapiens
agcaatttcacgtacatggctgacatatctgaagagatggattaagaatgctttggattaaggattgtggagcac

SEQ ID NO: 620645 - DNA, 100 bp, Homo sapiens
cctacgtcagtcccgtgttaaaagaaaacaaggcgattccgcagtccccccgttccctggaggtcctgtggaatggccttctccacagtaggcactcctg

SEQ ID NO: 620646 - DNA, 82 bp, Homo sapiens
tggaaggagaactaaatgggagaagaggaatgttccctgacaatttcgttaagctgccgggccgcaagtacagccctgggta

SEQ ID NO: 620647 - DNA, 116 bp, Homo sapiens
aagtaccacaacagggacacctggttccagctgcagcacgtggacgctgactcggaagtgcagagatcctgaaggagctagacgagtgctacgagcgcttcagtcgcgagacagac

SEQ ID NO: 620648 - DNA, 98 bp, Homo sapiens
ctatggagactggattgtttcctggtagcaatgccactttcaggatactagaggtttactcctggcttgggggcattaggaagcactggaggctcttc

SEQ ID NO: 620649 - DNA, 75 bp, Homo sapiens
cgggagcgtcccccgggggagaccaggactcgcacaggttatgagtgccagtgagccgccttagatagaagcatc

SEQ ID NO: 620650 - DNA, 100 bp, Homo sapiens
cgcctcccgggttcaagcaattctcctgcctcagcctcctaagtagctgggactacagatgcggaaaacgccatgcggtacataaatgggacgcgtctgg

SEQ ID NO: 620651 - DNA, 82 bp, Homo sapiens
cgctgccgcacctccgtagctgactcggtcttgagtcaccacgtccgaatataattcttgggttagtaatctgccaaaaaat

SEQ ID NO: 620652 - DNA, 100 bp, Homo sapiens
gttgccatgtccgcaccgggacgatcatcctggggacctggtacatggactttaatttttggaagtgaataaaacttgttttagaagacgagatgactac

SEQ ID NO: 620653 - DNA, 50 bp, Homo sapiens
cttacatctaaagagctagggaggctatcaagaattttaatggagctgga

SEQ ID NO: 620654 - DNA, 75 bp, Homo sapiens
tgacggtttcagccatccggcggggggttcctggaatgcatccttgtggatgggacagtatggaggtgagtgggc

SEQ ID NO: 620655 - DNA, 98 bp, Homo sapiens
ccacctgcgaccacccctacattgtgaagctcctgggagcctactatcacgacgggaagctgtgggttcttcagaagacctgaaattctgcgtgctct

SEQ ID NO: 620656 - DNA, 100 bp, Homo sapiens
ggagcttttcgtaaagggaagtcatttctactggacttcatgcttagatacatgtataacaagcagtctgagctatcagctgaagaaagtccagaaaaat

SEQ ID NO: 620657 - DNA, 89 bp, Homo sapiens
agaatctgttggttcagagatggttctagtggaatggtgcccagcaaaagcagggagtctgtggcatctgaaggctcaaaccagacaag

SEQ ID NO: 620658 - DNA, 74 bp, Homo sapiens
tgcttccgagcctagccgcctggccttcggcatttgcaggcaggttatgaagacagtatggagtttccagacca

SEQ ID NO: 620659 - DNA, 100 bp, Homo sapiens
gggcggcagccagctcgcagggtggggacccatcgtgaagatggcgtggccctgagaggcagccattctcttctgccaaaccaggttccggttccacagc

SEQ ID NO: 620660 - DNA, 100 bp, Homo sapiens
tacattcctgattacctgccacccattgtgtcttctcaagaagatcaatgaactgagccatgttcaaatccctgttatgttgatgccagatgacttcaaa

SEQ ID NO: 620661 - DNA, 98 bp, Homo sapiens
cgcgcagttaggcagcagcagccgcggagcagtagccgccgtgggagggagccatgaagcattacgagaccacgtgaccagagagaagctggaccgca

SEQ ID NO: 620662 - DNA, 100 bp, Homo sapiens
gaagccagagagggcttggtggatgacaaggaggcctgagtagaccgcaggcccaagaggatgctgagaaacttcggtccgttgtgatgccaatggaaaa

SEQ ID NO: 620663 - DNA, 90 bp, Homo sapiens
accagatcaacgtcctccgggaccggagtcagaaccctccgcagagtaaaggcaccagcttgctgcaggaggtggtctacttggtgagcc

SEQ ID NO: 620664 - DNA, 50 bp, Homo sapiens
caccaccggatcaacttcgacaaatagtgaattatgtaacctcattacgc

SEQ ID NO: 620665 - DNA, 75 bp, Homo sapiens
gtccgcgaagatggcgggccgggttcgtgagccacacatctccccacaccaagctcctccatacaagacctcgga

SEQ ID NO: 620666 - DNA, 98 bp, Homo sapiens
tgaataaagctgttttggaactgtcaggtacctcaaagctcctagaaaaggggtcagtcagacagggacgccagtgtgtgaggaggatggtgatgcag

SEQ ID NO: 620667 - DNA, 83 bp, Homo sapiens
agcgccgtgtggcacgacacaaaaatcagggggatatgagactttctactcggaatatcctgagtgttgcgtggatgtaaaac

SEQ ID NO: 620668 - DNA, 51 bp, Homo sapiens
caccctggaagccgagaaatggctccgtatgtggatgtgatctgtttgaac

SEQ ID NO: 620669 - DNA, 80 bp, Homo sapiens
cggcgcccgctggccgggctggctgcggccgccctgggccgggccccaccggacgatgaggacggggacttggttgcctt

SEQ ID NO: 620670 - DNA, 83 bp, Homo sapiens
cgcagccctgaagttgcctcttctggtgtcaaagcttttggacattcctggggttgatgccggcccaggatggatcagacctg

SEQ ID NO: 620671 - DNA, 75 bp, Homo sapiens
ccacaccccctccgtgggtgtgtgggcagcccaatggatccaatggtgatgaagagacctcagttgtatggcatg

SEQ ID NO: 620672 - DNA, 102 bp, Homo sapiens
aggcatgacaatagcttctctcctcacagaaatttaactgcttcagccccaggaaatcagcccccctcctactgccaacctggaccggtcgaatgataaggt

SEQ ID NO: 620673 - DNA, 140 bp, Homo sapiens
gaggcggcgggacagagcgcctgcgaccccagtcggtgctccggggaggtcacctgacgaggaggaggtgtccaggcggaggcagttcctgcgggagcatgcggcccccttctccgccttcctcacagacagcttcggcc

SEQ ID NO: 620674 - DNA, 100 bp, Homo sapiens
agttgactaccaccagtggagtccaggatgagacgtttgatgcaaatgatttgtatcaggggcagaattttaacaaggtcctcagttccttagtgactct

SEQ ID NO: 620675 - DNA, 76 bp, Homo sapiens
tcctcggaagagcgctcccaggagaaacaactgcattaatactacattgtcaaagacaaagacgaacatgagacat

SEQ ID NO: 620676 - DNA, 98 bp, Homo sapiens
ttcctgaggcctccccagccatgcagaactctcactgttaatgaagcggctgctcaactctgtgtgaaggataatgccctgctgacaagaagagatga

SEQ ID NO: 620677 - DNA, 100 bp, Homo sapiens
tcctgcagtgtcaggaagaagagctcacgcagatggtgtccacgatgtccgacggctggaaattcgaacagaaactggcagacctttcacttcgtatcca

SEQ ID NO: 620678 - DNA, 75 bp, Homo sapiens
ggagaaggccagcagtccttcagggaagatgggaggcgaggagaagccggtacaatccttggatttaccctccga

SEQ ID NO: 620679 - DNA, 100 bp, Homo sapiens
gggtgattgagcggactggccgctgccaaacatgtgcaggtctcctctgagcctccggcctccataagacccaaaacagatgacacctcttcccagtccc

SEQ ID NO: 620680 - DNA, 100 bp, Homo sapiens
tggtgccgtcgctcatcaagcagcaggtccttaagagagccttctccatggacgaccgcattgcctggacccacatcaccatcccggagtccctgaggca

SEQ ID NO: 620681 - DNA, 100 bp, Homo sapiens
gtttgagtccgcatcgccacagctgaaggctgcgagggactaagagcagattgtcactcagcccagtccatcagtttctcagcccagtacttctcagagt

SEQ ID NO: 620682 - DNA, 80 bp, Homo sapiens
aaatgaaagtgaaaatgttagaagaactcgtgagccggattgatggagcgtgaggatcatccccggagaggacgggagga

SEQ ID NO: 620683 - DNA, 120 bp, Homo sapiens
gttactggaaagatttttacctcattacttcaagggcgtgctcagtatctacaaagacccaggaattcaactgaaaaaggtgcaggagcagcgggagcaggaggccaagcgggagccagt

SEQ ID NO: 620684 - DNA, 87 bp, Homo sapiens
ggaactcacagagtggattccgatggcagtcttgggcacgtccatctgtaaacctgctgagagctctggtgacaagaaaggcagtgg

SEQ ID NO: 620685 - DNA, 100 bp, Homo sapiens
gacgtctttacgtgtccaaaggcttcaacaagaacgatgcccccctccacgagatcaacggccggacgacccccgcgggagccggggcccagaaacccgc

SEQ ID NO: 620686 - DNA, 101 bp, Homo sapiens
ggcagcctgggtgttttcacttgttcttggactgggccaaggtgtggtgaaatagggccttctaaacctgtggagaagtgagagatctgaatttggagagg

SEQ ID NO: 620687 - DNA, 75 bp, Homo sapiens
gagcccagaagctgccaccgaaccaaggcgatgacccaggatgcagccaggggccacgacatgcacggaggaccg

SEQ ID NO: 620688 - DNA, 74 bp, Homo sapiens
cgactgggaggagctgctggcaccgcctgctccagggttggatggcaagcatgtggtgtttggcaaagtgaaag

SEQ ID NO: 620689 - DNA, 100 bp, Homo sapiens
tgttgattgaggacgttcccttcacggagaaagattttgacagctccccttccaccccccggggaactgaagattgtcctggccgcgacctgagacctcc

SEQ ID NO: 620690 - DNA, 75 bp, Homo sapiens
ctgtcctaaatgtggcgacttgtgcacacatgtagagacctttgtatgtatacccctagaaacacttaaagaaga

SEQ ID NO: 620691 - DNA, 100 bp, Homo sapiens
aactcgaatggccttgttttcttgctctggggctcttatgctcagaagaagggcagtgccattgataggctcctccatttacaacctacaaagataaaag

SEQ ID NO: 620692 - DNA, 80 bp, Homo sapiens
gctctcactgtggtggacgttcggccaagggaccaaggtggaaatcaaacgcgagaaccgaagtttggaggtagacgagc

SEQ ID NO: 620693 - DNA, 83 bp, Homo sapiens
ctgccaccgctgcccgagcccgacaatgcagatcttcgtgaagactctgactggtaagaccatcaccctcgaggttgagccca

SEQ ID NO: 620694 - DNA, 75 bp, Homo sapiens
aaaagaagaggaggaattaaattttaatgaagatattctgtgtccacatgcatcagaggctccttgaaatgctag

SEQ ID NO: 620695 - DNA, 100 bp, Homo sapiens
gctactgtactggctattggaaggaggagattctgaagataaggagccctggaagaaagcgggacttttcccctgttccttggagtcagtattttgagtc

SEQ ID NO: 620696 - DNA, 71 bp, Homo sapiens
cgccgcagggagtttgtgatgcaggtgcgcgtggaattcatggacgacacgagccgatccatcatccgcaa

SEQ ID NO: 620697 - DNA, 100 bp, Homo sapiens
ctctgtgttcagattgctggactttgtcatgatctcgcaaagccaaagagctgaaggaccggcaccgggacttcccagacgtgatctcaggagcgtatat

SEQ ID NO: 620698 - DNA, 100 bp, Homo sapiens
ggaagagggagtcaccactggacctccaaggaagccacgtgcagacatctacaaccttcgatctcctgacgaggtgtgggccgaagatatgctcatgtgg

SEQ ID NO: 620699 - DNA, 100 bp, Homo sapiens
acaaatccagcagggaggtccagatgaaaaagaaaagactaccgcactgaaaggtgatttgatgaaggctgctgcaggagagttcgcagatgatccctgc

SEQ ID NO: 620700 - DNA, 74 bp, Homo sapiens
tgactgctcaatggagagaaggaaagtcaatcgtaggaagaacacagtacagatggtgatgcccagtcacttaa

SEQ ID NO: 620701 - DNA, 97 bp, Homo sapiens
tggagaggacgcgaggagccatgaggcgccagcctgcgaaggtggcggcgctgctgctcgggctgctcttggagctctagaggacaaaatcccagtc

SEQ ID NO: 620702 - DNA, 83 bp, Homo sapiens
caccaacatagccatcgacttcggggagcaggttactcactataaacaatatccacccaacacaagcaaagtttattcctact

SEQ ID NO: 620703 - DNA, 100 bp, Homo sapiens
ttgtttgtggatcgctgtgatcgtcacttggtggctttttctcaagtatattttccagtctgtttggaactcgggaaatgagaattttaattttgggatt

SEQ ID NO: 620704 - DNA, 50 bp, Homo sapiens
ggtcaagagcctctgcgagaagatgggctatctgaagaggaacggggacg

SEQ ID NO: 620705 - DNA, 98 bp, Homo sapiens
ggctgctcaacaaggagctgggctgcatcaactcggcccctggccccaacatggcccgtcgctctcagagctcctcgcagggggacaacccactggca

SEQ ID NO: 620706 - DNA, 100 bp, Homo sapiens
gaagatgcagttgagaatgatgattatgataaaggccatggttgcttgttatccgggcaatggaacgggttatgtacgtcatgttgataatccaaatgga

SEQ ID NO: 620707 - DNA, 75 bp, Homo sapiens
caagggcccaactggaattccacttacgggagaagaaactgaggcctggaatttgattaactcattcaaggttac

SEQ ID NO: 620708 - DNA, 100 bp, Homo sapiens
cgggcgccgaccaggcctggctcgcgcctctcccaggacccgcctggctgcgagatatctacagcctccgcttggcgtcccgatgctctccaccagcggc

SEQ ID NO: 620709 - DNA, 100 bp, Homo sapiens
tttgtttcatagctctactgatttcttctctggaggctggaggagaaagtgcaggccatgccacttcctctcaggagcctagtggatgctcagatcagag

SEQ ID NO: 620710 - DNA, 99 bp, Homo sapiens
caagatctcagtcagagtaggaaataattttcacaaccttcaagaaattcgggcagtgaaatcaactgtgcagaccatcactgttggaggagtgagcac

SEQ ID NO: 620711 - DNA, 95 bp, Homo sapiens
caacgcatcatgccagggagccaagcgtcctgcccggccacgcaggaggagggagacgcactgatgacatcgggccgctcctgcagctcgggcgc

SEQ ID NO: 620712 - DNA, 100 bp, Homo sapiens
ccgcggagggtcggggccgccggtggagtctcggcggccggggatgtttcgtctgaactcactttctgctttggcagaactggctgtgggttctcgatgg

SEQ ID NO: 620713 - DNA, 100 bp, Homo sapiens
cactgcccacattcctggttgctggagggagcctggccttcggaacgctcctctgcattgccattgttctgaggtttggagcaggtatgttaagaagtta

SEQ ID NO: 620714 - DNA, 75 bp, Homo sapiens
ggcacaggtggcccgatcccagcaggacattgaaagggctccagcaccaccaggacctgagcaccccagtcctgc

SEQ ID NO: 620715 - DNA, 75 bp, Homo sapiens
aagcacgccagcaggtttttattatggcagccactaacaggccagaaactaatggcagatcccggaaatccagac

SEQ ID NO: 620716 - DNA, 51 bp, Homo sapiens
ggataacatccctccagaagatgaatgttggctcaattaagaaacatcagg

SEQ ID NO: 620717 - DNA, 101 bp, Homo sapiens
cattgccacggctgaaccctccttctcaatcttggaacagcacccccttctttaaggctcctgagaatcaacccaactgaagcatttcaattcacttgaat

SEQ ID NO: 620718 - DNA, 71 bp, Homo sapiens
ggggccagctcagggaggacctgcctggattggagacccacagttggtgatctgtatggactgctcggcag

SEQ ID NO: 620719 - DNA, 82 bp, Homo sapiens
gggaccacgcgactcaatggacggagagcttggattagactctggccctagctgaaggtgatgtggccgccctcaaccgacg

SEQ ID NO: 620720 - DNA, 75 bp, Homo sapiens
gccggcctagcgtcctggaattacttcaatcaagcagacgcgtgccatgcctaccagatcattcaccgcaatggg

SEQ ID NO: 620721 - DNA, 100 bp, Homo sapiens
cgcagcccgatgggcatcaggattccgagtcaggagagacttcgggagaagcagcctcgtcttacagcgtgactgcaaagaaaaagacttttgttttgca

SEQ ID NO: 620722 - DNA, 75 bp, Homo sapiens
tgcacccctaactgccccctgcctgctccggcactgccccaggcccctacaaaggcttcagagtagatatctctg

SEQ ID NO: 620723 - DNA, 100 bp, Homo sapiens
cgggagcgccgagcgtcgccgccgccgccgccatgaacaactcgggcgccgacgagatcggggtgtacagcaagctgtgattcctgggaaaactaaaaaa

SEQ ID NO: 620724 - DNA, 96 bp, Homo sapiens
gacttcaacatgttccgcagccaggccgggggcgcctgcgactgcggggacagcaacgtgatgcgggagagcggggctgacgcgccactatgtagc

SEQ ID NO: 620725 - DNA, 100 bp, Homo sapiens
cgcgcatctgacggttgtctcggttactcattacctcaacatgctaaggacttgtgagggctacaatgaaatcatctttccccactgtgcctgtgactcc

SEQ ID NO: 620726 - DNA, 98 bp, Homo sapiens
ccagcagatggcggatgccctgcagtacctgcagaaggtctctggagacatcttcagcagctaaagctgttgatggatacgtgaagccacagatcaag

SEQ ID NO: 620727 - DNA, 87 bp, Homo sapiens
gacgccatgtcgggttattcgagtgaccgagaccgcggccgggaccgagggtgaggcggaaccaaccctcctggccatgggaggggc

SEQ ID NO: 620728 - DNA, 96 bp, Homo sapiens
tgggcttcccgggcgagcggtggaatgcctaccgcaggaatgggatggcttttctagcctgctgatgtgacaactgtgatgtgcctgcaacaacag

SEQ ID NO: 620729 - DNA, 99 bp, Homo sapiens
ccaaagtcctgctaggccctctctctccctacacgtcaaaatgcagatcttcgtgaaaacccttaccggcaagaccatcacccttgaggtggagcccag

SEQ ID NO: 620730 - DNA, 75 bp, Homo sapiens
gtggtgctgaaacgtgaagatgtgtttaaagcagtacaagtccagcggagaaaagctggaagtcgagtgtgctac

SEQ ID NO: 620731 - DNA, 51 bp, Homo sapiens
ccgggatgagcgcacggacgggtactccaaagattcaggtttactcacgtc

SEQ ID NO: 620732 - DNA, 82 bp, Homo sapiens
aagtcttagtctcctaggaaattttgaggtcagcagcaaggacaagatggagtaaaagtccagcaagctactatagctcctg

SEQ ID NO: 620733 - DNA, 82 bp, Homo sapiens
cccacggcgtccccggtcgcggtaactgtgacatttgatgatgtggccttatatttttcggaacaagagtgggagatcctgg

SEQ ID NO: 620734 - DNA, 85 bp, Homo sapiens
aaaagttgcagtttgaagaggaggactttgtacaggacacaatatccaatcctaggcctcctatatgatgactacgaatatatac

SEQ ID NO: 620735 - DNA, 83 bp, Homo sapiens
ggccatggaagaaatgatgatggaaatgaagtataataccaagaaagccccacttgcccaagaagatgaaaggattgttcttg

SEQ ID NO: 620736 - DNA, 76 bp, Homo sapiens
gcaaacttgacactcaccctgaccgatctttaaatggatgagatggctaccactcagatttccaaagatgagcttg

SEQ ID NO: 620737 - DNA, 90 bp, Homo sapiens
gcggtggtgaaggtgcaggccgttggggcggctcagaggcagaaaatgtttcgatgaaagatcctccggacttattggacaggcagaaat

SEQ ID NO: 620738 - DNA, 100 bp, Homo sapiens
ctttgtgaggcaacatcggataccactggcttgtacatgcagtggccatgcaaatatctgtcatctgcacacaggaaaatgtttctgcacaactaaagga

SEQ ID NO: 620739 - DNA, 138 bp, Homo sapiens
gcagggctccctctggatgtggaattctccgtccctttccagggagggaacaaagcccacagcaccgggccaattcctgtccccccagcagcatggcatcgtgtgctgaaccctctgagccctctgccccactgcccg

SEQ ID NO: 620740 - DNA, 75 bp, Homo sapiens
cacgattacacctgaaaccttacagaacgtcaaagagattgttgtaggagataaagttgttttgatgcctgtgaa

SEQ ID NO: 620741 - DNA, 78 bp, Homo sapiens
ctcggggactctgccttttaccggacccgtgcatctcttccgactctcgggcaagtgcttcagcctggtggagtccac

SEQ ID NO: 620742 - DNA, 50 bp, Homo sapiens
tcatgttgattcagagttggcttggagtgtcacatttgaagacgagcact

SEQ ID NO: 620743 - DNA, 100 bp, Homo sapiens
cccaaaatattctagaaggggaaaagctacttcaagattgtgtccagccaggtactgactctccccttgatgctgaagcctggaaaacctgctgggcggg

SEQ ID NO: 620744 - DNA, 75 bp, Homo sapiens
gaaaggattgtgacatatcgttggacccagaattgagcctgaagcaggacattctaaatgaaaagactgaattgg

SEQ ID NO: 620745 - DNA, 100 bp, Homo sapiens
ttgagagctgggttctattttccctcctcaaactgactttgcagccacggagaggcttttgatgaggccattgctgaacttgatacactgaatgaagact

SEQ ID NO: 620746 - DNA, 76 bp, Homo sapiens
gggaccccgacagctgcggttggcgggcaccataggccgaagcacccggcaaacggggattcagcgtccgatcctt

SEQ ID NO: 620747 - DNA, 100 bp, Homo sapiens
ttcaccggcctcctgagtgtcctgagtgtagtgggcacggccctgctgctctggaacaagtggaatgcagtagccctctgggcctgggatattgtggttg

SEQ ID NO: 620748 - DNA, 82 bp, Homo sapiens
gccgcctctgtattacttaccagaaccacaatggacactgccagccatagccttgttcttctccagcagctgaacatgcagc

SEQ ID NO: 620749 - DNA, 100 bp, Homo sapiens
acagacttgaaagtgcctgccaaagccaagctcaccaaactgaagatgccttctcagtcagttgagtctccaaacgtccacaactatcccgatatggaag

SEQ ID NO: 620750 - DNA, 51 bp, Homo sapiens
catacttggaaatggctgcaggttcagagaaagaatacccacctcatgtcc

SEQ ID NO: 620751 - DNA, 82 bp, Homo sapiens
cggcccctggggtcttgggtgtgcagcacggatcacgcgagacccctgaggtgcagctaaatcaagtccagcagctaaacca

SEQ ID NO: 620752 - DNA, 98 bp, Homo sapiens
gacggaccgcccaaccccaaaagagccaaactcagctcgcccggtttctcggcgaatgacagcacagaaatgcactcggtgatggaaagagagccact

SEQ ID NO: 620753 - DNA, 101 bp, Homo sapiens
ctttgagtccctcatccgagctcagaaggaggatgggcttttgcccaaaccactctcttctgggggagaggaagaagaaaaaccccggggcgaggcttctg

SEQ ID NO: 620754 - DNA, 110 bp, Homo sapiens
actatggataacatgacttcatcagcacagataattcagagatctttctcttctccagaaaattttcagagacaagcagtgcaccagggaaaaattggagttaagtttaa

SEQ ID NO: 620755 - DNA, 100 bp, Homo sapiens
cgagaacatcgtggccaactcgctgctgctgaaagcgcgtcaaggatcgaacagaggctgcaaatagaataatatgtactatcagaagtaggagacctca

SEQ ID NO: 620756 - DNA, 100 bp, Homo sapiens
tttgggaaaaagctccaggattctgacagggatgttgcgaagggcataagcaaggggttcactttgtccagcaagactgtcatcctttctctgtacctcg

SEQ ID NO: 620757 - DNA, 50 bp, Homo sapiens
gattatttgccgctccgggtccaggaaatctggcattttttaaagtttgc

SEQ ID NO: 620758 - DNA, 82 bp, Homo sapiens
cccagagccccgcgtttcagccctagggaagatgagcagcaccagcagtaagagggctccgaccacggcaacccagaggctg

SEQ ID NO: 620759 - DNA, 93 bp, Homo sapiens
actactttgactactggggccagggaaccctggtcaccgtctcctcaggcttctcacggcattcagcagcagcgttgctgtaaccgacaaaga

SEQ ID NO: 620760 - DNA, 87 bp, Homo sapiens
ctgtccgagtcccaggtcaagagcctctgcgagaaggtggtatggtcaggaaaaagactacaatgtactagtcatggatcttctggg

SEQ ID NO: 620761 - DNA, 74 bp, Homo sapiens
ggctgacatcagcggctctttgtatgatgacgtttttagaacttcagccataaaaatgggcagaattttccttg

SEQ ID NO: 620762 - DNA, 100 bp, Homo sapiens
cgctcggagcttcgctcggaagggtctttgttccctgcagccctcccacgggccatgatccaaaggaaccagagcagttgagaaaactgtttattggtgg

SEQ ID NO: 620763 - DNA, 98 bp, Homo sapiens
ggtggactcagatgatctccccttgaatgtttcccgcgagactcttcagcaacataaactgcttaaggtgatgacaatgggaagaaggccaacaaccc

SEQ ID NO: 620764 - DNA, 50 bp, Homo sapiens
agcccacggacaccacctcaacgaggtgaggactcactatgctgtccaga

SEQ ID NO: 620765 - DNA, 97 bp, Homo sapiens
accacaataaaagagacctctacttagctcagcaattcttaccttttaattggccttggtcctcacagctccaaaaagaaacaggatctcgataagc

SEQ ID NO: 620766 - DNA, 100 bp, Homo sapiens
gacggtgaccaacttattagaaaaggggtcatgtgaaggtggtgcgctacttagtcaaagaagtcaatcagtttccatcagattctgaatgtatgagata

SEQ ID NO: 620767 - DNA, 74 bp, Homo sapiens
tgaggacttaaatgaagccactgattagcaatttaaagatcctctccaagattggggaccacaaattcagtgcc

SEQ ID NO: 620768 - DNA, 96 bp, Homo sapiens
ggccgggatcctggagcactcggtcatgtacccggtggactcggtgaaggtgccaacatcgcctctggtgaggaagtcgccatcaagctggagtgt

SEQ ID NO: 620769 - DNA, 75 bp, Homo sapiens
cttttctctgctcagtaacggcactgcggctggcgtggcagatcaggccaaacgtaccaagaaagtcgggatcgt

SEQ ID NO: 620770 - DNA, 75 bp, Homo sapiens
tataaaacaaatgctgctgctatgaatatgggtcgaccattccaaaaaaatcgcttcgctgatcctgcaagctcc

SEQ ID NO: 620771 - DNA, 100 bp, Homo sapiens
tggtcatcgagctgtccgacaaccctggcgtccatgagcctgactggacgccgggcatggcagtgccacgggacattgcagccgcctacctgctccaggg

SEQ ID NO: 620772 - DNA, 75 bp, Homo sapiens
caaagaccatgcgccggaacaccattcttcgccaggccaggaataactgggcacctccgggctgtgaaaagttag

SEQ ID NO: 620773 - DNA, 83 bp, Homo sapiens
cccaccgctgccctcagctccgagtccagggcgaggtgacttaagagattaaaattaatttggttgctgttggttctgaacaa

SEQ ID NO: 620774 - DNA, 90 bp, Homo sapiens
cgagcagatccttgcatttgtccaaggtgattttacaacgagatgctgctctccatagggatgctcatgctgtcagccacacaagtctac

SEQ ID NO: 620775 - DNA, 75 bp, Homo sapiens
gcgcagccgctgccgcagggtgcgcgatgccttgaacctggggaactgtggctgcaccatctgtcttcatcttcc

SEQ ID NO: 620776 - DNA, 100 bp, Homo sapiens
tggcggatggccccaggtgtaagcgcagaaagcaggcgaacccgcggcgcaataacggttcggggatcgcctctagcttcccaggacaaccagccacgga

SEQ ID NO: 620777 - DNA, 82 bp, Homo sapiens
ccatgactcaaggcacagactctccagcccaagaagatgaaaggattgttcttgttgacaacaaatgtaagtgtgcccggat

SEQ ID NO: 620778 - DNA, 97 bp, Homo sapiens
tggagattcatgacaaaatcatggaggtgtttaaaattatccaactgccatagagctaaattcttttttggaaaattgaaccgaacttctactgaat

SEQ ID NO: 620779 - DNA, 75 bp, Homo sapiens
ctggtaaacctggcagggtctgaaaaacctgctggaagagacacagtagtggcttcagtattgaactggcatctg

SEQ ID NO: 620780 - DNA, 50 bp, Homo sapiens
gtaaaagctgtaaaatgataacagagcaataccaagtttccaggcccgaa

SEQ ID NO: 620781 - DNA, 87 bp, Homo sapiens
aaaactgcagatattaaatctgggagcaaaattgtatttaaccaactccaaacagattggtggaacgagaatgcctacacgcagcca

SEQ ID NO: 620782 - DNA, 110 bp, Homo sapiens
tcgttcggtggtttcttgtgaggacgcggcagcccgtggagtcggctgagggaaaagcgaggcaaggcaggcgggctctctatgagaacatgctggtggagctgcccttt

SEQ ID NO: 620783 - DNA, 83 bp, Homo sapiens
cggctgtggtggagaatgtagtgaagctggggatatgagactttctactcggaatatcctgagtgttgcgtggatgtaaaacc

SEQ ID NO: 620784 - DNA, 110 bp, Homo sapiens
ctgttctctgtcagtggaggcagcagcggtagaggcggcggcgaggactggcgacggcgaggaggatcttcagcctgttaaacaagaaaacgaaaaaccccttccagaaa

SEQ ID NO: 620785 - DNA, 82 bp, Homo sapiens
gaggaaatggccgaggagccggagccgcaggaactgtggctgcaccatctgtcttcatcttcccgccatctgatgagcagtt

SEQ ID NO: 620786 - DNA, 100 bp, Homo sapiens
ggagcagaagggaggctccaagacctcatcaacaattaagcttctttatgaaaaaggcatcagcctcagggcctccttcatcttcatctctgtctgcagt

SEQ ID NO: 620787 - DNA, 75 bp, Homo sapiens
gcgcggccgggctggcgatggaagatggaaggaaggagcgcagcggtattaatctctggagaagacacatccaca

SEQ ID NO: 620788 - DNA, 83 bp, Homo sapiens
caaaccaaggatctggggatcttcgcactatcccaagctttcatgaagcagaggaggatgggtctgaacgactttattcagaa

SEQ ID NO: 620789 - DNA, 100 bp, Homo sapiens
ggccgtggctaccccggatttgctccaagctatggctatcagttcccagtgggcactggcctggggggcaactgcacaggctgtatcatctgctcagagg

SEQ ID NO: 620790 - DNA, 83 bp, Homo sapiens
gccagcacggccaaaccccctcctctgcctcgctccaacacaggggttgtgtccactgtggtccccgactctgcccacaagct

SEQ ID NO: 620791 - DNA, 83 bp, Homo sapiens
gtaccagcagggcgttggctatgtgcccatcacaggttttaaaatcaaagatgggaaaatcggagaaaattgcccttccccat

SEQ ID NO: 620792 - DNA, 100 bp, Homo sapiens
tctcgccctgctgggatcgctgctcctctctggggtcctggcggccgaccgagaacgcagcatccacggaggcaagtgaggcctatctggttggcctttt

SEQ ID NO: 620793 - DNA, 50 bp, Homo sapiens
aggactgcggacaagggctggcaggccaagactaaggggctgcagagcgg

SEQ ID NO: 620794 - DNA, 100 bp, Homo sapiens
gccgctgcagccaccaccgccaccatgtcctaccaaggcaagaagaacatcccgcggatcacgggcggcgactggcggcgcgatggacctgaccgggctc

SEQ ID NO: 620795 - DNA, 82 bp, Homo sapiens
ctcctttggaaccgcggctgggcaagaagctgatcgagcccctcaccaatctcatccacagtctgcgctcctcagaccaccg

SEQ ID NO: 620796 - DNA, 74 bp, Homo sapiens
aaagacctgctagagccattattgccccgtgggagaaggagagaaattggtgagggctctttttgctgtggctc

SEQ ID NO: 620797 - DNA, 101 bp, Homo sapiens
acaagtgaccccaggatcgagtggaagaaaattcaagatgaacaaaccacatatgtgttttttgacaacaaaattcagggctaatggaggttggcaggatg

SEQ ID NO: 620798 - DNA, 100 bp, Homo sapiens
ctgaggttttcctaagccatcccctggcggaaccgcccccaggaaggaaatctcagatggaggaagtgcaagatgaactcatccacagactgaccattgg

SEQ ID NO: 620799 - DNA, 75 bp, Homo sapiens
agccatggatggccgggaacctatgtccagaaggcttcttgggggaatattgtcaacatcgagacccctgtgaga

SEQ ID NO: 620800 - DNA, 90 bp, Homo sapiens
ggtggctcaaattgatgctaactggaacttcctggctctagaccaagatagaacagcccttcagaaagtgaagaagtctgtaaaagcaat

SEQ ID NO: 620801 - DNA, 50 bp, Homo sapiens
cgccggttcagctccgaggccggaacagtacgtatttggcattcaagcac

SEQ ID NO: 620802 - DNA, 100 bp, Homo sapiens
gaccccagcgttaccatgcatcctgccgtcttcctatccttacccgacctcagatgctcccttctgctcctggcacgtctgagaatggtggatgtggtgg

SEQ ID NO: 620803 - DNA, 75 bp, Homo sapiens
gtctgcgagccaggattcccggcccactgctcagtggagcgtggaggacgaggaggaggccgtccacgagcaatg

SEQ ID NO: 620804 - DNA, 100 bp, Homo sapiens
cacagccagtgccagagccagatttgccctgtgatctgagacatttgaacactgagccaatggaaacctttgacgacccctatgccctggtggtgctggc

SEQ ID NO: 620805 - DNA, 90 bp, Homo sapiens
cgccgctctgtctacaacccgagcgtcgagggcgaggcccccagcagtgagactggcacatccctggacagcccctcagcctacccccag

SEQ ID NO: 620806 - DNA, 100 bp, Homo sapiens
ggaaagggaactgaacgcggttctgggagcagcaagcccacgggtagcagccgaggccccagaatggatctatcttgggatcccatggctttctttactg

SEQ ID NO: 620807 - DNA, 83 bp, Homo sapiens
agcagatcgacaagtccgggagctgggcggccatttaccagatggggcattctcttctcccaccctcgggactttaccccagt

SEQ ID NO: 620808 - DNA, 124 bp, Homo sapiens
atggtaaaattatatccaaatatgactgcggtactgcttcataacacacaacttgatcaacgaaaggatcactactcttggaatcaaagataaatccaaatactgcatatcagaaacaacaggc

SEQ ID NO: 620809 - DNA, 75 bp, Homo sapiens
ctgaccacgagcttttcctccaggcctttgagatctgttctctggggaggcagtaaggggccgtggagctggcct

SEQ ID NO: 620810 - DNA, 144 bp, Homo sapiens
gtggatgatcatcacctccattttcctaggtgtcattacagtgatcatcataggcttatgtcttgctgcaggtgaatctggattgggaaagtcgacattaatcaactcattattcctcacagatttgtattctccagagtatcc

SEQ ID NO: 620811 - DNA, 90 bp, Homo sapiens
tcgagacttcagtatcctcatcaacttgataaaggccgacttcgcagaactactgctccctggagcagccaggccagggcggcagcacca

SEQ ID NO: 620812 - DNA, 100 bp, Homo sapiens
cttgaggccgccagcgtgccttctgcagactgtgagcagagagatgccaaaggccagtacctgtttgaccttctttgccaccatctgaacctacttgaga

SEQ ID NO: 620813 - DNA, 100 bp, Homo sapiens
cagaagaacaaactcttgttcccctttaggggagctctttgaccatggctgtgactctctttccacagctgataccccaatgtccttctttgactttgtg

SEQ ID NO: 620814 - DNA, 74 bp, Homo sapiens
acacttggagcagaaggcataattagtgaatttacacctttgccaaggtataagcagtttagccaaattttgaa

SEQ ID NO: 620815 - DNA, 51 bp, Homo sapiens
accagatatcttgaaaagctgccagaaaggaggtgaagtgaaatctgcaag

SEQ ID NO: 620816 - DNA, 82 bp, Homo sapiens
ctgggagattactaccagggccggaggattaccatcaccggaaacgaagttatacggaagcgtctcctcattgatggagatg

SEQ ID NO: 620817 - DNA, 51 bp, Homo sapiens
cccagcactgatgatattataaagactccctggaggaaaagcggaagcggc

SEQ ID NO: 620818 - DNA, 96 bp, Homo sapiens
gttgaggctgcggtcatggagggagcaggagctggatccggcttccggaaggtgtgggcccatcgctggatggatctgtcagaacacggctttggg

SEQ ID NO: 620819 - DNA, 51 bp, Homo sapiens
ccctgaggccccagaactatcttttcgttggctgattgcaattctggccca

SEQ ID NO: 620820 - DNA, 82 bp, Homo sapiens
taatgaaatggtgatttgtatccccaaaagagggtatgtgctccagaagaaactacatttcaccttctacacttgtctttaa

SEQ ID NO: 620821 - DNA, 101 bp, Homo sapiens
gtcggtgccggctcaggagccgggatgtgaatgaatgtgaactgctcagtggggtgtgtggtgaagccttctgtgaaaacgtggaagggtccttcctgtgc

SEQ ID NO: 620822 - DNA, 74 bp, Homo sapiens
acagctgattcctgggagcacatccatttcattggcaagattttgaaaagccatggtaaagatgaagaatgtgt

SEQ ID NO: 620823 - DNA, 100 bp, Homo sapiens
agagcaacttgcccgcactggtgtcacagatcaggactcctaaatgcaaagtccctggatgtttcttgcaagaccttgaaaagtcaaagaaatactctgg

SEQ ID NO: 620824 - DNA, 88 bp, Homo sapiens
acgcggcggcgccgcctgtttacgagagatggctgcccaaagattgtcaatctggggagctctaagacagacctcttctatgaacgca

SEQ ID NO: 620825 - DNA, 100 bp, Homo sapiens
aggaatcatggcggctgcgctgttcgtgctgctgggattcgcgctgctgggcacccacggagcctccggggctggggaacaggaacctgataaagaatca

SEQ ID NO: 620826 - DNA, 75 bp, Homo sapiens
tcagaagaaggctgctattgaaagagagtatgcacagtgggtgaatttgtaagtgatgtcctgctagttccagaa

SEQ ID NO: 620827 - DNA, 87 bp, Homo sapiens
accatcccatcgggaagccattgtgaacagctgtgtgtttgttcatcagactcttcaccaggatagtgatgaggaagaagaagacac

SEQ ID NO: 620828 - DNA, 97 bp, Homo sapiens
gtgaaattctgtgtgctccctccggcgagagactttgtcagctcccgcacagtaacctgatgtttgagccagcatgtcgcggaggaagcaagcgaag

SEQ ID NO: 620829 - DNA, 75 bp, Homo sapiens
gctggggctacaggcgtgtgtcactgcgcccagttgcagtaccatgcaggactagcatctggccttttaaatcag

SEQ ID NO: 620830 - DNA, 75 bp, Homo sapiens
tgagagtaggctccgggccccggacctaggatttcttgtctgctgtggaggatgcagagaaccggtttactggct

SEQ ID NO: 620831 - DNA, 100 bp, Homo sapiens
aggaggttcaggctacggtgagccgaaggccctgcccgtggaccggaagcgaagccaggagcccagccgcccgtcccctacgccccagggcccacctttc

SEQ ID NO: 620832 - DNA, 100 bp, Homo sapiens
ctcactttgcgttgtagtcgtctcaaagggtgcctccacttctcattcagagaattcagtgcatacaaaatcagcttctgttgtatcatcagattccatt

SEQ ID NO: 620833 - DNA, 74 bp, Homo sapiens
ccgtcgccgccgcccgggacagcccggaggttaaagatcgaggtccggaagccactaggagattttttaattgg

SEQ ID NO: 620834 - DNA, 75 bp, Homo sapiens
ccctgccggaccgcgcctcaggctcccccaggctagcttgtcactttctgcaaaggtttccctcagggagcctcc

SEQ ID NO: 620835 - DNA, 100 bp, Homo sapiens
atcctgctggtcaacttgctcattgccatgttcaggccccttcccagctgcctgcctgccctagccagctcccaggtgaagagactctcggcttccaggc

SEQ ID NO: 620836 - DNA, 75 bp, Homo sapiens
ctggggccttggaagatgcccttgccaaggtactccaaagattcaggtttactcacgtcatccagcagagaatgg

SEQ ID NO: 620837 - DNA, 100 bp, Homo sapiens
cagcctgttgactccaattcagaggttcaggtccaggtcaagacctcgtctccgttctcatagtcgtagcagtgaaaggtccagtcacagaagaacgcgt

SEQ ID NO: 620838 - DNA, 95 bp, Homo sapiens
gccctcacctgaaaactctaaaaagtaatgggatgaataaaattggactcagagtttccattgacactgatatgacggaccagcaggctgaggcc

SEQ ID NO: 620839 - DNA, 82 bp, Homo sapiens
aaacatcaaagaggtctagcaaaggactacaaatccctccaggatatcattgccatcctgggtatggatgaactttctgagg

SEQ ID NO: 620840 - DNA, 75 bp, Homo sapiens
actatgtcgcctgccaccgagccgggcccacctccccaccaaggaagaggtggggctggtgtccgagcacttctc

SEQ ID NO: 620841 - DNA, 82 bp, Homo sapiens
gcaaatgttacttgttccacgtttcttccatgtcagatcctccccggcgtgaaggtcatcatcgcacacaccgagaccaaag

SEQ ID NO: 620842 - DNA, 100 bp, Homo sapiens
gaaaagatatgggttctgtagccttggatgcagggactgccaaaggagaagatgcagtagaggatgatgctgaagagaaccctattgtcttagagtttca

SEQ ID NO: 620843 - DNA, 75 bp, Homo sapiens
cggacctctggagtgcccccagcccagagcccggtggaatgaatcttacttgttgaatatcttctggttactagt

SEQ ID NO: 620844 - DNA, 101 bp, Homo sapiens
ctccctcagcttccgccccaaaaggagttgatccctgaattttattatctccctgagatgtttgtcaacttcaataattataatcttggagtgatggatga

SEQ ID NO: 620845 - DNA, 100 bp, Homo sapiens
atcctggggacctggtacatgaattaaggcggcagcaggtgtgaagataacggcagtgagagtcagcagtgaggaccaatgggcagtccaggaggaaatt

SEQ ID NO: 620846 - DNA, 100 bp, Homo sapiens
aagtgttggcggatggaagggaggagactcctgaccctcagaatggttggatggcaagcatgtggtgtttggcaaagtgaaagaaggcatgaatattgtg

SEQ ID NO: 620847 - DNA, 88 bp, Homo sapiens
gcggtggagcgcagagcgggcgagcgcgctctttcgacgtgtagcagcagctttgccgggaatggaaagcacacaggacagaagcaga

SEQ ID NO: 620848 - DNA, 82 bp, Homo sapiens
gatctggcaagaggagtcaaaatacgatcttatttcaatatgcccctcggaaaccaagccctaagggtctaccaaacagaaa

SEQ ID NO: 620849 - DNA, 76 bp, Homo sapiens
gtgaacaatggggaaaaactggagtttttgcacaagggtcctgagaacattatctgtagctgtatctccccatgtg

SEQ ID NO: 620850 - DNA, 83 bp, Homo sapiens
cgccacagctgaaggctgcgagggactaagagcagaattcccaacttcttctggagcctggggatcggtcacactggtgcgtg

SEQ ID NO: 620851 - DNA, 87 bp, Homo sapiens
cccaccacgtccagcttcaccacgcggctgcacaactgcaggaacaccgtcacgctgctggaggagatcgagggcacccagaaactg

SEQ ID NO: 620852 - DNA, 75 bp, Homo sapiens
ctgatgacccatttggattctctgatttcactgccaagattctcaacactacaacaacaggagtgcaaacttctc

SEQ ID NO: 620853 - DNA, 101 bp, Homo sapiens
tgtccaggagctcgaaaatgcatcaagagcaagaaccacctgagaaaagtgatcctaaacaagaagagtctcagatatctgggaaggaggaagagacatca

SEQ ID NO: 620854 - DNA, 74 bp, Homo sapiens
attttctttaaggatggtttagaaatggaaaaatgtgatcatcatgcctagggttcataacataaaaaagtctc

SEQ ID NO: 620855 - DNA, 75 bp, Homo sapiens
cagagttcaaggaggccttccagctgtttgaccgaacaggtgtgagatcaaccatgagttccgttgcagttttga

SEQ ID NO: 620856 - DNA, 75 bp, Homo sapiens
cacaggagtcatgcccagtgtgtgaaggagaagaaactgaggcctggaatttgattaactcattcaaggttaccc

SEQ ID NO: 620857 - DNA, 90 bp, Homo sapiens
ggagagaatgtatgaagaacagtcacaggacagatatccatgttcaagaggaaatgtttgttcaaggcaaaaaattatttctcagtaacc

SEQ ID NO: 620858 - DNA, 75 bp, Homo sapiens
cgagaagatcgcgatatggctcaaggactgccgctcagaggatgaaacaggaaactgagtcataaaacactacta

SEQ ID NO: 620859 - DNA, 80 bp, Homo sapiens
agaccctcagccaccgcccaggaagcttcatggctgggcaccaggccctgactaccaggcataatcaccagcaacacccg

SEQ ID NO: 620860 - DNA, 83 bp, Homo sapiens
ctccactgttcctggaggaatccgagaagagcagagcggagggagccccagacacgacctacgtctaccagtggccctggacg

SEQ ID NO: 620861 - DNA, 75 bp, Homo sapiens
ttatcttcttttatgaatggagcgtcaaactaaactggacaggtctacaaggaagtcttcacgaggagcagtgag

SEQ ID NO: 620862 - DNA, 88 bp, Homo sapiens
cggaccagcgacccaagcgccgcggttaaccacgtctcgtccacgacctccctaggttcttctgtgtggcagttcagaatgatggatc

SEQ ID NO: 620863 - DNA, 75 bp, Homo sapiens
acacacaggtgaatttaaaggagcagccctggtgtcacctatcagtaaaaggccttaatctgcttggtagacaaa

SEQ ID NO: 620864 - DNA, 82 bp, Homo sapiens
ttcaacttatgaaattcaagttacatgtgaattctgccaggacacattcagctaacgtattttagcaggtggagtgaggttg

SEQ ID NO: 620865 - DNA, 100 bp, Homo sapiens
ttatgatccccagacaaatgagtggacccaggtttttcgttggaatatacgttgcacatttatggcgattctgagtgtgagggcagacttctgccaggct

SEQ ID NO: 620866 - DNA, 83 bp, Homo sapiens
ccggggtccccggccggccaagcaggttgtgaccgagattcccgacgagagagactgaggggaagagaggaaggaggggcggg

SEQ ID NO: 620867 - DNA, 100 bp, Homo sapiens
ctcctgtacctcatggaatgatgccgcagatgatgccccctatgggagggccaccaatgggacaaatggagaacatcattgcaacagtaagagattccaa

SEQ ID NO: 620868 - DNA, 51 bp, Homo sapiens
aaccaaattatgctgcaaatgttttcgaatgcttgaaataccactactgac

SEQ ID NO: 620869 - DNA, 75 bp, Homo sapiens
accgagtccagcccaggaaaatggagaggacgactgggtttggattcagaagaggattattatacaccacaaaag

SEQ ID NO: 620870 - DNA, 83 bp, Homo sapiens
gtttttagccttttaacattcaaggattaggtgatctttagacagtgactgagtatggatcatttgaacgaggcaactcaggg

SEQ ID NO: 620871 - DNA, 100 bp, Homo sapiens
atgccagaatggttatctacacacccttctcatggcaatcgagttgagtacttggatagacttatacctcaggatgataatgaagataattcaaatgatg

SEQ ID NO: 620872 - DNA, 80 bp, Homo sapiens
cgatccagcctgcggagcctgtggggcagaatctccctggaaaaggagacatgaatgtctgcaatgatacttcctgacaa

SEQ ID NO: 620873 - DNA, 108 bp, Homo sapiens
gccccatgagatttcatcaagatcaacttcagggtccacatatagcctcagttacattagctgcttatgaatgcaattcagttaattttcccgaaccaccctatcctg

SEQ ID NO: 620874 - DNA, 100 bp, Homo sapiens
atttacgcggatgtcggcgaagagttcaaccagcggagctggagtttgttcagatcatcatcatcgtggtggtgatgatggtgatggtggtggtgatcac

SEQ ID NO: 620875 - DNA, 75 bp, Homo sapiens
ttcttacacaaagcagtgtgtgatagatgacagagcagcccggctagataatatggtccggaaaaagaacccccc

SEQ ID NO: 620876 - DNA, 110 bp, Homo sapiens
ttggtggaggggtggtgaccatcgaaaggagcaagagcaagatcaccgtgacatccgaggtgcctttctccaaaaggcctgtatccggtgtccgaggcgaactcagtaag

SEQ ID NO: 620877 - DNA, 75 bp, Homo sapiens
tgctttgcgtgctggtcagcatccggaacaacaggtcagcccaaggccaaccccactgtcactctgttcccgccc

SEQ ID NO: 620878 - DNA, 100 bp, Homo sapiens
ctttcctcaggagtcatttctgttccgcacaggcctgctgaactgggtgctttatataggtgattcgcctttgccagtctcatctcgtgtctgctttgtt

SEQ ID NO: 620879 - DNA, 109 bp, Homo sapiens
gaggaggcagaagatttctggccagtggagagaggaattcctcaagacaccattccaggatttgcctcaaagggcactgcaaaaattgaacagaggaatcccaaggaag

SEQ ID NO: 620880 - DNA, 95 bp, Homo sapiens
ctggggagtctgattcagatgacaactgtacagatgtcactgacagtgatctgacacaaacacagctgaagcaaacagaggtcctagtgacagct

SEQ ID NO: 620881 - DNA, 87 bp, Homo sapiens
caaccattgacgccatgtcgggttattcgagtgaccgagaccgcggccgggaccgagggaatggtcctcgtccgaagtgagaatggg

SEQ ID NO: 620882 - DNA, 90 bp, Homo sapiens
cgagtggacaaaatggcgaagatcgccaagactcacgaagtgtcctgctatagactatactagacacacacttgatggtgctgcatgtct

SEQ ID NO: 620883 - DNA, 75 bp, Homo sapiens
tccaggcagtgtaatctcattccatcttcattcatgactccagacagggtcatctttctgaaggattggttacta

SEQ ID NO: 620884 - DNA, 100 bp, Homo sapiens
aaacagcagtatgatgaactggaggctgagtacgacagcctcaaacaggagctggagcagctcaaagagatctatccatactaatggaaatgtaactgga

SEQ ID NO: 620885 - DNA, 82 bp, Homo sapiens
gggtcgggactcggaggaggggccaaggtgtggctcctctgaagacctgcacgacatcaagatggtgctcatgtggaccagt

SEQ ID NO: 620886 - DNA, 75 bp, Homo sapiens
acttgcagctccagcaagaaaaagaacaagaactttctaagctaaaagaaaacatagctctgctggcagaaacag

SEQ ID NO: 620887 - DNA, 100 bp, Homo sapiens
acctacaaaatcttccccaaaataaaaaaattgcaagagagagactattttcgttattacaaggttaaaccttctctcgatgaagcttttgtcatccaag

SEQ ID NO: 620888 - DNA, 97 bp, Homo sapiens
gttaatcctcaatttaagcctgatctaacccctagaaacagatggagctaacacccattatggagattaaccacttttcatcaggtttttaacttaa

SEQ ID NO: 620889 - DNA, 101 bp, Homo sapiens
gcagggcctgcagcgggagctggacggcgagcgcgagcggcgcgagaaagtggatccataaagaacccagccaacccgcagagggaggggaggggctgagc

SEQ ID NO: 620890 - DNA, 80 bp, Homo sapiens
gtttgcaaagcacctgaactgttaacttaccaagactggttacacctggagctggaaattcaacctgaagctgatgctct

SEQ ID NO: 620891 - DNA, 83 bp, Homo sapiens
gtcgcatttggccgcctccctaccgtattgcctaagtgtaatcttgaacatgggcggtgctgtgagtgctggtgaagacaatg

SEQ ID NO: 620892 - DNA, 51 bp, Homo sapiens
tcacatttttcacaacagtaagattcttcaaacacctaaatgaaagtgata

SEQ ID NO: 620893 - DNA, 83 bp, Homo sapiens
gttctctcggcgccaccctgggatccgcccttggagggtttggaacagcagttatctccagaagaagaagagaaaaggagaat

SEQ ID NO: 620894 - DNA, 83 bp, Homo sapiens
aagccttcctttatcgctttcaggatactgctattgttcatccagttcccattcgtatgactccaagcaaaatccacatgcag

SEQ ID NO: 620895 - DNA, 75 bp, Homo sapiens
cttcatagcattcgcctactccgtgaaggagggtgaggacaaaatcttcttaatcaacaagcttcactccatcta

SEQ ID NO: 620896 - DNA, 101 bp, Homo sapiens
agacagtgtggatatggatgagacagagagggaagtggaatatttcaaaaggaaatgacctcattcttgatggctgctgctaacttatggtgagatgctgg

SEQ ID NO: 620897 - DNA, 90 bp, Homo sapiens
agacttgaacttaatacagcaagaaagaccatcaagtttaccacttttcaggatgtccagcaaagaatcctgtgggaaaaaagagacatc

SEQ ID NO: 620898 - DNA, 50 bp, Homo sapiens
gcctacgtcagtaacagccaccaagtctctagtgatccctgaaaagttcc

SEQ ID NO: 620899 - DNA, 89 bp, Homo sapiens
aaaacagcagatttcccaagagcagcggaaaatgatccagtcacagattccacagtggtgtgtggagtacatgcgatcattaccaggac

SEQ ID NO: 620900 - DNA, 87 bp, Homo sapiens
gtacattcggggtgccagaaggaaagcatagaacctactgggttggtgacatttacaagacagagtcttgaagattttccagaatgg

SEQ ID NO: 620901 - DNA, 100 bp, Homo sapiens
atggcatcctaatattagttccgtcacaggggctatttgtttggatatcctgaaagatcaatgggactttgaatccaaagcaaaccatcttggtgattct

SEQ ID NO: 620902 - DNA, 82 bp, Homo sapiens
ccggacgggcactgggcgactctgtgcctcgctgagggtggcagcggtgggagcgagagtcaggaggaggaagagcctcagg

SEQ ID NO: 620903 - DNA, 96 bp, Homo sapiens
gttacctagaaacagaatcactgggtcaaagggtactactgagcgagtgtgcttgatccagggaacggttgaagcactgaatgcagttcatggatt

SEQ ID NO: 620904 - DNA, 89 bp, Homo sapiens
tggctcagctgctgcatcaggcagtttcccttcccaaggctctcaaaattagagagatgtgtaattgtccaccactgtctaatccagac

SEQ ID NO: 620905 - DNA, 90 bp, Homo sapiens
ctgaaaacatcctggaatcaaatagtgttacggcaacaagaaaatatttacaccagcagctccagttcataccaataaagaagatcctgc

SEQ ID NO: 620906 - DNA, 75 bp, Homo sapiens
agctgtggaaagaagttgcaaaacactggcaactttttacagatgtggcaactggagaaatgtccagggaattag

SEQ ID NO: 620907 - DNA, 100 bp, Homo sapiens
tttcaggaggaagcgatggcttcagacagcatatttgagtcatttccttcgtacccacagtgcttcatgagagtgttgttacagatcttataacagtcgg

SEQ ID NO: 620908 - DNA, 76 bp, Homo sapiens
cccggcgcacaggggcacccatcatcgtgtccaccatgcttgcaccagaaccaagcctgaagctgggcatggagcg

SEQ ID NO: 620909 - DNA, 49 bp, Homo sapiens
gtcccaaccaggtccacaacgttcggaattatatccagatcgagagaca

SEQ ID NO: 620910 - DNA, 98 bp, Homo sapiens
aggacttccgcaggacccgcaacagcgcagaggctccatgatgcgttatctgggtctggaaacccaaaccctcaaggatggcctggcgcatgggggaa

SEQ ID NO: 620911 - DNA, 110 bp, Homo sapiens
gggaaactgagagttcccaattaataatgaagcagttgttgacctcctgtactggagagacattaagaagactggagtggtgtttggtgccagcctattcctgctgcttt

SEQ ID NO: 620912 - DNA, 100 bp, Homo sapiens
ccgtccccctatcccctcccgcctcccccagggggcaccaactccaacgactacagcagccaagacgacatccctattcgtacctggttccccaaggaaa

SEQ ID NO: 620913 - DNA, 90 bp, Homo sapiens
agtgtctgcagtgccaaatgtgtgacccagtgggcgacagatgcgaaagaaacgagttccagtgccaagacgggaaatgcatctcctaca

SEQ ID NO: 620914 - DNA, 76 bp, Homo sapiens
caaagattcaaatggcgcaaaaaagaatcttcagtttgttggcattaatggaggcccagatggcagttacacagag

SEQ ID NO: 620915 - DNA, 75 bp, Homo sapiens
aggaacgtgtcccggggccgacccggcccgtagtgtggaagcagcttcaggtggcagggcccagccccgaaccag

SEQ ID NO: 620916 - DNA, 100 bp, Homo sapiens
gcgttggaggtagcagacttttcagcagaagctgatacagaaggcaataataaaacagtgctaaaatataaatgccatacaatgaagaagctcagcatga

SEQ ID NO: 620917 - DNA, 75 bp, Homo sapiens
tccagaggctgaatgagctagagcccatcatcttcgtttcggacagagcaaacagcaacaaggagctgggtgtgg

SEQ ID NO: 620918 - DNA, 50 bp, Homo sapiens
accgagaccgcggccgggaccgaggatgagcagcagctgctcagggctga

SEQ ID NO: 620919 - DNA, 74 bp, Homo sapiens
atgatgaagaggtttgctctggaacagcagctggaggagaaagctcgcctagaagcagaggccagggcccggga

SEQ ID NO: 620920 - DNA, 87 bp, Homo sapiens
aatatacccaaacaccctggagacgaattcctctaagaagaaatttcctgacttgtttgtcttcttggaagattcctcctcatgtct

SEQ ID NO: 620921 - DNA, 74 bp, Homo sapiens
catcgacccgaagttgcggattgcagccgagaacgagctcaaccagaaatgcactcggtgatggaaagagagcc

SEQ ID NO: 620922 - DNA, 100 bp, Homo sapiens
gtgtacagagcatcatgaagaaaagcatcttcaatgtctgtgggctgttgcaaggaattgcagaggatgcctggatctgaagctagaggaattgaaatcc

SEQ ID NO: 620923 - DNA, 98 bp, Homo sapiens
tgcaacagtggccgcacgcataggtctcctctgagcctccggcctccataagacccaaaacagatgacacctcttcccagtcccccgcgccttccgaa

SEQ ID NO: 620924 - DNA, 50 bp, Homo sapiens
ggaacaggacgccctctgatggcttttgttgtaacaccctgactttaaaa

SEQ ID NO: 620925 - DNA, 74 bp, Homo sapiens
ttggaccttccggagcttctcagaagacagagggttttcttttgaggcttgacttcaatggtttctacacggag

SEQ ID NO: 620926 - DNA, 50 bp, Homo sapiens
cagagctgctgcagaaaagctgtttggttggagtcttgctctgtcaccca

SEQ ID NO: 620927 - DNA, 90 bp, Homo sapiens
cttggccaggctggccccgagcggaactggagaaagctgaggatatgaggccccaggattcctggcgaggtcctcctccccttttccagc

SEQ ID NO: 620928 - DNA, 100 bp, Homo sapiens
gagaattggaagctaaagctaccaaagacgtagaaagaaatcttagcaggaccagaggagcgagagcagcaagaaccacacccagcagcaatgtcagcgg

SEQ ID NO: 620929 - DNA, 98 bp, Homo sapiens
gtcgctgtcaagatggagtttccaacccagtaaatccaagggccagaccgtgacctcataaaggttctggcctataggaacaagacattttcagtaat

SEQ ID NO: 620930 - DNA, 75 bp, Homo sapiens
cactcgcccctggcctcgcgggccgtgtctccggcatcatgtgtggtgatgatgaacagtctacacagatggctg

SEQ ID NO: 620931 - DNA, 50 bp, Homo sapiens
caaagacctgttcttaaaaaaaggtattgttgcagcatctggcagtgaga

SEQ ID NO: 620932 - DNA, 90 bp, Homo sapiens
cctgaggcatgagaagtcccgcaagtttctgcttagcaatgtcctcactgagcaagaaccctggctacatcaaacttcgcaagattcgag

SEQ ID NO: 620933 - DNA, 51 bp, Homo sapiens
atactgacctgtaaatcatcctttaggttcggctttccagtttggcagcag

SEQ ID NO: 620934 - DNA, 100 bp, Homo sapiens
agagctaattacaactttcggggcatgtacaatcagaggtgctgctacccccgtatgatgatgccactgtgaatggtgctgccaaggagccaccgccacc

SEQ ID NO: 620935 - DNA, 101 bp, Homo sapiens
ggtcgatgggaaaagattgcccacgaattgggtcgatctgtgacagatgtatttataacagcaatgatgtagcagtatcgtttccaaatgtagtatctggc

SEQ ID NO: 620936 - DNA, 99 bp, Homo sapiens
gcgattcgtgttcgtgagggccttttctgccatccgggtgacctgcataggttcctgcggggtctccaacaaggctaatgacacagcgtgggtagtgga

SEQ ID NO: 620937 - DNA, 100 bp, Homo sapiens
gctgggaagtgttaaagaagattacaacagactgagaagagaagtggagcaccaggagactgcctatgtgaccttcagtgactgtaagggaaacgacaag

SEQ ID NO: 620938 - DNA, 75 bp, Homo sapiens
gaaaaacaaagttccagagctacaaaagtttttccaggatgtatatggaatgttactcaatttagaaaaacatca

SEQ ID NO: 620939 - DNA, 74 bp, Homo sapiens
cgtcctgaacctgttatcacctggagacaccttacaccaactgcctcttcagaagaaacttgactccttcccag

SEQ ID NO: 620940 - DNA, 83 bp, Homo sapiens
gtcactgtggagtacatcacccgctacatcgccagtctgaagcagtgccagaacagataaagcccagtgtaagccagcctcag

SEQ ID NO: 620941 - DNA, 75 bp, Homo sapiens
ggttacatacagcttacatcttgcatcctcaagcggtcgttgaggacttccacatggagattggcacaggaccag

SEQ ID NO: 620942 - DNA, 75 bp, Homo sapiens
cagagtcctcttgttggagttacatctactcctggaacagataaacttctgcactggaggggcctctcctcccct

SEQ ID NO: 620943 - DNA, 75 bp, Homo sapiens
ctttgatgactacccacctagaagaggtgatgatagctttggagacacatctggaatcaagagacccatggcatc

SEQ ID NO: 620944 - DNA, 90 bp, Homo sapiens
aaagaaataattgaacaaatggagatgaaattggatactggcattgataggtatatgagtagaccagtgatgagtggcccaggactctat

SEQ ID NO: 620945 - DNA, 49 bp, Homo sapiens
cgcacgagcaccagcctagagccagacttaaatgggggcccagatgacc

SEQ ID NO: 620946 - DNA, 89 bp, Homo sapiens
ggtggcaggtgactgcttggatgagaagcagtgtaagcagtgtgcaaacaagatcctcaccaagacaggggagctgcccaggcagccca

SEQ ID NO: 620947 - DNA, 90 bp, Homo sapiens
gctggaggaagtactcagtggtcttaccctttccccagagcaaggaaaacgggccttactatacatcatatcccccatcaccagatttgt

SEQ ID NO: 620948 - DNA, 75 bp, Homo sapiens
caagaatatgctgccaaaattatcaacaccaaaaagctttctgctagggcttcgatgtttttgaagcaggcattt

SEQ ID NO: 620949 - DNA, 98 bp, Homo sapiens
ggccagagcgtggcagaaggcagagaagtgaacgccccagcaaaagggaagaaggagaaagggccaacccctgaagaagcaatacagaaactgaagga

SEQ ID NO: 620950 - DNA, 50 bp, Homo sapiens
gaagagatgctggcgtgaaggggctgtggaaaatctctgttctcacaaag

SEQ ID NO: 620951 - DNA, 75 bp, Homo sapiens
gcgcaactgtctgatctcagttcatgggcacagtcttttgctgagcgcctgcgcctgggaattgcagtgattcat

SEQ ID NO: 620952 - DNA, 82 bp, Homo sapiens
tggatttgagccgccgcattttttaaccctagatctcgaatcctgttacacctgggatttaggcactttcaatctgaaaaaa

SEQ ID NO: 620953 - DNA, 75 bp, Homo sapiens
tgttgattaactggacaaattcaggaattacatgaacgacagccttcgcaccgacgtcttcgtgcggttccagcc

SEQ ID NO: 620954 - DNA, 75 bp, Homo sapiens
agaagaaacaaaagtgccaccgaagaggtgagaacaaaatcatggtaatgaaagcatgggatgctcatgtgacag

SEQ ID NO: 620955 - DNA, 89 bp, Homo sapiens
atttggagtagtttcaaatacaagattgattgctgctgctacttctgtatgcaatacagtacggtactgaggataacagtactgcagta

SEQ ID NO: 620956 - DNA, 97 bp, Homo sapiens
tgaaggtgcagtgacttgcatatagtaggtgcttggtgtcatggagaaactccagctgggcccagagattctgcagcgggaaaatccaaggcttatt

SEQ ID NO: 620957 - DNA, 98 bp, Homo sapiens
gtcgaagcgagggtctgaagttcacgactactagaaggggaggggagtggaaaggctctcagtgaaaaagactgccactctccgcccctacctgagtg

SEQ ID NO: 620958 - DNA, 100 bp, Homo sapiens
agatatcttgaaaagctgccagaaaggatcaactcactatcctgaaggtccattctcccaagaagaggggacagaaagacagatctatttgtaagaaagg

SEQ ID NO: 620959 - DNA, 100 bp, Homo sapiens
agctggcgcctctgcagtggggaggacttaaatgcattggacagtggacaaagaccatttaaatggattacaaaaagcagacttcaccaggcagagcggc

SEQ ID NO: 620960 - DNA, 80 bp, Homo sapiens
acttaggccactgaactgtcaggcgggaaaacaggggaatcccggaggcaagacacttgaggagaggcgctccagcctgg

SEQ ID NO: 620961 - DNA, 89 bp, Homo sapiens
gtcaccactggacctccaaggaagccacgtgcagacatctacaaccttcgatctcctgacgaggtaacttctttcaaaatattggttcc

SEQ ID NO: 620962 - DNA, 80 bp, Homo sapiens
tgattctccagaatttctcctcataaaaaagacaatgcagatcttcgtgaagactctgactggtaagaccatcaccctcg

SEQ ID NO: 620963 - DNA, 83 bp, Homo sapiens
catgaatccagggcctaacatgggacagccgcaaccaggaatgacttctaatctatgggagtcgtcagattatactggagaaa

SEQ ID NO: 620964 - DNA, 100 bp, Homo sapiens
cctggaatgatgtcgtcagtaatgcctggaatgatgatgtctcatatgtctcaggcttccatgcagcctgccttaccgggtatatttacttctggcacat

SEQ ID NO: 620965 - DNA, 100 bp, Homo sapiens
ctgttcatcggattctgttgggagatgtgcagactattccaatacagattatagacaaccactcagctcttagttgctccttgagggcaggacagttctt

SEQ ID NO: 620966 - DNA, 80 bp, Homo sapiens
ccagtagaggaggaggtgaacaaggaggaggtgagaagccctaccactgcaactgggacggctgcggctggaagtttgcg

SEQ ID NO: 620967 - DNA, 101 bp, Homo sapiens
ttatttcagaagccccgaagggaggcagtgctttgaaaaccccagcagagtttaaaatattcagcttagaccatgctcagcctccaagcagccttgtcatc

SEQ ID NO: 620968 - DNA, 75 bp, Homo sapiens
agtaaaaacaggctggtgcagacagcagagctcacaaagatacatcagcccacagcaaggcgggctccagcagcc

SEQ ID NO: 620969 - DNA, 83 bp, Homo sapiens
cccaaatgtctgactctgactctcggactgagaaacgcaagcttcggaaccaaaaagaagcttcccagagccggggccaggag

SEQ ID NO: 620970 - DNA, 90 bp, Homo sapiens
tggttcagcacagagtggggacccagcaggtggctgaggagtgctcccaccccagcccgttgctgcccagctattggaacactgtataac

SEQ ID NO: 620971 - DNA, 80 bp, Homo sapiens
aggagggagaagacgaggatgatgcggaaattaaccccaagacattcacggcatggtgtaactcccacctccggaaggcg

SEQ ID NO: 620972 - DNA, 100 bp, Homo sapiens
catcctcctggcctacctggcaggactggactcgggccatatccgtggtgccgtcaacatgcctttcatggacttcctgactgaggatggcttcgagaag

SEQ ID NO: 620973 - DNA, 90 bp, Homo sapiens
ttgccattcagcccaatacaactggcaaacaactttttgaccagggaggagagagcgatggcttttttcacccagaaggccagccccagc

SEQ ID NO: 620974 - DNA, 100 bp, Homo sapiens
tcttctttaacttatcgtggaaataaaacagctgttttgcagattggactacaagtgctttctcctgctcaagacagccacacgaacacggatctccccc

SEQ ID NO: 620975 - DNA, 88 bp, Homo sapiens
gagaacaagccaggaaaaccccgaaaacgcaagaagcgtacgctgaccggaaaggagattgagattgacattgaacctacagacaagg

SEQ ID NO: 620976 - DNA, 90 bp, Homo sapiens
gaaaggctcaacgagaacaagctatcagctgcgttcctttgcctgcaacaggggtcaagatgagttttgcctgacttctttgatgtcctg

SEQ ID NO: 620977 - DNA, 74 bp, Homo sapiens
ttcaccatcaacatcgccctgaaccgagtcggggtggattacgagggcggcaccttcctacttctgcccagcca

SEQ ID NO: 620978 - DNA, 75 bp, Homo sapiens
cggccggagcgggcggctgagacaaaggcgacgcacatatagaactggatgcccttgtggtacatctcaaggctg

SEQ ID NO: 620979 - DNA, 74 bp, Homo sapiens
gatagctccaaactgggatatgtaatgtctcgctgggaagagtatatcagcaaagtgaaaaataaaggtagtac

SEQ ID NO: 620980 - DNA, 82 bp, Homo sapiens
gaataaagaagtggagcgtgtcctgaaggagttccaccaggccgggaagcccatcgggtgaccctggcaaagatgagagtgc

SEQ ID NO: 620981 - DNA, 73 bp, Homo sapiens
cctgaaggccctagccttcgtgtactccgcggcgagtcctttgcacatgttggcaacacacgcatccgcatcg

SEQ ID NO: 620982 - DNA, 80 bp, Homo sapiens
ctctgggagcttctcagccattttccacagatcagagagcgcctgctcgctgtgcccccgggttatgacgacccccaata

SEQ ID NO: 620983 - DNA, 88 bp, Homo sapiens
ggagaaagatttggccctcatgcagatctgaaactcagcaccgaggctctgctccccactctgagagtgatctaccagagcaggaaga

SEQ ID NO: 620984 - DNA, 75 bp, Homo sapiens
gagtacgaacacgagcgagacatgcactgatctcgaggacctggaagaagcagaggagccagacatggaggaaga

SEQ ID NO: 620985 - DNA, 100 bp, Homo sapiens
acagacacccaacattcgggtcagcagtggcactcagaggaaaagggatcatagacggtatttctatgtaaacgaacagtcgggcgagtctcagtgggag

SEQ ID NO: 620986 - DNA, 80 bp, Homo sapiens
gtcaggacaattccatttggggaccagagatggacggtcactcagcctatggaggagtgggaatagctttgcgaaaaatg

SEQ ID NO: 620987 - DNA, 147 bp, Homo sapiens
ctctgaaagggccccggccagcgtccctgagacgccaacggcagtcactgccccccattccagctcctgggtgtcccgcatgagatgtctgcagaatgagacttacagtgcgctgagccctggcaaaagtgaggacgttgtgcttcg

SEQ ID NO: 620988 - DNA, 90 bp, Homo sapiens
aagcagaacccatttcctcccctgtccacggtgtgttgaaagtacacggagccccgaggacgggtcaaaatgcagatcttcgtgaaaacc

SEQ ID NO: 620989 - DNA, 75 bp, Homo sapiens
tcgcagtggtcgcttcttctccttgtgaaggagaacgacctgctcagaatgagaagaggaaggagaaaaacataa

SEQ ID NO: 620990 - DNA, 51 bp, Homo sapiens
ttccagtctgatccttttgttggcagtgcaggtgatggtcctaccagtgtg

SEQ ID NO: 620991 - DNA, 100 bp, Homo sapiens
gggaattatattggaccagagcttgattctgatgaagatgatgatgaattgggtagagagaccaaagatcttgatgagttctctgtggacattgactcgg

SEQ ID NO: 620992 - DNA, 88 bp, Homo sapiens
caacaacattggcgatgcctcctcgctcatccgagccaccattggcatctgcaggaaccacaccacactttggaggccatgctgcggc

SEQ ID NO: 620993 - DNA, 100 bp, Homo sapiens
atttctcctattgaggagtcaacttctgcagaatcagaagatttggcagtacatttatatccaggagctgttactattcaaggtgttctcaggagaaaaa

SEQ ID NO: 620994 - DNA, 99 bp, Homo sapiens
tgtcttcggtggactccttcggcagtccacccaccgccgccgcctcccaggtacatgtcccagagcaagcacacggaggcccgggagctcatgtactcg

SEQ ID NO: 620995 - DNA, 113 bp, Homo sapiens
ctcaatatctgtcttcggtggactccttcggcagtccacccaccgccgccgcctcccaggaggctactcacagtcgaactacaactccccggggtccggccagaactacagtg

SEQ ID NO: 620996 - DNA, 90 bp, Homo sapiens
agaagaagctggaggccggcaaagccaagggggtcctgatgacaacttaattgaaggtggaggaacaaaatttgtctgcaaacctggagc

SEQ ID NO: 620997 - DNA, 99 bp, Homo sapiens
gccagcattagcctggctcaatatctaatcaatgtcagactcttcactgcctgaggacattccggtttttactgctgcagcagctgctaccccagttcc

SEQ ID NO: 620998 - DNA, 80 bp, Homo sapiens
ctccttcccagccgcgcggcttcctccagacctctcggcgcggccccgtcgcagaatttagtctcaaaggaaacttcaac

SEQ ID NO: 620999 - DNA, 100 bp, Homo sapiens
ccgagcaccgggccctctgcgacctggggccctgggtgaagtgctccgccgcccttgcctccagaaatcttcccaaggctgcagacaccgacggatttgc

SEQ ID NO: 621000 - DNA, 116 bp, Homo sapiens
ctcgctgttcgcggtgacggtggcgccgcccggggcgaggcagggccagcagcaggcgggaggattttttatcaagcagaaatgcatcgaacaacgagaatcaagatcactgagct

SEQ ID NO: 621001 - DNA, 97 bp, Homo sapiens
gtccgggacgcggagcccggagctggggcgacgaggcgattgcgggggcctgggctaggtatttcagtgtctgtagacaagatggaatcatctccat

SEQ ID NO: 621002 - DNA, 80 bp, Homo sapiens
caccccgccagctccagagccacgtacgagcagcccgacggccatggaggctgaagagacgatggaatgccttcaggagt

SEQ ID NO: 621003 - DNA, 90 bp, Homo sapiens
gccaagttcaatgcctcacagctgatcacccagcgggcccagcacctgaactcctggggggaccgtcagtcttcctcttccccccaaaac

SEQ ID NO: 621004 - DNA, 100 bp, Homo sapiens
ctcggtctgggcttctctgaggcggcgagagatggtcaggtctggagctcgaccgggccaggctggattctagtgacatttataacgaattgaaagaaac

SEQ ID NO: 621005 - DNA, 99 bp, Homo sapiens
gtcgggggtgtaggttatggggtttctgatgaagaattgaaaagaagagtagctgaggagctggcattggagcaagccaagaaagaatccgaagatcag

SEQ ID NO: 621006 - DNA, 83 bp, Homo sapiens
caactgggcaaaccccgcttccagcagcgacattcacgagagagacgaataggacacggtcatccgagtgccgaggcgcggaa

SEQ ID NO: 621007 - DNA, 82 bp, Homo sapiens
gaagccgaaaaaggcagcagcgaaggaaaactacatctcagacccaactatcttatggagggcttatccccataacctgatg

SEQ ID NO: 621008 - DNA, 90 bp, Homo sapiens
cccccattgaggatacctaatcagggcggcgactggcggcgcgatggacctgaccgggctcctgctggacgaagaaggcaccttctccct

SEQ ID NO: 621009 - DNA, 83 bp, Homo sapiens
cttcagaaagtgaacttggcattttagatctaattcaatgttttacctcaatcatatatccacacaagtgcttctcttgacat

SEQ ID NO: 621010 - DNA, 74 bp, Homo sapiens
caaaatcacagtggatgggccccgagaacctcgaacataagcttaaatcgtctcagaaggacaaggtccgccag

SEQ ID NO: 621011 - DNA, 75 bp, Homo sapiens
tcaaccccattttccgccagaacctccgcattgcccttctgggtggccccacagagcaggtgttgccaatgctgc

SEQ ID NO: 621012 - DNA, 87 bp, Homo sapiens
ggctacttgccattctcacaggactaatagctggcaaatttctgttccatcagcgtttgtttggcatagaatgtcaagctaaccagg

SEQ ID NO: 621013 - DNA, 100 bp, Homo sapiens
ccctcttctcctccaacccagaactggacaatctggttgcagccccacccacgtcacggtgtacagcgagtatggcgtggacgtctttgatgtgcgcacc

SEQ ID NO: 621014 - DNA, 50 bp, Homo sapiens
ctgaatttgaacactttcagaggagctcttgttcagcttctggaatttct

SEQ ID NO: 621015 - DNA, 98 bp, Homo sapiens
tgatcccatctcaggagcacctgaatggttgggctggtgtacatgtttaacctcatcgtgggcacgggcgcactcaccatgcccaaggcattcgccac

SEQ ID NO: 621016 - DNA, 90 bp, Homo sapiens
ctcatctggaattttgccgatttcatgactaaccagtagatttaccgcattgtttctcagaagcaaatgtcagacagacgcgaaaatgac

SEQ ID NO: 621017 - DNA, 92 bp, Homo sapiens
ctccgcgtcccgctcgctgggagagagatgccttcaattaagttgcagagttctgatggagagatatttgaagttgatgtggaaattgccaa

SEQ ID NO: 621018 - DNA, 118 bp, Homo sapiens
agtgaagaacatcgctgatctgcggcagaatttggaggaaaccatgtccagtttaaggggaactcaggttacacacaggccgggccgggatcagatgggaagtggaacctcgtcatga

SEQ ID NO: 621019 - DNA, 100 bp, Homo sapiens
agtcagtaatactgaatttgagaagtttgtgaactcaactggctatttgacagaggcccgaaggagaaccaccactcagatggaattgctgtatgcagat

SEQ ID NO: 621020 - DNA, 82 bp, Homo sapiens
acttcatccggtcaccatctacctattcttcaaatgctattgtggacgatgaaaggctctctgcagaggagatggatgagag

SEQ ID NO: 621021 - DNA, 75 bp, Homo sapiens
gcgggacatctccagcaccctcatcgccctggccgacaagcacgcaacggctggctgtcggcaattggattcttc

SEQ ID NO: 621022 - DNA, 101 bp, Homo sapiens
cgtcggcggcgccctgcaccgcgcctcgcaaacaaagaagtttgtcatcctgatattggtggcaagatcataatgtgtcctcagtgtgataggctttgtcc

SEQ ID NO: 621023 - DNA, 75 bp, Homo sapiens
tcacctgctcccaaaccttctgagtctccccaggacagtgctatcacccgggatattaaccgaacattcccagcc

SEQ ID NO: 621024 - DNA, 75 bp, Homo sapiens
cagatatagaacatttcttttatcacacttttaatctagacaacgagcaaccagattatgatatggattcagaag

SEQ ID NO: 621025 - DNA, 100 bp, Homo sapiens
accctgagccctgggacctctgaagtgaacactgcagggccatttgaatgttgtaccatctttgggtaggcagacttccctgacgacatcagtgataccc

SEQ ID NO: 621026 - DNA, 82 bp, Homo sapiens
atgctggcgatgaagtgattcaagttaatcatcagactgtgtggttggaataaaaacagggttgaatgagttccagaaagca

SEQ ID NO: 621027 - DNA, 75 bp, Homo sapiens
attgataattctcaaggattctacgtatatatttttgccatcatggatcagtttggagatatattagaaggtgaa

SEQ ID NO: 621028 - DNA, 75 bp, Homo sapiens
ctgtatgctatgaaggtgctgaagaaggcaacgctgaaagatgtatcctccactcctcgctggccaccatcctgc

SEQ ID NO: 621029 - DNA, 100 bp, Homo sapiens
caacaaggacaacaatgagatcgtggacaagatcatgggcaaaggacagatccagaaagttcaggagccctggaaaggagaaggaataagacggcaggag

SEQ ID NO: 621030 - DNA, 90 bp, Homo sapiens
gggtactcggaaggcgcgggcaggagcctggcgaggatgcaccttcccctgccttggaaagaaagatgatgcacaatcagtagaaactct

SEQ ID NO: 621031 - DNA, 50 bp, Homo sapiens
cgagaatctttaggacataccaggtgctaatgtctcttcatgaaatgttc

SEQ ID NO: 621032 - DNA, 82 bp, Homo sapiens
agtgcaaggcactgcaggaggagaaccgcgacctgcgcaaagccagcgtgaccatcatggtaaggttgaagttacaaaagaa

SEQ ID NO: 621033 - DNA, 95 bp, Homo sapiens
gccgctcctaagcctgcacagccgcggcggcagcagcagtgagaggtgtggaaacaggaagagaactagaactggaagtaaagcattgaagatgt

SEQ ID NO: 621034 - DNA, 100 bp, Homo sapiens
ctacactcaggcaccctggtgcccagccgggaactccccatcgcgttttgccagcgataatacgcctcaggtgcttccaatagtcctggtcagcctaatt

SEQ ID NO: 621035 - DNA, 100 bp, Homo sapiens
aggacaaccacaaggcagacatcagctcctggttcaacgaggccattgacttcatagtggtcaagcagaggatgcagatgtacaactcaccataccaccg

SEQ ID NO: 621036 - DNA, 75 bp, Homo sapiens
tgaatgtaacaagaggcataaaacagttctcactgaactacagatgtccggtctgtgctacgacagcaaaatgtt

SEQ ID NO: 621037 - DNA, 98 bp, Homo sapiens
gggaacttgtgagcctgcggtgaaaggcaagtgaaaattacatcctgtgtagtgataccaggtcacagctcaaatttcttgaaaagctggatcaattg

SEQ ID NO: 621038 - DNA, 100 bp, Homo sapiens
gaaaaaacaacgtacatggatcctactggtaaaactaggaggagatgttaaagtaacccatcttgcaggacgacattgaagattggtcttctgttgatct

SEQ ID NO: 621039 - DNA, 83 bp, Homo sapiens
agactttttggacgatgtgcggcggatgaacaagcggcagtgttacctggaatgtcagagagctgaaagcagtcatattttgg

SEQ ID NO: 621040 - DNA, 100 bp, Homo sapiens
cgacgcggaggcagagaagggaacgcccggcccagccccgattatcgagattgcagcctgtcactccacacacacgtctgcggccaagacgcagggtggg

SEQ ID NO: 621041 - DNA, 82 bp, Homo sapiens
tcccgggtggcttacagacgctgccagcatcgccgccgccagagagcgcctgctcgctgtgcccccgggttatgacgacccc

SEQ ID NO: 621042 - DNA, 88 bp, Homo sapiens
ccttcagcgcgagccaccgattgtacagtgttctgtggctgtggagatgagagcaggatcccagctgggacctggatatcagcatcac

SEQ ID NO: 621043 - DNA, 76 bp, Homo sapiens
tggaaaggctctcagtgaaaaagctgtgaggtggagcagtgggactcggatgagcccatccctgccaaggagctag

SEQ ID NO: 621044 - DNA, 100 bp, Homo sapiens
ggaagacaaacataaagatgaagtgcttaattcaaggtcacacaatgtcggggatggacctccagatttccttactgagtttcaagaagtttttaaccga

SEQ ID NO: 621045 - DNA, 74 bp, Homo sapiens
cctgcatggagtcttgtgaaatcgcgtggactgcaacacccagcagcgcgttcacaagattcctttgcagttca

SEQ ID NO: 621046 - DNA, 90 bp, Homo sapiens
gtggaagaagaagaggaaatcctcttgaactcttacaccacaccttcaaaggtgatcgaggagttctacaaccagacatgggtccaccgc

SEQ ID NO: 621047 - DNA, 98 bp, Homo sapiens
caccaccatctccatcacccaccaacaacaccacaataatccacagccaagttttctggatatgccgcagaaggatccgtgccagaagcaagcctgtg

SEQ ID NO: 621048 - DNA, 82 bp, Homo sapiens
ttgcccagctatgagagacagagccaggatttgaaaccaggatgaagagactcggcacagccttgagtgcatccaggccaat

SEQ ID NO: 621049 - DNA, 59 bp, Homo sapiens
gcaatgcttgaggctccttacaagaaggcctacacaagtgaaatggcagctgatggtag

SEQ ID NO: 621050 - DNA, 78 bp, Homo sapiens
tctggcggccatggtgttgctgctgtactccttctccggctatgctaacagagattgagcacaaggttgcctttctgt

SEQ ID NO: 621051 - DNA, 100 bp, Homo sapiens
tatttgcggatagctccaaactgggatatgtggcaggtgtcacagctttagcctgtggaatgatagcagtagggtcctgcaatggagatgtaacttccac

SEQ ID NO: 621052 - DNA, 76 bp, Homo sapiens
gtaacttatctggaagggaaagcacatgccttcacgggcagggttaatttggagtggcccctggagtcagtttcct

SEQ ID NO: 621053 - DNA, 100 bp, Homo sapiens
agcacctcgaattagtctggctgagatgcttgaagaccttcatatttcccaagatgccactggtgaagaagggtctgagtgcccggaccgcttggctatg

SEQ ID NO: 621054 - DNA, 75 bp, Homo sapiens
gagagagcttcccagaacaagcatcgttggcttcacagtatgactgatgatcctccaacaacaaaaccacttact

SEQ ID NO: 621055 - DNA, 100 bp, Homo sapiens
cacacaggatgtcaagcatgtggtttggcacccaagtcaggagagagaacatatgatgagctgttactgggagcagcccaggcccatggcctcacgccac

SEQ ID NO: 621056 - DNA, 83 bp, Homo sapiens
tccggcagcctcacctcaccatttctagcttgttgaaacccaaaactagttgattgtacacagcactatgaactctgctccgg

SEQ ID NO: 621057 - DNA, 50 bp, Homo sapiens
cgtcaatcagagcgtcctgtgcgcatttgacattgtgcagcaaagaaatg

SEQ ID NO: 621058 - DNA, 100 bp, Homo sapiens
gcgggcgcaatgaatccgcggcaggaactccatgctccactgactgttgttgcagatgggcttttctccaagttcaggaaaagcctggtctccaataaag

SEQ ID NO: 621059 - DNA, 75 bp, Homo sapiens
tagaacttgaagcaccactcaaaatatgtggatcaaagttctgatcgtaccagtctttcttcagtgggagcccag

SEQ ID NO: 621060 - DNA, 83 bp, Homo sapiens
gccacccgggagtttgaggaggttgtgactttcttgtctgcacagaaagtcccagtacaacttccattgctgagaaaatcctc

SEQ ID NO: 621061 - DNA, 100 bp, Homo sapiens
tcttgaaaccaatagtggaactgaaaagatctcaaaatctggacttgaaaagagtcttcctaatattctcaccgatgatcgatttaaagttatgtttgag

SEQ ID NO: 621062 - DNA, 90 bp, Homo sapiens
ctgaatcccagtctggaaagggtagtaaaagaggcggttgtcgagatgtccacagaaggaggatttggtggtactagcagcagtgatgcc

SEQ ID NO: 621063 - DNA, 75 bp, Homo sapiens
aaaaagactgcaatggctgctgctaagatacaaactggactctcaggacaaaacgacaccagccaaaccagcagc

SEQ ID NO: 621064 - DNA, 83 bp, Homo sapiens
cgtcatcctgctgctgaagatctggaagacgcgctcctgcgccgggccatgtttatgagtggactaagtgaaagcaaacaaac

SEQ ID NO: 621065 - DNA, 144 bp, Homo sapiens
gctgtgattgagaaggaatgcagcgcgctcggaggcctcttccagaccatcatcagcgacatgaagggtgttgaaagcagcaggggcctagaagacattaaaccgataccacagaaatacaaaggatcattagagactattatg

SEQ ID NO: 621066 - DNA, 101 bp, Homo sapiens
gaggctccgggcgcggggaagtcatgctcgcttcacggaggcaatagctagccgtgattctaccagaaaggaatgaagaacagaaccttcaggaattgagt

SEQ ID NO: 621067 - DNA, 100 bp, Homo sapiens
gaagaactgaccagagctgatcccgagcagcgtcatgtacccctggccgcaagcttcttatcattgggaccactagccgcaaagatgtccttcaggagat

SEQ ID NO: 621068 - DNA, 75 bp, Homo sapiens
atcagacacatgatccgcaagaacaagtaccgccccgacctgcgcatgacgcaaacatgcagatctttgtgaaga

SEQ ID NO: 621069 - DNA, 99 bp, Homo sapiens
gaggaagccgactgctgcctggtctgcaaagaagtcctttcaagtctctaggactggactcttcctaagcaagtccgccattgctccagtcctcctgga

SEQ ID NO: 621070 - DNA, 100 bp, Homo sapiens
gtcggaccagcttttcaaacaatacagccactatcgaaaacgatcggcatcccggggtcgctctggaagtcggtctagaagtcgctcaccctcagacaaa

SEQ ID NO: 621071 - DNA, 82 bp, Homo sapiens
gagcttagccattggcaacgagttaaatatcacccacggtatatgaatgacctaaaggtacaaataaagacggagagagaac

SEQ ID NO: 621072 - DNA, 100 bp, Homo sapiens
gcaactctttaaaacagtattgccaagagaaacagctctaagcgaaagacatgaggcctcagcctgaaatgaggttgttttgaggtcatctgatttctga

SEQ ID NO: 621073 - DNA, 100 bp, Homo sapiens
cctcctgcaacacctgcggcctcactgggacccccaggaggtgaccctgcagaattttctcccaaactggttggcttgactggcacgagagaagaggtcg

SEQ ID NO: 621074 - DNA, 100 bp, Homo sapiens
tttggacattgagaggtataggctggctgtaggagtcgggacttccaatagtagtcagacattatcatcctgtcatactatggagccatgtacatcagat

SEQ ID NO: 621075 - DNA, 101 bp, Homo sapiens
tacgtcgccatcttggatccgcgggacaagaaaattcatgcggtatgtcgagagtaccaacgtggcaattgcaaccgaggagaaaatgattgtcggtttgc

SEQ ID NO: 621076 - DNA, 51 bp, Homo sapiens
atttaaaacttcgccagaatttgctcagcagtggatttctaaatgtgctag

SEQ ID NO: 621077 - DNA, 101 bp, Homo sapiens
ttggatgatgcattagattcctctagtattctctatgctagaaaggtacctagtcgatagtcgctggttcaaacagtggaaaaaatatgttggctttgaca

SEQ ID NO: 621078 - DNA, 100 bp, Homo sapiens
agagacgagcagccttcagggagcgtggagacaggttttgtaatcaacccccctcagcatggtcctctcatcccccgactggtaacgaccaagcctaccg

SEQ ID NO: 621079 - DNA, 83 bp, Homo sapiens
caagagcttctgcctgttcagaagcattaccaacttgatgatcaagagggcatttcccttacgaaggatgaatccaaaaggcc

SEQ ID NO: 621080 - DNA, 82 bp, Homo sapiens
cgagcgcaaggacagcgcgaggtccgcgcagcccagcgcagccatcacaggaagtcctggagaacctgaaggaccgctggta

SEQ ID NO: 621081 - DNA, 102 bp, Homo sapiens
agagccgggagttcaagaagaacactccagaggtgtcatggagaaactccagctgggcccagagattctgcagcgggaaaatccaaggcttatttatgccag

SEQ ID NO: 621082 - DNA, 50 bp, Homo sapiens
gaatggcagatggcttatgaaccacaggccataggaaaaggatacagagt

SEQ ID NO: 621083 - DNA, 83 bp, Homo sapiens
ggaggggtgcctctgatcaaagcccccaagagaggaagaggatcacctagcccgggtagaagaggcaatcacccgtatgcttg

SEQ ID NO: 621084 - DNA, 100 bp, Homo sapiens
gaggaattctatgatgcccctgaagatgtgcacctagggggcggctaccccgtggggtattatacctgaagaaccttagccctcgggtgactgaaagaga

SEQ ID NO: 621085 - DNA, 98 bp, Homo sapiens
attaaaatcatagagaatgcagaaaatgagtatcagggttcccttctggagaagagtcaccgggtttggttctgtttcccctttctgctcgacacttc

SEQ ID NO: 621086 - DNA, 82 bp, Homo sapiens
tgggacccaccgctgccctcagctccgagtccagggcgaggaatactcccccagttgcaagaggcgcaggaccgtggaagac

SEQ ID NO: 621087 - DNA, 98 bp, Homo sapiens
caaggacatcgtcaagtggctggcaagcaactcggggaggttaaagacctatcaggatcaagaaatgtggtggttttgtagcttggaatagtttgggg

SEQ ID NO: 621088 - DNA, 98 bp, Homo sapiens
cgggactgagctgttgagttagagccaacatgagtgaggtactccaaagattcaggtttactcacgtcatccagcagagaatggaaagtcaaatttcc

SEQ ID NO: 621089 - DNA, 100 bp, Homo sapiens
caaatgccttctcatccccacatagttgtggcagcactgcctgaaggtatgagaccagattctaatctttatggttttccatgggaattggtgatatgtg

SEQ ID NO: 621090 - DNA, 74 bp, Homo sapiens
acgagcgtgagaaggcgctgcgcaggcaggcggaggaggtctatgttaacaatgaatgggcaaccagtgttggg

SEQ ID NO: 621091 - DNA, 83 bp, Homo sapiens
ctccgggcacacccggctccccggacgcctcgagcatgaataatctttcatttagtgagctatgttgcctcttctgctgtcca

SEQ ID NO: 621092 - DNA, 98 bp, Homo sapiens
ggtggtcctccatgtgctctgtgttctgtggacaatcacaatgggaatccaaggagggtctgtcctgttcgggctgctgctcgtcctggctgtcttct

SEQ ID NO: 621093 - DNA, 100 bp, Homo sapiens
cgccgagagccagagagatgtcggatttcgacagtaacccgtttgccgacccggatctcaacaatcccttcaaggactgactgcattgcacagatgatgg

SEQ ID NO: 621094 - DNA, 100 bp, Homo sapiens
cttatatttcaagttaaggtccaaaaaaactccagctgtgaaagcaacataaatgggcagaagataagattattggactgactactagtcctctacggga

SEQ ID NO: 621095 - DNA, 100 bp, Homo sapiens
gaaaacttcagagacctaagctttttccagagaagagaagctttactggtgttccagccctaaggttaacattcaagatggtacatgctgaagccttttc

SEQ ID NO: 621096 - DNA, 119 bp, Homo sapiens
cgctgccgaagcatgaagaaggggtaaggcgtgagcccccaagatttcacgatctgagtgggacatacttttgaaggatgtgcaatgttcaatcataagtgtgacaaaaactgacaagc

SEQ ID NO: 621097 - DNA, 90 bp, Homo sapiens
acgaaaatctttcattggcaccccttactgttctttattggtgaaaacatgaatccagatggcatggttgctctattggactaccgtgag

SEQ ID NO: 621098 - DNA, 71 bp, Homo sapiens
tcattctttaccacattttaagccaggcaccacactgtaactcgaggcatcaccaaaggcgtgaaggagga

SEQ ID NO: 621099 - DNA, 88 bp, Homo sapiens
gctgccgtcgccgccgccaccatgcccaagagaaaggtgtggggcttcctatgcgcaggtgatgcggaccgtgggtatccatcccaca

SEQ ID NO: 621100 - DNA, 82 bp, Homo sapiens
ttcatctaccatggctcagccgggaactctgaacctcaataacgaggataaagctgaaggttcaaacaagtggtggaaggag

SEQ ID NO: 621101 - DNA, 101 bp, Homo sapiens
ctgtaaaaccagccttagactatttttcaaacaattgaggacgagacgcaggtgtcacgggccactcagggtgaacaggacaattacgagatgcatgtgcg

SEQ ID NO: 621102 - DNA, 75 bp, Homo sapiens
cggcgcggaccccgcgtgcgccttgctcgcccgcagccccgagaccgcagggggggccctcagcctcttggcctt

SEQ ID NO: 621103 - DNA, 78 bp, Homo sapiens
ggccctcattctgcacgacgatgaggtgacagtcacggcgtgaaaccttcaaccacctgacctcatggttagaggatg

SEQ ID NO: 621104 - DNA, 90 bp, Homo sapiens
tctcgctgcccgacgatgtccgcaggcgagttgaagtattgataacaccaaggaactctatcacaatttgaaaagataagcaaaagtttg

SEQ ID NO: 621105 - DNA, 75 bp, Homo sapiens
taggcctgatagactgattaaaccacagtgtgaagcctcagtttaggtcatctggtggttcagaacactcaacag

SEQ ID NO: 621106 - DNA, 75 bp, Homo sapiens
gagaagaagcagcgcaagtttgaccaggggcacgttccgctttgaaagacctgatggctcccactttgatgttcg

SEQ ID NO: 621107 - DNA, 100 bp, Homo sapiens
caatgaggcagatcagattccgatttgacgggcaaccaatcaatgaaacagacacacctgcacagttggcaacaccatcatgacatcacaacctgttccc

SEQ ID NO: 621108 - DNA, 100 bp, Homo sapiens
tttcctgcgagccagcctgagcgcaacacttctccgagccagcgagccagcgagccgccgacccgccgagcaaaatgacacatttgccagcaaagtggca

SEQ ID NO: 621109 - DNA, 100 bp, Homo sapiens
tcgagatttgctgctaggggaccaaggatggcaaaacgacgacagagagcacagtcagacgaactcgaaaaaatagaaaagcatggccgatcttccaaag

SEQ ID NO: 621110 - DNA, 82 bp, Homo sapiens
aagaaaaagaaatacgtgaattctggcacaattctcattcagattgtggatgcctcgtcagtcatcacttgggatttcgacg

SEQ ID NO: 621111 - DNA, 100 bp, Homo sapiens
ctctgctggagccaacctgaggcgctacaatgaagccacactatataagcaaattcaacacccaacagcttccttaatagcaaaggtagcaacagcccag

SEQ ID NO: 621112 - DNA, 97 bp, Homo sapiens
cttcgtgatgggttgcgccgtgggcatggcggccggggcgctcttcggcaccttttcctgtctcagattgcagtgagcatgctgacctaccccttcc

SEQ ID NO: 621113 - DNA, 83 bp, Homo sapiens
cctgcacagccgcggcggcagcagcagtgagagcccagggccttgctgccgccatgactgaggaatcagaggagacagtcctg

SEQ ID NO: 621114 - DNA, 101 bp, Homo sapiens
ccttaccttacaacctggcagaacttcagagacagaatggggaatgcatcagcaacccccacacccccctccagatcagccatggatgccaccaacaccag

SEQ ID NO: 621115 - DNA, 98 bp, Homo sapiens
ggagtgcgtgggggaccggctgttggcggagacagggcagggcattgttcatgcactgaccgacctcagcagccccggcatgacctcagggaacggaa

SEQ ID NO: 621116 - DNA, 100 bp, Homo sapiens
cggccgtacgcggtgctgcgagggcagaacctggctgataggaagatgtcttcaggaaatgctaaaattgggcaccctgcccccaacttcaaagccacag

SEQ ID NO: 621117 - DNA, 53 bp, Homo sapiens
acacagtgcgcggggagcgttcctacaggcctcccagacctgtaaccagcatg

SEQ ID NO: 621118 - DNA, 126 bp, Homo sapiens
aaaagtcaagaaagcattggctcaggtcttctgtgaggaatctggattgtcacctttgctgcaaaaaattacgggttttcctcctccaccaggcgctccacctccatctcttataccaacaataga

SEQ ID NO: 621119 - DNA, 75 bp, Homo sapiens
tcttgacaaccgaaccatcgtcatcacctctcatccaggaatggaagttggatacactttgtgacttgtacgaga

SEQ ID NO: 621120 - DNA, 82 bp, Homo sapiens
tctgcccagccagcattccctgcaggagccctacacagcctccgtgggtgaccagcgccatgtccagccaggtggtgggcat

SEQ ID NO: 621121 - DNA, 100 bp, Homo sapiens
cttctccactggttcctgggcaccgaaaggtgacatcactcaaaaaggatatgaaaagaaaagggcaaagctgcttgcacgttatataccgcttattcaa

SEQ ID NO: 621122 - DNA, 82 bp, Homo sapiens
cagaggggaggaggactctggagctgacagcgcgcacttcacccgcagttgcaggtattaatctctggagaagacacatcca

SEQ ID NO: 621123 - DNA, 100 bp, Homo sapiens
gtgattcagcctaatatctcaccatattttcagaagacagaaacaccatggagcctgttcataaggttaaaaatatcccatccattttcaacactccaga

SEQ ID NO: 621124 - DNA, 82 bp, Homo sapiens
gggttcttttatactcaaggcaaatgaacttcttcattcataattggacccttgaagacactcttcagtggttgatagagtt

SEQ ID NO: 621125 - DNA, 89 bp, Homo sapiens
gggagacgtcggttgagcggcggcgaacatgcgcttttgacacattggagggttacacatcattttggaatgactgtatatcatctgga

SEQ ID NO: 621126 - DNA, 98 bp, Homo sapiens
gtgccgttacggccatcacggcggccgcagtggcgtcctggagccctcctcagtgatgatgacagcctcttcatctatgactgcagtgctgcagaaaa

SEQ ID NO: 621127 - DNA, 75 bp, Homo sapiens
gtcattgttgcttccttcttcatattgaagaacttcaaccccacagtgctattcaagatctctggcagtggagga

SEQ ID NO: 621128 - DNA, 100 bp, Homo sapiens
aagaaacttgaggccatgttacaagccctggaacagctgctgacagagttggatgacttcctcaagattcttgaccaggagaacctgagcagcacagcac

SEQ ID NO: 621129 - DNA, 97 bp, Homo sapiens
ggattaaggaacagcgagctgtttgacccctttgacctcttcgatgtgcgagactttggaaaggacactggggttgggaaatcaagcatcgtgtgtc

SEQ ID NO: 621130 - DNA, 75 bp, Homo sapiens
gatgtctgcaggaaaacagtatttagaacatgcatctaagatcaatgagctgagcaatgttcctgttcctgtcat

SEQ ID NO: 621131 - DNA, 75 bp, Homo sapiens
gatcctgtttggcatgaatgccaccttctgcagaaacatggagggtcctgatgaagaagctgttgtggatcttgg

SEQ ID NO: 621132 - DNA, 76 bp, Homo sapiens
ctaagaatattaatggccagatctaggtctttagacaaactcaaccaattgtcaaccagaaaatgttggaagttcc

SEQ ID NO: 621133 - DNA, 98 bp, Homo sapiens
cagcggttccgagcggggcccaacatggcggagagagaggtggagtccggcccccgaaagaggatggcccactgcgtgaccttggttcagctgtccat

SEQ ID NO: 621134 - DNA, 97 bp, Homo sapiens
gaggatccgcatccagcgggggagcagctgcgggcgctggggttggaggcttgtctggaccagagcagccgctcttctaaaacattcaaaccaaaga

SEQ ID NO: 621135 - DNA, 82 bp, Homo sapiens
cctggagtgatggttggcgacataggaaaaaaactcgggcagaacggtctggataatgggtttggtgcacctcgatttggag

SEQ ID NO: 621136 - DNA, 87 bp, Homo sapiens
agaggcgagccctggtggaggaagaggtccagcctttcctgccaaggtggctggctgagcctaactgtgtcagaaggaatgtcaccg

SEQ ID NO: 621137 - DNA, 88 bp, Homo sapiens
ggcagacgcgagccgacctgcacgcggtgcagggctgggctgcccggagctggctgccggcagagtcttctacattcatgctgtagaa

SEQ ID NO: 621138 - DNA, 73 bp, Homo sapiens
tgtaacacaaacgttgttgaaaactttagagattataagcgccatggctatggctagtgttaaattgcttgcc

SEQ ID NO: 621139 - DNA, 100 bp, Homo sapiens
atggcctctcgtcggcagtgaagctcaagttgctactcgggacgctgcacctcccgcgccgcacggtggacgagaacatccagtcatggataaaaatgag

SEQ ID NO: 621140 - DNA, 133 bp, Homo sapiens
cgagcggccccgggacgggcagctagcgcgaccctgagccggcgcccgtggtccggccatggacgacctcgacaatgcagatcttcgtgaagactctgactggtaagaccatcaccctcgaggttgagcccag

SEQ ID NO: 621141 - DNA, 97 bp, Homo sapiens
cgccgtgcacatggctggaggagcgtctctccgccactgcgcacattttgcagcctgcaccggccaacgctgtgagtaccagagtgcccactggttc

SEQ ID NO: 621142 - DNA, 82 bp, Homo sapiens
taaaggatttaattacaaagatgcaactgcaaagagaagccgaggctttccttaaagtttcccatgtctcaatggactcctg

SEQ ID NO: 621143 - DNA, 129 bp, Homo sapiens
gaggaggagagacggaggaggccgagaccggagcgccgctcgccgcagacttacttccccggctcagcagggaaaggtgctggagaatctggtaaaagcaccattgtgaagcagatgaggatcctgcat

SEQ ID NO: 621144 - DNA, 75 bp, Homo sapiens
tttcagctttggctttgctctctcttctgccatctgataatagcacccctacggagaacgagctgaagttccact

SEQ ID NO: 621145 - DNA, 89 bp, Homo sapiens
gccaatgtgggatcgatgtttcaatattggaagcgctttgatttacagcagctgcagatgccatggacaatattaccaggcagaaccaa

SEQ ID NO: 621146 - DNA, 83 bp, Homo sapiens
gaatggcaatggcacaaagttctctcgatcagggcatacatctttcttcgacaaagggattttttatcaagcagaaatgcatc

SEQ ID NO: 621147 - DNA, 100 bp, Homo sapiens
caagatgatgacttcatcaggcagatactgtgagggctacaagcttctaaataagcacaaagcttcattacagtcttcagtacaacaatatgaagaaaaa

SEQ ID NO: 621148 - DNA, 80 bp, Homo sapiens
cttgtttgtgttgtgtgtggaaatggcgaactcggcaaatacaaacaccgtgccgcggcgagtcctttgcacatgttggc

SEQ ID NO: 621149 - DNA, 100 bp, Homo sapiens
ccagccacctcacagagaacctgcccaaagctgcatcagagctggggcaacaacccatgactgcatttgagacggagttggcttatctctcaggaaatag

SEQ ID NO: 621150 - DNA, 50 bp, Homo sapiens
gcagaatgtaccagggacacatgcaggaaaagctttcaaaggatattgat

SEQ ID NO: 621151 - DNA, 75 bp, Homo sapiens
ctgccagtataaatgcagtgacggtgaaaggtgtagcagtcactcggcctacacccacagcatcgaccttgtgaa

SEQ ID NO: 621152 - DNA, 75 bp, Homo sapiens
aagccgaccagaatgatagccagtccctggagctggtgcacaggttccagcggagctggagtttgttcagatcat

SEQ ID NO: 621153 - DNA, 97 bp, Homo sapiens
attagcagaagtcagccaaaatatagagaaactgcgagtagagacccagaaatttgaggtccgtttattaatggttagtcgaatggctaaaccagag

SEQ ID NO: 621154 - DNA, 101 bp, Homo sapiens
cgcctgcgactgcggggacagcaacgtgatgcgggagagcgggaaatctactttcttcaatgtgttaaccaatagtcaggcttcagcagaaaacttcccgt

SEQ ID NO: 621155 - DNA, 101 bp, Homo sapiens
attgaattgacactatttgtggaggattgatatgacagaaaggagccaaggatgactcaagtttttggccagacaatggctgccatccggaagaaactggt

SEQ ID NO: 621156 - DNA, 138 bp, Homo sapiens
ccgccctgttcgagctgtgcgggcgggcggtgagcgcccatatgggggttctggagagcggggtgtgggagtgtgaacatggctacgcctcttcattcccgtccatgccgagcccccgactgcagcattcaaagcccc

SEQ ID NO: 621157 - DNA, 90 bp, Homo sapiens
caccaaggatggctcggccacctctggagaagactaccaccctgtgtcagaagaacccagtgacttgattgtaaaaatttacagagcgga

SEQ ID NO: 621158 - DNA, 98 bp, Homo sapiens
ctgggagcgtcctctaacacattcagactacaagtccagacccaggagagcaaggcccagaaagagactgttggagcagaactactgagaaaaaccag

SEQ ID NO: 621159 - DNA, 90 bp, Homo sapiens
gggaagaagaggagtgccagcaggatgtcagtcttttgaggaaacagcctccacctcagatatatgacaagcagttggatgaaagagaac

SEQ ID NO: 621160 - DNA, 90 bp, Homo sapiens
gcttgctgcaggctctggggagtcgccatgatggagatggacacatggatcatttactgccaggctgtgaagataaaaattgccaaaaga

SEQ ID NO: 621161 - DNA, 96 bp, Homo sapiens
cttcgccgccaagctctggagcttcttcatttaccttctgcggaggcagatccgcacggtgcggcggcagcacatggagcgttgtaccagcttcct

SEQ ID NO: 621162 - DNA, 101 bp, Homo sapiens
aagccctgttggagactatgcaaaacaagtttatcagtgccttcttcatcccctacctcgtcttcctctttacctgtggcattcctgtcttccttctggag

SEQ ID NO: 621163 - DNA, 80 bp, Homo sapiens
ttttactattagcccatcaagaaatgaagaacgagattcagacacagatatatgcaaaaaacctggtgaatgccgatcgt

SEQ ID NO: 621164 - DNA, 100 bp, Homo sapiens
gttgcagccggagcggccgctggaggcccggcacgcggtgctggctctgctgaaggccatcgtgcaggggcaggtggccctcatgacactgacgctcttc

SEQ ID NO: 621165 - DNA, 83 bp, Homo sapiens
ccttgcgcctgcctctccaggatgtctacaaaattggtggggcaacaccctccactaaagagtcaagccagccggacgcattc

SEQ ID NO: 621166 - DNA, 101 bp, Homo sapiens
caagctggccgtggctctcttggcagccttcctgatttctgcagctctgtgtgaagataatgttaattcaagactctcgaagagaagcttcagtgcagatg

SEQ ID NO: 621167 - DNA, 75 bp, Homo sapiens
gccagtatactttctgtcagccagaaactgagttgatctctctaatgtattagatcttcatgcctttgatagtct

SEQ ID NO: 621168 - DNA, 109 bp, Homo sapiens
ctggaggatgtgcggggtgcgccggcagaggatccagtgttcaccatcctggccccggaaggggaacgcccttttgcttgtgactggcagggctgcgacaagaagttcg

SEQ ID NO: 621169 - DNA, 75 bp, Homo sapiens
gcactatcaaatctagatgcagctacttatcagatcatgcaacagatgagtgaccaccgctacgacaaactcact

SEQ ID NO: 621170 - DNA, 90 bp, Homo sapiens
tgctgggacttcccgtccgcggcgtggaggtgcaagaagaaacacacgctgctgtgccccgactttgcccgcaggggggcgtgtccccgc

SEQ ID NO: 621171 - DNA, 87 bp, Homo sapiens
atacgtttgaacccagaactgaacaaactctagccctcaggaaagaagggattggagttgttttggattctgaactgcctcatttga

SEQ ID NO: 621172 - DNA, 75 bp, Homo sapiens
ggccagggaaccctggtcaccgtctcctcagatggagaaggaggagacaacccgggagctgctgctgcccaactg

SEQ ID NO: 621173 - DNA, 97 bp, Homo sapiens
acagattctcctctgcgctatgtggacattgccatcccatgcaacaacaaggaaccaccaaactgttttccacagaggctgcatcaattgacattcc

SEQ ID NO: 621174 - DNA, 100 bp, Homo sapiens
ctcatcgctctcggcctcggcctcggcctccgacacggaaacaaacgtacttggatttaaaggtcctaggaaaatgtctgtgatcattcctggaatgaca

SEQ ID NO: 621175 - DNA, 90 bp, Homo sapiens
cctaaactagcagtttagggtgtcaggttaaatggaaaccacccttgggaactggatgcctgtgtagctgttctaccatatcagtgtatt

SEQ ID NO: 621176 - DNA, 100 bp, Homo sapiens
attaagccttaccagcaggggcgacaacagcatcagggcattctgcacactcgtggtccagaccaatataaaatccctgccatctgtgacatgcccacgg

SEQ ID NO: 621177 - DNA, 100 bp, Homo sapiens
cagtcagtgggtcccgcagtcgcccgcaaccggggcgaatcatggcggccgccaaggtctcaagattctgccctccaagaaagtcttgccatgattggat

SEQ ID NO: 621178 - DNA, 74 bp, Homo sapiens
gctacgagctggctttaatcctgaaagccatgcagcgggttatgcaatggtctctgcaagatggtttattcttg

SEQ ID NO: 621179 - DNA, 74 bp, Homo sapiens
gcctgatctaacccctagaaacagtttagtcatccaacaagaagaaatatgaaattccagcaataagaaatgaa

SEQ ID NO: 621180 - DNA, 95 bp, Homo sapiens
atagagatgtgatgttggagaactacagaaacctggtctccctaggcagtatttggcagtcgtattcagagataaacccctggagctatgggatg

SEQ ID NO: 621181 - DNA, 100 bp, Homo sapiens
atagaagtggttaatatgttggctccttatgcaggatgacgatgtcgataccaagaagcagaagaccgacgaggatgactagacagcaaaaaaggaaaag

SEQ ID NO: 621182 - DNA, 80 bp, Homo sapiens
gaattgagagtcacagaggaaggacagtggagtctggcatcttattgtcacccacaaaagctgtatataatgccagacat

SEQ ID NO: 621183 - DNA, 50 bp, Homo sapiens
cttttaccatcttattaattcactctgctcctctggtgcaagtgtggtag

SEQ ID NO: 621184 - DNA, 100 bp, Homo sapiens
ctttagtgcttggattggtgggatgtttcggaatgggcattgtcgccaattttcagcacagtggagaatttacagtctctctcagtgatgttttattgac

SEQ ID NO: 621185 - DNA, 100 bp, Homo sapiens
tcctcaccctctgccgagtctcaatatctgtcttcggtggactccttcggcagtccacccaccgccgccgcctcccagtcttgctctgttgcccaggctg

SEQ ID NO: 621186 - DNA, 50 bp, Homo sapiens
ggcgacggcgaccatagctctcgccctcgggaccaaggatcacgtcatga

SEQ ID NO: 621187 - DNA, 123 bp, Homo sapiens
gccaagctgtcatcacaaaagagttgattgaaattatctctggtgctgcagctctatggccgaacagacccaattttggatgatgttggtgaagctttccagctgatgggggttagtctacat

SEQ ID NO: 621188 - DNA, 100 bp, Homo sapiens
caaaatttgccgaacgagggttcgcagaaaggtggggcagagctcatctgacgtggcatcaggatgagactttcaactgcacttaaaaaaaacctggaga

SEQ ID NO: 621189 - DNA, 75 bp, Homo sapiens
atgcgagagcctgtgcttaaattttggctatggaaaggggaaatgttctaagcagagcccgtcaggagcccacgg

SEQ ID NO: 621190 - DNA, 80 bp, Homo sapiens
ctgaaataacccttgatcctcctcctaattgcagttcagagaagccgaactgggattaccatgcagaaatacaagctttt

SEQ ID NO: 621191 - DNA, 83 bp, Homo sapiens
ccaggcattctgggacactggactgtgtgcccagaacatttttctgccatgagagttctgcagaatcagaagatttggcagta

SEQ ID NO: 621192 - DNA, 75 bp, Homo sapiens
cctgcttctgcatcgacagatagccgtcttcagcttgagccccatcactagtgctcatcatcactgtaggggacc

SEQ ID NO: 621193 - DNA, 96 bp, Homo sapiens
tctagtcaccctcttcaagcttttgggctatgacgtccatgttctatgtgaccagactgcacaggtttggtgcacctcgatttggaggaagtaggg

SEQ ID NO: 621194 - DNA, 75 bp, Homo sapiens
cgaaaatcagtgaaaaaaggttttgagttcacactgatggtggtcggctgaacatgaactaaatctggcaagaaa

SEQ ID NO: 621195 - DNA, 82 bp, Homo sapiens
actctttccgccctaatggaggtctccagtttcgtgtcttgggacaaggtgcgcattcctggtgtgctgcagcgattgggag

SEQ ID NO: 621196 - DNA, 97 bp, Homo sapiens
ccttacaggcttaaacttagagtcaagttcttcgtggagcctcatctcatcttacaggagcagactaggttcatcccagaggcctggtcggcctgca

SEQ ID NO: 621197 - DNA, 75 bp, Homo sapiens
agataatgtaactgtgtgcaaggataacaggcgtcgaccagaagattatgatattcataacagcagaaagaaacc

SEQ ID NO: 621198 - DNA, 98 bp, Homo sapiens
cgcgctcccgctgctcctgccggtgtggcaaaggagcagagaactttgacaagttcttcacacgaggacagcccgtcttaacaccacctgatcagctg

SEQ ID NO: 621199 - DNA, 88 bp, Homo sapiens
aggagcctccgtgcggagaccactgttcaaggccacagacaatgcagatcttcgtgaagactctgactggtaagaccatcaccctcga

SEQ ID NO: 621200 - DNA, 97 bp, Homo sapiens
tgagccacagtgtgatcccagctttaaaggagatgcaggagaaaatacggcattgctagtgaaattaaatggtggcagacatgtccaaggaatattg

SEQ ID NO: 621201 - DNA, 83 bp, Homo sapiens
cgggtgtctgtctctgctcgaattgacagaaaaggattctgtgaagcttataggctttatactgtggtgcctcgcctggtcaa

SEQ ID NO: 621202 - DNA, 50 bp, Homo sapiens
tgatttcggaacctggagaaaatagtttaccacctaggatgacttcagtg

SEQ ID NO: 621203 - DNA, 100 bp, Homo sapiens
atcacacgcataatggatgaaaggaaccgacagggtttcttccggagaacaatcagattgaagcttatctatgacagatgtgatcttaactgtcggatcc

SEQ ID NO: 621204 - DNA, 100 bp, Homo sapiens
gaaaaggacatccaagccttcaagatgaaccgcaaggagagaagttcttatgactcctccatgtctccaggtaattggtacgcctcagagaccggcagcg

SEQ ID NO: 621205 - DNA, 75 bp, Homo sapiens
ccaaatatccaagacccagctcaagcagaggcctacacgatttactgagcgtgccaggaagatgtcgagcccggg

SEQ ID NO: 621206 - DNA, 50 bp, Homo sapiens
ccaccaaaagtgaggtcttctacccagtggaaatcctgactgctcgtcag

SEQ ID NO: 621207 - DNA, 76 bp, Homo sapiens
agaaaggagacctcattccaagttccaggattaattctgctgccactggtgacatgccaacttaccagatccgagc

SEQ ID NO: 621208 - DNA, 76 bp, Homo sapiens
caacacggagcatggaggcagtcaggattggtggaaagtggaagtgaacgatcgtcagggttttgtgccggctgcg

SEQ ID NO: 621209 - DNA, 98 bp, Homo sapiens
gacttcctccgcgccaccaccctctacaacacggaagtgctgttgtcacacctcagttacctcagggaaagtattcagagaacgactaccttcagatt

SEQ ID NO: 621210 - DNA, 90 bp, Homo sapiens
tcctggaaaaggcctgaagtggcactgaaatgaggcatagatgagtatgatccatttgctgagcacagacctccaaagattgcagaccgg

SEQ ID NO: 621211 - DNA, 130 bp, Homo sapiens
ttgtgatcacccaaatatagtcaagcttctagatgccttctattatgagaacaatctttgggatctagtgaaaagccatttgatgtatgcggtcagagaagaagtggaggtcctcaaagagcaaatcaaa

SEQ ID NO: 621212 - DNA, 118 bp, Homo sapiens
gcgactcgcgggtgtgacgttgaagatgtcggccttctgagccgactgcggtggtcaagaggatggcaatggctatattagtgctgcagaacttcgccatgtgatgacaaaccttgga

SEQ ID NO: 621213 - DNA, 101 bp, Homo sapiens
ctctggaggagatgcgtgattggctgacgctgtgctcgggggttccctggccctttcggcagggttccagggtctccctccactgctgtagtaacccgggt

SEQ ID NO: 621214 - DNA, 100 bp, Homo sapiens
gggctgcacttgacaaccagcatgccgagatggagtcacatgccataggaaaaaagcctgaaaattcagcagacatgattgaagaaggggagcttatcct

SEQ ID NO: 621215 - DNA, 73 bp, Homo sapiens
gtgccagcacctttcggcttctgagacggcggcagcagcggcattcaggagttgtaagacgttcatcgccgtg

SEQ ID NO: 621216 - DNA, 75 bp, Homo sapiens
gaagcgcttcctggatgagaagagcggcagtttcgtgagcgacctcagcagaacccagcttagactagaaagtct

SEQ ID NO: 621217 - DNA, 55 bp, Homo sapiens
ctgacaacgtggatcgttgttttgaaacatccggaacatggtggcggtgctggaa

SEQ ID NO: 621218 - DNA, 100 bp, Homo sapiens
tctagccgtcgaggagctgcctggggacggaacagcgccttttgatagtcctaagtaattgctgctatctagaacgtcacaccttcctaaatatcgcaga

SEQ ID NO: 621219 - DNA, 75 bp, Homo sapiens
gaggaaaaaggaagagagcactgcagccagtgaaaccactgaggtcttgggcgtctttggtactggcttttttag

SEQ ID NO: 621220 - DNA, 90 bp, Homo sapiens
gtgttctcagtagtccgaactctaatatgagcagcatggtagttacagacgccacaggtcatcatctggatcatcccattctggttcccg

SEQ ID NO: 621221 - DNA, 90 bp, Homo sapiens
gagctatacagcggcgtgggcggcatgcaccacgcgctgagaggagaacctccatttctaccagaatcctttgaccgaattcttctggat

SEQ ID NO: 621222 - DNA, 82 bp, Homo sapiens
atgtgaagagtccttcaaaaatgccagaaatcaacgccaaggtctcctctgagcctccggcctccataagacccaaaacaga

SEQ ID NO: 621223 - DNA, 83 bp, Homo sapiens
actagcctaaagccgggcggactgcggcctccggtgtggctgtctctgatggtgtcatcaaggtgttcaacgacatgaaggtg

SEQ ID NO: 621224 - DNA, 75 bp, Homo sapiens
ccccggacatccgcgccacacggcaaacctggtggacctgcagaagaagctggaggagctggaacttgacgagca

SEQ ID NO: 621225 - DNA, 100 bp, Homo sapiens
catagcattcgcctactccgtgaaggaggtggagctgtataaaagcagccaccgggacaagctgggcctgatggtttgctaccgcacggacgacgaggag

SEQ ID NO: 621226 - DNA, 74 bp, Homo sapiens
ccgacttccgagacctcttggggttcatgctgttctacaaagaggcgccctgtacctttgatgttaagtggtgg

SEQ ID NO: 621227 - DNA, 100 bp, Homo sapiens
cccgacccccaggcagctcgccgctccctagcaccttctccagtcgacactctcgcgcccggagcatgattccacctttccactgatagactcaagttcc

SEQ ID NO: 621228 - DNA, 82 bp, Homo sapiens
cttccctttggatgtagcaaggaagaaattgttcagttcttctcaggaactgtggctgcaccatctgtcttcatcttcccgc

SEQ ID NO: 621229 - DNA, 90 bp, Homo sapiens
ttctctctccactcttcgagattggcacacccagctaaagtctccagtgaatattgaattgctgaggattttgggaaaagacaaatcaaa

SEQ ID NO: 621230 - DNA, 82 bp, Homo sapiens
cgaagtcgcagcgccagacccaaggcccccgagtgagcgcgggcgccgagtgtactaatggtcacttgatgtgcgctggctg

SEQ ID NO: 621231 - DNA, 100 bp, Homo sapiens
accgagtccagcccaggaaaatggagagtcttactactttgaccgcgatgatgtggctttgaagaactttgccaaatactttcttcaccaatctcatgag

SEQ ID NO: 621232 - DNA, 90 bp, Homo sapiens
gcaatgctgtttgccctgaacatcatgaattcccaagaaggagacattgcctaagatactgagccatatcgccccagcattttgcatgag

SEQ ID NO: 621233 - DNA, 80 bp, Homo sapiens
gctttgcaaggcatccgtgtccagagggtcatcatcagatttgaaatatttaaagtggatacaaaactatttcagcaatg

SEQ ID NO: 621234 - DNA, 50 bp, Homo sapiens
caactctgttcacctgcttgcagacccatccaaatgtggataaaaaactt

SEQ ID NO: 621235 - DNA, 75 bp, Homo sapiens
tcactgaatgagcctgaagacaaggatgtgactagtgcatctccctcgccccctgagagtctcgtggaggaggag

SEQ ID NO: 621236 - DNA, 100 bp, Homo sapiens
gaactttctccggggcgcagcgtgacggctggcatcatcattgttggagatgagatccttaagctccctcgtgaaagatgcttctgttcctctgattgat

SEQ ID NO: 621237 - DNA, 98 bp, Homo sapiens
gggactccaaatgggtcgcagtcgcagccgctctccacggaggggtgccttgaatggcttctaaacaatttgatgactcaccagaatgttgaactttt

SEQ ID NO: 621238 - DNA, 83 bp, Homo sapiens
tggggcttccgcctcgtgggcggcaaggacttcgagcagcctctcgccatttcccggcctgtgggccaaagctgaccaactcc

SEQ ID NO: 621239 - DNA, 95 bp, Homo sapiens
accgaattcagaaggatatcgacgtcgtgatccagaagtccagagctgaggactgcctgtttgcagatgggcaccaacaaatgcgccagccagtc

SEQ ID NO: 621240 - DNA, 102 bp, Homo sapiens
acactgcagaaaggctatctgaagaaaagtagaaggaaaaacagaacgttgcaaactctggaaaaaaacttgggttcggaacctcacttacatggtgacccg

SEQ ID NO: 621241 - DNA, 99 bp, Homo sapiens
ctgccaggccagctcgaagaaggcgagcagggtgcgggagagccccttgcagaagacgccgtacgaggtagacgttacatccaagaggaaataatccag

SEQ ID NO: 621242 - DNA, 96 bp, Homo sapiens
cggctccgcagcccgccgggagctctgaccgaggcgcctcgctggggcggggaccttgccttgcccggggagtgtggccatctggggccgtgtggt

SEQ ID NO: 621243 - DNA, 90 bp, Homo sapiens
cagcaggtcacagtggacgaggtgttggcggaagtaaacagctgttgtgtgacgtgatgattgtggcagaagatgtcgagatagaagccc

SEQ ID NO: 621244 - DNA, 50 bp, Homo sapiens
cgaatacaaagagccatacgaccttcggggcatgacgcgcctcctgctca

SEQ ID NO: 621245 - DNA, 100 bp, Homo sapiens
agaatctgtagaccttccacactgccacctgattaaaggaattggtatgcctgcagcatctttagtgacccctgctgatgttatcaagacgagattacag

SEQ ID NO: 621246 - DNA, 100 bp, Homo sapiens
cgggatttacgtggagatcaagcgcagcgatgttttcggctttgtgagaaaccttaccatcaaacacgatggccagcaacgttaccaacaagacagatcc

SEQ ID NO: 621247 - DNA, 74 bp, Homo sapiens
acagttaatcctcaatttaagcctgatctaacccctagaaacagctgagatctgtatctgtggacctgaatgtt

SEQ ID NO: 621248 - DNA, 99 bp, Homo sapiens
agaaacccagcttgatatgttgctgtgttggggtggaagaggaggaggcgcccgacatcgacatataccactgcccaaactgtgagaaaacccatggga

SEQ ID NO: 621249 - DNA, 98 bp, Homo sapiens
aacctgtaatgggcaaggagccacaaagaagaaaacatttcttttaatttttaaacttggtttgaaagggtgtttgtgaaccgaagtttagcaatgga

SEQ ID NO: 621250 - DNA, 82 bp, Homo sapiens
ccagcctgcggagcctgtggggcaggttgctgttgaagaaatctggttgcagaacaccacggattgaattggaagagatggg

SEQ ID NO: 621251 - DNA, 75 bp, Homo sapiens
ccccgccgcagctcctcggacgcagaatgaatggcagtcattttaaagatgaaaaggctttggtgaccagtcaaa

SEQ ID NO: 621252 - DNA, 100 bp, Homo sapiens
gggaccgggacctgctgctggacccggcctgggagaagcagcagcgcaaggactgagcacggaaggcatctaccgggtcagcgggaacaagtctgagatg

SEQ ID NO: 621253 - DNA, 100 bp, Homo sapiens
gaggcaccgggatcgtgaccgagaccgtgaccgagagcgtgaccgagagcgcgaatatcgtcatcgttagaagtttattaaccttgcaagaactcttcag

SEQ ID NO: 621254 - DNA, 98 bp, Homo sapiens
gaggcgattccagagagcggcggaaaggataagcctcgacttagaagctaccgagttaccctaagaaagatggtgtcctcagaccgaagccaactttc

SEQ ID NO: 621255 - DNA, 90 bp, Homo sapiens
gatccgtggttccctgcagactggcaggagcagattccaaaggcacaggaagaagcttgcaggggacggcaaaacagaacagaaaggcgg

SEQ ID NO: 621256 - DNA, 105 bp, Homo sapiens
ggactctctgcgggagaggctgcagcggaggcggaagcaggactcggggcacttggggaagaaggagaaagggccaacccctgaagaagcaatacagaaactgaa

SEQ ID NO: 621257 - DNA, 83 bp, Homo sapiens
gagtcttcggagcgaccccggcaggttttaaaatcaaagatgggaaaatcggagaaaattgcccttccccatggccagcttgt

SEQ ID NO: 621258 - DNA, 75 bp, Homo sapiens
gaagttgatggaattacactgtgatacgactgactctggagctctcaaacactgctgtcctgcaccagatgcggc

SEQ ID NO: 621259 - DNA, 100 bp, Homo sapiens
tttcatcatggtctcccaggccctcaggctcctctgccttctgcttgggcttcagggctgcctggctgcagcaaaccagtccagctacgggggcccagcc

SEQ ID NO: 621260 - DNA, 80 bp, Homo sapiens
tcaacatgcacctagtcaagagccaccgcctgcagcatcaccgacacatttgaagccttcacattaagtcttctgtcttc

SEQ ID NO: 621261 - DNA, 100 bp, Homo sapiens
actccccctaaagcagagatggatgaccttaaactgtatctggagacacacttggaagatgatccctatgatcttgaagatgtttctgcacagaaatgag

SEQ ID NO: 621262 - DNA, 95 bp, Homo sapiens
ccagaacggagagctccctcctagaaaaggccttggacaagattcgctatgagagcctgacagacccttcgaagttggacagtggtaaagagctg

SEQ ID NO: 621263 - DNA, 74 bp, Homo sapiens
cgccgccgccgccggagctaacctcggggaccgagatgcagccaccatgttcagccagcagcagcagcagcagc

SEQ ID NO: 621264 - DNA, 103 bp, Homo sapiens
ctttctgttcaggccagaccctctgggagcttctcagccattttccacagatcagtgatcagggccaaagcggtcagtgagaaggaagtggactctggaaacg

SEQ ID NO: 621265 - DNA, 100 bp, Homo sapiens
agagaagcagtgaaggagtgcagaggcatcacctgaaagctggaggagcaccggaattcacagaagcagatgaagctcctacagaaaaagcagagccagc

SEQ ID NO: 621266 - DNA, 75 bp, Homo sapiens
gtttatgcagtttcgggaccacctggaggaggtgttgaaaggggtggacccaagtggagagattgtggaactggc

SEQ ID NO: 621267 - DNA, 100 bp, Homo sapiens
aaatgagaagctggctatggttaaagcgcttaacaaacaacagttgcagttactgaaagaacggttccaggccttcctcaatggggaaacccaaattgta

SEQ ID NO: 621268 - DNA, 101 bp, Homo sapiens
tcccagtcattgctgagatgagtgaggattgtttcagaaaatcaggcctcctcctggggaatgtgcctcagcttctgatggaatcttgctctgttgcccag

SEQ ID NO: 621269 - DNA, 98 bp, Homo sapiens
tcagttggaagagtccagcaaggaaggaggagtcagtggttttctccatgcttttattgctgaagtgtttgcaatggtgagagctcatgttgctgcat

SEQ ID NO: 621270 - DNA, 100 bp, Homo sapiens
gtcatcacagagaatcctgtctggataatcatggagctgtgcacacttggagaggcttttattgagatggagacaagagaagatgcaatggcaatggttg

SEQ ID NO: 621271 - DNA, 87 bp, Homo sapiens
gggatatccacagttcgatcaaggttcaaaccttgtactactcagctgatcacaagctgcttgatgggaacctactagatggacagg

SEQ ID NO: 621272 - DNA, 75 bp, Homo sapiens
ttgcatggagttttgtggaggtggttctttacaggatatttatcacggtaccgaggagaaggcattgtatatggg

SEQ ID NO: 621273 - DNA, 85 bp, Homo sapiens
cccgagatgccttctcctcaggagcttgaggcctcagcacccaggatggtgcaaacccataggaaattacctgatgttccaaacc

SEQ ID NO: 621274 - DNA, 82 bp, Homo sapiens
gtcgcgtgtctaggtgagtcgcggtgggtcctcgcttgcagttcagcgaccacgtgcctgaggaaggaggccgctttgcacg

SEQ ID NO: 621275 - DNA, 82 bp, Homo sapiens
ataaatctcaaagatctcgtacaagatccttctttaaatgcactcggtgatggaaagagagccactattctgaagaacactt

SEQ ID NO: 621276 - DNA, 100 bp, Homo sapiens
ttcaagcgaatgggccctattgtgctcacacattcagaacctgttacccaaggaattccctaaaggtgtccttgaatggccattttggacaaaactggtt

SEQ ID NO: 621277 - DNA, 88 bp, Homo sapiens
gaagtgttatgatgcccttcgaaaaatgatcaactattgaccatatagttgtggacatcggatacccaaggagacgaagctgaagcag

SEQ ID NO: 621278 - DNA, 95 bp, Homo sapiens
agacccttcgcgagcggctgctgagcgtgcagcaggatttcacctccgggcatgaacaaccgggaggtgctggagcaggtggagcgaggctacag

SEQ ID NO: 621279 - DNA, 83 bp, Homo sapiens
ctccgtcggaagggagcccaagctttgcagagctaatggcagcattagccgctgttgggcctcctaatcctcgggcagatcca

SEQ ID NO: 621280 - DNA, 100 bp, Homo sapiens
gctaccttggcttccttcggcgaacagagctcactgatgccagtggaggtcatatataccagaagttctgagattgaagagctgaaagccactattgaaa

SEQ ID NO: 621281 - DNA, 83 bp, Homo sapiens
tctttctgttcaggccagaccctctgggagcttctcagccattttccacagatcagagaagcacctgaggcaggagccaggga

SEQ ID NO: 621282 - DNA, 75 bp, Homo sapiens
gatgttgtcaaggtggcctaccaggaggccaggggtgtcgccatgcttgtcagctcatttgcagcttacattttt

SEQ ID NO: 621283 - DNA, 74 bp, Homo sapiens
ttcgactggctgcttggggagattgagtccaagttcaaccaagccattatgttcgtggtagccgaggccgatgc

SEQ ID NO: 621284 - DNA, 75 bp, Homo sapiens
tagaagataatggcaagtccagactggggatatgatgacaaaaatggttcatcctaagttccactataaacaggc

SEQ ID NO: 621285 - DNA, 103 bp, Homo sapiens
tcatacaggagtggcagaagagaggcggacagccctggcagctcatcgagcccgtggatggattccaccccaacgagagtttcgctcttgttgccccggctgg

SEQ ID NO: 621286 - DNA, 116 bp, Homo sapiens
tttggagtttaacccttctgccaatccagaggcaagcacaatattccagaggaactctcaaacagatggtatctactgagcgtttcagtcaacaatacagctcgtgttcgacaata

SEQ ID NO: 621287 - DNA, 75 bp, Homo sapiens
aaatctaccaaactgtgctaatgcgccatgaaaacatacttgatctacaatggattcaagtatctgattccaaag

SEQ ID NO: 621288 - DNA, 74 bp, Homo sapiens
cggggcacgatgttgaacatgtggaaggtgcgcgagctggtggacaaagcctgcgcagttggacagcattggct

SEQ ID NO: 621289 - DNA, 100 bp, Homo sapiens
cgaaataaagtgaatcgtttattggatagcttggaaccacctggagaaccaggaccttccaccaatattcctgaaaatgtggtgaaaacaactgttcttc

SEQ ID NO: 621290 - DNA, 100 bp, Homo sapiens
ctcttgtcagaatgctcagctagtcaactccctagaaggctgccagttggtcattcccaaaagcaagttcgtcttggtgaagttcgacacccagtacccc

SEQ ID NO: 621291 - DNA, 75 bp, Homo sapiens
aattcagaaccacaactgtcaacatcggtatttgtaggcaaaataccaagggatttatatgaggatgagttggtg

SEQ ID NO: 621292 - DNA, 87 bp, Homo sapiens
gcaaccttcttctgagttctgtttctattgccttgggaaacactggctgaatgaaactagtgatcgagaagatggcctccccaaagg

SEQ ID NO: 621293 - DNA, 99 bp, Homo sapiens
gggggggtccgctgcccgagaatgggaattctcttcactagaatatggagactgttcaatcaccaggttggcagatgtgaatggagtcattgaggagga

SEQ ID NO: 621294 - DNA, 50 bp, Homo sapiens
gagtcctggccccctaactcaagggccttggacaagttgttactgactat

SEQ ID NO: 621295 - DNA, 100 bp, Homo sapiens
cctatcgcgacaccgcggcctatcggtaccttgtgaaggctttccgtgcacatcgggaaattcagttcatgaagataagaagtttcttgacaaatacatg

SEQ ID NO: 621296 - DNA, 100 bp, Homo sapiens
gatagatcatgcagagtattacctttacaactattgacctgaaaagtggttctggaaaagtgtaccaaggccctgcaaaaggtgctgctgatacaacaat

SEQ ID NO: 621297 - DNA, 74 bp, Homo sapiens
aacagtgttgtgccagcctacaggaggaaaggccagactcacagaagaatatgcttttaaggctattaaccagg

SEQ ID NO: 621298 - DNA, 83 bp, Homo sapiens
aggtgggaaggtgtgtccggaggtttgcaggggtgcagtgtgtctggtcttatgagacctagaggatcaagacataatgggag

SEQ ID NO: 621299 - DNA, 100 bp, Homo sapiens
aagtgccttccaagccgattgagaagagctgttcccctcctgaggcagattcgaactaagtggatcccactggtgaatggggggaccacgcaggggccca

SEQ ID NO: 621300 - DNA, 80 bp, Homo sapiens
tcctgtacagcctgcagaactgtgagaagccctaccactgcaactgggacggctgcggctggaagtttgcgcgctcagac

SEQ ID NO: 621301 - DNA, 101 bp, Homo sapiens
ccaaaatagattttatactgacctaaatgggtaccaggaaaatatgcccaggttaccaacaatcctgaaaatgatggatgtataaatgcagtcttactggt

SEQ ID NO: 621302 - DNA, 75 bp, Homo sapiens
caacaacccagagtccgtgtattactgggcccagaagattgttgatccatttcagatacttgtggcagcaaacaa

SEQ ID NO: 621303 - DNA, 100 bp, Homo sapiens
cggcacggagacggcggcagcgctggactaggtggcaggcgccaagcccatctttgtgtgcttgcatccaactgtgatgagcctatgtatgtcaagttgg

SEQ ID NO: 621304 - DNA, 80 bp, Homo sapiens
taccaaccgttcttattgctggcggcctgaggtacatacctatgtcaacactacaggtgtgcaagaagagcggaaaaacc

SEQ ID NO: 621305 - DNA, 97 bp, Homo sapiens
ccgcgtgctggagctcttcgacccacccaagccttacggacatccaaaaattgcttggaactgacttcatgggtaccataagtacagagaacaaggg

SEQ ID NO: 621306 - DNA, 90 bp, Homo sapiens
cgccaggtcccccggaaacctagaaatggtgatggctggaccggcggaggaggcgggagcccattgtcccgagagcctgtggcctctgcc

SEQ ID NO: 621307 - DNA, 87 bp, Homo sapiens
cagctctcctcaggatttgccctatccagatcctgctataggtgctttactccatgaactgtctaatgacggtgctcataagcagtt

SEQ ID NO: 621308 - DNA, 75 bp, Homo sapiens
cagaacagtcaagagctttctctccaaaatccccagtgtcgtcacaggccaccataccatttacatcggagtcca

SEQ ID NO: 621309 - DNA, 100 bp, Homo sapiens
cttcgaaggccctcagcctgcggatgtgaggctgatgaagaggaaaacagctgtacaggaagaggcacatacaaagaaaagaatccccgaaagggcggtt

SEQ ID NO: 621310 - DNA, 98 bp, Homo sapiens
cgacacaggcacacaccccccgacaggcacgcacacccaccccacagtgcccggctcggctgcgtgcccttccgagaggccccggcgtactccaaccg

SEQ ID NO: 621311 - DNA, 75 bp, Homo sapiens
ctgtctcaaaaccctcctcatcatctactccttcgtcttctggtgtattgtctagcatggcagatgcagtattgg

SEQ ID NO: 621312 - DNA, 83 bp, Homo sapiens
gcgcgccgggagagatgctgagtcttattgccagcagttttgaagatgactcccgtgtagcctcaccgttagaccagaacgga

SEQ ID NO: 621313 - DNA, 73 bp, Homo sapiens
ccagaacttcatcataaaggttttaaatccccgtcgaggtcaagatcaagatccaggtctatttcacgaccaa

SEQ ID NO: 621314 - DNA, 90 bp, Homo sapiens
attcgctgcatcaagccaaacgaaaccaagaagcccagagactgggaggaaagcaggacctccccaacgccatgaatgcggccgagatca

SEQ ID NO: 621315 - DNA, 85 bp, Homo sapiens
tctggggcaaagggaccacggtcaccgtctcctcagacaagttggatggcttgaggactggtactaaaaggaaacgtgactggga

SEQ ID NO: 621316 - DNA, 100 bp, Homo sapiens
ccatctgcgctgccggcattggtgggacttttcagtttggctataacctctctatcatcaatgccccgaccttgaacccattaaaagagccagtaaatcc

SEQ ID NO: 621317 - DNA, 100 bp, Homo sapiens
gctgcttctgctttgaaggcggaggctccatgttgtcccctcagcgagtggcagcagctgcctcaagaggagcagaaacttgggaaccgtgggtgctgtt

SEQ ID NO: 621318 - DNA, 83 bp, Homo sapiens
tcggaaaccggtagcgcttgcagcatgatatctccggagcatttggataatgtgacagttggaatgcagtgatgtcgactctt

SEQ ID NO: 621319 - DNA, 97 bp, Homo sapiens
ggtgcacgaactgcaggcgcggtggttccccagcagaaccactctcagcatcggtattcaaaacctttgaccacatggcccgtcaggatgatgagaa

SEQ ID NO: 621320 - DNA, 90 bp, Homo sapiens
caaggaattacataacatcaaacgtggtgatgctattgctgagattagagccatttgtattgaagaaattggagtatggatgaaaatgta

SEQ ID NO: 621321 - DNA, 75 bp, Homo sapiens
ctcaggtttttcctaagctcaactctagccagctaggttcctggtgctttggggaaagcttatagcttcattgca

SEQ ID NO: 621322 - DNA, 101 bp, Homo sapiens
tttcacatgggaaaagccaacctggccctgaagaactacagtgtggttaatttggagtggcccctggagtcagtttcctacaccatccgaggccccaccca

SEQ ID NO: 621323 - DNA, 101 bp, Homo sapiens
gtctgaggagcggtcagtgacgcgatggagcgggcaaggccgccatggcatcagatgaaggcaaactttttgttggagggctgagttttgacaccaatgag

SEQ ID NO: 621324 - DNA, 75 bp, Homo sapiens
tgagatgaacgtcgactcgcttgcaggcaagttgtcaaacccagtgacttgattgtaaaaatttacagagcggaa

SEQ ID NO: 621325 - DNA, 75 bp, Homo sapiens
cgcagcccgggcccaggccccggcagcgcctgggacaagtctgtgctgagacctataaccctgatgaggaagagg

SEQ ID NO: 621326 - DNA, 96 bp, Homo sapiens
gggttgaaacaagcagaagaacgcttagaaagagatcacatctttcgacttgaaaaaattccgaagaggctcaatctgtaaatccttctagtgttg

SEQ ID NO: 621327 - DNA, 74 bp, Homo sapiens
gaccacggtcaccgtctcctcaggattactacagcatcccatttcccacacccactactccgctgactgggagg

SEQ ID NO: 621328 - DNA, 100 bp, Homo sapiens
agagaccccgcggctgggcgttcatctaccacgctttcgtgcactgtttagtacagctgttgaaatgaagataaaacaatcagcagaacaactggaagat

SEQ ID NO: 621329 - DNA, 136 bp, Homo sapiens
ggaagacgtgttcgggcagctggagtgtacgggcccgcgggccacggccatgcagcccctggaggtggagtttgtccatatgctcaatgctaccatgtgcgccactacccgtaccatctgcgccatcctggagaac

SEQ ID NO: 621330 - DNA, 75 bp, Homo sapiens
cctcgaggcctcctgcactccgcccggacccccggccccgccgtggctgtctgagtggtggctcaagaccgccta

SEQ ID NO: 621331 - DNA, 83 bp, Homo sapiens
agcacatcaaagcagaacatgcaggctttcgggtcacctccagcagctcccagttcagctcacgtgattcggcacagctctct

SEQ ID NO: 621332 - DNA, 100 bp, Homo sapiens
cacatcttacaacaggtgctccagctgaaggtgcgagaagaagtcagaaatctacagttactcacacaaggttatgagcagccgttttctgccctacgac

SEQ ID NO: 621333 - DNA, 101 bp, Homo sapiens
aagcctgtgatttggactccacagtgtctgctcttgccctggctttttacctagcaaaggctaaatttattgtgaagaaatcagaagatgaagaagacgcc

SEQ ID NO: 621334 - DNA, 74 bp, Homo sapiens
tggcattgacatttaattttagggtcctttatatagaagggagacaaaagatacagatattgtggatgaagcca

SEQ ID NO: 621335 - DNA, 100 bp, Homo sapiens
ttcctggtcaatcatgacttcacccctctggagtgtcgaggagggccccaaccgcagcacagtcagccgcccccgcagccaccggctgtgaccccggagc

SEQ ID NO: 621336 - DNA, 91 bp, Homo sapiens
cgacaagcacatcaccactctgcaggaaacccagcgtttgctggcagaaccagttcctggcatcaaagccgaaccagatgagagcaacgcc

SEQ ID NO: 621337 - DNA, 51 bp, Homo sapiens
gcggtttggaggaaagatgagacgaaatgaaagctcattagcatctacact

SEQ ID NO: 621338 - DNA, 83 bp, Homo sapiens
cgcaaccaccgccctggccatctaccatgtgggaaccttctgaccagcctcatgggctcctcagagcaggaggatggggagga

SEQ ID NO: 621339 - DNA, 100 bp, Homo sapiens
tactctatatgaacaatccgtctggatcacggatgtaggaagtgcactgccagtgaaagatgtagaagataaacctgaacaacaaaccagaacaagagag

SEQ ID NO: 621340 - DNA, 98 bp, Homo sapiens
tccaggcaatagctgaagaagaagaggaagtagccaaagagcaactaactgatgctgacaccaaagagtatcttaaagtgaggtcacatgaccctgag

SEQ ID NO: 621341 - DNA, 110 bp, Homo sapiens
ttaagcaaagccccctaactgcctggcgtctagtaagtacacagagttcaaagaggccttttcattgtttgaccggaccccgactggagagatgaagatcacctacggcc

SEQ ID NO: 621342 - DNA, 75 bp, Homo sapiens
ccagaaaacagaaatcgaaacagatacagagatgtaagcccatatacttatcttcagcaaatcctaatgataaca

SEQ ID NO: 621343 - DNA, 90 bp, Homo sapiens
tggccaatgctgggtttttgctggtgtctttaacacatatagcatagaagccaatgtggaaaatgcagaggtgcacgttcagcaagcaaa

SEQ ID NO: 621344 - DNA, 75 bp, Homo sapiens
gaagaattgggttttcttcgctacttgaaacaatccaaggacaaaactttcggtttgaagaataagaaaggagca

SEQ ID NO: 621345 - DNA, 75 bp, Homo sapiens
cgttgtgccagcgactaaaaagagatgccagaagtgggtggagaactgtaggagagcagacttagaagataaaac

SEQ ID NO: 621346 - DNA, 100 bp, Homo sapiens
ggctcagtcccagcggcgacagacctctgctcttccaggcaagtgaacatgtagccagtagtcctgcattgggggatgtgattccgttcagcatcattat

SEQ ID NO: 621347 - DNA, 101 bp, Homo sapiens
ttcaaagatcatggaatccttcaaaaacatggtccctcagtttttccagaaaggaggagtcaaggaagcccttagtgaacgagaactcttcaatgctgttt

SEQ ID NO: 621348 - DNA, 100 bp, Homo sapiens
caagaacaaggtgacacatattctgtctgtccacgatagtgccaggcctatgttggagggggatatgagactttctactcggaatatcctgagtgttgcg

SEQ ID NO: 621349 - DNA, 101 bp, Homo sapiens
gccggggcagcgctcctggcgctgctggctgcgctctgcccggcgagtcgggctctggaggaaaagaaaggtcattcagtggtgcacccaccacaaggatg

SEQ ID NO: 621350 - DNA, 90 bp, Homo sapiens
tcatcattgacttactattgcactgtcacagcaaagctgtaggtaaaacttgcctactgatcagttacacaaccaatgcatttcctggag

SEQ ID NO: 621351 - DNA, 100 bp, Homo sapiens
cggcgcgaagcgctggtggcgggcccgggctgcggcgtgtgcgcgcccgccagctgctccggagatacgatacactctgtgcagttttagagagagacac

SEQ ID NO: 621352 - DNA, 75 bp, Homo sapiens
cttcatcgccttggcctactccctcaaatttggcaatgaggagcagcagctggcgtgggccaagcgggagagcga

SEQ ID NO: 621353 - DNA, 101 bp, Homo sapiens
gaaggcgcgagtgaggaaaggaggtactgtaggtacatcaagagagtgtacacatgattgaagtcacaagtaatttgattaatgaaactctagcaaatcac

SEQ ID NO: 621354 - DNA, 50 bp, Homo sapiens
atcaagagcaagactcccaagcagctgatggcacatttcctagaggcaga

SEQ ID NO: 621355 - DNA, 117 bp, Homo sapiens
gccgtggctgctgggtttgaacggaatgctggagtcagtggaagacggagctggtcggcccgaaggttatgcaatggtctctgcaagatggtttattcttgaattggacctttttaa

SEQ ID NO: 621356 - DNA, 82 bp, Homo sapiens
tacaacaagagtcctcaatccaacagcccagtgcttctgtctcgactgcactttgagaagactgcctcttcaaggtgtgccc

SEQ ID NO: 621357 - DNA, 96 bp, Homo sapiens
cagggcatcagttggagctaccgacctgagcccacaaactcaagtctcatataatggcagcaaaggctgtagcaaatacaatgagaacatcacttg

SEQ ID NO: 621358 - DNA, 100 bp, Homo sapiens
caagcacattgcggaagaggctgaccgcaaatacgaggagatgagacgtgcaggtaccatcaggaagcagcgggataagctgataaaggaaggaaagtac

SEQ ID NO: 621359 - DNA, 82 bp, Homo sapiens
ggaggcgacgctaagttgctgatcgtggcgacctgcctagagctggaacgttacctccagagcgagccctgctatgtttcag

SEQ ID NO: 621360 - DNA, 75 bp, Homo sapiens
tccaccacctccgccagttaagaggaaaaagacctgcctagagctggaacgttacctccagagcgagccctgcta

SEQ ID NO: 621361 - DNA, 75 bp, Homo sapiens
atggagcagccgccggcgcctaagagatgacatcatggattcatcccttacccgccggggacagatctgctggta

SEQ ID NO: 621362 - DNA, 100 bp, Homo sapiens
tcaaggacaggatggtgaacagcaatcttgccagtgtggaagaactaaagggtttactctcagaaacctacctggaagcccatcggattgtgaagatgaa

SEQ ID NO: 621363 - DNA, 100 bp, Homo sapiens
caaaaccagttaccactaatcttaagaagattactttctatgaagacaaaaattttcaaggccgtcgctatgactgtgattgcgactgtgcagatttcca

SEQ ID NO: 621364 - DNA, 100 bp, Homo sapiens
tggctgtgctggccttagtgccccaggatcagggaggactggtcatagagctgcccaacatccagaaggtcgaagtgtacccagtagaactgctgcttgt

SEQ ID NO: 621365 - DNA, 90 bp, Homo sapiens
aggatttcaacatgcctctgacaatctctagtgtacagcagggaagaactggaaactcagagaaagaaactgcccttccatctacaaaag

SEQ ID NO: 621366 - DNA, 98 bp, Homo sapiens
tgaggcctccccaaccacatggaactgggatcacaagaatcaggtgttattctggatcagaaaatgccttccctccagctggaaagaaagcactccct

SEQ ID NO: 621367 - DNA, 75 bp, Homo sapiens
ccgccgccgccgcccccgccgccaggagctctgtgtgtcgtctgagcagtcgcgagaagatttccctccaggact

SEQ ID NO: 621368 - DNA, 75 bp, Homo sapiens
gagaactactcaaacaggtcgcagcattatcaaaggaaacctctgtagaggagcaggatgcaaccgacaggctgt

SEQ ID NO: 621369 - DNA, 90 bp, Homo sapiens
cccagccccttgtcagccagggctgaacccccgcaggccaaggagcgggagctggaactgaagaacacctggtcagagaacaagctcagc

SEQ ID NO: 621370 - DNA, 80 bp, Homo sapiens
cggcgaacgcggagagcacgccatgaaggcctcgggcacgtgccaggccgggcacctggtgtgtaaccaatgccgccaga

SEQ ID NO: 621371 - DNA, 50 bp, Homo sapiens
tcccagtactttgggaggccaagctaggtcttgactccactaacggggac

SEQ ID NO: 621372 - DNA, 100 bp, Homo sapiens
ccatctatcagcaggctccgggctgaagattgcttctcttctctcctccaagtcccgaaccgacagccacaagtggcgcccgaacagggacgtgagtgaa

SEQ ID NO: 621373 - DNA, 96 bp, Homo sapiens
ctacagtgtctctctgatgtctcttgcaacaggaagcataattctgtgcctcttcaggtggagcccgagaagttgaagacactaacagaaggtttg

SEQ ID NO: 621374 - DNA, 75 bp, Homo sapiens
ctcagcatggccaactccgggcccaacagcaacaggtctcaattctatcatggtgaacttacttcagattgtgcg

SEQ ID NO: 621375 - DNA, 100 bp, Homo sapiens
tttggactcagtttgtttctgctgattacacccgtgcccaggagcttgacgccttagataacagccatcctattgaagatggacgtggtagaggtcgcgg

SEQ ID NO: 621376 - DNA, 76 bp, Homo sapiens
gctgtgtgtccagaacgtgccatggagacgcttaacgggatatctgcattacctccacctcctccacctccaccac

SEQ ID NO: 621377 - DNA, 75 bp, Homo sapiens
caagacccatctttatgcaaagccagcgttacagtaatgttccagaacaccaatcagggtcttcaggcctggaag

SEQ ID NO: 621378 - DNA, 100 bp, Homo sapiens
tgaacacaacccaaaaacgatacgccatctgttctgccctggctgcctcagccctaccagcactggtcatgtctaaaggggcaagattcttgccaagaga

SEQ ID NO: 621379 - DNA, 82 bp, Homo sapiens
cacagcggggcaggagcgcttccgcaccatcacctccacagtccttagccaggatggaggctgttgtgaacttgtaccaaga

SEQ ID NO: 621380 - DNA, 50 bp, Homo sapiens
gcactttgctgtctgcaatcgaagttgagaatctacctgttactcgtatt

SEQ ID NO: 621381 - DNA, 83 bp, Homo sapiens
gccagagtagcaaggaaggtcaacgagacggtggagagcggctctgacactctggattgacaagtatctctatgccatgcggc

SEQ ID NO: 621382 - DNA, 100 bp, Homo sapiens
tgggcctggcttgtaatcataacttgaaaggggtttctctggatctcagcaactgtgagttaattggccttggtcctcacagctccaaaaagaaacagga

SEQ ID NO: 621383 - DNA, 100 bp, Homo sapiens
ttctgaagactgccctcatccacgatggcctagcacgtggaattcgcgaagctgccaaagccttagacaagtcacgagaagagaatgccttctagatgca

SEQ ID NO: 621384 - DNA, 100 bp, Homo sapiens
aacccacggaccattaatggacaaaaacatgagtcaatatgtattgtggcattcaaatcctagcactctgggagagatctatgccctcaacagagtcatg

SEQ ID NO: 621385 - DNA, 99 bp, Homo sapiens
ggtgaccatcgaaaggagcaagagcaagatcaccgtgacatccgaggtgcctttctccaaaaggccagtgaagaagcaaaggaagacatgaaaattgac

SEQ ID NO: 621386 - DNA, 50 bp, Homo sapiens
cacaaactgctttggtggaagatcccggtctgcggtgacagctcttcttc

SEQ ID NO: 621387 - DNA, 101 bp, Homo sapiens
ctggtgctcagcgccgcggggatgggggcctcgggcgccccgcagccccccaacatcctgctcctgctcatggacgacccctgggcgctgcctatggcaca

SEQ ID NO: 621388 - DNA, 96 bp, Homo sapiens
tagaaaatggacatcgttaccaagcaaacctagagatcactggccccaaggtggcatctcctgggccacaaggaagagtaattcttcatctaaagc

SEQ ID NO: 621389 - DNA, 76 bp, Homo sapiens
agaatgcctccttggatttacaatgagagtttggttccagagcttggaggactcctgaagtatgtacgacccttct

SEQ ID NO: 621390 - DNA, 75 bp, Homo sapiens
cgacagagtcctccgtgtcctcccccgcatgacccccttgtatggatggagcagatctgtgttttgaaatcgtaa

SEQ ID NO: 621391 - DNA, 98 bp, Homo sapiens
cagccctcagaaggaatggtaccggctgacggaggaggagtcagcccccatcggcatccgtgttctagatacaacattgcagtgtcgagatggctatg

SEQ ID NO: 621392 - DNA, 83 bp, Homo sapiens
agtctactaatggacagttagtcacccacctacatgttgaggatgaccagtgtcccagtgaaggaacgagtgaaggtgtctca

SEQ ID NO: 621393 - DNA, 95 bp, Homo sapiens
aaaaagagaagatgaagaaacccagcttgatatgttggctgttcacggaagaccaggatgtagatgagggacttgtctatgacactgtattcaag

SEQ ID NO: 621394 - DNA, 98 bp, Homo sapiens
cccacagcaacagaggcgcagcctcaaggaggaggagtgtccagcagacacgaatgcagagtttgagtccagatcccaaagcccagtacacaagtatc

SEQ ID NO: 621395 - DNA, 98 bp, Homo sapiens
cttccacagtacatcattgggcagctgggcctggccaaggaccccctggagggtgcccgcccctgcatccctaaaagcttcggctacagctcggtggt

SEQ ID NO: 621396 - DNA, 51 bp, Homo sapiens
gggtcccgccgggtctgaagcctgaacagagaaagcttcttgctatctacc

SEQ ID NO: 621397 - DNA, 75 bp, Homo sapiens
cgcacgtcggctcccacgcttagccagctcccgctgctgtgacttactcgaagcctcgattggccacattttggt

SEQ ID NO: 621398 - DNA, 99 bp, Homo sapiens
catcgtgggcttctacggggccttctacagtgacggggagatcagcatttgcatggaacacatggaccttctggaccctgcacggtggcggatgctgat

SEQ ID NO: 621399 - DNA, 100 bp, Homo sapiens
ccggctcccgctcgggcggccgcggacatgtgcaggatgtccttcaagggctctggctgagaacatggccaatgacattgatgagctcattggcattccc

SEQ ID NO: 621400 - DNA, 50 bp, Homo sapiens
cggtcatgtacccggtggactcggtgaagcatgcttttcacttccactgc

SEQ ID NO: 621401 - DNA, 51 bp, Homo sapiens
agagccgacccaacgatctgaactcctcagaaatcagagcctcattccctt

SEQ ID NO: 621402 - DNA, 88 bp, Homo sapiens
agcagatggaaacacatgaaagacttcctcaaggactacagtatgcacttaatgtccctattggtttttcagcagcagatgctgtaac

SEQ ID NO: 621403 - DNA, 82 bp, Homo sapiens
gatttcctgcagaaagacttgaaggcgtatacaggaacaatattgatgatgtagtaagatcaacagtacaaattctgaagtt

SEQ ID NO: 621404 - DNA, 80 bp, Homo sapiens
agaggtttgagttttatgaacgggctaagaaggcttttgctgttgtggcaacggggacagtcattttgtttactcattca

SEQ ID NO: 621405 - DNA, 101 bp, Homo sapiens
caggagtggccgttatggaacgcaggaatgtttctccagtgggttctttgtgctgccatatggttggttgccttggttgtcaatctgatattacattgtcc

SEQ ID NO: 621406 - DNA, 100 bp, Homo sapiens
ccgggtgcccacactggccgtcccggccatctcgctgcccgacgatgtccgcaggcgttacagaatgtctgaaggggacagtgtgggagaatccgtccat

SEQ ID NO: 621407 - DNA, 75 bp, Homo sapiens
ccataatgtcatgattgatcatgagcacagaaaggccttgctgtctctaaccctgatctgatctcctgccttgag

SEQ ID NO: 621408 - DNA, 75 bp, Homo sapiens
gctgggtgcagatgcagtgtggctctggatagcaccttatggacaggtgtctgatgatttgtgagcctcaagtga

SEQ ID NO: 621409 - DNA, 80 bp, Homo sapiens
cctaatggaggtctccagtttcgattttcagctgaactctcatctctcaacactggcaaatattcataagatctaccaca

SEQ ID NO: 621410 - DNA, 106 bp, Homo sapiens
cttctctgaggcggcgagagatggtcaggtctggagctcgaccgggccagactgttggcaagagtagcaagatgctgcagcacattgactatagaatgagatgtat

SEQ ID NO: 621411 - DNA, 97 bp, Homo sapiens
gcctgggcaggtgtcttcctcgagaggcaggcaggggatcccggacattgagaggatccagaatccagatctctggaatagctaccaggcaaagaaa

SEQ ID NO: 621412 - DNA, 75 bp, Homo sapiens
tcatgttgcaaatcacatgattgccacccacacagaatatgcctatgggtcctggagggatgaatcagagcggcc

SEQ ID NO: 621413 - DNA, 97 bp, Homo sapiens
aacagcttcctggagcagctgcgtaaaacatacaggccggagcttatcaaaggtggataatattaatgcagctgtgatggatttgaaaaaaaagaag

SEQ ID NO: 621414 - DNA, 74 bp, Homo sapiens
cgtctggagaaaagtggtgacttattggtgatctgtgaaaatggttcgctattcacttgacccggagaacccca

SEQ ID NO: 621415 - DNA, 100 bp, Homo sapiens
aaaagtgcagctgcaaccaatctctcagccctgtattatatgagatgcctggagagaatgagaaacagccgggacaggctcctaaacaggtaccgccagg

SEQ ID NO: 621416 - DNA, 101 bp, Homo sapiens
gctgcgcaggaggagtatgtcaagcgagccctgataaccagatgcaacgtgaagatctagactggaccctggtttgatgaaccagctgtaaaaacacattt

SEQ ID NO: 621417 - DNA, 106 bp, Homo sapiens
tgttgcattccttgtggttggtgatccatttggatttggagcaagaggtggtggtggccttcccccgaagaaatttggtaatcctggggagcgtttgcgtaaaaaa

SEQ ID NO: 621418 - DNA, 100 bp, Homo sapiens
ggcgtcttcaccaccatggagaaggctgggcctagatattatcctactgaagatgtgcctcgaaagctgttgagccacggcaaaaaacccttcagtcagc

SEQ ID NO: 621419 - DNA, 75 bp, Homo sapiens
cgccgcgccctcggcctgcacggcctctctacatatgacatcgtgatcactacctatagcctcgtggccaaggag

SEQ ID NO: 621420 - DNA, 93 bp, Homo sapiens
acttttctttcttgcctttacaattcactgcaggaagaacaggtctctgctggtggttctgaagccaaacctctgatcttcacatttgtcccc

SEQ ID NO: 621421 - DNA, 50 bp, Homo sapiens
ctcaaccccttctcttccaaaagaaagttggagtgactggtccccctgat

SEQ ID NO: 621422 - DNA, 83 bp, Homo sapiens
tccagagctgaggactgcctgtttgcagattctgaaagtcaagaagacatcatccggaatattgccaggcacctcgcccaggt

SEQ ID NO: 621423 - DNA, 138 bp, Homo sapiens
cagcccctgttccaggcatcaaaattaagaagaaaaaaaaagtactgtcacctacggctgccaagattcgggaacaaaatcgatatgacttgaaaacagcaggaccacaatctcagttgcttgctggaattgttgtgg

SEQ ID NO: 621424 - DNA, 100 bp, Homo sapiens
cagcgccgcgaaggcggtgctcgggccagcccttctctgccgtccctgggaggtcagaatggcggcagcggagcatcgtcattcttcaggattgccctgc

SEQ ID NO: 621425 - DNA, 100 bp, Homo sapiens
gaaaggaacggctgaaggccctacgggagaaaaccgggcgcaaggttctgcggggagtgtctccagccctgcctgcaggtgccatccccgctgtgcccac

SEQ ID NO: 621426 - DNA, 100 bp, Homo sapiens
tgaactgctggcaggctgccttccctgacccccagttacgcctggaatatgaaggcttccccgtcccggtttctgaaggattgtcattcttgcatagcag

SEQ ID NO: 621427 - DNA, 83 bp, Homo sapiens
cttctgaaccatccacacatcataaagctttaccaggatctggaaatagtatattcctatttacatggtatggaagccttatc

SEQ ID NO: 621428 - DNA, 119 bp, Homo sapiens
gttttggattacataaaccagtcacccaagtgcattgcctttggaaacgagatcaatgaggaaatctccgtgaagcaccttccgtctacagagcctgacccccacgtggtccgtatcgg

SEQ ID NO: 621429 - DNA, 83 bp, Homo sapiens
gaagatcatcgagcatttcaaacgcgccgtgccgtccctgcagtgacaccgaggtgctcctagccgtctgcaccagcgacttc

SEQ ID NO: 621430 - DNA, 100 bp, Homo sapiens
tgaatcctcaagaatgtctgcctgtcattctggatgtgggaaccgaaaatgaggatgaatttcacccattcatcgaggcacttcttccacatgtccgtgc

SEQ ID NO: 621431 - DNA, 74 bp, Homo sapiens
cgaggactacccccgcttctaggtgttgacttcaaaatcaaaactgtagagctaagaggaaagaaaattagatt

SEQ ID NO: 621432 - DNA, 90 bp, Homo sapiens
gattggagtgggggcacccgtgtacatggccgccgtcctggaatacctgacaggtacaccaggggttggaaaaaccacactaggcaaaga

SEQ ID NO: 621433 - DNA, 100 bp, Homo sapiens
ggaagtttgagacgcgggagaatgcaggctgcgtgctggtacgtgcttttcctcctgcagcccaccgtctacttggaaggtgggagtcaatcattttgac

SEQ ID NO: 621434 - DNA, 95 bp, Homo sapiens
tgcctgaacattatgtggaaggatcaacagtcaattgtgtactagcattccaaggtattagaaaactactcggatgctccaatgacaccaaaaca

SEQ ID NO: 621435 - DNA, 100 bp, Homo sapiens
caacagactcacaattggagaaggacagcaacaccacctggggggagccaaacagggtaaaaaacttgttgctgcaagtcaagctgccttaggcttataa

SEQ ID NO: 621436 - DNA, 75 bp, Homo sapiens
tatagtttccagatggctctaacctcagtggaatttgtaagtgtctgggttcgagatcctaggattcagaaggag

SEQ ID NO: 621437 - DNA, 50 bp, Homo sapiens
gcgcggggaccgctgtgctctcgtggtagacggaggagaagtccatcccc

SEQ ID NO: 621438 - DNA, 100 bp, Homo sapiens
cggacgtgtccgcgaagatggcgggccggaggatgcctggatctgaagctagaggaattgaaatcctttgtcctaccctcctggatggtggagaagatga

SEQ ID NO: 621439 - DNA, 133 bp, Homo sapiens
ctgggcatttttcatggccagtggcccatgtttagatgacattgcagaactggtggatgcgggaaaggtgctagagatgacactgcagagtagagaacaaaggaatcttagtaattgttcaatccaatctcca

SEQ ID NO: 621440 - DNA, 100 bp, Homo sapiens
gcgggaccccaggatgggggacaggaggctgcggggcctcaggtctcagcggcggtggcagccgaggtgcaggatgcaagaaggcgccccccggccgggc

SEQ ID NO: 621441 - DNA, 100 bp, Homo sapiens
ttggaacatcgggaagaaaccattacaatagatcgagcctgcagacaagaaacattcgtttatgagatgagagcagctctaaattgggaagcaatgccgg

SEQ ID NO: 621442 - DNA, 100 bp, Homo sapiens
gtccctgacatcatctctgtgcactgataataaccctgcagtacgtagagaaatcgacactcttaatgaacgtttagctgctgaaggacaagcgattgat

SEQ ID NO: 621443 - DNA, 100 bp, Homo sapiens
gaaagacgtgcggatcctgctggtgggagaacggttattttggagctgttggagcactccttgagctgttgaagatcccgtgatcattacctggggaggg

SEQ ID NO: 621444 - DNA, 75 bp, Homo sapiens
caagccaaacatcaagcagaatgtgatttgcttgaagatatgagctgccactgcagagccccgccatggaagaca

SEQ ID NO: 621445 - DNA, 100 bp, Homo sapiens
ctgacctttgctccggcctcgtaggctgggaggcggcagaatgcagccagaggagggcacaggctggctgctggagctgctgtccgaggtgcagctgcaa

SEQ ID NO: 621446 - DNA, 74 bp, Homo sapiens
ccggcccacagtgggggtgtgcaaacccgagagaactggagtacccaaaggcaagtggaacagctctaatgggg

SEQ ID NO: 621447 - DNA, 97 bp, Homo sapiens
ttgaaagcgtgctccacaaatatttacagtcggaggagtactcggtgaaatcctgtcctgaagactgtaagcattttgaaagcgaagcagaagccgt

SEQ ID NO: 621448 - DNA, 89 bp, Homo sapiens
cttggttaaaacctgacacttttaacaggaaggcgacatgccaattcatgaacttctcagcctttatggttatggtagtactgttcgac

SEQ ID NO: 621449 - DNA, 100 bp, Homo sapiens
gtaaagctgggtatcctcagtatgtctcagaaattttggaaaaagttacatgtgaaagaagatatattccagctggaaatgcagaaatcacaaaatgaag

SEQ ID NO: 621450 - DNA, 90 bp, Homo sapiens
ccgggcttgccctggagccctcagtggtattcatgggtagtttgaaatatccagatgagaatggatttgatgccttcctgaagaagcatg

SEQ ID NO: 621451 - DNA, 100 bp, Homo sapiens
caagtctacaccatcttgactgtccagctctttgcattcttaaacctactgcctgtagaagcagacattttagcacgggacgaccctgggacagtctcca

SEQ ID NO: 621452 - DNA, 75 bp, Homo sapiens
cctactttaagagataccaagtgaaatttagaagacgacgagtgtcctactgtccgtggcagagctgtactggcg

SEQ ID NO: 621453 - DNA, 98 bp, Homo sapiens
tttggagctgtcctggaagtaaatatccctaggaaaccagatcatgctttacgattatggaatatccagacggacactctggtggcaatatttggagg

SEQ ID NO: 621454 - DNA, 80 bp, Homo sapiens
gtacctggatctcatcaaaaaggacaccagcaagctgttcaatgaggaggcctgggccgaggccactggtgcatatgttc

SEQ ID NO: 621455 - DNA, 100 bp, Homo sapiens
ggatagctccaaactgggatatcagcgtcaccctttacaccagaaagctggcgggcactatggggaaaaaacaaaacaagaagaaagtggaggaggtgct

SEQ ID NO: 621456 - DNA, 100 bp, Homo sapiens
cttccaggacatcaagcccatgcgggaccagatcatccgcgtgaagcggaatcttgggatttagaggaaaaactgcttgatattagaaagaagagattgc

SEQ ID NO: 621457 - DNA, 100 bp, Homo sapiens
cttccactggcgcgggttgagttccctgttgcccttggtctcggggtcgctgtaggcgctgaggctgcagtgtggaaccatcagagaatctacaatccct

SEQ ID NO: 621458 - DNA, 78 bp, Homo sapiens
cgctcctaagcctgcacagccgcggcggcagcagcagtgagagaacccagtgacttgattgtaaaaatttacagagcg

SEQ ID NO: 621459 - DNA, 82 bp, Homo sapiens
tggctgctgctggcaatctggggtttccaggcctgaggtgcccgccctggccccaggagaatgaaccagccgcagaggatgg

SEQ ID NO: 621460 - DNA, 95 bp, Homo sapiens
ggagcccatgtcctatgactcagacctgggcacagcaaatgctgaggactcagaccagtctctgcaagagctggagtgcagtggcgtgatctcgg

SEQ ID NO: 621461 - DNA, 51 bp, Homo sapiens
ctggggccatcgcggccatgagcgatgatattggaaaaattgatgtacaag

SEQ ID NO: 621462 - DNA, 97 bp, Homo sapiens
ctgcgttactcccgggatggtcgccgctggatgggctggaaggaccgctggggtcaggagtacgcctgcctcacaccttgcgatgcgccaacatcac

SEQ ID NO: 621463 - DNA, 101 bp, Homo sapiens
atctaccacactaagagttgaccagtcaattctcacagttgctgaacctgtttgcatgagttgctcctgacggccctttaggatacttccatgtctgtagg

SEQ ID NO: 621464 - DNA, 100 bp, Homo sapiens
agtcagaaaacaaggtgtctgcaggaccaacctctcctctggatgctctagcagataatcaccagaatgggagtgaatgacttgtggcaaattttggagc

SEQ ID NO: 621465 - DNA, 142 bp, Homo sapiens
gaaaaagctgcttgaatgtctgccgaaatgttcaagtttaccaaaagagaggcaccgctggaacactaatgaggaatctttgtctgaagtggaagaaaaatacaagaaagccatggtttccaatgcacagttagacaatgag

SEQ ID NO: 621466 - DNA, 101 bp, Homo sapiens
accgcaaccattgacgccatgtcgggttattcgagtgaccgagaccgcggccgggaccgagggactgctgtgtaagctatggtggcatgtggtaccttaaa

SEQ ID NO: 621467 - DNA, 75 bp, Homo sapiens
ggggacagaggcaccaaggacctccaagacaggccttgctctattactgtgaagcactaacaaagacaaacctcc

SEQ ID NO: 621468 - DNA, 101 bp, Homo sapiens
ctcactgaccctctggaaagttcaacagattatacaaagctgcaagaagaattttgtctaatcgcacagaaaggagtctctgagaacaagccagccagagg

SEQ ID NO: 621469 - DNA, 98 bp, Homo sapiens
acatgttgtctcttagaagtgggagctgaacgaagccatgcagtgacacccgctaagacttgttggtagccatgtcggagccccacagggtccagttc

SEQ ID NO: 621470 - DNA, 145 bp, Homo sapiens
tctgggaagcagaacctggccggagccactagacagagccgggcctagcccagagacatggagagttgctacaacccagcaaatttagcgatcaacccagcggccttgctgcccacagcggcttcccagatctctgaagtaaagc

SEQ ID NO: 621471 - DNA, 75 bp, Homo sapiens
acggagcataggaggaaaattcatcatctgatctttgaacaggtactaagtgaactggagcccctatgtctggca

SEQ ID NO: 621472 - DNA, 100 bp, Homo sapiens
gtggtcattacagaccctgaaaaactggaccaaattagacagagggatgtctcagatgcagcttgcacaccatggccctcatggcttaggacatccccac

SEQ ID NO: 621473 - DNA, 75 bp, Homo sapiens
cagattcgcagtggtcgcttcttctccttgctgcagctgataaattctaatgaacccggagtgatcatgtttaag

SEQ ID NO: 621474 - DNA, 82 bp, Homo sapiens
cgcggatctcaccgccgctcaggacatgcaagaaagcacttcagccaagcagaagggagccagctggacgaggtgcgccagg

SEQ ID NO: 621475 - DNA, 101 bp, Homo sapiens
ctcagtgggactagttcgaactatgtggaggagatgtactgtgcttggctggaaaaccccaaaagtgtacataagctgagctgcccctcctggacctgatg

SEQ ID NO: 621476 - DNA, 50 bp, Homo sapiens
ctacaaccttcgatctcctgacgagtcagctccgccgaaggcgccgccaa

SEQ ID NO: 621477 - DNA, 100 bp, Homo sapiens
tcccacctgcatgtaccggctccccaacgtgcacggcaggagctacggcccagcgccgggcgctggccacgtgcagagacggggtttcaccattttggcc

SEQ ID NO: 621478 - DNA, 75 bp, Homo sapiens
ggcttccccggaatggagggctccgggcccaagtttgaggagtgaaagagtttctagccaaagccaaagaagact

SEQ ID NO: 621479 - DNA, 75 bp, Homo sapiens
aaagaaggcatccctcccgaccagcagaggaaattgatgaagcctgtaagagaataaagcgtgaagttgatgatt

SEQ ID NO: 621480 - DNA, 100 bp, Homo sapiens
ctcggcccgcgggggagccccgggagccgcacgctagctatcctagaagactatgcggacccgtttgatgttcaggagactggcgaaggctcagcaggag

SEQ ID NO: 621481 - DNA, 97 bp, Homo sapiens
cgccatggcgttcctcaaactccgtgaccaggtatgagaaagtgccagtcatcttggttgggaacaaagtggacctggaaagtgagagagaagtatc

SEQ ID NO: 621482 - DNA, 101 bp, Homo sapiens
tttgtctcctttttcaacaaatggttcctggtccagaactttacacagaaaaggtgctcaaaggatatttgtttaatgaatgtggtatgctgacatttaaa

SEQ ID NO: 621483 - DNA, 99 bp, Homo sapiens
tattcatcaataatgaaatgctgactaaggaacaagtgatgcagaagaccacaagcctttgaaaaaaggaagtcgaactccttcagacaggactgtgaa

SEQ ID NO: 621484 - DNA, 75 bp, Homo sapiens
gggcctgggagctgcctctgaggaacacgccgcaggattcactacaacattttctattgcctatatcttcaggag

SEQ ID NO: 621485 - DNA, 82 bp, Homo sapiens
gggcgggacagcggccccctggagggggcagtcccgggagaacctgcggcggccggagcgaacatccagtcatggataaaaa

SEQ ID NO: 621486 - DNA, 142 bp, Homo sapiens
acagagaacgacaacaccgtgctcctcgaccccccactgatcgcgctggataaagatgcgcctctgcgatttgcagtgctcctgcgggaagaagtgtcgcggctccaggaggaagttcaccttctccggcagatgaaggaga

SEQ ID NO: 621487 - DNA, 83 bp, Homo sapiens
gcagccactgcaagagtcaggttccgatgatcgcgctgcagctccctgtgctgtcaggaatctacaggacttggctcgtattt

SEQ ID NO: 621488 - DNA, 100 bp, Homo sapiens
tccagggaaaggatgacatatttttggacctgaaacagaaattctggaacacctatatgagagatgcaggtcagctcctccagtaccacaacttctgaga

SEQ ID NO: 621489 - DNA, 75 bp, Homo sapiens
tagctaatattggaacaagcgttcagaagaattacatgaatgacagtcttcgaaccaatgtgtttgttcgatttc

SEQ ID NO: 621490 - DNA, 100 bp, Homo sapiens
ggtgtgactggggcaggaccatcagatcaatgagctgagcaatgttcctgttcctgtcatgctaatgccagatgacttcaaagcctacagcaagatcaag

SEQ ID NO: 621491 - DNA, 96 bp, Homo sapiens
agatcttagacatccctttccatcaagtgtcctacgtaaaggagtattggaatgatgtgttcagttctgacccagtgggtgatatatgccatccga

SEQ ID NO: 621492 - DNA, 95 bp, Homo sapiens
ctttccgaatctgcaaaagaaggcctgtgatacttgggctgtgatcctctagagccagcttggactcacatcattctatggggttgaagacaact

SEQ ID NO: 621493 - DNA, 100 bp, Homo sapiens
gacagtgagcgccggcgcgaggacagcgcgtgcccgcgaggagccgccgcgcgcccgcgccctccgcgcgacgccaggcccagctgagagccagcctgga

SEQ ID NO: 621494 - DNA, 88 bp, Homo sapiens
ccccttggattcagacgccgattcgcccaggttagcactctacgtatatgaatatctgctccatgtaggagctcagaaatcagctcaa

SEQ ID NO: 621495 - DNA, 83 bp, Homo sapiens
acctgctgagggccgtcagcaacatgctccagaaggcacccaatatttgaaaggagaggagatgatttgtacacaaatgtgac

SEQ ID NO: 621496 - DNA, 75 bp, Homo sapiens
gggacgctggggccgaagcagcatgtgacaccgaccaggacaacactcgcatctcctcagccgggtgcctagggg

SEQ ID NO: 621497 - DNA, 74 bp, Homo sapiens
agaagaatatgaatggaaagaaactgctagtgtctgcgagattaatctctcatggccgctgcacaagaacctgg

SEQ ID NO: 621498 - DNA, 100 bp, Homo sapiens
gagcccagaagctgccaccgaaccaaggtgtcatcaatcttacagaagaagtgctgtgggtcaaagtgaatataaacatgaatggttattatattgtaca

SEQ ID NO: 621499 - DNA, 80 bp, Homo sapiens
ctgggtgctggacgagggcgcctgtgtggattctgaaagtcaagaagacatcatccggaatattgccaggcacctcgccc

SEQ ID NO: 621500 - DNA, 100 bp, Homo sapiens
gatgccctcagtgaagaactagtccagcttcgagcacaaggtggataattactgtaccttcctcatggaaaaagttttatttaaagtgttatttctcatt

SEQ ID NO: 621501 - DNA, 87 bp, Homo sapiens
agaacctaaagaccaagcatttggcaatggaaatggaataatagacaatatggtttagataattctggaggatacaaacaacaacaa

SEQ ID NO: 621502 - DNA, 60 bp, Homo sapiens
ggccaccacacacacccagctaccaggatgccttcgtgaagatcgtgaggcacgagggca

SEQ ID NO: 621503 - DNA, 98 bp, Homo sapiens
ttcaagatactgacgtattcctgctgttcccagaagcgaagtggagagcgccagagtaatggtcagaaggttggtgctgtttaaaggggaaaaaaaag

SEQ ID NO: 621504 - DNA, 75 bp, Homo sapiens
aaacttgaagcaacccttaatgtgcatgatggttgtagctcttcagaaaccaggctgctttcaggaacattgctg

SEQ ID NO: 621505 - DNA, 100 bp, Homo sapiens
gctaggatgatcgaggttgtttgcaacgaccgtctggggaagaaggtccgcgttaaatcgtgtgaaggcaaagaagaatgctgctccattcagaagtgaa

SEQ ID NO: 621506 - DNA, 100 bp, Homo sapiens
aagaatacattttatgaaacattaccagtggcaattaatggaaatggacccaccaagacagttcgtggaagttatggctagtgctctgactggttatctt

SEQ ID NO: 621507 - DNA, 83 bp, Homo sapiens
ggacggagacagacctgtccttcaagaaaggcgagcggctccagattgtcaacaacactgtcaacagcatctccaccctggag

SEQ ID NO: 621508 - DNA, 98 bp, Homo sapiens
ggacaaagagtcaaggtggggagccaacatacaatgtggctgtcggcagagctggtagaggacacattcagctaacgtattttagcaggtggagtgag

SEQ ID NO: 621509 - DNA, 75 bp, Homo sapiens
ccactgttttcagtattttaccagtacctggagctgaccacagtggccgagaagtcgcgcgtgctgcagctggag

SEQ ID NO: 621510 - DNA, 74 bp, Homo sapiens
aaccaggagccgccgcggcagctcaggctccactgcaacatcacggtctcctctgagcctccggcctccataag

SEQ ID NO: 621511 - DNA, 82 bp, Homo sapiens
cgcttcgctggccatttaggagctctgctcaaagccagacgagcttcttcgagacaccttcacttccctgggctatgaagtc

SEQ ID NO: 621512 - DNA, 98 bp, Homo sapiens
ttgctgccgccatacgcgctctccctgtttagatcctgacgggagaggactggaatgcagtgatgtatcacgggatcgaatcgcaaggcggcgtcagc

SEQ ID NO: 621513 - DNA, 82 bp, Homo sapiens
cgtctcctgtgtggcgatggtcttcctgctggggctcatgtttgagggcgaactttctgaccaagtatacaactacccagag

SEQ ID NO: 621514 - DNA, 75 bp, Homo sapiens
tgcaggagaggattgtgtctgcttggtgtggagccatgaagggggatatgagactttctactcggaatatcctga

SEQ ID NO: 621515 - DNA, 83 bp, Homo sapiens
taatatggaatgttcttaacccagaagtagctgaatgtgttactccattgctgaggagtgggccagttacaacagaagacact

SEQ ID NO: 621516 - DNA, 76 bp, Homo sapiens
cagatcccacgccattttcacgatccactacacgcaggtttggcatagaaatggtaccccttgttcaaaatgaaca

SEQ ID NO: 621517 - DNA, 100 bp, Homo sapiens
ggagctgacggtggaggttcgcggctctaacggggctttctacaaggccccttcacagatgtagtcactacaaatcttaaattgcgaaatccatcggata

SEQ ID NO: 621518 - DNA, 100 bp, Homo sapiens
ggcacagcaagacccacacgtccgttcgagctctgactgcagacctaccaaaacagcaacagccaactcagtttataaatccagaaacacctggctatgt

SEQ ID NO: 621519 - DNA, 74 bp, Homo sapiens
caggagctgcggccccgtccggcccgggctggtccaacgagcgctcctccaagcggagccttggagggcacggc

SEQ ID NO: 621520 - DNA, 83 bp, Homo sapiens
aattgataacaccctgtaacagctgaggggatatgagactttctactcggaatatcctgagtgttgcgtggatgtaaaaccca

SEQ ID NO: 621521 - DNA, 149 bp, Homo sapiens
gagcaggacgcgccggggccgcctcctcccgcacggacccatgaaccagccgggcggcgcggcggctccgcaggtttcttctgggtccattcaagagagtgtgaaagaccgagtgattgactcaagactgcagctgtttatcaccaagc

SEQ ID NO: 621522 - DNA, 82 bp, Homo sapiens
gcccgtgccgcgagcgcggcctgcaggagagcagcaagatgggcatggaggcggtgatggcgctgctggaagccacgcctga

SEQ ID NO: 621523 - DNA, 100 bp, Homo sapiens
tcaccatcgtggaatcaaacggtgatttgaagatattaaagctagaaattggaactagaaaatcaaaagaattcaaggcatcttaacgtgacagttgaac

SEQ ID NO: 621524 - DNA, 100 bp, Homo sapiens
ctggttctggggctgggattggaactgtgtttgggagcctcatcattggttatgccagggatgaggagaatttctgtgccactgtgcccaaggatggacg

SEQ ID NO: 621525 - DNA, 50 bp, Homo sapiens
cagctcaccgaggacggggactctcgactcaaccccgagtctcacctccc

SEQ ID NO: 621526 - DNA, 100 bp, Homo sapiens
tcccatcctatgccgacgatggggtccacagacttcccacaggaaggcatgcatcaaatgcataaggtggtcctgctgcaagctcagctgactttggagc

SEQ ID NO: 621527 - DNA, 74 bp, Homo sapiens
cttccatccgcctttgatcgtcttcctcttcagccatccaggaagatgttaccgagtacttcagtgaattcctt

SEQ ID NO: 621528 - DNA, 51 bp, Homo sapiens
agagagctattattccctgtattaaagttgtcgagatgtccacagaaggag

SEQ ID NO: 621529 - DNA, 75 bp, Homo sapiens
agactcctgaccctcagaatgacctctcaagctggatccaaggataaaaagatggaccaaccaccccaagccaag

SEQ ID NO: 621530 - DNA, 75 bp, Homo sapiens
gaacttctgcccagctctccttgggaatggttcccttcatttttgttggcacccgagagaacatcagcaatgccc

SEQ ID NO: 621531 - DNA, 88 bp, Homo sapiens
ccaggttacatacagcttacatcttgcatcctcaagcgggagtaactattcccagtcagaggcgctatgtgtattattatagctacct

SEQ ID NO: 621532 - DNA, 51 bp, Homo sapiens
atcccagcactttgggaagctgaggattatctccgagaagaagctgaagag

SEQ ID NO: 621533 - DNA, 100 bp, Homo sapiens
cccgcgcgctgcccacgattcgcttctgaggctttaccgccagcacctgttcagaatcacacaaataagcatcaggtattcaatgcatctcttcaagacc

SEQ ID NO: 621534 - DNA, 100 bp, Homo sapiens
gcaagaccacagctggtgaacagtccagtacaaaattggacagctgtacatgatcagcaaacacagccatgaacagagtgaccggggagaaggggtggag

SEQ ID NO: 621535 - DNA, 100 bp, Homo sapiens
tgaaccggcacctgcacacctggatccaggataacggaggctgggacccagatgatgtggtaccagttggccaaagaagagcctggtgttggtgcatgtg

SEQ ID NO: 621536 - DNA, 98 bp, Homo sapiens
cgcgctgcgcagttttgttctgctccagctgttcgaaggtgatccagctttcatgacgctggtcattatcttgctgcatgtattctggggcattgtat

SEQ ID NO: 621537 - DNA, 100 bp, Homo sapiens
ggcgcgatgagcatagagacgctactggaggcggcccgcttcctggaatggcaagcgcagcaacaacagagagcacgtgcgcgagcttcggcctcggctc

SEQ ID NO: 621538 - DNA, 100 bp, Homo sapiens
ccgcctggcaccctgcagggcaccaagctacctgtggagccgaggaaaagacttcacagagaatgcagttgtcttgacttcaggtctgtctgttctgttg

SEQ ID NO: 621539 - DNA, 74 bp, Homo sapiens
atgcccagacaagtccccagggaatgccacagcatcctccagcacctcagaattctcccagtccttggctacat

SEQ ID NO: 621540 - DNA, 90 bp, Homo sapiens
cacagaagcagagttacaggacatgattaatgaagtagatgctgatggcctccccatggccacccatggaccagtcggcattcacttcct

SEQ ID NO: 621541 - DNA, 98 bp, Homo sapiens
caggacaggacgaagccggagtgtaggcggcagaggattcgctcccagagcagctgcggccaggaatcatattgacaggtcatgaaaatgagaccaaa

SEQ ID NO: 621542 - DNA, 85 bp, Homo sapiens
tgaacctccaaatctttcagtgccacagtgtagagtatgattttcggcagcaggaaggcaggttccatgaagttttgcagagtct

SEQ ID NO: 621543 - DNA, 100 bp, Homo sapiens
tgtatatacgctacattcacaaactctatgatctgcatctcaaagcacagaactttacagggaagtttggttggcttagtggattatccagatgatgaag

SEQ ID NO: 621544 - DNA, 82 bp, Homo sapiens
tggatgtagcaaggaagaaattgttcagttcttctcagccgaggaggagctggtggaggctgacgaggcgggcagtgtgtat

SEQ ID NO: 621545 - DNA, 83 bp, Homo sapiens
gccagggcagccaggcagagctgcacccgctgccccagctcaaaggtccggtggcagccttcaaggtcgccacgccgtattcc

SEQ ID NO: 621546 - DNA, 90 bp, Homo sapiens
cttcaaaagcagtgcaactggctcagtattcacagggaaagctgtgaggacctacctggtggttctgtgccttcccctactctcttctca

SEQ ID NO: 621547 - DNA, 90 bp, Homo sapiens
gccaaccgcaaccattgacgccatgtcgggttattcgagtgaccgagaccgcggccgggaccgaggatgcctttgaagatgagaaacccc

SEQ ID NO: 621548 - DNA, 50 bp, Homo sapiens
cgctgcgcaagcacgctgaggaggataaacatcacgatgctgctcatgaa

SEQ ID NO: 621549 - DNA, 90 bp, Homo sapiens
gaatgaaggagatgcttattatttgttgaaggattttgcactcaccattaaatctatcagtttctccacagacactacccaaagcagtcc

SEQ ID NO: 621550 - DNA, 97 bp, Homo sapiens
gaggtttgtaagcttgctcctgctaaccacttcattgtctgagagagaaacgtgaactactgagttcttcattatgtctgatggagattatgattac

SEQ ID NO: 621551 - DNA, 80 bp, Homo sapiens
gggcagcggaagcggcgcggcggtcggagaagtggcctaaaacttcggcgttgggacgaggcacggatccagaaggtgac

SEQ ID NO: 621552 - DNA, 98 bp, Homo sapiens
tctgaaggtgaactctaaagaggaaattgaacttgaatgtggaacccagctttgtcttctgtttccccccgatgaaagtattgacttgtatcaggtca

SEQ ID NO: 621553 - DNA, 75 bp, Homo sapiens
agaaactagcaaactttttaatgaggaatgtgaagcctcagtttaggtcatctggtggttcagaacactcaacag

SEQ ID NO: 621554 - DNA, 100 bp, Homo sapiens
tccgtggtctcagcccaggacctccaggggaacaatgaggcctacgcagagctcatcgtccttgattactccaaaggtttcggcggcaaatacggtatcg

SEQ ID NO: 621555 - DNA, 86 bp, Homo sapiens
ctctacctcctgcgaggcctcccgggctccgggaaaactacactggccaggtttggtgcacctcgatttggaggaagtagggcagg

SEQ ID NO: 621556 - DNA, 74 bp, Homo sapiens
atatgcaaagtgtgaccagtgtggaaacccaaagcgcctgaggaccggcaacatggtgcggtcggggaataagg

SEQ ID NO: 621557 - DNA, 100 bp, Homo sapiens
aaaccatttatgtcttttccagtggacagtagttctgctgttgggctctttccaaattttaacacagagtctaccatggctcaagaatctcccaaaaatt

SEQ ID NO: 621558 - DNA, 100 bp, Homo sapiens
caaacacagactgtttgacttagaatcttcccttttttactccattcaagagcagcattcataaatttccagtgtgaagcctcagtttaggtcatctggt

SEQ ID NO: 621559 - DNA, 100 bp, Homo sapiens
ctcagccccatggggtatatccaccctcaagtgtggtctcctctgagcctccggcctccataagacccaaaacagatgacacctcttcccagtcccccgc

SEQ ID NO: 621560 - DNA, 75 bp, Homo sapiens
agcgggagctggacggcgagcgcgagcggcgcgagaaagagtagcccatcgaagccagagcagtgaaggagtcag

SEQ ID NO: 621561 - DNA, 83 bp, Homo sapiens
gcttaagatgtcctgcctgaaaggcggtgcgtctttctacgtgaataggattttgtggctggccagatacactgcatcatctt

SEQ ID NO: 621562 - DNA, 90 bp, Homo sapiens
ggtggacctgctggcgcaggacgccgacatcgtgtgccgctgccagtcagattctgaggaagatgaacccacaaagaagaaaactatcct

SEQ ID NO: 621563 - DNA, 96 bp, Homo sapiens
agtcagattctgagccttcagacttctgtacagcagctgaaagaccagataaacaggggtcacatgacgacagaagccaagagggctgcaaagatg

SEQ ID NO: 621564 - DNA, 82 bp, Homo sapiens
cgcgtcccgctcgctgggagagaggtacctctccttttccctctccctttccctaaggtgtggaaacaggaagagaactaga

SEQ ID NO: 621565 - DNA, 75 bp, Homo sapiens
caagtggagccccaaacaagtggtggactggactagaggagaacgaaggacttatcctgaggagcgaatgcctct

SEQ ID NO: 621566 - DNA, 82 bp, Homo sapiens
tccgtcccccgcgggtctgctctgtgtgccatggacgggagaactacgatgacccgcacaaaacccctgcctccccagttgt

SEQ ID NO: 621567 - DNA, 50 bp, Homo sapiens
aagtctgcctcagagaaggggaagctggaatgccttctccagaatggacc

SEQ ID NO: 621568 - DNA, 100 bp, Homo sapiens
gtaacagatgtggatggacttgaaccaccaactcagcttagaaggaagccaagacttaaagtttcctagatcccagcttctccagctccagaaatcccag

SEQ ID NO: 621569 - DNA, 82 bp, Homo sapiens
agctgtgctcgcgctactctctctttctggcctggaggctatccagcgtggcacgtctctgagcttcctggtgttggtgaca

SEQ ID NO: 621570 - DNA, 98 bp, Homo sapiens
cactttcatagcaagtgtgatcggcacccgagggcttgcggctgaaggtcaaaatgcagatcttcgtgaaaacccttaccggcaagaccatcaccctt

SEQ ID NO: 621571 - DNA, 100 bp, Homo sapiens
cgagactttcaaagatggaatcacaaacggcgcacattggtatgatgtggaagacttgtgcaccatggacaattttgctgagggagatttcactgtggcg

SEQ ID NO: 621572 - DNA, 100 bp, Homo sapiens
tggcacgctctatagccaaggaaggcttcgagaagattagcaaaggtgctaatccagtggaaatcaggagaggaccgcctggggctaaaggaaatggaca

SEQ ID NO: 621573 - DNA, 75 bp, Homo sapiens
caaaagtccaggaggaagagcatgaccttgttgacgatgacatcaccactgcccacacatcttgctgacttcact

SEQ ID NO: 621574 - DNA, 74 bp, Homo sapiens
agagccgggggagcccagcccagccagcctccagagcctgagcccttgtgaagccggcaatgacaagtctgtat

SEQ ID NO: 621575 - DNA, 75 bp, Homo sapiens
ggacaccaaacacatagtgggaattgcctgtgggcctgcccaggacaaacatgctttattagatgtaacaccaaa

SEQ ID NO: 621576 - DNA, 100 bp, Homo sapiens
gtcagcactacaacatctccccccaggatttggagactgtatttccccatggccttcctcctcgctttgtgatgcagttcttctcaccactaaatccaat

SEQ ID NO: 621577 - DNA, 82 bp, Homo sapiens
cgctgctgccgccgccgcccgcgaagccggagctcgagccgcagcggcttcctgcctgacacagctcacttcaagaagtgca

SEQ ID NO: 621578 - DNA, 75 bp, Homo sapiens
gggagagtacatgagacgatgaagcaaaggagcatcgtgcatcaagtcaccagggtggtccattcaagctgcaga

SEQ ID NO: 621579 - DNA, 100 bp, Homo sapiens
gaaaatcatggaagttgattactcagtctctaaaaagctaaggtccaggtcaagacctcgtctccgttctcatagtcgtagcagtgaaaggtccagtcac

SEQ ID NO: 621580 - DNA, 51 bp, Homo sapiens
agggaagagacaggaagatggtgcccagtttcattggggatcatgtccatg

SEQ ID NO: 621581 - DNA, 51 bp, Homo sapiens
cagaaacgggtcctgctgctcaccaagtaagactttgaccccgacgcaggc

SEQ ID NO: 621582 - DNA, 100 bp, Homo sapiens
agaaactgaagcagagcatgtggagtctgctgacagcgctctccggaaaggaggcagatgcagagcatcagacatcgatgagtcatcagtgatgcagctg

SEQ ID NO: 621583 - DNA, 96 bp, Homo sapiens
cgggggtgctgcagaggacacgaggcggcgggctggagacatggaccgcggcgagcaagctggagaatgctggaggagaccttaaggatggccacc

SEQ ID NO: 621584 - DNA, 100 bp, Homo sapiens
aggcgtattctggtaatttcgaggagggaaagcaggcaggatgggagagtcgccgatagaaccacctcttccctgcctcctgggcttgggggaagcttga

SEQ ID NO: 621585 - DNA, 75 bp, Homo sapiens
gggacgagagggcctgacgtacaggtgtattacctgactgcttaaccgatggctctgatgtggtcagtgaccttg

SEQ ID NO: 621586 - DNA, 100 bp, Homo sapiens
tctctatggagcttcagtagcaaataaggacatcatctgctataacctacaagcagttggacagccagagactgctgctactttgaaacgtacgatagag

SEQ ID NO: 621587 - DNA, 89 bp, Homo sapiens
gatttggagacagggacagtactttttgagattgccaaaccttgcgtttcagccgtttccctggggagatggtaaccatactctattcc

SEQ ID NO: 621588 - DNA, 90 bp, Homo sapiens
cggcccacagtgggggtgtgcaaacccgagagaactggcgctcctttaccctcatcgtggaggcctgggactgggacaacgataccaccc

SEQ ID NO: 621589 - DNA, 100 bp, Homo sapiens
aaagaaaacttcctgaagaacatgccaggtgtcaacatgaaaacttagtagaactacttggtttctcaagtgatggagatgacctctgcttagtatatgt

SEQ ID NO: 621590 - DNA, 82 bp, Homo sapiens
ctgccggaaggggtcccgaagccccctgcaggaactctacaacccaatccaggggcatggtctagtggcccagtcaggacgc

SEQ ID NO: 621591 - DNA, 101 bp, Homo sapiens
aaagcaattttagtcgatttcacgcggactccgtgtgcaaagcctcgaccctgtcacactcactgaaaatggcggaccagaacctggagaaactgaagacg

SEQ ID NO: 621592 - DNA, 151 bp, Homo sapiens
gcaatagggaaagtgaggcagctgcaaggagggcggcgggactgcactcgagtgtccagacctgctcgatggtactccaaagattcaggtttactcacgtcatccagcagagaatggaaagtcaaatttcctgaattgctatgtgtctggg

SEQ ID NO: 621593 - DNA, 82 bp, Homo sapiens
ccagggccctgcagctggaagaggagctgttccaggtcgtcgtcccgcagacacacaatccagaagtcactttcctcgagac

SEQ ID NO: 621594 - DNA, 96 bp, Homo sapiens
gatgccacctatacttctgcccggaccctgctggctatcctgcgcctttccactgctctggaagccattaatttgctagaaccaatgacaaacgac

SEQ ID NO: 621595 - DNA, 90 bp, Homo sapiens
caagtcagagtccgtgccacctgtcactgactgggcctggtacaagatcactgactctgaggacaaggcctgggaaatcacgaagaagac

SEQ ID NO: 621596 - DNA, 75 bp, Homo sapiens
aaaacccagaagcagaacttgaaggttaaaccactagcccatttcacagattgatgaagatccctgcctcattcc

SEQ ID NO: 621597 - DNA, 100 bp, Homo sapiens
gccaagcataatctaatgacagttgaacagaataatggcagaagaattgtttttatgggttccacgaaaattgctaatgactgttgaatctgctaaaaat

SEQ ID NO: 621598 - DNA, 88 bp, Homo sapiens
gggacctgcacaggccggagagagccgtaggcaggaccccgggacaccctggaagccaggaaatgagctacttcctcagccgagccca

SEQ ID NO: 621599 - DNA, 100 bp, Homo sapiens
gaaaagttgaatgatgtatttgatcctgattctacccaagtacatatgatttcagctgcaatggcagatggagtgaaggtacctgagcgcaggaaccatg

SEQ ID NO: 621600 - DNA, 100 bp, Homo sapiens
tggtcaagtgcctcacccctttctacaaggagggcaagtttgcttccaagacctgttacatctgcgaggagcagggccgggagagcaaggcggcctcggg

SEQ ID NO: 621601 - DNA, 100 bp, Homo sapiens
aaagtacatgaagaacagtcaagtaaggttacctttgaatgatgtctatgaatgggctcgtgaccaccgtgcccaccacaagttttcagaaacacatgct

SEQ ID NO: 621602 - DNA, 98 bp, Homo sapiens
ggaaacgccgaggaacccggctgaggcggcaggctctgtgtgctccgggatggagcaggtgtgcagagggtgagaacccagctctgggaccaagtcac

SEQ ID NO: 621603 - DNA, 50 bp, Homo sapiens
aggaagccaagggagattataccaggtgaagatggagctggaaaaacaag

SEQ ID NO: 621604 - DNA, 100 bp, Homo sapiens
aatacctatgcactggacagtggggtcattgacgagactctggatgttaaggaaatgattttcaatgccgagagagttggaggcctcgaggaagagcggg

SEQ ID NO: 621605 - DNA, 82 bp, Homo sapiens
tcgggcccggcggagcggcccggccggagcgcccccgcgagctcggaccaggtgcatggctgcctcctaatcccatagtcca

SEQ ID NO: 621606 - DNA, 75 bp, Homo sapiens
cgggctcgggtcgccggagccgcgccccaccccgccagctccagagccacgttatttcacagttgaggattttgg

SEQ ID NO: 621607 - DNA, 83 bp, Homo sapiens
ccacgttctgcagaggaccatccagtgtgcaaaaggattttttatcaagcagaaatgcatcgaacaacgagaatcaagatcac

SEQ ID NO: 621608 - DNA, 82 bp, Homo sapiens
gtactgagcctgttggaggaactggcccggaaacaggaggacagaagcagggccctgagcggaagaggattaagaaggagcc

SEQ ID NO: 621609 - DNA, 75 bp, Homo sapiens
aaaatgcaaactgaaacctgggaaacagtgcaggtagcacagagtgaagctgaaaagaaattgaagaaggatgac

SEQ ID NO: 621610 - DNA, 83 bp, Homo sapiens
gggaaatcgtgcacatccaggctggtcagtgtggcaaccagatcggtgccaaggttgatgataattagaagcatgctttccac

SEQ ID NO: 621611 - DNA, 117 bp, Homo sapiens
caatttggaggtggcaaacagcttcgcagtcactaatgcttatttataatcgcttagatacaaattgctgtggattcagacctcgcaaggaagatgcctgtgtacagaatggattga

SEQ ID NO: 621612 - DNA, 95 bp, Homo sapiens
agagattggactgggagggcaacgagcacaacaggagctacgaggagttgaaactatgttccaacttcctgtcaacaatcttggcagtttaagaa

SEQ ID NO: 621613 - DNA, 97 bp, Homo sapiens
accattgctgccgttctgtacttgcttttcatgattggagaacttgtaggtcctgcagacattcgctttgtctgggagaagaatgggcgagctctgg

SEQ ID NO: 621614 - DNA, 74 bp, Homo sapiens
ggaggcggccggtgagtgaggcttacagggccccgggaccaaggtttgtctacagattttgagcgttcgaagtt

SEQ ID NO: 621615 - DNA, 75 bp, Homo sapiens
tgcatgctaactgggtgttgcacagagatttgaattctgcttggtcagaatcgtgatggcattgtgttcagcact

SEQ ID NO: 621616 - DNA, 100 bp, Homo sapiens
gctttatgaaataacttgttaggttaattctaaggtgctccttgtcttctgagatgttgggcccctcttgggatggagatgaagcagaatccactggtga

SEQ ID NO: 621617 - DNA, 51 bp, Homo sapiens
tcaacttgattgagatttgtcgaaccaaagtatacctgaggtgcaccggag

SEQ ID NO: 621618 - DNA, 149 bp, Homo sapiens
gcaagcctctgcagaggcgctggagctgggtcagtccgccgctcaccccgcggccgcaccttcccgccttctcaggtactccaaagattcaggtttactcacgtcatccagcagagaatggaaagtcaaatttcctgaattgctatgtg

SEQ ID NO: 621619 - DNA, 100 bp, Homo sapiens
gaaaagtggcactgaggctctggaacttctgcccagctctccttggttggcgtgcagtggtgtgatctcagctcattgcaacctctgcctcccggactca

SEQ ID NO: 621620 - DNA, 75 bp, Homo sapiens
cgggctgccccgcaggatcatcaagctccaaaaggaattcttcatttgtctcctgatgtttatcaagagatggaa

SEQ ID NO: 621621 - DNA, 75 bp, Homo sapiens
caagatgtacctgactcccagtgagaaacatatgctcctcaagaacaccgaaaatctctcccagcactttagaaa

SEQ ID NO: 621622 - DNA, 78 bp, Homo sapiens
acagatctaccgtcgcgtgaccagtgtggcagtagagaagagcatcacagaagttgctcaggagctgacagagctggt

SEQ ID NO: 621623 - DNA, 100 bp, Homo sapiens
ctgaaggtggccctggagctgccggccagcaagtttctgtggttaaaggcacagattgtctaaacctgtttatgtcataaactggtttatgtcctttggt

SEQ ID NO: 621624 - DNA, 90 bp, Homo sapiens
aagagatcagagaccagggctcctgtggctcctgctggtactcccctgccctcaacaagatgttttgccaactggccaagacctgccctg

SEQ ID NO: 621625 - DNA, 100 bp, Homo sapiens
aattagaaggtgacgaggagggagaagacgaggatgatgcggaaattaaccccaaggaagggaaaaggccgaggcatcagcgtgtgaagaccgcaaagac

SEQ ID NO: 621626 - DNA, 100 bp, Homo sapiens
agacctgtttaaaacgaattcgacttgatctccctattttacatgaagattttgttagcaataatggcagtgctttcctcagtgctatttttcttgcctt

SEQ ID NO: 621627 - DNA, 100 bp, Homo sapiens
tcttgtctgctgccatgtgagacgtgcctttgaccttctgccatgattgtgaggcctccccagccacgtgaaactgatggcactggatctttaaaacgca

SEQ ID NO: 621628 - DNA, 98 bp, Homo sapiens
ggagtcgagtctagaattcacacagagccacctaggttatcaatagtctggctgtctatcgtcatcgtgagactgactttggtgtaggagttcgagac

SEQ ID NO: 621629 - DNA, 101 bp, Homo sapiens
gcagttcagaagagccaaggaataaacatgcaatgaacccaaaaggcaagcttcatctccccagagaagagccggaagatgttgccgactcccattgggac

SEQ ID NO: 621630 - DNA, 100 bp, Homo sapiens
ggtgagcgggagatgtcctggatcgctgatacctatgccagcaccatagggcactatcctcttagcaatgcataccacgagttagcacaagtgtattcaa

SEQ ID NO: 621631 - DNA, 76 bp, Homo sapiens
aagaaggctcgagaagagcatgagagagcccagagggatcaaggtgaagaaggggctgcatgtgacagccgcccgc

SEQ ID NO: 621632 - DNA, 75 bp, Homo sapiens
attagcccaagcagattcctcccaggagtctccccaggacagtgctatcacccgggatattaaccgaacattccc

SEQ ID NO: 621633 - DNA, 127 bp, Homo sapiens
ctcgcgtcgcgcccgggaggaaggaacgaggcaaggagctaaagcagcgtgcgttcagccctggggattttttatcaagcagaaatgcatcgaacaacgagaatcaagatcactgagctaaatcccc

SEQ ID NO: 621634 - DNA, 83 bp, Homo sapiens
cacaggccctcgttgcccagatgacctcagcagccatgtcgaagccccatagtgaagccgggactgccttcattcagacccag

SEQ ID NO: 621635 - DNA, 99 bp, Homo sapiens
aaggcagcaaaaacaagagtccctctaaagcagctcaaaagaatgaagaatccctccattgttggagtcctgtgcacagattcacaaggacttaatctg

SEQ ID NO: 621636 - DNA, 75 bp, Homo sapiens
cagcatctctctgtggatcattgctgcctggaccgtccgtgtctgtgaaagtttcattaaagaacgatcaaaagt

SEQ ID NO: 621637 - DNA, 75 bp, Homo sapiens
aaaatatggattacaggttgatgtgggagaaatctttggaattaagagaaaaacaagctgaaaaggaagaaaagc

SEQ ID NO: 621638 - DNA, 114 bp, Homo sapiens
ctgagacctgtcaccccgactcaacgtgagacgcaccgcccggactcaccatggtgaaggtgtggttccagaaccggaggacaaagtacaaacggcagaagctggaggaggaag

SEQ ID NO: 621639 - DNA, 82 bp, Homo sapiens
gttccaggctacatgcaggacttggaggtggagcaggccctgactccaggaactgtggctgcaccatctgtcttcatcttcc

SEQ ID NO: 621640 - DNA, 82 bp, Homo sapiens
aatagacctgaagacaaaaatccagaagtacaagcagtctggtgtcgtgaaaactacccctaaaagccaaaatgggaaagga

SEQ ID NO: 621641 - DNA, 83 bp, Homo sapiens
cacctacgtcccgctgccgtcgccgccgccaccatgcccaagagaaaggcgatcagtgggtgaccgcggctgcgagggacttt

SEQ ID NO: 621642 - DNA, 123 bp, Homo sapiens
aacgcttatgccattggcaaagcagcaaccaattatcagtttacaacctgcacccactaaagttgtcgagatgtccacagaaggaggatttggtggtactagcagcagtgatgcccagcaaag

SEQ ID NO: 621643 - DNA, 83 bp, Homo sapiens
gaagaccgcgcgcagggcctgcagcgggagctggacggcgagcgcgagcggcgcgagaaaaactcgccgtgtgtgtgtcagag

SEQ ID NO: 621644 - DNA, 50 bp, Homo sapiens
gcaggctgaagaggaacgatatttccgtgatctcagtgaaaaccaaattc

SEQ ID NO: 621645 - DNA, 99 bp, Homo sapiens
gcctccttgcccgtgaccgtcgctagaactcagttgtgcgttgcggccagtcgccactgctctgtgagtaccagagtgcccactggttccaacagttct

SEQ ID NO: 621646 - DNA, 80 bp, Homo sapiens
cccagctcagctcttactgcgggccgctccgacggcggtccatcctgcctcccgcgacgatgcccctcaacgttagcttc

SEQ ID NO: 621647 - DNA, 100 bp, Homo sapiens
tctcgcccatcagcgcggcgctggccgagagccgcggctccgtgtttctggaaagtgacagcaggctctgacgcccgctctgcggcttcggtgtttgaac

SEQ ID NO: 621648 - DNA, 100 bp, Homo sapiens
agaaaggagaacaccttatttcaggacacattcagctaacgtattttagcaggtggagtgaggttgaagattcctgtgacagcgatgccatagagagaat

SEQ ID NO: 621649 - DNA, 83 bp, Homo sapiens
gcgcctgcccctgcaacgggaggatttggggtggaaggcaggcatggtcaaacccatttcactgacaggagagcagagacagg

SEQ ID NO: 621650 - DNA, 74 bp, Homo sapiens
ataatagaatgtctacattcctgctaaagtgatgtccaatgaagagaaaaaatttcagcaacatattcaggccc

SEQ ID NO: 621651 - DNA, 50 bp, Homo sapiens
cccctaagatgttactcaggctcccgattatctccctccaaactctaaag

SEQ ID NO: 621652 - DNA, 74 bp, Homo sapiens
ggagaactacagaaacctggtctccctagatgtggttgccctgcttggctttccttatgcctccagtggagaaa

SEQ ID NO: 621653 - DNA, 100 bp, Homo sapiens
tgatcagagaaaacaagcaaatgctgccttccttgttggatgctacatgagcttcagagaagaggcagaagtgtgcaaacaggagcaggtccaagatttg

SEQ ID NO: 621654 - DNA, 97 bp, Homo sapiens
aaggaggccttccagctgtttgaccgaacaggtccttatgtcgtcagaagatcgagaagctcaggaggatgaattgctggccctggcaagtatttac

SEQ ID NO: 621655 - DNA, 80 bp, Homo sapiens
aaatctctaaatgcagattccagaaaaattacagcacatctcagtgaatttgcaagtggagccttcacgtaaatgggtcc

SEQ ID NO: 621656 - DNA, 100 bp, Homo sapiens
ctgggctttaccatctttgtggctgtgcttgccaggcctggctccagttggtcaaagaaaaagtgatgtatgaaaaagaggcaaaacaacaagaagaaaa

SEQ ID NO: 621657 - DNA, 75 bp, Homo sapiens
ctcacagcctgaaaatgaaaaggaagcttcaggtggagacagcccgaagctgcctgtggaggaaccgattgtgtc

SEQ ID NO: 621658 - DNA, 83 bp, Homo sapiens
agcagaggcctatttgatagaggaaatgtatgatgaaggtcacggagctgctggacgtctccatggagctgggctgtttcctg

SEQ ID NO: 621659 - DNA, 96 bp, Homo sapiens
ggctttgacgccgagagctacacgttcacggtgccccggcgccacctggagagaggccgcgtcctgggcagagtcaagttcatccgagaagtaaca

SEQ ID NO: 621660 - DNA, 102 bp, Homo sapiens
tcttacttgtcatttgaaggtgcaactaaaagaaacagaccaaatgtgcagatgtggtgaagctgtagagaaaaacaagcgtctcatcacggcagaccagag

SEQ ID NO: 621661 - DNA, 98 bp, Homo sapiens
ggagaccccgaaaacggaagcgcagggagaaggaagaggtgtttgaaaagaagaagctcattcacacagaagacccatttaatgatgaacatcaggag

SEQ ID NO: 621662 - DNA, 100 bp, Homo sapiens
gaatcttttgaaaggactattaatatagcaaaaggcaattctagcctagtgatctctagtaactaccagacctgtctcggccttctgatgcattacccat

SEQ ID NO: 621663 - DNA, 50 bp, Homo sapiens
cgatccgcccacagacctcaaattcaaagcgtgagtgcatctccatccac

SEQ ID NO: 621664 - DNA, 100 bp, Homo sapiens
atgatgaagtttccagcagtgaaagtgctgacagtggggacagtgtcaatccatccacttctagtcattttacccgggccacctacagatgctcctgcag

SEQ ID NO: 621665 - DNA, 100 bp, Homo sapiens
gaacagtctccccagaacggggttgcagaaatacccgtctacatcagaagcagtgataacagcgacttgattgcatgtacagtgatcaccaaggatggcg

SEQ ID NO: 621666 - DNA, 110 bp, Homo sapiens
tggaggatgatttcatgtgcgatgatgaggaggactacgacctgactgtttatgaccagtggttcatcaccctttttaacattgtttacacatcactgcctgttttagcc

SEQ ID NO: 621667 - DNA, 96 bp, Homo sapiens
tttggctacacagcactggttgtttctggtgggatcgttggctatgtaaaaacagaacatatgctgtcaggaggataagagatgccttcagagaaa

SEQ ID NO: 621668 - DNA, 51 bp, Homo sapiens
tacagtggttggaataaaaagaactttatattgctgttggaatatctggag

SEQ ID NO: 621669 - DNA, 50 bp, Homo sapiens
ccacgcccctcaccccccgagagccggtgctggagaatctggtaaaagca

SEQ ID NO: 621670 - DNA, 74 bp, Homo sapiens
gccgctgccaacgtcgagcggcgacggctgtgactgtcatgtggcatgggtctctgcccaagctcgtaatgaga

SEQ ID NO: 621671 - DNA, 83 bp, Homo sapiens
ttctggacctcttagaaggaaggctcatctatacacttcaaggacatacggcaaatgttctgaaaaagactctgcatgggaat

SEQ ID NO: 621672 - DNA, 100 bp, Homo sapiens
gcaacctccgcctcccaggttcaagtgattctcctgcctcggcctcctgagtagctgggatttcagggccaagaccagcttcaagtctccatggtaccag

SEQ ID NO: 621673 - DNA, 75 bp, Homo sapiens
ttactttgtcttggtatactacatggcaaaatgggaaagtgacaaaaatgctgagtttcttccgtagaacactag

SEQ ID NO: 621674 - DNA, 51 bp, Homo sapiens
caactcctgaaagaacactctgaacttcagccagttctggtgactcagtcc

SEQ ID NO: 621675 - DNA, 90 bp, Homo sapiens
cagcactggactcatggaggctgagcatttattcagactggcacagcctccaggttggcgggctcatctgcgctggggttctgtgcgcca

SEQ ID NO: 621676 - DNA, 75 bp, Homo sapiens
tgtgctggccacgttcgtccacatgctggttcagtggatggcagatctagatggagtcttgctctcgttgcccag

SEQ ID NO: 621677 - DNA, 100 bp, Homo sapiens
ctgctctaaaccttatagcctgcttatgggggaaggaaccagctgctactcccgaaacctggaatatgcccggctacggaagattgcagatgagaacggg

SEQ ID NO: 621678 - DNA, 100 bp, Homo sapiens
caattttctggagggtagtgtattggacgtcacaatttttaacatgtgaacttggagaaattcccacactaaaaacactacaagtttttggaatcgtgcc

SEQ ID NO: 621679 - DNA, 100 bp, Homo sapiens
ttccctacctgcacgtgagggaagcctttggccagaagatcggccacttccagagaggcggatttggtcgtggacgtggtcagccacctcagtaaaattg

SEQ ID NO: 621680 - DNA, 100 bp, Homo sapiens
ttccagcagctgtcaatgcattccaggaagcagctagtcttttattgtaaaccatggctgtgtggatacaagctcagcagctccaaggagaagcccttca

SEQ ID NO: 621681 - DNA, 82 bp, Homo sapiens
gccatgggggcctgcctgggagcctgctccctgctcagctgcccctgggcgctgcctatggcacagccaagagcggtaccgg

SEQ ID NO: 621682 - DNA, 83 bp, Homo sapiens
aggccggacggggcggacggcgacgcagcccgcggcagaaggagcggtggtgccccccccgggcacggggccatgtacaacgg

SEQ ID NO: 621683 - DNA, 75 bp, Homo sapiens
cttcgagataccagtgggaccagcagaggtgttggctttgcaagctatccagatagtgacacctcctgtagacaa

SEQ ID NO: 621684 - DNA, 98 bp, Homo sapiens
tccggctgcctggcgtccccggcccaccccgttccaggaaaagatctaccagcctctacggcgatccaagagaagatgggttatcaccaccttggagc

SEQ ID NO: 621685 - DNA, 74 bp, Homo sapiens
gatgatgatgatactagtaaatgtactgtggcagctagtttggaaaagaatcttattcctaaactgactagctc

SEQ ID NO: 621686 - DNA, 98 bp, Homo sapiens
gaaagtgacgccttcgctcaacgaggacctgcaggtggaagtgatgaaggggaacgcccttttgcttgtgactggcagggctgcgacaagaagttcgc

SEQ ID NO: 621687 - DNA, 100 bp, Homo sapiens
acagggagagagtagggacagcgactgggagacgcgctccacagaaacccggactgagaggcagcgagagggtctacctatttagtcttacactttcaaa

SEQ ID NO: 621688 - DNA, 100 bp, Homo sapiens
gccggtctgggagttgggggcaaggagaagatcctgtgccggatggagtgctgtgatgtgccagccgagacactctacgacgtcctacacgacattgagt

SEQ ID NO: 621689 - DNA, 89 bp, Homo sapiens
cgccagagcccaggtgcccagaggactttcttccagcttctgctgtccttctttgtggagagcaaggctggagtgcggtggtgtgatct

SEQ ID NO: 621690 - DNA, 100 bp, Homo sapiens
atctcactgggcagaattagaaatctcgggtccctccagctacaaggtgggcaccatggcggagaagtttgactgccactactgcagggatcccttgcag

SEQ ID NO: 621691 - DNA, 120 bp, Homo sapiens
ataaacatctatcctactgtacagtatccattagaagtgctttgtttgcatttaattgaatcaggtgcttttcagtgggaagaattggaagaagatatcaggaagaagttgaaagattct

SEQ ID NO: 621692 - DNA, 100 bp, Homo sapiens
acaacaacagcaccctggttagtacagtggagagcatcccagtgtttggggcactgtgttcctcttcgtccctgcaccagaccctggaagccttggccag

SEQ ID NO: 621693 - DNA, 100 bp, Homo sapiens
gaagagaattcgagttttagttatccgaaaacttgtcaggagtgttggccgactgaagtcaaaaaagtgatcttaaagggcagcaaggagcgcagcactg

SEQ ID NO: 621694 - DNA, 83 bp, Homo sapiens
aaaagagtaccctgtgcttatgacaagactgccttggcattagaggcacgtgtggttctcaaatataggcattctgatgggaa

SEQ ID NO: 621695 - DNA, 83 bp, Homo sapiens
cccatccgtccgcgggtccgtggagctggagcagatcccccagccggctgagacagaattaaatgtgagggagtctgacgtaa

SEQ ID NO: 621696 - DNA, 100 bp, Homo sapiens
tgatcataaacttagccttgatgaacttcatcgtaaatatggaacagacttgagccggacgccacaggtcatcatctggatcatcccattctggttcccg

SEQ ID NO: 621697 - DNA, 83 bp, Homo sapiens
tcgggagttgatctctaatgcttctgatggcactgtgttggcactcactgaaaataacttcgatgacaccattgcagaaggaa

SEQ ID NO: 621698 - DNA, 83 bp, Homo sapiens
cagttaacatcttcaaaggaaattgtcaaatcctatgagaatgaacttgatccattgaagacaagacttgctaaatccatcat

SEQ ID NO: 621699 - DNA, 99 bp, Homo sapiens
aaaatcagaatgtttttccaaaagaatttgggagcctctggtggagcaagtaattgggattcctacagtgaccatttcaccattgaaacctgcaaagag

SEQ ID NO: 621700 - DNA, 75 bp, Homo sapiens
aaacaatccattgattggaagaccaaacaaggttcaaaccttgtactactcagctgatcacaagctgcttgatgg

SEQ ID NO: 621701 - DNA, 101 bp, Homo sapiens
tcctgctgagtctgctcttcctggtccaaggtgtggatggtattgcccaggcgtactcagcttgcctgccccacatccgcttctacggtcctaccaatttc

SEQ ID NO: 621702 - DNA, 100 bp, Homo sapiens
aaggaggttcagtggacccttggagccatcctctacaggacccgctttctaccattaaggtggtataagttgaaatccaaaccaggaaagaaggacaagg

SEQ ID NO: 621703 - DNA, 99 bp, Homo sapiens
tgacactgtctcggctacagacccagaggtcacaaacatgtcagacaaaagtgaattaaaggctgagttggaacgtaagaagcagcgactggcccaaat

SEQ ID NO: 621704 - DNA, 50 bp, Homo sapiens
cgtcgctgcagagaccccgctatggctatttggagcaagaggtggtggtg

SEQ ID NO: 621705 - DNA, 75 bp, Homo sapiens
gacaagaccatgctggcaagtctgaaggtcaagagaatgcagttgaaactaattttgtggatagagaaactgttg

SEQ ID NO: 621706 - DNA, 90 bp, Homo sapiens
ctcggcagcagtcaatcctccagaacctatgctggtggaacagcctcggccaccaaggtgactgccaacagccagcccaatgtcgaatcc

SEQ ID NO: 621707 - DNA, 83 bp, Homo sapiens
cgagcagacggagtacacggagcagcggccccggccccgccaacgctgccgccggacaatgcagatcttcgtgaagactctga

SEQ ID NO: 621708 - DNA, 100 bp, Homo sapiens
gccgggcctttggccgactcacccatgtatacgctcaacggcaagaaagtggaagttgccgtcaaacagatcatcgctggaaaagccgtggagcaaggag

SEQ ID NO: 621709 - DNA, 49 bp, Homo sapiens
tgccttctggacaatctttccggctcacgacttatttagatgtacagcg

SEQ ID NO: 621710 - DNA, 75 bp, Homo sapiens
ggaagacctctcccaaggcacctgtccaggagtctgtgaccttcgaggatgtggctgtgacatttacccaggagg

SEQ ID NO: 621711 - DNA, 76 bp, Homo sapiens
ggcttcgagtgacccgggtgccgaggagcgggaagagttgctggggttaattatagaaaatgccaagtaggaaatt

SEQ ID NO: 621712 - DNA, 100 bp, Homo sapiens
gctgacttttgggattaccattttaggagatcctcaaactcagatatcagtgatcttattagctttttcacaagccagaacataatggtgacgatgatta

SEQ ID NO: 621713 - DNA, 101 bp, Homo sapiens
ctgtgacaagcagtactataagcaccaggagtttgacaatcacattaattcatatgaccatgctcacaagcaggtgtatgcaacagcgttattgcaacagg

SEQ ID NO: 621714 - DNA, 100 bp, Homo sapiens
ccgaggccggcgaagccatgggcgccgggaccccgccgccgccgccgccgccgccgtctggccccagaatgaagagcttcgaaacttgtctttgtctggc

SEQ ID NO: 621715 - DNA, 76 bp, Homo sapiens
ggagtcagctgtgtgtccagaacgtgccatggagacgcttaacggtaacttgggtttttactcctgtaacaactga

SEQ ID NO: 621716 - DNA, 75 bp, Homo sapiens
cggccatcgtcatcctgctgctgaagatctggaagacgcgctcctgcgccgagtttatgtggccgaggcagacaa

SEQ ID NO: 621717 - DNA, 99 bp, Homo sapiens
aagccaattttttcaacacttcctgaaaccaacattttaaatgtggttaagaagccaagtacaagaagctggagaagcgatgagaaacttatttctatg

SEQ ID NO: 621718 - DNA, 98 bp, Homo sapiens
acactgtcagggaagaagcgcagaaaactcctccagcagatccggcttgcccagaaagagaagacagccatggaagctactgcgactactaccggccc

SEQ ID NO: 621719 - DNA, 100 bp, Homo sapiens
atggagctcagccctccacctccacaggctgtgccaagaccttgtaccactcggtccatgaaaagatcttcacacttccaggagactgtctgatctaccc

SEQ ID NO: 621720 - DNA, 75 bp, Homo sapiens
tcttcgcctcgcctcgggacccgcggtccccgctcttgctggacaggcgacactaacaggtgaagatctcgggag

SEQ ID NO: 621721 - DNA, 100 bp, Homo sapiens
tctctggagacatcttcagcagagatgcagaggatgctatttatggaagaaatggttatgattatggccagtgtcggcttcgtgtggagttccccaggac

SEQ ID NO: 621722 - DNA, 100 bp, Homo sapiens
caaatggcatccggggatttctgctcacctggagaagggatggaaatacttcaacaaggcattgctccctggcagtgattaatgccctggccaacatcgc

SEQ ID NO: 621723 - DNA, 100 bp, Homo sapiens
cacccccaacagccagcactcttctcctagccgctcactcagtgttgaggagctcaagcttgggaaaatggtgtgcattccttgtatcgtcattccagtt

SEQ ID NO: 621724 - DNA, 90 bp, Homo sapiens
cgaagaagctgcagccgcacctggccaaggacttccatggagtcactgattcatcactttaagttgtatactgagggctaccaagttcct

SEQ ID NO: 621725 - DNA, 74 bp, Homo sapiens
cgctgttctcgctccggagccgctgcacatttcgctgttctaaagaaatccaaatggcagttctgctgaaattt

SEQ ID NO: 621726 - DNA, 74 bp, Homo sapiens
gtttgttcaggaaccaccagtgacagaggatatagctagtgcaataaaagaacttcttgatacagtgaataatg

SEQ ID NO: 621727 - DNA, 100 bp, Homo sapiens
caaaagacaaggaagatgagctgtcctttcaggaaggagccattatttatgtcatcaagaagaatgacgatgattgctcgctgtaagcagctcatctgtg

SEQ ID NO: 621728 - DNA, 75 bp, Homo sapiens
ggcaaacgagaattaaatgccgagaaggccagtacgtccaagtggtaagaagttcagaagcaagcctcagttggc

SEQ ID NO: 621729 - DNA, 83 bp, Homo sapiens
caatggcatttacagaaagagtcaacagcagtggcaacagattgaaaatattgaacttcccatggatacaaaaacaaatgaaa

SEQ ID NO: 621730 - DNA, 88 bp, Homo sapiens
cgacgggtttgtgagcctggactcgccctcctatgtcctgtacagatcaggatcctcatgaccagccaaagagaagaagaattaggaa

SEQ ID NO: 621731 - DNA, 82 bp, Homo sapiens
cagtcatggtcccagaaacgtcactatcaagaagcttatgtccctgatgccaaaaatgcacctactctttcctctaactctg

SEQ ID NO: 621732 - DNA, 149 bp, Homo sapiens
caggacatgcctccgccggggggctatgggcccatcgactacaaacggaacttgccgcgtcgaggactgtcggatatcccagaggcatccttcctggaggaagaggatgaagaccccatcccacccagcaccacgaccaccattgccac

SEQ ID NO: 621733 - DNA, 144 bp, Homo sapiens
ggatgggcagatagatgctgatgaattgcagagatgtctgacacagtctggcattgctggaggatacaaacagaatggatcttggagaatgtctgaaagtccatgacctggctttaagagcggattatgaaattgcatccaaag

SEQ ID NO: 621734 - DNA, 90 bp, Homo sapiens
ttttgaccagaagttctcaaaggtgcctaccaaggtcaaaggctatgacaacctctttgctatgtttgtcccgctggctggaagcctggc

SEQ ID NO: 621735 - DNA, 75 bp, Homo sapiens
gcagaagaactggcttcgggaattttaccagccctgggcgctgcctatggcacagccaagagcggtaccggcatt

SEQ ID NO: 621736 - DNA, 75 bp, Homo sapiens
cccttcacctcatttgtctacaccatcaaggaggaaggcctggttcttcaaggaatcccttggcaccatgtcctg

SEQ ID NO: 621737 - DNA, 75 bp, Homo sapiens
acggtggaggcaaccagtagcatcagggaaaaagttggtaactataactacccaatattgcagccatggagtcca

SEQ ID NO: 621738 - DNA, 90 bp, Homo sapiens
atatggacccaaatcagaaggggtttctagaggaatgtatcctgtcaggtataatgtcagtgaatggcaagaaagttcttcatatggatc

SEQ ID NO: 621739 - DNA, 82 bp, Homo sapiens
gccggcatcgtctttccgtcctctgaggcgacggccgcggctgcacagtctattgcgtctgcagacatggatttcaaccagc

SEQ ID NO: 621740 - DNA, 98 bp, Homo sapiens
cgccaagcataatatgtatgccaaagcagcagccttctcgacagccttttactgtgaacagatattgtactccaagatacttggattacgaagatttg

SEQ ID NO: 621741 - DNA, 51 bp, Homo sapiens
caatctgtggatcagctacgagtaattcgccaaaatgacgaacacaaaggg

SEQ ID NO: 621742 - DNA, 80 bp, Homo sapiens
gttcaactatgtgtgttgtcagaatgctcttaatgagatccaggatgagaagactgataaaagaagaagctagctgaaca

SEQ ID NO: 621743 - DNA, 100 bp, Homo sapiens
gacatggctggacaaaattctggagttggtacatgaccacctgaaggatctctggaatgatggtgtactaatggtcacttgatgtgcgctggctgtttta

SEQ ID NO: 621744 - DNA, 108 bp, Homo sapiens
ggccgacaagatacctctcgcatgtccacctcacaggtcgcaatggaagaagagatcgccgcgctggtcattgacaatggctccggcatgtgcaaagctggttttgct

SEQ ID NO: 621745 - DNA, 129 bp, Homo sapiens
gggtgcggctctttccctgcagtcctgccgaggaagcgtgcgtccctggcgcttccttcttctcttccggcggagagggtatgttagagcccaccaaggaaccactgaaaccactttctgctgcagaaa

SEQ ID NO: 621746 - DNA, 100 bp, Homo sapiens
cgaagggctctcctgatactaacagttttacgatttaaaacttcgccagaatttttacgacacgtggatcccagcgagtgaaattgaggcatctgtggaa

SEQ ID NO: 621747 - DNA, 101 bp, Homo sapiens
agcacagttcctgggaaggtggagccaccagcctctccctgttactggggcttccggatgcagatgacgatgcgtttgaagagtacagtgctgacgtggaa

SEQ ID NO: 621748 - DNA, 75 bp, Homo sapiens
ccgcggtggggcgttgccatggagacgcgggcggcaggcaggtgacagcagggacatgtctcgggagatgcagga

SEQ ID NO: 621749 - DNA, 134 bp, Homo sapiens
aatgaggcagatcagattccgatttgacgggcaaccaatcaatgaaacagacacacctgcacaggatcccaaaatggctgggcgaaaacttgctctaaaaaccattgactgggtagcttttgcagagatcatac

SEQ ID NO: 621750 - DNA, 90 bp, Homo sapiens
cgataacgcgcttttgctcctcctgaagtgtctttggtccaacgttgttccaggtgcaaggatggcttgaaaggatttacattttctgca

SEQ ID NO: 621751 - DNA, 71 bp, Homo sapiens
tcaaggaggccttccagctgtttgaccgaacagatgcctgaggaaacccagacccaagaccaaccgatgga

SEQ ID NO: 621752 - DNA, 100 bp, Homo sapiens
acaaaaccatgatttccctgtccattgaggaagttcagaagcagaaggaactttccaaagctgaaatccagaaagttctaaaagaaaaagaccaacttac

SEQ ID NO: 621753 - DNA, 75 bp, Homo sapiens
cagtgacccagtcagtgcccttcagttaaagaccaccaggagcacacttgtgtggatgaggtcaccattgtcaac

SEQ ID NO: 621754 - DNA, 100 bp, Homo sapiens
ggacgtgcggcccagcgagttggtcggtcccggggtcacccgctacgggaagcaggcctcgccacaggcctttgaagacctcagcaaactaatgatcaag

SEQ ID NO: 621755 - DNA, 50 bp, Homo sapiens
cctgcaaaccagggtatcagaggttcccctccagactctttgcaccaaag

SEQ ID NO: 621756 - DNA, 82 bp, Homo sapiens
agcagcgcgtcgtggggcgagcggcaggttctgcggggagtgtctccagccctgcctgcaggtgccatccccgctgtgccca

SEQ ID NO: 621757 - DNA, 50 bp, Homo sapiens
ctagtttctctgatgcacagaccttggaaatctacatttctgaaggaacc

SEQ ID NO: 621758 - DNA, 91 bp, Homo sapiens
gaaacaagacagttctgtctgcagaagcccattatggctgtaactggagatgacacaggtacagatgaagtttttagttgagcaaatgagg

SEQ ID NO: 621759 - DNA, 135 bp, Homo sapiens
ggatcaagcaggttttaaatcaagatttaacattccaacacataaaaattatttatccaacagctcctcccagccacagacccctttgcttctgtttttgggaatgaatcatttggaggtggatttgctgacttc

SEQ ID NO: 621760 - DNA, 75 bp, Homo sapiens
gtctgcatcaccaccggatcaacttcgacaaataaggtccagttccggccgtaccgcacagacgacttcatcacg

SEQ ID NO: 621761 - DNA, 98 bp, Homo sapiens
tctgcgcaaggaggagactcgacaacatgtcacccgcgctccaagacctgtcgcaacccgttgggacccctgattttagcaggatggcccaatggaat

SEQ ID NO: 621762 - DNA, 98 bp, Homo sapiens
gaaggaggagattctgaagataaggagacggcgccccgctcagcgagctgtcctggccatcctccctcgccgtggtggctgtgtctttctccgggctc

SEQ ID NO: 621763 - DNA, 100 bp, Homo sapiens
ccttggataacaccatcagtgaagagaacagagctgttattgagaaaatgttgttggaagaagacacggatgataccatcggggaccttaagaagctgat

SEQ ID NO: 621764 - DNA, 100 bp, Homo sapiens
tactgtcccgtttgattttggagaaaagcaaaaaaatgctcttgggacaatctctatgggaagcagaaggcaaggaccccggtcattttaggtagaaaca

SEQ ID NO: 621765 - DNA, 101 bp, Homo sapiens
ttactgaagacttggagcttgcttctgagaacaaacgcaaaaggacagtaaactgtggaccttgaagttagcagagtcgacttcaatgttcctatgaagaa

SEQ ID NO: 621766 - DNA, 100 bp, Homo sapiens
atctggtgtaccaggcgaagctggccgagcaggctgagcgatacgacggtcagttcaccgggacctggaggcccagattgcgatcgtgacggagaaccag

SEQ ID NO: 621767 - DNA, 100 bp, Homo sapiens
ttctactacgatgagtttggtttccgtgtgtacaaggaagatttcgatggggtcctctatcatatttcaaatcctaatggagacaaaacaaaagtgatgg

SEQ ID NO: 621768 - DNA, 100 bp, Homo sapiens
cttcagccgctgttcaagtgtagccgacagtggggacacagccattggtacatcatgctcagatattgcggaggctcctacagaagaagggaaaaaagag

SEQ ID NO: 621769 - DNA, 90 bp, Homo sapiens
gaggtgccaagaagcagcggtacacggtcggcactcttcaccctcccgagccctgcccgtctcggccccatgcccccaccagtcagcccc

SEQ ID NO: 621770 - DNA, 75 bp, Homo sapiens
aatgaaaactgaacaaagggattaaattgtgagatcatgcatgccccgcggtccagggacaggttcacagcgccg

SEQ ID NO: 621771 - DNA, 75 bp, Homo sapiens
aaacaataggacggaaacgccgaggaacccggctgaggcggcagattctgaagactactttgaggtcaacattcc

SEQ ID NO: 621772 - DNA, 98 bp, Homo sapiens
gattgttgggaaggcatggaatatgtttgcttcaaaagttatggagtggctgccagcaagagacagtgttcagatgtggatgatatttgttcaatatg

SEQ ID NO: 621773 - DNA, 96 bp, Homo sapiens
tctggctccaggatgctgtccccctggccacggctccaggtcacggcccccagcgcagcctgcatgttccagccagtcgctgcttccacctgttca

SEQ ID NO: 621774 - DNA, 135 bp, Homo sapiens
aggatgctgtctaaatcgggttgatggacaaagagaggctgtttgagcctctgagccaggtctctacattggctggcgctgcccccattacctatgggactgtttccggattggggatgagtccagatgcttttg

SEQ ID NO: 621775 - DNA, 100 bp, Homo sapiens
gctgcatcttccaatcttccaggttccaattgcccgggctgttcttgttgacatggaacccaaagttatcaatcaaatgctgtcaaaggctgcccagtct

SEQ ID NO: 621776 - DNA, 50 bp, Homo sapiens
cccagcacgaccagctcatgcaggttaccacattctcatctggagccagg

SEQ ID NO: 621777 - DNA, 141 bp, Homo sapiens
gggaaaggacaaaaaaattcctggaaaaagaagtccaagaagcaaaaaagggactgctaagaagataccaccaggtgctggagaatctggtaaaagcaccattgtgaagcagatgaggatcctgcatgttaatgggtttaa

SEQ ID NO: 621778 - DNA, 100 bp, Homo sapiens
ttcgctggagagatggcaccggcctgaggtcaaggagaaattgaactaaactctcctttgaagactggtcccgacggcctacacatggggcgctgtgggc

SEQ ID NO: 621779 - DNA, 76 bp, Homo sapiens
tgaagttataaggttccccatgggttcattgtctgagatcagttgataacttatttgtggtggttcaggagtttca

SEQ ID NO: 621780 - DNA, 96 bp, Homo sapiens
ttttagagtccaccagatcatccatgtgagtgaccatgcagcaaaagaaggagggtcctctcagtgattaaggaattacatgaacgacagccttcg

SEQ ID NO: 621781 - DNA, 75 bp, Homo sapiens
ctgcagctggtggacgaggtggtacgaggggtcgtggccgaggtttgaagatgccgcatttggattggatgaatt

SEQ ID NO: 621782 - DNA, 71 bp, Homo sapiens
agatatggcgcaactgcggcgcgactcgctcagcagcagcctgaaaacttgctacaagtatctcaatcaga

SEQ ID NO: 621783 - DNA, 100 bp, Homo sapiens
gattcggatgggtcagatggctatgggagccgccgccatgtctgcgcatctgcaatggatggtcgtgcggaactgctccagtttcctgatcaagaggaat

SEQ ID NO: 621784 - DNA, 75 bp, Homo sapiens
ccggcaccgcgcctgctgccgggttgcgctccgtgcacctcttgcgggttgaagccatccttgtcaatatatttg

SEQ ID NO: 621785 - DNA, 90 bp, Homo sapiens
ctgattccaagccacttgggtcagaggatatagataatcaaggttgaccactgaaaaacacacatactatctgactgcagattctcccaa

SEQ ID NO: 621786 - DNA, 100 bp, Homo sapiens
gcaaatccttaaaagagtcttaacgtttgcctgagaatacagatcaacccacagaacaaagcggatttccaaggcatctccccagagcgagcctttgctg

SEQ ID NO: 621787 - DNA, 83 bp, Homo sapiens
ctggagtcgcagaccctgttggggccgctcgagctggtgagaagccctaccactgcaactgggacggctgcggctggaagttt

SEQ ID NO: 621788 - DNA, 106 bp, Homo sapiens
cggaaggagaagatgtgccgccgctgccaacgtcgagcggcgacggctgaactctcttgatagagcccaagcagccaagaataaaggcaataaatattttaaagca

SEQ ID NO: 621789 - DNA, 75 bp, Homo sapiens
tctccccgatctacggggctgacatcagcggctctttgtatgatgacctccagctccagaaatcccagtacctgc

SEQ ID NO: 621790 - DNA, 100 bp, Homo sapiens
gattacttatctggagcaaggaaaagagccctggaatatgaagcaacatgagatggtggatgaacccacagatttaatccagagactgacttcactatag

SEQ ID NO: 621791 - DNA, 100 bp, Homo sapiens
aggtacagtgtgcatcctacaacaacaagccattcatgggccggttttatgagtgggaaccatttgcagaagggcccagaatgtgttcagtatcttcaac

SEQ ID NO: 621792 - DNA, 100 bp, Homo sapiens
aagtgtttattttaaaccatctctgactccttctggtgaattcaggaagactaatcaaagaatagataacaagtgcagtcttagcagtgtctgcaaaaac

SEQ ID NO: 621793 - DNA, 128 bp, Homo sapiens
aggacaccatgctgaaggccatgttcagcgggcgcatggaagtgctcaccgacagtgaagagtcttgctgtgtggcccaggctggagtgcccggctggtctcaaattcctgacctcaagtgatctccc

SEQ ID NO: 621794 - DNA, 98 bp, Homo sapiens
ccggaaggggcaagacgggttcagttcgtcatggggctgtttggaaagacccaggagaagccgcccaaagaactgtggtgaactatgacaatgtagtg

SEQ ID NO: 621795 - DNA, 75 bp, Homo sapiens
agcccgctggaccgtctgggcactgctcaccgtgtacttgggcaagcgggacttcgtagatcacctggacaaagt

SEQ ID NO: 621796 - DNA, 104 bp, Homo sapiens
caaaggcagacagtacgggctcccttcgccaaactcttcattttctctgcaaactaggcgtggcaactgctggctgcgtgaatgaagttacagagatggagtgc

SEQ ID NO: 621797 - DNA, 100 bp, Homo sapiens
gctgtattccataatatacagaaatctccagagggagaggtctgtgccgtttcctgtgcagcagggacctatggccccaactgctcgtccatctgtagct

SEQ ID NO: 621798 - DNA, 104 bp, Homo sapiens
cctcccgggactctctgtcacccagcagatgttcgagcctgtgagctgcaccttcacgtacctgctgggtgacagagagtcccgggaggccgttctgatcgacc

SEQ ID NO: 621799 - DNA, 100 bp, Homo sapiens
gtgtctccttccgcagacgggctatgtgcacccagatgagttcttccagtcccctgaggtgatggcagctggtgaaactgcgtgctgtaagctgggacca

SEQ ID NO: 621800 - DNA, 75 bp, Homo sapiens
ccgcagagtcggcacctgaaggacatggagcaaagatttctgaagacgtctttctagaaatgactggaaagtttc

SEQ ID NO: 621801 - DNA, 78 bp, Homo sapiens
caggccgaaccggtgcagttcaaggactgcggttcatcatgcctagtggcgtataagaagaccccgccaccggtccct

SEQ ID NO: 621802 - DNA, 97 bp, Homo sapiens
caaacccaaattcttcgttctgtgcggcgacctcatccacgccatgccagaggcagaggaggtggacacggtggacgtctccggcgtgcccgcagag

SEQ ID NO: 621803 - DNA, 100 bp, Homo sapiens
tgaaaagaagaaaaagccatcttacactactcaaaggctgccactgcagagccccgccatggaagacacgccgttggtgatatcgaagcagaagacggag

SEQ ID NO: 621804 - DNA, 50 bp, Homo sapiens
cctgggcctcggagacgctgacaggtgctagactggatcgagaaccacgg

SEQ ID NO: 621805 - DNA, 75 bp, Homo sapiens
cagcgtgcgttcagccctggggtttgggcaaaactacccctgatccttcagctaacattagtctggatggtgtag

SEQ ID NO: 621806 - DNA, 101 bp, Homo sapiens
cggacaacgagaaactggacaaccaacggctcaagaatttcaagaacaaaggccgcgacttggaggcacaacgtgtttgattgctctgctatcagataaag

SEQ ID NO: 621807 - DNA, 51 bp, Homo sapiens
cccacgagaggatccctcacccggaaccttcagaagtttagtctttttgga

SEQ ID NO: 621808 - DNA, 90 bp, Homo sapiens
ggcggatgccctgcagtacctgcagaaggtctctggagacatcttcagcagaagctgacgggtcgcctcatgctggccgtgggaggagca

SEQ ID NO: 621809 - DNA, 75 bp, Homo sapiens
aagtgatcctttcatctcagcctcctcagtagctgagactacagtctgaacaacccagtcctgccagctccagct

SEQ ID NO: 621810 - DNA, 98 bp, Homo sapiens
cgggagccccggcgggccgcgcctggtgatcggctccttaccagctcacctctcaccgcgcatgtttggagggtctcgctctgttgcccaggctggag

SEQ ID NO: 621811 - DNA, 141 bp, Homo sapiens
gctcatgttcccgctgttgctcctccttctgcccttccttctgtatatggctgcgccccaaatcaggggagattagtaatttttaggtattaaagatacactcaaccaaagggacagaatgggaaaggctgaaaggggaat

SEQ ID NO: 621812 - DNA, 51 bp, Homo sapiens
gggaaaaggggcctcgtcggagagtagaggcaggattctgctttcccttgg

SEQ ID NO: 621813 - DNA, 97 bp, Homo sapiens
tgacgaagcattttgcaacgcagttcggagttattatgagctccagaacctgggtatcaacccagcaaacattggcttcagtaccctgactatggag

SEQ ID NO: 621814 - DNA, 117 bp, Homo sapiens
tgtgtcagcacttcttaatgctgaagatgaaaaaagagaagaggagaaggaaaaacaagctgaagaaatggcatcagacttaattcagtgcacaaatgagatgaatgtgaacatccc

SEQ ID NO: 621815 - DNA, 100 bp, Homo sapiens
atcgaacgcaccttccatgtggagactcctgaggagcgggacccaggctcatgctctgaactctggctgagaggatgctgctcaggagccagcacaggac

SEQ ID NO: 621816 - DNA, 100 bp, Homo sapiens
ccggcctctccccgccggcccgcgggctcgccgtccggcgcagggcaggtcacggagctgctggacgtctccatggagctgggctgtttcctggctggag

SEQ ID NO: 621817 - DNA, 101 bp, Homo sapiens
cccagagtgcagagccgcctttccagcatgcaggggctgctcaggatgtacagttacccagcacgtgtacctcctcctcctcctattgctcgggctgtagt

SEQ ID NO: 621818 - DNA, 95 bp, Homo sapiens
ccagaagtgatcgctcagctggagaacgcggctaaagttctgatgagtgaattactggaactgaaacggcagcagcaagagcaagaaagagccaa

SEQ ID NO: 621819 - DNA, 90 bp, Homo sapiens
caaacaatctgtgactattaagaccatgttggaagatactctccattgcataatgtgaagttaccagaagcagatgacatccagtacccg

SEQ ID NO: 621820 - DNA, 75 bp, Homo sapiens
gcaagattataatcaggaagtggatgcctccatttttaagatcattgagcgcttgaagctggtgcccctgaatca

SEQ ID NO: 621821 - DNA, 100 bp, Homo sapiens
gtagactctcgccaaagccgctctgggcaagggtggatcgtacccggagctggctctatgctgcctgttctatctcctatctgggtgccatggtctccag

SEQ ID NO: 621822 - DNA, 90 bp, Homo sapiens
tgaaagtcccagatttttgctcattaacagaaaagaagaggagaatgctaagcagagaaagcttagatatgccaacaacagcaattacaa

SEQ ID NO: 621823 - DNA, 100 bp, Homo sapiens
aatcctgagaatggactgcaagagaggaaaaactgggcgtctgcttgggaatctattgtggaaacccaggtgtccctggccagtgtccttccacctgtcc

SEQ ID NO: 621824 - DNA, 82 bp, Homo sapiens
agctcgggggccaactctgaggagtccactgcagcagtcccacagaacaacgagaagcttcaggagagcccgtgcatcttcg

SEQ ID NO: 621825 - DNA, 75 bp, Homo sapiens
atgtagcaaggaagaaattgttcagttcttctcagatccaatggaagaagacattctccaagttgtgaaatactg

SEQ ID NO: 621826 - DNA, 100 bp, Homo sapiens
gagtctttgaggacacagcctcgctggaggcagtttctgctcaaccagaacgtaagttctttccaaagaaaatttgttggtgaggtgaagaggtgtgaag

SEQ ID NO: 621827 - DNA, 82 bp, Homo sapiens
tgatgctggagaattataggaacctggtctccctggttaattggccttggtcctcacagctccaaaaagaaacaggatctcg

SEQ ID NO: 621828 - DNA, 83 bp, Homo sapiens
acaagtacctttatgaaccagtgtatcccaaagctccagagattatattggggttgccattttgtgaagccatagacatgtgg

SEQ ID NO: 621829 - DNA, 97 bp, Homo sapiens
agcggactaataaaggccatggcgccagcagaaatcctgaacgggaaggagatctccgcttccaaagaggtgtttgaaagctcgagaacattttggt

SEQ ID NO: 621830 - DNA, 98 bp, Homo sapiens
cgacttttgtaacaaatatttgcggtttcagcctcaacccagaggaatcgttactctttcagctgtgctgatcctgtatttcctgtatttcctgcact

SEQ ID NO: 621831 - DNA, 75 bp, Homo sapiens
aataccgcttcctggagttcacgactctgagtgctgctaggagacaccaaaccctcaggaagatttactatagct

SEQ ID NO: 621832 - DNA, 95 bp, Homo sapiens
tcatcaagaagaatgacgatgcataacatggcttgaagtaaaaggcagtatccaagtccttcacctggtcttgccctgtctactttctgatcatt

SEQ ID NO: 621833 - DNA, 50 bp, Homo sapiens
ctcccaagtagctgggattgcaggtgtgtccctggaatcctccaacctct

SEQ ID NO: 621834 - DNA, 90 bp, Homo sapiens
aacgattgaacaccagattgcagttcagaatcatccagaaccgcatcctgctcgtcatcctagggatcatcgtggtcatcaccatcctga

SEQ ID NO: 621835 - DNA, 89 bp, Homo sapiens
agaagcctacacgtgaaacatgccagggtatggatcctggcgggagccagtcaacccctattatgtcaatgccggctatgccctggccc

SEQ ID NO: 621836 - DNA, 101 bp, Homo sapiens
ttacatttggatcttacagattaggagtgcatacaaaagatgctcccataatactctcagatagtgaagaagaagaaatgatcattttggaaccagacaag

SEQ ID NO: 621837 - DNA, 98 bp, Homo sapiens
tctgaacctgttaagcagattggttaaggatgatgagtttacacacctgtacacactgattgtgcggccagacaacacctatgaggtgaagattgaca

SEQ ID NO: 621838 - DNA, 74 bp, Homo sapiens
tccatcacccaccaacaacaccacaataatccacagccaagactgcttttcaggaagccttggacgctgcaggt

SEQ ID NO: 621839 - DNA, 75 bp, Homo sapiens
gttcatcaaagagctcattaaggacgggaagaacctcatcgctgcgacgaaaacttctcggacaaactatttagt

SEQ ID NO: 621840 - DNA, 100 bp, Homo sapiens
gcgaagatttccaatcatttctaaagaggaacagcacagcatgctgggctctggatttaaagctgagcgcttaagagtgaatttgagattagtcataaat

SEQ ID NO: 621841 - DNA, 100 bp, Homo sapiens
acactgaaactccagtcaagttgtaaactgaaaaagaacgtgttgaaacaaggaattgccccatagccttcacagtttgctgaggctaaacactatcatg

SEQ ID NO: 621842 - DNA, 83 bp, Homo sapiens
ccatggacagcttcgacttagccctgctccaggaatgggacctcgagtcactgtgattggtttatcttggaagctaaagggca

SEQ ID NO: 621843 - DNA, 82 bp, Homo sapiens
aagacattccatcaaggacagagagatcaatggcttttcaaaagcagcacaccaaactgtcaaagtggtgatccctcttcat

SEQ ID NO: 621844 - DNA, 97 bp, Homo sapiens
agaacagcacgtaccagaggtggaagtccaagtcaaacgcagaaggactgcctcactgagcaaccaagagttctgtacagagtaatgagatgtgtga

SEQ ID NO: 621845 - DNA, 110 bp, Homo sapiens
agaagatccagagaagctcttcacagatctcagagaaattggccatggaagctttggagcagtgtattttttctgatacaacaccccttttaaatggatcaagccaagac

SEQ ID NO: 621846 - DNA, 88 bp, Homo sapiens
agagcccggggacggcgaggccctcatgtaccacacggtatctcagatgaagacatcatcaacattactcttcctactggagtcccca

SEQ ID NO: 621847 - DNA, 98 bp, Homo sapiens
acatccttctccacacaggcgatttcaccgagctgggactgccctcagaggttaagaagtttaatgactggttagatttcttataggaaagacgtgca

SEQ ID NO: 621848 - DNA, 96 bp, Homo sapiens
cttggagccaggcgccggggtctgaggctggaggctcccaggtgattttcacaaatcctttagaaatcgtcaagatccgtttgcaagtggcaggag

SEQ ID NO: 621849 - DNA, 83 bp, Homo sapiens
gaaccagcgcttctccaccaggatcacgtttgagtgtgctcagatatcgttatccaagcattaggtgaacatcttaaattaag

SEQ ID NO: 621850 - DNA, 74 bp, Homo sapiens
ttatgagaggagtcaatcagagggtgtgagatggcagacaggtttgcaggaaaccctcagaaagggggctggag

SEQ ID NO: 621851 - DNA, 90 bp, Homo sapiens
gttcgtcatggggctgtttggaaagacccaggagaagccgcccaaagaactgaatagcctaacatggcagaccagagacagcgctcactg

SEQ ID NO: 621852 - DNA, 74 bp, Homo sapiens
tttgtatgcggtgtcaagttgcctaattctgaggacttccaagagctcttcagtatccccatcagccagtttcc

SEQ ID NO: 621853 - DNA, 108 bp, Homo sapiens
catgccgtccgccttctctgtcagctctttccccgtcagcatcccagccgtgctcacggttcgtgctggccgtgggcagcgccgtctttgatgccatgttcaacgggg

SEQ ID NO: 621854 - DNA, 97 bp, Homo sapiens
tcagtcggccaagaagccctgcccagaaatgtgcctgtggctgccttgcctgtaactcagcaaatgacagaaatgagcatttcaagagaggacaaaa

SEQ ID NO: 621855 - DNA, 98 bp, Homo sapiens
gatactgagcttcttcctatttgccatgggtatgatctcgtgaaatcttgagagaaactgaatgacgaatgaaactattgttcctgtttcacacagaa

SEQ ID NO: 621856 - DNA, 75 bp, Homo sapiens
ccacaagaagcggaagtatgagttggggcgcccagctgccaacaccaaggagtcagggctaaaggtcaaccagcc

SEQ ID NO: 621857 - DNA, 99 bp, Homo sapiens
attctagagagcacgggcaggtcccggaggtctcagacccgcagctaataagcacaagtgggtaccactccacttagatgttgtaagatcagagagtca

SEQ ID NO: 621858 - DNA, 100 bp, Homo sapiens
ggatttcaggagcttcatcgagcgggacttgatcgagcaggcaacaatggtggctttggagcaggcaggtaagaatgattgatgttggctgatattggag

SEQ ID NO: 621859 - DNA, 82 bp, Homo sapiens
cgccgaaaaagagaagacgctttacccgactctttgggccgttatctcacgccaagaagcttgagagaagaaaaatttcaga

SEQ ID NO: 621860 - DNA, 75 bp, Homo sapiens
accgctccttggaaggtcgctgggaggtggcattcaaagagagcacagtccctggaggacccattggagggcaaa

SEQ ID NO: 621861 - DNA, 80 bp, Homo sapiens
ggaccccagaaactgatccgcaaagtgtctacctcggggcagatccggaccaaggtcaaaatgcagatcttcgtgaaaac

SEQ ID NO: 621862 - DNA, 98 bp, Homo sapiens
caaaacagcagatttcccaagagcagcggaaaatgatccagtcacagaagctcctcctggggtagagacagatcttattgatgttggattcacagatg

SEQ ID NO: 621863 - DNA, 98 bp, Homo sapiens
ctcagtggtcctacctggggatattatcaaatctactactgttcatggcagaaatgcactcggtgatggaaagagagccactattctgaagaacactt

SEQ ID NO: 621864 - DNA, 100 bp, Homo sapiens
gccgacttcgatgatcgtgtgtcggatgaggagaagtattctaccttgtaaatactgttatttgtatatactgtaaatgatgacatcggtgggcactaac

SEQ ID NO: 621865 - DNA, 101 bp, Homo sapiens
tggcctcaatatgtgccgccagtgtttccgtcagtacgcgaaggatatcggtttcattaagcgccacagcaacatcctcagagtctgagcgaactgcgccc

SEQ ID NO: 621866 - DNA, 96 bp, Homo sapiens
cccgactcgggcttggcgcggcggccagaggaaccccgagcccgtggaccgggagcccgtggaccgggagccggtggtgtgccaccccgacctgga

SEQ ID NO: 621867 - DNA, 83 bp, Homo sapiens
gtggagcttggtttcgggatctcggtgctgcagacggcgagacctcctgcacagaattttgtagccaccttggctaatgggat

SEQ ID NO: 621868 - DNA, 82 bp, Homo sapiens
tggagttcagcccactactctgaaccaggcaacatgagtgagaatgaggaagaggaaatttctcagcaagaaggcagtgggg

SEQ ID NO: 621869 - DNA, 100 bp, Homo sapiens
cggggatggcgtcccccgggggcccgtactgcacatcgtggtggtcggatttcaccacaagaagggctgccagttgcattaaaatcctcccctactgaaa

SEQ ID NO: 621870 - DNA, 100 bp, Homo sapiens
taaaattttacataagaagttacctttttcagggcggcgactggcggcgcgatggacctgaccgggctcctgctggacgaagaaggcaccttctccctcg

SEQ ID NO: 621871 - DNA, 89 bp, Homo sapiens
ctgatgcccagtggggcattcgtcttggtaaacttggtctcttccaggtttcccatgtccccccgaccagattcagtgcatagcacaac

SEQ ID NO: 621872 - DNA, 73 bp, Homo sapiens
gttggaataccggctctcagcggctatacgtaggtaacctttccagagatgtgacagaagtccttatacttca

SEQ ID NO: 621873 - DNA, 96 bp, Homo sapiens
cactccccggcggcagcacgaaagtaccatatgctgcagttggagaagaaacttgaacgtgaacttgaggatgatgcacgagttattgcttgccgg

SEQ ID NO: 621874 - DNA, 99 bp, Homo sapiens
gtgaaggtcagagagaagcagctggctgcggagaacaggctcacggagatggagacgctgcagtctcagggtttagatgtagattctctggtcattgag

SEQ ID NO: 621875 - DNA, 100 bp, Homo sapiens
gaactgggcatggccccccatcttctttggtgcccgacaaatgggctggaggagaaatgtctgaagtaagacccctctccagagacatcttgatggagac

SEQ ID NO: 621876 - DNA, 97 bp, Homo sapiens
tcgtgcttcgggatggaaacctatggttatctgcagagggagtcatgctttcaaggacctcatggttatgccaagaatgttccattaaattaaattt

SEQ ID NO: 621877 - DNA, 100 bp, Homo sapiens
gcgtggtccctggtccagtcggagagccaggccgtaagttcatcatcgccaacgctcgggtggagaactgcgccgtcatctactgcaacgacggcttctg

SEQ ID NO: 621878 - DNA, 100 bp, Homo sapiens
agtgagccagatttcacctctgcaaatatgagagattctgcagaaggttatggaggttttgatgactatggtggctataataattacggctatgggaatg

SEQ ID NO: 621879 - DNA, 95 bp, Homo sapiens
gtctcggtgtagctgccgtggttgccaggagagctgcgccggcgagaagcggccgagccagcagcagtctcgacacaatacagaagattttacac

SEQ ID NO: 621880 - DNA, 49 bp, Homo sapiens
cccgcccgccatggccaccaaggtgttggtaaatcatgcttattgctac

SEQ ID NO: 621881 - DNA, 100 bp, Homo sapiens
gacaaggaggccaggaagaaggttctcaaacaagggtccaagacgcggaagatcccataccccaccaagaaccccttcacgtggctcttcctgctggtgt

SEQ ID NO: 621882 - DNA, 101 bp, Homo sapiens
ggacacgggaatatatccgaagcctgaagatggttccaagtattccctatctaggacattggctccctggattatcaagagtttgtagttgacattgaatc

SEQ ID NO: 621883 - DNA, 101 bp, Homo sapiens
gttccaccttcagagcgtcacggcgtacgccctcatggggaaaatctccccggtgactttcaggtgaaagaaaagatgttgtcccggttaagagtagtttc

SEQ ID NO: 621884 - DNA, 90 bp, Homo sapiens
ttcacattccactccttcctcatctggagatatacttcccaattcatcagattataagtcctcactcatagcactgactgctcataattg

SEQ ID NO: 621885 - DNA, 82 bp, Homo sapiens
ggtcagtccgccgctcaccccgcggccgcaccttcccgccttctcaggccttccggagcagtactacagcctcacctggttc

SEQ ID NO: 621886 - DNA, 82 bp, Homo sapiens
attgatacaatatggaaaatactcaagccaggtggaatttggataaatctagctagtatgttcaacacaccaggaatgcaga

SEQ ID NO: 621887 - DNA, 98 bp, Homo sapiens
cagaagaaatggcggacttctacaaggaatttttaagtaaaaattttcagaagcacatgtattataacaggagattatttggtagcaattgaagagaa

SEQ ID NO: 621888 - DNA, 101 bp, Homo sapiens
catttcccaacacccgccaccagcaggaataagttcccctgtcagtggaggatgggatacttcaacctgggggttgaaatcaaacactgaacctcagagtc

SEQ ID NO: 621889 - DNA, 51 bp, Homo sapiens
caccgccgctgcctcagtcatgccgacaaatcttcctattttcaagctgaa

SEQ ID NO: 621890 - DNA, 90 bp, Homo sapiens
cttaagttttccgtgtgcgggttgcaaggagcgtgcgtgcgtctgaagaccgtgatgataatcgtagcaatcagccccaaatacaaacag

SEQ ID NO: 621891 - DNA, 101 bp, Homo sapiens
tggccccattgggccccctggtcctcgcggtcgcactggtgatgctggtcctgttggtcccattgggtctgctggccctccaggcttcccaggtgcccctg

SEQ ID NO: 621892 - DNA, 87 bp, Homo sapiens
agcattttctgttgactgtaaaggtgctggtaagatttcttctggtggatccataaagaacccagccaacccgcagagggaggggag

SEQ ID NO: 621893 - DNA, 74 bp, Homo sapiens
ggaaggatggcctctggacatccgagtgggtgtggccgacgacgatgccctcgctgaggagcgcatgcggagag

SEQ ID NO: 621894 - DNA, 146 bp, Homo sapiens
gttggcctttggggccctggcattaggtctccgcatggccattattgagacaaacttggaacagctctgggtagaaggttcacgagtactaatcttcagtcaaatgacaagggtattggacattttggaagattattgcatgtgga

SEQ ID NO: 621895 - DNA, 90 bp, Homo sapiens
ttgaattcattaatgaaaaaggtgtcaaacgcacagccacatatttacctgaggttgctaaggaacaagagggaaaaacgtgatgtcccc

SEQ ID NO: 621896 - DNA, 82 bp, Homo sapiens
cgtgtgcccaggcgcctggcgtccgcgtcggcgatccggggtctgggcgcggcgaggaccaagaatcgccttcagccctgtc

SEQ ID NO: 621897 - DNA, 83 bp, Homo sapiens
agaagaatctgcttgtctatggatggcattggagtcaagagagattataaacaggccttgaagtattttaatttagcttctca

SEQ ID NO: 621898 - DNA, 97 bp, Homo sapiens
agagcctcgcctttgccgatccgccgcccgtccacacccgccgccaggtgtccctggccagtgtccttccacctgtccacaagcatggggaacatct

SEQ ID NO: 621899 - DNA, 99 bp, Homo sapiens
acggaggatgaagtgaacagctgagcagctcgcagagagcaggcagccttaagtgccttgaaacaattttctgaacaaggactggatccaatcgatgga

SEQ ID NO: 621900 - DNA, 52 bp, Homo sapiens
ccctggagcagtatgccagcaagttaagtgggcagaccaacatccacctcag

SEQ ID NO: 621901 - DNA, 75 bp, Homo sapiens
gagaggttaagagactccactgaggtcacacagccgggtgatcagcccatgacctaaacctccagacaaaataaa

SEQ ID NO: 621902 - DNA, 90 bp, Homo sapiens
agcgagctgagtggttgtgtggtcgcgtctcggaaaccggtagcgcttgcagcatggcggttttggtgaataacatcaccacaggtgaga

SEQ ID NO: 621903 - DNA, 83 bp, Homo sapiens
aaggactcttgtcatctgccttaggcgggaaatgctgttgctggattgcaaccccgagttattttaccaagaaaatggtttgc

SEQ ID NO: 621904 - DNA, 49 bp, Homo sapiens
tgaatgcatcagaaccatgcacgccgtggtccttcagcatatctctgtg

SEQ ID NO: 621905 - DNA, 80 bp, Homo sapiens
ccgccacatgaggaaccatgcctatgagccactcgccagcttcctagacttcattacaatgattacggacctgaagccaa

SEQ ID NO: 621906 - DNA, 100 bp, Homo sapiens
aatgcaatgctgtttgccctgaacatcatgaattcccaagaaggaggtatggacgacaaaggcgacccgagcaatgaggaggcacctaaggccatcaaac

SEQ ID NO: 621907 - DNA, 100 bp, Homo sapiens
tactttgcacaggaagctataagtgcatccaggatcctgatgagaaggtagccatgcttacgcaaatcttggaatttgggcagacaccaaaacaactatt

SEQ ID NO: 621908 - DNA, 100 bp, Homo sapiens
tctcttgggcaatcttcacggggctggctgctctgtgtctcttccaagggagaggtgatatccagcctcagttggacagtgctctccaagatgtcaatga

SEQ ID NO: 621909 - DNA, 100 bp, Homo sapiens
gggggcccagctcccgtagggagccgtgggcgctcggtgcccgggccgggcagctctggcttatcaggactccatagttctccaacagagaaatcttgaa

SEQ ID NO: 621910 - DNA, 139 bp, Homo sapiens
tggcccccggctccgtgaccagccggctgggctcggtattccccttcctgctagtcctggtggatctgcagtacgaagacattgctacaagtggttggtgtggtctctgtggctgtggccgtgattccttggatcgcaa

SEQ ID NO: 621911 - DNA, 80 bp, Homo sapiens
ctggagcctcagttggaagcagccgatccagcctgcggagcctgtggggcaggtgattgaattactcagatatgaagatc

SEQ ID NO: 621912 - DNA, 76 bp, Homo sapiens
aatcctggagccccccagtgaggacttgggaagatccccatgaaaaagataagagcacgaactgctttggagataa

SEQ ID NO: 621913 - DNA, 74 bp, Homo sapiens
acaaatctaaaagaagctgccagacttggtattcacaccattaaggatgttttagaagaatgtatgtctcttcc

SEQ ID NO: 621914 - DNA, 83 bp, Homo sapiens
ccgggcacacccggctccccggacgcctcgcccatggcgaattgtggatgattgcggtggagccttcactatgggtgtcatcg

SEQ ID NO: 621915 - DNA, 97 bp, Homo sapiens
gcatgttcaagaagtggccggagagttctgcatgttgattcgctgaccggttccctgatgtgttacctgcttctgctactgatccaaactgcagaac

SEQ ID NO: 621916 - DNA, 100 bp, Homo sapiens
gcgaaaattaaactcccgaagaagagatgtgggcgctatctccaactgtctttgcacttctgagtaagaatctgatgattgtgcacagtgacctggctgt

SEQ ID NO: 621917 - DNA, 101 bp, Homo sapiens
tgggctgcagtacctgctggagaagggagactacaaggacagcagcgactttggggcccgtcaccctcagggtgactatgaccagagcaggaccaaagtgc

SEQ ID NO: 621918 - DNA, 98 bp, Homo sapiens
agcaggcctttgctggacagatgaagagtgacttgtttctggatgattctaagagaaaaactgcttaaggttgaaaagagaaatttaagaaattgctg

SEQ ID NO: 621919 - DNA, 51 bp, Homo sapiens
gtgcgggaaagaggagatgcttctgtgaaggactaccagctggtccagaag

SEQ ID NO: 621920 - DNA, 100 bp, Homo sapiens
aaactcccaggctcaagcagtcctaccatgtcagccttcccagtagctgggaccacagcttcagtaatccagtcagccgcagtgtccctgaagaatagac

SEQ ID NO: 621921 - DNA, 100 bp, Homo sapiens
ctgttgatgctgtaattgctgaacttaaaaagcagtctaaacctgtgaccacccctgaagaaattgcacagggaacagaaagaacagcttcaaaagatga

SEQ ID NO: 621922 - DNA, 75 bp, Homo sapiens
cttttggcttatgatgtctacaataattcggatttgttctacagagagtggttcaactcataatgacaagagaca

SEQ ID NO: 621923 - DNA, 50 bp, Homo sapiens
ctcgttgtcgccgcggtcctgctgttgaacatccagtcatggataaaaat

SEQ ID NO: 621924 - DNA, 100 bp, Homo sapiens
gactctgtagcacggaggatgggctttattcctctcccactagctgttttacttgatgaagaaatctctggaattgtggaagtggttggaagagtaaccg

SEQ ID NO: 621925 - DNA, 100 bp, Homo sapiens
cccctccgcccggcagctgccccgtctgagaagtgtggcgggctggggctggtgctggccagcgcgggcttcggcatgctgacggcacccatcatcgagc

SEQ ID NO: 621926 - DNA, 100 bp, Homo sapiens
agagaacgcgcccaagtggcggggactactggtgcctgcgctgaaaaaggaccgcagctgaatgcacagctagaaggttggctttcacaagtacagtcta

SEQ ID NO: 621927 - DNA, 101 bp, Homo sapiens
tacctgttgttgcagagttattttctgagtcagtttcaggtactagcaaaggccagacgtcttactcaacaacttccctgccaccacctccaccatcccat

SEQ ID NO: 621928 - DNA, 100 bp, Homo sapiens
tgctttcctaaggtttggctcgaaccaggaaggtactctgatggctaccgcagctcctccctcctccgggccgtggcccacctgcggtcccagctctggg

SEQ ID NO: 621929 - DNA, 50 bp, Homo sapiens
ctcatgttggacatgctttaaataaggatgaagtttccaaatgtgtatgt

SEQ ID NO: 621930 - DNA, 74 bp, Homo sapiens
ctattccgagccattgaccaagaggagaaggggaagatcacattcgggcgtctctggccgagcctctttttgtg

SEQ ID NO: 621931 - DNA, 90 bp, Homo sapiens
cgctcgctctggggctcgatgtgaatatatattatgtctgcctgttctcccctcgtcggtggctaagcaggctctccccggaggctcagc

SEQ ID NO: 621932 - DNA, 100 bp, Homo sapiens
caatgtgtcaaccgcattattactgaaaagctggccgcccggatcctggaggcgcaccagaacgtggcccagatgcccctggtcgaagccaagctgcggt

SEQ ID NO: 621933 - DNA, 100 bp, Homo sapiens
cttagatacttgggttcagccagcaattgcccaaacccaaagtgtggaggatctggggactttgatgattttaacctggaggatgcagtgaaagaaactt

SEQ ID NO: 621934 - DNA, 112 bp, Homo sapiens
caatatctgtcttcggtggactccttcggcagtccacccaccgccgccgcctcccaggttgtgaccgagattcccgacgagagagactgaggggaagagaggaaggaggggc

SEQ ID NO: 621935 - DNA, 100 bp, Homo sapiens
ggagcagtgagaaagcaaaggctgctctgaagcgcacgacctccgactactttctccttcaagatgctacatttatgtgtgacaagcggtgtaacaagaa

SEQ ID NO: 621936 - DNA, 97 bp, Homo sapiens
gccggcttcaagcagatgacttcctccaggactatactttattgatcaacatccttcataggcatgttatttgaaagcaattgagacgcaaccgaac

SEQ ID NO: 621937 - DNA, 75 bp, Homo sapiens
atcgatctaagatggcgactgtcgaaccgaaaataaagcagttggagtgatgaagtcgggccatgtatttacaat

SEQ ID NO: 621938 - DNA, 75 bp, Homo sapiens
gggggccgctctgggatcccggccaccagcaattgtccggctaactatatgtcagaaagcatcagcttttctcga

SEQ ID NO: 621939 - DNA, 99 bp, Homo sapiens
tcttcccgctggccgccatctgctgcagactggagcctgagagcagtgacgagtagcacagcccctctatggtttagatggcagtgctgcaaaggaggc

SEQ ID NO: 621940 - DNA, 100 bp, Homo sapiens
cgcggctgcacaactgcaggaacaccgtcacgctgctggaggagaggatgacagcaacaagagtccttcttgaaacccaagattgaaccttccagtgcct

SEQ ID NO: 621941 - DNA, 74 bp, Homo sapiens
gagtagtcgctggagtccgcgcctccctgggtgaacatgggtgatcggtttgggcagatcatgattgaaaacct

SEQ ID NO: 621942 - DNA, 90 bp, Homo sapiens
ctatcttagcggcacagagacgaggagaagatgtggagacttccaagaaatgtatggacctgtctgccaatcaggacgaggagaccgacc

SEQ ID NO: 621943 - DNA, 75 bp, Homo sapiens
ggaacatggcgcaagctctgtctgaggaggagtttcagcggatgcagcctgaactctttgcttccggaatccggg

SEQ ID NO: 621944 - DNA, 80 bp, Homo sapiens
agctttgtgttcaagcggaaaaccaattggtttaaaagaagagccagattttctctgtgggcagttctttttgttttggg

SEQ ID NO: 621945 - DNA, 82 bp, Homo sapiens
ttctggaagctactactacgtggtgcttggaaaggctcgcttctcatatgtgcggatgaaatatcttttcttttcctggtta

SEQ ID NO: 621946 - DNA, 83 bp, Homo sapiens
cacaattataaaatgtcagcttttaaggttataaaccggtggaccataagcttatttggctacccttacgggaggcatttgag

SEQ ID NO: 621947 - DNA, 74 bp, Homo sapiens
atttgctccgctaaaattacagatggaattcaaggcagtgcagcagatggtggatgcttccaaaagcatcgaag

SEQ ID NO: 621948 - DNA, 101 bp, Homo sapiens
cgagaagtccccgaccgactgtgtctttggtgcaacactaacaaggcttgtctggactacccagttacaagcgtcttgccaccggcttccctttgtaaatt

SEQ ID NO: 621949 - DNA, 100 bp, Homo sapiens
tgatggtgatggagattttgatgtggatgatgccaaagttttattaggtgtccaaagacaggaggtggtctgtaaaaggttggatgacaactccattgtc

SEQ ID NO: 621950 - DNA, 74 bp, Homo sapiens
agaagaagcaggatgaactgaaacggattgccagagaattggcagaaggtgatgatgaacagtctacacagatg

SEQ ID NO: 621951 - DNA, 101 bp, Homo sapiens
caggccttgagcagagagatggcacccaacaggcggtacctctggagcacccctcatccccctggggttgtctaccttcataacaacaatatctctgtagt

SEQ ID NO: 621952 - DNA, 100 bp, Homo sapiens
gcctgaatggcggcacatgccatatgctcagccgggatacctatgagtgcacctgtcaagtcgggtttacaggaaacatgccctgaactgtcacagaatg

SEQ ID NO: 621953 - DNA, 75 bp, Homo sapiens
aaactctaccctccaggggatgaggaaggtgctgcagatgattacaatagaattggttcttcattatatgcttta

SEQ ID NO: 621954 - DNA, 100 bp, Homo sapiens
gatttgacgggcaaccaatcaatgaaacagacacacctgcacagattatctccctccaaactctaaagaaggaatataaatcctatgaagccaagctccg

SEQ ID NO: 621955 - DNA, 101 bp, Homo sapiens
attttgatgtggatgatgccaaagttttattagagaagaggccccctgagccccccggacctccaccgccgccacctccaccccctctggttgaaggcgat

SEQ ID NO: 621956 - DNA, 98 bp, Homo sapiens
tctttatgcaaagccagcgttacagtaatgttccaggactccctggaggaaaagcggaagcggcagcggtctgaacgcctggaacggattttccaact

SEQ ID NO: 621957 - DNA, 83 bp, Homo sapiens
cccgcctccctcccgcgcgtgctgcgggtctgctcgggggtctacttcgaggacaaatttacatgtattggagaccagaccag

SEQ ID NO: 621958 - DNA, 88 bp, Homo sapiens
taaaagttgatggagattacctttggccaccttttgtggtgacattggatgaggtagagctgatccactttgagcgggtccagtttca

SEQ ID NO: 621959 - DNA, 82 bp, Homo sapiens
tcgtgggagtcgccagcaagtccatggagaacacgctgcctgtggaggaaccgattgtgtccacagatgaggtcatcttccc

SEQ ID NO: 621960 - DNA, 100 bp, Homo sapiens
tgatgaagaagaagatgatgcagagtccagggagcgagaacccgagcagcgccatgagcaacactaccgtcgtccccagcactgcaggtccgggccccag

SEQ ID NO: 621961 - DNA, 98 bp, Homo sapiens
ctgggtcagtccgccgctcaccccgcggccgcaccttcccgccttctcagaaaaatggctactggacaggatcgagtggttgctctcgtggacatgga

SEQ ID NO: 621962 - DNA, 75 bp, Homo sapiens
tctatctttacactcccacagcagccaaaccagaagatcagtgtgcgtgtgaccaccatggatgcagagctggag

SEQ ID NO: 621963 - DNA, 100 bp, Homo sapiens
gctggggacgcgcgcggccgagactctggcctgcagtcgccgccgccgccgccaggatgtacagttacccagcacgtgtacctcctcctcctcctattgc

SEQ ID NO: 621964 - DNA, 98 bp, Homo sapiens
acccttggcgcctgcccctgcaacgggaggaccaagaatcgccttcagccctgtctggtgcatccttggcagaaagtgaggaggaaaacacccccatt

SEQ ID NO: 621965 - DNA, 96 bp, Homo sapiens
ttcaagtttggattggagtccagataaaaggggtctctgcgtctgtagttcatttgaccaaacggtctctaattaacagaagatggcaaagcccag

SEQ ID NO: 621966 - DNA, 100 bp, Homo sapiens
ccatcttccacatccctggccgtaccttccctgttgacatcctcttcagcaaggagtgtacaccttaaacaatgagaagcagtggataaataaggctgtt

SEQ ID NO: 621967 - DNA, 100 bp, Homo sapiens
aagatgatcagacaaggcaaagcgaaattggtcattctcgctaacaactgcccagctttgaggaaaatgatgaagttctggttgctggatttggtcgcaa

SEQ ID NO: 621968 - DNA, 96 bp, Homo sapiens
gcatgcccgggagcggaaggtgcctgtgacgaggattggccggctggccaacttcggagctccaccgggggacggctacgtgcaggcggacgcccg

SEQ ID NO: 621969 - DNA, 74 bp, Homo sapiens
gtttgtcactttttgtacaaaagaagcagctcaggaggctgttaaactgacagttgaaccaactggaaaacgtt

SEQ ID NO: 621970 - DNA, 100 bp, Homo sapiens
ctcgccgagcgccgttgctgagccctgcaaatagcaggttccttcaatggtgccttagctgctgttcctgtccaggacctgggctccactgtcatcaaag

SEQ ID NO: 621971 - DNA, 80 bp, Homo sapiens
atgctgctggacgccactttccggggtgcacagcaagtggatttttagactctgaggagcagttggagctaatccacatt

SEQ ID NO: 621972 - DNA, 100 bp, Homo sapiens
tggtggctttctttggacccttgacatcaaccagttactatttgtctttctctaatacacagaattctaggaaggaggctgttcttttagccaaaatgaa

SEQ ID NO: 621973 - DNA, 50 bp, Homo sapiens
atgtctgcctcctggtgaaaaagggcttcccacggcacgacatggagacc

SEQ ID NO: 621974 - DNA, 75 bp, Homo sapiens
gccgcaaccagagccgccgccacgatggaagtacaggctccaccaggcaccaccattggccacgtgctacagacc

SEQ ID NO: 621975 - DNA, 51 bp, Homo sapiens
ttgctgaaggggaggaagaaaagccagcttctagacaatctgatacctcag

SEQ ID NO: 621976 - DNA, 82 bp, Homo sapiens
tccggggcttgccctggtcttgctcggccgatgaagtgcagaggtttttttctggtggacgcggatctgtcaacatgggtaa

SEQ ID NO: 621977 - DNA, 100 bp, Homo sapiens
caccatccacgccagccgcaccatgccgctcctaagcctgcacagccgcggcggcagcagcagtgagagtctctgctttctatccgtcaagatgataaag

SEQ ID NO: 621978 - DNA, 75 bp, Homo sapiens
cactgcctgaggccaaagataaggtacatggactatatcgcacaacaggtgctagttttgagaaggcccaacagg

SEQ ID NO: 621979 - DNA, 100 bp, Homo sapiens
ccagaattggaaataacgggagggaggacctggtccagcttcccttcctcaaataaggaaattgacacctggcgtgggagaaaatccccttcaacattcc

SEQ ID NO: 621980 - DNA, 50 bp, Homo sapiens
gcccgggtctgtgatcgccgaggcgggggttacacatcattttggaatga

SEQ ID NO: 621981 - DNA, 83 bp, Homo sapiens
gtaatggaaagcatatggacaggtctacgccacatcacttagccaaaagaatgcaatggtgtaaagattccagttgatgccag

SEQ ID NO: 621982 - DNA, 75 bp, Homo sapiens
cagaagctacatgacccctaaacgtattggtaaaggttttcaaggtgtcatgaaaagatggggatttaaaggcca

SEQ ID NO: 621983 - DNA, 75 bp, Homo sapiens
ggctagcatctctcgggagccgcaaggcgagagctgcaaaggtagtgggcagcagtcagtgacaggtgtaacctc

SEQ ID NO: 621984 - DNA, 100 bp, Homo sapiens
ggaggcgccggcggagcccgaccacgacggccccagggaggatgacgaacccaacctggtgcccggcccgcagcaaagcttcgaggcgcaccaggacgag

SEQ ID NO: 621985 - DNA, 75 bp, Homo sapiens
cagaaagcaggcgaacccgcggcgcaataacgcttttacccagcacctgtccagtgaaacaacttgataatcgtt

SEQ ID NO: 621986 - DNA, 100 bp, Homo sapiens
aaaatgttctttactactaagcaccgttggtatcctcatggacgctaaaagaagtcttcaggaaacagctagagaaggcagaatatgaaataaagaagac

SEQ ID NO: 621987 - DNA, 100 bp, Homo sapiens
ctagacctcgtaattacattctctcggccagcgcctccgcggcctacttagagtttttcacttcccgcgagacagcggaagcacttctgcaagtgctgaa

SEQ ID NO: 621988 - DNA, 100 bp, Homo sapiens
gtgaatgaaggacacggcctcttgacactcccaggcagcacagatagacggatccaaccaatttagaacttgaattgattcatcgaggaggcaatttgtg

SEQ ID NO: 621989 - DNA, 89 bp, Homo sapiens
aggacaccttccactttgaccccgagttcacagcgcggacgcccacaggatggaagagtgtagaaagtgtcccaaagttggtgtctgaa

SEQ ID NO: 621990 - DNA, 75 bp, Homo sapiens
atgtgatcatcgatctctcagggtcgtcgggtgaaggtaagaaccttgatgctgtccatgatatcactgtggcgt

SEQ ID NO: 621991 - DNA, 101 bp, Homo sapiens
ccctggccgcgcactcgcctcagctgagcctgggttcactattatgaagatggcaatgttcagttggttagtcataaagatgtacaggattcactaactgt

SEQ ID NO: 621992 - DNA, 100 bp, Homo sapiens
ttcgggtcgggcgtctccgccggctactgccgcttcagttctcccggtgtggccacgagtcggggggctagagagctgaaggagagccagtttccccaaa

SEQ ID NO: 621993 - DNA, 90 bp, Homo sapiens
gcggcggagcgcgagagcttcgagcggactcagaccgagacatgggtgcccggcaccgcgcccgagcccactccattcagatcatgaagg

SEQ ID NO: 621994 - DNA, 110 bp, Homo sapiens
cccaaggaggcttcaagacaaagggccccttacacaccagacagttaccgaagtgcatgtttgggattttgttgaagaaagctggatacagtaaacggaaagaatcttgg

SEQ ID NO: 621995 - DNA, 144 bp, Homo sapiens
ctcttcctttttcgacgcctccgccgccgcctgaggaggcgagctagccgggagttacaccgccaccgccagaaagctgacttcatgagaccgaggatctcgttcgttgatcgatgctacatattcagcatgttagataatgag

SEQ ID NO: 621996 - DNA, 50 bp, Homo sapiens
ctggcacttatgtcctccctgggcgcatattaaatttcctattgactacc

SEQ ID NO: 621997 - DNA, 75 bp, Homo sapiens
ggcattcttacattgactatgagatatgtattcatgtgtgatgaatgcagactctgctaccattttggctgtttg

SEQ ID NO: 621998 - DNA, 76 bp, Homo sapiens
ggacaggaactgtggacagtgaagagaggcctctcccaaagcacctgcgcagctttctatgggaggattctcgtaa

SEQ ID NO: 621999 - DNA, 122 bp, Homo sapiens
tactgtcgtggagaaagattgaaaagtagttaatggcagtggtggtatgaaggacttaaccaccaccatgtcgagcaaaagaacaaagaccaagaccaagaagcgccctcagcgtgcaacat

SEQ ID NO: 622000 - DNA, 100 bp, Homo sapiens
aacagggcttcaatcaaggttataagaaaggtgcagaagtcattttaaactatggacgactccgaggaacattgagagctgtaggtaaaacttgcctact

SEQ ID NO: 622001 - DNA, 75 bp, Homo sapiens
tgtttatggacatcgccatgctggtggagaatcagatgcaaccttaaaatcagtgacaagaaacattccaaacaa

SEQ ID NO: 622002 - DNA, 99 bp, Homo sapiens
cttcaaagcatggggctaactccagaatcccccattggaagaggcagaaatccaggcagaacttgaacgtttggaaagagtcagaaatcttcacatacg

SEQ ID NO: 622003 - DNA, 75 bp, Homo sapiens
ccgccgcgcaggagcctcccggagctgggcgaagctgtgctcaggcccgggctggacgcagagccagagctgtcc

SEQ ID NO: 622004 - DNA, 74 bp, Homo sapiens
ttggtttcgggatctcggtgctgcagacggcgagacctcctgcacaggacgtggcccagtggaacatcgggagc

SEQ ID NO: 622005 - DNA, 82 bp, Homo sapiens
gactctgaacttccctggtcgaacagttttttctaatggctattcaagccacccggcccaagttgaagaagatgaagagcca

SEQ ID NO: 622006 - DNA, 100 bp, Homo sapiens
agcaggcccagcaagaggagcagtccagcggcatgaccattttcttcagcctccttgtcctagtgaacacctacctcttcatgatgcaagcccaaggcat

SEQ ID NO: 622007 - DNA, 96 bp, Homo sapiens
ctcctctccttctacctgctggggttgcttgtcagtagcgggcaaggtgacgccttctgggccccatctgtccttcctcacagcaccctcagcacc

SEQ ID NO: 622008 - DNA, 51 bp, Homo sapiens
ggtttggaattgatgatcaagatttccagacactcttgcactcctgtaatg

SEQ ID NO: 622009 - DNA, 74 bp, Homo sapiens
tcattgtttgtggcattccagttaagagcacaacattttcaagaaaattcaagtgaggagctggtttcacctga

SEQ ID NO: 622010 - DNA, 98 bp, Homo sapiens
ctgaactgaagaagcttgggctcacttccacaaatgttcctgggtggagctacccatgaacagcagcaatggcaatgataatggcaatgggaaaaatg

SEQ ID NO: 622011 - DNA, 83 bp, Homo sapiens
gccaggagatgcccagcctggaggtgatcacgctcagattttgcaagaacgaggctcaaggatgtgagggacacagtattgac

SEQ ID NO: 622012 - DNA, 98 bp, Homo sapiens
aattcagattgaacaccctgaaccatatgaaaggctgctttgactctcccgcgaagacctttccttcactgttctactgtgattcccgttgtggttct

SEQ ID NO: 622013 - DNA, 100 bp, Homo sapiens
cgactccgaggacggggaggaggaggaggcggcgcccgcggacgcaggggcgttcaatgatcccgtaccagctttggatctcggacagcaactccagctc

SEQ ID NO: 622014 - DNA, 100 bp, Homo sapiens
gccgggcgcggctggggcccgaggctagcatctctcgggagccgcaaggcgagagctgcaaagtttaaaattggtggtgaatggtggacatggatcgatt

SEQ ID NO: 622015 - DNA, 98 bp, Homo sapiens
gccatcctctacaggacccgctttctaccattaaggaagatgttaccgagtacttcagtgaattccttagtgcaggggaacggagtcttgaattccag

SEQ ID NO: 622016 - DNA, 100 bp, Homo sapiens
aactgcttgaacatcctttgactggttagccagtgttatagttttgccgctggactcttccctcccttcccccaccccatcaggatgatatgagacttga

SEQ ID NO: 622017 - DNA, 90 bp, Homo sapiens
ctgaagcgggagccgggaggagagctctcctgggaagattctggaacttttcaaagcctgactctcttcttgaaacagtggagcatcata

SEQ ID NO: 622018 - DNA, 75 bp, Homo sapiens
gctccccagctggtggctggagcgaccccttgttctttggtggcgctggtcatgctttcagaacgaaaaggcaca

SEQ ID NO: 622019 - DNA, 75 bp, Homo sapiens
cagattatatcgcatcctatggctcaaagaaagatgattatcttcagctttagctgcagctgcctctgttcagcc

SEQ ID NO: 622020 - DNA, 82 bp, Homo sapiens
tgtcgggttattcgagtgaccgagaccgcggccgggaccgaggctgagcgtgctccgcctctcaccttccatgggccacccg

SEQ ID NO: 622021 - DNA, 75 bp, Homo sapiens
caaggacctggccgacatcgcggccttcttccgatccggttggatttggtctagggagtcccagaaagaagtaga

SEQ ID NO: 622022 - DNA, 102 bp, Homo sapiens
aagtcatgctcgcttcacggaggcaatagctagccggactgactgcattgcacagatgatggatatttacgtatgtttgaaacgaccatcctggatggtgga

SEQ ID NO: 622023 - DNA, 100 bp, Homo sapiens
ttcagggcaagaagagtccgcgactcctggatgccattattacttgcaatcctgaggaattcatagttgaggcgctgcagcttcccaacttccagcagag

SEQ ID NO: 622024 - DNA, 50 bp, Homo sapiens
gcaaactctggaaaaaaacttggatgcaatcttcttaccgcgaagaagcc

SEQ ID NO: 622025 - DNA, 87 bp, Homo sapiens
agagaaggagagccccgactcctggatccctggcagtaagccgaaaggatgaagagttagaccccatggaccctagctcatactcag

SEQ ID NO: 622026 - DNA, 50 bp, Homo sapiens
cttcctgcccaacaaacagaggacagtggaaagttatatcacagatgata

SEQ ID NO: 622027 - DNA, 100 bp, Homo sapiens
tctgagagagggaagtcgcctctgtgctcaacgtgctggccaaagcgctctatgacaatgtggccgagtccccggatgagctctccttccgcaagggtga

SEQ ID NO: 622028 - DNA, 100 bp, Homo sapiens
atttgtgggccataccaaggatgtgctgagtgtggccttctcctctgacaaccggctttggtcgatggaccttgcactcaagtgaggagacaggccatgc

SEQ ID NO: 622029 - DNA, 100 bp, Homo sapiens
cttcccccagcgcttgccgccctgggcgcggccctgctcctgtcttccattgaggcagaagaataaaagccgccctcattctaggggagaatataatgtt

SEQ ID NO: 622030 - DNA, 100 bp, Homo sapiens
agaacagagcagaaatcaaattgaagagagcagttgaagaagtgaagaaattattggtacctgcatactatactggcaattgctggagaagattttgcaa

SEQ ID NO: 622031 - DNA, 120 bp, Homo sapiens
caatttcatagccatttattaccatgcttcaagagccattccttttggaacaatgaatggctttaagtgtcattgtatgtccgaatctcatcagagacaactattgctggcttcagaaaa

SEQ ID NO: 622032 - DNA, 83 bp, Homo sapiens
agctaagacgccgggactccctggaaacctagaaatggtgccatcgcctgcaggattctttattcagctctgacagtggcttc

SEQ ID NO: 622033 - DNA, 75 bp, Homo sapiens
aaaagtgaagaaagtgatcataggagaaaaccatttcagcagccattgtggatgagaagatcttctgttgtcatg

SEQ ID NO: 622034 - DNA, 75 bp, Homo sapiens
gcggtctgggccttttgggcagcttttccggcctgacaacttcatctttgggaccctgatgccccacaaccctgc

SEQ ID NO: 622035 - DNA, 98 bp, Homo sapiens
gcaggaggagtacctcggccaagaaaattatgcatgcgttagggaagctctgagagaatggctgtggaagggcgatgccagtccctccactccagagg

SEQ ID NO: 622036 - DNA, 101 bp, Homo sapiens
cggagcgcagcgcggccgcacaggtagacatagctgacattgagaatgaagagaaccgctactgtctattcatggaactcctggaatctagtcaccacgag

SEQ ID NO: 622037 - DNA, 74 bp, Homo sapiens
gggggacgagctcggagcagcagccagcctgtgggccaaagctgaccaactcccccaccgtcatcgtcatggtg

SEQ ID NO: 622038 - DNA, 75 bp, Homo sapiens
atgagatggggcacccagagataggagatgctattgcccggctcaaggagaggatgaagtttttgctgctgcagc

SEQ ID NO: 622039 - DNA, 75 bp, Homo sapiens
cggcttctgagacggcggcagcagcggcattcagtttctacagcagtataatcactacaaatccaatgtggagat

SEQ ID NO: 622040 - DNA, 98 bp, Homo sapiens
gggccaagaagattgaagccagagaaaggaaactcagccaagaatgtttaaagcagctggcaatcaagaagcagcagcacattgacaacataacccag

SEQ ID NO: 622041 - DNA, 98 bp, Homo sapiens
ctcggcctctcaaagtgctgggattacaggaacagatgttgttattgtaaagaatggaagaagaatatgtggaacaggaggttgtttagccagcgcac

SEQ ID NO: 622042 - DNA, 76 bp, Homo sapiens
ctccggccgcagccatgtgggacccgcgggcagctagtgtttcaacaaaagacagccagaagacaatctgatgatg

SEQ ID NO: 622043 - DNA, 100 bp, Homo sapiens
ctggaacgggtggccgattactgcgagaacaactacatacaggatgaagttaaaggaagtagatcgtacagccatgcaggcatggagccctgcccagaat

SEQ ID NO: 622044 - DNA, 50 bp, Homo sapiens
ctgtatggccgccgtcgcaagaaaagcaaccgtgacaagtggtgcccgac

SEQ ID NO: 622045 - DNA, 100 bp, Homo sapiens
aaaagcagcgattggaagagctccagctgttcaaaaataaggaaaccagtgttgccattgaggagaactgcgacacatcaccaagctgaagccctggagc

SEQ ID NO: 622046 - DNA, 83 bp, Homo sapiens
catttgtttgcccgtcggagcggagagagacccaacatgagtgaagtttcctgcaagaaacgggacgactatttggaatggcc

SEQ ID NO: 622047 - DNA, 100 bp, Homo sapiens
gaatctatgatgctgatggtgatggagattttgatgtggatgatgccaaagttttattaggaccgccgggagagcctgcccacctccccaccctggacgc

SEQ ID NO: 622048 - DNA, 75 bp, Homo sapiens
agccctggaatatgaagcaacatgagatggtggatgaacccacaggttcctttgcccaaagactcaacaggtgca

SEQ ID NO: 622049 - DNA, 82 bp, Homo sapiens
gcctggtctccattatttgagatgagttacatcttggaggcccattcacaggacgccatatgaacacaaaactgtgtggaag

SEQ ID NO: 622050 - DNA, 101 bp, Homo sapiens
cgtggcgcctcaggaactgaaccctcgcggccgcaacgtgtgccgtgctcccggcaagagtgagccatggagctacgtgtggggaacaagtaccgcctggg

SEQ ID NO: 622051 - DNA, 75 bp, Homo sapiens
acaagaccctggtgaaggaggtcgtacagaaaggcctaaagaatgtatttgacgaagcaatattggctgccctgg

SEQ ID NO: 622052 - DNA, 75 bp, Homo sapiens
cgggtctggagtgcgtgggggaccggctgttggcggcgagggcggcactgctcacaggacggctacccatccgca

SEQ ID NO: 622053 - DNA, 82 bp, Homo sapiens
gcgcggcatcgagtcaccaaaacgcagtcttcccatgcacaagatgattaatacagatcttagcagaatcttgaaaagccca

SEQ ID NO: 622054 - DNA, 87 bp, Homo sapiens
ctgcagggctttttggctgccgagcaggacatccgagaggagtctactcttcatcttgtgttgagacttcgtggtggtgctaagaaa

SEQ ID NO: 622055 - DNA, 50 bp, Homo sapiens
cttaaccgagatcaacctgtctggtccagctgggagctccccgacctcca

SEQ ID NO: 622056 - DNA, 49 bp, Homo sapiens
tccccgtcgtcctggtgctgcagcgggggacttgatctcatcttcatgc

SEQ ID NO: 622057 - DNA, 98 bp, Homo sapiens
cccagatccatttacactttacagaaaaatttgagggactgtttcggacttatgatgactgtgtgacgttccagctatttaagagtttcagacgtgtc

SEQ ID NO: 622058 - DNA, 82 bp, Homo sapiens
atttgaagtgggcgaaaatttagcccaagagtctcgctctcagtcaaaatctccaacgggaactcctgctcgtgtaaaatcg

SEQ ID NO: 622059 - DNA, 101 bp, Homo sapiens
tgaagattcacctcctcccctacctgaaagaactcctgaatcgtttgtgttagcaagtgaacatagctgggtgcagtggcttgtgcctgtaatcccagcac

SEQ ID NO: 622060 - DNA, 100 bp, Homo sapiens
tcccaaagtgctgggattgcagaattagacctttacgagaagcacagttttgtcttcagtttcctctccccccacccggaatggcctgagccgaagccag

SEQ ID NO: 622061 - DNA, 100 bp, Homo sapiens
gagctgctcaccatgtggtttggggagtctgaggccaatgtcagagaaatctttgacaaggtagcaatgaagtgatgaggatactgatctctagaagcct

SEQ ID NO: 622062 - DNA, 74 bp, Homo sapiens
ttttggatgatcttgaccccgaggatcaaaaccattcaagtgcaagatatgccattttgcaacagctcagcttg

SEQ ID NO: 622063 - DNA, 89 bp, Homo sapiens
gggacatgtctcagatatcaatgctgtcagtcttcaaaagcagtggactgtcttttggattcaaagtgggcaaaggccaagaaaggaga

SEQ ID NO: 622064 - DNA, 73 bp, Homo sapiens
atcaacgtggagggcctgctgttctgaagtttataggttaaacttagaacaaggacgatacctgaatcctcta

SEQ ID NO: 622065 - DNA, 75 bp, Homo sapiens
actaggattatacattgtaagaggtgacaacgtatgatggacttccaaaaccagaactaatatcctggattgaac

SEQ ID NO: 622066 - DNA, 74 bp, Homo sapiens
tcctctgcctccttcggacacaatctactcctacgtcaggccagagagtgagaaggcaaccaaagtgcaggaca

SEQ ID NO: 622067 - DNA, 99 bp, Homo sapiens
ccagcgctcagcccacctgtgattatggattaatacccctcgaagacaaggaggacttgggccaataaggattccacttctttcagatttgacccatca

SEQ ID NO: 622068 - DNA, 101 bp, Homo sapiens
cacaaaagagtctccgcggtggaggtctgcgttgctcttgcttttcctcgctggggtgtacggtgattcgcaaggggtggctcaccatcagcaacattggc

SEQ ID NO: 622069 - DNA, 80 bp, Homo sapiens
cgtttccagcctcaggaatttatggtcgcctttttgaatgaggaggaagttaacatccctaataggagggttctggttac

SEQ ID NO: 622070 - DNA, 100 bp, Homo sapiens
atggaggctttgttgtgagaagaactactgaattaactgttacaggacctccaaggtgaaattgaagctcacacagatgtttatcacaacctggatgaaa

SEQ ID NO: 622071 - DNA, 100 bp, Homo sapiens
tgaaaagtgttagcatgagcaaaagttcctatctaatattatatgctttcctttgctcccagcttcagacagcaaagtcctgacatgtgcagccgtgtgg

SEQ ID NO: 622072 - DNA, 96 bp, Homo sapiens
ccgcaaggtgtccacgtcgggtcagatccgacagaagagtcattcaggagagcaggaaagaaaaggccatccctgtggatgtcgcgctgccacaga

SEQ ID NO: 622073 - DNA, 83 bp, Homo sapiens
ggcaaagggaccacggtcaccgtctcctcaggagcatcagatccatgctgctgctgactcggagccccacagcttggcacagg

SEQ ID NO: 622074 - DNA, 75 bp, Homo sapiens
gacgcccaccctcaatggcgggttatggaaacaaaggacatgctttacatcgtcactgaatttgctaaaaatgga

SEQ ID NO: 622075 - DNA, 100 bp, Homo sapiens
gggcttctctgaggcggcgagagatggtcaggtctggagctcgaccgggccaggtgtctcatgatgccatcaaaatcccaaagtggtcacctttgtcaga

SEQ ID NO: 622076 - DNA, 89 bp, Homo sapiens
ggattccaagtaactcttatttgaatcaaggcagcatggatgccctgaacatggacacagtatgcaggctgtatgaagtgggcaggcag

SEQ ID NO: 622077 - DNA, 90 bp, Homo sapiens
gcgacttctaggagcctggggttcggcgctatggaggagctcgatggcgagccaacagtcactcttcctgcctgacacagctcacttcaa

SEQ ID NO: 622078 - DNA, 100 bp, Homo sapiens
ctttaatcggttagacttctcaagtgcaattcaagatatccgaaggttcaattatgtggtcaaacccaccttgggacaccttgactccaagcccagcagt

SEQ ID NO: 622079 - DNA, 100 bp, Homo sapiens
acccctcgtcatactcggtgttgagcgtttgaaacgtgaggaacggcgtagagaagagctttatcgtcaatattttgaggaaatccagagacgctttgat

SEQ ID NO: 622080 - DNA, 100 bp, Homo sapiens
cgagaacgtgcgggaagagaagatcatcgagcatttcaaacggcctccggtgtggctgtctctgatggtgtcatcaaggtgttcaacgacatgaaggtgc

SEQ ID NO: 622081 - DNA, 112 bp, Homo sapiens
ctcgataccaacggcaaaaatctcaagaaagaggtgggcaagatcctgtgcactgactgcggaatcccagtcagaagttccagcctgccactgttctctgatgccatgccag

SEQ ID NO: 622082 - DNA, 90 bp, Homo sapiens
aatgaccatgaaagagctcattgacaaaatctgctggacaaaaaagaagatgctgatatgctacaacacggatgaacctggaggacgtgg

SEQ ID NO: 622083 - DNA, 100 bp, Homo sapiens
ggatgctcttccgcttctccttagtgctgcctccaaaccaatgcaccatcaccaaccaagtctcctctcggaagaaacccgggatggacgtggccgacgc

SEQ ID NO: 622084 - DNA, 75 bp, Homo sapiens
cacctctgcagtgtcttccacaacctggagttgtcaggggagtgtccattggcagcacctgcctcctgagtgtct

SEQ ID NO: 622085 - DNA, 50 bp, Homo sapiens
ctggcagtagcaagagcacttggtaagcggaagggtacagccaatgcccg

SEQ ID NO: 622086 - DNA, 100 bp, Homo sapiens
ccaagtattgattgagaagtatgaacccaacaacagcctcgccagaaaagcatcagaagagctaacaattgctggaatgacctttacaacttttgatctt

SEQ ID NO: 622087 - DNA, 101 bp, Homo sapiens
agatgcagtggataatagtaattgcaactattggatgattatccgaaatgtttcattgtgggagcagacaatgtgggctccaagcagatgcagcagatccg

SEQ ID NO: 622088 - DNA, 75 bp, Homo sapiens
ggaggtgatggtggatataatggatttggaggtgatgcccaagaagatgaaaggattgttcttgttgacaacaaa

SEQ ID NO: 622089 - DNA, 75 bp, Homo sapiens
agaagacaactgaattgcttctaagaatgggccttaaactctggtgttgagtactactgggaccagctgaacgag

SEQ ID NO: 622090 - DNA, 50 bp, Homo sapiens
cattatatgctggaatggttcctttgggctcgggatgagtttgaaggcct

SEQ ID NO: 622091 - DNA, 75 bp, Homo sapiens
ctgatcccgagcagcgtcatgtacccctggtggctgttgcaccacgccctccctcctgcccctgaggcccggaag

SEQ ID NO: 622092 - DNA, 100 bp, Homo sapiens
gaaactattccaatgttcagtggcggaacttgcagttgaccccctgtttacagtgccagcgccaccaccgccgatttccagcagtctcacgcctcagatt

SEQ ID NO: 622093 - DNA, 75 bp, Homo sapiens
aggtccaggagtacccgaccctcaaggagcttactccacgggaacagcctctagataatctgagttgttgaaaat

SEQ ID NO: 622094 - DNA, 120 bp, Homo sapiens
ggcttcatactgagggccgagccgaggcggcgcgggtgcaggagcaggacttacggcagtgggggctgacaggtatcatgatattagctggtttgacatcaagtcatttgtgagtcatca

SEQ ID NO: 622095 - DNA, 82 bp, Homo sapiens
tactcagcgtcgctggcagccgctgtacttggttttaaaatcaaagatgggaaaatcggagaaaattgcccttccccatggc

SEQ ID NO: 622096 - DNA, 82 bp, Homo sapiens
aatccccccaaccagcaccagactggggctcccagaggccatttcataggattgcccccgaggaattagcacttgttcacaa

SEQ ID NO: 622097 - DNA, 90 bp, Homo sapiens
ctagtcttgcagaagaaacaagagccctgaaagatgaaatagatgttcttaggtggattttatccaaagccaagaaagacgataccgatg

SEQ ID NO: 622098 - DNA, 97 bp, Homo sapiens
atgaaactagccagactggaatttgagtctttggaggcactcaagcagcaggcccctagcagtcttcttgatgctttggaacaacatttagcttcct

SEQ ID NO: 622099 - DNA, 75 bp, Homo sapiens
gaggaccgtagggcccgtgggggcttcacgcctggcaggcggccggccagactgagcgggacgtgagcgtgcggc

SEQ ID NO: 622100 - DNA, 87 bp, Homo sapiens
ttaatttcagtgactgaattaaaaggtgtcaagaagctcagaatggactcacaccacccggcaagaactgctcactacggctccctg

SEQ ID NO: 622101 - DNA, 76 bp, Homo sapiens
cagagcttgacccaggcactagaaagaccacagcaagattctttcattcgtctcctcctagcctgggggaccaggc

SEQ ID NO: 622102 - DNA, 50 bp, Homo sapiens
aagatcttccaccccaacaaaggctatcctcctgacaaggtgatccgggc

SEQ ID NO: 622103 - DNA, 101 bp, Homo sapiens
agaatctggttatgatacaatcttgcgtgtcctgggctctaatgtcagagaatttctacaggcaagccaaattagagctgagagttgctgtagcaaaagtg

SEQ ID NO: 622104 - DNA, 75 bp, Homo sapiens
ccgtggcctccaacctgcaggacgtgttccaggctggtgatgtgccttcggaacgcccattctatcccccaacct

SEQ ID NO: 622105 - DNA, 75 bp, Homo sapiens
ctgcagaggttcctctacagcaaggtagtgggcagcagtcagtgacaggtgtaacctctgtggatgacagcaaca

SEQ ID NO: 622106 - DNA, 100 bp, Homo sapiens
cagaggtcgtaaagaatacaaatgctgcagaggatatgcctttcacctgtgaaggtatcacccctgatatcatcatcaatccccatgccatcccctctcg

SEQ ID NO: 622107 - DNA, 95 bp, Homo sapiens
cagagctattccagcaccagcagagcatccgcagtgtcatgcagaagtacctggaggaccggggcgaggtgacctttgagaagatcttttcccag

SEQ ID NO: 622108 - DNA, 96 bp, Homo sapiens
gaagaagcaaaatcaacaagaccagcaccagatccaggttctagaacaaagtatcctcagggtgataaaagaaaatgtggctgaagttacccgaag

SEQ ID NO: 622109 - DNA, 95 bp, Homo sapiens
tgccacaatgggacatgtgcaaatgtcaaggttcgcttcatcgttcgaggctgtggacagtacatttcctaccgctgccaagaaaaacgcaacac

SEQ ID NO: 622110 - DNA, 50 bp, Homo sapiens
ggattcttttcaatacatcctaaaacagatatatttttgccatcatggat

SEQ ID NO: 622111 - DNA, 78 bp, Homo sapiens
atcattggacctggtattgtgctttccaaccctgaccgaccatgtcaccaggctgctttgctggctctgcaagaaaat

SEQ ID NO: 622112 - DNA, 100 bp, Homo sapiens
ctgcaaagcagctaccaaatgcttattttctgcttccaaaggtccagagcattcagctgtctcaaatgcaggttgctgcagcaactggtcacacagtagt

SEQ ID NO: 622113 - DNA, 100 bp, Homo sapiens
cgcactgcagcctcctgagttcagacaagagtgagaatggtgaggcatatcagagaaagaaggcggcagccactggccttccagagggtcctgctgtccc

SEQ ID NO: 622114 - DNA, 82 bp, Homo sapiens
ctgcagaggctcttcctcatcatctcagccacgaagtacagccggagggaagcccgtcagcctgagctacagatgcccatgc

SEQ ID NO: 622115 - DNA, 98 bp, Homo sapiens
gaaacagggctgacaccacaggaaacctgcctgtctccaaggaggccgcatcggtggcagagatatcaacaagtttctttggatggtccggattggag

SEQ ID NO: 622116 - DNA, 83 bp, Homo sapiens
ctttcccggaggccagaagggaggttcacctgcagcgagtgtgcctcagccctgggcgctgcctatggcacagccaagagcgg

SEQ ID NO: 622117 - DNA, 98 bp, Homo sapiens
tgctgaagtacatgcttcatagtccttgcgtctctctgagctgtttgatcagtgtgagaacaagaggcggactttatttaaactcgccagtgagactg

SEQ ID NO: 622118 - DNA, 82 bp, Homo sapiens
ggatattctggtggggagatgaacccaacctagtgggtgtaatacatcatgaactgcaggaccttagaccctgaaccccaac

SEQ ID NO: 622119 - DNA, 83 bp, Homo sapiens
gtctcaaagggaacttggaaatgacattggcatccagattatccactgcactgaggcaacttctcctagaatctcaatctcag

SEQ ID NO: 622120 - DNA, 88 bp, Homo sapiens
tcttcaattccctcaacgaggcgacgatggtgctggtgtcctggattatgtgtttgtgaagtgtggatatgcaggctctaactttcca

SEQ ID NO: 622121 - DNA, 98 bp, Homo sapiens
aatgatcatgattttcttgaaaaggaccttgtagaacctctttgcagcatcactgcaaaacttgaaagagcgttagaaaaagttgctcctcttcttcg

SEQ ID NO: 622122 - DNA, 100 bp, Homo sapiens
tcggcgccgccaaacagcccagctcgcgcttcagcgtcccggcgccgtcgcgccactcctccgattgctgatcatctgggctgtgatccacaaacccggt

SEQ ID NO: 622123 - DNA, 75 bp, Homo sapiens
taggagtgacccagcctcgaagagtggctgctgttacatttctcttcagcaacgggtagcagaattggaaaaaat

SEQ ID NO: 622124 - DNA, 100 bp, Homo sapiens
tcggctactgcgacgccaaatacgtctgggcagccacggccgggggcgtctttcagagcattacggataaaagaatcagagtgtctcaacccttgacaag

SEQ ID NO: 622125 - DNA, 101 bp, Homo sapiens
tgccactcgtccattccagctggtaacaggtcgcacatggaaaggcactgcctttggaggtggaagtgatagagggcaccctgcagtgcccggaatctgga

SEQ ID NO: 622126 - DNA, 98 bp, Homo sapiens
agaaaacagctctggaaaatgacagccttcatttctctgaacatactgccttatgggacagatcaaaagcatcaagtgtacctgatttgtgaacctat

SEQ ID NO: 622127 - DNA, 50 bp, Homo sapiens
gtttgaatccttccttgatgatgaagagctcctgaaatacccactattga

SEQ ID NO: 622128 - DNA, 75 bp, Homo sapiens
aattctctctccactcttcgagattggcacacccaggaagggaatttgaaggagaagaagaatatctggagatcc

SEQ ID NO: 622129 - DNA, 76 bp, Homo sapiens
attgaacctgtgccggaagtactacctggacgcaaacatgcagatctttgtgaagaccctcactggcaaaaccatc

SEQ ID NO: 622130 - DNA, 75 bp, Homo sapiens
cgccgccgggagactccagccggcgggcgagcaggaattcaattcgtcataatctgtccctacacagcaagttca

SEQ ID NO: 622131 - DNA, 98 bp, Homo sapiens
ggcgctttccgtcggcgtgtgttttggggttgccatcggcccgtagtatgtgaaaatccacaggtcctggctaccctgggaagagacaagaagtaaat

SEQ ID NO: 622132 - DNA, 49 bp, Homo sapiens
tgacaggagaggctgcttcttgtagagcactattcctgatcagagaact

SEQ ID NO: 622133 - DNA, 74 bp, Homo sapiens
aagaagcagctggacccgctcaccatctacggcatccggtggtgacgagaacaagtcagtgcgcgaccgtttca

SEQ ID NO: 622134 - DNA, 85 bp, Homo sapiens
gagattccaaccttccagccccttttgaaaggtgattgtagagaaggctccaaaagccagggtgcctgatctggacaagaggaag

SEQ ID NO: 622135 - DNA, 90 bp, Homo sapiens
aaagaacaggaccccgtacgtcactaccactgtctctgctcacagtgccaagtaagactttgaccccgacgcaggcttcagtgattgccg

SEQ ID NO: 622136 - DNA, 98 bp, Homo sapiens
caggttattccaggcagccagaccaggctccttggtgagaagaccaccacagcggcagctcctgcttcaggtgcagaaatacagcgatttccagtgcc

SEQ ID NO: 622137 - DNA, 90 bp, Homo sapiens
gagcgccgccgccgcctcgatggggaggagatgaccgccgggttctgctatggcacatggaacaagccatccactccagggtcaagccca

SEQ ID NO: 622138 - DNA, 100 bp, Homo sapiens
gttcatcacagtagccagcttcagcttctctgatgttgaagaccttctagcagaagctaaagacctgttctaggtctcgttccagatcatattctccagc

SEQ ID NO: 622139 - DNA, 50 bp, Homo sapiens
ccagcaggcgctggctcctgctcaggttagagcagccagcgggtacagaa

SEQ ID NO: 622140 - DNA, 75 bp, Homo sapiens
tggcggcggcggcagctgcagtgacatgtccagcatgaatcccgaatagttagcatggcctcattgaaagaacta

SEQ ID NO: 622141 - DNA, 75 bp, Homo sapiens
catgggtcgggaagcagcatatggtggatccataaagaacccagccaacccgcagagggaggggaggggctgagc

SEQ ID NO: 622142 - DNA, 75 bp, Homo sapiens
cccaaaccaggagattgcgagggagcgatgcggtgcagcgcggctgttactgaggcggagacacgggtgatgatt

SEQ ID NO: 622143 - DNA, 100 bp, Homo sapiens
ccaaatccaagaccagtttaatgaccttgttatcagtgatggctcttctctggaagatcttgtgaacacttcagttatggaagatcaaaatgaagatgag

SEQ ID NO: 622144 - DNA, 95 bp, Homo sapiens
ccgaggtagaggcagtggcgcttgagttggtcgggggcagcggcaggacttggatgttgtgggtgatggtatgcagtgtcctccttcacctttgc

SEQ ID NO: 622145 - DNA, 81 bp, Homo sapiens
gtttttttggatgtggtcgagagattgtctgtactgatagcatctaatctgtcttgtcgacggtctcactgatgcctcttc

SEQ ID NO: 622146 - DNA, 75 bp, Homo sapiens
gttgactgccagaaagtgatgtacggttcttacagcttcagctctccctcagcgagggaggaggctgtgggctgc

SEQ ID NO: 622147 - DNA, 100 bp, Homo sapiens
cctcttcgagcgccgcggacgcgtcatcgagtgtgacgtggtgaaagacctgatggccaaaagaaaggaagaaaatttttcctctcctaaaaatgccaaa

SEQ ID NO: 622148 - DNA, 88 bp, Homo sapiens
tgtacttctcggcggtgcagcggtacccggggccagcggccggagccaggaacttgctactaccagcaccatgccctaccaatatcca

SEQ ID NO: 622149 - DNA, 98 bp, Homo sapiens
ctcgaccctgtcggaccggatggcaagaatcagctggggcagaagcgcgtggtcaagtgtaccatagagagcattttcccgggatttgcaagccaaca

SEQ ID NO: 622150 - DNA, 100 bp, Homo sapiens
agatgattgagaagaagcggaaaaaagaaaactctagaagtctggatgtcggtgggcctctgagatatgccgtttacggacacgatgaggcgagtggtac

SEQ ID NO: 622151 - DNA, 100 bp, Homo sapiens
ggaaaagaagaaccacagaattatacagatagtagttcctcttctacagagtcctcccagagttcccaagtgtcttctcagaaacaaccagctgagaagg

SEQ ID NO: 622152 - DNA, 75 bp, Homo sapiens
gaagcagccgatccagcctgcggagcctgtggggcagagatgtgaaagctggaaacattcttcttggagaagatg

SEQ ID NO: 622153 - DNA, 89 bp, Homo sapiens
tcctccagcggcggcagcggcgctcgcagcgcccgattggcatctttgcaaacgaggcattgttcaccttggaactgctagccaccacc

SEQ ID NO: 622154 - DNA, 49 bp, Homo sapiens
aaaaaagcagaggccagggcgccgttggttaccacagagaagcgcttcc

SEQ ID NO: 622155 - DNA, 101 bp, Homo sapiens
ctcttcatattggcgatcctgttgtgaggcaagtgaggcctatctggttggcctttttgaagacaccaacctgtgtgctatccatgccaaacgtgtaacaa

SEQ ID NO: 622156 - DNA, 80 bp, Homo sapiens
ccttgcatgtctcttcatggaggtgactctcctattccatctgtttcttcgggatcatcttcacctctttcagccacttc

SEQ ID NO: 622157 - DNA, 119 bp, Homo sapiens
ctcgctccgtggccttagctgtgctcgcgctactctctctttctggcctggaggctatccagccgatgccctcctagctagccgtcacgggatggagggcttcatggactcagggacac

SEQ ID NO: 622158 - DNA, 100 bp, Homo sapiens
agaaatatgagaaagaatatcagacaatgcgagagagtcagctgcaacaggaagacccaatggatagatacaaggagtacttctttgattccagagtatt

SEQ ID NO: 622159 - DNA, 100 bp, Homo sapiens
acacctcaaggttgaagcagaagaataaggagaaggataagtcgaaggggaaggcgcctgaagaggacgaagagttaaacatgaagtttctggagagaca

SEQ ID NO: 622160 - DNA, 100 bp, Homo sapiens
gacgagtcgagcctcctgcggcgccgcgggctccaggaggagaaggagaagcggcgcctcgaccagctggaacgtaagaaggagacgcagcgcctactgg

SEQ ID NO: 622161 - DNA, 73 bp, Homo sapiens
ggagagcctgttggagaaacacaaagaggttttccacaataaaagccagtttgttccaccattcaaaggtaac

SEQ ID NO: 622162 - DNA, 104 bp, Homo sapiens
gagaaacctcgtggcctggtctccattatttgagatgagttacatcttggagcaaacttggaaatcatgtcttagagatcaaggagccaagagatgagacaagc

SEQ ID NO: 622163 - DNA, 100 bp, Homo sapiens
gccgctgctacctgcagcgccgtgtggcacgacacaaaaatcaggtgtcccgacccaggctaagcttgagcatggctgagcaggagcccacagccgagca

SEQ ID NO: 622164 - DNA, 75 bp, Homo sapiens
caccactgcagccatgatctccttaacggacacgcagagcttgaagaaaatttgcctacacgttgtggattttgt

SEQ ID NO: 622165 - DNA, 80 bp, Homo sapiens
tctgcaagcaggcaacctgaatacagcccaagaagatgaaaggattgttcttgttgacaacaaatgtaagtgtgcccgga

SEQ ID NO: 622166 - DNA, 98 bp, Homo sapiens
gagaagacgatctgcacttcgcattttggcattgacatttaattttagggtcctttatatagaagggagagtagattctgtgctgaacgcctccggtc

SEQ ID NO: 622167 - DNA, 75 bp, Homo sapiens
cggggcgcccgcgcgcggggaccccacggggactccatccccgtgtctacctccctccttggagacacttccgac

SEQ ID NO: 622168 - DNA, 75 bp, Homo sapiens
gagacccagcacatcgccgaccagaagctgcacacatacatgtaagagaagcaaaaatgtcagatgatatcagga

SEQ ID NO: 622169 - DNA, 101 bp, Homo sapiens
tgaagcgactgagtccgcgatggaggaaagtctttgggttcggaggattccagaaacatgaaggagaagttggaggacatggagagtgtcctcaaggacct

SEQ ID NO: 622170 - DNA, 98 bp, Homo sapiens
atttctccaaggatctgctgaaaaaatacctcagggactttttcagcgtgatgctccagtccgcaacatctcccctccacatcaacaaagtgggactg

SEQ ID NO: 622171 - DNA, 75 bp, Homo sapiens
caactgtcacgggtggtgaggaaccaacggccattccagcaacaacaatgtccttgacagcaagaaaaagagcgt

SEQ ID NO: 622172 - DNA, 82 bp, Homo sapiens
gaacgatgtgcgagaactgcgcagacctggtggaggtgttaaatgaaaggtctgacatttcaggaggtggagaacttcttta

SEQ ID NO: 622173 - DNA, 74 bp, Homo sapiens
cgtatttggggctgctcctggaggagctacgcagggatcgacgagaacgtgctaggagcccagctggacgttga

SEQ ID NO: 622174 - DNA, 100 bp, Homo sapiens
gtgcgctgtggagacgcggagggtcgaggcggcgcggcctgaggcctggtgatcctcagtcagctcaggataaagcacggatggataaagaatatttgtc

SEQ ID NO: 622175 - DNA, 90 bp, Homo sapiens
ctttcctaccatctaaaatacgaaggtttctggctgggaaacatgatgaaagtattgagggggcatcagaattgggtgtacagctgtgca

SEQ ID NO: 622176 - DNA, 75 bp, Homo sapiens
tagcatcttctgtcatgagaagtggcgatcaaaattgcaatggcaccagcatgatatcattgatcattcctccca

SEQ ID NO: 622177 - DNA, 98 bp, Homo sapiens
cacagacggaacaagcatgcaggtgaaagacccctgacaaaagacaatcatcttctgggtacatttgatctgactggaattcctcctgctcctcgtgg

SEQ ID NO: 622178 - DNA, 90 bp, Homo sapiens
ccgggcggcacgcacgcggtgcagggtaacatggcggatgcggaagggaagaggacccagatgatgtgccccatggacatatcacctcat

SEQ ID NO: 622179 - DNA, 74 bp, Homo sapiens
gcacccgatatatgttctctaggccttttagaaaacatgctatcagttgagggatttgcagttgataaaatggc

SEQ ID NO: 622180 - DNA, 100 bp, Homo sapiens
agaaaattgaagttgtaatggccgaacccttgatactagtagtagtcaaccaaagcctttcagacgagtaagacttcagacaacattgagacaaggtgtc

SEQ ID NO: 622181 - DNA, 100 bp, Homo sapiens
gatgatgaccatcagaaagacggcaagacctacaggttttgcccacgctgctcccaagaacggaagaagaaatagataagggccttggattccaacacag

SEQ ID NO: 622182 - DNA, 103 bp, Homo sapiens
ccgctggctgctgctcacatggtgtctgggcccttggcactccggacaaccctccatatgataagggagccttcagaatcgaaatcaactttccagcagagta

SEQ ID NO: 622183 - DNA, 100 bp, Homo sapiens
tgttggatggctcctgaagtcatggaacagaccaagatgaagagacgagctgtggggatctggcactgtggttcctgcatgaagacagtggctggcggtg

SEQ ID NO: 622184 - DNA, 96 bp, Homo sapiens
ggtgctaccatcgtgagagtaagtctcagagaaagatgtcacatctgctaaagcactgtatgaacatttgactgcaaagaatacaaaattggatga

SEQ ID NO: 622185 - DNA, 75 bp, Homo sapiens
ggagaatggaagcagccacacgggggggctctcacctccaggaggcctactccgtggcccggcagttcaacctga

SEQ ID NO: 622186 - DNA, 100 bp, Homo sapiens
caagaagaagacaaggaaatggctgatttcctgagaatcaagttaaaacctctagacaaagtaaccaaatctccagccacggctagccttgatgtaccga

SEQ ID NO: 622187 - DNA, 98 bp, Homo sapiens
gaagctggcgaaacatagagctgcagaggctgccataaacattttgaaagccaatgcaagtatttggtatttgagtacagcatcccagacaaacagta

SEQ ID NO: 622188 - DNA, 88 bp, Homo sapiens
cgcgggagggcgccgcggggcagccgccgctcctccggggtcctactgctctgttggctcatgaaataggttttggaagtaaagttac

SEQ ID NO: 622189 - DNA, 100 bp, Homo sapiens
tccagactgttgatcagttgactaaagaactgcctgaattactgcaatgaaatagagaaatcctagatgagggaccactgacaattagggatgtgactgt

SEQ ID NO: 622190 - DNA, 75 bp, Homo sapiens
ctggcgcgctccaaaggcttccgcgtccttgacgcctgcagacaccatgccacaaggagagtgatctcttcccct

SEQ ID NO: 622191 - DNA, 89 bp, Homo sapiens
ctgccttgtaattcttaatcagcctttggacaactattttcgtcatctttggaacaaagccaggaagaaagctcaggcccattagtgat

SEQ ID NO: 622192 - DNA, 100 bp, Homo sapiens
ggcgccgagccgcgcagcgctgcgggggaggcgcccgcgccgacgcggggcccatggccaggaccaccagccagctgggtttgtatgttggcagatgcca

SEQ ID NO: 622193 - DNA, 109 bp, Homo sapiens
cgccttcgtctccgagtttgcgactcgcggaccggcgtccccggcgcgaagaggctggactcggattcgttgcctgaggtaagaatgattgatgttggctgatattgga

SEQ ID NO: 622194 - DNA, 51 bp, Homo sapiens
caccgactactgtcagcagctgtgccagtgctcaacaggaaccttggatta

SEQ ID NO: 622195 - DNA, 75 bp, Homo sapiens
gaaaactggatccagaactccatttcaccaggagactaaagtccatcaaaaacatccagaaaattaccaagtcta

SEQ ID NO: 622196 - DNA, 83 bp, Homo sapiens
tcagcgggccaggaagcgcatccaggagggggaggcccccgctgagatgggggcgctgctgctggagaaggaaaccagaggag

SEQ ID NO: 622197 - DNA, 76 bp, Homo sapiens
gctctttgtcactccccggcggcagcacgaaagtaccatggccttgatacaaagcatgcttgaaaaatgcgatcgg

SEQ ID NO: 622198 - DNA, 100 bp, Homo sapiens
acaacttccaggttcccatcctgcggtcccagtcatgcagggaacaggaatgcaaggagcaagtatacagggtggaagccagcctggcggctttagtccc

SEQ ID NO: 622199 - DNA, 98 bp, Homo sapiens
ctggagcagggtctcctgattcttttcctgctagagttcccggactcatatgaacgagcaaaacatatcttgaaaactcatgcaaaggagcataagaa

SEQ ID NO: 622200 - DNA, 50 bp, Homo sapiens
gcggaacaggacgccctctgatgaccaagaatcgccttcagccctgtctg

SEQ ID NO: 622201 - DNA, 88 bp, Homo sapiens
gagcttgatccagcgtggctgatggtggacactgtcataggagaaggagagaagtggatgggccctatacctccagccgtgaatgcca

SEQ ID NO: 622202 - DNA, 83 bp, Homo sapiens
ccgcccccggagctgctggtttcattcgaggtttcgggccgggaaccctactctggaaactgtcagtcccagggcactgggga

SEQ ID NO: 622203 - DNA, 82 bp, Homo sapiens
cagatggcggatgccctgcagtacctgcagaaggtctctggagacatcttcagcaggttggatttggtctagggagtcccag

SEQ ID NO: 622204 - DNA, 75 bp, Homo sapiens
gagaccctacactttgaccatgctgtccggatgggagcagcatggacctgtcagcaactaaggaacaaaagtaat

SEQ ID NO: 622205 - DNA, 100 bp, Homo sapiens
tttcacagtttgcgggactcagtcccatcactccaaggagagaagacctgtggatgaagagccagagtcctctgaggtcgatgctgctggtcggtggcct

SEQ ID NO: 622206 - DNA, 90 bp, Homo sapiens
cgtctgcggaagtgcagctgcctcagttcttagcgcagcttatcacacagactttcagccaccacaatcagctggcacagaagacccggc

SEQ ID NO: 622207 - DNA, 98 bp, Homo sapiens
tacgacgtgatcgtgctgggcaccggcctgacgaatgaggagaaacctgtgcaaatgatgtttaagcaatctacttttaagaagacctatataggaga

SEQ ID NO: 622208 - DNA, 100 bp, Homo sapiens
cgaagtggttgagaagcctgtacctgttttatacttgcttttgcttcagcgttctgtggttgtcaacagaggagttttctcgggtccgggaggaggtacc

SEQ ID NO: 622209 - DNA, 100 bp, Homo sapiens
attttcaggttggtcttggacaactgcacctgcacggagggcgtggagtagaacagaatcatcagcctcagggcttttgcctctgctgttcctgcagctt

SEQ ID NO: 622210 - DNA, 82 bp, Homo sapiens
tcatttgttaccaaacggagtcttcaagaacatatgagtattcacacaggatttctttgaagaaaaatgtgcttcttgaatc

SEQ ID NO: 622211 - DNA, 95 bp, Homo sapiens
cagtttttcaccctcacgctgatgaacttgtacttcacgcagattgcccgtgaggcagaggctgccatctaccacttgcaattatttgaggaact

SEQ ID NO: 622212 - DNA, 100 bp, Homo sapiens
accgtgttggtgacgaccaacttggcccctcacgggcctgcactgcccaaagtcttggaaacttgctggatatgatgtaccgggagccagcacgatggtc

SEQ ID NO: 622213 - DNA, 75 bp, Homo sapiens
agcagaaaacttttaaatgcaaaacactcagagaaatcaccaccttctacaggtgtggatgaggtcaccattgtc

SEQ ID NO: 622214 - DNA, 105 bp, Homo sapiens
tcagcctcctgagtagctgggattacagctggctcatcgccatcctggcgcagctgaaccccctgttcgggccccagctgaagaatgagaccatctggtacgtgc

SEQ ID NO: 622215 - DNA, 88 bp, Homo sapiens
agaatgttttttcttacaaaaaagattgcagttatctgtccagaaaccagagcaagttatcaaagagtggtggtatctccatcaaggc

SEQ ID NO: 622216 - DNA, 102 bp, Homo sapiens
ggccgtacatcgtcagctggtgcctaaacctcagagtcctagatggatatgtgatttctcagaaggaaaggtctctaattaacagaagatggcaaagcccag

SEQ ID NO: 622217 - DNA, 90 bp, Homo sapiens
ctggcccagggtcggcgcctgccccagcctgagtattgccctgattctctgttagagcctggcaatgccgtttgggtgtgtgactctggg

SEQ ID NO: 622218 - DNA, 50 bp, Homo sapiens
gagaaactgaaggagctagagcagtacgaagatgccctggtgctcctgct

SEQ ID NO: 622219 - DNA, 75 bp, Homo sapiens
gcctcctgagtacctgggactacagtttgtctttgtcagcgccacgtgagacacctacaacgagatgccttaagc

SEQ ID NO: 622220 - DNA, 98 bp, Homo sapiens
gcctttgccgccaccatgcccaaaacgggattcccctgaaaccaatgttggcccatcccacccggggcatcagcgaggtcctgaaacgctttgaggag

SEQ ID NO: 622221 - DNA, 75 bp, Homo sapiens
gtaacaggagactgcagcagacccaggcccaggtggatgagctggtgagcttgttgctcattggagtggctgctt

SEQ ID NO: 622222 - DNA, 75 bp, Homo sapiens
gggaagtgatttgcctcagcttgtactgagcagcatttctttctattactactatctatgctgagactggttcag

SEQ ID NO: 622223 - DNA, 75 bp, Homo sapiens
ataccaggagtaggaggaaagacacgactggaaaagcaattcaagggctacagaactggctacccttatcgatac

SEQ ID NO: 622224 - DNA, 98 bp, Homo sapiens
ttttatgggaaaattaagcagatgctccagtttgagaaacctggatctgcgatctgtttgtggattgatttccagagacttatgttacttgaggaaga

SEQ ID NO: 622225 - DNA, 115 bp, Homo sapiens
agaaagttaactgaattggtgacacttcgggtctctcacagaggaagcttaaaagagccttggaagaacttcaggaagcactagcagaaaaagaagagctgaggcaaagatgtga

SEQ ID NO: 622226 - DNA, 90 bp, Homo sapiens
cctgtacagcctgtggaactgacagaataacgggctcccagattcacaagccccaccaagaggatcaccccaggaacgcttggaggctga

SEQ ID NO: 622227 - DNA, 107 bp, Homo sapiens
tactgcgggaagggcttcaatgacaccttcgacctcaagagacacgtccgaactcacactgattgacgagatgcctgaggctgccgtgaaatcaacagccaacaaat

SEQ ID NO: 622228 - DNA, 101 bp, Homo sapiens
tatccacaattcatggtaaacttcaagaagcattcagcaaaattgttcatcaggtaacagttaacctcttccacatgcagcatctgcaggctgcttccctt

SEQ ID NO: 622229 - DNA, 100 bp, Homo sapiens
aggtcccatctggatgaagaggaggagcaacagaaacagaaagacctccaggagaagatcagtgggaaggctgaccaactgactgaagagcagattgcag

SEQ ID NO: 622230 - DNA, 98 bp, Homo sapiens
caaagctgtcctaggccaaccagagattcatctttcatgcagtgacatgttgataaaaaatgatggttaatttggagtggcccctggagtcagtttcc

SEQ ID NO: 622231 - DNA, 82 bp, Homo sapiens
aacaaatagagctgccagaggttccctccgagccccttcctgagaagatcccagtaagactttgaccccgacgcaggcttca

SEQ ID NO: 622232 - DNA, 100 bp, Homo sapiens
aaagcagcgtgcgttcagccctggggtgaatgactggcaggaggactgggtcgtgttctatgcccggcagcgcattcagccccagatggacatggtggag

SEQ ID NO: 622233 - DNA, 96 bp, Homo sapiens
cctgcctgaagcctctaggagcccgagatggagggatccttctgagaagtgaagccatttggactttctgggtccttccaaccctcctgctaccat

SEQ ID NO: 622234 - DNA, 71 bp, Homo sapiens
ccgctaaaattacagatggaattcaaggcagtgcagcaggttcagtgtctgtggtcagatatcaatcattc

SEQ ID NO: 622235 - DNA, 75 bp, Homo sapiens
ccgccatccgggagaagctggcctgggccaaggtaacagtacttcaatttctaccttaaggacttcctgtctact

SEQ ID NO: 622236 - DNA, 101 bp, Homo sapiens
aaccgattcacaaggcgtgcctcagattactgatctctcattacccaactatctgatggcatcttcggttggactgcttcctacccagcttctgaattctt

SEQ ID NO: 622237 - DNA, 98 bp, Homo sapiens
gccggggcagcgctcctggcgctgctggctgcgctctgcccggcgagtcgggctctggaggaaaagaaagataaaagcttcgatgatgaagaatcagt

SEQ ID NO: 622238 - DNA, 82 bp, Homo sapiens
aatgatgcttcctacttcctttccgtgcataagaagccgaatgatattgatgaccatgagatccctgctcagaacccccttc

SEQ ID NO: 622239 - DNA, 100 bp, Homo sapiens
cggagccgggctcgggtcgccggagccgcgccccaccccgccagctccagagccacgtacgtgtgccggtccaacaaaagcccttgggtctgtttgactt

SEQ ID NO: 622240 - DNA, 110 bp, Homo sapiens
gtgcgcccgctgtcaccgccatggctgccccgtgtttgctgcggcaaggacgagccggggcgctgaagctgacagtccgtttgaaagacatctgttccatgactaaagaa

SEQ ID NO: 622241 - DNA, 100 bp, Homo sapiens
gatgctgaaggaggcatgcagagtaaaatgagggggcacgtgactcaggatgcacccatcccaggctcccctctgtacaccatcaaagcttttatcccgg

SEQ ID NO: 622242 - DNA, 80 bp, Homo sapiens
ggcgcgcagcgtgtcaggcggagagacccgccgccaggattacagtttaaagacaatttctgtgatcaagttgtcatttg

SEQ ID NO: 622243 - DNA, 83 bp, Homo sapiens
ctcatacaggggaaaagccatttcggttaaacccatccagagtaatggctgcggccttacccaggaccctgggggagttgcag

SEQ ID NO: 622244 - DNA, 75 bp, Homo sapiens
cgaaccccgggacacgcaggaacggctccagcatcaagatccgtctgacaggtcagcccaaggccaaccccactg

SEQ ID NO: 622245 - DNA, 100 bp, Homo sapiens
gaaaattccagtgacagtgattcatcttgtggttggactgtcatcagtcatgaggcatagaatgtcaagctaaccaggcgtccgctacttcagaagagtg

SEQ ID NO: 622246 - DNA, 75 bp, Homo sapiens
tactacaaccagagcgaggccggtttgggccgacacgcggaaggccgggtggagcccatccatgctgtggtgttg

SEQ ID NO: 622247 - DNA, 75 bp, Homo sapiens
ctgacagccctgtgtgacaccaagataagtaacgattaaactgcaaatatctcatgaagctgctgcctgtatcac

SEQ ID NO: 622248 - DNA, 110 bp, Homo sapiens
ccccagcatcaacacgggaactctttcactagcaggcaagatcctcagcctggagacgtgtcaccgtctaacattagtttccaggatggcttctgcatcaacttctaaat

SEQ ID NO: 622249 - DNA, 75 bp, Homo sapiens
tgaagttcgagcactaatatttaagaaagaagatgttaactttcaggtgcgagaagatgtactaaattcattgaa

SEQ ID NO: 622250 - DNA, 75 bp, Homo sapiens
ctgcagaagatgaagctttgagtaacattgccagagaggttctgccgcaccacggcctccacgcagcagggttct

SEQ ID NO: 622251 - DNA, 50 bp, Homo sapiens
cgggagtacacagacatcatccggcctaaaggggagtggccccagtggcg

SEQ ID NO: 622252 - DNA, 74 bp, Homo sapiens
agacaagttggtcaaaaacttggactctcaaatgggggacagttgctcttcaaaaaatggactcaatgctttcc

SEQ ID NO: 622253 - DNA, 100 bp, Homo sapiens
ctcggagggaccctggcccggaggaagaaagccaaggaggagacactatggacagcgtgaagcagagcgcggccctgtgcttgctgcgcctgtacaggac

SEQ ID NO: 622254 - DNA, 75 bp, Homo sapiens
cctctcccaacatggcggcctcaggctttcctcggagacgggtggcatggggagcagctagaacaatgcagattc

SEQ ID NO: 622255 - DNA, 73 bp, Homo sapiens
cggctgtcaaggaggaccgtgcgggcgtggaggccgaggggtccagagctgaaccttcacctagccccaggat

SEQ ID NO: 622256 - DNA, 100 bp, Homo sapiens
gcggagttagcagtcacgacctccagcacaggccggagcctcaacagaaagctcctttagttcctcctcctccaccgccaccaccaccaccaccgccacc

SEQ ID NO: 622257 - DNA, 131 bp, Homo sapiens
aaattgaagaatatctgaagcgacagggtatttcttccatgcaggaatctggaccaaagaaagtgatcttactgtgccgagatcgctcacaatgtttcctccaagaaccgcaaagccatcgtggaaagagc

SEQ ID NO: 622258 - DNA, 100 bp, Homo sapiens
ggcacctgagaggattgccgatggcaccatgtgagagatttttcttgaggctgaatagaaacgggcttcccaaagcccctgataaaccggaacgacattg

SEQ ID NO: 622259 - DNA, 104 bp, Homo sapiens
aaggaaaaactggagagcttcatcaaaaatagtgatagctttgataaatgaaaccagcttgtataaaagcccttactcgtatatttaaaatatctgatcaagat

SEQ ID NO: 622260 - DNA, 75 bp, Homo sapiens
aacaggaggaaaccattcagagggatggcatagagtttgcatttaaataccaaaatcagaaaggacaagagtatc

SEQ ID NO: 622261 - DNA, 98 bp, Homo sapiens
ccacctgggccccagaccgtgctgatcttcgatgagctctcggattccttatgcagagtggccgacttggcgaggaaacgagacctctttcgttcctt

SEQ ID NO: 622262 - DNA, 90 bp, Homo sapiens
gtcgtagatacaaatttttggatgatgatggatccatttctcctattgaggagtcaacttccaagttcttcgatttgatttgtctaatgg

SEQ ID NO: 622263 - DNA, 75 bp, Homo sapiens
gactacaggagaattcggtttgtaggtcgtcagaaagagaacccagtgacttgattgtaaaaatttacagagcgg

SEQ ID NO: 622264 - DNA, 96 bp, Homo sapiens
aggagaggacagaggtgcctggggcaacctccaccttgacggttccagggagcatgacttcggcaacttcacctatcattctgaaatgggacccca

SEQ ID NO: 622265 - DNA, 83 bp, Homo sapiens
cacccaatggagatggctctaatgtgtttctaagacctcagagaaatttggaatctatagacccgcagtttacaatccggagg

SEQ ID NO: 622266 - DNA, 75 bp, Homo sapiens
aaggattccaagtaactcttatttgactccatcaagaatgctggaggaagggtgtttgtccactgccaggcaggc

SEQ ID NO: 622267 - DNA, 83 bp, Homo sapiens
gtgggcgtctggcggggtccgcagtttcagcagagccgctgcagccatggccccaatcaagactttgagaagcccgagagccc

SEQ ID NO: 622268 - DNA, 100 bp, Homo sapiens
ggcccctggtgaccaacttgctgcggtttttgttcctggggctgagtgccctcggtgctggagaatctggtaaaagcaccattgtgaagcagatgaggat

SEQ ID NO: 622269 - DNA, 75 bp, Homo sapiens
ggctcttcttcgggatcactggattgctgacggcagccctctcagatacaaactggactctcaggacaaaacgac

SEQ ID NO: 622270 - DNA, 96 bp, Homo sapiens
caccagatgacaataattgaatgtttagatcatcctgatcccattattaaaagagagatatcgcaattttgatcagcctcatcgattttatgtagc

SEQ ID NO: 622271 - DNA, 75 bp, Homo sapiens
tacggaccttaaaatacccgcaacagccccttcgtcccaatgttctaagaacggaagcatctgggctggatggaa

SEQ ID NO: 622272 - DNA, 75 bp, Homo sapiens
cttggactgagtcctgcaggacacagtttggtgccctggttgtcagatgttggaaagcagtaggacggaacatac

SEQ ID NO: 622273 - DNA, 51 bp, Homo sapiens
gcaagcataagctgccaaaccaaggcaactactattattacttgccttggg

SEQ ID NO: 622274 - DNA, 95 bp, Homo sapiens
cagtctctacagacaactggatgacaagttgtattccctgaatgactataaaccacccatttcgaaagcgaaaatgacccaaattactaaggcag

SEQ ID NO: 622275 - DNA, 82 bp, Homo sapiens
tggcgtgtccctgcagcgaaggatcctggtggaagttaaacgagctgagcctcgggacagcaagagccaagcgccgggacag

SEQ ID NO: 622276 - DNA, 98 bp, Homo sapiens
gacttttcctgtggtaataatagttggctgattgcaattctggcccaactcaaccctctctttggaccgcaattgaaaaatgaaaccatctggtatct

SEQ ID NO: 622277 - DNA, 100 bp, Homo sapiens
aagtggatcctctggccagctgactgcacttcttttttgagaaaggaaggaatatatcctgactgattgtgaccatggaggaagaagatgagtctcgagg

SEQ ID NO: 622278 - DNA, 100 bp, Homo sapiens
cccgaagcagaggaaataggagctagtgtccgggatctacctggtctgaaatgacatgtgaaaaagtccttgatttgatgtgctacatggtactccccat

SEQ ID NO: 622279 - DNA, 90 bp, Homo sapiens
aacgacctggcggtggggctgcggcgcctgggactgcaccgcaccgagggcgagctccagtgaggactcagaagacaaagatgtgaagac

SEQ ID NO: 622280 - DNA, 95 bp, Homo sapiens
gaggagtgggttaaattcctcaggagagttgctggcacaccctgtggaggtttattcttcagtccaaggaagcaattcacagtcagctgttagag

SEQ ID NO: 622281 - DNA, 98 bp, Homo sapiens
cccagcgcagcgttccaccgctcgggtttggctggggatgggcgtgttttgggcgtgctagaggtgtcacgctccattggggacgggcagtacaagcg

SEQ ID NO: 622282 - DNA, 83 bp, Homo sapiens
gaggtgttacaccagcctgtccggacccgctgtggccacgtgtagaacgtcatgacatgaataccttaagcctgcccctgaac

SEQ ID NO: 622283 - DNA, 100 bp, Homo sapiens
cagattagccagatctccatgaagtcgccacagctgattttggtgaatatggccagcttcccagaggtggtgaaaactattggcttgagggaagtttggt

SEQ ID NO: 622284 - DNA, 82 bp, Homo sapiens
gagccaccagcagcgggtgggcgacctcttccagaagctggccaagactaaggggctgcagagcggggtggacattggcgtc

SEQ ID NO: 622285 - DNA, 96 bp, Homo sapiens
ctcctcttcgtctccgccatcagctcggcagtcgcgaagcagcaaccatggagtgggaatagctttgcgaaaaatgggcgcaatggccaagccaga

SEQ ID NO: 622286 - DNA, 75 bp, Homo sapiens
aacagatgttaagacattcttggaagccttaccgacttaattcagtgcacaaatgagatgaatgtgaacatccca

SEQ ID NO: 622287 - DNA, 51 bp, Homo sapiens
tcttcctctggctctacagcggctgaaaaacagagtgggtactctcttctg

SEQ ID NO: 622288 - DNA, 100 bp, Homo sapiens
gctgggagaaactggcaaggagaagctcccgcggtactacaagaacatcggtctgggcttcaagacacccaaggagcaaaaggcccaaggtggagtattc

SEQ ID NO: 622289 - DNA, 76 bp, Homo sapiens
gatttgttaaggattccaagtaactcttatttgaggcggggtttcaccatgttgcccagactggtcttgaactcct

SEQ ID NO: 622290 - DNA, 100 bp, Homo sapiens
tgccaatgcatcttctgtactctggaaacctcgacctgtctcccagttggttgcacagcaggttactcagcagtttgtgcctcctacacagtcaaagaaa

SEQ ID NO: 622291 - DNA, 100 bp, Homo sapiens
gctgaaccacgctgaggggctgggagccgcgcacaccaccatcacatatggttatcgaggaaaggactgtagagctaatgtttaccttcttccgaccggg

SEQ ID NO: 622292 - DNA, 100 bp, Homo sapiens
ctacaaccctgaagtgcttgatatcacagaggaaactctgcattctcgcttcctggagggtctgcaagtggatgatgagattgtggagttcggctctgtg

SEQ ID NO: 622293 - DNA, 82 bp, Homo sapiens
gtgaagatcatggactatgaagaatttgcatactgctgggaaaactttgtgtacaatgaaggtcagcaattcatgccttggt

SEQ ID NO: 622294 - DNA, 101 bp, Homo sapiens
cccctttggacgcaaagatctttcgaggccaggtccggtggcagccttcaaggtcgccacgccgtattccctgtatgtctgtcccgaggggcagaacgtca

SEQ ID NO: 622295 - DNA, 82 bp, Homo sapiens
gctcacggtcttttcaaccatctttggcgaggccttgcttccttccactcgattgcagatctgatctcttctgaacacctca

SEQ ID NO: 622296 - DNA, 75 bp, Homo sapiens
cttccccgttagaactcgcgtttccacttcagagatctggtaaagtgttgagagaggagaaccagtgcattgctc

SEQ ID NO: 622297 - DNA, 100 bp, Homo sapiens
gtgcagaagaaaccagccgaacttcagggtttccaccgttcgttcaagccacaatggtgcgcatgaatgtcctggcagatgctctcaagagtatcaacaa

SEQ ID NO: 622298 - DNA, 98 bp, Homo sapiens
tggccaagatccgcaaggccgcccgggaactgctgacgcttgatgagaaggacccacggcgtctgttcgaagaagatctgcccagaccctccatctcg

SEQ ID NO: 622299 - DNA, 50 bp, Homo sapiens
cgacaaggaagtgaaacaccaatgcaggctgaagggtatgtgattggcag

SEQ ID NO: 622300 - DNA, 100 bp, Homo sapiens
gcatcttctaagtttttggcaccatatactactttttccagaattcatacaaagagtgtggacccccaaaagtacaagggcatatttaacggattctcag

SEQ ID NO: 622301 - DNA, 90 bp, Homo sapiens
tttaattttagggtcctttatatagaagggagagtaggcactcttaaaagacccattttacatgggcttgtaccagaaacgagatcgcac

SEQ ID NO: 622302 - DNA, 74 bp, Homo sapiens
cactctcatcgctctcggcctcggcctcggcctccgacacgaacggccggtttgtgggcgatgctgaccttgaa

SEQ ID NO: 622303 - DNA, 83 bp, Homo sapiens
cagacgggctcccccgggatgatctacaggattttttatcaagcagaaatgcatcgaacaacgagaatcaagatcactgagct

SEQ ID NO: 622304 - DNA, 82 bp, Homo sapiens
aactggcattggactcatggtgctgcatgcagagatgctgtggttcggggggtgctcgaatccacattcatctcaatggaag

SEQ ID NO: 622305 - DNA, 75 bp, Homo sapiens
gctaatcagattgaagagcttccaaaggtattgaagcccctgggtgataatttgatggaggaaaacataaggcag

SEQ ID NO: 622306 - DNA, 75 bp, Homo sapiens
aggtgttaagtgtaaggatcttcatgatgaaatttctgtaaatgatgaggaaactgaacttgccccaagtcacat

SEQ ID NO: 622307 - DNA, 130 bp, Homo sapiens
gcgagcgcagcaaagcgcccagcctgccgcctcgctgtccctgcggcttctggggagtctaaatggtgtttggctgaacagagcgcgtctggaacctttaagggtctattccattcatcagggagactac

SEQ ID NO: 622308 - DNA, 51 bp, Homo sapiens
tgaagtacaaccagcatatgctacaagaaaccgaaccctcaccaaacagat

SEQ ID NO: 622309 - DNA, 101 bp, Homo sapiens
cctaccccaatgaggagaagcagcaagaggctgaccagtgcaccggtcttcagggcttcttggttttccacagctttggtgggggaactggttctgggttc

SEQ ID NO: 622310 - DNA, 75 bp, Homo sapiens
tctgctcacaatcggcagctgacacctgcagacaatctccactgttgcaagaagaagaccagctacaaggaaata

SEQ ID NO: 622311 - DNA, 96 bp, Homo sapiens
gccaaggtcatccggtccctccacgggcggctgcagggtggaggaatccctttgcccacgtccagctgaagccgacagtgaccaacgacaggtctg

SEQ ID NO: 622312 - DNA, 98 bp, Homo sapiens
cgggaggaggcggcggcggcgggaccagttactctccacaagaaaattcacacaaccacagtgctcttcatagttcaaattcacattcttctaatcca

SEQ ID NO: 622313 - DNA, 75 bp, Homo sapiens
cgtgctggtgtctgagtggatggggacctgcctgctgaactacacgcagtacatccctctgtccatatatgacct

SEQ ID NO: 622314 - DNA, 82 bp, Homo sapiens
cgtgcatcatccacggggtgctgcagatcctgttccaggtggacggcctgttcatcatcgggtggatgtacctgcctcccca

SEQ ID NO: 622315 - DNA, 75 bp, Homo sapiens
gtctgcctcgctttctccttggccaccctggtccagcgaggaatcagtgtcattcaaggacgtaactgtagactt

SEQ ID NO: 622316 - DNA, 98 bp, Homo sapiens
caaggaacattttgtgtggactgtgagacttaccatacggccgcctctacccttggcagccaaggtgtgatccctcacatccacaaatctctgattgg

SEQ ID NO: 622317 - DNA, 82 bp, Homo sapiens
aagaccgcgcgcagggcctgcagcgggagctggacggcgagcgcgagcggcgcgagaaatcaggatggctaaaggtgacccc

SEQ ID NO: 622318 - DNA, 100 bp, Homo sapiens
tatgcctgcttttatggagcatctgcaaagaaggttaaatcaggatggctggataaactctctcctcaaggatggtccccatccctgctggagtatttac

SEQ ID NO: 622319 - DNA, 96 bp, Homo sapiens
ctctgaggtcgaccgcgtcatcctcaagatgggggctgtgacgactatgcagagggccgagtttgcaaagttcgctttgatgctaacggagccaca

SEQ ID NO: 622320 - DNA, 100 bp, Homo sapiens
tggcatgggaacaggagcaggcgcctacatcctaactcgatttgctggtctcctatggacagaagtgcgggcaaggagctttgttcctccccgatgtcac

SEQ ID NO: 622321 - DNA, 100 bp, Homo sapiens
tcggaatcctataattgaaaaacagtaaagatggaaaaccagttattgaatatcaagaggaggagttgttgaaattacagaagacatccccgtgaagact

SEQ ID NO: 622322 - DNA, 100 bp, Homo sapiens
gtgctctttagctgtgcatagcgggcgcggtctacggatgtcgcaggtcttgggtctttaggagagaagcctcatcagtgccaagtctgtgggaagacct

SEQ ID NO: 622323 - DNA, 98 bp, Homo sapiens
gcgagaggaaaggctgcggcgcgcagagcgaggctgcgggaccccaggatgggggacaggaggctgcggggcctcagatggcggctgcagaggctgtg

SEQ ID NO: 622324 - DNA, 100 bp, Homo sapiens
agacaacaccctgatctggcatggacataactgcctttttgttgagcacagaaaacgaaggaaatttgcatttccaatgtccttcagacgtggagactag

SEQ ID NO: 622325 - DNA, 96 bp, Homo sapiens
acaaagggttccacatgggagttgtctctgattctgctccagtgttcctggggcgctggttcagcgcgggcctcgcctccaactcgagctggctcc

SEQ ID NO: 622326 - DNA, 101 bp, Homo sapiens
tcggttccgggtcttggccccgtccttacctcacagagcctggaagagctgttgggggagggagccacgctgatgaggggcaggagcctgctggttgtgga

SEQ ID NO: 622327 - DNA, 96 bp, Homo sapiens
tgcaaaagtgatgaaacagtccatttgtcataaagtaagatgcagctgtggcatgtcaaccagcttggatgaatctggttatagatggacaagaga

SEQ ID NO: 622328 - DNA, 100 bp, Homo sapiens
gttcatgacaatgactttgagccctaccttactggacagtcaaatcagacaacagcagttctgtagagagtttaaatatgaaggaatggcaggacgggct

SEQ ID NO: 622329 - DNA, 100 bp, Homo sapiens
cctgacttcccggcgctgctggtggagaagctgcttcaggaacacttggaagagcaggaggttgcgcccccagggactggtgattgcagctggaagtgcc

SEQ ID NO: 622330 - DNA, 90 bp, Homo sapiens
gcgatgcaagctcggatccgagactggcagcatgagcagcatgagacatatgtagagtgtgtcggtcagaaggaacacctgagaaaccgc

SEQ ID NO: 622331 - DNA, 100 bp, Homo sapiens
gttgaagagttcaactttcccagaagttgttctaacgctgcctttgctttaaaacagtattacttgcgagttacactgttagaccttatgatagccaaga

SEQ ID NO: 622332 - DNA, 100 bp, Homo sapiens
cgctgtcccactgtgtggatgtggtgaaggggcttctggacggctggctgtcggcaattggattcttccagtacagcccgggcgctgccgtggtcatgct

SEQ ID NO: 622333 - DNA, 100 bp, Homo sapiens
aggtttgtggagttcctcaaacgaaaagagaattgtacactgcagggctctccaatgtcagatgtggtcagtagggagctccatgcccaagctcaagaac

SEQ ID NO: 622334 - DNA, 50 bp, Homo sapiens
gttcgctacacagcaatgcatcgaggcatcagcttctggtgatgtgagct

SEQ ID NO: 622335 - DNA, 100 bp, Homo sapiens
tcctggaagacaggatgatgaccaaaatggacccccaggaccaggaatggaagttggatacactttgtgacttgtacgagacactgaccattacacaggc

SEQ ID NO: 622336 - DNA, 74 bp, Homo sapiens
cgcaagcgaggcagccatgtcttatcccgctgatgattatgagtctgagctctgaagagactgagggactcggc

SEQ ID NO: 622337 - DNA, 95 bp, Homo sapiens
tacatgtaaaaggccactgactcctacttcctctgtatagagcaactgttgaactcagctgcctgtaggtgaccattgtgaggtagatattttgt

SEQ ID NO: 622338 - DNA, 98 bp, Homo sapiens
tcaaataattaccaaggcatcacatgagcatgaagataaaagtcctgaaacagttttgcagtcgagagcgaaatgtcatcagtgcagtcacaacagga

SEQ ID NO: 622339 - DNA, 100 bp, Homo sapiens
ggcgcggccatggctcacctccggggatttgccaaccaggccagaagaatgtttgaaggtgagatggcaagtttaactgccatcctgaaaacaaacacgg

SEQ ID NO: 622340 - DNA, 75 bp, Homo sapiens
cagccgatccagcctgcggagcctgtggggcagaatggacagcaaattatggatgaacctatgggagaggaggag

SEQ ID NO: 622341 - DNA, 100 bp, Homo sapiens
gcggggcctccgcggtctgctcatggcgcacagccagcggctgctcttccgaatcgggacatggatttgattgacatactttggaggcaagatatagatc

SEQ ID NO: 622342 - DNA, 106 bp, Homo sapiens
gattgtgggagtctccgcgtcccgctcgctgggagagaggtacctctccttttccctctccctttccctaagagatagagtttcaccatgttgtccagggtggtct

SEQ ID NO: 622343 - DNA, 74 bp, Homo sapiens
ttcctccccagcctttgggcttctatccgcagagaggcggcttacagggagaacacagttggcctccaccgttt

SEQ ID NO: 622344 - DNA, 96 bp, Homo sapiens
ggcctacacgccgccgcttgtgctgcagccatggatgagccccaagagcctcaagaacccaacaaggtgcccctagaagacacagagacagatgaa

SEQ ID NO: 622345 - DNA, 90 bp, Homo sapiens
gtatactgggcacaatccatctggtggcaggtctgaatttcctgctgctgttcacaaagatgctttttatctttaactttttgttttccc

SEQ ID NO: 622346 - DNA, 100 bp, Homo sapiens
ctctgctttaccctctgcatctattacatccaccagtgcagctgcagccctgactataatgtggaatttttccgacagtttatactggttatgaatgctt

SEQ ID NO: 622347 - DNA, 100 bp, Homo sapiens
atcaaagaagcccatctcccgccgggcgccatggcagccgtggagcacctggtgaatggccggatggactttgccttcccgggcagcaccaactccctgc

SEQ ID NO: 622348 - DNA, 100 bp, Homo sapiens
cagaaggagccgcaaatatgggaactccaatgatgccagataatggagcagtgatgtcctggagcttctcatcggagagttgccctggagagaaggaaaa

SEQ ID NO: 622349 - DNA, 100 bp, Homo sapiens
ccattgtggggcagatcaactacatcgtgaggcagccagcacctgtccagtcccagagccaggaggagaccctgcagagaagcttccgataatcttgcag

SEQ ID NO: 622350 - DNA, 75 bp, Homo sapiens
gccaacagccagggacctgtatgctgctctcccgtctcaaggggaacttggaggaagaaaatcatcacctcctga

SEQ ID NO: 622351 - DNA, 82 bp, Homo sapiens
tcaccagattattttgtggattttcctgttccattttgtgcctcctggacacctcagtgtttaaccagggggaagaaggtac

SEQ ID NO: 622352 - DNA, 75 bp, Homo sapiens
tggcggcgtgggcccgggcgagcagccctgcctccggacgggcgaccattgacgaggtggagacggacgtggtgg

SEQ ID NO: 622353 - DNA, 50 bp, Homo sapiens
cttctgggcccacgcggggaagtgaaatggatgagaatcaaatccagatg

SEQ ID NO: 622354 - DNA, 80 bp, Homo sapiens
cacgtgaaatacatcagtgatgcactccggcgtctggaggaggaggaggaagtgagctcacaatgactcaagctgccaca

SEQ ID NO: 622355 - DNA, 121 bp, Homo sapiens
agaaaccagaaactttaaatcttgagaaaagaagattgtctatcatgaaggaggtcagatgtaccaacagtaccagcaacaggccggctatggtgcacagcagccgcaggctccacctcag

SEQ ID NO: 622356 - DNA, 100 bp, Homo sapiens
cggtcatctaaaggaggttttaaacagtataacagggtgtccggtggagagctgtttgaccggatagtggagaaggggttttatacagagaaggatgcca

SEQ ID NO: 622357 - DNA, 73 bp, Homo sapiens
gtccccagcgacgccttgctaacaaagaatgtaaggtatggagaaaccctctaaatcttttcagaggagcaga

SEQ ID NO: 622358 - DNA, 127 bp, Homo sapiens
gctttcttggcttggaaagaagatataacccaagagtttccgggaaaaggcaaggctttgttccaggtgcccctgggcgctgggattgctctagcctgtaagtataatggaaaagatgaggtctgcc

SEQ ID NO: 622359 - DNA, 100 bp, Homo sapiens
acctgttacgagttctaccttttgagctgggaaaactgtttcagttgcagactttaggcctgaaaggaagttcgtgaatgctaatcaagggctaaataaa

SEQ ID NO: 622360 - DNA, 75 bp, Homo sapiens
ccggcctcgcctcctcgcagcagcgccatgatagcagaccccacgttagctgaaatgggaaaaaacttgaaggag

SEQ ID NO: 622361 - DNA, 83 bp, Homo sapiens
gcgcccgcctgcagctggagctgagcaaagtgcgtgaggagtttaaggagctgaaagcgcgaacatggtccaagacaattcct

SEQ ID NO: 622362 - DNA, 51 bp, Homo sapiens
tgaagattgtgaagcaatagcctaaggattgaaagaaggtggcaagaggaa

SEQ ID NO: 622363 - DNA, 99 bp, Homo sapiens
taaaaattcatcagagagcattttactactgagctgcaaaggttgctgcttttgctcagaggacatccatgaccctaatggtctttttgttcaagataa

SEQ ID NO: 622364 - DNA, 100 bp, Homo sapiens
gcagagattaaaagagttcggcgaggaactccagaatacaaggcatttgcaagtaaaatcactggcatgttgttggaattatccccagctcagctgcttc

SEQ ID NO: 622365 - DNA, 75 bp, Homo sapiens
cgtttgactggacagtaaagctttggacaactaaggcagatgatgttgagggcaaaattagacaaatcattccac

SEQ ID NO: 622366 - DNA, 80 bp, Homo sapiens
cttggggacggagcagcgcgtcgtggggcgagcggcagctgcctgtggaggaaccgattgtgtccacagatgaggtcatc

SEQ ID NO: 622367 - DNA, 83 bp, Homo sapiens
taaatcctggatggaagatagcttgaacagggctgacaacatttttccttttccggtcagatgtaccaacagtaccagcaaca

SEQ ID NO: 622368 - DNA, 100 bp, Homo sapiens
ctaaattctgccgaaaggactgaggaacggtgcctggaaaagtttcaccagtgatcattaaagaatgggcagcttacaaaggaaagtctcctcaaacccc

SEQ ID NO: 622369 - DNA, 82 bp, Homo sapiens
cgcgcagggcctgcagcgggagctggacggcgagcgcgagcggcgcgagaaatgtcctcagcctgcgggggctgcgtggagg

SEQ ID NO: 622370 - DNA, 90 bp, Homo sapiens
tccaacctttctggagaagccgtggcctgatgggcgggcaggtccggacgcgctgggccctggtcccttcggccgcaaacggcgcaagtc

SEQ ID NO: 622371 - DNA, 80 bp, Homo sapiens
ggccagcctgctcatcgcctactgcatgacaacgcgcctgcaaaagggaacaagagcccttcgcctccagatggctcccc

SEQ ID NO: 622372 - DNA, 75 bp, Homo sapiens
tttcatgggatcccagccacgccgggcataggagggcgtgtaccagactttatcctggaaaagataccagccatg

SEQ ID NO: 622373 - DNA, 90 bp, Homo sapiens
gttcggtcctgctgttgcggccgctgccccagggctgcggggacgaccttcacggcatggtgcaactcccacctgcggaaggcaggcaca

SEQ ID NO: 622374 - DNA, 83 bp, Homo sapiens
caacaacaattccgatggcaaagccgttgccaagccatcactggtgcaagctatatttaacggagatcctgatgaagttcgag

SEQ ID NO: 622375 - DNA, 75 bp, Homo sapiens
gtgagcaggtgaacactgaccccaatggggactatgcagccatcgtcttctttgctaacaaccgctttgagacag

SEQ ID NO: 622376 - DNA, 83 bp, Homo sapiens
accatggagacccgctacaacctgaagagtccggaatggcttcctttgggtggaagaggaaaattggtgagaaggtctcaaag

SEQ ID NO: 622377 - DNA, 97 bp, Homo sapiens
cggaaatcagggagctcttaacccagtttgaaacgtaactggttccctgaccagcgtgtccatgggcccagtgcctggcgtgtcctccctgggagct

SEQ ID NO: 622378 - DNA, 75 bp, Homo sapiens
aaggtctctggagacatcttcagcagctgctcagataaagaatttgatgagccagctaggaactaagcaggactc

SEQ ID NO: 622379 - DNA, 74 bp, Homo sapiens
tttgaagctacccttggggcatctgatcctaattcccttgctgatgatattgtttctcaagcaagacctccccc

SEQ ID NO: 622380 - DNA, 75 bp, Homo sapiens
ccggaagggactcgtgagcgtggccgagccacatcgctcagacaccatggggaaggtgaaggtcggagtcaacgg

SEQ ID NO: 622381 - DNA, 75 bp, Homo sapiens
ggaaactgttttggatgatcttgaccccgaggagccagcaccgctctttgaccttgccatgcttgccttagatag

SEQ ID NO: 622382 - DNA, 75 bp, Homo sapiens
acccggaggaggttcgaagctgagtatgtgacaggttggtcaaagaaaaagtgatgtatgaaaaagaggcaaaac

SEQ ID NO: 622383 - DNA, 100 bp, Homo sapiens
tcctgggtgctggccctgtgctggagaacctcatgcagttccatactgtgggcaccaagaccaagctgtctacactcaccctgctctggccctgccccat

SEQ ID NO: 622384 - DNA, 74 bp, Homo sapiens
acccagcagaacagcgtgggatgttcacaaagggaggacgcgcccttggaccaggggagcggtgcgattctggc

SEQ ID NO: 622385 - DNA, 90 bp, Homo sapiens
tccacatacataacccaacctttctctgagcgggacacaattcacaattctttatagcacttgctctgaaatttggggactgagtacacc

SEQ ID NO: 622386 - DNA, 90 bp, Homo sapiens
caccagccttgggcacagctccacccatcaccccagaacaccccgcagaaagtgcctgtgcatcaggtagagtacagagagatggatgaa

SEQ ID NO: 622387 - DNA, 98 bp, Homo sapiens
gccaagtttctttcccaagaccaaattaatggtgatggccgttttgctggaagaggatcgcttggcagctgaacccagctggaatcttagggctcaag

SEQ ID NO: 622388 - DNA, 74 bp, Homo sapiens
ggagataaaggatatccggttggtggggtctcctgctgccagctaagtgtgggagaacttgtgcacgtatctcc

SEQ ID NO: 622389 - DNA, 106 bp, Homo sapiens
gtaataaccctcttttccagtataagtatttggctcttaatatgcattatgtagccgctgttgtgacaagaaaagctgtggcaaccgaaatgagactccctcagat

SEQ ID NO: 622390 - DNA, 89 bp, Homo sapiens
agcttatgctggcctccatgttccactcggtgaagtaccatgcaagcatttcttaaaggtacatccatcagtactaaacccccgctgac

SEQ ID NO: 622391 - DNA, 50 bp, Homo sapiens
caaccgagggacccgcgtccagggcagctggtggaatttttgaagaaaat

SEQ ID NO: 622392 - DNA, 100 bp, Homo sapiens
caaaaggacattaaggatctgggaggggttggatggcaagcatgtggtgtttggcaaagtgaaagaaggcatgaatattgtggaggccatggagcgcttt

SEQ ID NO: 622393 - DNA, 100 bp, Homo sapiens
gtaaaacctggaacagcagcatcattgtcaaaggttttgatgatgatggttcagaatttcatgaacatatatttctggagaaacacctggagagctttcc

SEQ ID NO: 622394 - DNA, 76 bp, Homo sapiens
tggggcgcgcgtgcggaggaccaggcgcggcgcggctgcggctgagtgatgagccctcctcttcagctaggaaaat

SEQ ID NO: 622395 - DNA, 100 bp, Homo sapiens
ggagcagcccaggatggataaggagttgaggccccagggatgctgagcctgcacaagtggaaggaatggttttagggaagactgttgccggatgacaagg

SEQ ID NO: 622396 - DNA, 98 bp, Homo sapiens
ctgaggaggccggctgcagccccaagacagagcgctactcctggcagtgcgtcaatcagagcgtcctgtgcggctggagtgcggtggtgtgatctcgg

SEQ ID NO: 622397 - DNA, 80 bp, Homo sapiens
catgccccgctacgagctggctttaatcctgaaagccatgcagcgggtgcgcgcggagccatggttatcatgtcggagtt

SEQ ID NO: 622398 - DNA, 74 bp, Homo sapiens
cagagggcgttcccatggagccaggctctggcaggctgccctgagcacgctcaaccccaaccccacggacagct

SEQ ID NO: 622399 - DNA, 90 bp, Homo sapiens
gggcagccgcctgaaggaacgcgacggcggcgcccgcagcatgcagccagtaaagatcccagagaagttcgagaagctagagatcataag

SEQ ID NO: 622400 - DNA, 80 bp, Homo sapiens
tcgaacccgcctgcgatggggcgagaaaggtcccactgcagccctccaagcagtctctcagcaaacctgctgggcgacag

SEQ ID NO: 622401 - DNA, 86 bp, Homo sapiens
acgtggtcaccgacagcatgctgatcaaggctgtctccacctcggacacaggtcatgaacaacactgaagaaacgtcaaagtgaac

SEQ ID NO: 622402 - DNA, 117 bp, Homo sapiens
cctcctgtgacctgcatgtactgggggattcgcagggaggatgtcgggacaccccggaagctgggaaatggtggtcgagatatccagtctgacggagcacttgctgacggaatgtga

SEQ ID NO: 622403 - DNA, 83 bp, Homo sapiens
cagtgctcccggaacacaagctgtgaaacactaggactcaacgatgactctgaataatgtcaccatgcgccagggcactgtgg

SEQ ID NO: 622404 - DNA, 75 bp, Homo sapiens
ggactttgggcgtcccattgccatgattcccgacagttaagcaatggggagacatttggctttgctcctgcttct

SEQ ID NO: 622405 - DNA, 100 bp, Homo sapiens
cggaggaggcattaacgagaccggtatctggagtccatctttcaccatcttctcctgagattgtactggaccgtgaccactcttcttccattggctgcct

SEQ ID NO: 622406 - DNA, 95 bp, Homo sapiens
taaagacatagttcctggtgatattgtagaaattgctgatgcttttactgactctgctatcagtgctaaagtgaatggcgaacacaaagagaagg

SEQ ID NO: 622407 - DNA, 49 bp, Homo sapiens
cacgtgcacatgctggtgccttccagatcagcaagttgctcggatggaa

SEQ ID NO: 622408 - DNA, 75 bp, Homo sapiens
tttgggaagcatgtcaccaacccggccttcaccaaactcccttgtaaggcaaacattggtgggcaccgatcttcc

SEQ ID NO: 622409 - DNA, 82 bp, Homo sapiens
ttgtttgtggatcgctgtgatcgtcacttgatcaagacacagccatccgggtcttcgccatccccccatcctttgccagcat

SEQ ID NO: 622410 - DNA, 73 bp, Homo sapiens
tccaggagtacccgaccctcaagcgtgaggtcgaccgcaaccaggagctcctgacgcgcatccggcagcttca

SEQ ID NO: 622411 - DNA, 98 bp, Homo sapiens
cgggagatgcagccagtttacagacttgtgcaccatggacaattttgctgagggagatttcactgtggcggattatgccttgttagaagattgccctc

SEQ ID NO: 622412 - DNA, 100 bp, Homo sapiens
ggaaaagctggaaaaagttcaaaataaagcagcatcacttattcaggtagagtggaacccccagctattagaggtcccaccccaaactcagtttgattac

SEQ ID NO: 622413 - DNA, 96 bp, Homo sapiens
ttgacaggcggctttgcatcggaaatcagctctacagttcagaaatgagccgtcagactgctacagcattacctaccggtacctcgaagtgtccac

SEQ ID NO: 622414 - DNA, 82 bp, Homo sapiens
tgcccagcaagagattaaagatgcagtacgccacggggccgctgctcaagttccagatttgcttgcaagtagaagtctcagg

SEQ ID NO: 622415 - DNA, 100 bp, Homo sapiens
atgatcctgaagatggaggcaagcactgggtggtgatcgtggcaggttcaaatggctggtataattataggcaccagttctgggaggtgatcagtgatga

SEQ ID NO: 622416 - DNA, 100 bp, Homo sapiens
acatcttaattgggcacgaaagaggtaatagcctgcagctggtgttttgagaagccctactgctgaaaacttaacaattttgtgtaataaaaatggagaa

SEQ ID NO: 622417 - DNA, 50 bp, Homo sapiens
ttttcagaggggaatgctaagagcaggaagaaccggacccggcgaacctg

SEQ ID NO: 622418 - DNA, 99 bp, Homo sapiens
cgctgccaacctgctgttctggttggtcaaagaaaaagtgatgtatgaaaaagaggcaaaacaacaagaagaaaagattgaaaaaatgagagctgaaga

SEQ ID NO: 622419 - DNA, 100 bp, Homo sapiens
caaagaaacaagccgtggaataggtgtatcaagtaatggtgcaaagcctgaaacagagtctcactcccatcgcccagacttgagtgtagtgatgtgatca

SEQ ID NO: 622420 - DNA, 100 bp, Homo sapiens
tatcctgcatcgggagaaaacaagtccaaggatgaatcccagtccctgttacggggtttggattcaggatttgttcctagtgtccaagattttgataaga

SEQ ID NO: 622421 - DNA, 101 bp, Homo sapiens
gccctgcggctacagcgcttcttccagcaggccatgttacaggagctgaattttggtgcatatttgggtcttccagctttcctgctgccccttaatcagga

SEQ ID NO: 622422 - DNA, 90 bp, Homo sapiens
caggaggacgactgggaccgggacctgctgctggacccggcctgggagaagcagcagcgcaaggtttggtgcacctcgatttggaggaag

SEQ ID NO: 622423 - DNA, 100 bp, Homo sapiens
tcagcgtgatggaaggggagctggaggccagagaccttgtcatcgaggccctgcggggaatgaaggatggcagcatgccgtgcattaaaagctgttttgg

SEQ ID NO: 622424 - DNA, 106 bp, Homo sapiens
ctcagttggaagcagccgatccagcctgcggagcctgtggggcagtcgtgagatggagaataaagaaactctcaaagggttgcacaagatggatgatcgtccagag

SEQ ID NO: 622425 - DNA, 46 bp, Homo sapiens
ggaagaagaagatcagcactgtgactttccatttcaacacggttga

SEQ ID NO: 622426 - DNA, 109 bp, Homo sapiens
ccatccttcaggcgaattattgaaaatgtggatgtgatcacaaggcctaagggagaagtgagtcatctcattcccctccgtggatcagaggacttggactagatagaag

SEQ ID NO: 622427 - DNA, 94 bp, Homo sapiens
cacaaagaatagagttgagcctgtgggacacttcgggtgatgtgtccaatctagatcccaacttctcatttgaaggcaccaaactggatgtggg

SEQ ID NO: 622428 - DNA, 97 bp, Homo sapiens
ggcatatgttcgactggctcctgattacgatgctttggatgttgccaacaaagcttgaagtagaaaatgtcatgatgagaaaaattattaaaaaaca

SEQ ID NO: 622429 - DNA, 75 bp, Homo sapiens
ctgccaggagctgcggccccgtccggcccgggctgcgtgttacacgttcccaagaagaacttcgagaagataaag

SEQ ID NO: 622430 - DNA, 75 bp, Homo sapiens
cttggcgccaccgcctcatgcactgtgtaggtatccgttacagcactgatgtgagtgtagatgaagtaaaagctt

SEQ ID NO: 622431 - DNA, 100 bp, Homo sapiens
cgagcgcggcgcggggccaccatgggggcccagctcagcacgggcagccgatgaagtgcaaccttcacatgaatgggaatgttatcacctcagaccagcc

SEQ ID NO: 622432 - DNA, 100 bp, Homo sapiens
gcattttactactgagctgcaaaggtgcaggccctagcaggtgcaggtggagtagacaatctccatgtactggactttcagaagtataaagctttcactt

SEQ ID NO: 622433 - DNA, 143 bp, Homo sapiens
gtctgcgaaggccgggacccggttccccggcccacagtgggggtgtgcaaacccgagagaactggaaaaggtggacaagtcctattttcaagagaagatgacttttaacagttttgaaggatctaaaacttgtgtacctgcag

SEQ ID NO: 622434 - DNA, 90 bp, Homo sapiens
ctccggtgctggtgcggcgggggactgcggggccagcctcagaatcttttagctgaaaaagtagagcagctgatggaatggagttccaga

SEQ ID NO: 622435 - DNA, 98 bp, Homo sapiens
cgaattcagaaggatatcgacgtcgtgatccagaagtccagagctgaggactgcctgtttgcaggtatataatgtttacatggcagggaggcagctgt

SEQ ID NO: 622436 - DNA, 82 bp, Homo sapiens
aagagtgtagttgagagctcggccccaggagccaataacctgcagaccggacaggaacatgagcttatcgagagcatgcccc

SEQ ID NO: 622437 - DNA, 101 bp, Homo sapiens
ggatggtggtggatgcggccaactccaatgggcctttccagcccgtggtccttctccatattcgagtttttcagttatgggacaaaaatattatatcaaaa

SEQ ID NO: 622438 - DNA, 51 bp, Homo sapiens
ctgaaggctgcgagggactaagagcagagagaagatggtataaactggtcc

SEQ ID NO: 622439 - DNA, 75 bp, Homo sapiens
ttcatctcaaaaacaaaattctgaactcaggacttggcaaagtggaacagatgtgcattcagattaaagaagttg

SEQ ID NO: 622440 - DNA, 101 bp, Homo sapiens
gctggttgttccgttgcgagctgcagctgcgatctctgtggtaggcccaggttggaagactgcttggccacccctagaatttggactgatcttggcaataa

SEQ ID NO: 622441 - DNA, 75 bp, Homo sapiens
gaaacctcgcggaaagaaatgcttctttgtgaaattttttggaacagaagatcactgaactttgacctggaccgg

SEQ ID NO: 622442 - DNA, 95 bp, Homo sapiens
cagctggagagtttggagccctgcagactgtccgcctggagcgttacaaggccttctacattaccggtcctcttcctgatggatgggaacaagcc

SEQ ID NO: 622443 - DNA, 83 bp, Homo sapiens
cttagaagtggtgatgcaagaagtttctaggaaaggccggacaccaggcaccatgactcctgtgaggatgcagcactccctgg

SEQ ID NO: 622444 - DNA, 51 bp, Homo sapiens
gctaagaactgctgggaggatgacagtctacatgttcaagtgcgtgtggcg

SEQ ID NO: 622445 - DNA, 75 bp, Homo sapiens
ctgaaagccagagatgcaatgacaaagatctatgggagtcgtcagattatactggagaaagaggaaacagaagag

SEQ ID NO: 622446 - DNA, 101 bp, Homo sapiens
aatgctgaagtaagattgtcttggaaatactaagttggcccccttcctgtgtcatcccaatttatggatacgttatggtgccgtgggatttatcacagtgg

SEQ ID NO: 622447 - DNA, 88 bp, Homo sapiens
aagaagtgtcgggtacgcctgcattacacctggcgggagctctggtcagagaacaccttctgcagtggggaccatgtgtcctggcaca

SEQ ID NO: 622448 - DNA, 83 bp, Homo sapiens
atcctccaatctatggtgcagatgtgaatggtaccctctatgaaaaggttgtcctttgtggagggtcttctcgaatcccaaag

SEQ ID NO: 622449 - DNA, 100 bp, Homo sapiens
ctggacagcacaattggaatccaccctgtctgtgcagaggaatcagtttagacttgaaattcagtttttcctgaaactgatcagaagttagtgacacctt

SEQ ID NO: 622450 - DNA, 82 bp, Homo sapiens
tgctgtcagcgcggccgtcggagacatgggagacccggggtcggaaacaaatttacatgtattggagaccagaccagaagcc

SEQ ID NO: 622451 - DNA, 100 bp, Homo sapiens
ccaaggagaaggaggagctggagctgctgaaggaggatgtgcaggactacagcgagattgcaacacttctacatcaagaaaatgtggcaataaggctgcc

SEQ ID NO: 622452 - DNA, 74 bp, Homo sapiens
ggtcgcgtctcggaaaccggtagcgcttgcagcatggctggggccgggctggcggggccctcccgactgacttc

SEQ ID NO: 622453 - DNA, 83 bp, Homo sapiens
gaaaaaagtagctgtcattggtggtggcttggttttagatggagcaggattagatattgatttccatcttgcctctccagaag

SEQ ID NO: 622454 - DNA, 100 bp, Homo sapiens
ccgcgagttcctgcgcggctgcggggcttccctgcggctggaggaaacctatgagaatatcccaggccagtcaaagatcacattcctcttacaagccatc

SEQ ID NO: 622455 - DNA, 75 bp, Homo sapiens
aaacgattgaacaccagattgcagttcagagtttatgtggccgaggcagacaagtggaattaggccttgctgcag

SEQ ID NO: 622456 - DNA, 73 bp, Homo sapiens
gttcaccccaatgatcatgccaatcgagaggctgaattaaagaagaagtgggcagaggaagcggctgctgaga

SEQ ID NO: 622457 - DNA, 74 bp, Homo sapiens
tttggttttgatatggattatacccttgctgggaagatcagttttcctgccatccaggctgctccctccttcag

SEQ ID NO: 622458 - DNA, 90 bp, Homo sapiens
tgagaggaatatactcatcatcagtctatttagaagaggtctcggcgcggaagatggccggcggcgtggacggccccatcgggatcccgt

SEQ ID NO: 622459 - DNA, 75 bp, Homo sapiens
tgctaaactgtgtggggcgcggatgggatccagctgttagtcgggtcagcccaaggccaaccccactgtcactct

SEQ ID NO: 622460 - DNA, 98 bp, Homo sapiens
aggaggcaagattttgaaatctatggagaattcgcacaaccacggggacggtgcagaggacttcaagcagcaggtgccgtataaagaggacaaacccc

SEQ ID NO: 622461 - DNA, 75 bp, Homo sapiens
taaactttatgatgtagaaaccaaatatggtttgcttcagggttctctataaaggtgtcttaaaaaggttgattt

SEQ ID NO: 622462 - DNA, 50 bp, Homo sapiens
caggatggcttgcagaagacgctatttaaggtgggtgcggctgctatttg

SEQ ID NO: 622463 - DNA, 100 bp, Homo sapiens
tcagagacagcacctcaacctggttcagcagttcagggagctcacatttctcatattgctcaacaggtgaccattgtgaggtagatattttgttctaatt

SEQ ID NO: 622464 - DNA, 83 bp, Homo sapiens
aaggaactcgtcctacgtaacacagccagttagtggaagatagatgataagcctgtaaaaattgacaagtgggatggatcagc

SEQ ID NO: 622465 - DNA, 75 bp, Homo sapiens
atggtacggatcttaaggactgtgccattcctgccgctgctaggcaccatcatgggagcagcattgctggaggac

SEQ ID NO: 622466 - DNA, 98 bp, Homo sapiens
cgcggcgcaggaggcggtggagcgcagagcgggcgagcgcggcaaaaactgattattccaagtggaagttgccctgttattctgaatacttacttttg

SEQ ID NO: 622467 - DNA, 90 bp, Homo sapiens
cggaggcttgacccctcggaaggtacgccctcttatctggaacatgcttatagtgatttaggatactacattatcaataaactgcaccat

SEQ ID NO: 622468 - DNA, 90 bp, Homo sapiens
agctggcggacatcactttagaccctccacctaattgcagattctgatagttggtggtggtgttgctgggcttgcttctgcaggcgcagc

SEQ ID NO: 622469 - DNA, 96 bp, Homo sapiens
agagcaaacaagaacagaaatacaaatggagaactggtcaaaagggccaatgcaggaaaccatctatgacttctggaggatggtgtggcacgaaaa

SEQ ID NO: 622470 - DNA, 95 bp, Homo sapiens
tatccaccatgtactacctctggatgtgttttgagatagaaactgtgaagaacaacctcaggatcctttttaataatgctgtaaagaaacgtttg

SEQ ID NO: 622471 - DNA, 98 bp, Homo sapiens
gtagaggagcagctcaaaaagaaatgtttcactctgctctgctactatgatcccaattcagatcccaccaaatattttggttgtgagctgggagcaca

SEQ ID NO: 622472 - DNA, 100 bp, Homo sapiens
tgccacgaggtggctcccccacggctggtgatgagcatccgggatgggatccacggacccctgctaggccattgcccaagtctggccaggctgatgggac

SEQ ID NO: 622473 - DNA, 80 bp, Homo sapiens
tatatgatgcaagatgtggcagaagaacaagaagttgagaccgagaatgtggaaacagaattcaactagagggcagcctt

SEQ ID NO: 622474 - DNA, 110 bp, Homo sapiens
cacacctctgaaatatttaagtggaaaagcatgatttctgagacaagtaccttgtggtctataatcctttagaacaagaccgaatctcgttggtctcagtctatgtgagt

SEQ ID NO: 622475 - DNA, 83 bp, Homo sapiens
agccggaacgttactccgtgtccacccgcctggaattgtctcgccatttaaacgagtattcctaaaaggtgaaaagagtagag

SEQ ID NO: 622476 - DNA, 100 bp, Homo sapiens
cgctgctcaagttccagatttgaggaccttatcatgtccttcactgtatccatggcaatcgggctggtacttggaggatttatttgggctgtgttcattt

SEQ ID NO: 622477 - DNA, 83 bp, Homo sapiens
gctgttcacccactcccagatggctggcagcaggcaccattgggcactgccaccctctcgtggtccaagcagcacatgagcag

SEQ ID NO: 622478 - DNA, 100 bp, Homo sapiens
gcagaactaaagaaagctttaaaagaaaaagaaaacagattattattgcaacaaaggaggaagttaacatccctaataggagggttctggttactggtgc

SEQ ID NO: 622479 - DNA, 82 bp, Homo sapiens
gaccagcaagaggatggggccctggatgagggggaagggcctcaaagccagaagatggagtctcactttgtcgcccaggctg

SEQ ID NO: 622480 - DNA, 51 bp, Homo sapiens
atcggattggcagaaggaaccagatggcagaaacggtggacacaagcgaaa

SEQ ID NO: 622481 - DNA, 87 bp, Homo sapiens
gacagatgtgcctgtctgtcgcaggctgaggagcgccaggattttttatcaagcagaaatgcatcgaacaacgagaatcaagatcac

SEQ ID NO: 622482 - DNA, 98 bp, Homo sapiens
ctgaggctgcaccaagtggcgaaggagccggctccaaggtctatgtgctctctctatcaaccattccaattcttacctggcctatcctggaagcctga

SEQ ID NO: 622483 - DNA, 136 bp, Homo sapiens
cgggcggccgcggcgcggcgggaccatggagctcagagcgcagccccggcgccggcggcgggaccgcggaccgtaattcgccaaaatgacgaacacaaagggaaagaggagaggcacccgatatatgttctctagg

SEQ ID NO: 622484 - DNA, 82 bp, Homo sapiens
caaagacctgcgactttgctcaggctgagcagtccaaagtcctgagcgccgtggaggaccgcatggacgagctgggtgctgg

SEQ ID NO: 622485 - DNA, 100 bp, Homo sapiens
actaaacatgcagcagaaaatccagggaaatataacattcttggcacaaatactattatggataagatgatggtggtggcagcagaggtagttatggagg

SEQ ID NO: 622486 - DNA, 98 bp, Homo sapiens
tgaaagactgggctgtagtgaggaaggacctgctgatgaatattacatcatataccgaaatgtttttgataaggaagagagaatggattctgcaagac

SEQ ID NO: 622487 - DNA, 75 bp, Homo sapiens
gtgagcgcgtttcccgcctgagcgcaactagcggcgggtcgtgggcacctccagataaaataccatgaggagttt

SEQ ID NO: 622488 - DNA, 90 bp, Homo sapiens
gaagattgcttctcttctctcctccaagtgcaccaattccagctggacatcactgtgaaaatgggacgggataaagtccgagaaatgttt

SEQ ID NO: 622489 - DNA, 90 bp, Homo sapiens
cccatcccggtccctgcagagcgatccccgggcccagatatggacgcagcagagccggctccttcccgaactcacaaatcctgacgagct

SEQ ID NO: 622490 - DNA, 98 bp, Homo sapiens
ctggccacgatatcaactatttggctttgtcaggtgctgggacaccatcaactcctcactgtggtggatcataaagggccccatcctcacctccatct

SEQ ID NO: 622491 - DNA, 89 bp, Homo sapiens
tgggaggcactttgctgtctgcaatcgaagttgaggaccttctaccgctttgaggctgtgtgggatagctctctgcataactcccttct

SEQ ID NO: 622492 - DNA, 100 bp, Homo sapiens
gcgctgaagggcaaggaaagcagcatagagaatgagatagccgtcctgagaaagtcattgctttagtgatggatatatttacagatgtggacattttcaa

SEQ ID NO: 622493 - DNA, 75 bp, Homo sapiens
accggggcctgggtccacgccgagggcaggacgaacttcaccagattgctcgctgtaagcagctcatctgtgacc

SEQ ID NO: 622494 - DNA, 80 bp, Homo sapiens
ccggtgcggctgcacgtctcgcggatcatgctcaaatgaagaaacacccctgccgccagtgtgacaagtctttcagctcg

SEQ ID NO: 622495 - DNA, 100 bp, Homo sapiens
ggggggaagaggggaacatggacatgaagaggaggatccacctggagctgaggaaccggaccccggcagctacttgcacacctacccctgtggagcgtgc

SEQ ID NO: 622496 - DNA, 100 bp, Homo sapiens
ctggactcatggaggctgagcatttattcaggaacatgtttgacaagctgaaccgtgatgcctttcatataatttcttattttttgtttcaagttctgga

SEQ ID NO: 622497 - DNA, 75 bp, Homo sapiens
gccaacttaacatcagcagatatcctgtctcagatgaagaggtagtaacactctggtacagatctccagaagtat

SEQ ID NO: 622498 - DNA, 100 bp, Homo sapiens
aaagctacaggaggaagggtggctggaaggagaactaaatgggagaagaggaatgttccctgacaatttcgttaaggtcgtttatacgcaatgcagactg

SEQ ID NO: 622499 - DNA, 100 bp, Homo sapiens
tcaggaggttaagatttgcattgaaggccggtctaatgtaggtttttagaacttcagccataaaaatgggcagaattttccttgatcatatcggtggtac

SEQ ID NO: 622500 - DNA, 51 bp, Homo sapiens
gctaaatattgcggcagttttatcactgccagtgaaagatgtagaagataa

SEQ ID NO: 622501 - DNA, 51 bp, Homo sapiens
agaaagcacagctcggaaaggcagaggtacctttgacaggagcgtgaccct

SEQ ID NO: 622502 - DNA, 83 bp, Homo sapiens
ccgcgcccgcaggacgccccagccaggtatcatgatattagctggtttgacatcaagtcatttgtgagtcatcagatcttctc

SEQ ID NO: 622503 - DNA, 100 bp, Homo sapiens
ctaccacaccggggaccctcagctggacacggccatcgggcagtggctccgctgggataagcatgatgccttcttctgtagagtgggcgctttgcagaat

SEQ ID NO: 622504 - DNA, 100 bp, Homo sapiens
gagcagtcctggcccggagcgtcggtcctggtaatctgtaggaaaagcgctgcggcccagggggtaaagagagtgagaaagatcagtctaaagaaaagga

SEQ ID NO: 622505 - DNA, 108 bp, Homo sapiens
agcagaagctcgtggagaagatcatggaccaataccgcgtgctggagcctgtgcccctgccccggaccaaggatcctgtggaacctttcatccagcgaccacctgaag

SEQ ID NO: 622506 - DNA, 100 bp, Homo sapiens
aactacagaacagcacgtaccagaggtggaagtccaagtcaaacgcagaaggactgcctcactgagcaaccaagaaattcagaaggagctggcggacatc

SEQ ID NO: 622507 - DNA, 74 bp, Homo sapiens
tgaactttcttctaagtgccacagtgaagttttgatgatgatggttcagaatttcatgaacatatatttctgga

SEQ ID NO: 622508 - DNA, 77 bp, Homo sapiens
gacttcaaggatttctacctttccatagcagatctgcttgacatttacctggaaggatgctttcgataaaggttcac

SEQ ID NO: 622509 - DNA, 97 bp, Homo sapiens
ctgctggtagttccatgctgtctgttcagacttcagcttggtgatgctgaaaacgccattcaacagatgggtggccagtggcttggtggaagacaaa

SEQ ID NO: 622510 - DNA, 90 bp, Homo sapiens
gcccggtatggctgaagtcagcatcgaccagtccaagctgcctggagtcaaggaagcgtgggcttcctctaatattacaccgtaaaaggc

SEQ ID NO: 622511 - DNA, 76 bp, Homo sapiens
tggaggatgatttcatgtgcgatgatgaggaggactacgacctgaaacttattggagaagtgtttaatattgtgag

SEQ ID NO: 622512 - DNA, 75 bp, Homo sapiens
gaacttattatgaccccaatacccaggttgactatagtcaatggggccaatggagccaagtgtatggaaacccac

SEQ ID NO: 622513 - DNA, 90 bp, Homo sapiens
aggacctgtctgttcatctctgaataaacagccattggactcttcaaacaaaaacgctgtctccatcaagtactgctttcgcaggataag

SEQ ID NO: 622514 - DNA, 83 bp, Homo sapiens
cagaaggtctctggagacatcttcagcagagtgcctggtgaagaatgtgatgggatcactagcatgtctgcggagagcggccc

SEQ ID NO: 622515 - DNA, 101 bp, Homo sapiens
gacggagctacagctccgcgcccgccagttgcttgatcaggtggaacagattcagaaggagcaggattaccaaaggggctcccttaaggaaaagacagttg

SEQ ID NO: 622516 - DNA, 75 bp, Homo sapiens
tccgcgggcggcccacggcgagggattaaagcctgtggtttccacagaagcaccacctatcatatttgccacacc

SEQ ID NO: 622517 - DNA, 82 bp, Homo sapiens
cggcccgacgaggaagttttctactgtaaagtcaccaacgagatcttccgccactacgagttttgagagtattttagaaggg

SEQ ID NO: 622518 - DNA, 75 bp, Homo sapiens
tccttgtgcatggcctggcttgtggatcatgaactgataaatttcaaacggaagagagtggcagcatttagaaag

SEQ ID NO: 622519 - DNA, 76 bp, Homo sapiens
aaaaatcaccagttactttaatgagtctcggtccagctcgacttccagctcaggctccagcaccagcactggctca

SEQ ID NO: 622520 - DNA, 80 bp, Homo sapiens
ctcgtggcgtgcgacaacgcggcgcagaaacaatgcagatcttcgtgaagactctgactggtaagaccatcaccctcgag

SEQ ID NO: 622521 - DNA, 96 bp, Homo sapiens
aaagggagattacacagaagcaaaagccttgatagcatggatttctgtgagctcactgtggactatgcgccctcattaatggctcggcttatactg

SEQ ID NO: 622522 - DNA, 51 bp, Homo sapiens
cctgtacagcctgcagaactgtgagcgagtgctgtgctttcatgggcctct

SEQ ID NO: 622523 - DNA, 78 bp, Homo sapiens
tgacatgtctctcgaagaccccttttttgtagtccgaggcttcgagagctgtgcccaggagtgaacaaccagccctac

SEQ ID NO: 622524 - DNA, 90 bp, Homo sapiens
ttgctgtgatcaaggctatgttgcctctgtgttaggccaatggtcagcgatgaaaaggatgcacgagggtatcttcaggccttagcttct

SEQ ID NO: 622525 - DNA, 100 bp, Homo sapiens
gaagcctgacctggccggctatgaggcccaggagacacctatggctgccgatgaaggctcagcagagaaacaggcaggagaggcccacatggctgcggac

SEQ ID NO: 622526 - DNA, 96 bp, Homo sapiens
tccccaggcggcggcggtcctggtgcggaccctccggccgcagccatgtgggacccgcgggcagctaggttaagtgacccctgttcaagccgatgg

SEQ ID NO: 622527 - DNA, 51 bp, Homo sapiens
agccaaagagaagggaatttgggagccgtgtaaagccagtggaatatagtc

SEQ ID NO: 622528 - DNA, 83 bp, Homo sapiens
ccactgaagacgtctgcgtgagaatagagaccaccgagagagctggcggtcaccatggcaatgcgggagctggtggaggccga

SEQ ID NO: 622529 - DNA, 51 bp, Homo sapiens
atcagcttgcacctggagaatttcagtactaaggctcgtacgtctgcatcg

SEQ ID NO: 622530 - DNA, 94 bp, Homo sapiens
ccagaagtccagagctgaggactgcctgtttgcagatagcctgggctggaagctcttctacgtcacaggctgcctgtttgtggctgtgcagaac

SEQ ID NO: 622531 - DNA, 100 bp, Homo sapiens
agtgtatctggaagagaagaaggcagagactgagcagcatatcaaggcggcttacagggagaacacagttggcctccaccgtttctgccccacagaaaac

SEQ ID NO: 622532 - DNA, 98 bp, Homo sapiens
cacagcttcacgcagctagaccccgacctgccgcgcccggagacaatgcagatcttcgtgaagactctgactggtaagaccatcaccctcgaggttga

SEQ ID NO: 622533 - DNA, 100 bp, Homo sapiens
ctttcttcaaacgctaaatcaagcttggaatgatcatcaaacagctatggtgatgattagagacatactaatgtacatgtcctgtgcctcctgattgctg

SEQ ID NO: 622534 - DNA, 113 bp, Homo sapiens
aggaagagcaaagctgtcctaggccaaccagagattcatctttcatgcagtgacatgttgataaaaaatgatgttaccttatcccatatcacacaactggtcctcagccataa

SEQ ID NO: 622535 - DNA, 98 bp, Homo sapiens
tccagggatggagagtggcctggctggcaacggcacaggaaccatgcgaggccagcggagcctgctgctgggcccggcccgcctctgcctccgcctcc

SEQ ID NO: 622536 - DNA, 100 bp, Homo sapiens
ttgaagctgatggtgaatgtgtgcggacacactctcttgtactcccagagtacctcatccacgctttcttctgtgtcatgtttctttgtgcagcagagtg

SEQ ID NO: 622537 - DNA, 117 bp, Homo sapiens
aaaagaaatggaacagaaacatagagaggaactggagcaattgaagctgactactaaggagaataagatcatgactgagagattgttaataaaagcattgagtggtggtaaaaatac

SEQ ID NO: 622538 - DNA, 83 bp, Homo sapiens
aagaaatagcaagaactgaggagcaccaggagacgcaactcatcggtgttcatcatttgccacttaagctacttgcagtcacg

SEQ ID NO: 622539 - DNA, 100 bp, Homo sapiens
ggaacacagccagcgcaggaggcaagattttgaaatctatgggagttctgggaaatcgttcattcatttacagatgaacagaaaagactcttcttgcagt

SEQ ID NO: 622540 - DNA, 100 bp, Homo sapiens
agaaaggacggaggctgttatctatggcaggtgagctgtcagggagaaatgtcgaaacaggtcaagagatgttctgctcaggtttccagacatgtgcccg

SEQ ID NO: 622541 - DNA, 100 bp, Homo sapiens
ccaagtttcacatccttgtctgtgaagctaaactcaatgctgctgtgtgggaagaagatttgtaaagaaaactcttagcctcgaagcggaggatccctgt

SEQ ID NO: 622542 - DNA, 100 bp, Homo sapiens
tctggggctgggattggaactgtgtttgggagcctcatcattggttatgccagcaggaggccactgtctgcagctcccgtgaagatgtccactccagacc

SEQ ID NO: 622543 - DNA, 75 bp, Homo sapiens
tttaagcctgatctaacccctagaaacaggtatggacgacaaaggcgacccgagcaatgaggaggcacctaaggc

SEQ ID NO: 622544 - DNA, 100 bp, Homo sapiens
gtccatttggggaaatccttcggatggtgaactcattagaagtgtccttgaatggccattttggacaaaactggttgtggtagccattggcttcacagga

SEQ ID NO: 622545 - DNA, 76 bp, Homo sapiens
caccttgcgcttcttgcagtcgaaggtggtcttctgccctgttaaagaagccctggaggtggactggagcagtgag

SEQ ID NO: 622546 - DNA, 88 bp, Homo sapiens
cagctcgtgcagcggctccagagagcgatatctgaagtggctctgatgcctttgccacactcctcgcatctctgggacatcccttccg

SEQ ID NO: 622547 - DNA, 100 bp, Homo sapiens
agataatgctgacatggccagacttgatttcaatcttataagatttggagcaagaggtggtggtggccttcccccgaagaaatttggtaatcctggggag

SEQ ID NO: 622548 - DNA, 100 bp, Homo sapiens
caccgcggtagcagtgctggcggcggcgggtcaggagcagccgcagcgacggcggcgacagcaggtgcgcatgggcattgcaggagtggtgagggacaag

SEQ ID NO: 622549 - DNA, 75 bp, Homo sapiens
agcaaaggtgctaatccagtggaaatcaggagagagatgctgttcagttaaatgtgattgcaacgcgacagctta

SEQ ID NO: 622550 - DNA, 89 bp, Homo sapiens
acctgtttatctctgatttctggagttcagcactagcttcttctgcacggtacctgagatcctggtgcacaacatagtgatcttcatgc

SEQ ID NO: 622551 - DNA, 100 bp, Homo sapiens
actctggagtaattggagccaagaaatgagtataggtatctacgagaccccagcaggcaccatcctttaccatgctcatttagacatcgaggccttcacc

SEQ ID NO: 622552 - DNA, 83 bp, Homo sapiens
ccgcgcgcctttgtgcgcgcgccgaggtctcaccaacggctttgggggtgcgaggagcgagcaggagccgggcggcggcctgg

SEQ ID NO: 622553 - DNA, 117 bp, Homo sapiens
cctgttataaatacgatgttgcagctcagccctgaagaaaagggaaaacttgctgcggttgctcaaggcctgcacagctgaccacagttgggaaacgttgctgtctttggattcagg

SEQ ID NO: 622554 - DNA, 92 bp, Homo sapiens
ctgtgctcgcgctactctctctttctggcctggaggctatccagccagcctcccgcgacgatgcccctcaacgttagcttcaccaacaggaa

SEQ ID NO: 622555 - DNA, 129 bp, Homo sapiens
ccggcagcagtggatcaccgccctggagctggccaaggccaaggctgtccgcgtgatgaacactcattcaggtgtttccccccgggccggcctgccgtgacgatcacagccctgccgtctcaggtcacg

SEQ ID NO: 622556 - DNA, 75 bp, Homo sapiens
cacagcctcgctggaggcagtttctgatgccttcaattaagttgcagagttctgatggagagatatttgaagttg

SEQ ID NO: 622557 - DNA, 83 bp, Homo sapiens
gcgaccaggaggtgccggtggccgcgctcggacccgatgcagcagcttttttatgagaattacgagcagaacaaaaaggggta

SEQ ID NO: 622558 - DNA, 100 bp, Homo sapiens
cactcattgattctaaagcatctttaatctgccaggcggagggggctttgctggtctttcttggactattccagagagatcgtcagtatttaaacagatc

SEQ ID NO: 622559 - DNA, 100 bp, Homo sapiens
ggtttgtgagcctggactcgccctcctatgtcctgtacagggatcgtgggactttaccagatcggtttgtaataacacctcgaagacgctatccgatcca

SEQ ID NO: 622560 - DNA, 98 bp, Homo sapiens
tactgagcgccaatcgaatcaaggaggtggatgccaccaatctgccccccacactcaaggcgcagatcaggcctctataaccgccaggaatcacattc

SEQ ID NO: 622561 - DNA, 90 bp, Homo sapiens
accgtggcgaagtggagagtgacatgcagttggatggcggtgactgcgtgtttggatttaggtggcgagtagaaaaagaagtaatttcag

SEQ ID NO: 622562 - DNA, 100 bp, Homo sapiens
ggaggagcagttgtctgatgaagagaagaacactcgtgaaactgctcaggccatcaagggtatgcatatacgaaaagccacgaagtatctgaaagatgtc

SEQ ID NO: 622563 - DNA, 75 bp, Homo sapiens
acatactatccgtttgttcaggaaccaccagtgacagataccttctccaggcaaattccgttcccctgcagcacc

SEQ ID NO: 622564 - DNA, 75 bp, Homo sapiens
agagatgatggtgccagggatggaaggcaaagaggagcacttgacccctgacaagatctaccacgtcacagtgat

SEQ ID NO: 622565 - DNA, 100 bp, Homo sapiens
agatcgccggggaggcagcgcgggatcccagcctcaggcgtgcgcggacggtgtgcggattgggctaatggatactacagacaacagagaaaacttgttg

SEQ ID NO: 622566 - DNA, 144 bp, Homo sapiens
gggactcgccaggctatccttcctccaaaccagcaaccagcactttccctagctccttcttcatgcaagagtgcagacatcctcagcaccatcggctatgacaacattatccaacatctgaacaatggccgcaagaactgcaaa

SEQ ID NO: 622567 - DNA, 98 bp, Homo sapiens
ctcaatgacctcctgcggttcgatgtgaaagactgctcctggtgcagatgggtgatagatctgccactctgaaaagacagtctttggatcaagtcacc

SEQ ID NO: 622568 - DNA, 100 bp, Homo sapiens
gaaagtagggcatccttcacccatctgaagggaggaaatagtggcaggtgacagtctgcatgtgcagttttcaggtggtgaaacgtcttccaaaaaccag

SEQ ID NO: 622569 - DNA, 100 bp, Homo sapiens
agcacctgactacgaagtgctatccgtgcgagaacagctattccacgagaggatccgcgagtgtattatgatgattattccccaccttctaagagacaaa

SEQ ID NO: 622570 - DNA, 89 bp, Homo sapiens
tttccaggggaagcaacagaacaagcatgtgttcttttttgacaccaaaaaggaagtgctgggctttgacaaacttcctctgtggggta

SEQ ID NO: 622571 - DNA, 87 bp, Homo sapiens
agcccgaggctatcgaagagttccccgtgccggctcttcaccatcccgttttccagcaaggatggggctggtaagtagcaaaaagcc

SEQ ID NO: 622572 - DNA, 96 bp, Homo sapiens
gggccagatggccaccatatcagggaaagccaatgtgttttgaaaaatatgcaaatgttcaataagattgttctctggggccggactgagaaatgc

SEQ ID NO: 622573 - DNA, 75 bp, Homo sapiens
gacagccggccttggtggaggtccacagcatggagaatattatccagcaatgcaaatgaacaaactataactaca

SEQ ID NO: 622574 - DNA, 82 bp, Homo sapiens
aggtggacagatctgagagatactgagggtgtggatgaatggaacatagctcgcctcaatacagtcttggatgtggttgaag

SEQ ID NO: 622575 - DNA, 50 bp, Homo sapiens
tcagaagatatagaacttggggaataagacgagttggaagaagacctgat

SEQ ID NO: 622576 - DNA, 90 bp, Homo sapiens
aaaggcacccatccttattgctacagatgtagcctcccgtgggctagtttgcaggcctttcagatatatccatctcacaagacatccccg

SEQ ID NO: 622577 - DNA, 89 bp, Homo sapiens
agcagacttaccctgaagtagttagaatgggtcaacatatttcactggcacctattcacaagcttgaagaagctctgtatgaataccag

SEQ ID NO: 622578 - DNA, 76 bp, Homo sapiens
cagaactacaggggctctggccatcttcgtgggcagcaattgaagagaggtatggcaaagatctgctcaacctctc

SEQ ID NO: 622579 - DNA, 76 bp, Homo sapiens
ctggctacgaatacgtgagcccggagcagctggctggctttgataagtacaaggctccactttgaggctctgatga

SEQ ID NO: 622580 - DNA, 82 bp, Homo sapiens
atgaccctagccagactcagggatcaaagagcaaacagattcagtggcctgcattgttcacaagattcctttgcagttcacc

SEQ ID NO: 622581 - DNA, 75 bp, Homo sapiens
gcttggcctcggcgtcctcggagagaagaagaaggaggttcctgctgtgccagaaacccttaagaaaaagcgaag

SEQ ID NO: 622582 - DNA, 100 bp, Homo sapiens
gcggaagatctgtgctttggatgacaacgtctgcatggcctttgcagatcttttagagaaatctcgggttgttaaacagccaagaggtgaaagaaacttc

SEQ ID NO: 622583 - DNA, 50 bp, Homo sapiens
caggggagttctctgtgtctgtgaagagaaaactgatgtggaaggaacct

SEQ ID NO: 622584 - DNA, 114 bp, Homo sapiens
ctcagaacagttggatcttgctcagtctctgtcagaggaagatcccttgataacggaggagatgatggatcaggcaaatgataaaaaagtggctgctattgaagccctaaatga

SEQ ID NO: 622585 - DNA, 98 bp, Homo sapiens
gaagccaggcgctgttcccccaccccagaagaggatggcaaaggtggctaaggacctcaacccaggagttaaaaagctaacccactcctagaagcctt

SEQ ID NO: 622586 - DNA, 100 bp, Homo sapiens
ggacgggagtcacccagctgaaggccggcagcttcctgagaattccgtctctgcacctgctgtggacctgggtcccattaacctggacagacacctccaa

SEQ ID NO: 622587 - DNA, 50 bp, Homo sapiens
cggcgagaagccccagctgcactacgcggctgaccaactgactgaagagc

SEQ ID NO: 622588 - DNA, 132 bp, Homo sapiens
taccgccccagcccgggtgcccacactggccgtcccggccatctcgctgcccgacgatgtccgcaggcggaggtgttgcccatggcccccggggccccacaagttactactacatgctgcccatgaaggtgc

SEQ ID NO: 622589 - DNA, 100 bp, Homo sapiens
aggggccgaagcccacccagggagttgatgatagggccagatttgagtgtgtgaatttttgagtgaaacctggaacccaaatgagaagaaatctgcaagg

SEQ ID NO: 622590 - DNA, 100 bp, Homo sapiens
agaaagcagctccataggggaggagagccacgcaggatctcacagctgcagtctaatagtaacacagagagaagtttcacttcaagtcatggatgtctaa

SEQ ID NO: 622591 - DNA, 82 bp, Homo sapiens
ggcgacccggtgtgtggcgcgcccagagccccgcgtttcagccctagggaagattttgcaagaacgaggctcaaggatgtga

SEQ ID NO: 622592 - DNA, 100 bp, Homo sapiens
cagaagcaaaagccttgatagcatggatttctgtgagctcactatcctgaggtgatatcagacttggtatttttgaaacagccttctcccttagtcagag

SEQ ID NO: 622593 - DNA, 83 bp, Homo sapiens
cgtggattctagaggggtgacagcgaaacctcctacctcccggcagcctctccaggcccagaactttctccagtcagcctcta

SEQ ID NO: 622594 - DNA, 90 bp, Homo sapiens
aggaaggaacctgggatggttgtgagggaagggacaagaagatactgccctgattttaaagcctgcagagaaaaagaagccaaatgccac

SEQ ID NO: 622595 - DNA, 98 bp, Homo sapiens
aaggccaagaaaggagaggaagctttatttacaaccagggagtctgtggttgactactgcaacagctctacaagtttcacgctgtttaagtcatgaac

SEQ ID NO: 622596 - DNA, 74 bp, Homo sapiens
ggaaaatggttcccactgccgggcgagctactgcttcttgggatacctttctcatgctatggaatttcaagcca

SEQ ID NO: 622597 - DNA, 100 bp, Homo sapiens
ctggctcgccgtcccctacacggatgaggcccggcggtcgcgcctcaaccggctgtacggaatccaaggcaatggcagcagataaaagtgacgagtggtt

SEQ ID NO: 622598 - DNA, 100 bp, Homo sapiens
cccaaattgctccaatacagttcaagagaaaacattcaacaaagatacagtgattatagtctccttccgcttccagccgttcgagtcctatgactccagg

SEQ ID NO: 622599 - DNA, 98 bp, Homo sapiens
ttgtgtggtggtccactctgactgcaagcacccctttcttgaaccgaacagagtcaagtggaatcaaaggaagcaagatttccagatgtagcaaatgg

SEQ ID NO: 622600 - DNA, 101 bp, Homo sapiens
cttgaacctagaaaatttcactgcaaagaaactggcgatggaatatgagaggagccctctggaaagaaaaggacagaccctgtgctttcatgaaagtgaag

SEQ ID NO: 622601 - DNA, 50 bp, Homo sapiens
acacagagcagcagtcccctacaagcttccacagcgcggcacctgtacct

SEQ ID NO: 622602 - DNA, 88 bp, Homo sapiens
gtaggcgttggtcttctgatagcaactttaatgtgcctactttggggataaaggattatttggtcttctggatttggaggcaatcagc

SEQ ID NO: 622603 - DNA, 50 bp, Homo sapiens
ctggatgcccactaccacgtcaagatggagttttaacattgaatgcggag

SEQ ID NO: 622604 - DNA, 97 bp, Homo sapiens
gtccttcctttccgacttagtcctcgggaagaagtttcagactacaagaactatctcagggaggttgtatgagctcatttcgatggaacagaggtgg

SEQ ID NO: 622605 - DNA, 100 bp, Homo sapiens
cgctggctgcggcagcaggggactagcgtgagaggctgcctgctgtttcccggggagatcatgaaacgaggtcgccttcccagcagcagtgaggattctg

SEQ ID NO: 622606 - DNA, 98 bp, Homo sapiens
tagaattacctggaacttcatcatcatctacttcacaggaattgccatttacttcccaagtaagaagcggaagaggagccgctggaaccaagacacaa

SEQ ID NO: 622607 - DNA, 100 bp, Homo sapiens
gggggagtgcgcggcggccgcagctgccacaaaccaggactttgcctcccgggccaaactggcagttcaaaaactagtacagaaagttggattttttgga

SEQ ID NO: 622608 - DNA, 100 bp, Homo sapiens
gaatttattcactcaagactaaaaactaaaggcctgggcctgagaactgaatcagtactatactggcaattgctggagaagattttgcaattgttgcttc

SEQ ID NO: 622609 - DNA, 100 bp, Homo sapiens
gtttggaaaagctatatggagataaatggaattcttttaccatcttattaattcactctgatcggcttcagctccccaggaatatgattgaaaacagcat

SEQ ID NO: 622610 - DNA, 93 bp, Homo sapiens
cgcgagcaaggagcgcggaatcggggagcgtccggagctagctggatcctctaggcagagattatgcatgatgtgataaagaaggtcaagaag

SEQ ID NO: 622611 - DNA, 83 bp, Homo sapiens
gccagatcaacctggagctctacgcctcctacgtttacctgtccatgcttccgacttcgactccttaccttaaaagatgctgg

SEQ ID NO: 622612 - DNA, 75 bp, Homo sapiens
ccgtccccgccagtcagaagttgaggaaacttttgagaagaactttgaaagagaaacccataaaataagtgagca

SEQ ID NO: 622613 - DNA, 100 bp, Homo sapiens
tggccttcaattttggggctccctcgggcacctccggtaccgctgcagccaccgcggcccccgcgggctgtattcatcaccaaagaaaaaacttacacca

SEQ ID NO: 622614 - DNA, 50 bp, Homo sapiens
cgagttcttcgtgctgctcaaggacctgccctcattcacccagaatgtgc

SEQ ID NO: 622615 - DNA, 98 bp, Homo sapiens
tcctcaggtgagctggagctgcccggctcggcagcgggaagggtgagttctgcatcctggtacttcctcaatgtatttgggcttcggagcatttactc

SEQ ID NO: 622616 - DNA, 75 bp, Homo sapiens
ttaaacttgtggcctcagaacagttggacaagaaatggattctcagtcatgaagatgtcatattgggagaattac

SEQ ID NO: 622617 - DNA, 82 bp, Homo sapiens
cggtatgggcccgcctgaccctgggcgccgcgccgcacgagcaccagcctagagccagatctgactgcagccatgagcagca

SEQ ID NO: 622618 - DNA, 96 bp, Homo sapiens
agatgaacaaggtgcacagagcaggtgatggaagccaaattggcagagaatgcttgtaccctggctgacctgacagagggtcaggttggcaagcta

SEQ ID NO: 622619 - DNA, 78 bp, Homo sapiens
gtgtactttaccaacgagctgaagcagcatgtgccgaagcgccacctcagaagataaaaagaaatgagtctcatattt

SEQ ID NO: 622620 - DNA, 101 bp, Homo sapiens
gcccagaaggctgcccagagaaggtctatgaactcatgcgagcatggcttctgtatgtaatgtactgttgacttgctgcaaagataatgtgtgtcgtcttt

SEQ ID NO: 622621 - DNA, 100 bp, Homo sapiens
tatttgctttatatatcatgtgtgttcctcactcagttttctggatatgccgcagaaggatccgtgccagaagcaagcctgtgagatacagaaatgttta

SEQ ID NO: 622622 - DNA, 85 bp, Homo sapiens
gatgctctgtgcaggcataatgtcaggcaagagagatgcctgcaaaggctactacaaagttctgggaaagggaaagctcccaaag

SEQ ID NO: 622623 - DNA, 101 bp, Homo sapiens
ctgcgttttgccagtcacctctcaactgtgtgccaaaggccgaatacatcaagcaatggtaacatctttaaatgaagataatgaaagtgtaactgttgaat

SEQ ID NO: 622624 - DNA, 100 bp, Homo sapiens
cccgaacattgtttaccttggaagaactccgtgcccagatgctcataaggattgtcctctttctacaaaagctcctgaattcagaccacagatccacagc

SEQ ID NO: 622625 - DNA, 83 bp, Homo sapiens
gaaccatgtttggattgaagccgcctctgtattacttaccagattaactgctgaagtactgatcgagttctgcatttcttcaa

SEQ ID NO: 622626 - DNA, 76 bp, Homo sapiens
gaggcggcagcggcggaggaaggcggcgcaccccgagaggtgcatggctgcctcctaatcccatagtccagaggag

SEQ ID NO: 622627 - DNA, 75 bp, Homo sapiens
gcactcacttacatctccgaggacggagacaccctgcccactaaggaggaggagtcattgctgccatcattatca

SEQ ID NO: 622628 - DNA, 90 bp, Homo sapiens
tggaaacggacctgctcagcagcctaactgggcacctccgggctgtgaaaagttagggaagtgtctgacacctccagaatccattcccaa

SEQ ID NO: 622629 - DNA, 90 bp, Homo sapiens
cggggcccgcggccgctcgcgcctctcgatgggcagctcgcacttgctcaacaagggcctgccgcttgcccgcggcgccatggctcacgt

SEQ ID NO: 622630 - DNA, 83 bp, Homo sapiens
ctgatcttcgccaaactgtggagcctcttctgtaaccaagggttacacatcattttggaatgactgtatatcatctggattac

SEQ ID NO: 622631 - DNA, 118 bp, Homo sapiens
cggcagcgggcggacggccggcgggggcggcgtgcggcctagcgtctcaggtcaaaatgcagatcttcgtgaaaacccttaccggcaagaccatcacccttgaggtggagcccagtga

SEQ ID NO: 622632 - DNA, 75 bp, Homo sapiens
atggggccctggatgagggggaagggcctcaaagccagaaggagtctcgctctcagtcaaaatctccaacgggaa

SEQ ID NO: 622633 - DNA, 100 bp, Homo sapiens
aagccccggccacctcggcctcttcctgttgcaccaggttcttcgaaaactgaagcagatgttgaacaacaagccctgtgtgtccaaatgctgggagaac

SEQ ID NO: 622634 - DNA, 102 bp, Homo sapiens
gcgagaagctgccgccgaacgacaggacgttggggcggcctggctccctcaggttgtgtgtgtcccgctgtggattctcatgtcctttctgtgcctggtggt

SEQ ID NO: 622635 - DNA, 100 bp, Homo sapiens
tgctgcgaaagctgccaaaagtgacatgcagagctaaaacgtcatcctctcttcagtgatgtggactgggaaaatctgcagcatcagactatgcctttca

SEQ ID NO: 622636 - DNA, 100 bp, Homo sapiens
atcctgcctatgtttgccaaagagttgatgcagacagagtttcatcatgtccgcactctcaagatcatgagtggtgtgtacagccaggggatgatggcgg

SEQ ID NO: 622637 - DNA, 82 bp, Homo sapiens
gctcagggctcccacggattctacattatgcaggaacgaatgcaggaatttgggaactgagctgtgcaagtgctgaagaagg

SEQ ID NO: 622638 - DNA, 75 bp, Homo sapiens
tcccgccagcgaccagatgcagcactggaaggagcagcgggccgcgcagttggaatcgaagcctcttaaaatggc

SEQ ID NO: 622639 - DNA, 75 bp, Homo sapiens
ggtccctgaagagggaagacacgcggaaacaggttacaagtataggtcagcaggtggccgagtccagctccgggg

SEQ ID NO: 622640 - DNA, 100 bp, Homo sapiens
ttgggtgcggggcctgggccgccgctctcgctcctctggccaccgcccctgggaagcccttttggaaagattcagaatggacagtttagaagaacctcag

SEQ ID NO: 622641 - DNA, 94 bp, Homo sapiens
ctggagctgggtcagtccgccgctcaccccgcggccgcaccttcccgccttctcagggtggcccagttgaaatccttcccttcctctaccttgg

SEQ ID NO: 622642 - DNA, 100 bp, Homo sapiens
gtagttgaaacacgacgggggacttaggtgccagtccttctaggcagaagggccctcttggaaacagattgtctcagtttacctagctttgaaaatgcca

SEQ ID NO: 622643 - DNA, 75 bp, Homo sapiens
ccatcccggggggcagcaacggcgacatccagcaaggtactccaaagattcaggtttactcacgtcatccagcag

SEQ ID NO: 622644 - DNA, 100 bp, Homo sapiens
gacgggggcggcggcggggccccggactccgtcggcgcacatccccgtcccagcgcagagaatcactgcagcccccctcgccctgagccagagcaccccg

SEQ ID NO: 622645 - DNA, 102 bp, Homo sapiens
actatttaagctctgtaatcaagcagaaccaggtgcgaaacctcaaaggttagagccacagctgaaacaactacaaacaaaatatgatgaacttaaagagag

SEQ ID NO: 622646 - DNA, 82 bp, Homo sapiens
tgatccagcaaggtcggcagagcaaggggcttacgcagaaggacctggccacgggcgaccattgacgaggtggagacggacg

SEQ ID NO: 622647 - DNA, 101 bp, Homo sapiens
gcagagtattacctttacaacaaccgttccttcagagttgatacagcgaagctccagcacaggtaccagcaactgcagcgtcttgtccacccagatttctt

SEQ ID NO: 622648 - DNA, 80 bp, Homo sapiens
tggaaactctttgggaaagccactcgaaaagaaagatgttgtgtccctcctggtgagcgctgtcccagtgcacccgataa

SEQ ID NO: 622649 - DNA, 107 bp, Homo sapiens
gaacagggcggcactggcccgccacagcgacgccggcgccgagggacaccgcagtatgaggcagagagcccacccacctttgggttcctgttggacatcgatggagt

SEQ ID NO: 622650 - DNA, 80 bp, Homo sapiens
aatcaaaacaagctctttatgagaatggcatctaaggtcagcccaaggccaaccccactgtcactctgttcccgccctcc

SEQ ID NO: 622651 - DNA, 100 bp, Homo sapiens
gtcagggtcaagtcgtgttctgatcactactgacttgttgcgtggtaccatgcgacgacgctatgaagatgatggcatttcagatgatgaaattgaagga

SEQ ID NO: 622652 - DNA, 100 bp, Homo sapiens
ggatgattgtgagggaagaaacaagaggagagtgtacaggatcacagtcaccttctatatagcaccatccccaggatgcaggagccggggcagattgtgg

SEQ ID NO: 622653 - DNA, 100 bp, Homo sapiens
ctgcaaaggagacccaaggaacagtgccaagttagatgccgattacccacttcgagtcctttattgtggagtctgaacaagtgtcggaggccgagttact

SEQ ID NO: 622654 - DNA, 98 bp, Homo sapiens
agtgcagagatgggatggcaaagagacaaccataaagagaaagctagtgaatgggaaaatggtagcgacttgtgcaccatggacaattttgctgaggg

SEQ ID NO: 622655 - DNA, 101 bp, Homo sapiens
acttctctacatcccatctcaatcagaattactagattttctctcaaactacgagatgccaacgtccggcggtacctccagctgacacagtcagaactcag

SEQ ID NO: 622656 - DNA, 90 bp, Homo sapiens
ccagcagtccttcagggaagatgggaggcgaggagaagccggaaaaccagtgttctctggacatgaaaagcaaactgaatacaagtaaac

SEQ ID NO: 622657 - DNA, 100 bp, Homo sapiens
atgtgtctgtggcagtcttgtaaaaaattcagaatggacagtttagaagaacctcagaaaaaagtctttaaggctcgaaaaacgatgagagtgagtgatc

SEQ ID NO: 622658 - DNA, 101 bp, Homo sapiens
ggaggaggatgtggcgcgcggaggggaaatggctgccgaaaacaagccggaagatggcgtttaatgattgcttcagtttgaactaccctggcaacccctgc

SEQ ID NO: 622659 - DNA, 82 bp, Homo sapiens
cgagcgcggcccgggcgccatcgagccttggcggcggacgtgcagagacgtctcccacaacctgctccgggcgctggacgtt

SEQ ID NO: 622660 - DNA, 83 bp, Homo sapiens
cttgtgggagcaaaaccaacgcctggctcggagcagcagcctctgagatgcggcattccaaaagaactcactgtcctgattgg

SEQ ID NO: 622661 - DNA, 96 bp, Homo sapiens
tacctcaacaacccgtacgtgcggaaggccctcaacatcccggagcagctgccacaatgggacatgtgcaaaatccagggcctgaaaacccagaat

SEQ ID NO: 622662 - DNA, 100 bp, Homo sapiens
tagcacagatttatgtaatgtcaactttactgagaattttccacctcctgacacaacaccactcattttttggaccatatacaaacaacactctttttga

SEQ ID NO: 622663 - DNA, 80 bp, Homo sapiens
cgcgacgagcaggtggcggcggctgcagctcctgtccaaatatgacccccagaaggaggcagagctccgcacctggatcg

SEQ ID NO: 622664 - DNA, 100 bp, Homo sapiens
catcctcacctgtacgcttggctatgtgacgctgctggaggaaacacctcaggacacggcctacaacaccaagaggtttgacttgcagtatccagaggaa

SEQ ID NO: 622665 - DNA, 75 bp, Homo sapiens
cttgtatagtgaaatccatgagcgtggatgagacagataaggagtccatagaggccactgtattctattgaagaa

SEQ ID NO: 622666 - DNA, 100 bp, Homo sapiens
tagcaggcatttatctttctttgagtctaaagaatcccttgaagaaagtattggcaagaatgtacctgaacttccggacactacagagcattctagaacg

SEQ ID NO: 622667 - DNA, 87 bp, Homo sapiens
tggaacttcgttgcttgcttgcctgtgcgcgcgtgcgcggacatggcctcaaacggcacaaatcctgaagagcccgtgggcgtggac

SEQ ID NO: 622668 - DNA, 100 bp, Homo sapiens
attctcttggaaaaaggtagcatcgagtctctgcgaacattccttttaacctatgtcttacaaaggcccaagttttaaatgcacagagagcaggatacaa

SEQ ID NO: 622669 - DNA, 75 bp, Homo sapiens
gcccggccaagaggcaaaggggaggttacgcagcaaaccatccagaaggaattgtcttagaagaaagaaggcaag

SEQ ID NO: 622670 - DNA, 108 bp, Homo sapiens
ccacaatagtaagagtatgtgaagcaacttatgacactactcttgtggagaaagaaggtatccatgttcttggaatgaaagctactggttgattttaaagtgcctggg

SEQ ID NO: 622671 - DNA, 89 bp, Homo sapiens
cgttctgaagcccgagaggagccacaatggagacgccgccgctgcctcccgcgtctatgctccatcagcaagcactgccgactacaata

SEQ ID NO: 622672 - DNA, 75 bp, Homo sapiens
cctgcatgaagacagtggctggcggtgcctggacgtacaattctttgtttcaacaccagttttcagctatgatgc

SEQ ID NO: 622673 - DNA, 100 bp, Homo sapiens
aggatcggaagcctgcgtaactttctcccttgatccgggagtctttccactggagagaaaaggaacagttccgtaagctctttattggtggcttaagctt

SEQ ID NO: 622674 - DNA, 51 bp, Homo sapiens
gagacacggccagatctgccctccaggcagagcggcttgggtaaatccacc

SEQ ID NO: 622675 - DNA, 75 bp, Homo sapiens
ccttggtcaaagctgggatgggaaaaggagaacaacttcccgccactgcccaagttcatccctgtgaagccctgc

SEQ ID NO: 622676 - DNA, 50 bp, Homo sapiens
ttgtgacgagtgggatgagggaggcttatctgccccagtccccagaggga

SEQ ID NO: 622677 - DNA, 83 bp, Homo sapiens
cgaaccgcagtatcatgctggccaagaagatcatcattaaggacggaggcacgaggctgggaggcggcagaatgcagccagag

SEQ ID NO: 622678 - DNA, 75 bp, Homo sapiens
gaattacctcgtgggattctgcccggaggggccctcgtgtaaattcatgcagtgggtgagcaagcacattaaaaa

SEQ ID NO: 622679 - DNA, 74 bp, Homo sapiens
ttcaacgagaatgaagccatccaatggatgcaggaaaactgaaatgcttcggttacccacagtctttcgccaga

SEQ ID NO: 622680 - DNA, 100 bp, Homo sapiens
agttgcagcgaggagaagcgcagcgacggcgtcgggagagcgcgcctagccggctcgcgagttgccaacttggcctgttccatctcaaataatgaagaag

SEQ ID NO: 622681 - DNA, 98 bp, Homo sapiens
cagcgctgccatggagcccagcagcaagggccaattcctgtccccccagcagcatggcatcgtgtgctgaaccctctgagccctctgccccactgccc

SEQ ID NO: 622682 - DNA, 74 bp, Homo sapiens
gtgatctttgaatctcgtcctgactgtctaccccaggtagctacagcaagctgggtagcaggcagatccaaagg

SEQ ID NO: 622683 - DNA, 75 bp, Homo sapiens
tggccggagagttctgcatgttgattcgctcatcagattcaagagatgtttccccaggttccataccatctggta

SEQ ID NO: 622684 - DNA, 99 bp, Homo sapiens
gacctccagatttccttactggccgccatggcatcagatgaaggcaaactttttgttggagggctgagttttgacaccaatgagcagtcgctggagcag

SEQ ID NO: 622685 - DNA, 98 bp, Homo sapiens
tctgcaccttctcttactgctggcctgtctcttcaagaaaatgaggaggaggagattgggaacctagagcttgcctgggatatgctggatttagcaaa

SEQ ID NO: 622686 - DNA, 75 bp, Homo sapiens
aatatctactcttgacaaccgaaccatcgtcatcacctctcatccagtctctgctggatgaaccgaatcctaaca

SEQ ID NO: 622687 - DNA, 75 bp, Homo sapiens
aaggtgaacatttgtagcattgatttcccggatctggtaacatggcaaaagatggtttggaaatcccttgtctcc

SEQ ID NO: 622688 - DNA, 100 bp, Homo sapiens
ctgctactgcgaattctttgggcacggcgggggcaattgaaggaacagactaaaaatcgtgtcctggaaggaaactacaggtactaccagggattttcag

SEQ ID NO: 622689 - DNA, 100 bp, Homo sapiens
cttccccagccatgtggaactgtgtggcatgggggaaaggaatatggctaataatcactatgcaaaataagaaatgcatttaaaagttgatacagtatgg

SEQ ID NO: 622690 - DNA, 95 bp, Homo sapiens
gccaacgacctgtttgagagtgggaacatgacgcaggtgcaggtgtctcttctcgccctggcggggaagggggcaagcgcgatgaagagctggtt

SEQ ID NO: 622691 - DNA, 100 bp, Homo sapiens
ccgactccaccctggctggaggaactgggtgctcctgcccgctggcccctcgcgcgtgaggatctatctcagtgttcagactgcatcacagtgcttccga

SEQ ID NO: 622692 - DNA, 75 bp, Homo sapiens
tatgactccaggaccactatattttctccagaagattgtgtcaaaatctcaattgccatctgagaatagagaagg

SEQ ID NO: 622693 - DNA, 100 bp, Homo sapiens
ccccactggcggcggtggcggaggtggcagtggcggtaccagaatgcgaggagctcactcctctacttgaaaaagaaagagatggattacggtgccgagg

SEQ ID NO: 622694 - DNA, 90 bp, Homo sapiens
ctggggaacctgctcaaagccctgggtcgcttggaagaagccaagacagtggaaatatgatggtgagatgctgaacaggtaccgacaggc

SEQ ID NO: 622695 - DNA, 88 bp, Homo sapiens
cacatgtctaaagaagagacccaagatctgtgggaacagagcaaagagttcctgagaagctgccagtaactcagattctagccatgaa

SEQ ID NO: 622696 - DNA, 95 bp, Homo sapiens
cggagcctccgctgcagcgcgatctgcgcgaccagaccggcccccccgagaccctctttcccagctgcccgctcctcagcacccgaagattcgcc

SEQ ID NO: 622697 - DNA, 100 bp, Homo sapiens
caggacagcttcgggagttgagtataaactcatcctgaaagtcgctgttgttctcctgctgagcaagaatggaggccccactggtgagtctggatgaaga

SEQ ID NO: 622698 - DNA, 83 bp, Homo sapiens
cctcggcctccggcgcagcccggaaatgtccggcaagatcgagaaagcagaaaagcctgccattgctccgcccgtctttgtgt

SEQ ID NO: 622699 - DNA, 78 bp, Homo sapiens
agagaagaacaaatggaacgcttggaagcccttggaattgcttcatgtttggctgttttctcagcactgatgaaatag

SEQ ID NO: 622700 - DNA, 100 bp, Homo sapiens
ctgggaggagcgccggaacgccgaggcccagggaataaccagcaagtacctgtcaagaatgaagtagatcattgtgaaaatttgaagaaggtggacacaa

SEQ ID NO: 622701 - DNA, 100 bp, Homo sapiens
ccgcgctcagcgacaaacaaagaaacagcacccaggactatcttccaaagagttctggatatcctaaagaaatcttctcatgctgttgagcttgcctgca

SEQ ID NO: 622702 - DNA, 100 bp, Homo sapiens
aatgccacttttgattgcaaagtgctatcaaggaaccacgctctcgtctggtttgatcacaagacgggcaagggccatcgatgcacccctcggagctaat

SEQ ID NO: 622703 - DNA, 101 bp, Homo sapiens
gcgaccatggcctcctccgaggtggcgcggcacctggactcacaccacccggcaagaactgctcactacggctccctgccccagaagtcacacggccggac

SEQ ID NO: 622704 - DNA, 97 bp, Homo sapiens
aaatccaaaggtgaatcttttggttggtgattttgatgatagccacaaagcaagcagggtaccacgtatgactttgcccactgcaccttcactggga

SEQ ID NO: 622705 - DNA, 130 bp, Homo sapiens
cagcttggagatgtcgtcggatggggaacccctgagccgcatggactcggaggacagattcagaatggacagtttagaagaacctcagaaaaaagtctttaaggctcgaaaaacgatgagagtgagtgat

SEQ ID NO: 622706 - DNA, 100 bp, Homo sapiens
ggccctttggggaaatgcgtgcactgcgtccctctagagcattcctgggagatggtcgggaagaagaagggagtctcaggccagaaggatggtggccaga

SEQ ID NO: 622707 - DNA, 100 bp, Homo sapiens
gaccccgccccctgcggcccagcgcccccagaatgaagaaggagccccacaggaaggaattctggaagatatgcctgtggatcctgacaatgaggcttat

SEQ ID NO: 622708 - DNA, 100 bp, Homo sapiens
gctgacttacactgaactggtactggatgatcaaggtcagctggtccacatgaacaggcttccaggaggaaatgaggtgtggcggggcaccctggcccgc

SEQ ID NO: 622709 - DNA, 115 bp, Homo sapiens
taggaacactcttccggctgttaatagagcctgtaattgatgttcttgaggagagaatttccctggaagttcaactggaacaacttcgaccattctctcacctataagccaattg

SEQ ID NO: 622710 - DNA, 100 bp, Homo sapiens
tactggctgctgctgccctgcgcgctgctggctggtcgagtcccagacaccagaagtctgaatttggagaaggctggggtagatactagccccgacactc

SEQ ID NO: 622711 - DNA, 75 bp, Homo sapiens
aacattggtgggcaccgatcttcctgttcattctgcaagaacccaagagaaggttatattcccagaggatgtcag

SEQ ID NO: 622712 - DNA, 80 bp, Homo sapiens
gtgcaaacccgagagaactgggtaccccaagaagctagtgcagacttattcagtgtttccctaccaggacgagatgagcg

SEQ ID NO: 622713 - DNA, 75 bp, Homo sapiens
gaagacggagtgcctgcagaaatagccggatcgagctgggagatgtgacaccacacaatattaaacagttgaaaa

SEQ ID NO: 622714 - DNA, 90 bp, Homo sapiens
agaagcttcaccacaaaagcgaaatgggcacaccacaggtaatactgcattgcatgattgtgcagaatctggaagtttggacatcatgaa

SEQ ID NO: 622715 - DNA, 83 bp, Homo sapiens
aaggcattacggctcccattgagcagcctcccgcgacgatgcccctcaacgttagcttcaccaacaggaactatgacctcgac

SEQ ID NO: 622716 - DNA, 98 bp, Homo sapiens
cggcgctgcgatccgcgcatataacggttctgacaacaaaggagattgtgacatattgctgggcctaacactaaggtgatgttagttatttgctttgg

SEQ ID NO: 622717 - DNA, 83 bp, Homo sapiens
cgaggaggcagccaagctcatggcctgccactgcgtgcatgctgtgggccctgagggaaaggatcacagaggcgctgagccgg

SEQ ID NO: 622718 - DNA, 51 bp, Homo sapiens
cctggagaagcagatggaaaagcatcagcagcaggtgctccaggccgtaga

SEQ ID NO: 622719 - DNA, 75 bp, Homo sapiens
caccacagcccagaacgtgctgctcagtgcaggggcccatgaagaggttgactacactgaaaagctcaagttcag

SEQ ID NO: 622720 - DNA, 75 bp, Homo sapiens
gtcaatcgtaggaagaacacagtacagggtaaatggatccttctatgagatcttgcaagtggactttggaattga

SEQ ID NO: 622721 - DNA, 76 bp, Homo sapiens
gattcatttcagacagcaaaaggctggaagatgtctttccggcagacattgggactattcttgataagaaagagct

SEQ ID NO: 622722 - DNA, 48 bp, Homo sapiens
ctctaaaaaaggcacctgctgctaagaataactgaagtgaagtgatgg

SEQ ID NO: 622723 - DNA, 74 bp, Homo sapiens
agcaggcagcgggctttgccagcaaaaccgaaacagatgggaaactcttgtctagtgatgtgactcattacgtg

SEQ ID NO: 622724 - DNA, 90 bp, Homo sapiens
gacggacgttgagagaacgaggaggaaggagagaaaatggcgtccacggaattcataatgcactgaaaggaattccagatgaccgagatg

SEQ ID NO: 622725 - DNA, 75 bp, Homo sapiens
cgtggagatatggcgcaactgcggcgctgtgctcatgggagcttagaagatcccaaaagtataacccatcataaa

SEQ ID NO: 622726 - DNA, 108 bp, Homo sapiens
gggatcgtcatgtgggaagtcatgtcatttggagagagaccctattgggatatgtccaaccaagattcggaggcctgcaggactttggcacccgagaaggacaaggcc

SEQ ID NO: 622727 - DNA, 74 bp, Homo sapiens
aggcagcatcagccatgaggagcagaagtcagtccggctgcactcctgtaggaggcctgctgatggcatttcag

SEQ ID NO: 622728 - DNA, 82 bp, Homo sapiens
ctgggacttcccgtccgcggcgtggagggcggtgcgtctttctacgtgaataggattttgtggctggccagatacactgcat

SEQ ID NO: 622729 - DNA, 98 bp, Homo sapiens
ggaagaacaatgtgccaaggctgaaattatcctacaaaggttgggataattcttcactattccacccttgccacagtactatgggtaggagtgacagc

SEQ ID NO: 622730 - DNA, 96 bp, Homo sapiens
tgaagctaccggccagggttttctttactctggggtcccggctgccctgtggcctcgctcctcggaggggatgtttcatcttctcgctcgtcaagt

SEQ ID NO: 622731 - DNA, 100 bp, Homo sapiens
agacgatctgcacttcgcattttggcattgacatttaattttagggtcctttatatagaagggagagtaggagacgcaggtgcccgcgctgctggaggcc

SEQ ID NO: 622732 - DNA, 75 bp, Homo sapiens
tgatggtgttcgatacttgctcaggaagctgaaaccccacgtagtgttcttgaagaaattggactgacataactc

SEQ ID NO: 622733 - DNA, 90 bp, Homo sapiens
tggaattagatgacagcgacttggcaatatttattgctgtcattattctcagtggaggagcgagaacccgagcagcgccatgagcaacac

SEQ ID NO: 622734 - DNA, 82 bp, Homo sapiens
actgctgttgggaaccaccacgcagaccaccagcatcgacatgtgattggactggctaaggacgatcagctgaaggttcatg

SEQ ID NO: 622735 - DNA, 75 bp, Homo sapiens
ggcgggtaagatggcggccccgcggcgagggagaggagcggaagaccttctggtgtgggctgggcagcaattcac

SEQ ID NO: 622736 - DNA, 104 bp, Homo sapiens
cattgacgccatgtcgggttattcgagtgaccgagaccgcggccgggaccgaggtgttatagttttgccgctggactcttccctcccttcccccaccccatcag

SEQ ID NO: 622737 - DNA, 73 bp, Homo sapiens
gtgcggcacggcacggtgggagtgtctccggctggcttgcagaatgtatttagcaagccaaaaggaacaaact

SEQ ID NO: 622738 - DNA, 90 bp, Homo sapiens
gctcctcggaagaaacttaaccatcttttgaaagcccttgaaacgtcaaaggtgctccatctcgaaaagcgagaaaggcctccagaccac

SEQ ID NO: 622739 - DNA, 82 bp, Homo sapiens
tacgaccacctcttcaagctgctcatcatcggcgacagcgacgccctgctggcggacttggagtctaccacctcccacatct

SEQ ID NO: 622740 - DNA, 97 bp, Homo sapiens
ggggaagaggcccaccctggagtaaccctcactggagaatccagagtactaaggctcgtacgtctgcatcgattatcttacgtggggcaaatgattt

SEQ ID NO: 622741 - DNA, 82 bp, Homo sapiens
atacattgttcagttttatggtgcactcttcagagaggtcaaaatgcagatcttcgtgaaaacccttaccggcaagaccatc

SEQ ID NO: 622742 - DNA, 100 bp, Homo sapiens
acccaatatagaagaagtagtacttcccaaaaatgtgaacagagtatctgtcaggcaagagctgctgtgatggtttatgatgatgccaataagaagtggg

SEQ ID NO: 622743 - DNA, 90 bp, Homo sapiens
ctttgcaacatttcaggaaaacagagaaagaagtgataggagggctctgtagacattaggtatgcatcagttaacttttgcccatagaac

SEQ ID NO: 622744 - DNA, 100 bp, Homo sapiens
ccggcagctggcgctggggatccctgctcttcgctctcttcctggctgcgtccctagttgaacaagatggaaattcccatagcttggcgaaagattgaca

SEQ ID NO: 622745 - DNA, 75 bp, Homo sapiens
agcgcgggatcccagcctcaggcgtgcgcggacggtgtgcgggatggaggatgaagctgtcctggacagaggggc

SEQ ID NO: 622746 - DNA, 99 bp, Homo sapiens
gcttaggaccgcctgcccggggcaaccccgaaccaagctttagccgccgaggccgcgtgtcccaaaggccaggtggtcctgctgcaagctcagctgact

SEQ ID NO: 622747 - DNA, 74 bp, Homo sapiens
tgaaaagcctccttctggttccaaatgattttctccaaaggaacatccggtgcttgccctgccaggagccccag

SEQ ID NO: 622748 - DNA, 100 bp, Homo sapiens
accagtcccagcgctgtcgtgctcctctactcggaataagacgagttggaagaagacctgatcaacaacttcagggtgaagggaaaataattgatagaag

SEQ ID NO: 622749 - DNA, 98 bp, Homo sapiens
gttttcattgttccccgcctcctgcgactcgtttgtggggatttaccaattggaataagagagattttaaccagtttatcaaagctaatgagaagtgg

SEQ ID NO: 622750 - DNA, 99 bp, Homo sapiens
tcgtccagagggtcggcagcggcacctacggggacgtctataaggcccagatagctaataaccgaacacctggaagatggacccagcggtactattcag

SEQ ID NO: 622751 - DNA, 100 bp, Homo sapiens
tggatggggacctgcctgctgacagaccccgtgcggctgacacagctgtatgagcaggcccggtgggacctgctgctggaggagattgactgcaccgagg

SEQ ID NO: 622752 - DNA, 101 bp, Homo sapiens
cgggacggagatggagccgtggtccttcccaatgagaaattcattgagtttgaagatgctctggaacaagagaagaaagagctgcaaatccaggtggagca

SEQ ID NO: 622753 - DNA, 100 bp, Homo sapiens
gaagacagtgaatcagcagcattactttgctgtgaatgtgaagaatcagaaatctttactgattccaatgatcttacacatttgttccatggcttctcag

SEQ ID NO: 622754 - DNA, 90 bp, Homo sapiens
ggggcatggagtgcaccctggggcagacacctgaaagaccccgccgtggcatcccagggcttcctgatggccgcttccatctgccgcccc

SEQ ID NO: 622755 - DNA, 101 bp, Homo sapiens
ctgtcccagtgatggatgcacctggaaggggaccctgaaagaatacgaggtgacagagttagtccttgataattgcctgtgtgtcaatggggaaattgaag

SEQ ID NO: 622756 - DNA, 75 bp, Homo sapiens
cgggacaccccggaagctgggaaatgtgagctggaggatggccacactgctcttaacactcactctgttagcccc

SEQ ID NO: 622757 - DNA, 100 bp, Homo sapiens
tgacacttttgtccatgtcactgatctttctggcaaggctgtactgcggatgctcctgctgctctggttcaaggctggcctccagacttcaccccctatc

SEQ ID NO: 622758 - DNA, 90 bp, Homo sapiens
gccgcccgccctaccccccaagcagcggcagctggtgttcctgcatgaagccaccgtgcgcctgatggcaggagccagccccacccgcac

SEQ ID NO: 622759 - DNA, 90 bp, Homo sapiens
cagcggccgccgccgccgagacagctgcgcgggcgagcatccccacgcagtggatcatccatgccatggagtatgaacttcagatccgtg

SEQ ID NO: 622760 - DNA, 50 bp, Homo sapiens
gccggcttcaaccaggaccacggtgacgcggcgcacggcgcggatggtgg

SEQ ID NO: 622761 - DNA, 100 bp, Homo sapiens
gtccaaacaatcatgggaatttccaaggggattcaaacttcaacagaatgtggcaaccagggcagagacacctgcggaagccacagggaagccacagaga

SEQ ID NO: 622762 - DNA, 50 bp, Homo sapiens
cacctcttcaataggtgacattcaatgaacaatgcagatcttcgtgaaga

SEQ ID NO: 622763 - DNA, 100 bp, Homo sapiens
actcaggcaccttccaccaaccgccagatcggggctccgctgatcctctaaatagtgctttccatttgacctacaacatggttttgaacttactacgtgt

SEQ ID NO: 622764 - DNA, 100 bp, Homo sapiens
tgggtatggaggaggacctggaggtggacaacctggaggaatttctgaacgacccgctgaagaagcacacgctgatccgctttctccccaggcccattcg

SEQ ID NO: 622765 - DNA, 74 bp, Homo sapiens
gctgaacttcaccttttggctttcttggcctgatgctgaactctcgaggctgctactgtttgaacggtcttgga

SEQ ID NO: 622766 - DNA, 82 bp, Homo sapiens
aaggaatgatagctggggttcttttgacctgagggctgctattgtatatcacactaaagatcaggatcctcatgaccagcca

SEQ ID NO: 622767 - DNA, 90 bp, Homo sapiens
gcggcggtgtgggcgcgtcaggccgcgacgagggcgctgaggctggcagtgatggtgaaagcataggaaactgccccttttcccagaggc

SEQ ID NO: 622768 - DNA, 90 bp, Homo sapiens
atccgcatctggggacccctccaggaagatgctgacatccagatctacgcagaccccaccaagaggctggagctgtacttccggcccaag

SEQ ID NO: 622769 - DNA, 100 bp, Homo sapiens
ttagtagcaaagatgaagattttcttgacctttctgttgatgtggagcagaatacatccattacccactgtctaagcgatgaagaacgatacagatacag

SEQ ID NO: 622770 - DNA, 99 bp, Homo sapiens
tgtcgaaccccgggacacgcaggaacggctccagcatcaagatccgtctgacagggaaatcctcattgacgattcaatttgttgaaggccaatttgtgg

SEQ ID NO: 622771 - DNA, 76 bp, Homo sapiens
tggcaggaggtttttgatgataaagcaaaggtggctgaatccacagaggagcctgctggttctaatcggggacagt

SEQ ID NO: 622772 - DNA, 100 bp, Homo sapiens
cggggagagcgaggcggggccgccggggccgccatggagcccgactcggtgattgaggacaagaccatcgagctcatgctttgactctcccggatcttgc

SEQ ID NO: 622773 - DNA, 74 bp, Homo sapiens
tcgcctcgatctcctcgtctcccgctccgccctcccttttccctgaaattcattgagtttgaagatgctctgga

SEQ ID NO: 622774 - DNA, 115 bp, Homo sapiens
cagttttggctgttttggctgatattgcaccttccacagatgacttggggagatgcacttatttacatggaaccagagaaacaagtgatgtccaggtcgtcagatgaatgtgttg

SEQ ID NO: 622775 - DNA, 98 bp, Homo sapiens
cacggagtacaacgagccgcatgagagccggacaaactcagacatcgtggagattctgtttctggcgtctgcatacgcaagtccccaactcgctgagg

SEQ ID NO: 622776 - DNA, 100 bp, Homo sapiens
aggctgccataaatcgaaattcatctaatcttcctcttccattaccaccaaagaaaacacgaattatttctgttgaagaagaggatgaacttgaatctgg

SEQ ID NO: 622777 - DNA, 82 bp, Homo sapiens
cgggagccgcaaggcgagagctgcaaaggtctgcgaggaacagaagtgcgaggaggaggtcttcccgctggccatgaactac

SEQ ID NO: 622778 - DNA, 75 bp, Homo sapiens
cttacatctaaagagctagggaggaaaacgacagcacgtgttctttttcactagtagaagtgacgttggtttcat

SEQ ID NO: 622779 - DNA, 100 bp, Homo sapiens
tctctacgctgcggggatgcagcccgcaccctggggccccggatcagacactcctctaatttacaaagcagtgcccagctggtttgtgcgagtggagaac

SEQ ID NO: 622780 - DNA, 49 bp, Homo sapiens
ggggaacggaggccagagctgcgggtgaggccgagttcaaccgcatcat

SEQ ID NO: 622781 - DNA, 100 bp, Homo sapiens
agccctggtgccaggtgtccatccccgtgctgagggccgttgctccagggagaactgcaaatatcttcatccacccccacatttaaaaacgcagttggag

SEQ ID NO: 622782 - DNA, 102 bp, Homo sapiens
atggggttgtgatggcccaggttcttcaaaagatggtgataaaagaaaatgtggctgaagttacccgaagttcagcttgcagtgtaattcagaagagttaag

SEQ ID NO: 622783 - DNA, 96 bp, Homo sapiens
gggacagccgcccctggtgcacacaccctcgtattctcctgcccttccccagctgaagggaactgtgcgcccagccaatgacttcaaccctgacgc

SEQ ID NO: 622784 - DNA, 102 bp, Homo sapiens
gaacaacacacacgctgctgtatctccctgtggcaggaaagtggagaatgaggacatgaataaagaccagatcttgctggaaaaagaagctgaggtaagtag

SEQ ID NO: 622785 - DNA, 101 bp, Homo sapiens
gcgggggattgtgggagtctccgcgtcccgctcgctgggagagaggtggccctcatgacactgacgctcttcccggtccggctcctggttgccgctgccat

SEQ ID NO: 622786 - DNA, 98 bp, Homo sapiens
ctgtcttcggtggactccttcggcagtccacccaccgccgccgcctcccaggtgtgagatgcacaatgcgaaacctaggccccagcttttacaccatg

SEQ ID NO: 622787 - DNA, 95 bp, Homo sapiens
gctgcaaatcagtgagaggaatgatttcagagagctatgccttcctaccaagagaagcggtgacacgatttctaatgagctgctcagagtgccag

SEQ ID NO: 622788 - DNA, 101 bp, Homo sapiens
tgtatgataccttacttaatactatgctttgggaaaatggaattaatggcattttagcagatgaaatgggattgggtaagacagttcagtgcattgctact

SEQ ID NO: 622789 - DNA, 87 bp, Homo sapiens
caaggtcttcatagaccagaaccttagtcccgggaaaggactccagaagacctttccagattcgtggttgagctgcagcagagggag

SEQ ID NO: 622790 - DNA, 50 bp, Homo sapiens
gtcatccagccttagcaaaccagaggttcaacttatggtaactgatagtg

SEQ ID NO: 622791 - DNA, 74 bp, Homo sapiens
tgtttccggaacaacagaaagaggtcccgtcaggaagcccaagtatgtggaaagccccagagtgcctggagatg

SEQ ID NO: 622792 - DNA, 80 bp, Homo sapiens
gttggcctgacaaattatgctgcagcatattgtactggcctgctgctggcccgcaggtgggctcgggatgagtttgaagg

SEQ ID NO: 622793 - DNA, 75 bp, Homo sapiens
ccgcgaccgagtcatggctgagacctacgggctaatgctaaaggaggtcatctggaaggactgcagatgactgat

SEQ ID NO: 622794 - DNA, 50 bp, Homo sapiens
ttggaccctcctcccaactgtagagctcagagttctacagagtcaccact

SEQ ID NO: 622795 - DNA, 50 bp, Homo sapiens
gagccaagacttggctctttgtgacaggtcacttcctcctaacccatctg

SEQ ID NO: 622796 - DNA, 90 bp, Homo sapiens
gtcctggccgcgattttctgcaggccccacgagtgggaggtgctgagccgctcaggaagggatgagaccatgcagcctgcgaaaccatcc

SEQ ID NO: 622797 - DNA, 97 bp, Homo sapiens
gatgccgggggagcggggccttccacaccccctccgtgggtgtgtggtgtcctcatgacttctcttgtggaccatgtccgtgatcttttttgcctgc

SEQ ID NO: 622798 - DNA, 91 bp, Homo sapiens
ggaggagctgtgcagccgcgaggaggcgcgggaggtgttcgagaacgaccccgagacggaactctgcgaccttcaagtcgtttgaggaccg

SEQ ID NO: 622799 - DNA, 98 bp, Homo sapiens
cggcccctagctttctccttctggtgtggggcccgagatacttgtttgccttgcaacttaagagagacctgctggaagagcgtttgacctgtgctgac

SEQ ID NO: 622800 - DNA, 75 bp, Homo sapiens
tcttaacttccaaacatcatgaaggctactcgacatgcagaaatggtggccatcgatcaggtcctcgattggtgt

SEQ ID NO: 622801 - DNA, 74 bp, Homo sapiens
tttgttaaggattccaagtaactcttatttgatccaaaaggtaattctggcacttggagactatatgggagcca

SEQ ID NO: 622802 - DNA, 89 bp, Homo sapiens
attaaacatatggccaaactcctggacagtatcactgttcaaaatggaaagtatttattgaccaaattaacaggtctttggagaattac

SEQ ID NO: 622803 - DNA, 100 bp, Homo sapiens
ctgggatgatacaccttttccacagggaattgagttgctgtgattgggttattatacccctgcattgacagacatctaggagaaccacataaatttaaaa

SEQ ID NO: 622804 - DNA, 100 bp, Homo sapiens
catcctgagggtgcgactccgccgcgatggtgacccggttcctgggcccacgctaccgggagctggtcaagaactgctggcctgctgctgtgggtctgca

SEQ ID NO: 622805 - DNA, 82 bp, Homo sapiens
tatgaacccaccactgggcaaagaaagtatcccttttgagaaagatcagtctaaagaaaaggagaagaaagtgaaaaaaaca

SEQ ID NO: 622806 - DNA, 100 bp, Homo sapiens
gtttgcttctgaggaagctggaagctgcagccacaatgtgcctttgcaggggagcctgagagccacagtgactgtgaagtgctgaccacactcaccccag

SEQ ID NO: 622807 - DNA, 90 bp, Homo sapiens
ctcagggaagagaccctgcaaagatcctgggagaccaagggtgaagcccttctgtggagctgaccagggtgctgacccaaagggcaggcc

SEQ ID NO: 622808 - DNA, 83 bp, Homo sapiens
cgtgtctcttcgggatttgcgacgctgtcacaggttccagggtataccccgcgaatgaagcggagctggagtttgttcagatc

SEQ ID NO: 622809 - DNA, 83 bp, Homo sapiens
aagaaatcaacctgctcaccggggagtctgatacacaggcctccggtgtggctgtctctgatggtgtcatcaaggtgttcaac

SEQ ID NO: 622810 - DNA, 101 bp, Homo sapiens
cccggacaagggcagcttcccgctggatcacttaggatccttggcgtggagtcttcctcccttctcccaagtctttctccgtgaacttttcctcctggact

SEQ ID NO: 622811 - DNA, 98 bp, Homo sapiens
tctggggaaaataatccagagatttccacagaaggactgggatgatacaccttttccacagggaattgagttggtgttttcattcacggattatttct

SEQ ID NO: 622812 - DNA, 82 bp, Homo sapiens
cagccgatccagcctgcggagcctgtggggcaggattgctgggaggagtaataactataaaatgataatgacaataatggcc

SEQ ID NO: 622813 - DNA, 73 bp, Homo sapiens
ggctgcaagctaggtcgtcgactgtaggaaatcagtactactttaggaacagacatggaaggtctttaatgta

SEQ ID NO: 622814 - DNA, 75 bp, Homo sapiens
cccgcgccccgcagcgccccgcagagcagtcgaggtactccaaagattcaggtttactcacgtcatccagcagag

SEQ ID NO: 622815 - DNA, 75 bp, Homo sapiens
tgccttggaaaatgccaacgccgtgtctgaagagcctgtctccccaggaccgtgcagcatataaagagtacatct

SEQ ID NO: 622816 - DNA, 100 bp, Homo sapiens
agccggaaagtgtagaagtcacaccccaatggcgggatagcagcccctgtgtgtgagcacccctccatgccagtttggatttaggtggcgagtagaaaaa

SEQ ID NO: 622817 - DNA, 100 bp, Homo sapiens
attagctttagtgaaatgggctaataatgctggcaaagtggaaaaatgtgcggtgtcatggagaaactccagctgggcccagagattctgcagcgggaaa

SEQ ID NO: 622818 - DNA, 74 bp, Homo sapiens
tccagaagctcttagccagcactcgctatccacctccaggccatggtaggggaggagtgtgtaggtgccatcgt

SEQ ID NO: 622819 - DNA, 98 bp, Homo sapiens
aaacgtcagaaatccagtactaaactttctgagcttcatgacaatcaggacggtcttgtgcatgattatgatatgagggtggatgatttccttcgtcg

SEQ ID NO: 622820 - DNA, 82 bp, Homo sapiens
tccattatctttcgggaaagctctctggggcaggacctgcctagagctggaacgttacctccagagcgagccctgctatgtt

SEQ ID NO: 622821 - DNA, 80 bp, Homo sapiens
ggaattgctactgctgcctctgtcactcctggtgaccagcattcaaggggccagtgtcattcaaagatgtggctgtggat

SEQ ID NO: 622822 - DNA, 90 bp, Homo sapiens
gtatcttctcatgaaggaaggaaccgaaggatgataatgaagataattcaaatgatgggacccagccatccaaaaggaggcgaatgggct

SEQ ID NO: 622823 - DNA, 99 bp, Homo sapiens
gaagatcagctgcagacaactgaggaatcctttgcaaagcacgcactcctggctttaaagtttatacttgcatttgccatacctgataagccacggcat

SEQ ID NO: 622824 - DNA, 102 bp, Homo sapiens
ggccgacatggcggcagcggtggcggctgcgctggcgcggcttttggcggcctttctgctcctcgcggcccaggataaacatcacgatgctgctcatgaaat

SEQ ID NO: 622825 - DNA, 98 bp, Homo sapiens
ttcaggaggaagcgatggcttcagacagcatatttgagtcatttccttcgtacccacagtgcttcatgagaggagtacaagcgcaagctagccagagt

SEQ ID NO: 622826 - DNA, 98 bp, Homo sapiens
cgtgattgtcagtttcttgagggctccccagccatgcttcctgtacagcctgcaaaactgttctgttggtgcaactaatatgaacgaacatagttccc

SEQ ID NO: 622827 - DNA, 90 bp, Homo sapiens
ttctcttgctcgatggctactctgtaatggcagctcctgcaaaatcttccttattctgaaaagatgacagttttgtttgtctacaatggc

SEQ ID NO: 622828 - DNA, 90 bp, Homo sapiens
tcccttgtagctgggactacaggtacgtttgcgggagcacatgggtgaaaagtatacaacttacagtgtgaaagctcgccagttgaaatt

SEQ ID NO: 622829 - DNA, 51 bp, Homo sapiens
gtctctggagacatcttcagcaggcgagtgctctatgcagccacctttctt

SEQ ID NO: 622830 - DNA, 100 bp, Homo sapiens
gaggtgtacgacaagatctgcaaggccgccaggcactgagctggagcccgcctggagagacagacacgtgcaccatgactcctgtgaggatgcagcactc

SEQ ID NO: 622831 - DNA, 100 bp, Homo sapiens
taaatgaggaatgtctttcctaccatctaaaatacgaaggtttctggctggacttatcagatgtagacttcctagatgattcttcaacggagagtttgct

SEQ ID NO: 622832 - DNA, 128 bp, Homo sapiens
acgctccgtggatgaggctctgcggctggtccaggccttccagtacacagacgagcatggggaagagacgagttgtactgctgtcacaggaaatggacgctggattacaagcatggcagctcaggcag

SEQ ID NO: 622833 - DNA, 74 bp, Homo sapiens
ctgcagcccagacactgagagccgctttcatcaaggatgtgtgaccggaatggtggtcggcggcttcgacagtg

SEQ ID NO: 622834 - DNA, 98 bp, Homo sapiens
aagaatgcaacaaagctgaatgaactcattcaggttggaaattcattgagtttgaagatgctctggaacaagagaagaaagagctgcaaatccaggtg

SEQ ID NO: 622835 - DNA, 83 bp, Homo sapiens
ggtgtctggtgtgggcattgactatgcccgggccagcaaacagccgcttacaaacacgcagatggcaagaagattgatggcag

SEQ ID NO: 622836 - DNA, 75 bp, Homo sapiens
aagaaagcctctttgcaactgggtgtttgaaggcgtctacaacaattccagaatgctgcatttccttacagctgt

SEQ ID NO: 622837 - DNA, 95 bp, Homo sapiens
ccccggcagcgggacccggcgaagacgcgaccgcggcgcgagtcaccatggaccactatgagacctcagtccttctatgatggaagtcattcttg

SEQ ID NO: 622838 - DNA, 120 bp, Homo sapiens
cgctccgtggccttagctgtgctcgcgctactctctctttctggcctggaggctatccagcgagaacatattgtgatgttcgtgcctcagagctaaaactatgagtgaatttcggattca

SEQ ID NO: 622839 - DNA, 90 bp, Homo sapiens
ggggtgtccgagttgccgccggagaggagtggcctcgcccgcttggtttaccttccagaggctggcaatgctgtttcactggaggacacg

SEQ ID NO: 622840 - DNA, 113 bp, Homo sapiens
tgcagagctacatggatgcctcccttatctccctcattgaggattttgggagccttggagagaagggagttaagccccaagccaaggcagccaaagctcctcctaagaaggcc

SEQ ID NO: 622841 - DNA, 100 bp, Homo sapiens
taggcagctatttcacacttcagatgctgaagcgagtccctgagctcccggtagtaaacctattgatggcaattttgctgactgtggaagtgactcatcc

SEQ ID NO: 622842 - DNA, 90 bp, Homo sapiens
gacgacattcgaaggatggaagaagagacgaagagacagctggatgaacttaccctcttctccacctgctccccggctgcccgcaccttc

SEQ ID NO: 622843 - DNA, 97 bp, Homo sapiens
accggacactttgttattggagaaacatgcagattatatcgcatcctatggctcaaagaaagatgattatgaggaagacaatggtcctataatgccc

SEQ ID NO: 622844 - DNA, 50 bp, Homo sapiens
ctgagccagcagtcagtaatacagaaggtctggccgtgggcctgggcttc

SEQ ID NO: 622845 - DNA, 90 bp, Homo sapiens
agaaactgtccgagaagcccaaaggggacttgatctcatcttcatgccaggccttgggtttgacaaacatggcaaccgactggggagggg

SEQ ID NO: 622846 - DNA, 73 bp, Homo sapiens
gccggccgccgcgccgcccggcagcctcggcagggtgtcttttatgaataatcaaaagcagcaaaagccaacg

SEQ ID NO: 622847 - DNA, 95 bp, Homo sapiens
ttcatccctaagggtcctaaccggggacagcatcgcacagaattattttaaaaaaaagcagtgatccaagcaattgaattggaagcactctgggg

SEQ ID NO: 622848 - DNA, 75 bp, Homo sapiens
cgggaccccagcgcgggcggcggcggctgggcgggagccccagagatcgtgtctcagaaggacgagcactgctgg

SEQ ID NO: 622849 - DNA, 100 bp, Homo sapiens
tgtggctctgtgacctgccggtattggatgattcgtatctaagactctgggacactcctgaagtcgggaaatggttcagtcctcagtggctgtaggaact

SEQ ID NO: 622850 - DNA, 100 bp, Homo sapiens
gtttacaggccctctattgccaactgttaaatcactggggtgatcctgctggctgttggagtctggggcaaacttactctgggcacctatatctccctta

SEQ ID NO: 622851 - DNA, 100 bp, Homo sapiens
tcaatagaaaataaaacaacagaaattcctctaattgggggcgtggttgctctccagaccctacgaaaattagttgaacttactcagaagccagttcatc

SEQ ID NO: 622852 - DNA, 82 bp, Homo sapiens
ctctgactctcggactgagaaacgcaaggtaactaggatttctacctcaaccgcgagacctatgcaaggacggtgtggacca

SEQ ID NO: 622853 - DNA, 82 bp, Homo sapiens
cctgcagtacctgcagaaggtctctggagacatcttcagcagaggcgtagaggctccggtgttttttgtgccaattgcctga

SEQ ID NO: 622854 - DNA, 101 bp, Homo sapiens
ctcaatatctgtcttcggtggactccttcggcagtccacccaccgccgccgcctcccaggtgagcgagtgctgtgctttcatgggcctcttctttatgaag

SEQ ID NO: 622855 - DNA, 100 bp, Homo sapiens
tccactcggattgggtcaggctcttttggaactgtttataagggtaaatggcacgatgagtgatgtagaagctggtggtgccaccgtcttccctgatctg

SEQ ID NO: 622856 - DNA, 107 bp, Homo sapiens
ctgcagtacctgcagaaggtctctggagacatcttcagcagttcctggtccagaactttacacagaaaaggtgctcaaaggatatttgtttaatgaatgtggtatgc

SEQ ID NO: 622857 - DNA, 104 bp, Homo sapiens
ctatgttgccctgagttacataaataggaagatgagaatgtgcctactgctcctgatcctccaagtcaacatttacgtgggcatgggacaggcttttgctttga

SEQ ID NO: 622858 - DNA, 75 bp, Homo sapiens
cggaggccgggttgccagattacggtctttcccagggaactccgatgaagtgttccaacaaaatgagcgagtgaa

SEQ ID NO: 622859 - DNA, 83 bp, Homo sapiens
gatgtgggatccggttccttggtgtcatccagccttagcaaaccagagatgctgaagaaggaagaagcaattccatggcctgg

SEQ ID NO: 622860 - DNA, 88 bp, Homo sapiens
cgaaggccgggacccggttccccggcccacagtgggggtgtgcaaacccgagagaactgggtgcctgactgacagaagttcttgcccc

SEQ ID NO: 622861 - DNA, 51 bp, Homo sapiens
gcgacccgtactgggcctactctgatgacttgcagggtgcacagtcagaaa

SEQ ID NO: 622862 - DNA, 90 bp, Homo sapiens
ttttgagagactgactcgggacaaatacgcctacaccaagcagaaagcgacagggggccgcctttttgcctatcctgacactcaccgcca

SEQ ID NO: 622863 - DNA, 89 bp, Homo sapiens
gcgggaagaacaaaggaaggggagcccgggacccccgggggcgcagacaatacaatggtgggtgaagagaagatgtctctaagaaaccg

SEQ ID NO: 622864 - DNA, 75 bp, Homo sapiens
tcttgggagtgatttgcgccatcatcctcatcatcatcatagacaaatttacatgtattggagaccagaccagaa

SEQ ID NO: 622865 - DNA, 80 bp, Homo sapiens
acctcggtttcctggacccattccgactcaggttttataggatcacattgacaaaagtaccatggagttttatgagtcag

SEQ ID NO: 622866 - DNA, 100 bp, Homo sapiens
cgaacacctcactattgatggtgtagcgctttaggggaaggaaggaagacttcaagaagtcattgaaacccttctctctctggaaaagcagactcgtact

SEQ ID NO: 622867 - DNA, 51 bp, Homo sapiens
cccatacacctaccagatgcacgatatgaggccccaggattcctggcgagg

SEQ ID NO: 622868 - DNA, 50 bp, Homo sapiens
ccccagttttgggtggggagaaggcaaagaccatgtcgcctgaagaatgg

SEQ ID NO: 622869 - DNA, 100 bp, Homo sapiens
ccaggaaggtcaggctcggtgtctggctcacctgggtaggcatatggaggcgctggagattgctgcaaacttgttgattcgatgtcatcagtcccgtggt

SEQ ID NO: 622870 - DNA, 99 bp, Homo sapiens
acaacttggaaaaggcctatgatactcctgctggtttcaagagacctgtggtcttattcggccccatagctgatatagcaatggaaaaattggctaatg

SEQ ID NO: 622871 - DNA, 100 bp, Homo sapiens
attccagaccaaaattgaaaaaatggttgacctcacccagaaagggataaacagcacttccagggggagaaaaaaaatcatgttatcagaaagcaaagaa

SEQ ID NO: 622872 - DNA, 75 bp, Homo sapiens
ttccgcctcctgctagagcggcgaaccgtgggcagtgagcactgctagaggggttcaacatccgggagagcacca

SEQ ID NO: 622873 - DNA, 98 bp, Homo sapiens
tccaccaaagaaagtgacctctgagaaagtgagccagaaacatgctgagcctttgacagggcgatgccagtccctccactccagaggagaacgaaacc

SEQ ID NO: 622874 - DNA, 82 bp, Homo sapiens
gcctagtaaacggggctgctggtgggccgcgtcgaagacatggaccagggctacggagctcaaactggaggattataaggat

SEQ ID NO: 622875 - DNA, 125 bp, Homo sapiens
gacaggtgcccagcaagcccattgaccacagcaccatcacttcctggtctttcccagggaactccgatgaagtgttccaacaaaatgagcgagtgaaccaagaagaggatgacattagatccagg

SEQ ID NO: 622876 - DNA, 80 bp, Homo sapiens
ctactctctctttctggcctggaggctatccagcggaacccagtttggccagtgggatactgctggttttgagaacgagg

SEQ ID NO: 622877 - DNA, 98 bp, Homo sapiens
ttgatgactctcgtgaacatagctttaatagggagatgagtatgatgtatgtgccatttgtttggatgagtatgaagatggagacaaactcagaatcc

SEQ ID NO: 622878 - DNA, 100 bp, Homo sapiens
catcgtctcctgtgtggcgatggtcttcctgctggggctcatgtttgagaaaactacccctgagtgtggtcccacaggatatgtagagaaaatcacatgc

SEQ ID NO: 622879 - DNA, 106 bp, Homo sapiens
gggcctgcaggtctctgtcgagcagcggacgccggtctctgttccgcaggatggtaaagtcagtgataaatcttttgtttgctgcatatactggagatgtgtctgc

SEQ ID NO: 622880 - DNA, 50 bp, Homo sapiens
ttttgtcagattatcaggatgagggccaatggccatgtgtctcaggatca

SEQ ID NO: 622881 - DNA, 90 bp, Homo sapiens
cacacggcctgcactctgcgctttgagctactgggctgtgagctgaacgctgtccccaatctcttcatgctggaaacagtggattctgtg

SEQ ID NO: 622882 - DNA, 75 bp, Homo sapiens
cgcgagaacctccgcacaccatggaagcccaaatattttatccaggagatggagtctcacgctgtcacccaggct

SEQ ID NO: 622883 - DNA, 100 bp, Homo sapiens
cgctggaggcagcggtgcacgtgcagtgcttagatgagtacgaagatgatgaagcagggcagaaagagcggaaacgagaagatgcaattacacaacagaa

SEQ ID NO: 622884 - DNA, 98 bp, Homo sapiens
ttatgaaaaacctcctcctgggcttatcaagctttctgaacctgaagaactttgtagattgaaagctgtagcttgtggacctctctctgtggagatca

SEQ ID NO: 622885 - DNA, 96 bp, Homo sapiens
tggtggccatcagcaagcccaggtctatggcattctgtgaaactttagaagagacaaactaccgcttacagaaagaactacttgaaaaacaaaagg

SEQ ID NO: 622886 - DNA, 75 bp, Homo sapiens
ccacttcaaacattcgtctcggaaaccccgcctcttacagtcacgagggttttcagagaaagatgctgatgaggt

SEQ ID NO: 622887 - DNA, 50 bp, Homo sapiens
ggtgtggcaggttgcagaggacagtgttaagtgggcagaccaacatccac

SEQ ID NO: 622888 - DNA, 103 bp, Homo sapiens
ctgcgattgaggaagagcgagccagcgcccggagcaagcggagctcccccaagagccggaaaggtgtcatggagaaactccagctgggcccagagattctgca

SEQ ID NO: 622889 - DNA, 96 bp, Homo sapiens
aacaggttggggaggagagtttgggaccaagaacacccatgaacccttagaagccaccatagagctgaccacagtggccgagaagtcgcgcgtgct

SEQ ID NO: 622890 - DNA, 100 bp, Homo sapiens
tttggtcatggaagaacaactgacttgtccaaggttcgtcacaaggcatcgcagaaggtttatgctatgaagcttcttagtaagtttgaaatgataaaaa

SEQ ID NO: 622891 - DNA, 128 bp, Homo sapiens
aaggccgtctctgagactactttcagagaagatccttgggctccaggtccagcaggcggagcactgttcattcctccgtgtcacaaagcagtacctgccccacgtggcgcgcctctgtctgatcagca

SEQ ID NO: 622892 - DNA, 87 bp, Homo sapiens
acctacaaacactcctttcaaactatttggagttttcctcgtcttactggatgtcactctcgtccttgccgacctaattttcactga

SEQ ID NO: 622893 - DNA, 98 bp, Homo sapiens
ccttcctcgaggcggtgtcccacctgccgcccttcttcggcagtcacccgcagggccaaggtggctcccgctgagaggatgagcaagttcttaaggca

SEQ ID NO: 622894 - DNA, 75 bp, Homo sapiens
agtttgaagacttgctagttaggattttattactggcagcatgtatatcttttattgtcagtggctgctatgcag

SEQ ID NO: 622895 - DNA, 74 bp, Homo sapiens
attacaacttcattttacttatgaagaaaaatctcctggcaattacagtatgctatacctccggagcatggaaa

SEQ ID NO: 622896 - DNA, 98 bp, Homo sapiens
ccggaggacagccccaaaaaggatctgtttgacatgcacgtgtactcatatgatgaggatgacatggtcctggaccccagcctggctgagcacctgtc

SEQ ID NO: 622897 - DNA, 100 bp, Homo sapiens
cagatagatcgtgtggtagaagttgtggaggagacaattaaagtgcggatttgcgaggcgcgccctggagctgctagagatccggaagcacagccccgag

SEQ ID NO: 622898 - DNA, 51 bp, Homo sapiens
cgccatcattggacccaatggctctgtgaataaccctataccttccaattt

SEQ ID NO: 622899 - DNA, 100 bp, Homo sapiens
aggttttgacacaagaacagttggccaatactggtgcccaagcctggattaaaaagcttcctgcctgacacagctcacttcaagaagtgcacaatgtcag

SEQ ID NO: 622900 - DNA, 82 bp, Homo sapiens
actaatgaagttgggaactcagaccgtaccttgcaacaaggctctcaaaattagagagatgtgtaattgtccaccactgtct

SEQ ID NO: 622901 - DNA, 100 bp, Homo sapiens
gatcaacaagcacaataatcagcaagcactcagtcacagcattgaggaaggactgaagatacaggccatgaacaggttactatatcaacaactgatagga

SEQ ID NO: 622902 - DNA, 74 bp, Homo sapiens
catctgtggaaggacctaccaaccaggttgtctgcattcaaaagagcattctattaaagctaccttaatttggc

SEQ ID NO: 622903 - DNA, 98 bp, Homo sapiens
agtaaaataccttcaagcgaatgggccctattgtgctcacacattcagaacctgttacccaaggaattccctaaaggcaacagcattattgagaaaag

SEQ ID NO: 622904 - DNA, 75 bp, Homo sapiens
acatgatcctctccgcctctcgagatctgactgcagccatgagcagcaatgagtgcttcaagtgtggacgatctg

SEQ ID NO: 622905 - DNA, 98 bp, Homo sapiens
tcatgcttaaccagtacaccaagacatttgccaagatcaaggctcgagatcttcgcgggaagaagaaggaggagctgctgaaacagctggacgacctg

SEQ ID NO: 622906 - DNA, 100 bp, Homo sapiens
cgcacttgctcaacaagggcctgccgcttgggccatgaagcccccaggaggagaatcgagcaatctttttggaagtccagaagaagctactccttccagc

SEQ ID NO: 622907 - DNA, 100 bp, Homo sapiens
tttggaaatgatacaattacctgcacgacacatggaaattggactaaattaccagaatgcagggtgtcactactccatccagaagggagctgcgtttctg

SEQ ID NO: 622908 - DNA, 100 bp, Homo sapiens
ctcgaactaaacaaattcatcccagaaatctaagagaagctgccagtaactcagattctagccatgaaggtcaagaggaatcttcaaaggaaaatgtgtc

SEQ ID NO: 622909 - DNA, 100 bp, Homo sapiens
gctaatccctgaatatctgatcccatgaagctgaggtcttgaagcagctggctgagaaacgagagcacgagaaagaagtgcttcagaaggcaatagaaga

SEQ ID NO: 622910 - DNA, 78 bp, Homo sapiens
ctgcggccacttctcgttttcatctgggccaagatcctcgcagtggacagcccgaacgaccctgtcaccaacatttgc

SEQ ID NO: 622911 - DNA, 94 bp, Homo sapiens
gcattcagcctgtatatggagcacagcatcctcctcttgacccacggctcaccaaaaagcaagaaactatattcagtctttgactcagatgccg

SEQ ID NO: 622912 - DNA, 50 bp, Homo sapiens
agactcgtgggggaaaggctgggaagtgttcgccagttactacatgaaaa

SEQ ID NO: 622913 - DNA, 100 bp, Homo sapiens
cagcgacctgcgcaacctcgacgagctggagttgcgggagcttcaggacgagaaggcagagctgcagaagatctgcgaggagcaggaacaagccctccag

SEQ ID NO: 622914 - DNA, 96 bp, Homo sapiens
gttgagaaggtgttttttaccactgcagtaccagtagccagtagcccagaacaatatgaatcttttgtgaaattcacacatgatcagattatgcga

SEQ ID NO: 622915 - DNA, 75 bp, Homo sapiens
acgactgctacagaactgcaagcattccttctgcagcacttgatttattggaccacatgctgacactagatccta

SEQ ID NO: 622916 - DNA, 83 bp, Homo sapiens
gcaaggaccctttggaaggccgggtgggccgagttcctctgtgacgagggtgcaggtatctctggggactacatcgatcgcgt

SEQ ID NO: 622917 - DNA, 75 bp, Homo sapiens
gaagacgcggggaagaggaggcggaaaaggacgcaaagttctccggcgagaagtcacctgcaccggtgcccgtga

SEQ ID NO: 622918 - DNA, 100 bp, Homo sapiens
tttgaggactttgtctctgatgagctgagaaacaaagccacccagccaatgaaggaaaaatgatgtgatgaacctccttgaaagcgctggtttttctcga

SEQ ID NO: 622919 - DNA, 96 bp, Homo sapiens
cagcgcgggagccgtcacggtgctcaagttcacagacattgggaccttcgagacagtgtggcaagtcaagttctacaattaccacaagcgggatca

SEQ ID NO: 622920 - DNA, 91 bp, Homo sapiens
ctttggatgaaggagcttcaaacccaaagaggtaagcattcagggagcagctatgcattgggaagcaatgcagaagacaaaccaattaaaa

SEQ ID NO: 622921 - DNA, 100 bp, Homo sapiens
aggctctacactgggatgcatacggtcctgctctttgtgctatggaagtgcttcctcttgcactaccttctccacctcgtcaattatcagaatcagaaaa

SEQ ID NO: 622922 - DNA, 101 bp, Homo sapiens
gctcaagaaattctgcaagcacgcttcccgatgccacgttacatcaacacggagcatggaggcagtcaggttaagaatagacccaccagcatttcgtggga

SEQ ID NO: 622923 - DNA, 100 bp, Homo sapiens
ttacggcgaagtccacccagcgtttctcaggacgggagtatgacaaggacgggaacctccggccatggtggaagaactcatccgtggaggccttcaagcg

SEQ ID NO: 622924 - DNA, 75 bp, Homo sapiens
ctcacatcctcacccattcccaccgggtgggatgccccatccagaatcctcactatggatgggctcattgaggac

SEQ ID NO: 622925 - DNA, 89 bp, Homo sapiens
ctcaaagggaacttggaaatgacattggcatccagattatccactgcagagttccatctggaatatgacaaattagaagaacggcctca

SEQ ID NO: 622926 - DNA, 100 bp, Homo sapiens
tggccagagttactcagctagacagtgacagacaacagtggaacttctgtggtgaactatgacaatgtagtggacacaggttctgaaacagatgaggaag

SEQ ID NO: 622927 - DNA, 88 bp, Homo sapiens
gcagaactgatgcaacttgacatggaagggatgttacaggtcgtagttcccccgctccctgggaaagcgtttttgcgtcagcttcctt

SEQ ID NO: 622928 - DNA, 60 bp, Homo sapiens
cactgcggttggtgccattcgctacaaagcgagcatgacctgggggaggacatctacgac

SEQ ID NO: 622929 - DNA, 90 bp, Homo sapiens
gtcgtggaagcaggactgcgccgcgtcttcctcaagagttatgcccagccaagtcttcagtatatccaggggcaacagattttcacagct

SEQ ID NO: 622930 - DNA, 100 bp, Homo sapiens
agtgcgctgcaggatttgtgaaaatccatcttgaggactctcctaggctcaggctgcacgaagaaaaggttattaaagatagacgtcatcatctcaagac

SEQ ID NO: 622931 - DNA, 85 bp, Homo sapiens
cagatcgggagcgcaaggtcgccctcaaggccatgatcaaaaccaggttcacaactacatgatgccacccctcgaccgaagctgg

SEQ ID NO: 622932 - DNA, 83 bp, Homo sapiens
cggcgatccgggcgctcgagacttaccagagccacaagaacatgaaaggctcccggagcagcgctgactcctccaggaaacac

SEQ ID NO: 622933 - DNA, 100 bp, Homo sapiens
agaagatgaagaaacccagcttgatatgttggtaaaaatgttgtacatcagctctcagtaaccctagaagacttatataatggtgcaacaagaaaactgg

SEQ ID NO: 622934 - DNA, 50 bp, Homo sapiens
ggaacatttcaccaattttaaatcggactatatcatcatgtacatagaaa

SEQ ID NO: 622935 - DNA, 100 bp, Homo sapiens
cccacaggctgctgggaggagagcataaggtggttcatataaaaatggtaacacctagaggtataatagaaaaaagctgtcaaggacctcgtatgtcaac

SEQ ID NO: 622936 - DNA, 74 bp, Homo sapiens
ctcaaactctatttgccaaaggaaacttgccttatcaccttcttgcttgcagagccatccaaaactctgtttgt

SEQ ID NO: 622937 - DNA, 101 bp, Homo sapiens
ggcagaggcacttatgcttgtcaggcaaggaaacttggagctgatttaattattctgcagtgttctactgcaagttgaccagtaagaacatcttcgtttca

SEQ ID NO: 622938 - DNA, 51 bp, Homo sapiens
tgaaagtggacttaacttttaaggtgattcgttggaaaaattcattgtctc

SEQ ID NO: 622939 - DNA, 83 bp, Homo sapiens
attcccgggaggggggagcggcgttggaggccaccgtttccagtttgaaggatgacctctaggaagaaagtgttgctgaaggt

SEQ ID NO: 622940 - DNA, 100 bp, Homo sapiens
gtctcaccgttacccggggcaacagctgagccgtctgggaagggatgcatctcatgcttttcacttccactgcatctctcgctggctcaaaacacgacag

SEQ ID NO: 622941 - DNA, 75 bp, Homo sapiens
agtggctaatgctgatatcataaatgtgaccttggagaaggtgctgggaattacagtgtctggaggcagaggact

SEQ ID NO: 622942 - DNA, 83 bp, Homo sapiens
tatctgtaaagggtatctgatcaagccaacaacagtgacggaatgcctccatacatatttcctcctctgatgctcctcttcag

SEQ ID NO: 622943 - DNA, 75 bp, Homo sapiens
agatatctgcaatgatgtactgctctacattaatcatactcctccaccactgtccaagagtaaggagagagaaat

SEQ ID NO: 622944 - DNA, 82 bp, Homo sapiens
ggatgtggtttccgttaagctggacaacaggacatggatttgattgacatactttggaggcaagatatagatcttggagtaa

SEQ ID NO: 622945 - DNA, 89 bp, Homo sapiens
ggatccaggataacggaggctgggcaaaagaatggaccccagcaggaaaagcaaagcaagagaattctgctaagaagttttattctgaa

SEQ ID NO: 622946 - DNA, 83 bp, Homo sapiens
ccacacggctgacattagctcccactttcaagaagcaatagacttcattggtttgctgggatgggaaacctgctcaaagtcct

SEQ ID NO: 622947 - DNA, 75 bp, Homo sapiens
acgaacctggacattgaggagctcaaggtaagaatgattgatgttggctgatattggagtgctcattcacatgaa

SEQ ID NO: 622948 - DNA, 49 bp, Homo sapiens
attagacaactaagtagcctaaggttacgactcactgattaaaaagagg

SEQ ID NO: 622949 - DNA, 82 bp, Homo sapiens
tcaaatataggcattctgatgggaacttgtgtgttaaagtaacagatgatttagttgcaggtaaagtgaggaaacatgcaac

SEQ ID NO: 622950 - DNA, 100 bp, Homo sapiens
tgacacaaggaatgtgaaagaaaccacagagtacttaaaaacatcatggatcaatctcaaacaaaggcaagagggcacattgggagattcagcttgcaag

SEQ ID NO: 622951 - DNA, 75 bp, Homo sapiens
gccgtgcgtactacaccctcaacgtgctgcgggatgacatcgataacccgtgcgggagctgatggatgctgagtt

SEQ ID NO: 622952 - DNA, 96 bp, Homo sapiens
ggatttacagtttaagaattatcagcagctttttgattatatgaattctcagtccaagtttaaagttaagaggatgccagcccccatcagattgcg

SEQ ID NO: 622953 - DNA, 50 bp, Homo sapiens
ttgctcttcgagggcgagaagaaataactgataccgtgcttccagaagat

SEQ ID NO: 622954 - DNA, 74 bp, Homo sapiens
acagcagcttcctctcctctcttagacctttcctcatccatccttacccgacctgggatggagatcaccaaaga

SEQ ID NO: 622955 - DNA, 73 bp, Homo sapiens
caagacctcatcaacaattaaggcatatggttgatgatatgctaagtgcagatgatgtcagttgtagtagctc

SEQ ID NO: 622956 - DNA, 101 bp, Homo sapiens
gcaggacccggtctcgggaccagccgttggttagtctgctgctaattggaattgctgcgtggggcattggcttcgggctgatttccagtctccgagtggtc

SEQ ID NO: 622957 - DNA, 100 bp, Homo sapiens
catgatgtgatgctggagaccttgacacttatatcctccctgggagcgcctggaccatgctgctgagcgcctactggcacggcctccacccgggctacta

SEQ ID NO: 622958 - DNA, 100 bp, Homo sapiens
tccccaaagtgtgtccagagttatgcaacttgacccaggttctgagttctgtccgcacagaatgggacccactggatgttcgctttggcaccaaacagcc

SEQ ID NO: 622959 - DNA, 100 bp, Homo sapiens
aatgtcgtgtgctgcagaagctgggagcagacgctgttggcactgtctacagcttgtactcccttggctgggcctccttccccaggaattaagaccaaga

SEQ ID NO: 622960 - DNA, 100 bp, Homo sapiens
ctgacactatggacttcagacatgcagggtgacgacatagggcctgattacattccaacagaggaagaaaggagagtcttcgcagaatgcaatgatgaaa

SEQ ID NO: 622961 - DNA, 100 bp, Homo sapiens
ctttgtggagaaagtcgtcttccacttgcacgaaagctttcctaggccaaaaagagtggttggatttcatcccttactggtctcaaccaaaatattcctg

SEQ ID NO: 622962 - DNA, 75 bp, Homo sapiens
ccagcatcaagatgatttatggtaataaggaggtgaaacagcagaaatgcctgacatgtatccccctggagagta

SEQ ID NO: 622963 - DNA, 123 bp, Homo sapiens
gagtcgccaggcggccgtcatggcggtgtcggagagccagctcaagaaaatggtgtccaagttcttcaggagagaataccatgggtaccacctgaatgcattgaaaatcctaaaaatttaaat

SEQ ID NO: 622964 - DNA, 100 bp, Homo sapiens
tctgatgggctatttgggtgatacccagtgcagtgaactgcaggggcctttacaacaactaaacggacaggcattccagccccacgggaattttcagtaa

SEQ ID NO: 622965 - DNA, 49 bp, Homo sapiens
ggaaggggtcctcagagttactggggacagtcattttgtttactcattc

SEQ ID NO: 622966 - DNA, 50 bp, Homo sapiens
tcgagagctaccgcgccagacagtttcactgttacatgccttgaagtgat

SEQ ID NO: 622967 - DNA, 75 bp, Homo sapiens
gccactgctgctccgtggagatcgtcccgcgcctgccgctctggcaggctgccctgagcacgctcaaccccaacc

SEQ ID NO: 622968 - DNA, 100 bp, Homo sapiens
tccctttccttcccggcgctttcctgggttgcttctggcggccctggtgttgctgctgtcctccttctccggcgcctgtgtctggcagagctggtgtgag

SEQ ID NO: 622969 - DNA, 101 bp, Homo sapiens
gctactttgttggatgaagacatctgggaggagatccaggatggaggatgaagctgtcctggacagaggggcttccttcctcaagcatgtgtgtgatgaag

SEQ ID NO: 622970 - DNA, 100 bp, Homo sapiens
gcagaggaagtagtttaaatgatacctatcactcaagagactcttcatttagattggattctgaatatcaggtgatgatgaacagtctacacagatggct

SEQ ID NO: 622971 - DNA, 82 bp, Homo sapiens
ggagaaccattaatcatctctaagactaatagggatgccaaaggaaaaatatgatcctccagatcctcgcagaatttatacc

SEQ ID NO: 622972 - DNA, 83 bp, Homo sapiens
tgaagttcgagcactaatatttaagaaagaagatgttaactttcaggtggagtgcagcaacaaagacctccattctggggtgt

SEQ ID NO: 622973 - DNA, 90 bp, Homo sapiens
cgacgacgttcgtcatttagtgcgggagggatcctgaaccgcgcggccgaaccctccggctctgctgccatgaaggtgaagattaagtgc

SEQ ID NO: 622974 - DNA, 75 bp, Homo sapiens
gtgattgcacacgacgtggatcccatcgagcctggtatcgccagccttaaggtgtctggagcccccacacttggc

SEQ ID NO: 622975 - DNA, 100 bp, Homo sapiens
tccctctcttcgcggagcggcgccgcgtagcttccatccgccagctgccatgagcgagcgcctccgtcccagaaagacgagaatccaggacttgaatcgt

SEQ ID NO: 622976 - DNA, 101 bp, Homo sapiens
accactcaagagtcataggattagatgatccaagtcaccaagaaattactgtctcaagtgatacgtatgaagtgtaacagaacagactttaccacctgaaa

SEQ ID NO: 622977 - DNA, 50 bp, Homo sapiens
accattcttcatctgcctgaaaagaccgctgatgaggaggaggaccagcc

SEQ ID NO: 622978 - DNA, 75 bp, Homo sapiens
ctgtgtccagccagggatacatgccctacctcaacaagtacatcctggacaagcaggttcacaactacatgatgc

SEQ ID NO: 622979 - DNA, 100 bp, Homo sapiens
gggctgagcttcctggagaagaggaagggtttgtggcatcatcatcccctggaactatcccctgatgatgctgtcctggaagacagctgcctgcctggct

SEQ ID NO: 622980 - DNA, 100 bp, Homo sapiens
ctgcgatggacagaataactgtcaagacaacagtgatgaggaaagctgtgaaagttctcaaggatcaggagaaggtctggggaaaataatccagagattt

SEQ ID NO: 622981 - DNA, 75 bp, Homo sapiens
gcggaatcggggagcgtccggagctagctggatcctctaggcaggaaacaagattttggtgaagcagtcgcccat

SEQ ID NO: 622982 - DNA, 87 bp, Homo sapiens
tggaacatggctagcaggaatgcttactgttgcgtggttcgttattaacaggataacaaagccattgacctttgccgattgtgttgg

SEQ ID NO: 622983 - DNA, 75 bp, Homo sapiens
ggctccaggagtcctgtgactcaggtcccaggaaggtggcgtcagcatctgcagccgcgtcgacgttgtcggagc

SEQ ID NO: 622984 - DNA, 75 bp, Homo sapiens
aaggaactgatagcttatggttctccattgtgatgaaagcacatggtacagccttcacagttgttgatcacatag

SEQ ID NO: 622985 - DNA, 94 bp, Homo sapiens
cagtgattcccggaccctggaagagaagagggtggctaatgattaagactatccccataaatacggtcctcaggggggctgtgcagatcattca

SEQ ID NO: 622986 - DNA, 74 bp, Homo sapiens
ccagaacgacctgatgggcacggccgaggacttcgccgaccaggttaattatagaaaatgccaagtaggaaatt

SEQ ID NO: 622987 - DNA, 75 bp, Homo sapiens
agttgatgcgtcttccatttgcaaggatttggtgctatggagaaatttttggtagaatataagagtgcagtggag

SEQ ID NO: 622988 - DNA, 90 bp, Homo sapiens
tccgggaaacggaggaaaaaaagagttgcgggaggctgtcggctaataacgaatcttatcttggctttggatcttagaagagaatcacta

SEQ ID NO: 622989 - DNA, 83 bp, Homo sapiens
gaacggacaagtgttttttgttgaggcttccgttacaagatgaggtctgtgtatgctcacttccccatcaacgttgttatcca

SEQ ID NO: 622990 - DNA, 98 bp, Homo sapiens
gcaggagcctgtcatcccgccgcagggcatccgcttcgatcctgaaattccgcaaacactacgactagagtttgctaaggcaaacacgaagatggcca

SEQ ID NO: 622991 - DNA, 100 bp, Homo sapiens
acccctacgggaacccacgaccattatatgctggaatggttccttgttgcccccaagtttcctggcagtgtgtgatactgaggaggtgagcttgtttctg

SEQ ID NO: 622992 - DNA, 136 bp, Homo sapiens
caatggctgtggcaagaagttcagcctcaagcatcagctggagacgcactatagggtgcacacagacggtgtgaagggagacctgctgattgacatcggctctggccccactatctatcagctcctctctgcttgt

SEQ ID NO: 622993 - DNA, 100 bp, Homo sapiens
ggaggaatggcaggacgaagatcttcccagccagtgagctcctccgacagcgaggcccccgaggccaaccccgccgacggcagtgacgctgacgaggacg

SEQ ID NO: 622994 - DNA, 75 bp, Homo sapiens
tctgtatatagtgtccatgcattgacattactctctgagactgtccaggacggccggcagtttctaaagtatgtt

SEQ ID NO: 622995 - DNA, 90 bp, Homo sapiens
gtcttctggaacagttcaaatcccaagacatgtcatccagtgacagtgactcggactgggatggaggcagccgtctttcaccatttctac

SEQ ID NO: 622996 - DNA, 50 bp, Homo sapiens
gggggctccccctcgagatggaaaaggtagctacagcaagctgggtagca

SEQ ID NO: 622997 - DNA, 100 bp, Homo sapiens
ccggattggggatgagtatgcggaggacagctctgatgaggagcttcggaaccaaaaagaagcttcccagagccggggccaggagccccaagcgccctct

SEQ ID NO: 622998 - DNA, 100 bp, Homo sapiens
tacaaggagtatatcatgaaaattctacttcaaagacaacgactgaaagacctttcattcagaagctgtttcgtcctgtggctgcagatggacagttgca

SEQ ID NO: 622999 - DNA, 98 bp, Homo sapiens
tttaattttagggtcctttatatagaagggagagtagacagtgtttaagaatgaaagcctcaacgcagaatcaaaatctggctgcaaacttcaggagc

SEQ ID NO: 623000 - DNA, 95 bp, Homo sapiens
ggactctttcacaggctggatgaagattgggtgctgggattacaagcgtgagctaccacacccagcgaggaagccaagtttaacgtgtgtgctcc

SEQ ID NO: 623001 - DNA, 96 bp, Homo sapiens
agaatacatccaagcaatgattctagtgaatgaagcaactataattaacagttcaacatcaataaaggaaggtgcttcctggaggggcctgcccca

SEQ ID NO: 623002 - DNA, 75 bp, Homo sapiens
gcggcgtcgagaggaccatcctgggtgctggccctgtgctggaggcctcccccagggaagaacttcactatgcct

SEQ ID NO: 623003 - DNA, 75 bp, Homo sapiens
aaggtgctaaaattgaaagtggactatttaatagctaggtgccagctgctgcccgtgctggtgccattgccccat

SEQ ID NO: 623004 - DNA, 100 bp, Homo sapiens
aggggctctccctgggaggatctgacggagggccgcggcgagtcctttgcacatgttggcaacacacgcatccgcatcggcctccctgcccacaaagcgc

SEQ ID NO: 623005 - DNA, 82 bp, Homo sapiens
cccgtcccgaccctggccgccccgagcggagcctggagatctgcttggctttgaggaagagtggcagtactgcctcactgca

SEQ ID NO: 623006 - DNA, 100 bp, Homo sapiens
ggagacgacgctgctgggtccgctgagcggggcgacccgaggtgcctgattattacaaaataattaaaaatccaatggatttgtcaaccatcaagaaaag

SEQ ID NO: 623007 - DNA, 76 bp, Homo sapiens
atggcagttatggctatggtgatcaaagatgaccgtcttaacaaagaccggtcaagtttacccatgggggaactgg

SEQ ID NO: 623008 - DNA, 100 bp, Homo sapiens
gctgaaaggccagttcacgacgggtcttgaaacagttgcctccaacccaggaatgcctgtgaagtgtctaacttctaatttactccagtctaggaaaagg

SEQ ID NO: 623009 - DNA, 50 bp, Homo sapiens
ccaagacctcatcaacaattaagaggttggaaagaaccatgactgtattc

SEQ ID NO: 623010 - DNA, 90 bp, Homo sapiens
caagggaaagaaccctggctggggaaaagggaagtgaaaagagatctgttttcagaagtctggaaagtagatggtaacatgatgtggcac

SEQ ID NO: 623011 - DNA, 100 bp, Homo sapiens
aaatgaagattttaggcggtatcaaatggaaagtttttccaaatattcatctgtacagagaatgggacattttagagactgaagagcattataagagccg

SEQ ID NO: 623012 - DNA, 75 bp, Homo sapiens
ggattccaagtaactcttatttgggggagacattggacaggacagctctgatgataatcacagcgggactcttgg

SEQ ID NO: 623013 - DNA, 83 bp, Homo sapiens
ttcccagaaagtccaagctcgtggtgggtggaaaagtgttcgccgagatggaaaatccccactcactgctcacgatgccagac

SEQ ID NO: 623014 - DNA, 83 bp, Homo sapiens
ttccaagagggcacgtgggtcggcgtggagctcgacctgccctcagacctgcctagagctggaacgttacctccagagcgagc

SEQ ID NO: 623015 - DNA, 83 bp, Homo sapiens
ccccgaacgggggtcttcctcctccgccgttgacagggagaactggagaagttaaatcagtccacggatgatatcaacagacg

SEQ ID NO: 623016 - DNA, 100 bp, Homo sapiens
tacggagcacgaaaacaagtccgacagtgagaatggctcataaacctctctgatgagtcctgccagtgttttcttagatcccactgttgagacaatggag

SEQ ID NO: 623017 - DNA, 100 bp, Homo sapiens
atcaaagtggtgggactcgcgtcgcggccgcggagacgtgaagggcggcgactggcggcgcgatggacctgaccgggctcctgctggacgaagaaggcac

SEQ ID NO: 623018 - DNA, 75 bp, Homo sapiens
gctcgctgggagagaggtacctctccttttccctctccctttccctaagattttaccaaatgttgcaagaactct

SEQ ID NO: 623019 - DNA, 51 bp, Homo sapiens
caccaacgagatcttccgccactacgaaccggagagcaatggtgtgatctc

SEQ ID NO: 623020 - DNA, 101 bp, Homo sapiens
gatggcatcatttttgccctcaaaagaaatggcagtgaagtaagaactctgctagagaggaaatggctgcttcatcatcatcctcctcagctggtggggtc

SEQ ID NO: 623021 - DNA, 75 bp, Homo sapiens
gcccaggtgcagctgaacgtgcagtatgtatcggcaagcagtgtaaacggaggacttggggaaaaaggaccacat

SEQ ID NO: 623022 - DNA, 90 bp, Homo sapiens
gccccctcccagttcccctggaggatctgcctttcactactttgaaggcaatttcttgcaaccaccaccgaggccccgaaaagcactggt

SEQ ID NO: 623023 - DNA, 128 bp, Homo sapiens
cgaagcactcgttccgggggtgaagcctcctgcgccggccttgcctcgggttctttcatgctggtgaatgcctctgggagacctgaggggcagagagcccacctgctcttaccccaacttaaagaaaa

SEQ ID NO: 623024 - DNA, 96 bp, Homo sapiens
acttgctccttccagaagcaggttgctggcaacagcatcagggagaatggggccaagaaatgcaccgcacccagaccaagttcgaggacgccttca

SEQ ID NO: 623025 - DNA, 74 bp, Homo sapiens
atactacagatttggagaaatgcagtttttgcagggcactatggcaatttgaatgcttagaattttaaacctga

SEQ ID NO: 623026 - DNA, 100 bp, Homo sapiens
cggtccttggggagacgcgggtcccagtcctgcggctcctactggggagtgcgctggtcggaagctggctctgaagcaccgacaaggcaagaatcacaag

SEQ ID NO: 623027 - DNA, 100 bp, Homo sapiens
tccttccttactttgtcttggtatactacatggcaaaatgggaaaggtcatgatgatgggcagcgcccgagtggcggagctgctgctgctccacggcgcg

SEQ ID NO: 623028 - DNA, 95 bp, Homo sapiens
ccgctcctaagcctgcacagccgcggcggcagcagcagtgagaggcccgcgatgctcccagcccggtgagacctgcctgaatggcgggaagtgtg

SEQ ID NO: 623029 - DNA, 51 bp, Homo sapiens
ggttcacaaaacaagtgtagtagccgaggcctgcctggagccccagatcac

SEQ ID NO: 623030 - DNA, 90 bp, Homo sapiens
atcaagatgatttatggtaataagaaaatgatgcatcctgttgccagcagtaatccagctttctgtgggcctggcaagccttcctgcctc

SEQ ID NO: 623031 - DNA, 100 bp, Homo sapiens
ccctcagcctgcggatgtgaggctgatgaagaggaaaacaggctgccgtggggtgtgtgtaggcttcagagacatgggatcacggaagactgaagcagaa

SEQ ID NO: 623032 - DNA, 100 bp, Homo sapiens
gaataatttctttctcgctgatcgcctaacttctactgacgaagcttggaagttgcagaagccatcagcccacaaagacatgactaccaacgcgggcccc

SEQ ID NO: 623033 - DNA, 75 bp, Homo sapiens
ccaggagccaggggcccagaagggtctcactgtgtcacccagcggtggagtgacacggagtgtcagcggtgcaat

SEQ ID NO: 623034 - DNA, 90 bp, Homo sapiens
ccagatcctaaacatgcgaggaagctccatcaaaattgtcaggcatatcatcaaggatttgcgaaatgatccagaaatcggtgtcctccg

SEQ ID NO: 623035 - DNA, 82 bp, Homo sapiens
ctcgagacttaccagagccacaagggccgagaactactggtggcgtggccagaacacacggacgctgtgtgtggggcccttc

SEQ ID NO: 623036 - DNA, 82 bp, Homo sapiens
gaggacccagctaagccacgttcaacttcctgacctgtcagatggcagtcttgggcacgtccatctgtaaacctgctgagag

SEQ ID NO: 623037 - DNA, 100 bp, Homo sapiens
caaggaagaaattgatattttgatgaacaatattgaacgctatcttaaggagaattcctgcactcaggccacaaaagttaaagaggagccatctgtctgg

SEQ ID NO: 623038 - DNA, 90 bp, Homo sapiens
tcagtctatgacaacgtctctctgccgtgaatcattcctgcagatgaaaaagtgtgacttggcagctgcttcagaagctgcttaccatgg

SEQ ID NO: 623039 - DNA, 80 bp, Homo sapiens
tgactctgtttcagccatcttcgataaaggcaaaaagtttttcagaagaagtgaagtcaagatgaagaaccatttgcttt

SEQ ID NO: 623040 - DNA, 74 bp, Homo sapiens
cctcatgccaaagaccatcatgcacctcatgatcaacaatcggtacctggatgaggccgagagagagaagcagc

SEQ ID NO: 623041 - DNA, 96 bp, Homo sapiens
aggtctcctgaatacctctcattatttattgatgataagctgaaaaagggagtcaaaggggtgggtttggaggatttgggacaacatctacaactg

SEQ ID NO: 623042 - DNA, 73 bp, Homo sapiens
aattattcgaaactcagggcaaaatcaccacccctctccacaggaatacagattcatgatgttgctatcaaaa

SEQ ID NO: 623043 - DNA, 100 bp, Homo sapiens
cttgggaatatgttggccaagaaccttctatttgaaaaagggttccccactgaaggacttggtccagctgtctggcagggaggagagacagaagctctgg

SEQ ID NO: 623044 - DNA, 95 bp, Homo sapiens
agcctgtgcagcactggtgccgtgccccgaggccagacggccggctctgtgagcgccaagaccggctgaagggctttgttcgcgggggtcacagc

SEQ ID NO: 623045 - DNA, 75 bp, Homo sapiens
acaaccaatgtgcgtctgaaacagctttttatgcagattgaagctctctttccacaaaaatttggaagatggacc

SEQ ID NO: 623046 - DNA, 51 bp, Homo sapiens
aagcctgcctacagttttcacaaatctgaggtaggaaaagtaattggaatt

SEQ ID NO: 623047 - DNA, 90 bp, Homo sapiens
tgcaaggaagcctggttcagcaggtggccctaaggttggaggaaggaagtttgttaacatcctgatgtgcttttggtatctaaccagtgc

SEQ ID NO: 623048 - DNA, 100 bp, Homo sapiens
ttcctcctccttataaagctctgactgatgacagtgatgaaaatgaagaagaagatgcctttaccgaccgcaagctgtggattttctgagcaatgagggg

SEQ ID NO: 623049 - DNA, 100 bp, Homo sapiens
tcctagggacagggaaactgagtcatatcaaggtggaaggcagctgaagcctaaaatgaccaatgtgtgatttcagtggaataaatggcgtccaaagtca

SEQ ID NO: 623050 - DNA, 90 bp, Homo sapiens
ggcggacgagaaggacagggaaggtgctggagaatctggtaaaagcaccattgtgaagcagatgaggatcctgcatgttaatgggtttaa

SEQ ID NO: 623051 - DNA, 82 bp, Homo sapiens
tgatcgccttcaactccgaccgtcctgaaacaggtggcatctgcatcgcaccacggccctcggaagaaggggcggaaatcct

SEQ ID NO: 623052 - DNA, 97 bp, Homo sapiens
ccaggaggcatttgaagttccaagcatgcttgagaagggaggataaaaactttcagaatgagcaaaacaccatcaacgttaattccagagatggaac

SEQ ID NO: 623053 - DNA, 80 bp, Homo sapiens
gaagagtcttgtccacagctggcaaattcagtgcagatcaggccatcaccatcgaggctgagccaagagctgatggcagc

SEQ ID NO: 623054 - DNA, 100 bp, Homo sapiens
gccgagccatcccaattaaacaggaagagaggatggtgatgcaccggttacaaaagatgagaccacctgcatttcacaagacacaagagctttatcggag

SEQ ID NO: 623055 - DNA, 96 bp, Homo sapiens
ccgcgctcagcgacaaacaaagctgagctcaatgtgcagcaatggatgacgacagcctggatgagcttgtggcccggagcccagggccggatggac

SEQ ID NO: 623056 - DNA, 73 bp, Homo sapiens
agcctcccgagtagctgagattacagatctattaatgagatgaagcggttggaagaaatgtcaaatatgtttc

SEQ ID NO: 623057 - DNA, 89 bp, Homo sapiens
aggccccatcaggtgcagagctgtgggtctggttccaagacactgtcactgagaaagcggagggaaaggccacttccaccactgagctg

SEQ ID NO: 623058 - DNA, 98 bp, Homo sapiens
agccgaggcctgtggttctgcagggcatgcaggtgcgccgggtgcccctggagatcccggagccaagcccctttgaagggaaaacgagcacagaacca

SEQ ID NO: 623059 - DNA, 82 bp, Homo sapiens
ctggttatagatggacaagagacgatcattctgcaagcaggcaacctgaatacaggtaatctgtaagtcagatgctccaaca

SEQ ID NO: 623060 - DNA, 100 bp, Homo sapiens
agccgggagactcgcgcagcgccatggcccccattggcctcaaagctgttgtcggagagaatcagcttgaacgggtctttttacgacttggccatgctga

SEQ ID NO: 623061 - DNA, 100 bp, Homo sapiens
agtggattggcctgcctaccaattctgctcaggaatgtcagaatctggaggaggcaagtgaggcctatctggttggcctttttgaagacaccaacctgtg

SEQ ID NO: 623062 - DNA, 100 bp, Homo sapiens
cgcgcctgtcctggatcgacaccctctacagcaattctgaggatgacggagagtccgaggcggccaagcagctgattcagccgatagctgagaaaatcat

SEQ ID NO: 623063 - DNA, 99 bp, Homo sapiens
cgcggagcccggctcccgcaccatggaggaggacgacagctacgaaaactgattgggaggtagctattaaaagtattaataaaaagaacttgtcaaaat

SEQ ID NO: 623064 - DNA, 107 bp, Homo sapiens
gtagagctgcattctgctcagtgggctgccgagaaggaccagaccgaaacaagatttagaagaattctggctgacttatccttgtataatgaattccgattgtggaa

SEQ ID NO: 623065 - DNA, 90 bp, Homo sapiens
agaaggtgctggacccgaagaaggacgtgctgacccgcctgaagcacctgcgggcgctgctgggtttgcctgcaatgagatttcattctc

SEQ ID NO: 623066 - DNA, 90 bp, Homo sapiens
cgaatcgtgatcttcacccaagggagagatgacactataatggctacagacagagctcggatagagagtccagccttttctactctcagg

SEQ ID NO: 623067 - DNA, 100 bp, Homo sapiens
cgcgtcgcgatcgcgacggctacagctacggaagccgcagctgccgtgtggaatccatctacctgaacgtggagtccgtctgcacacaccgggagaggtc

SEQ ID NO: 623068 - DNA, 100 bp, Homo sapiens
aagacctggaaaaatggcagaataatctgcttccatcccgccagtttggccttgagagcccctggagcagagaagcagctaacctgtgcctggattcctg

SEQ ID NO: 623069 - DNA, 98 bp, Homo sapiens
ccggaagcagcacccctacacgttcccgggtggcagtggcactgtctttgcccggaggcaagtgaggcctatctggttggcctttttgaagacaccaa

SEQ ID NO: 623070 - DNA, 75 bp, Homo sapiens
tgctgctgcccctgctctcagctctggtcgcggcggctatcgacggcacccagtggcaagtactagctgagcatt

SEQ ID NO: 623071 - DNA, 75 bp, Homo sapiens
atctgtcgcgccaggaccagcagtctcttcaagaaaatgaggaggaggagattgggaacctagagcttgcctggg

SEQ ID NO: 623072 - DNA, 75 bp, Homo sapiens
ctgcggaagcccagacaccaggaaggtgagatcttcgacacagaaaaagagggccgcgttcgcaccaaaaccgtg

SEQ ID NO: 623073 - DNA, 83 bp, Homo sapiens
ttttttcaggcagaaaacaagtctcgtctggacgaaagtttcctacactactgaggtttaggggcactgtgaagcaaaagcca

SEQ ID NO: 623074 - DNA, 75 bp, Homo sapiens
ctacagcatcgtgggcgccggctcccagtttggccctgggcgctgcctatggcacagccaagagcggtaccggca

SEQ ID NO: 623075 - DNA, 90 bp, Homo sapiens
ttatcaataatactttaatgtcattatcagacctacctggtggttctgtgccttcccctactctcttctcatcttcgtatatgacgaagt

SEQ ID NO: 623076 - DNA, 98 bp, Homo sapiens
actgtgcttatgttggtgacatcgtggacattccaggaacctctgttgccatcagcaactgtgatggtctgttcagagcctagactgggagacctttg

SEQ ID NO: 623077 - DNA, 89 bp, Homo sapiens
tattttgtggaaagttccaaactgtctgatgctggagctgaagaagcaggtggagagtgccgagctgaagaaccagcggctcaaggagg

SEQ ID NO: 623078 - DNA, 76 bp, Homo sapiens
ggaagtgcggagccagcctgagttgggagaagagctccagagagagtggagtcaacatatcaatggagcaagtcac

SEQ ID NO: 623079 - DNA, 98 bp, Homo sapiens
atagaagcacattgtttccagaatgaaaaggtcactgccatctggagtggatggacacacctggttgctcagacaggaggaaatgagtctcaaccaga

SEQ ID NO: 623080 - DNA, 83 bp, Homo sapiens
tgctggaggacgagggccagctgacggagatggtgcagaagatggaggagccttatgccagcctggaccatcttggaggcagt

SEQ ID NO: 623081 - DNA, 82 bp, Homo sapiens
ggagacaggaattgagagtcacagaggaaggacagtggagtctggcatcttattgggccgccgtcccacccccacctcgccc

SEQ ID NO: 623082 - DNA, 100 bp, Homo sapiens
ccacctgtcctcaggcatatcaaagctcttttgaaacagatggtcaccatgtttagatattagcagtcccgtatgtgcatgtctgcatttgaaaatggaa

SEQ ID NO: 623083 - DNA, 75 bp, Homo sapiens
gaggagctggcggagagcggcctgcgggcgatcgggccgaggcaagccgattttttcagttgatattcaccctga

SEQ ID NO: 623084 - DNA, 83 bp, Homo sapiens
tcctgattcaagtgttggcggatggaagggaggagactcctgaccctcagaatgatgacagtcatgtccctttccagggacct

SEQ ID NO: 623085 - DNA, 82 bp, Homo sapiens
ccatcacggcggccgcagtggcgtcctggagccctcctcagatttcccggcaccttcgtgggcaccacagagcccgcctccc

SEQ ID NO: 623086 - DNA, 75 bp, Homo sapiens
ggtcgccacctggcgacccttcccctccagtcacctgggtgaaaggtgtagcagtcactcggcctacacccacag

SEQ ID NO: 623087 - DNA, 100 bp, Homo sapiens
agattttactgctgaagattatgaaaagatgttgatgatggagacacagtgacagatttcatggcccaagagcgagaaagaggcattactattcaatcag

SEQ ID NO: 623088 - DNA, 75 bp, Homo sapiens
ggcagcttctccgagaccccaacaccccactgttgcaagatgactctggggacgacgacgaggctaccaccccag

SEQ ID NO: 623089 - DNA, 101 bp, Homo sapiens
tcactaattatgaatcagaagaactggatcttaccttgcccaccaacttcagagatttgtccaaggtgtgttctactccctcttctgggaatgaagcctcc

SEQ ID NO: 623090 - DNA, 100 bp, Homo sapiens
ccgccgccgcgaaggacagcctttccgcgcgggactccggggcgccacgggggccatgtaagcagatccgtaatgcctcctgcctgcctctttcaagatg

SEQ ID NO: 623091 - DNA, 75 bp, Homo sapiens
ccccagaaagcaatgataattcccaggacagtcagtctggtactaacaatgcagcggcccttctcagcattcctg

SEQ ID NO: 623092 - DNA, 100 bp, Homo sapiens
tcttgggagtgatttgcgccatcatcctcatcatcatcatagcaaaatgaagccaagttggatgagattttaaaagagatcaaatctataaaagacacaa

SEQ ID NO: 623093 - DNA, 113 bp, Homo sapiens
ttgagtagagtctgccagcgccacactgatgcccaggcacaggcatctgcaggggagcagatggaccctactggaagtcagttggattcagatttctctcagcaagatactcc

SEQ ID NO: 623094 - DNA, 75 bp, Homo sapiens
gactcggagctgagaggagctgctgctcggaccagcgcgtttccttacgccgccccacctccccaagaacccgtg

SEQ ID NO: 623095 - DNA, 88 bp, Homo sapiens
tccgggctacgctgcggggatggagaaccggtgtccagcggggctgcgggctacggctgttgtggtggtgaccgcggtggcttcaaaa

SEQ ID NO: 623096 - DNA, 100 bp, Homo sapiens
gttatccaggacgccctggacctaaggttttaggagaagttttagcacaacttctgcttcttcccaaaaggagattaacagaagaaatgctttttccaag

SEQ ID NO: 623097 - DNA, 90 bp, Homo sapiens
caggccaagatccacgctgacgcagagcggaaggagccacaatggtgcgcatgaatgtcctggcagatgctctcaagagtatcaacaatg

SEQ ID NO: 623098 - DNA, 100 bp, Homo sapiens
gtacaatttgatagtcattcgtaatcagcaggccaaagactcagaggccttccttcggtggctgccatctctgagcccagattgcatcaacgtcgtggtg

SEQ ID NO: 623099 - DNA, 80 bp, Homo sapiens
ccattggtaaattgatcaggatttttggcctaccctccaaagaaaagtaattcgccaaaatgacgaacacaaagggaaag

SEQ ID NO: 623100 - DNA, 83 bp, Homo sapiens
ctcagcgcagcgctgcggcctttcggcagccgaacggccgcggcaggagccttcacgtaaatgggtccagtcatgcctcccag

SEQ ID NO: 623101 - DNA, 97 bp, Homo sapiens
ccgttcctggagattctgattgaggtgcacgacgccagctcccttctggggggccggggcctgggggttgccatggcccccagccacctgtcagtgc

SEQ ID NO: 623102 - DNA, 126 bp, Homo sapiens
atgatcgcctcatgtggagggcaaagttgcgccggggaacttgtgagcctgcggtgaaaggtgcagctaaatcaagtccagcagctaaaccaggatccacaccttctcgaccctcatcagccaaaa

SEQ ID NO: 623103 - DNA, 98 bp, Homo sapiens
ttgaagtcaacattcgatttattggaggcctacttgcagcatattacctatcaggagaggaggtggcgacagacaaagttgcagaaaagctgagctct

SEQ ID NO: 623104 - DNA, 98 bp, Homo sapiens
gcgagcggctgcgggacgcgaggtttccggtaagactttgaccccgacgcaggcttcagtgattgccgcggatcagaagcctgagcactttggctcga

SEQ ID NO: 623105 - DNA, 75 bp, Homo sapiens
ccgctacgctcgccggggctgcggccgcccgagaccatcatggagcagttcaaccctagcctccggaacttcatc

SEQ ID NO: 623106 - DNA, 130 bp, Homo sapiens
cggaataattcatgaagaaggggctggatccgtgggtcagagaacacaggaccagtttgccatcccaaggccgaagataaataggatttaccaatccttggatgaagtgcttgggaagtctttaagtgcc

SEQ ID NO: 623107 - DNA, 97 bp, Homo sapiens
gagggtcttcctgaaacccgcagaggaaaattcaggcaacgcctcgcgttggcttcccagctggcgtgtatgttgtaaagagagttcttcagcttca

SEQ ID NO: 623108 - DNA, 101 bp, Homo sapiens
cggccatggcgtacgcctatctcttcaagtacatcataatcggcgacacaggacagctttcctgcccgctttggaggagtccactttgtcaaccagccctg

SEQ ID NO: 623109 - DNA, 100 bp, Homo sapiens
aggaacagggacagcacctcatcccctggatgggggaccacaagatcctcatcgacagaggcagttgctgtgggaggtgtggtaactgctggaaggaaga

SEQ ID NO: 623110 - DNA, 74 bp, Homo sapiens
tgacagtctgcatgtgcagttttcagaggtatatggaggtcagtgggaacctgagggatttgtatgatgataag

SEQ ID NO: 623111 - DNA, 80 bp, Homo sapiens
atcaaacaagaagtcgtcaccccagacaacatgtgcatggggaggaccagtcgtggaaagatgaatgggagggctgattt

SEQ ID NO: 623112 - DNA, 75 bp, Homo sapiens
aggtgcttggcaaaatcgagcgggccattggagcaggccgggctctcgccatgggtcactgtcgcctctgccacg

SEQ ID NO: 623113 - DNA, 100 bp, Homo sapiens
ctttcttggcatttttgaatacgcctaccgatgctctggatcaatttgaaggccaacattgcctagacaaaactcacaactacctgctcaagttcaaaat

SEQ ID NO: 623114 - DNA, 75 bp, Homo sapiens
catgttttgtacattccagaccaagcgggtcacagaaagtcgagagagccaaatgacgattgaggagaggaagca

SEQ ID NO: 623115 - DNA, 100 bp, Homo sapiens
atgcgggagagagaatgagccagagggacacgctggtgcatctgtttgccggaggattaaatctcttgatgaacagtgtgtggttggcaaaatttccaag

SEQ ID NO: 623116 - DNA, 90 bp, Homo sapiens
tcctccttgaagtatttggctgaggagttttcaatcccaatcagtgtgcgtgtgaccaccatggatgcagagctggagtttgccatccag

SEQ ID NO: 623117 - DNA, 100 bp, Homo sapiens
gtctcgctccgtggccttagctgtgctcgcgctactctctctttctggcctggaggctatccagctcaccttcaggccattcagaggaggaaagagaggg

SEQ ID NO: 623118 - DNA, 99 bp, Homo sapiens
atttagagctgcggaacaggacgccctctgattgcctatgattacacaataccacctatggagaaagctgttgtgaaaacggacattcagatagcgctc

SEQ ID NO: 623119 - DNA, 100 bp, Homo sapiens
atgagctcaactgctctctgcaggaccccagaagtggccgatcagccaacgcctctgtcatccttaatgtgcaatgaaagcagatggtggagctgaatat

SEQ ID NO: 623120 - DNA, 83 bp, Homo sapiens
atgaagttcgagcactaatatttaagaaagaagatgttaactttcaggaaagtgtgctgtgttgtcattcaaggacttcctct

SEQ ID NO: 623121 - DNA, 100 bp, Homo sapiens
gtgaccatcgaaaggagcaagagcaagatcaccgtgacatccgaggtgcctttctccaaaaggtcatcatcagatttgaaatatttaaagtggatacaaa

SEQ ID NO: 623122 - DNA, 83 bp, Homo sapiens
tcctgaaggaagccgcccgccccccaccgccgccccctccggcgtgttcatgcccccggggagggtgtgaagacagagaatga

SEQ ID NO: 623123 - DNA, 83 bp, Homo sapiens
ccgcaactctcagttcgagagtaaagatgtgtatatctcatgattgatatggagaaactagtcatgggccaaaggtcaagata

SEQ ID NO: 623124 - DNA, 83 bp, Homo sapiens
ggagccgtctgcaaagtgtccccggcaagaaggtcagtttgctgagaacgaaaccaatgaggtcaattttagagagatacctt

SEQ ID NO: 623125 - DNA, 82 bp, Homo sapiens
ctgtcagtcaatgcccgtgcccgcattgtggctgaagagttccttaagaataaaatgtggtgacctggaagaagaactcaag

SEQ ID NO: 623126 - DNA, 90 bp, Homo sapiens
gccggctgtctgatgaagagcagcgagaatggcgcgctggaggagctgatagacatggctgtgctggaggaaattcaacaggagctgatc

SEQ ID NO: 623127 - DNA, 51 bp, Homo sapiens
acccgctgagcgtcagaaatgggctccttcccgaactcacaaatcctgacg

SEQ ID NO: 623128 - DNA, 100 bp, Homo sapiens
ccggactcggcgggcatcgccctctacagccccacaatggtgcgcatgaatgtcctggcagatgctctcaagagtatcaacaatgccgaaaagagaggca

SEQ ID NO: 623129 - DNA, 75 bp, Homo sapiens
agagaagtcgtttaaagctcaaagatggacatcgaatcagtttaccttcaggagtgggaatagctttgcgaaaaa

SEQ ID NO: 623130 - DNA, 100 bp, Homo sapiens
ttcgaacgcccaggggtgggccaaacccgtttcttaggaaaccaggaatccagggaaggcagtggtgatcatgtgtgcgagcagtgacaccatccggagc

SEQ ID NO: 623131 - DNA, 80 bp, Homo sapiens
ataaaggcctcccatatcttatcagatttctgagttctgattcagaggtgtgttgcagtcactcattgaaaaacattttc

SEQ ID NO: 623132 - DNA, 148 bp, Homo sapiens
gcagaaagttgtggttttgttgcatcgcttacaaaggatggcagtttcttctcctcggtatcagaagctctgtaaggcaatggacctcatcatgaccgttgctgtacttacaatgaaaacaacttggtggatggtgtgtattgtctcc

SEQ ID NO: 623133 - DNA, 83 bp, Homo sapiens
gtcggacgtgggcgaggggcggggtgtctggactggaacctctgggcccacgtccagccctgctgggagttttctgccacaca

SEQ ID NO: 623134 - DNA, 90 bp, Homo sapiens
ccctgatccttgtgatcccaggctccaagagtccacccttcccagctcagctcagtacctcagatgcagacagacatgctgaactatctg

SEQ ID NO: 623135 - DNA, 82 bp, Homo sapiens
ctcattcagtgccatctcataccgctgatgaattcatccgagcaaatgccaccaacaagctgacagtcatagctgagcaaat

SEQ ID NO: 623136 - DNA, 100 bp, Homo sapiens
atccagggaaagtgttgaagaaaaacgacctcgattattaaaagccctgaaagaggagttattcctgatgaagctaaagctttgtctctgttggcaccag

SEQ ID NO: 623137 - DNA, 100 bp, Homo sapiens
aaacgtcttgaagagtttcaacttatgagaggtgacgagctcatcttcttggaccctcatacaacccagacctttgttgacactgaagagaatggaacgg

SEQ ID NO: 623138 - DNA, 50 bp, Homo sapiens
accgagaccgcggccgggaccgagggatgataatgaagataattcaaatg

SEQ ID NO: 623139 - DNA, 98 bp, Homo sapiens
tcctgagtagctgggattataggccccgcagggcgccccctgcctctgaggatgagtcactgcagcagccgcgccctgaccctgctgagcagcgtgtt

SEQ ID NO: 623140 - DNA, 100 bp, Homo sapiens
atttggagaagaatggaaagagaagactgatagagacttcgttaaggtaaagctttccagtttgaatttagatgatcacgcaaagaagaaattaattaaa

SEQ ID NO: 623141 - DNA, 100 bp, Homo sapiens
gacggtctctgccagtataaatgcagtgacgactaatagggatgccaaaggaaaaatatgatcctccagatcctcgcagaatttataccatcatgtcagc

SEQ ID NO: 623142 - DNA, 74 bp, Homo sapiens
gacaagtgtatggcagtctggagtgaagatggacagttctacaagctgcacgagcggaggtgtgagcccattgc

SEQ ID NO: 623143 - DNA, 97 bp, Homo sapiens
aaaacgccaggcggatctcagaaggccagttcaaagatggcttgttcaatcagtatatcagtcaacaggaatataagccacgatggagtcaaatcat

SEQ ID NO: 623144 - DNA, 100 bp, Homo sapiens
gggaatgctgccgtggtgaagcatgaagtcacagggctactgttttccaatcctcaggtggaatgcatccttgggacatctttgcatagccccatctagg

SEQ ID NO: 623145 - DNA, 100 bp, Homo sapiens
gacagtggaaagtacttgtgttatttccaagatggtgacttctacgaaaaagccctggtggagctgaaggttgcaggtcagaatggcggcagcggagcat

SEQ ID NO: 623146 - DNA, 89 bp, Homo sapiens
gcgccagagaggacgtttccaactcaaagatggctgcagctcctccaagttactgttttgttgccttccctccacgtgctaaggatggt

SEQ ID NO: 623147 - DNA, 51 bp, Homo sapiens
ctggagaaagatctgcaagtgcgcaggtactccaaagattcaggtttactc

SEQ ID NO: 623148 - DNA, 75 bp, Homo sapiens
agtatcttacaggagaacagactgaaaaaatgtggcagcgcctgaaaggaattgaatggtagtgtctagaaaggg

SEQ ID NO: 623149 - DNA, 75 bp, Homo sapiens
gagaaggttagctgttctctgatgggtttcgaaaaaacgatgaaatgaaagctatggatgttttaccaattttga

SEQ ID NO: 623150 - DNA, 74 bp, Homo sapiens
aggaccggcacaaggacgttctcaagtggggcgatgagacctaatctgggagcctgcaagtgacaacagccttt

SEQ ID NO: 623151 - DNA, 115 bp, Homo sapiens
tacgaagttgatgcttatgtccagaaatgaagaggccactaagcatttagaagtttatttcaatctacagaggacccagccacacctacaaggtccagagactgacggaattcac

SEQ ID NO: 623152 - DNA, 100 bp, Homo sapiens
ggtgatggcattggagaatggggcttaggcaagcctgtaggtatttcaggagccagcagaggaagaacgagatggcagaaaaaagaaatatcctagtccc

SEQ ID NO: 623153 - DNA, 96 bp, Homo sapiens
cccgcccggaacatggactctgactcttgcgccgccgccttccacccggagctgcctgtggaggaaccgattgtgtccacagatgaggtcatcttc

SEQ ID NO: 623154 - DNA, 80 bp, Homo sapiens
gaatggaacagcctgagggatgcccccctaaggtttatgaacttatgagagcatgcacagaccccacaggctcctcggac

SEQ ID NO: 623155 - DNA, 97 bp, Homo sapiens
ttcagtatctcagtcctccagtgtttggatattcagccccctccatcccatcggaagaggaaggaacaaaaggtcccggaccccccggatctgacgg

SEQ ID NO: 623156 - DNA, 83 bp, Homo sapiens
gttgcgatggcgcagaaaccccgttgacaaggcactgctttttcatgacgatgattaaacttcaggaagtatttaaggcattt

SEQ ID NO: 623157 - DNA, 101 bp, Homo sapiens
ttgtgcaagaggtactgtccatcaaacatcttccaccacagcttagaggaacattcctcgtgaaggactgtgaccagcatagaaaggctgctcagtgtgat

SEQ ID NO: 623158 - DNA, 88 bp, Homo sapiens
tagacctgaactcttcagataatcagagtggaggaagtacagccagcatgttctaagaacggaagcatctgggctggatggaatttag

SEQ ID NO: 623159 - DNA, 100 bp, Homo sapiens
agcaacacgatcggcgcccgcctgaaccgagtagaagacaagggttattcaaatgctcagaagactattcttctgcaggtggatcagaactgtgttcgca

SEQ ID NO: 623160 - DNA, 78 bp, Homo sapiens
agctgcacgcaagtgttaaacttctgttcctccaggccaaggatttggagtcccaccaggtggagcaggcttttctgg

SEQ ID NO: 623161 - DNA, 95 bp, Homo sapiens
cgaaagctacagcccagccatcccgattcccctggcgcggactctggcaccaacaaaactatctctttgaggtgggaccagggagattggatctg

SEQ ID NO: 623162 - DNA, 84 bp, Homo sapiens
attataaggggccaagaatagtgcttgctgctgctggaggggctcgttttgatgatggtgctggaggtgacaatgaagtgcaga

SEQ ID NO: 623163 - DNA, 74 bp, Homo sapiens
aagtcacagcccctcagcaccaagcagaagtctgaagatgatgagaaactgaaaaagaggaaggagcgatttgg

SEQ ID NO: 623164 - DNA, 97 bp, Homo sapiens
agtccggagtaacttggccaggctggccccgagcggaactggagaaagctgaggaaatggtgcgagaactttggatgtggaacgtggaggaggagga

SEQ ID NO: 623165 - DNA, 98 bp, Homo sapiens
ccaagcccgccacgccgcccagcccggccccgcccgcgccggaagagccacgccgggcagcccaatggatccaatggtgatgaagagacctcagttgt

SEQ ID NO: 623166 - DNA, 74 bp, Homo sapiens
tgaacaaactcgaagaacagctgtggaaagaagttgcaaaacactggagctccaaacgagaatggaagccgctg

SEQ ID NO: 623167 - DNA, 97 bp, Homo sapiens
aactttctctgcaattgcacaatcctcttatcctgatgccaggtgcatggctgcctcctaatcccatagtccagaggaggcatccctaggactgcgg

SEQ ID NO: 623168 - DNA, 100 bp, Homo sapiens
aagcccaggagttgacatttctctgcccagccatgggcctcaccctgctcttgctgctgctcctgggactagaaggtttttcgttggaatatacgttgca

SEQ ID NO: 623169 - DNA, 90 bp, Homo sapiens
cccgccggccgtctccttaacaccgaacaccgttgccaacttggcctgttccatctcaaataatgaagaaggtgtaaagcttgttcgaat

SEQ ID NO: 623170 - DNA, 85 bp, Homo sapiens
atcaaagacgaatttcagctactgcaagctcagtaccacaggtctattacaatggctaccatggagacacctctgaaacattttt

SEQ ID NO: 623171 - DNA, 82 bp, Homo sapiens
catgacacaaaagctgataccagagctatacagctgctattaggcagtgtggcaaaggagcagagaactttgacaagttctt

SEQ ID NO: 623172 - DNA, 90 bp, Homo sapiens
atggatttttgcatgagacgcttctggacaggttgaaatcacaaagattagacacctttttagataggtgttcttcagcaccactgacaa

SEQ ID NO: 623173 - DNA, 100 bp, Homo sapiens
gcgcgtgtgggaccgaggtggacatggatccgcaggcccccccaggatgcaatggcgcagcccccccggctgagccgctctggtgcctcctcactttggg

SEQ ID NO: 623174 - DNA, 75 bp, Homo sapiens
tcctggaagaaccgcaccctctgatgttccagaaactccaggaccaggcaggtgacaaacattaccaccccagct

SEQ ID NO: 623175 - DNA, 100 bp, Homo sapiens
gcagtgcagcgtgtgtggggtcgagcttcctgataacgaggctgtggagcagcacagcatcaagatggtgctcatgtggaccagtggtgacgccttcaag

SEQ ID NO: 623176 - DNA, 51 bp, Homo sapiens
cgaggaggaggaggaggaggaaaaaggctggaagattatatctggatcacc

SEQ ID NO: 623177 - DNA, 96 bp, Homo sapiens
ggagtatagatgacataggtcacctcattcatgaaggcctacagaagtgttattggagagcttacgccgtgggagatgtggagaaaatggctctgg

SEQ ID NO: 623178 - DNA, 75 bp, Homo sapiens
ctcctgagtagctgggattgcagatatgttcctaaaacatccctgagttcaccaccttggccagaagttgttctg

SEQ ID NO: 623179 - DNA, 83 bp, Homo sapiens
agaagacagccatcatttgaaagtactatactggcaattgctggagaagattttgcaattgttgcttctgatactcgattgag

SEQ ID NO: 623180 - DNA, 89 bp, Homo sapiens
acgggatccacttccgcaaggaccctttggaaggccgggtgggccgaggaaattaattctgatcaggctacccagggcaacatcagcag

SEQ ID NO: 623181 - DNA, 101 bp, Homo sapiens
cttgtggatattatggctaataacacaacaagtttagggagtccatggccagaaaacttttggggtcgctacccacaggagaacaagggaacctacatccc

SEQ ID NO: 623182 - DNA, 50 bp, Homo sapiens
cggcagtacggcaaatatggcggaggagaaaatgcagaagtctccatgga

SEQ ID NO: 623183 - DNA, 90 bp, Homo sapiens
ctttcctgagcaagcggtctctgagtcggagtccactccccagaataatccagaatggctactctgatctatgttgataaggaaaatgga

SEQ ID NO: 623184 - DNA, 100 bp, Homo sapiens
ccagaagcgggcggcgcgggggagatggtattgttgcagcatctggcagtgagactgaggatgaggacagcatggacattcccttggacctttcttcatc

SEQ ID NO: 623185 - DNA, 100 bp, Homo sapiens
tgcacttcctggaggtgaaactgggcaagaggccccagcccgtgaaaagtgaggaaggatctgagtctctccctgcggagacagccctgaagaactcctg

SEQ ID NO: 623186 - DNA, 102 bp, Homo sapiens
gcctgcagcctgccccgcggccaacatgagcttcttgttagaaagtttcattgtgcaaatctaacttcatggcctcgctggctgtattccttatatgatgct

SEQ ID NO: 623187 - DNA, 98 bp, Homo sapiens
ccctgctaaccttagcagaagaaaggacggtagacctgcccaagtctcccaaggtcacccctcctaatttctcagtgtcacaagtgcccaacatgccc

SEQ ID NO: 623188 - DNA, 100 bp, Homo sapiens
gcatattgtactggcctgctgctggcccgcaggggtgaggacgcttgagcggaagttagaagcaaaaatgatcaaggaggaaagcgactaccacgacctg

SEQ ID NO: 623189 - DNA, 100 bp, Homo sapiens
tcccaacttattgtttcatcagctaaacattattgcaagagcatctcaagcagacgtcgttacaatcgtgatttggaacaggatgaagcatttattccag

SEQ ID NO: 623190 - DNA, 74 bp, Homo sapiens
ttggcggtccctgtgacctgtggagacacggccagatctgccctccagagccatgtgtgagatacctgcccagg

SEQ ID NO: 623191 - DNA, 100 bp, Homo sapiens
gaagcatacagatctgggaccgaaatttgactggacaaactctgcctgggcgagtccttttcctgcgttatgtcgttcagaccctagaagatgactttca

SEQ ID NO: 623192 - DNA, 100 bp, Homo sapiens
cttgcttgcaagaaccttgaacttattcaaacaaggtcatcatcacgggacagatgggtgtgatccctcacatccacaaatctctgattggaaagaaggg

SEQ ID NO: 623193 - DNA, 100 bp, Homo sapiens
tgaaaacgaagatgacgtgtatggaaactcatcaggacggaagcacaggggccactcagagtcgcccgagaaccgatcaaagtccagatctccatctcca

SEQ ID NO: 623194 - DNA, 101 bp, Homo sapiens
tggtgctggagtgggccgactccgaggtgaccctgcaggccctgcggcggaagacggccgctcactttcacggttgtatccacgccatgcaagtgcgctca

SEQ ID NO: 623195 - DNA, 100 bp, Homo sapiens
agcgcttgagggggactggcctggcgtgcactccgcacctcggggacattattgcgcgtggaacggctgcttttggaagaactctctttgctcacaagtt

SEQ ID NO: 623196 - DNA, 100 bp, Homo sapiens
aaaacatgcggataattcatctgacacagagatggaagacatgattgctgaagtgttacgagatgacttccgacaaaaccccacagatgttgtagtggca

SEQ ID NO: 623197 - DNA, 75 bp, Homo sapiens
agcctcaggctttaggaactgaagaggttcgggaggccttgaggaaagcagagaaggagctagaatctcacagct

SEQ ID NO: 623198 - DNA, 90 bp, Homo sapiens
attcaacatgtggaagtattttgttatgccagagatggcatagaatttgcttttaaagagcctaatccgcaaggggagagccatccacct

SEQ ID NO: 623199 - DNA, 75 bp, Homo sapiens
agctcgggaagtggacagactgggcgtcatgacccttggtaaaggagctggaagtgcgaaaattgatgcatgtga

SEQ ID NO: 623200 - DNA, 83 bp, Homo sapiens
acacaatcccgggcatgggcggcaactctttgatgtactactataatgggaaagcggacccagatgatgtggtaccagttggc

SEQ ID NO: 623201 - DNA, 100 bp, Homo sapiens
ggcagccacagttaccaagaagacttatgagatctggcatcgacggcatgactactggctgctagccggcattataaattacctaatggtgtcctcagtt

SEQ ID NO: 623202 - DNA, 100 bp, Homo sapiens
agcccgcccgcccgccggcccagatctgccttctggagactgcgccgtcctcccgggagagccagaaagaggacatggctgctgggcagcgggaagcgag

SEQ ID NO: 623203 - DNA, 83 bp, Homo sapiens
ctggagctgggtcagtccgccgctcaccccgcggccgcaccttcccgccttctcagatgaggaaaatgaggcccaaagaagtg

SEQ ID NO: 623204 - DNA, 100 bp, Homo sapiens
gtggaggaagtgcggcacttcagcccccgggggaagttcaagtattttaataagcggaaaacctactttgctcacgatgcccttcagcagtgcacagttg

SEQ ID NO: 623205 - DNA, 122 bp, Homo sapiens
cagtgttggaaatacaagatcatcatctgtttctagagatgctttcaattcagctgaaagatcgttaactgaagacaatatgcaaaattctcacatggatgaatacagaaattctagtaatg

SEQ ID NO: 623206 - DNA, 75 bp, Homo sapiens
agcaggaggtgatccgaggctgggaagaaggggttgcccagtccaatggatgggaccccaatgaaatgttcaagt

SEQ ID NO: 623207 - DNA, 89 bp, Homo sapiens
cctgtggtgaccagtgccctgggttcgccttgcataaatggagatccaaaaggaaagtcctcggccgtagagattcagatgatgaccac

SEQ ID NO: 623208 - DNA, 82 bp, Homo sapiens
cgaccgcctggagaagctgctgcgctgctcgcgttggaactgtggctgcaccatctgtcttcatcttcccgccatctgatga

SEQ ID NO: 623209 - DNA, 73 bp, Homo sapiens
cagaggctcagcggctcccaggtgcgggagagagtgggtaattccagaattgattggccataccattgtcact

SEQ ID NO: 623210 - DNA, 100 bp, Homo sapiens
gagcagttaggccgcgagcgactgcggcgccgagccggctccaaccaggaatggagacgccattggatgttttgtccagggcagcatctctggtgcatgc

SEQ ID NO: 623211 - DNA, 96 bp, Homo sapiens
attaccatgggaaaatgagcaacctggaatcatgggagaaaaccagacctccacttccaaggatatagagcaggccaaagtttggagggaaatatt

SEQ ID NO: 623212 - DNA, 100 bp, Homo sapiens
atgtgcgcatttccattatgagaatgttgagttcggcagcatacaggccaacagagattttgagaaacacattgaaggatctgttaacacttgatatacc

SEQ ID NO: 623213 - DNA, 100 bp, Homo sapiens
cggccttcgggtcgggcgtctccgccggctactgccgcttcagttctcccggtgtggccacgagtcggcggccctccaggcactgaagcgtaagaagagg

SEQ ID NO: 623214 - DNA, 50 bp, Homo sapiens
tgcagctagaagtccatatcggtgggaacatccagttgcaggaaaacaag

SEQ ID NO: 623215 - DNA, 97 bp, Homo sapiens
tgagaagcccaactaaagccccacatttgcagctcattgaaggaaagatcaatgtccgagttaccaccatggatgcagagctggagtttgcaatcca

SEQ ID NO: 623216 - DNA, 83 bp, Homo sapiens
ctctgtgagcgcccctgagcgccggcagcggccgcggtgggttcttcagggcggcaccttcctacttctgcccagccacagcc

SEQ ID NO: 623217 - DNA, 98 bp, Homo sapiens
tcgtcagcactgactttcagctatggaatcggtcttcaaagcttcacctttctccaaaggcagatgtgaagaacttgatgtcttatgtggtaaccaag

SEQ ID NO: 623218 - DNA, 98 bp, Homo sapiens
atccagctcaccaggccatgaatcttgtgggcccccagagcattgaagctgtcctgctgacggtgtgctgcatgaagaggaagaagaagaccgccaac

SEQ ID NO: 623219 - DNA, 75 bp, Homo sapiens
ccagccaggcctcggacgaggaggacgcgcccgccaccgacatctactttgcctgggttctgaggaaaacgcaat

SEQ ID NO: 623220 - DNA, 75 bp, Homo sapiens
agcacaatgacattgacaaacggccctcaagtctggatgatagaagaggcagccgcccccggtccatggtgcggt

SEQ ID NO: 623221 - DNA, 91 bp, Homo sapiens
tcgacgcggacagcgggctggagcctgacgagctggcggatgatatcatcaagttgaatcgaaaggaagggaagaagcagaattttccaag

SEQ ID NO: 623222 - DNA, 50 bp, Homo sapiens
ttggcttcctcgcttctgctcctcaggaatatgactggcgaaactatcag

SEQ ID NO: 623223 - DNA, 90 bp, Homo sapiens
ccagctccgaaatcaccaccaaggtgaaagaacttgtcctggacaacagtcggtcgaatgaaggcaaactcgaaggcctcacagatgaat

SEQ ID NO: 623224 - DNA, 101 bp, Homo sapiens
tttgatttttggaaggatatagttgctgctatacaacacaattataaaatgtcagcttttaaggaagatattgatgctgatggacagggattttgtcaagg

SEQ ID NO: 623225 - DNA, 80 bp, Homo sapiens
gtcaagttttctactcttacaaaggaactgtccacactgctgaaaaatctgttgccttgttgaaggggatgctaaagaag

SEQ ID NO: 623226 - DNA, 100 bp, Homo sapiens
ggggaccctgactgccctgatgattcagacgagtctttagatacctgaagaacaaagtatgctagctatggaagatgagggcacagtacaactcccattg

SEQ ID NO: 623227 - DNA, 75 bp, Homo sapiens
ctgacatgaactttgtgcaagatttatgtgaagatctctatgaactttttaagttgtcaggagctagacttgctg

SEQ ID NO: 623228 - DNA, 90 bp, Homo sapiens
tccctcgcccaggtccccttggacaaatgggtctcctctgagcctccggcctccataagacccaaaacagatgacacctcttcccagtcc

SEQ ID NO: 623229 - DNA, 89 bp, Homo sapiens
caccatcaagaaggagatgtctggggatgtcagggatgcatttgtggccattggggagcttttggaagagtcccagatggaagcgacca

SEQ ID NO: 623230 - DNA, 75 bp, Homo sapiens
cacatcctggagatgtacgagggttttaaaaagttgcagaaagaagaaaggaaagggaaagaaaagtgttcagaa

SEQ ID NO: 623231 - DNA, 100 bp, Homo sapiens
ggggtgtcacctagtagtcagctgttggtggcacagatggtcatctcgatgcactcctgaggggcttggttctgggaaaactaggaaaagcaggacataa

SEQ ID NO: 623232 - DNA, 98 bp, Homo sapiens
gcgccgccagtggagcccccgcgcgcccggccggcccggagcaccgagctcgcggcacggtaggagccgctgcagagggagcgtcgcgccggggcgga

SEQ ID NO: 623233 - DNA, 75 bp, Homo sapiens
gaagtcattaggaacaatggtgcaagctgccactgcagagccccgccatggaagacacgccgttggtgatatcga

SEQ ID NO: 623234 - DNA, 50 bp, Homo sapiens
tccatgcaccagtttcgccaggacacagtaccaaatatgccccaacagcg

SEQ ID NO: 623235 - DNA, 75 bp, Homo sapiens
caaaagctgctacttatggaagatacaaaggattctggctgtgactcagtcactgacactgagcctgaggacgag

SEQ ID NO: 623236 - DNA, 75 bp, Homo sapiens
tttttacattgccacatacctagggaattgcaacccagtgaagaagttacctggaagtaaagactggctagatta

SEQ ID NO: 623237 - DNA, 75 bp, Homo sapiens
ttagccgaagagttgaaaaacactggcgggccatgctatgatagtggaagcttatccaaaataatagatccagaa

SEQ ID NO: 623238 - DNA, 82 bp, Homo sapiens
tcgtcgagggcatcctcaagcggcctcctgacgagcagcggctgtacaagggcagccccgagaaccacaggtgtacaccctg

SEQ ID NO: 623239 - DNA, 87 bp, Homo sapiens
aaggagcacggacctcagtaccagtacaggatcatcttccggacccgcgaggtatccacaaattacccattatcaaaaacaaatagt

SEQ ID NO: 623240 - DNA, 100 bp, Homo sapiens
gatcgccgcggggcagttcgggccggctgtcctggcgcgagatgttgacctttcaaataggtcagtgttgtccaggctgacctcgaacttctgggcccaa

SEQ ID NO: 623241 - DNA, 75 bp, Homo sapiens
ctgagtgtggtcgacaggcagagatggatccaatactctggtaccgacagggctcacacagtcgacaaaagaaaa

SEQ ID NO: 623242 - DNA, 98 bp, Homo sapiens
agaaacctcagacagatcgccggggaggcagcgcgggatcccagcctcaggcgtgcgcggacggtgtgcgggccaggaatagttgctgaacaccccag

SEQ ID NO: 623243 - DNA, 100 bp, Homo sapiens
cccatcctggtagacggcaaggatgtgatgccagaggtcaacaaggttctggacaagatgaagtctttctgccagtacatgtactggacgatgctgcagc

SEQ ID NO: 623244 - DNA, 75 bp, Homo sapiens
gactggcagcatgagcagcatgaggtcctgcatgccagtaaaactactcatgtcagctgttctgcaggatcccat

SEQ ID NO: 623245 - DNA, 100 bp, Homo sapiens
ccaaacttgcagctgttcagaccgcgctccgccgaggttccttgtggagaagcactggtataagcagtgggaggcatacgtgcagggaggggaccaggac

SEQ ID NO: 623246 - DNA, 117 bp, Homo sapiens
ctaatgcttacatgttagtctacatcagggaatcaaaactgaaaaaccatgagctgttttccaagagcttcatctccatggaagtgcctgtcatggtagtaaatggcaaggatgata

SEQ ID NO: 623247 - DNA, 87 bp, Homo sapiens
aaattatgatctacctaccaatcgtgaaaactatattcacagttgaccagcaagtcaagtccctgtcgtcggtcctgtcgcggtacc

SEQ ID NO: 623248 - DNA, 83 bp, Homo sapiens
tccacggactggaagatcaaaagaggaggatgtccggcttccagatcaacctcaacccgctcaaggagccactcggcttcatc

SEQ ID NO: 623249 - DNA, 100 bp, Homo sapiens
cgggtcttgggtcctccgagagcagcagcgatatgtgaaagaggccaaagaagcaactaagaatggagacctggaagaagcatttaaacttttcaatttg

SEQ ID NO: 623250 - DNA, 50 bp, Homo sapiens
agctgttgccaatacacaatcaggggaaatcctcattgacgattcaattt

SEQ ID NO: 623251 - DNA, 75 bp, Homo sapiens
ctcattgatgtggtggaaggaaacagggttaaagcacgaattgggagctctcagcgacatcaccagtcagcagcc

SEQ ID NO: 623252 - DNA, 82 bp, Homo sapiens
gactacggcaaagtggccactcaggtaaagcagctgagcagccattttcagatttaccccttctcattgaggaaaccaaact

SEQ ID NO: 623253 - DNA, 100 bp, Homo sapiens
cccgggtggcttacagacgctgccagcatcgccgccgccagcaagagtgagccatggagctacgtgtggggaacaagtaccgcctgggacggaagatcgg

SEQ ID NO: 623254 - DNA, 82 bp, Homo sapiens
caagatggtgaagcagatcgagagcaagatgcctgaggaaacccagacccaagaccaaccgatggaggaggaggaggttgag

SEQ ID NO: 623255 - DNA, 100 bp, Homo sapiens
ccgccctcaccacccctatccagacggctgcccttcaagtaccaacattgggtttgcctatcacagatgaacaaatccaggagatgaaatcaaacctgga

SEQ ID NO: 623256 - DNA, 95 bp, Homo sapiens
tgttggaggaactggcccggaaacaggaggacgattttttatcaagcagaaatgcatcgaacaacgagaatcaagatcactgagctaaatcccca

SEQ ID NO: 623257 - DNA, 51 bp, Homo sapiens
accaacctcttcctggaggagattcaggtggtggtaaatggaaatcccttc

SEQ ID NO: 623258 - DNA, 83 bp, Homo sapiens
cggaagatcgcgatcctgggctaccggtctgtggacctgcctagagctggaacgttacctccagagcgagccctgctatgttt

SEQ ID NO: 623259 - DNA, 101 bp, Homo sapiens
ctgggtggatccggatcgcatggaagacgcagcctggccgcgctctcccaggaactgtacctggggaatgaattgtaggtttatacaccctggagtgaacg

SEQ ID NO: 623260 - DNA, 50 bp, Homo sapiens
ctgcatccttaactgagaatgaggtgtcaaagaagaacccagcttccctc

SEQ ID NO: 623261 - DNA, 75 bp, Homo sapiens
cccgacagcaggaagagatgctggggcttcaagcggcttatgacccctacgcttatcccagcgactatgatatgc

SEQ ID NO: 623262 - DNA, 100 bp, Homo sapiens
tccggagctagctggatcctctaggcaggcttgttagagtgctgtgcaagatgtctggtaggggccccctttgcttccctggtggccactggattgtgtt

SEQ ID NO: 623263 - DNA, 82 bp, Homo sapiens
tggactggagcagaaccccaggactgcgcccccgggagcgggcgcccagagtttagaagaagaatgtgaatcctctctttgc

SEQ ID NO: 623264 - DNA, 90 bp, Homo sapiens
gcaggtttggcatgtcgagttatggatccaacaaagattctgataactggcaaaacaaggtggaagtgggctaactggagctaaacttca

SEQ ID NO: 623265 - DNA, 90 bp, Homo sapiens
agaggaggccaggacacctggaagccgggaaatgggacttccttccccgcggttcaggaatcgtcacccggcggcctctcattctgcagc

SEQ ID NO: 623266 - DNA, 74 bp, Homo sapiens
cagcaccctccgcttcctctcctaggcgacgagacccagtggctagaaacgcttcgttaagggactcaggcagt

SEQ ID NO: 623267 - DNA, 75 bp, Homo sapiens
gtcagaaacacaaagcagcccaaccaaaggacgtgaagccctccaatatgctagtaaacacaagaggacaggtta

SEQ ID NO: 623268 - DNA, 82 bp, Homo sapiens
ccaaacaaccagaagaagtatttgatgtcttagagaaacttggagaaggacccaagaaactcgagagatcttacatttccac

SEQ ID NO: 623269 - DNA, 87 bp, Homo sapiens
cggaatgtgatcacagagcctatttacccagaagtagtccatatggtgtttgctgactagcactttggagagtgtatgcttatctgc

SEQ ID NO: 623270 - DNA, 53 bp, Homo sapiens
agctgctggagggcgaggagagcaggatttctctgcctcttccaaacttttcc

SEQ ID NO: 623271 - DNA, 106 bp, Homo sapiens
ccaagttctgcagccagtgcggagagaggctgcctcctgcagcccccatagcaggttatggaaacaaaggacatgctttacatcgtcactgaatttgctaaaaatg

SEQ ID NO: 623272 - DNA, 100 bp, Homo sapiens
ctgaagggaaagctccagatactaaaactaattctgaagcaagcccttatagttgtgctgcagtggtgtttcaatcacaattttagtgttcgactgtatg

SEQ ID NO: 623273 - DNA, 96 bp, Homo sapiens
tgattctttagctgcagtagaagttcttgttgcccttagagatttgtttgattccatggataaaacttcttccagtattccacctattattctact

SEQ ID NO: 623274 - DNA, 100 bp, Homo sapiens
gagtagtcgctggagtccgcgcctccctggccaaaccaaacaggaagcttacttttctctacctagccaatgatgtcatacagaacagcaagaggaaggg

SEQ ID NO: 623275 - DNA, 50 bp, Homo sapiens
tagatcttctgcactgtttacaggcacagctctgcttatgataatgtcaa

SEQ ID NO: 623276 - DNA, 98 bp, Homo sapiens
cttccccacgcaaccccagatccatttacactttacaatcctgaggaggatgaaggggctggccctggaggccgagagtgagctggagagacaagacg

SEQ ID NO: 623277 - DNA, 98 bp, Homo sapiens
ctcaacttctagttccacctgaaaactgtagttatttccaacttggggatgtttggcatcgacgaatttactgcagtgattaaccctcctcaggcctg

SEQ ID NO: 623278 - DNA, 75 bp, Homo sapiens
caaattttactttctgacaatgcagcttctcttgcagtgcaggattccacgcagaacttggaagacagagaagtt

SEQ ID NO: 623279 - DNA, 73 bp, Homo sapiens
gcgaggccgggcggcgcttctgtcctcctactcggacccgcaggctgaactccagtgcacccagttagacttg

SEQ ID NO: 623280 - DNA, 100 bp, Homo sapiens
ggcaagagaaagccctaccacaagaagcggaagtatgagttggggcgcccagctgccaacaccaagcccagctcaacattggcaatgtgctccctgtggg

SEQ ID NO: 623281 - DNA, 50 bp, Homo sapiens
ggagccgcagtgggtcccggacaaggagggctgaagaagatgcagagcag

SEQ ID NO: 623282 - DNA, 100 bp, Homo sapiens
cagaggcttgggccgccgagctggacccggaccggttttgggacgccaacaaggagagcagcaagacctccaagccacacaaggtgaccaaggagcaccg

SEQ ID NO: 623283 - DNA, 74 bp, Homo sapiens
aaagagcaaagaagaggcctgcaaagctgtacaagagatcatgcagacaaagaaggttggcaatacctgtttcc

SEQ ID NO: 623284 - DNA, 100 bp, Homo sapiens
cgatttattggaggcctacttgcagcatattacctatcaggagaggagcattactctactgactggcagagacaggagaggtagatgtccacgcccacag

SEQ ID NO: 623285 - DNA, 100 bp, Homo sapiens
cttgatataagccagctgtctttcatccatgatttgggaccaaagggcatgatgtatcaggacaaactggcttctctcaagaggcagttgcaacaactgc

SEQ ID NO: 623286 - DNA, 83 bp, Homo sapiens
cccagccacaaatgtgaacacagttttaagaattcctcctaagttgcaccattactcagacttctaaagagactatttgaagt

SEQ ID NO: 623287 - DNA, 82 bp, Homo sapiens
gaaggactcctgaaccagctcgtcctggagcacctgcagctggcgcctctgcagtgggatctgactgcagccatgagcagca

SEQ ID NO: 623288 - DNA, 50 bp, Homo sapiens
tggacgccggcggagacgcgggcgagatagcctgggctggaagctcttct

SEQ ID NO: 623289 - DNA, 82 bp, Homo sapiens
cagaagtccagagctgaggactgcctgtttgcagaggctgggaggcggcagaatgcagccagaggagggcacaggctggctg

SEQ ID NO: 623290 - DNA, 97 bp, Homo sapiens
atactttgccgacacattccttcgagatgacacctggatttcattagcatcatgacctacgattttcatggagcctggcgtgggaccacaggccatc

SEQ ID NO: 623291 - DNA, 75 bp, Homo sapiens
tgacaatctcctcagggaaggggcagcacaatgtggccaattagatagtgctttgcatgaagctactagtcgcgt

SEQ ID NO: 623292 - DNA, 102 bp, Homo sapiens
gatggccccaggtgtaagcgcagaaagcaggcgaacccgcggcgcaataacgggcgaactttctgaccaagtatacaactacccagagggcctaggagaagt

SEQ ID NO: 623293 - DNA, 101 bp, Homo sapiens
ctatggaaaacggggatttccaccatctgtcccaggtgaggtttatacatggggcgacaatgatgagggacaactgggagacggaaccaccaatgccatcc

SEQ ID NO: 623294 - DNA, 114 bp, Homo sapiens
gagaatttatccaaagattaaaacttgaagcaacccttaatgtgcatgatggttgttgccccaggtgctaaagagctgtgcagaatttgtggaggagtatggagtggtggatgg

SEQ ID NO: 623295 - DNA, 101 bp, Homo sapiens
gaggagatggatgagaggaggcggcagaacattgcttatgaatatctgtgccacttagaggaagccaaaaggtactaggttttgacaagcttgcatcatgc

SEQ ID NO: 623296 - DNA, 100 bp, Homo sapiens
cctcttcttcccctcagccattgagagggtgtcagaggcaatcgtcagcatccgaagaatccagaaccaagagccactgagagaggaagactctgatttc

SEQ ID NO: 623297 - DNA, 75 bp, Homo sapiens
aattggatgtgaaaatgaagccagaccgagcggagctccctgggtcctcagcagtgaggctggcctccctgcgtg

SEQ ID NO: 623298 - DNA, 74 bp, Homo sapiens
catcacccaccaacaacaccacaataatccacagccaagatacgatgaatggattaaagcagataaaatagtaa

SEQ ID NO: 623299 - DNA, 75 bp, Homo sapiens
ggagagagaggtggagtccggcccccgaaagaggatatggccgcgtggaaagtgtcaaaattcttcccaagaggg

SEQ ID NO: 623300 - DNA, 100 bp, Homo sapiens
gggacgtgctggccgtgatcaaacactgcaaggaccccctccggctcaagtgtgtcaagcaagcctaaaatgaccaatgtgtgatttcagtggaataaat

SEQ ID NO: 623301 - DNA, 88 bp, Homo sapiens
tacccgccaagctgtcatcacaaaagagttgattgaaattatctctggtgctgcagctcttagaccaaattttggtacaattgaatca

SEQ ID NO: 623302 - DNA, 100 bp, Homo sapiens
ctcttctccaagattctcaggcaatcaaagaatcttatggcaagggccttatatgacaatgtcccagagtgtgccgaggaactggcctttcgcaagggag

SEQ ID NO: 623303 - DNA, 50 bp, Homo sapiens
cggcgatcgagaaagtgcgcaaatggctccctggggaagggaatgcaggg

SEQ ID NO: 623304 - DNA, 71 bp, Homo sapiens
tgtggggcggtcccggccccgcaggccacccagaggagaaggccaccccgcctggaggcacaggccatgag

SEQ ID NO: 623305 - DNA, 95 bp, Homo sapiens
cgtgtaccctgtctaccagcctgtggctgaaggtgatgtggccgccctcaaccgacgcatccagctcgttgaggaggagttggacagggctcagg

SEQ ID NO: 623306 - DNA, 100 bp, Homo sapiens
ggatcttgcaggagatcgagagcaccgacaccgcctgtgtggggcccaccctccgtttcggtgtctgaactgctcagcttcgcaagtctgctctcaggat

SEQ ID NO: 623307 - DNA, 82 bp, Homo sapiens
ccaaaccatgtgccttactgtcttcatgatggtcatggtgattggaaatctagtggctttaacagacttctgtgattcatat

SEQ ID NO: 623308 - DNA, 82 bp, Homo sapiens
cagaaatcaaccaagttcatggaattgaatgatctggcacgggaccctccagcacagtgttcagcaggtcctgttggagatg

SEQ ID NO: 623309 - DNA, 115 bp, Homo sapiens
agaggctgcccagaaagcagttaacagtgccaccggtgttccaactgtttaaataaccatggacccaaacgtgttgagaagtgatgtcttcgttgagtttttaaaactggcgcag

SEQ ID NO: 623310 - DNA, 100 bp, Homo sapiens
gcactccagcatgccgatagttcaaacttctatatcacagaaaaggctgaccccgcactacatctacccaccagccatcgtgcagcccagcgtggtgatc

SEQ ID NO: 623311 - DNA, 90 bp, Homo sapiens
aaatacaaatcacacgcataatggatgaaaggaaccgacaggacaagaaatggattctcagtcatgaagatgtcatattgggagaattac

SEQ ID NO: 623312 - DNA, 82 bp, Homo sapiens
actcagaatcgaatctcttctccctccccttcttggttgtcacagctcatgcagttcgggtccctgtcaccagcaacctgag

SEQ ID NO: 623313 - DNA, 98 bp, Homo sapiens
gcgagcaaggagcgcggaatcggggagcgtccggagctagctggatcctctaggcagtctgcgggccaggcatcgacatccgcaacgactatcagcag

SEQ ID NO: 623314 - DNA, 75 bp, Homo sapiens
ctaccacggccgagctcttcgagatacatccagaaagtgcccagaagaaacttcctgctggaaaaaatgaaaaag

SEQ ID NO: 623315 - DNA, 75 bp, Homo sapiens
gtggactccgtgctgcctgtgccacccattgaatttggagtcagtccaaaagaggagatgttaaagtaacccatc

SEQ ID NO: 623316 - DNA, 74 bp, Homo sapiens
gaacccagaggtcgtggaggtggccgtggaggcagaggtggcatgggcatattgagtatcagtgctgatattga

SEQ ID NO: 623317 - DNA, 83 bp, Homo sapiens
cagcaagcagctctaccgccgcctcaactgccgcctcgcctactcactctggagccagaaccatggagtctggcagtaccgcc

SEQ ID NO: 623318 - DNA, 75 bp, Homo sapiens
catttgaagacgttccttgaggaggtttgaaaaagtttctgtggatgatcgccttaaacagcttcaggaagccca

SEQ ID NO: 623319 - DNA, 90 bp, Homo sapiens
aggcggcacaagaaaagatgatccagcaggagcatgagcggcaggagcaggacatcgagactttacatggctctgttcacgtcacgctgt

SEQ ID NO: 623320 - DNA, 100 bp, Homo sapiens
atgcggatcaccctgcggaacctggaggaggtggagttctgtgtggaaggttatggaattccactgaaagacggagatgagaaaacagatgaagaagcag

SEQ ID NO: 623321 - DNA, 100 bp, Homo sapiens
gcctcggactcgccgggcgctgcggtggctccctgggccgaggtcttgggtggtgcctatgatgagttcatctttgctcctcggctggacaatctgcaca

SEQ ID NO: 623322 - DNA, 90 bp, Homo sapiens
gctcgatcttgggacccaccgctgccctcagctccgagtccagggcgagcggagctggagtttgttcagatcatcatcatcgtggtggtg

SEQ ID NO: 623323 - DNA, 87 bp, Homo sapiens
ggcaagcaggacttccgggaggaccaggatgctgccttcttcaaggtcagaagaggccaagtgatggaaatagtggattaatggcaa

SEQ ID NO: 623324 - DNA, 99 bp, Homo sapiens
atcgcgctggcgctcctgggcgagaggcttctggcactcagtgcagaaataccataccatcaatggtcataatgcagaagtaagaaaggctttgtctag

SEQ ID NO: 623325 - DNA, 100 bp, Homo sapiens
tacgatgcttccagtgcagtacttttagacaacctccctggagtccggtggctcacacttccactggaaatcaagaggaccattcttagtggcactgggg

SEQ ID NO: 623326 - DNA, 80 bp, Homo sapiens
ccggcgtcgtcggatgttgtgttgcccgccaccatgagctacacagctatgtttccagtgtcctctgggtgtttccaaga

SEQ ID NO: 623327 - DNA, 100 bp, Homo sapiens
cgcgacgacgagtacgactacctctttaaaggctgctgagaactagccctagacctctgcgtgagggttcttctgccgaagacatcaccagtgtgtggag

SEQ ID NO: 623328 - DNA, 75 bp, Homo sapiens
gcattttcggcaaccgctgctggcagttttgccaggtgtttgttaccttggtgacctaccagttgaagattccgt

SEQ ID NO: 623329 - DNA, 75 bp, Homo sapiens
ccaggtgtgaagagttgcaggtcctccgaggagccgggagctgcaaggttcccatccaaccactttgggacgctg

SEQ ID NO: 623330 - DNA, 100 bp, Homo sapiens
ggcacctgcacccgcctctgggaggtcgcaatggaagaagagatcgccgcgctggtcattgacaatggctccggcatgtgcaaagctggttttgctgggg

SEQ ID NO: 623331 - DNA, 83 bp, Homo sapiens
catccgcaagaggcactaccgcatcggcctgaacctcttcaacaatgtactaatggtcacttgatgtgcgctggctgttttat

SEQ ID NO: 623332 - DNA, 100 bp, Homo sapiens
catctcgctcggctgcgggaaatcgggctgaagcgactgagtccgcgatggagcaggaggatgcattagcacaacaggcctttgaagaggctcggagaag

SEQ ID NO: 623333 - DNA, 100 bp, Homo sapiens
cgaggctccactaatctctttagtaaattaacttcaaaactcacaaggagaatgtatgacaacatgtccacaatggtgtacataaaggaagacaagttgg

SEQ ID NO: 623334 - DNA, 75 bp, Homo sapiens
tccccatctgaggcgtttgttgcagctacctgcacttctagatgcttttatcttgagaacatggtgtctggagtt

SEQ ID NO: 623335 - DNA, 51 bp, Homo sapiens
gcctcgcacattcagttggacagccctgccctcactgcagtgctctacgac

SEQ ID NO: 623336 - DNA, 74 bp, Homo sapiens
cgtcatggggctgtttggaaagacccaggagaagccgcccaaagaactgataacatgcctggacatttccagca

SEQ ID NO: 623337 - DNA, 83 bp, Homo sapiens
ccgaggaagagtgagggcgcgacgcgcaccaacggtggaggcataatggttatgaaagcttctgtagatgatgacgattcagg

SEQ ID NO: 623338 - DNA, 100 bp, Homo sapiens
gcaggcagaatttggacgccgggagattgagattgcagagcaagaggctgccattcgctgcaaggttgaacacccccatgggccctggacgaactgtcgt

SEQ ID NO: 623339 - DNA, 90 bp, Homo sapiens
cagaaatctactgccttaacccagcacaggggaaaacccatagaactctcaggaggcggcttcaatgatccatcctaaagaggtgccccc

SEQ ID NO: 623340 - DNA, 96 bp, Homo sapiens
ccagacaccaccgcggaccccgccatcgctgcctcggaccccgccaccaaggggaaccccctcggaaggggaagggttgggtgctgacgggcagga

SEQ ID NO: 623341 - DNA, 100 bp, Homo sapiens
catttttttgtggagtggtttgaatatcgtaagcgcacgtttaaacatctcaaggaattgaatgatctggcacgggaccctccagcacagtgttcagcag

SEQ ID NO: 623342 - DNA, 50 bp, Homo sapiens
ccgtgaacatgccaacaaattgattgaggatatgggccctcacattttcc

SEQ ID NO: 623343 - DNA, 101 bp, Homo sapiens
cgggcacgacctctcggacacggtgcaggcaggatttagaagaattctgctttaagttttgcatcaatcatttgacagaagttacacagactgcagcattt

SEQ ID NO: 623344 - DNA, 75 bp, Homo sapiens
cccatcgcggtgctcatagacgaactccgcaatgaggacgttcaggtagacgaagagcggcggagtgcagcgggc

SEQ ID NO: 623345 - DNA, 80 bp, Homo sapiens
gggttattcgagtgaccgagaccgcggccgggaccgagggctctgacgcccgctctgcggcttcggtgtttgaacaggcc

SEQ ID NO: 623346 - DNA, 100 bp, Homo sapiens
ctggcagctccactgccgtcaactcctgttctcctcagagcctggtaagatttcagaggtactggatgctgggacagtcgatcccctgacaaagctggtc

SEQ ID NO: 623347 - DNA, 82 bp, Homo sapiens
cgcctgggtggttgttggcgtgtccctgcagcgaaggatcctgggaaggtgaagaaggagctggaccctgacgacagccatt

SEQ ID NO: 623348 - DNA, 90 bp, Homo sapiens
ggaagctatgcagaataaagctcgagccgaaggacatatggtggcggctttgaaatacatcccatctgtcctgcatgatgtagaaatggt

SEQ ID NO: 623349 - DNA, 102 bp, Homo sapiens
tacccctcagagcaggagaagctgagcctttctggacagaccaacctgtcagtgctgcaagtgaatgaaaactttgccattgatttgatagcagagcagccc

SEQ ID NO: 623350 - DNA, 82 bp, Homo sapiens
ctgcccggtgcccgaggaggcagccaagctcgtagcctgccactccgtgcgttgacatcatggacatatgtgagtccatcct

SEQ ID NO: 623351 - DNA, 95 bp, Homo sapiens
aaggggatgtcctgcacatgcactacacgaaagttcgtcgctgcttcctgtgctccaggagaggacatctcctgtattcctgtccagcccccctt

SEQ ID NO: 623352 - DNA, 101 bp, Homo sapiens
ccctgcaccgcgtctccctcgggagccggcgtgcccacccggacttgtccttctacctcaccacctttgaatttcgctaaggagtttgtgatcagtgatcg

SEQ ID NO: 623353 - DNA, 100 bp, Homo sapiens
ccgaggagcccttcggggtgatcgtgcgccggcagctggacggccgcgtgctgctgtgggtgagcgtggaggatgctcagatgcacaccgtcaccatctg

SEQ ID NO: 623354 - DNA, 100 bp, Homo sapiens
cagagaccaccgaagactgcatcgccaagatcatggtgctaactgccaaagaaaggaaaactcaaattgatgatagaaacaaattgactgaacattttat

SEQ ID NO: 623355 - DNA, 100 bp, Homo sapiens
caagatctcagagaaggaggaggtgaccacgcgcgagacctgcgaccgcatcaagcagtccgccagcggaaccaagcggcgcgtgttcatcatcgagacc

SEQ ID NO: 623356 - DNA, 82 bp, Homo sapiens
gtgggatttggatgtgggatccggttccttggtgtcatccagccttagcaaaccagagtgtcttctcagaaacaaccagctg

SEQ ID NO: 623357 - DNA, 90 bp, Homo sapiens
gcagaattatacctagaagtctactaatggacagttagtcacccacctacatgttgagattgccatcacgaaagccaaagtggatttctc

SEQ ID NO: 623358 - DNA, 75 bp, Homo sapiens
gcagtcgacatactcggataccagcgctcagcccacctgtgattatggtggtaggcagctccctcctcttcgtgc

SEQ ID NO: 623359 - DNA, 75 bp, Homo sapiens
agaagaaaatgatattgatgaagaaactatctgtcaccactgactaaagaagagaaaactgcggcagagcaattc

SEQ ID NO: 623360 - DNA, 100 bp, Homo sapiens
catcactgacgggcgctcagacactcagagggacaccacaccgctcaacgtgctctgcagccccggcatccaggtggaccggtatcggttgaagaatggg

SEQ ID NO: 623361 - DNA, 75 bp, Homo sapiens
caccatggatctcttcaggcacactacagaactaaatatgcatgttcgttccaccagtcataaaccagatgaaat

SEQ ID NO: 623362 - DNA, 101 bp, Homo sapiens
gtatctgcttgccgccctctttggatacctaacattttacggactagcccgagccaagtcagttcccacaaagacctactcaaatgaagttgtcacactat

SEQ ID NO: 623363 - DNA, 83 bp, Homo sapiens
atcatggtgtccaacatgctagcacaggacagccacctgctgtcgggccagctgcccacgtttgctgaggatgatggcttcca

SEQ ID NO: 623364 - DNA, 98 bp, Homo sapiens
tattgctatagtagctctggtccttgccaatcccagaaggtttttagttcaacaagtgtcacggcatacaagcagggaagtgttcgccagttactaca

SEQ ID NO: 623365 - DNA, 80 bp, Homo sapiens
gctttggatgccgagagcgagtatctgacagtctagcagtgcttccttggagaccctgttagcacttcttcaggcagaag

SEQ ID NO: 623366 - DNA, 89 bp, Homo sapiens
gttcaaggaggccttccagctgtttgaccgaacagtaacaacatgctgtaccccaaggaagacaaggagaaccgcattctgctctacgc

SEQ ID NO: 623367 - DNA, 96 bp, Homo sapiens
ggaggcggcagcggcggaggaaggcggcgcaccccgagaggctcttgtcaggatggtgaagctgttcatcggaaacctgccccgggaggctacaga

SEQ ID NO: 623368 - DNA, 75 bp, Homo sapiens
agaaaacaaggcgattccgcagtccccccgttccctggaggtcctgtggaatgaggcgccctcgcccccgccgcc

SEQ ID NO: 623369 - DNA, 99 bp, Homo sapiens
gagaagggctgcgggtgctcgtggtggcaaagaagtctcttgcagaggagcagtatcaggactttgaagatatgggccctcacattttccaaacctgtc

SEQ ID NO: 623370 - DNA, 89 bp, Homo sapiens
cagcatgggctcgcctgtcaacgcgcagacaatgcagatcttcgtgaagactctgactggtaagaccatcaccctcgaggttgagccca

SEQ ID NO: 623371 - DNA, 90 bp, Homo sapiens
tgcacacggcactcgagtgtgagagagaacgaggtgctcaaagtccaactgaagaaatatgtaggagctgtccagatgctgaaaagagaa

SEQ ID NO: 623372 - DNA, 71 bp, Homo sapiens
actgcgctgtcagcgatagcccagtggatggccattccagtatttgagaacacagtggctacggtgatggc

SEQ ID NO: 623373 - DNA, 97 bp, Homo sapiens
gtggaacagattctcagggtggagatgtcagcccttcagaaacagtattacaagtgtcagttgtacccgaggcgttctcagcagcagcaagtacctg

SEQ ID NO: 623374 - DNA, 75 bp, Homo sapiens
ctgcgaattctttgggcacggcggggctgagagacttcgaagaatgcttggaaaggatgaggatgaaaatgttaa

SEQ ID NO: 623375 - DNA, 100 bp, Homo sapiens
cgcactggccgtggagcccatgaagtttgtctacagaggcagaaaaatggctacaaacttcctagcacatgagaagatctggttcgacaagttcaaatat

SEQ ID NO: 623376 - DNA, 98 bp, Homo sapiens
tgcgatgtgaggaaaggcacctccaccagtttcaccagtgatcattaaagaatgggcagcttacaaaggaaagtctcctcaaaccccggaactggttg

SEQ ID NO: 623377 - DNA, 90 bp, Homo sapiens
gatggtgtcaaagagaaattctggtttggtgcacctcgatttggaggaagtagggcagggcccttatctggaaagaagtttggaaaccct

SEQ ID NO: 623378 - DNA, 100 bp, Homo sapiens
aaggaatcaaaagaatatttagaatgcaggatggagagtgctaacaactttgcaatgaaaggaaagcggaagacgctgaatgccagtgatgtgctctcag

SEQ ID NO: 623379 - DNA, 110 bp, Homo sapiens
ctggggaacctgctcaaagccctgggtcgcttggaagaagccaagttgatcctcagtctgtccagaagtgggtcaaattttcttcagtatctgatggcttcaactccgat

SEQ ID NO: 623380 - DNA, 95 bp, Homo sapiens
aagaagagacacagtatgaaagaacagagccatctccaaatccaatcctgaggcaaaagaaacattttaattcactgcacattccaaaagccttg

SEQ ID NO: 623381 - DNA, 96 bp, Homo sapiens
agattgtgtaccgtgatctcaaggcccaacacagagatactttcattgaagaacgctatggaaaatataacatcagtgatcctttaatggctctac

SEQ ID NO: 623382 - DNA, 75 bp, Homo sapiens
agaatgcctgcatgcagatctcatcaccatggttctgtcaggccaagcagaaggcagccttgctggagctgctgc

SEQ ID NO: 623383 - DNA, 100 bp, Homo sapiens
aaagagacaaccataaagagaaagctagtgaatgggaaaatggtagcggtctcctctgagcctccggcctccataagacccaaaacagatgacacctctt

SEQ ID NO: 623384 - DNA, 99 bp, Homo sapiens
aattaataaaagccttttagcactcaagggattgtcaatgaggcagatcagattccgatttgacgggcaaccaatcaatgaaacagacacacctgcaca

SEQ ID NO: 623385 - DNA, 83 bp, Homo sapiens
agagagaccttagaaaggatcaggactggcggcttcctttgctccaataagctttgcaatcaaggccaaagaaaatgatctgc

SEQ ID NO: 623386 - DNA, 100 bp, Homo sapiens
gggattaaaagtggatttacgttttggaacctcgtctttttattgacggtgtcttgtgtgaaagtggcttttcatggcctgccactgaaaatcaagaaag

SEQ ID NO: 623387 - DNA, 90 bp, Homo sapiens
accacacccggcatcagacctggcactacttgtccaagacgtactggtggcgagttgagccccatatgggggttggcaggcagcagagag

SEQ ID NO: 623388 - DNA, 100 bp, Homo sapiens
aaagagatctaccaaacccagggtatcttccttgatcagcctttacagtaaaaatgacccatctatggctgcttaattttgtatctgttcaaactaggaa

SEQ ID NO: 623389 - DNA, 100 bp, Homo sapiens
acgcgcggcggcaccgggaggccgggccgagcgtctctgaaagccactcggaatttctccatctcagattggagcaagaactttgaggttgttttccagg

SEQ ID NO: 623390 - DNA, 90 bp, Homo sapiens
cccaggctgcctcccaggtcctctgggacagcccctgccttctaccagaatttacaacgggaatgattttaccaacgaaagctatggcaa

SEQ ID NO: 623391 - DNA, 100 bp, Homo sapiens
atcttttataggttgtgtgctggtgcttctgaagatattagagaaaaacttcatttgagttcaccagataattttcggggatgagaatggcagttttgtt

SEQ ID NO: 623392 - DNA, 98 bp, Homo sapiens
aaccaggagtgagtcggagctgccgcgctgcccaggccatggactgtgaggactcagtggcctctgaggatgtggctgtgaacttcacacttgaggag

SEQ ID NO: 623393 - DNA, 75 bp, Homo sapiens
ttaaatgacgaaactcagcggaaatatattcaggaacacgatgaacctattctgaagcacttgaaagatattaaa

SEQ ID NO: 623394 - DNA, 82 bp, Homo sapiens
agcagcagacagcagtacagacagctcaggctgcccagatggtggctcccggagtccaggcgatcagtgggtgaccgcggct

SEQ ID NO: 623395 - DNA, 74 bp, Homo sapiens
tttgacctttttgaagcctttgcaaaaatgccttcaattaagttgcagagttctgatggagagatatttgaagt

SEQ ID NO: 623396 - DNA, 100 bp, Homo sapiens
tgatctgttactgcaacttcagcgaattgctctgctgcccaaaatacatcgagatatttccaagcagaaggaatgaagttcgaacacatgtcggttctta

SEQ ID NO: 623397 - DNA, 99 bp, Homo sapiens
cctgaagaacagtgcctggatgtggtgacccactggatccaggaaggtgaagaagataacatttttctggagattttatactctactgatcccaaattg

SEQ ID NO: 623398 - DNA, 101 bp, Homo sapiens
ccctctgctgcaccacttcatgctgacattcgctgtcactcctgctacaaggtccctgtgctgggctgtgtggaccggcagtcctgccgcctggagccagg

SEQ ID NO: 623399 - DNA, 75 bp, Homo sapiens
caagagcaacaatcctctcagcagtgagctagatttgaagaactacgtgacagtttcagaagaggagccccgccg

SEQ ID NO: 623400 - DNA, 88 bp, Homo sapiens
gagaaggtggacgtgctggtgtctgagtggatggggacctgcctgctgctgctattaacttagcaaagctgaaacttttcagacatta

SEQ ID NO: 623401 - DNA, 90 bp, Homo sapiens
gtgactgtcaggtcgatcatatcatccataccccagtttaccaattcccccacaatggtgatcatggtgggtttaccagctcgaggcaag

SEQ ID NO: 623402 - DNA, 98 bp, Homo sapiens
gtattgccgctgttactgatatacctttagaaatgactgctgtccatgcaggcaacataaacttcaagtgggatcctaaaagtctagagatcaggact

SEQ ID NO: 623403 - DNA, 100 bp, Homo sapiens
tatgctgaccccaatacttgcagaggggagcaaaattatgtgtggttaaaacccagcggaaggcaaaacaagctgagactctaactcaggactacatcat

SEQ ID NO: 623404 - DNA, 100 bp, Homo sapiens
cttaaacacctccaacggggatggctctgaaacagaaaccacctctgccatcctcgcctcagtcaaagaacagcttcggaaggagtatggggccaatgtg

SEQ ID NO: 623405 - DNA, 100 bp, Homo sapiens
tggtgcttgatggtcgaggccatctcctgggccgcctggcggccatcgtggctaaacaggtatccctgttgatccgccgggagctgacagagagggccaa

SEQ ID NO: 623406 - DNA, 100 bp, Homo sapiens
ggcggctgcgctgttcgtgctgctgggattcgcgctgctgggcacccacggagcctccggggctggttgtctttctactcgggacactcttcctttggga

SEQ ID NO: 623407 - DNA, 100 bp, Homo sapiens
ctgaaacagaagattctcaatattctcacaaataaacatggtgcttggggagcagtttctcataggcttgttgattggtgctggctgtgccctctacccc

SEQ ID NO: 623408 - DNA, 100 bp, Homo sapiens
caggaactggatgccaactctgcccttatggaattggacaaagtgatggaatggggagaagatattaaagcagtttcaaaagatgaagcagtgatgttgg

SEQ ID NO: 623409 - DNA, 85 bp, Homo sapiens
agacaccggagactgggaaatggttatgaagacagtatggagtttccagaccatagtagacatttgctacagtgtctgagcgagc

SEQ ID NO: 623410 - DNA, 90 bp, Homo sapiens
gctgccgtcatcaccatcaccttcaatccgctctactggaatgtgcggcccagcccaatccagctttactcccctccctttatattggcc

SEQ ID NO: 623411 - DNA, 90 bp, Homo sapiens
atttcaacatcattaggaatttaacaggcttttgcaagaaggcccagaggagtttgaaattcttgcttcaggccatatggagtggatatt

SEQ ID NO: 623412 - DNA, 90 bp, Homo sapiens
attacctgtgctgaatacactcacttttatggtggcaagaagccagatgacggtccttcgctacccaccaaacagaacgaggaattccgc

SEQ ID NO: 623413 - DNA, 82 bp, Homo sapiens
ggttcacatgatcaactgggcgaagagggtgccagtgttcagactgcatcacagtgcttccgatacaagcgacaaaaatcga

SEQ ID NO: 623414 - DNA, 97 bp, Homo sapiens
acttagctgcctgtggagctgtttggaactgaggctgagagacttcgaagaatgcttggaaaggatgaggatgaaaatgttaagaaaccaaaacata

SEQ ID NO: 623415 - DNA, 115 bp, Homo sapiens
cctccttcagccatagaaatgcagttgcgaagagtattacatgatattagaaactcactgcagaatctttcacaggctaaagtaaataatgccagcctgattggactgggttata

SEQ ID NO: 623416 - DNA, 100 bp, Homo sapiens
tcctacagatgatgagtcggtggcagagatcaatggaaccatgaacggccaagaccagcttcaagtctccatggtaccagaaaacaacaacctcacagca

SEQ ID NO: 623417 - DNA, 82 bp, Homo sapiens
cgcgaatatcgtcatcgttagaaggagtaaacatggaagtactaacttcattccagaacaatttttggatgacttcattgat

SEQ ID NO: 623418 - DNA, 83 bp, Homo sapiens
gaattataatttgaaagtcaaagtcttatttgataatgatgctattgctgagattagagccatttgtattgaagaaattggag

SEQ ID NO: 623419 - DNA, 101 bp, Homo sapiens
cagcgagtacacctgcaccatccaggcctgtctccactaactctggaccctaaaacagctcacccaaatctggtgctctccaaaagccaaaccagcgtctg

SEQ ID NO: 623420 - DNA, 75 bp, Homo sapiens
ttcccccacccccgactcgggcttggcgcggcggccagaggaaccccgaggtgtggacactgccagcggctgcag

SEQ ID NO: 623421 - DNA, 75 bp, Homo sapiens
gtaaacggcatcatcgcaaccgtcgtggtcagagctgtaggtaaaacttgcctactgatcagttacacaaccaat

SEQ ID NO: 623422 - DNA, 100 bp, Homo sapiens
atgactttcctccaagagcacattgcctggtaagatggtatgaatctccagaaatagctctaaattgtggaataatgttaagagaatgcatcagacatga

SEQ ID NO: 623423 - DNA, 78 bp, Homo sapiens
ttgtgtggtcgcgtctcggaaaccggtagcgcttgcagcatggttctgcggggagtgtctccagccctgcctgcaggt

SEQ ID NO: 623424 - DNA, 50 bp, Homo sapiens
gaatcctgcaaagtgatgcctcagcttactgaaacaaatgcaggtatcaa

SEQ ID NO: 623425 - DNA, 101 bp, Homo sapiens
agggaccacatcaaagacagctttcacagtttgcgggactcagtcccatcactccaaggagagaagaaggttcctgttgtaaaagaagatgatgaaccaga

SEQ ID NO: 623426 - DNA, 135 bp, Homo sapiens
actcctcctttacttcatcatgacttgaagactcagaatatcttattggacaatgaatttcatgttaaggggcctttacaacaactaaacggacaggcattccagccccacgggaattttcagtaactgtctcaa

SEQ ID NO: 623427 - DNA, 100 bp, Homo sapiens
tgacatcagctctcctgggaccctccaagagcactagtgtctagaaggcactaagggattatcgagattgcagcctgtcactccacacacacgtctgcgg

SEQ ID NO: 623428 - DNA, 90 bp, Homo sapiens
ggagcctgctccctgctcagctgcccgtgcaggaggagcggcagcgtggcaaggaccggaacgagaatgaggtggagtcgaccagcagcg

SEQ ID NO: 623429 - DNA, 82 bp, Homo sapiens
tcaagcgggagtatgaccacatgaatggatccagcaccgaacaagatttgtgatgaaatggagcctggaacaaactcttttc

SEQ ID NO: 623430 - DNA, 87 bp, Homo sapiens
ttggatggcaacgagctcaccctggctgactgcaacctgttgccaaagttacacatagtacaggatggcacatttcctagaggcaga

SEQ ID NO: 623431 - DNA, 105 bp, Homo sapiens
cgaggacggtcggactcccgcggcgggaggagcctgttcccctgagggcaggatggcagcagatgaaagctcacagaacactttgcggctccagttcaaggcaat

SEQ ID NO: 623432 - DNA, 100 bp, Homo sapiens
aaaccctatttctctaagaccattcgcgatttagaagttgtggagggaagtgctgctagatttgactgcaagattgaagctctcgtggcattatccttca

SEQ ID NO: 623433 - DNA, 100 bp, Homo sapiens
gttggtgcttcttttcagtgccagtccatccatcacgaccacatttgtcatgatgacagtgacaagactcctgggagagttggctctcaaggttctgatt

SEQ ID NO: 623434 - DNA, 102 bp, Homo sapiens
cccatcctgccgtccttctccactttcgccagcccgtgccgcgagcgcggcctgcaggagtcgcaatgtatctgctgagcaaaaagatgaaaacaaagaagc

SEQ ID NO: 623435 - DNA, 90 bp, Homo sapiens
ccgacccctctgctcgcggccgcgcctttgaggtgtcatggagaaactccagctgggcccagagattctgcagcgggaaaatccaaggct

SEQ ID NO: 623436 - DNA, 75 bp, Homo sapiens
atttatggtcgcctttttgaatgagagtgcctggaagagctgggatgtctggttgagtcctatggcatgaatgtt

SEQ ID NO: 623437 - DNA, 101 bp, Homo sapiens
ccgccttttcagaagcggctgcgcacggactgctggagatggtggagtccgtcatggccttgttcccagtgtaccagatgacctggatggcatcaacccca

SEQ ID NO: 623438 - DNA, 95 bp, Homo sapiens
gccacaaatgctccttctcctggagacgcaactcaaggtacatgtcccagagcaagcacacggaggcccgggagctcatgtactcgggagccctg

SEQ ID NO: 623439 - DNA, 98 bp, Homo sapiens
gacatcgcgagcctcgtggtgtggtgtatggccgtgggcatctcctacattagcgtctacgaccaccaaggtgacctaccagttgaagattccgtgta

SEQ ID NO: 623440 - DNA, 100 bp, Homo sapiens
gcatccttggggagagcagcaccgaggccagcaagacgctgcccgccatcgaggtgaaggccatggaggtggacatagaggagaggcctaaagagcttgt

SEQ ID NO: 623441 - DNA, 101 bp, Homo sapiens
agtgctcctagagaacatccatttgtcttgcaaagtgttggaggacagacattaacagtatttactgagagctcatcaggcacagtgtcttataaatgtaa

SEQ ID NO: 623442 - DNA, 100 bp, Homo sapiens
gaaccgcagcagcgtggaagtgcgcatggagtttgtcaggcaggccttggcgtaccttgagcagagatgatgctggagggtcttgaaatctttacagtaa

SEQ ID NO: 623443 - DNA, 100 bp, Homo sapiens
cgattatccggaggagctggaagatgacgacgaggacgccagttactccacggaaagcagcttcagcagcactccagcctcgtcacgtgttcaatatgct

SEQ ID NO: 623444 - DNA, 96 bp, Homo sapiens
attcttccaaggaaccagtgcgaaggtacctgaaagaattccgcacagagcagtgcccactctttgtgcaacacaaatgcacgcagcatcggccct

SEQ ID NO: 623445 - DNA, 75 bp, Homo sapiens
tcgggatctcggtgctgcagacggcgagacctcctgcacagaaagtctttatctcttgcaaggttcagtagtggc

SEQ ID NO: 623446 - DNA, 100 bp, Homo sapiens
aagatccttgggctccaggtccagcaggcggagcactgttcagtccagcgtcggaagtggaagctgaacctgattgcagagttggagtccagagttctgg

SEQ ID NO: 623447 - DNA, 51 bp, Homo sapiens
cttgctgcaggctctggggagtcgccatgagacacctatggctgccgatga

SEQ ID NO: 623448 - DNA, 75 bp, Homo sapiens
cccgactcaacgtgagacgcaccgcccggactcaccatggcaatactgaacactgcgcagcttgcagaggtctcc

SEQ ID NO: 623449 - DNA, 99 bp, Homo sapiens
gaagcaccgtggctgagtctgtgagccagcagataaagcatatgatggctttcattgaacaagaagccaatgagaaagcagaagaaatagatgcaaagg

SEQ ID NO: 623450 - DNA, 83 bp, Homo sapiens
gaatggacaagcttaataaaataaccgtccccgccagtcagaagttgaggaaataatgcaaaaggtgtcccaaggctcctgac

SEQ ID NO: 623451 - DNA, 82 bp, Homo sapiens
ctccctctgcccccccttccccacgcaaccccagatccatttacactttacagtgctggagaatctggtaaaagcaccattg

SEQ ID NO: 623452 - DNA, 82 bp, Homo sapiens
ccttcggcagtccacccaccgccgccgcctcccagtccttcagtgaatctacagacctattttctcaggagctcagcctggc

SEQ ID NO: 623453 - DNA, 98 bp, Homo sapiens
gtccagaagtgtccaaaccacaagttctcaaaactctctgaaaaatggctccctccgagttaagggttttggccaaattgggcgagggcacaaaataa

SEQ ID NO: 623454 - DNA, 75 bp, Homo sapiens
ttgaaccgaccatcagcttatacaacggagctggagttcgcccaaatcatcatcatcgtcgtggtggtcacggtg

SEQ ID NO: 623455 - DNA, 96 bp, Homo sapiens
ctgcttgcggctagtggatggtaattgcctgcctcgcgctagcaggaagatgcctggaatgatgtcgtcagtaatgcctggaatgatgatgtctca

SEQ ID NO: 623456 - DNA, 82 bp, Homo sapiens
cctgccgtccttctccactttcgccagcccgtgccgcgagcgcggcctgcaggagatgagatcgtggggctcaccagcgtcc

SEQ ID NO: 623457 - DNA, 101 bp, Homo sapiens
gcgcttttcaccgcggccatcctgcaggcacagttgccgattacagatctgcttggctttgaggaagagtggcagtactgcctcactgcataagggatggg

SEQ ID NO: 623458 - DNA, 100 bp, Homo sapiens
agcgtgccacgcgctacaactacaccagcgaggagaagtttgccctagtggagtgtggcaaaggagcagagaactttgacaagttcttcacacgaggaca

SEQ ID NO: 623459 - DNA, 129 bp, Homo sapiens
cgggttgagatccacagagctaaacgttttagagtaccaaccattgtgtgctgtgaggtaaagggttcttgaagcttttgagattaacaatggcaggaaaatcatcactttttaaagtaattctccttg

SEQ ID NO: 623460 - DNA, 100 bp, Homo sapiens
tctcctatgatggcagcgaaaacttatcacggttttggcgctttgacttccgtccaaaacctgatccttattgtcaagctaagtatactttctgtccaac

SEQ ID NO: 623461 - DNA, 100 bp, Homo sapiens
gcagacagcgagtggcgacgatctggaggagcaccggaattcacagaagcagatgaagctcctacagaaaaagcagagccagctggtgcaagagaaggac

SEQ ID NO: 623462 - DNA, 100 bp, Homo sapiens
gtggtgttggccttcgagctgtactaccataccacccagaggcatttcatccttcatgaagccattcaggattttgaattgcatatgagtgcttggctct

SEQ ID NO: 623463 - DNA, 101 bp, Homo sapiens
ccgatgggaaacccggagaccaaatccttgagccaaacttgcttcctgctgtgatgctgttcaaaactttgttgtttctcagaataacactccagttggga

SEQ ID NO: 623464 - DNA, 97 bp, Homo sapiens
attaaattatgaagatgtaaggaaaaaatcctacgctaacactgtcgcagtttgaaaggtgtcatggagaaactccagctgggcccagagattctgc

SEQ ID NO: 623465 - DNA, 96 bp, Homo sapiens
ctgtccccagagcctcagtttgtgcaggacaccgacatggaacagggactcactgggggagcatattaatgaaaagtgccataaactgaaaaacca

SEQ ID NO: 623466 - DNA, 74 bp, Homo sapiens
ccgtgtgggagcgggagctgcggaaagattggctcacagtggttgattgatcaaccccattggacgttggttct

SEQ ID NO: 623467 - DNA, 83 bp, Homo sapiens
ctcctgagtggctgggactacaggacatacagcagctcctccagctccagcagctggtgcttgtgccaggccaccacctccag

SEQ ID NO: 623468 - DNA, 97 bp, Homo sapiens
agcctacggctgaatgagctgccatccacgctgcagcgccgcactgacttccaggtgaagggcacagggatcctgtacgacacgtacccactctcgg

SEQ ID NO: 623469 - DNA, 90 bp, Homo sapiens
ctggatgagcagcaaagggtcctggaaggaaagaatgaagaggccctgcaaggcttcagtgtcatttgaggacgtgactgtggacttcag

SEQ ID NO: 623470 - DNA, 75 bp, Homo sapiens
tatgttaatatcattaagattctgcttaatgctggggcagaaattaattcaagggacacggccaacacggtgaag

SEQ ID NO: 623471 - DNA, 80 bp, Homo sapiens
gcgaggtggccggagccgtgtggaccaggaggagcgctgaaatctggcattttttaaagtttgcgccccacaaagaggaa

SEQ ID NO: 623472 - DNA, 75 bp, Homo sapiens
tgattgatgctcgtgactgcccacatataacggtgaacctgctcctcaacaagggagccagcctgaatgtctgtg

SEQ ID NO: 623473 - DNA, 101 bp, Homo sapiens
cgaggacaactacaccatcgtgcctgctatcgccgagttctacaacacgatggactagaggcttttaccagatttcttaaaactgaattcagtgaagaaaa

SEQ ID NO: 623474 - DNA, 75 bp, Homo sapiens
gcgaccgccatggcgttcctcaaactccgtgaccaggccaaacgtaccaagaaagtcgggatcgtcggtaaatac

SEQ ID NO: 623475 - DNA, 75 bp, Homo sapiens
tccgtgcaatggatccagcaggacagctcagcccagagagttgatagatgggagacctttaactctgaaggacat

SEQ ID NO: 623476 - DNA, 75 bp, Homo sapiens
atcccaggacaggtggcactctttcagaatgagtccctggaacgccagatgcgtgaaatggaagagaactttgcc

SEQ ID NO: 623477 - DNA, 75 bp, Homo sapiens
cagcctcccgccggccgtctccttaacaccgaacaccccaacatgcccatcactcggatgcgcatgagaccctgg

SEQ ID NO: 623478 - DNA, 75 bp, Homo sapiens
tggaaacttgtctctagtgagaactttgacgattacatgaaagctctggactgtgccctgtccacggtgcctcct

SEQ ID NO: 623479 - DNA, 74 bp, Homo sapiens
atagttgctgctatacaacacaattataaaatgtcagcttttaaggggaggtggggaagacagggctccagcta

SEQ ID NO: 623480 - DNA, 100 bp, Homo sapiens
tgctgctgccgctgccgccctgagtcactgcctgcgcagctccggccgcctggctccccatactagtcgccggtgtctgtttgcctccttcctaaccatt

SEQ ID NO: 623481 - DNA, 96 bp, Homo sapiens
ggagggtcaaagaaactcctggttgagctcaaagttattttacattctgacagctctgacaactctgatttggaagatgacatcatcttatctctg

SEQ ID NO: 623482 - DNA, 90 bp, Homo sapiens
caatcttcgaaaactggatccagaactccattatatgagggaaggcaccattggagatatggctatcctgggtataacagaaagttttca

SEQ ID NO: 623483 - DNA, 75 bp, Homo sapiens
gcaacaggtgtttcaaggaactaattctctggtgctcaagtaaagctctttgtgacagggcttttcagcttaaat

SEQ ID NO: 623484 - DNA, 117 bp, Homo sapiens
caccttgggaacctagctgatgataggggggttccatctcccaacttgtccataattctgcttggtcagaatcgtgatggcattgtgttcagcactgatgactattttcaccatcaa

SEQ ID NO: 623485 - DNA, 100 bp, Homo sapiens
ggttgcaggactctttctgttcaggccagaccctctgggagcttctcagccattttccacagatcaggtgctgccttcacctgcctggagactgccttcc

SEQ ID NO: 623486 - DNA, 100 bp, Homo sapiens
cccgctgctcagcgtcctcatgtggggggtaaaccactcgatcaaagacacagctctccccttctatcaagcgcaagagagaagtcagccctcctggggc

SEQ ID NO: 623487 - DNA, 74 bp, Homo sapiens
cggccatcgtggctaaacaggtactgctggcaaggatggaacattactgtggacctggtcattggccctaaagg

SEQ ID NO: 623488 - DNA, 90 bp, Homo sapiens
tgtcctccccacaaacactgtgtcctcagcaaagcctggcccagcactggtgaagtgcaatcgactgttaaagtggtgtcctgccccaga

SEQ ID NO: 623489 - DNA, 90 bp, Homo sapiens
cgcgcaggagctcatgtggcctgcggctcctgtcgcctgtactctcaaaggtctatggccctgtgttcactctgtattttggcctgaaac

SEQ ID NO: 623490 - DNA, 89 bp, Homo sapiens
cgctggacaagcacgagggcgcgctcgagacgctcctgaggtatttgaaatggacatcgctaaacagttacaagcttatgaagttgagt

SEQ ID NO: 623491 - DNA, 74 bp, Homo sapiens
gagaaccaagtgcggacgctgtgcgagaaggattctgtttcactgaggccatctatccgatttcaaggaagcca

SEQ ID NO: 623492 - DNA, 96 bp, Homo sapiens
catcaacaagctctaccctgcttggtgaagatgcagaggttgcagcagattttgatatggaagcctccagtgagaaggagaacactcagccctttg

SEQ ID NO: 623493 - DNA, 75 bp, Homo sapiens
gccgtagccgtccagagactggcaggcctcggcctaaagagctcccagctcctccagcagccgacaggaggcccg

SEQ ID NO: 623494 - DNA, 90 bp, Homo sapiens
atacaaatcatggagccgctggggtcccttttgcctcagatactattttgaagggcaagtgtccagagaatggctgggatgaaagtacac

SEQ ID NO: 623495 - DNA, 98 bp, Homo sapiens
agccttgggtttctttcttaaaggactgatttttagaactccacatttgagggtgtttcccgaccagtccctgggcgccaactagagtatggactgac

SEQ ID NO: 623496 - DNA, 90 bp, Homo sapiens
ggcccttatccccttggcattgatcctgttcatgaaatatttggaagacagcatgagatctaacaacttgtgaagtgggaagaactgacc

SEQ ID NO: 623497 - DNA, 99 bp, Homo sapiens
gccgcgcttcgccgctgcgcaccccagcggagccaagccccacgctggccggacagggccgcctgtcgccggctgtgttggggtggaagaggaggaggc

SEQ ID NO: 623498 - DNA, 100 bp, Homo sapiens
gtactctccgagaggtcgttttcccgtccccgagagcaaggtctctgagcggcccctgatgttcctgttggacactcctggcgtgctggctcctcggatt

SEQ ID NO: 623499 - DNA, 75 bp, Homo sapiens
ctgcctggaccgtccgtgtctgtgaaagcaaagccttctagacaagctcagtggaatctgaagggcccaccccat

SEQ ID NO: 623500 - DNA, 83 bp, Homo sapiens
caaatgcgctcagcttcaattgacttgcagacctactggaagagaaccaagaagagctggcaactattgaagcccttgattca

SEQ ID NO: 623501 - DNA, 100 bp, Homo sapiens
caggcacagggcccgatgagccagagaagcttgggttcagtttggcaaagacttggtgcagatgtgacagcagttgaatttttaggtcatgtaggtggag

SEQ ID NO: 623502 - DNA, 100 bp, Homo sapiens
ggcagagccattattgttccgtgctgttcctgagtgtcaactatctgggggggacattcccagtggtggtgctagagaatgaattgatgtatggggttcc

SEQ ID NO: 623503 - DNA, 90 bp, Homo sapiens
gttcagctccatcgtctgcagcgtcccgcacacctggcagcaaaagaggccaccagcccctcgggttccaagatgcagctactggagaca

SEQ ID NO: 623504 - DNA, 76 bp, Homo sapiens
ggctttgcccaaatccaaatggatgaatgtagaccatcccattcatctaggagtggatgcccgtcaccaagttggg

SEQ ID NO: 623505 - DNA, 90 bp, Homo sapiens
agctgtgggagaaggcccagcgagacggggaggtttactgcatcgacgcgcggttctacgggaacgtcagccggttcatcaaccaccact

SEQ ID NO: 623506 - DNA, 75 bp, Homo sapiens
tggattacaaccttgcactatgctttccaggatgacaataacttagaggaggtgcgccagtctgtaactcctgcc

SEQ ID NO: 623507 - DNA, 98 bp, Homo sapiens
tttgggttgcatccactttttggctgttctgaagagtgttactgtgaacattcatgcacaaatttttatgtggaggccttgtctggttttagacagat

SEQ ID NO: 623508 - DNA, 75 bp, Homo sapiens
acaaggacatggtccttaagaccaagaagaatggcggggcggctacttccctgagaatgtcaaggccatgaccag

SEQ ID NO: 623509 - DNA, 50 bp, Homo sapiens
gaaaagaatgctgaaagtagcaaggtaaaatggccattacctcgtctaag

SEQ ID NO: 623510 - DNA, 97 bp, Homo sapiens
gttaaggattccaagtaactcttatttgtggagacggcactatgagaaaaaacattgatgtttggaaaaagtggaccaccttaaatagcttgcagct

SEQ ID NO: 623511 - DNA, 98 bp, Homo sapiens
ggatgctgatctaaacgtggaaaaaaacatatgctgtcaggaggataagagatgccttcagagaaaataaaaatgtaaaggatcctgtagaaattcaa

SEQ ID NO: 623512 - DNA, 75 bp, Homo sapiens
ctggagcctcagttggaagcagccgatccagcctgcggagcctgtggggcagaagcatcaagtgtacctgatttg

SEQ ID NO: 623513 - DNA, 74 bp, Homo sapiens
tgaatttgtcacattctcctgccctggcgctgacaagggtccagcctccgataccattgtgatgaatgactgta

SEQ ID NO: 623514 - DNA, 76 bp, Homo sapiens
cgggatggcggaggcgcctcctgtctcagttttcggctttgtgagaaaccttaccatcaaacacgatggccagcaa

SEQ ID NO: 623515 - DNA, 100 bp, Homo sapiens
gaggccacttggtagtggtcaagccctggggaccaagccttccatggaggggttcttggaccctgatgcttggtgtgacctgagtaaatttgacctccct

SEQ ID NO: 623516 - DNA, 100 bp, Homo sapiens
acctgcctaattaccttcaaacctgattttgcaagaacgaggctcaaggatgtgagggacacagtattgacagctgaagaaatgatttacgttttcccga

SEQ ID NO: 623517 - DNA, 83 bp, Homo sapiens
ctcgccatgccggcccggcggctgctgctgctgctgacgctgctgctgcccggcctcggggaagctcttcgtgggcggtcttg

SEQ ID NO: 623518 - DNA, 97 bp, Homo sapiens
agttctcggaggggagggggcgttagccccgcgcagccgccggcgtcgccgccatggacctaggaaatagacagacggttggaaaaaaaactgaaga

SEQ ID NO: 623519 - DNA, 88 bp, Homo sapiens
gaaaaggtggaagagcagtgccatccattgaatgggttgaacttttcacaggtacatggccatcatacatcccctccagccccggctg

SEQ ID NO: 623520 - DNA, 101 bp, Homo sapiens
gttgtctcttagaagtgggagctgaacgttcacagccatgaatgaaccacagtgcttctacaacgagtccattgccttcttttataaccgaagtggaaagc

SEQ ID NO: 623521 - DNA, 75 bp, Homo sapiens
gccctaacctctaagccctatgcctttactgcccggccttgggaaacaagacggagtcttgccctgtcacccagg

SEQ ID NO: 623522 - DNA, 100 bp, Homo sapiens
gctctgtgtgctgagcgttctaaaggaaggcgtccgttggccttcgtacccgtcttgattgagctgataggaagatgtcttcaggaaatgctaaaattgg

SEQ ID NO: 623523 - DNA, 73 bp, Homo sapiens
cctcagcagatgaaatacatgaaggagacctagtggaagtggttctttcaggagtccagctacttgctctttt

SEQ ID NO: 623524 - DNA, 100 bp, Homo sapiens
acacagaggatgatgctgactttgatgaagagcacgagcggctccgcaaataccactgaagaggacacactctgcacccccccaccccacgaccttggcc

SEQ ID NO: 623525 - DNA, 51 bp, Homo sapiens
ctgagccttgagctcccagtcgcaggttgggggccgtcccgctcctaaggc

SEQ ID NO: 623526 - DNA, 107 bp, Homo sapiens
caccatgccgctcctaagcctgcacagccgcggcggcagcagcagtgagaggagctggtgactgccctcatgtgtgatttgcggcggccagcggcaggtgggatgat

SEQ ID NO: 623527 - DNA, 83 bp, Homo sapiens
gtttcggcctggaggagttgtacggcctggcactgcgcttcttcaaaggttctgggccggagaaggggcgacgttcgggcacc

SEQ ID NO: 623528 - DNA, 85 bp, Homo sapiens
tgagagaggagctgggaggagcactgcaaatttcactttggacacgtgagtcagagcatcaagatggtgctcatgtggaccagtg

SEQ ID NO: 623529 - DNA, 100 bp, Homo sapiens
gaggaccggagcggaaaaccttctgaagtcaaagaaagtatctgttccatcaactgtgatatccagagtgattggaagaggaggctgtaatatcaatgct

SEQ ID NO: 623530 - DNA, 81 bp, Homo sapiens
aggaggaagtggaggaaccaggggacctccctcacggggaggacacatgggtggactgggtggttatggatcaggagacag

SEQ ID NO: 623531 - DNA, 90 bp, Homo sapiens
acacgcctgaaaattctcataccgctcccctcactgctattgactagataacgaaggacaatgcatatatacaaaattgctgtattgcct

SEQ ID NO: 623532 - DNA, 101 bp, Homo sapiens
ctctactggacaaacatttcctccaagttgattcgatgtcatcagtcccgtggtggagcctgtggagacaacattcagtcttatactgccacagtcattag

SEQ ID NO: 623533 - DNA, 82 bp, Homo sapiens
gacttgaaggagcctccccagcctcctagagtgttgcggagataggaacatgggagagaaacaatctgggtaacatgaaagt

SEQ ID NO: 623534 - DNA, 99 bp, Homo sapiens
aaaatcattaaattggagcctgacgttccatcctcagagcagcctgaactgttcctaaagaaacttcagcagtgctgtgtcatttttgacttcatggac

SEQ ID NO: 623535 - DNA, 100 bp, Homo sapiens
catggccgcttccagaccatggaggagaagaaagcattcatgaattacctccccagccaggaggatatgcctcataaccagttcatcaagatgatgatca

SEQ ID NO: 623536 - DNA, 100 bp, Homo sapiens
ccctctcaggacaacccagatgtgcaacaaagtgcgatgaagaagatagtggtgagctggcaaagccaaagattggttttccagagacaacagaagagga

SEQ ID NO: 623537 - DNA, 75 bp, Homo sapiens
ccctggttaatgtgggccatgtctggtgaaatgacaatggatgctctgttggctcgattgaaacttctgaatcca

SEQ ID NO: 623538 - DNA, 102 bp, Homo sapiens
ctggtgtggggaggccttcgagggcgtcagcgacgagctggggctgcagaagaagctacgcacagaggtcattcagctggaggacacgctggcccaggtacg

SEQ ID NO: 623539 - DNA, 98 bp, Homo sapiens
caaaaactccaaactcctctccaccagcgccaagaggttaccttccgaacaagaatctatcactgtaatattaacagccaaggtgtgatctgtctgga

SEQ ID NO: 623540 - DNA, 82 bp, Homo sapiens
tcctgccgtccttctccactttcgccagcccgtgccgcgagcgcggcctgcaggaggtgcccgtggttgacacgagctgtgt

SEQ ID NO: 623541 - DNA, 83 bp, Homo sapiens
atcgagagcgtcatgaacccgagctatagagaaaggagatgagtacctggagtagaacagaaaaattattatgtctgtgttcc

SEQ ID NO: 623542 - DNA, 100 bp, Homo sapiens
tggaagggcttaggaccaaatgtgctacctccaacgacctcacacaaaaagaaatccggaccctggagtgagcatttgtcctgtgctttcacattctttc

SEQ ID NO: 623543 - DNA, 96 bp, Homo sapiens
ctggtgcagctcaacgagctgctggaggacgagggccagctgacggagatggtgcagaagatggaggagctgctctgttaaaagcgaaaatgaaac

SEQ ID NO: 623544 - DNA, 89 bp, Homo sapiens
agaccccccccggaattctgagcaccaaaagcagggtttccaggcctgaggtgcccgccctggccccaggagaatgaaccagccgcaga

SEQ ID NO: 623545 - DNA, 100 bp, Homo sapiens
cttccacagccaagtgcgggagtccacgccattgttaaccccaaacagcccaaggagacgcccaaaagcttcagctttgactactcctactggtcgcaca

SEQ ID NO: 623546 - DNA, 112 bp, Homo sapiens
acgggaaggcgggagacgagaagcctgaaaagtcgcagcgagctggagccgccggaggacccagatgatgtggtaccagttggccaaagaagagcctggtgttggtgcatgt

SEQ ID NO: 623547 - DNA, 100 bp, Homo sapiens
gcagcctgccatgggacgtggggtccaccggtacagtaagactttgaccccgacgcaggcttcagtgattgccgcggatcagaagcctgagcactttggc

SEQ ID NO: 623548 - DNA, 100 bp, Homo sapiens
ccgggctacgctcctccatcacgtgatggtgatggaatttcctgataatgtgttaaatctcgatggacatcagaataatggtgcacagctaaagcagttc

SEQ ID NO: 623549 - DNA, 137 bp, Homo sapiens
ccgttcttgcctcaggccagtcgcctccaggccaagagggatccttcacccgtgtctgacttcccaagtaagaagcggaagaggagccgctggaaccaagacacaatggaacagaagacagtgattccaggaatgcc

SEQ ID NO: 623550 - DNA, 99 bp, Homo sapiens
ggaacctgctgtatctactcaagagtggaagttttcacaggtggagtaactaatacggcacaatatcagaacaggctaatggtgtatgaacctaaccag

SEQ ID NO: 623551 - DNA, 83 bp, Homo sapiens
cggctttggaaacgacgtcatgtgttaggcataatcaccagcaacacccgggacaataatacgggggccacctacccccacct

SEQ ID NO: 623552 - DNA, 90 bp, Homo sapiens
gctgatgctcatggtccccatggcatgggggcctcagggcagcctgcctggagcgggctacattgagagacctcagctgattcgagcaaa

SEQ ID NO: 623553 - DNA, 100 bp, Homo sapiens
atttgacacagagtgctataaaaagtatggaaaaatgtggggatgatgaccactggatcgtcgacacagactacgacacgtatgccgtgcagtactcctg

SEQ ID NO: 623554 - DNA, 101 bp, Homo sapiens
cctgcctttgacctttttgaagcctttgcaaaagtactaggttttgacaagcttgcatcatgcgtgagtataagctagtcgttcttggctcaggaggcgtt

SEQ ID NO: 623555 - DNA, 97 bp, Homo sapiens
aataggaagttgatgcggggtacagttactcccggaccggcggcgtgaaagtcgtgatatcatcgttgaactgcaaggtgcccggcgacgactgccc

SEQ ID NO: 623556 - DNA, 82 bp, Homo sapiens
acagccaaaggttctacaggaatggaaattctgctgtcaacattagaggtttactcctggcttgggggcattaggaagcact

SEQ ID NO: 623557 - DNA, 105 bp, Homo sapiens
cgatattgatattgaagcaatgcttgaggctccttacaagaagaattttgatttggctgctgggctgctaccttgaaatccaagccctaaaaatgccagcttctt

SEQ ID NO: 623558 - DNA, 98 bp, Homo sapiens
gcgatgctgaccggtggaaaccagagcagtacctcgtgtatactacgctatcattttaccaaatgttgcaagaactctggagttcttatggtagtaaa

SEQ ID NO: 623559 - DNA, 74 bp, Homo sapiens
aataatgtggggaggccagccagtcggtctaatttgaaagatcctgataacttaagtgactctctcttttccgg

SEQ ID NO: 623560 - DNA, 101 bp, Homo sapiens
ggggtcgagcgcggccggggcctgaggaggctacgcgaccatggtggagtatgaacccaccatcttctaccccacacgctcgctggacctgctgcatcggg

SEQ ID NO: 623561 - DNA, 58 bp, Homo sapiens
agaagctgaggatgaagaagatggttcagttccggaaggtgtcttagaggacattaaa

SEQ ID NO: 623562 - DNA, 101 bp, Homo sapiens
gccaagtatgtgccggagagaaacgtcgtgatttggagtattaagtctttcccgggagaagagaagtttacctttattgagaaatgtaacaaccctcgttc

SEQ ID NO: 623563 - DNA, 74 bp, Homo sapiens
cggcgctttcggcgcgggcccgggccccgagcgcccgaacagggagtctgaagatacagtattgctcgtcctca

SEQ ID NO: 623564 - DNA, 100 bp, Homo sapiens
ttttccacagaaggttagaccctgaaagagatggctcagcaccacctatggatcttgctcctttgcctgcaaacctatgccatggacaatattaccaggc

SEQ ID NO: 623565 - DNA, 54 bp, Homo sapiens
agccgcggatctcaccgccgctcagggctgatcagctgaccgaagaacagattg

SEQ ID NO: 623566 - DNA, 83 bp, Homo sapiens
cgggaggcggcggcggcgcggagcccagacaatgcagatcttcgtgaagactctgactggtaagaccatcaccctcgaggttg

SEQ ID NO: 623567 - DNA, 50 bp, Homo sapiens
agaagaatgaaccagaagttcaatggagctgcatgctgtttcccttgaac

SEQ ID NO: 623568 - DNA, 131 bp, Homo sapiens
gaaaacttctgagaaacttggagagtggaatgagaaagtgacccagtcagacctagatcctgaaggagctagacgagtgctacgagcgcttcagtcgcgagacagacggggcgcagaagcggcggatgctg

SEQ ID NO: 623569 - DNA, 75 bp, Homo sapiens
catcctcactgaacctgcccaagcccagaagggcccctgggtagacagacacagcttgatttcagagcagacata

SEQ ID NO: 623570 - DNA, 75 bp, Homo sapiens
ctcaggtcctcgggggcggcggccacgccaaggacggcctgccacagtgactcaggtcactcaaggaactatccg

SEQ ID NO: 623571 - DNA, 51 bp, Homo sapiens
tctggaatgtcattatcagacacaatggcatgtattgatgaaaatttggac

SEQ ID NO: 623572 - DNA, 50 bp, Homo sapiens
ccggcgcctcggacaccttcgagggttggctgctaaatcctgaagatgac

SEQ ID NO: 623573 - DNA, 97 bp, Homo sapiens
ggatggcagctatttgctgagggacagcgagagcgtgccaggcgtgtactgcctatgtgtgctgtccagctgggagctccccgacctccaggagggc

SEQ ID NO: 623574 - DNA, 87 bp, Homo sapiens
catgttgtggctgttccaatcgctcctgtttgtcttctgctttggcccaggatgacgtagctttgccaaagacttagaagctaagca

SEQ ID NO: 623575 - DNA, 73 bp, Homo sapiens
ggcaagaggcagaagagttggaggggtactgcattcaactcaagaaccaagcgcctccaggtctctacacgaa

SEQ ID NO: 623576 - DNA, 82 bp, Homo sapiens
gcctgctggtggctgctcgcgccgccggcgctgctcgcgctcctcacctgctccctggagctgagctcaatgtgcagcaatg

SEQ ID NO: 623577 - DNA, 101 bp, Homo sapiens
tcctccaccagaggactgggaggagcatgtcaacagaagtgaacatccacttgcccagctttactgccattcaatcatggaacaccatcattttgaccagt

SEQ ID NO: 623578 - DNA, 100 bp, Homo sapiens
gctactctctctttctggcctggaggctatccagcgccgctttgaagaggaatttatcaaaatgcgcatggagagacttcaggcctggatgaccaggatg

SEQ ID NO: 623579 - DNA, 75 bp, Homo sapiens
acagagatacccagacaacaggatcgtctcgtccaagggttcagcaccacccccttctccaacacctaacaaaga

SEQ ID NO: 623580 - DNA, 51 bp, Homo sapiens
aaggattccaagtaactcttatttggttttaaaatcaaagatgggaaaatc

SEQ ID NO: 623581 - DNA, 89 bp, Homo sapiens
aacccattcccagtctggaggccatttatttgctgagccccacggagaaggagctggtgagcaggctgctgcacctgcacttcaaggat

SEQ ID NO: 623582 - DNA, 100 bp, Homo sapiens
gttcacgagggcatatatgaagaaggcatttctattttagaaagcagttcgcttcgacaaaatttggatgccctcctgaaccagctgaaaagcttccctg

SEQ ID NO: 623583 - DNA, 82 bp, Homo sapiens
gccggaaggccatgaagcagggcttcgagttcaacatcatggtggtcgttggaatcgaagcctcttaaaatggcagatgact

SEQ ID NO: 623584 - DNA, 72 bp, Homo sapiens
cggctctgctcggtcctcaaaggtatgaggatacatgggctgcacttcacagaagagccaaagactgtgcaa

SEQ ID NO: 623585 - DNA, 100 bp, Homo sapiens
cttttgtcaattccagaatacaaactggaaaggaggagaacatgaaacattgcttgaagacaatggccgagacagcaggtcccaccctgcacagccacca

SEQ ID NO: 623586 - DNA, 90 bp, Homo sapiens
ggagctccggcagccgccctgttgaatctggtatcaagtgtcactctctccaagtccgcatcggaggcttctccacagagcttacctcat

SEQ ID NO: 623587 - DNA, 105 bp, Homo sapiens
cctgagcagagctctccgggttccccggctcgcggggcccggcgaagggcaggtgtccctggccagtgtccttccacctgtccacaagcatggggaacatcttcg

SEQ ID NO: 623588 - DNA, 88 bp, Homo sapiens
caaggacatcaagaagatcttggacagcgtgggtatcgaggcggacgacgaccggctcaacaagctgatccaccttgagatcaagccg

SEQ ID NO: 623589 - DNA, 50 bp, Homo sapiens
cggggagttaggatgacgcgagcgcttcgcctcaacagcatcaagaagct

SEQ ID NO: 623590 - DNA, 75 bp, Homo sapiens
tcaaggaagaaaaaggaagccccttaaatgccgcaccctacggcatcgaaagggtttggaaatcccttgtctcca

SEQ ID NO: 623591 - DNA, 75 bp, Homo sapiens
ctgagaaggacgcgcagtccatctctctcagcttccccgggcgctgcctggacaggcctgcctgcgtgctgggac

SEQ ID NO: 623592 - DNA, 88 bp, Homo sapiens
tatgtccagcctatttgcacaccatccaggagtcagtttattactggaaaaactgataaatttcaaacggaagagagtggcagcattt

SEQ ID NO: 623593 - DNA, 100 bp, Homo sapiens
ccttcccagtagctggaactacagcgagttcctggggaaaaccccagggcaaaacgctcagaaatggattcctgcacgaagcactagacgagatgacaac

SEQ ID NO: 623594 - DNA, 82 bp, Homo sapiens
gatactgcagagatattctactccatctcattcattgtacaggttctgtacagagtaatgagatgtgtgacggctgcaaacc

SEQ ID NO: 623595 - DNA, 51 bp, Homo sapiens
taaaagtactggaaaaattcacaagagagaagaagaaggaggttcctgctg

SEQ ID NO: 623596 - DNA, 75 bp, Homo sapiens
cctgctgaaagtggcgcaaatgtggtgatttacaagtcaagttaaaatgtccccagaagtggccttgaaccgaat

SEQ ID NO: 623597 - DNA, 99 bp, Homo sapiens
tgtttctggggcctctggcggtggcggcctggggcggcgcgacggctggtgcgcagggaggaaatcaaacagctacagtgattgcgttgtgttcaatga

SEQ ID NO: 623598 - DNA, 75 bp, Homo sapiens
cctccgccaccgtgcacatccgaatggggatgtgtttggccaaatgggagagtggttacaacacacgagctacaa

SEQ ID NO: 623599 - DNA, 82 bp, Homo sapiens
cgaccggctcctgctcaagatctcagagaaggaggaggtgaccacgcgcgagccttgatgacttacaagccctcaaggggaa

SEQ ID NO: 623600 - DNA, 87 bp, Homo sapiens
tggtggaacagctacgcatagaagccgggattgagcgcatcaagacaatgcagatcttcgtgaagactctgactggtaagaccatca

SEQ ID NO: 623601 - DNA, 48 bp, Homo sapiens
cacctgcggaggttctgccttcagtgcccatacatcgtgtacatgctt

SEQ ID NO: 623602 - DNA, 100 bp, Homo sapiens
ggaagactcagaaacacagcctgatgaggaggaagaagaagaagaagaaaaagtttctcaaccagagagcagcccgacggccatggaggctgaagagacg

SEQ ID NO: 623603 - DNA, 90 bp, Homo sapiens
gttcaaggaggccttccagctgtttgaccgaacagacccctttgctgatgcaagtaagggtgatgacctgcttcctgctggcactgagga

SEQ ID NO: 623604 - DNA, 100 bp, Homo sapiens
ttttgtacctcggggacctgctggagacctgccatttccaggccttctgggaactgttgacattcagggatgtgaccatagaattctctctggaggagtg

SEQ ID NO: 623605 - DNA, 74 bp, Homo sapiens
gcgctgatctacaagaaaatccacaagaacgcactttcctcccaggtctgggaggggctgaacgtggtgaagac

SEQ ID NO: 623606 - DNA, 50 bp, Homo sapiens
gggatttttagcccagcccatgaagggatcatagacggtatttctatgta

SEQ ID NO: 623607 - DNA, 108 bp, Homo sapiens
caagtgctcatcaactgccgcaacaataagaaactcctgggccgcgtgaaggccttcgatagggtgaggacgcttgagcggaagttagaagcaaaaatgatcaaggag

SEQ ID NO: 623608 - DNA, 75 bp, Homo sapiens
ggagcgtatcggcctcgccactgcaggggaagacaaaggcgctttggctaagctggtggaagctatcaggaccaa

SEQ ID NO: 623609 - DNA, 74 bp, Homo sapiens
ctgtcctggagcagatggagaaccacgaggagaaggcagagcccccccaggctatgaatgccctgatgcggttg

SEQ ID NO: 623610 - DNA, 97 bp, Homo sapiens
ggccgggggcggaggtgccagcgatcccgaggacaggtctgggcacagtagacgacaaccccgacttcgacaacctcgacatcgtggcacgggatga

SEQ ID NO: 623611 - DNA, 100 bp, Homo sapiens
agccacccaggcaaagcaggcacttttggcaaagaaggaggctgtgggtgagcgtggaggatgctcagatgcacaccgtcaccatctggctcacagtgcg

SEQ ID NO: 623612 - DNA, 75 bp, Homo sapiens
ggccgccctgggccgggccccaccggacggctccaccgaggacaccgcgtccagcttgtgtggcgaggaggacac

SEQ ID NO: 623613 - DNA, 100 bp, Homo sapiens
aaagagtgcatctgtagatgctgaaaaatcaatgctgtccaaacttaaacatggacatggtctgctatacagctcagactctcgtccgaatcctctcaca

SEQ ID NO: 623614 - DNA, 49 bp, Homo sapiens
ttttccctctccctttccctaaggaaagccatcaccaagtcgggcctcc

SEQ ID NO: 623615 - DNA, 90 bp, Homo sapiens
aaagaattcagaaggaacttgcagaaatcacattggaccctcctcccaactgtagatggagatggacacatggatcatttactgccaggc

SEQ ID NO: 623616 - DNA, 83 bp, Homo sapiens
cgaccgccgaatcgctcctgcagcagaggagactacctaggtggagaagcgtactgggccggcggcctgcacctctacacccc

SEQ ID NO: 623617 - DNA, 100 bp, Homo sapiens
aaattcttctttaagtccatggaccaggacttcggcttcggaaccaaaaagaagcttcccagagccggggccaggagccccaagcgccctctagcagcaa

SEQ ID NO: 623618 - DNA, 75 bp, Homo sapiens
aacatttcacacctgaagcaacccaattagcatctgaacaattgcaagcatgcctgatttgagatggggtcccag

SEQ ID NO: 623619 - DNA, 100 bp, Homo sapiens
gatattttaggccaaggagctactgcaaatgtctttcgtggaagacataaggtctcatcagaaaattgaagactccgaagaaagcagtgatgaaattctt

SEQ ID NO: 623620 - DNA, 98 bp, Homo sapiens
taaagattttcgaattattcagttggatattcctggaatggaggaatgcttgaatatagccagttccattgagattgctcgctgtaagcagctcatct

SEQ ID NO: 623621 - DNA, 75 bp, Homo sapiens
aagaaagagaaaagcagaaaaccagaatgaaagtagtcagggtttttggattcaaagcataaaaaccattacaag

SEQ ID NO: 623622 - DNA, 101 bp, Homo sapiens
gaggattggaggtgtcagtgttaaaggaacctctacaacgaaggtgaagccacggaagataagggctgaagaagatgcagagcagcctgaagctggtggac

SEQ ID NO: 623623 - DNA, 98 bp, Homo sapiens
ccaagcagcagaagtctcggcccaccgcctcgagggatgagcgcttccggtcagctatatgttctcctttcagccaagacctttcaccagtgcagggg

SEQ ID NO: 623624 - DNA, 75 bp, Homo sapiens
gtatcactcagaacgccaggaactatttgatgaggactatggacacacacctcctctacgtactggcagctgcca

SEQ ID NO: 623625 - DNA, 83 bp, Homo sapiens
ctctgctgctgccgccggcgaaggaggaggcgttgccggctaagaagaaatttcctgacttgtttgtcttcttggaagattcc

SEQ ID NO: 623626 - DNA, 75 bp, Homo sapiens
aagcattgcttcaaagcatggggctaactccagaatcccccattgattgtatgcaggcccagaggtagatatatg

SEQ ID NO: 623627 - DNA, 102 bp, Homo sapiens
gaagcaaatcacgtacaaagactgagacaaatgctggcttgccctccacatggtttactggacagggtcataacaaatgggtgtttgtgaaccgaagtttag

SEQ ID NO: 623628 - DNA, 83 bp, Homo sapiens
cagccgcccgcttcaaccccaggggaccagaggaactcagccctgattgcgataacgaaggaggcccaacttcattcaataag

SEQ ID NO: 623629 - DNA, 97 bp, Homo sapiens
ccgcagatgttgtcaaggtggcctaccaggaggccaggggtgtcgccatgaggcctaacatcgtgtcccagctcagccaagcctgcgatggagccat

SEQ ID NO: 623630 - DNA, 100 bp, Homo sapiens
ggggagattgacttagatggcttagacacaccgtcagagaatagtaatgagtttgagtgggaaggtggtaattcgaagattacctcccactttgaccaag

SEQ ID NO: 623631 - DNA, 99 bp, Homo sapiens
tcgggatatcgggtggcggctcgggacggaggacgcgctagtggccgagaactactggtggcgtggccagaacacacggacgctgtgtgtggggccctt

SEQ ID NO: 623632 - DNA, 97 bp, Homo sapiens
tacgagtgcgtggcctcctaatccggatcctagtcctgagcgtgtctgtgtgcgagtggactaatagggatgccaaaggaaaaatatgatcctccag

SEQ ID NO: 623633 - DNA, 74 bp, Homo sapiens
caaaaaagggactgctaagaagataccaccagaatggtggtttggcctggagtgatgatgcagatggaggccgg

SEQ ID NO: 623634 - DNA, 98 bp, Homo sapiens
aggagcacgccaatgccaagaagatcctgctggagatgggggagttctttcagattcaggtatattgagatcttcagaagtagcaggagtgaaatcaa

SEQ ID NO: 623635 - DNA, 88 bp, Homo sapiens
catgaccgctcgcggcctggcccttggcctcctcctgctgctactgtgtccagcgcagattctggaatacccaattgatgtacaacgc

SEQ ID NO: 623636 - DNA, 74 bp, Homo sapiens
caggaagattgctggctcagaggctctatgcaggttccactgtcaagttaattttcctgagagaccaagacctg

SEQ ID NO: 623637 - DNA, 97 bp, Homo sapiens
gaaatggccctcagctaccacaagttaattcaggagaactaccttctcaattctgtgcaaggaacttggaatccattttgatcacatatggcaaaaa

SEQ ID NO: 623638 - DNA, 90 bp, Homo sapiens
caatcaccccttcctcactcagttgttctgctgctttcagacccccatcaatgaactgagccatgttcaaatccctgttatgttgatgcc

SEQ ID NO: 623639 - DNA, 100 bp, Homo sapiens
ttcttggcaggaccccccttgatttgaaaaatgtgtgagtgctaaggaagctttggagactgatctttataagcggtttattctggtgttgaatgagaag

SEQ ID NO: 623640 - DNA, 127 bp, Homo sapiens
cctggcgtctccctccctgaagacgtggtcccagccgggtgtcctgacgctcggggttcagtgaaccctgcggcttcgaggcgacctacctggagctggccagtgctgtgaaggagcagtatccggg

SEQ ID NO: 623641 - DNA, 101 bp, Homo sapiens
cgtactttgtctgactacaatattcaaaaggtacatccagacactgaaggaccacaggccccggatggtgtgggacagccaggcctcagagcacttcttcg

SEQ ID NO: 623642 - DNA, 100 bp, Homo sapiens
cttttccttggagagcctgctatggtgggtggaaagttgtaaacctacacccattgaaaaagcagccgccctccttcccaggagctgctgaagagagagc

SEQ ID NO: 623643 - DNA, 100 bp, Homo sapiens
aatgtcatcctcgtgaggtccaacctgccaggcctcatggacatgcaggctgtggaccgggcacagccactaggtcacagcggagtgaatcagctcggtg

SEQ ID NO: 623644 - DNA, 76 bp, Homo sapiens
tagcctgagtagctgggactaaagacagaccatggattcttacagtgcaccagagtcaactcctagtgcatcctca

SEQ ID NO: 623645 - DNA, 100 bp, Homo sapiens
ccccggccgcctccgcgagggcaccatggaggtgaatgcaggcgccatgtcagaaccggctggggatgtccgtcagaacccatgcggcagcaaggcctgc

SEQ ID NO: 623646 - DNA, 83 bp, Homo sapiens
agcataatgacattgtggacagtgacagcgatgctgaggatcgaggaacgttgtctggagagcttgtttcatatccatatccc

SEQ ID NO: 623647 - DNA, 74 bp, Homo sapiens
ggcgctatggcacccggctgcaaaatgatatcagtatcaagataaaagtttggaatgggagaaaaattctcaaa

SEQ ID NO: 623648 - DNA, 100 bp, Homo sapiens
gctgggaatccggaatgctgcccgatggccctgggtcctcgctgtggggcaatccgggcttgcagacgagtgccggtggtggtgtgcacattgagccccg

SEQ ID NO: 623649 - DNA, 101 bp, Homo sapiens
tccggactcagccaagttccccaacggctccccgtcgtcctggtgctgcagcgatcttcgtgaagactctgactggtaagaccatcaccctcgaggttgag

SEQ ID NO: 623650 - DNA, 100 bp, Homo sapiens
ggtagcaactcttccacaattaaaggttatgatgtgattgctcaagcccaatctgggactgggaaaacggccacatttgccatatcgattctgcagcaga

SEQ ID NO: 623651 - DNA, 100 bp, Homo sapiens
gaggagacatcggcctctgcaggcttgccgaagaagggaggaaggtgctcgggtcttcggggcactgggtcccatcggtccctcctcacctgggctcacc

SEQ ID NO: 623652 - DNA, 74 bp, Homo sapiens
gatggtaaccgtgtgttccaagcacagatgaagctctggggggatggaactgcaggatccaaagatgaatggag

SEQ ID NO: 623653 - DNA, 82 bp, Homo sapiens
ggaataagcctggaagaaaaagatacaacgaactagcacaacgaggagccagccccagtgcctgctgagccgtttgacaaca

SEQ ID NO: 623654 - DNA, 87 bp, Homo sapiens
aagatctgctctctcaatatgaaaatggtagctccacagtagggaccagttactctccacaagaaaattcacacaaccacagtgctc

SEQ ID NO: 623655 - DNA, 88 bp, Homo sapiens
tacagaacaacatatcgtatcagatggcagacatacatcatttaaagggtgaatctggattgggaaagtcgacattaatcaactcatt

SEQ ID NO: 623656 - DNA, 80 bp, Homo sapiens
aacctgtccaggagctggcatgacgtgcaggtctctagcgcgttttaaaatcaaagatgggaaaatcggagaaaattgcc

SEQ ID NO: 623657 - DNA, 119 bp, Homo sapiens
gctggacatagactggtgcccacataacgatcaggtcattgccagcggttcagaggactgcacggtcatgacaatgcagatcttcgtgaagactctgactggtaagaccatcaccctcg

SEQ ID NO: 623658 - DNA, 108 bp, Homo sapiens
ccgggaggaaggaacgaggcaaggagctaaagcagcgtgcgttcagccctggggctactgcagcactggggtgtcagttgttggtccgacccagaacgcttcagttct

SEQ ID NO: 623659 - DNA, 98 bp, Homo sapiens
agtacaaagaagtcctgaaactttgggacagagcgggatgccaccagcttgtccaaagggaagttccaggagctcctggtgggcatcgttgtggagaa

SEQ ID NO: 623660 - DNA, 100 bp, Homo sapiens
agaggaggcagattcccctctacatagacgacaccctgacgatatgagatcctgactccaaactccattcccaagggtttcatggacgggaagcaggcgt

SEQ ID NO: 623661 - DNA, 100 bp, Homo sapiens
cttgagagaaaagcccccaaaagcagctattcagaaaacatcggttgtgaagagaaagccaaaaagaatgccaacaagcctttgctggatgagattgtgc

SEQ ID NO: 623662 - DNA, 98 bp, Homo sapiens
ggagaggcctggaggacaccaacatgaatgtgaaagatgttgcagaagtgttccagaagtggctgaagatagaaggaaaaaagtgccactgcctatca

SEQ ID NO: 623663 - DNA, 51 bp, Homo sapiens
tggaattggttatgctactgtgttctcagatatgagatcctgactccaaac

SEQ ID NO: 623664 - DNA, 82 bp, Homo sapiens
ctccaaagagaagaggactcttgctatggttcagatgtgagatctgtggatttacttgtcgacaaaaggcatctcttaattg

SEQ ID NO: 623665 - DNA, 75 bp, Homo sapiens
ctacacttgcttccaatccatacaggcccaaaagagttcagaacatatgaagatccatgagaaggaccctaacag

SEQ ID NO: 623666 - DNA, 130 bp, Homo sapiens
ctgccgcgccggggcctgagctgccgcctcctccgccgcccgaaaacccggagtgccccgcacaggtactccaaagattcaggtttactcacgtcatccagcagagaatggaaagtcaaatttcctgaat

SEQ ID NO: 623667 - DNA, 100 bp, Homo sapiens
ctgttgtccaacagaacgacctagtatttgaatttgctagtaacgtcatggaggatgaacgacagttatataagtttggagagacagtttctattgtttt

SEQ ID NO: 623668 - DNA, 100 bp, Homo sapiens
tctctgcctccaaatgtgaattcctcagtgacagcacagcctgctcaaacttcatatttaaggcatggaagaggagatggttcgtgttacgcagtggccg

SEQ ID NO: 623669 - DNA, 82 bp, Homo sapiens
gaagattcgatggacatggacatgagccccctgaggccccagaactatcttttcgagtgaagacatttccacctggacacct

SEQ ID NO: 623670 - DNA, 100 bp, Homo sapiens
acaaacgagggttcccgggattggaccgacgcagccatggtctggctctgggagaggagtggacagcagctggttgagatacatccccatctggagacag

SEQ ID NO: 623671 - DNA, 100 bp, Homo sapiens
caactcaagttgcaaggatattcctcatgtatcatgcaaggatattcctcatatatcatctcaatctgaaattgaagtgtctgtctctgcaaggaatatc

SEQ ID NO: 623672 - DNA, 90 bp, Homo sapiens
ggccgagcaggaggcgccatcatgaaccaacatcccgggtaaccgggtggctgaaggacaggtgacgtgtccctacctcccccccttccc

SEQ ID NO: 623673 - DNA, 75 bp, Homo sapiens
gtggttcgatggctgccgcggctacgctgaggctctccgctcagggtcgagctgtgcagttttagcgggtacaag

SEQ ID NO: 623674 - DNA, 100 bp, Homo sapiens
aggaagtaccttcgcagtgtaggagatggagagactgtggagtttgatgttgttgaaggagaaaagttttctggatatgccgcagaaggatccgtgccag

SEQ ID NO: 623675 - DNA, 100 bp, Homo sapiens
ctgcatctaccttcaggactcggaggtcaccgtgcggggcttccggatctatggctccccatggaaccatcactgttgctggaggcacctgacaaatcct

SEQ ID NO: 623676 - DNA, 98 bp, Homo sapiens
cgggaagatggcggcgccgctcatccccctctcccagcagagcggttccgccaccccagccgcagatgtttggtgaagagctgcctgacgctcaggac

SEQ ID NO: 623677 - DNA, 87 bp, Homo sapiens
gagattcaagattatttgcaacagctcacgggagcaagaacggaactgtggctgcaccatctgtcttcatcttcccgccatctgatg

SEQ ID NO: 623678 - DNA, 100 bp, Homo sapiens
cagcaggtgcgcaaggtgaaatgttcactgttaaagagatacattatggtgccgagtggtaacatgggagtgtttgatccaacagaaatacacaatcgag

SEQ ID NO: 623679 - DNA, 90 bp, Homo sapiens
gctggatttaagcactgctgcactttatgagggcagagcggcttgggtaaatccaccttaatcaacaccctcttcaaatccaaaatcagc

SEQ ID NO: 623680 - DNA, 75 bp, Homo sapiens
tttggcagctaattctagatttggatcattgcccaaagttgcacaaggaccatgtctcatacattccatgaatgg

SEQ ID NO: 623681 - DNA, 100 bp, Homo sapiens
tccgactactttctccttcaagggcggcgactggcggcgcgatggacctgaccgggctcctgctggacgaagaaggcaccttctccctcgccggcttcca

SEQ ID NO: 623682 - DNA, 100 bp, Homo sapiens
gctgccacaatgggacatgtgcaagggcaacctgggctccttgcagctggaggtgcggctgcgggacgagacggtgctgccctccagctactaccagcca

SEQ ID NO: 623683 - DNA, 49 bp, Homo sapiens
aaagcaggcgactacagccacgtgaagggaaatcgtggaacacatggtc

SEQ ID NO: 623684 - DNA, 74 bp, Homo sapiens
gtacaagaggaagtactcagccgctaaatccaaggtggccaaacaggagaagaagaagaagaagacaggtcggg

SEQ ID NO: 623685 - DNA, 145 bp, Homo sapiens
cgaggcgagtgtggaaggactcctgaaccagctcgtcctggagcacctgcagctggcgcctctgcagtggggggaactaactgcacattcaagagaggcgtccgtggatgctgggtctcactgccaaagccgaacacggcttcgg

SEQ ID NO: 623686 - DNA, 90 bp, Homo sapiens
tggttctccaggaaccgaaaaggcgaggagtatagtacggcaaaaaactgtcgaatttatccagttggcgaaggactttgaggatttccg

SEQ ID NO: 623687 - DNA, 98 bp, Homo sapiens
agcagttgtctgatgaagagaagacaatgcctgtggaagacaagtcagaccccccagaggggtctgaggaagccgcagagccccggatggacacacca

SEQ ID NO: 623688 - DNA, 58 bp, Homo sapiens
cgagtggtctaaggcgccagactcaagacaaatttacatgtattggagaccagaccag

SEQ ID NO: 623689 - DNA, 82 bp, Homo sapiens
ctttgagaactcctccagcaacccatacctgatccggagaatcgaggagctcaacaaggtgagcatgggtttatgcgtctta

SEQ ID NO: 623690 - DNA, 101 bp, Homo sapiens
cagatgtctgacagccctgtgtgacaccaagataagtaacgtggccggcattcacaagaaggtggcccggaccatcggcatttctgtggatccgaggaggc

SEQ ID NO: 623691 - DNA, 50 bp, Homo sapiens
cgccggagccgcgaggccaagtcgcgtggggcaggcagtggcgctgcggg

SEQ ID NO: 623692 - DNA, 75 bp, Homo sapiens
gccggctccgcctcaccagcaagcgcattcccaggttcctcatgagagtgctggactcctacggggatgactacc

SEQ ID NO: 623693 - DNA, 82 bp, Homo sapiens
ggccatacctgggctatgactggattgcagaaacactttgtgctactctgtggggctttggaaaagcatgttaaatgtgata

SEQ ID NO: 623694 - DNA, 100 bp, Homo sapiens
attcactacctgcatgctaactgggtgttgcacagagatttggccatagtgtatgaaggccaagacaagaacccagaaatgtgccgagtcttgctcacac

SEQ ID NO: 623695 - DNA, 74 bp, Homo sapiens
gaagttggaagtgtctcttagcagcgcgcggagaagaacggggagccaggtggatccataaagaacccagccaa

SEQ ID NO: 623696 - DNA, 74 bp, Homo sapiens
ccgagagcgcgaatatcgtcatcgttagaagtggctgtaaacctagctgaagacacagctcatcccaaactcgt

SEQ ID NO: 623697 - DNA, 100 bp, Homo sapiens
ccgggtgtgagctgcctgaaaatgcactcggatgccgccgctgtcaggagtgaggaggccaacgggggcactccccagagcaggatttccagggaaaccc

SEQ ID NO: 623698 - DNA, 100 bp, Homo sapiens
gcgaggctgcccggagtccggataagccgggcgggagcccctcggccaggttcactatagttgcggagagtctgcagcaagttcggcagcagcttaaaaa

SEQ ID NO: 623699 - DNA, 75 bp, Homo sapiens
cgcggatgtcggcgaagagttcaaccagctccttccgcttccagccgttcgagtcctatgactccaggccctgcc

SEQ ID NO: 623700 - DNA, 100 bp, Homo sapiens
tgcaaaacaggactggctgatactacatattccagatggcttgcagggtggcccccgctccgacttcgacatggcctatgagcgtggccggatctccgtg

SEQ ID NO: 623701 - DNA, 101 bp, Homo sapiens
cggagggagaggctgcagagcgagggcaggagttagagatgtttatgattacttccgagctgtcctgcagcgtgatgaaagaagtgaacgagcttttaagc

SEQ ID NO: 623702 - DNA, 97 bp, Homo sapiens
accccagtgcacctccctggcctggtctgctgatggccaggctttaaggagttttaagctgagtgtcactgtagaccccaaataccatcccaagatt

SEQ ID NO: 623703 - DNA, 75 bp, Homo sapiens
ctgccgtccatgcggaagatcgtcgccacctggatgctggagcctcccgcgacgatgcccctcaacgttagcttc

SEQ ID NO: 623704 - DNA, 100 bp, Homo sapiens
gattggattgaggttcagatcaacaacgaggaaatatttccaacatgcgtgggccgggtgagagcaaaactttcagcaccacttgctggcatgggaaatg

SEQ ID NO: 623705 - DNA, 100 bp, Homo sapiens
atcccagcaatgtggattccctcttctacgctgcccaggccagccaggccctctcaggatgtgagtacctcgcctccctgggaatacagtcccttgttca

SEQ ID NO: 623706 - DNA, 50 bp, Homo sapiens
cctggatccaggataacggaggctggtgcctttgttccattgaatgttcc

SEQ ID NO: 623707 - DNA, 96 bp, Homo sapiens
cgataccaacggcaaaaatctcaagaaagaggtgggcaagatcctgtgcactgactgcggtgacgcagctggaccagaggctggcactcatcaccg

SEQ ID NO: 623708 - DNA, 75 bp, Homo sapiens
acactcagagtggaaaaagtaccatcatttgaaacagatccctgcatgtcactgagtccaccatgctttacagaa

SEQ ID NO: 623709 - DNA, 75 bp, Homo sapiens
ttccaagccaatgcccaagacattataaactttgaaattgttcctgaagatgacccccagaatgccattgtcagc

SEQ ID NO: 623710 - DNA, 100 bp, Homo sapiens
gggttcgttcccgggtcccgcgcgagctttcccgggataagtagctttagcgatcgggagacagccgggcgctgcaaggaatgaagccaagagtgatgaa

SEQ ID NO: 623711 - DNA, 83 bp, Homo sapiens
cttggagtcccagttcagcctgagtgcctcagaagctgccaccttgtttggtgaagccaaaaaccttccctcttacccggggc

SEQ ID NO: 623712 - DNA, 98 bp, Homo sapiens
ttggaataactggactcttttacactcaactaattggcatcatcacatagatggtgacacaagaatccatgctgaaggctgccttgcctctctttacc

SEQ ID NO: 623713 - DNA, 74 bp, Homo sapiens
gtccatacggcgttgttctggcaggtattaatctctggagaagacacatccacagttagcactttcttcagatg

SEQ ID NO: 623714 - DNA, 100 bp, Homo sapiens
ctctccttttccctctccctttccctaaggtccttattccttaaatggatacagagtgagagtatatagacaagactctgccacccagtggtttactggc

SEQ ID NO: 623715 - DNA, 75 bp, Homo sapiens
acctgcccagtcctggcccgcacaacttccccctcgggctccactgccagagtggatgaggatgaggatgacctg

SEQ ID NO: 623716 - DNA, 83 bp, Homo sapiens
aagtttcagatagcccaggtggttagagagtccaatgcaatgctcagccggtggctgctggcagcggaatcccccagatcaag

SEQ ID NO: 623717 - DNA, 100 bp, Homo sapiens
ggtgtagagtttgcatatatcaactgtggccttaatgagcatgttgacagcatcgatgctagacagacaaccggaacatgaacattttgcagtactgccc

SEQ ID NO: 623718 - DNA, 75 bp, Homo sapiens
gccgccgccggacgtcggcaacggagaaggagggaacctgtatgacaaaatccttcgtcagaaggacaagttgtt

SEQ ID NO: 623719 - DNA, 75 bp, Homo sapiens
ctgagggagggtccgagccagccgctgttttgccggaggagcccctcaggcccctgcaggtcaggagtcatcttt

SEQ ID NO: 623720 - DNA, 83 bp, Homo sapiens
aacgaacatgtcaaaggaggagcagcagagctggccccggggatcccctaacaacagtgagagagcaatgcgagcagttggag

SEQ ID NO: 623721 - DNA, 101 bp, Homo sapiens
cttcggctaggtcgtcacaggctccggctcatggcatcaagtggcatccatcataagcatgtagagcgcatgaagtacaggacaataaagcttcctacaca

SEQ ID NO: 623722 - DNA, 98 bp, Homo sapiens
catcacgcacgtgtctgactcggacgccgagtccaagagagatcctctgtcgatgggtcctcagaaagctctggaaaccatcggtgcaaatttacaga

SEQ ID NO: 623723 - DNA, 82 bp, Homo sapiens
ccggtcccaacccggcccaggagcatctttctccgcagaccgtttcctggcgagacaatgcagatcttcgtgaagactctga

SEQ ID NO: 623724 - DNA, 89 bp, Homo sapiens
aaaaatggacgcctggcaaccaagaaggaagagggaatggtttaaaatagaagacgccataaaagtgctgcagtatcacaaacccgtgc

SEQ ID NO: 623725 - DNA, 113 bp, Homo sapiens
attatgagccagtgctttgaccggagcgagctcagtgacaagaagcggccagagacgtttttcagaagaagtgaagtcaagatgaagaaccatttgcttttctggggagtcct

SEQ ID NO: 623726 - DNA, 80 bp, Homo sapiens
tacctgatccggagaatcgaggagctcaacaaggccctgggctgcatcttgtacctgctgtgcttccggcagcacccttt

SEQ ID NO: 623727 - DNA, 100 bp, Homo sapiens
attttgatgtggatgatgccaaagttttattaggtgtgtcgtttggactggtgatgagcgggtcttcttttataatcccaccactcgtctttctatgtgg

SEQ ID NO: 623728 - DNA, 100 bp, Homo sapiens
gcaatcacagaagccgacaaggcgttcaagcgaaaacatgaccgctgagcccatgagggtcttactacatattgcaacagaagataatattggaggtgaa

SEQ ID NO: 623729 - DNA, 100 bp, Homo sapiens
gattgccaacattgaccgtattacaaaggctgttgataatcaggtgtatgtggccacagcctctcctgcccgggatgacaaagcctcctatgttgcctgg

SEQ ID NO: 623730 - DNA, 51 bp, Homo sapiens
tggcaatcaggttctcttttggaaccttttgaggatggctttgcaaatggg

SEQ ID NO: 623731 - DNA, 74 bp, Homo sapiens
gaagttgtggaggagacaattaaaggtgacaaaatatctgaacagaagaggacttaggagagatctgaactcca

SEQ ID NO: 623732 - DNA, 75 bp, Homo sapiens
aggctttggctatgatgagacagatccatttattgataactcagaggctgtcaatgtgacggtggactacattag

SEQ ID NO: 623733 - DNA, 110 bp, Homo sapiens
actacgagatcgaccgcaccatcggcaagggcaacttcgcggtggtcaagcgggccacgcacctcgtcaccaaggccaaggaacggaaaacagttcttccttcaaagcat

SEQ ID NO: 623734 - DNA, 90 bp, Homo sapiens
ctcggccacggctccctcctcggtggtcgcggcgacctccggcggcgggaggcccggcctgggcaggttctgcttggattctgctagaca

SEQ ID NO: 623735 - DNA, 100 bp, Homo sapiens
tccttggaagcagaacccatagaactcgtggaaactgaggagaaggcagagcccccccaggctatgaatgccctgatgcggttgaaccagctgaagccag

SEQ ID NO: 623736 - DNA, 83 bp, Homo sapiens
agctggatggggttttgccctcaccaaaactttctctcttgataagttgggacagaaataacccagagccctggaacaaactg

SEQ ID NO: 623737 - DNA, 83 bp, Homo sapiens
ctcaaccctgagtggaatgagacatttagattagaatttccgctgcctgtgcactcatgaaaagggctttggctttaagggaa

SEQ ID NO: 623738 - DNA, 100 bp, Homo sapiens
ggcaggagggaagtgagaagcccaactaaagccccacatttgcagctcattgaaggaaagggaactgctcgcagaaagaagaaggtggttcatagaacag

SEQ ID NO: 623739 - DNA, 100 bp, Homo sapiens
tgattccaacgccaccaattccaacctgggtgatgaattagaagacaatggaaagaatttctacgaatctgatgatgatcagaaggaaaagactgacaaa

SEQ ID NO: 623740 - DNA, 100 bp, Homo sapiens
aaaagatatattacatgctgcaaagcagatagggccaaagaatgtggtgcttcgcctagctgtaaaattttttccacctgatcctggtcagctacaagaa

SEQ ID NO: 623741 - DNA, 100 bp, Homo sapiens
cgccacagctgaaggctgcgagggactaagagcagagaaacccttttccaaagagaaatgaagaagaaaactgtatgtaccctaaatatgggagataaga

SEQ ID NO: 623742 - DNA, 100 bp, Homo sapiens
tgggggcccaggtgcttcgggggtcccagccattaacagagcttcgtgcaggaagatgaagtcctcagtacattctgaagaagatgattttgttccagag

SEQ ID NO: 623743 - DNA, 90 bp, Homo sapiens
cggagaagcgcgcgggcgcgcaggccgcggggagcacctgggctactgctttacaaaaccagaactgatcttcacattggaacaaggaga

SEQ ID NO: 623744 - DNA, 82 bp, Homo sapiens
ggcccgacgactgtgacgaggacgaggaggcagccacggggcccctgggcctcaggcccaggcccaaggccaagtgagagag

SEQ ID NO: 623745 - DNA, 98 bp, Homo sapiens
caacatggtgcggtcggggaataaggtatgagatgcaagatgctggaattacttcagactcaatgatgaagaacttcttctttgtgccttcttgcatt

SEQ ID NO: 623746 - DNA, 117 bp, Homo sapiens
cccagaccctggagcctcagttggaagcagccgatccagcctgcggagcctgtggggcaggagaaactcccatgtatggaatcccactgtatgatttataaacagacaatatgtgag

SEQ ID NO: 623747 - DNA, 75 bp, Homo sapiens
gtaaaacgctttcaggtcggcgtctcgtttcatcctcacaacagccaggtcatgctttcagaacgaaaaggcaca

SEQ ID NO: 623748 - DNA, 74 bp, Homo sapiens
tgtttgtggataagacagtcccacagtccaggaagatgagaatgtgcctactgctcctgatcctccaagtcaac

SEQ ID NO: 623749 - DNA, 100 bp, Homo sapiens
taagcatgccctgaaaaagtatcgtcgagaagcctatcatcgggaatgggtactgttcaaaaaggaatgccccacaagtgttaccatggcaaaactggaa

SEQ ID NO: 623750 - DNA, 50 bp, Homo sapiens
ccagtgccgcgcagctgctggagatgatgataattccgaagaaggcttcc

SEQ ID NO: 623751 - DNA, 105 bp, Homo sapiens
gggacacctggttccagctgcagcacgtggacgctgactcggaagtgcagggcactttccctcatggtattgatattttgaccacagctgactattttgccgtcg

SEQ ID NO: 623752 - DNA, 87 bp, Homo sapiens
gaacagaaggcgatcaaggccaagtatccgccagtcaataggaagtacgagtgccagaagcggactcctagaagaggggagcagcaa

SEQ ID NO: 623753 - DNA, 75 bp, Homo sapiens
gcagaactccacgctgccctccatctggttgcagatatcaagaaagtcaacaacttcatcagagaacaagactta

SEQ ID NO: 623754 - DNA, 87 bp, Homo sapiens
gcacttcgagaagctggagaaggatttaagtgccctgtatgctcaaaatttgtatcctcagatgaaatggatttgcatcttgtaatg

SEQ ID NO: 623755 - DNA, 98 bp, Homo sapiens
cagcagagacgcgaaggagaggccctagaaccaattcaaggaagccttctccctatttgataaagatggcgatggcaccatcacaacaaaggaacttg

SEQ ID NO: 623756 - DNA, 101 bp, Homo sapiens
cctgccccggagaagccctcggccccagcccctgaggtggacgagctctcactgccattttgcagactctgatcacagtgaaacgttccatgggaacttgg

SEQ ID NO: 623757 - DNA, 82 bp, Homo sapiens
tgaaagcatgaaaaatcaaaaggagttcatgcttatgaatgctcgacttcagtttttcagaagaagtgaagtcaagatgaag

SEQ ID NO: 623758 - DNA, 82 bp, Homo sapiens
cagcagtgtggctgtcaacccaagctttgcgattacagtgagaaagatcagtctaaagaaaaggagaagaaagtgaaaaaaa

SEQ ID NO: 623759 - DNA, 109 bp, Homo sapiens
ttcatcgtgctattcctggtctacatcctgcgggtgcctttgaaaatcaacgacaacttgagcacaggtgtgtcaaggatgccacaatgccatcgacccagaagtgcag

SEQ ID NO: 623760 - DNA, 90 bp, Homo sapiens
cgttcatctaccacgctttcgtgtgggagcacagcatggccgtgggaacgagtgctctcagcaaggagccgtggtggaccctgcccgaaa

SEQ ID NO: 623761 - DNA, 100 bp, Homo sapiens
aggacttcgacctggagccgtcccaggactgtgcaggggactctgtcacatctgtgaatttctggtacgtgctggtgatgaatgatgagcacacagagag

SEQ ID NO: 623762 - DNA, 74 bp, Homo sapiens
gcgagctcgcgatgagtggtctcggcaggctcttcgggaaggtgacgacagtatgggctatcaatatccattca

SEQ ID NO: 623763 - DNA, 100 bp, Homo sapiens
gagaagtgcggaaacgaccaaagaggccgggcgaccactggagatggctgtgtccgagcccgaggccagcgccgcggaacccgtggcattggaagatgtc

SEQ ID NO: 623764 - DNA, 98 bp, Homo sapiens
acaggcgtgtgtcactgcgcccagagtactattaatcccgtagatgcaatatatcaacctagtcctttggaacctgtgatcagcacaatgccttccca

SEQ ID NO: 623765 - DNA, 100 bp, Homo sapiens
ctccgtgtcatcttcctggagaactaccgagtctcactggccgagaaaggacagtcattttgtttactcattcagccctgttgcaggtcccaataaactc

SEQ ID NO: 623766 - DNA, 100 bp, Homo sapiens
cactgaggcacccggacctcgtcaggccgctgcagatgaccattccagataatacatatgtgtcaagttcagagaatgatgaagatgtgctagttactac

SEQ ID NO: 623767 - DNA, 100 bp, Homo sapiens
aggaggtggaatattaccagtcagaggcggaaggactcctggaatgccacaaatgcaaatacttgtgcactgggagagattcatgttacatgtaaagctg

SEQ ID NO: 623768 - DNA, 100 bp, Homo sapiens
aggcagcctccgcggaggagcagaaggtactaggttttgacaagcttgcatcatgcgtgagtataagctagtcgttcttggctcaggaggcgttggaaag

SEQ ID NO: 623769 - DNA, 50 bp, Homo sapiens
ggaaaacatatattggagctacatggatggtgactgtcgttcctacagtt

SEQ ID NO: 623770 - DNA, 105 bp, Homo sapiens
cgcagggcctgcagcgggagctggacggcgagcgcgagcggcgcgagaaaacgagccaaactcaggctgtaccttgagcagctcaagcaactggtgcccctgggc

SEQ ID NO: 623771 - DNA, 75 bp, Homo sapiens
cgaggccagatcctctggttccggggcctgaaccgtatccagactcaggtgggcgacatgaccaacagaaagcca

SEQ ID NO: 623772 - DNA, 98 bp, Homo sapiens
cagagccgggaactagaggacggcccggcagacatgcagaaagtacgaatctgctctgagggcggatgggtgaccaaaagccagccccactgtgagtt

SEQ ID NO: 623773 - DNA, 88 bp, Homo sapiens
aatggcacttcattggccacctacagaaacaaaatgtcaacaaattgatgggtgaactccagtttgcttttgtgtgcttcctgctggg

SEQ ID NO: 623774 - DNA, 97 bp, Homo sapiens
cagggggcggcggaccgcggggcgctcatctggctctgctacgacgcgctggtgcacttcgcgctgggaagaaacccttttttcttggagccagcaa

SEQ ID NO: 623775 - DNA, 100 bp, Homo sapiens
caaccttcactgtcctaaaacgttaccagcagctgaaaccaattggctctggggcccaagggattgtttgagcaattgtatgatggctatgatgaagagt

SEQ ID NO: 623776 - DNA, 100 bp, Homo sapiens
gcttttactgctggattagctcaagttagctttgacaagacactgcccatctctaagataagaacctggaaaggggactctgttggccattggaaattgc

SEQ ID NO: 623777 - DNA, 95 bp, Homo sapiens
gtatacatgcatcgattctacatgattcagtccttcacacagttccctggaaatgtggcacaactctttacagacaactttgactaccaaactcg

SEQ ID NO: 623778 - DNA, 82 bp, Homo sapiens
cctgaacctgttatcacctggagacaccttacaccaactgccatggaattccatgaacacttgcacagcataggcaccaagg

SEQ ID NO: 623779 - DNA, 90 bp, Homo sapiens
aaggcatgtttccccaagcaatgaagaatctgagactgagcactacaaacaccactggtttcccgaaaagccgtccaagggctccggcta

SEQ ID NO: 623780 - DNA, 100 bp, Homo sapiens
ctgaccctgcgctccaagtccatgacagctgagctcgaggaacttgatctgccgacaccccaggccatcgagccccaggccatcgtgcagcaggtcccag

SEQ ID NO: 623781 - DNA, 50 bp, Homo sapiens
gacaacaccgttcccccagccgggctggtctggcggcttctctgttgaca

SEQ ID NO: 623782 - DNA, 100 bp, Homo sapiens
tgaagcccaagatcgtcaaaaagagaaccaagaaattcatccggcaccagtcagaccgatatgtcaaaatcaaggatccagccgcagaagccaggatgaa

SEQ ID NO: 623783 - DNA, 74 bp, Homo sapiens
ggggaattttgcaaaagtaaaattggcaagacatatccttacaggcagagagatagtttctaatggtgatgaac

SEQ ID NO: 623784 - DNA, 80 bp, Homo sapiens
gggaaatctccaagtcagaaaggcccgccaagctgccccctgtgtgctattctttgatgagctggattcgattgccaagg

SEQ ID NO: 623785 - DNA, 90 bp, Homo sapiens
aagctccgcaacaagatagcagggtacgctacgggccatgacatcacagagcactctgtgctgatccacgagtactacagccgagaggcc

SEQ ID NO: 623786 - DNA, 74 bp, Homo sapiens
gtgtcttcatcttacccagtggaacctaagaaattaaattctccagtgaaaccaatccgtaatctaaatggaca

SEQ ID NO: 623787 - DNA, 100 bp, Homo sapiens
agccatatttgtctatgctgctacgtctccagtgaatggttattttggaggaagtctgtatgctagacaaggagaagtctcaggggatccagaactgcag

SEQ ID NO: 623788 - DNA, 100 bp, Homo sapiens
caggtgaagaagctggaaaaagcccttaagaaaaacgtcaatgctgaagctgctgaaagatggcagaagaagtggtggtagtagccaaatttgattatgt

SEQ ID NO: 623789 - DNA, 96 bp, Homo sapiens
aagaccggaagctgagtttttatccgtcttgggcgtctttggtactggcttttttaggggtctgcctggggattacccttgctgtggatagaagca

SEQ ID NO: 623790 - DNA, 80 bp, Homo sapiens
aatgagcggccccagtaaaggctatttatcctttgcattgtctcatgatcagtggatgcaaatgcctattattattgctg

SEQ ID NO: 623791 - DNA, 132 bp, Homo sapiens
aggaaactggcggctgctggtagttccatgctgtctgttcagacttcagcttggtatcaacctctagaatcccgtagactctgcaacaagccaattcagagcttgcccaacatggacagcatttttagtgag

SEQ ID NO: 623792 - DNA, 108 bp, Homo sapiens
cccgttcttgcctcaggccagtcgcctccaggccaagagggatccttcacccgtgtctgacaatgcagatcttcgtgaagactctgactggtaagaccatcaccctcg

SEQ ID NO: 623793 - DNA, 100 bp, Homo sapiens
ccgctgtgtggttgcaacggagataaattcccggaaccgcgattcggcgtgtcaggtggttctgctgggcatggacatcctgtccgccctggtgacccgg

SEQ ID NO: 623794 - DNA, 75 bp, Homo sapiens
ggggattcgtgcgcggtaagaagctgcgcggtagcgcggtgagtgcccttggtttctagaatatgcccaaatgat

SEQ ID NO: 623795 - DNA, 80 bp, Homo sapiens
tgggcggttcagactcagggtgcaaatcagccggcaccaggagcagttcatccagatgctgaacgagccccctggggagc

SEQ ID NO: 623796 - DNA, 100 bp, Homo sapiens
atgactgcggcagcgaactgggtggcgaacggggcgagcctggaggattgtcactccaacctcttttcgctggggtcgaactggaaaaattagagtgcag

SEQ ID NO: 623797 - DNA, 83 bp, Homo sapiens
ccaatggggagcagaaggactcggacacaggtgtccctggccagtgtccttccacctgtccacaagcatggggaacatcttcg

SEQ ID NO: 623798 - DNA, 88 bp, Homo sapiens
catggggcaggagtgcatcaagtgccacatcaacgtgtatccacacaagcagggcaaactctttgattctacaatagctgatgaggga

SEQ ID NO: 623799 - DNA, 74 bp, Homo sapiens
cccgaccccaaaagagtattcttggatcttgcacaggaaggaattaaaggtattaggttgcagcgtctagggca

SEQ ID NO: 623800 - DNA, 100 bp, Homo sapiens
atccgagtcatgttctcttcgtttggacagattgaagaatgccggatattgcggggacctgatggcctgagccgaggtgcacaaatggagtccagaggag

SEQ ID NO: 623801 - DNA, 100 bp, Homo sapiens
ggaagtcatgctcgcttcacggaggcaatagctagccgaatttcacggtccctcatggtgtctcactccagcagacagaggattgtgtcgtgccaatgag

SEQ ID NO: 623802 - DNA, 100 bp, Homo sapiens
ctggcatggaataaaccagtaactaatatttcagctgttgaaacagaagaagttgagcctgatgaagaagaagaggactccctcaatgtggctgacttga

SEQ ID NO: 623803 - DNA, 96 bp, Homo sapiens
gaggagcagcatggcatttcagtcactggtttgcagagtccagtgggatgaagctctcttgactatgagtaaaggagaaaaggctcgactggagat

SEQ ID NO: 623804 - DNA, 75 bp, Homo sapiens
caggactccaaaatggcgtcagttggtgtacaaagataatcaatgctgattcggaggacccaaaatacattatca

SEQ ID NO: 623805 - DNA, 51 bp, Homo sapiens
cattagcaaggatgtttttaataaggagagaaggatattcctggactgact

SEQ ID NO: 623806 - DNA, 100 bp, Homo sapiens
agccatagttaccgcacagacaattgctctgatagtgattcatcattgaatcagattttctccaaaggaacatccggtgcttgccctgccaggagcccca

SEQ ID NO: 623807 - DNA, 100 bp, Homo sapiens
tttgcacatccttcgaaaagctgccaagttgaaaatggacgagtaatcgcctgctttgattcattgaaagagatgagtatgatgtatgtgccatttgttt

SEQ ID NO: 623808 - DNA, 100 bp, Homo sapiens
tgggggtggccgtccgggaggatgggggaactgtgggcgtcttctctccaaagaaggttggatggcaagcatgtggtgtttggcaaagtgaaagaaggca

SEQ ID NO: 623809 - DNA, 50 bp, Homo sapiens
gaaagatgaaacttcgagctcctctgtgcggaaacaggaaattataaaag

SEQ ID NO: 623810 - DNA, 90 bp, Homo sapiens
cttgggcccagtttatggcttccagtggaggcattttggggcagaatacagagatatggaatcagttatggctgattgtcctcacacaat

SEQ ID NO: 623811 - DNA, 95 bp, Homo sapiens
ttgacgtcgtccgagagtcttaaaatcctgctctggccggattccagactcgtgggggaaaggctgcggttgctgatgctattagaacaagcctt

SEQ ID NO: 623812 - DNA, 75 bp, Homo sapiens
gaccgtgtagccctcaggaggacgctggacaaggtggtgatcagggaagtggctttgggaccacaggtaaagctc

SEQ ID NO: 623813 - DNA, 100 bp, Homo sapiens
caggcacctgcggacgctgcagataagttacgacgcaactaatagggatgccaaaggaaaaatatgatcctccagatcctcgcagaatttataccatcat

SEQ ID NO: 623814 - DNA, 83 bp, Homo sapiens
ctccctacacaccctggttggacaggtagttacttttggtgacgctgtccagttcccacaatgtatcattccttatctgaaac

SEQ ID NO: 623815 - DNA, 83 bp, Homo sapiens
taacatttattcaggattaccagattattctgtgaggtatgccccagagtgcctgaaggagtataagttctactatgcgtcag

SEQ ID NO: 623816 - DNA, 74 bp, Homo sapiens
ctcggcccttgcctgcgcgcctaccaggctcgaccccagtttccagttgtcatcacaagaagcagtaatgttta

SEQ ID NO: 623817 - DNA, 100 bp, Homo sapiens
ggccttcgcaccccttcctgtcaggggccgaggatctcctgtatcgaaggtctaggtcactagtggattatgaaaatgctaataaagcactggataaagc

SEQ ID NO: 623818 - DNA, 100 bp, Homo sapiens
ggcctcacactagtatcgcatgtccactatccagaacctccaatctttcgggtgcatgtagtctttggactggttatttctggttttgaagtaatcgaac

SEQ ID NO: 623819 - DNA, 83 bp, Homo sapiens
tcaacacggagcatggaggcagtcaggcacagatgaggagagcatcctgactctgttgacatcccgaagtaatgctcagcgcc

SEQ ID NO: 623820 - DNA, 100 bp, Homo sapiens
gagtttatggctccttcagaatacatggttatctaccttgcctgctcctatgccacagtgtacctgatctacctgaaatttaaggcaacctacgatggaa

SEQ ID NO: 623821 - DNA, 83 bp, Homo sapiens
gtcatgagcgacagcggcgagcagaactacggcgagcggatacactgaagagatggtgccttggcacccttgcctggaactcg

SEQ ID NO: 623822 - DNA, 75 bp, Homo sapiens
agctccggcgccgagagtgggcatggcgacttggtctcagccggactcgggacagagcgggatgccaccagcttg

SEQ ID NO: 623823 - DNA, 75 bp, Homo sapiens
gcaaaaatgcccactttatgaagccaacggacaagctgaaagaccggcagagaccaatgccaatgtggacaactc

SEQ ID NO: 623824 - DNA, 75 bp, Homo sapiens
cggggcgctgcctggcccaggcgcacacggaagtggtgactctgttttgagaagtgcaaccagatctctcctgga

SEQ ID NO: 623825 - DNA, 100 bp, Homo sapiens
acgatacacacgttggatcaaccagctgacgccggagcagctcctaacccaggatgcagcagtctcggccctggctgctctatgcagtgaatattacatg

SEQ ID NO: 623826 - DNA, 75 bp, Homo sapiens
gcattgacatttaattttagggtcctttatatagaagggagagtagtataccaaatactacattcaccgaattcc

SEQ ID NO: 623827 - DNA, 48 bp, Homo sapiens
ccccctatcctatccgcaaacatactggagaaaatgaaactgggattg

SEQ ID NO: 623828 - DNA, 98 bp, Homo sapiens
cgactttgaggatctggaggacggagaggacctgttcaccagcactgtctccaccctagagttcacccatctcaggagcctggctggttggaggggac

SEQ ID NO: 623829 - DNA, 100 bp, Homo sapiens
gcggaagccatcacctggatgcctacgtgggaagggacctcgaatgtgggaccccagcccctctccagctcgaaatcgactgagcagggggaggaacatt

SEQ ID NO: 623830 - DNA, 50 bp, Homo sapiens
atggcccaggcagaccttgcagtcaaagtttgggccccatggtatccctg

SEQ ID NO: 623831 - DNA, 90 bp, Homo sapiens
cagctggtgaaggcagacagcgagtggcgacgatagcagcccgacggccatggaggctgaagagacgatggaatgccttcaggagttccc

SEQ ID NO: 623832 - DNA, 98 bp, Homo sapiens
accaccacgggcaggactcactgaaggagtttgtgcagtttgtgtgctcggatggctcgggccaggccaccggacagaggtggggctggtgtccgagc

SEQ ID NO: 623833 - DNA, 75 bp, Homo sapiens
ggcacctccggtaccgctgcagccaccgcggcccccgcggggagcccaagcaatctttaatgagctaccttgtga

SEQ ID NO: 623834 - DNA, 75 bp, Homo sapiens
gcaaaagcctttcatgattatcatcagacaacagtcagcgctttcgagaaacctgttttgcatttgccttgacac

SEQ ID NO: 623835 - DNA, 105 bp, Homo sapiens
taaagtccaggaagctcgatcaaatgcccgcctaaagcagctctcatttgcagggtaacttcctgatgttgccatggcatttgtaaactgtgatgacgctggtgg

SEQ ID NO: 623836 - DNA, 100 bp, Homo sapiens
cgtagatacaaatttttggatgatgatggatccatttctcctattgaggagtcaacatcaaagccatcggccagacagagttgaatgcaagcaatccaga

SEQ ID NO: 623837 - DNA, 75 bp, Homo sapiens
ggccgccaggaagcgccctacagctccggctgggcatgttattctcgttcaagttaatccaggtgagactttcac

SEQ ID NO: 623838 - DNA, 82 bp, Homo sapiens
agtttgtatgccagaagaagggtttaaagatatggccgcgtggaaagtgtcaaaattcttcccaagaggggatctgaaggag

SEQ ID NO: 623839 - DNA, 83 bp, Homo sapiens
tgggggacagtgaaatttggtgttacggctagatgaggctcaagaagcagaatgccaggccttgaggctacagctccagcagg

SEQ ID NO: 623840 - DNA, 97 bp, Homo sapiens
gcagccgtagacaccagctccgaaatcaccaccaaggacagtgataccaccaagaagaagaagaagaagaagaaagcaaaagaggtagaattggttt

SEQ ID NO: 623841 - DNA, 100 bp, Homo sapiens
gatccgcgagaaagacgaagagcttgagaaacacctctttgccccgtcatgccaaagaggaaagtgaccttccaaggcgtgggagatgaggaggatgagg

SEQ ID NO: 623842 - DNA, 90 bp, Homo sapiens
gtcttgggacccttgcatggtgtttcaaagggtggtgaagaactaagaatgtttggaatggttttggaaaaaattattattcctgaaatt

SEQ ID NO: 623843 - DNA, 51 bp, Homo sapiens
cttgcatatatttgactgcaatgttctggaccatcaatggagcctacaatt

SEQ ID NO: 623844 - DNA, 100 bp, Homo sapiens
agcccgacggcacccctgggggatcgggggcggcggtggcgccggcggcgggacaggaggaagtgaggaaggcagccccaagctgcagcatgaacttatc

SEQ ID NO: 623845 - DNA, 103 bp, Homo sapiens
gtcaactctggaaacgcctgtctttctccatggcaactgtctacgccgcaggctggagctgcccattaccggagcccgctggagtgcaatggcgcaatctcgg

SEQ ID NO: 623846 - DNA, 101 bp, Homo sapiens
gtcgaactgtgaattctacccgggaaactcctcccaaaagcaagcttgctgaaggggaggaagaaaagccaggatggccgagcctcgatttaacaacccct

SEQ ID NO: 623847 - DNA, 100 bp, Homo sapiens
cctgctcctggacccggcctgggagaagcagcagagaaaggtcatccatgcctggcttattatatcatctctattgttgctgttctttttttcattcatt

SEQ ID NO: 623848 - DNA, 83 bp, Homo sapiens
agactacagtccctacttcaagaccatcgaggatctgaggaacaagctttgtgtccctggtgatgttggaacattaatgatgg

SEQ ID NO: 623849 - DNA, 75 bp, Homo sapiens
tctccaatgcaatgctgtttgccctgaacatcatgaattcccaagaaggaggcagaggtggaggagacactgaag

SEQ ID NO: 623850 - DNA, 49 bp, Homo sapiens
ccgggggacagctgtagtgaagactgccaatctggctgaagccaatgct

SEQ ID NO: 623851 - DNA, 82 bp, Homo sapiens
tatatcctccaggaatactggccagctcactccaggcctgtatgaattcaaagtgattgtagagggtcaaaatgcccatggg

SEQ ID NO: 623852 - DNA, 74 bp, Homo sapiens
tcctaccttgattgcatcagggccattgcgtatggggacaccacacacaccctggtggagaagatgaactacat

SEQ ID NO: 623853 - DNA, 100 bp, Homo sapiens
gaaggaagcagctagcaaggtgacccatgcattggttaatatcagaagatgctcatgaagcagcaggaccggctggaggagcgagagcaggacattgagg

SEQ ID NO: 623854 - DNA, 100 bp, Homo sapiens
ttttcctttagtcaggaaggacgttggtgttgagcatccttttatcaagaatgccaaacctgtatcaatattaagagacctgatcacagaagctatggag

SEQ ID NO: 623855 - DNA, 77 bp, Homo sapiens
atgtactgcgcctggatgtggccagcagcaagatgaagagcgacgtcggcagctgagagagagagctcgtcagctaa

SEQ ID NO: 623856 - DNA, 98 bp, Homo sapiens
gaacgacagccgcttcactgacctaccccctggacctggtcagagcgcggatggccgtaaccccgaaggaaatattccaactccacagagtgaccaga

SEQ ID NO: 623857 - DNA, 75 bp, Homo sapiens
cttttgaagcaccctaatattggtcaaaatgcagatcttcgtgaaaacccttaccggcaagaccatcacccttga

SEQ ID NO: 623858 - DNA, 50 bp, Homo sapiens
ttttaatttttaaacttggtttgaaaggtttggtgcacctcgatttggag

SEQ ID NO: 623859 - DNA, 74 bp, Homo sapiens
cagtcacttgtacagcgccggtcaacatcgcggtcatcaagtactgaaagaaggtggaaagtttggttttgcag

SEQ ID NO: 623860 - DNA, 100 bp, Homo sapiens
cctcagacagtgacaatggattttcctcaactggtagcacgccggctaaacccactgtggaaaaattgagctgagagcagcaccaacaccacccaggatg

SEQ ID NO: 623861 - DNA, 100 bp, Homo sapiens
gaagcttgcagcttacatctgatcctgggcttccccatctggtgcttttcccatggagaacacacaaccaatgacctgagaattaatttatggcacttag

SEQ ID NO: 623862 - DNA, 96 bp, Homo sapiens
ctgttgacaagactgaggatagtttagaaggatgcttggattgtctgcttcaagccctggctcaaaataagaatgtaactggtcactacatttccc

SEQ ID NO: 623863 - DNA, 98 bp, Homo sapiens
ttacatatgagatgagtctcttgaagactacagatgtttcacttctccgaaccctgaggcagtgtgtgaagctgggacgccagccatgttccagaccg

SEQ ID NO: 623864 - DNA, 101 bp, Homo sapiens
ctggcagggagcctggtggggtggcggagggggagactgtgccgtggagggcctcgccatgtcctgctgcccggtaagaatgattgatgttggctgatatt

SEQ ID NO: 623865 - DNA, 75 bp, Homo sapiens
ccgtgggtccgcgctgcttccacccaacttcctgttaggtgagaagccctaccactgcaactgggacggctgcgg

SEQ ID NO: 623866 - DNA, 98 bp, Homo sapiens
cagctccggcggcagcaacattgactacgaggaatggcggcggctgccgcaggacctgcagcatcccagaggagatacaactcgtcaacgaatcaaat

SEQ ID NO: 623867 - DNA, 132 bp, Homo sapiens
agctgggccacctgccacgactgctgggccgcctggcccggctcatcaaggaggccgtctgggcgcagacggggaagcggagccaacatgccagtggcccggagctgggtttgtcgcaaaacttatgtgacc

SEQ ID NO: 623868 - DNA, 75 bp, Homo sapiens
tcagagggaagatctttttcctcaattgccaatgttttcagttgcaccaagcttagccaccaatgcatcagcagc

SEQ ID NO: 623869 - DNA, 100 bp, Homo sapiens
ccgccttggacctcctgggaggcgaggacggtctctgccagtataaatgcagtgacgaaatcaagatgactaccagctggttcgaaaattaggccgaggt

SEQ ID NO: 623870 - DNA, 75 bp, Homo sapiens
acaaagaagtgatgctggaaaatctcaggaatctggtctcattggtgttctaagaacggaagcatctgggctgga

SEQ ID NO: 623871 - DNA, 75 bp, Homo sapiens
tccaagacggcggtagcgcccatcgagcgggtcaagctgctgctgcaggtagggaagacatatgagctactcaac

SEQ ID NO: 623872 - DNA, 95 bp, Homo sapiens
caaaagtatgttgtaccttgtgacagaatatgccaaaaatggagaaatttttggtagcagtagctgatgtgcagtttggccccatgagatttcat

SEQ ID NO: 623873 - DNA, 100 bp, Homo sapiens
ctggagctgggtcagtccgccgctcaccccgcggccgcaccttcccgccttctcaggaatcccagtcagaagttccagcctgccactgttctctgatgcc

SEQ ID NO: 623874 - DNA, 97 bp, Homo sapiens
accaaaacaatccagctgttccctcagggtccttctcccacacctgaggatgtctccatgaaggaagagaatctctgccaagctttttctgatgcct

SEQ ID NO: 623875 - DNA, 90 bp, Homo sapiens
ggtggaccggagctcgtccagctgcgtgcctagcaccagcagacgtttttgaatcaactgagagaaattacggggattaatgacacccag

SEQ ID NO: 623876 - DNA, 90 bp, Homo sapiens
aggatccccaaagtctcagacttcacaaatcctgaaggaacccaaagtggctgcttctgttttgaatccctatgtgaagcgttccattaa

SEQ ID NO: 623877 - DNA, 96 bp, Homo sapiens
gagctctgcatcaaaagtcagtgctaatgttgacagcaggattgaaatggaagtacatccaggaagccaggactatgggcagcactatccgccagc

SEQ ID NO: 623878 - DNA, 90 bp, Homo sapiens
gcaggccacgtccacccagctgcagaaccagacagggtctcgctctgtcacacaggctggagtgcagtggtgtgatcttggctcatcgta

SEQ ID NO: 623879 - DNA, 80 bp, Homo sapiens
gaggtgacggatgtgaagaataagctgcagacgcagctggcgaaggtcagccatgtcatctgagcctcccccaccaccac

SEQ ID NO: 623880 - DNA, 98 bp, Homo sapiens
agtgcggctgccgcagtcagccggggacctcgtccgagcccacccgcctttggaggtggaaaacgaagctcattcccaacgtgcaaagccaaggcagc

SEQ ID NO: 623881 - DNA, 100 bp, Homo sapiens
gccgccaggtcatcacccaggaaggctgcacctgcaaaggtgctggagaatctggtaaaagcaccattgtgaagcagatgaggatcctgcatgttaatgg

SEQ ID NO: 623882 - DNA, 75 bp, Homo sapiens
acagccacctcgtctcagtgggaaaggtctgggttcctaagcagaagccactggatcctgtgctggaaagtgtga

SEQ ID NO: 623883 - DNA, 98 bp, Homo sapiens
gcgttcctctccagcaactaatgccgaccgcacaaggtttgggccgacacgcggaaggccgggtggagcccatccatgctgtggtgttgcctcgaggg

SEQ ID NO: 623884 - DNA, 76 bp, Homo sapiens
taatcccatagtactgctattggataacccctactgtgtgaagacattcacaggacacagagaatgggtacgtatg

SEQ ID NO: 623885 - DNA, 82 bp, Homo sapiens
acttgcatgtatttggaacaaaaaaaggagatgcctggcagccccgctctctgcacaaaatgatgcttcaacacccaggcca

SEQ ID NO: 623886 - DNA, 83 bp, Homo sapiens
ccactccgtcccccgcgggtctgctctgtgtgccatggacggctggagcagatccgcagggacatccgagacttccggtctag

SEQ ID NO: 623887 - DNA, 83 bp, Homo sapiens
ctcatcactccagcagccctccacccaggagtacgtgctgcatgtctacggtctctaattaacagaagatggcaaagcccagc

SEQ ID NO: 623888 - DNA, 75 bp, Homo sapiens
cctgatataaaaaaagaaattagtgaaggagatgaagtagagggcacctttcacagccagcaggcattggaatat

SEQ ID NO: 623889 - DNA, 75 bp, Homo sapiens
tctgcccttatggaattggacaaaggagtgacagttcattcaatttcttcgttttcttcttcattttcttcgtcc

SEQ ID NO: 623890 - DNA, 100 bp, Homo sapiens
aacggagataaattcccggaaccgcgattcggcgtgtcaggtgtatagtgttgattggagccaaaccagaggtgaacagcttgtggtgtctggctcatgg

SEQ ID NO: 623891 - DNA, 75 bp, Homo sapiens
gccatggaggaagtcaagaaatttctagtaccgatggaggagatgtataagaaagctcatgctgctatacgagag

SEQ ID NO: 623892 - DNA, 100 bp, Homo sapiens
cgccgccgcgcacaaccgcacgtgcaggctagcatcccattctctgtggttggatccaatcagttgattgaagccaaaggaaagaaggtcagaggccgcc

SEQ ID NO: 623893 - DNA, 83 bp, Homo sapiens
caaatcgagtgcacctgggatgacaaaaagtcatagtggtgtgacaactttcctgctctgggaccctaccaaggtgcccccac

SEQ ID NO: 623894 - DNA, 110 bp, Homo sapiens
tgcgacgaagagttccctcagcctccggccttgtgtgtccgactcggcagcagtgttcattcggctcctaaagaagtagcagtgtccaaggaacaagaagagaaatctga

SEQ ID NO: 623895 - DNA, 50 bp, Homo sapiens
ctaagtaacgatctggatgcccagaaggtgcctaccagtaacacagaggg

SEQ ID NO: 623896 - DNA, 100 bp, Homo sapiens
tttggcgtggccatgccggcggccctcacagcaaccagcaccagatgaaggagcattcctcttggactgcttgctggaactcacaggaggcacacttgag

SEQ ID NO: 623897 - DNA, 82 bp, Homo sapiens
tgtggtcttcatcgaagatgctattcaggtgagaagccctaccactgcaactgggacggctgcggctggaagtttgcgcgct

SEQ ID NO: 623898 - DNA, 74 bp, Homo sapiens
ttcccatcaccatcacagagagcgatattgctctggaagcagccaaagcactggatgacaagaactgctgggaa

SEQ ID NO: 623899 - DNA, 82 bp, Homo sapiens
gtgacgggcgtgggggcctcaagctgtcccaggacatggacacctgtgaggtaagaacaagagagttggaaagcagttagcc

SEQ ID NO: 623900 - DNA, 98 bp, Homo sapiens
gcagccgcgagctcctggaggcggcgggatggaggcggcggccgggactttgaacatgtcggggatcgccctcagcagactcgcccaggagaggaaag

SEQ ID NO: 623901 - DNA, 82 bp, Homo sapiens
gcggcaggagcgaccgtgaggacaggcttttgctctgcgacggctgcgatgcggggtgtggacactgccagcggctgcagcc

SEQ ID NO: 623902 - DNA, 82 bp, Homo sapiens
cgcctgttctcgggctgtttggcgggttgtggcagcactgcctgaaggtatgagaccagattctaatctttatggttttcca

SEQ ID NO: 623903 - DNA, 99 bp, Homo sapiens
cttcaacaagagcaagtgtcagaactgcttcaagccccgcgagtcgcatctgctcaacgacgaggacctgacgcagtggaagagaaagccaatacccac

SEQ ID NO: 623904 - DNA, 80 bp, Homo sapiens
cagtcggagcccttcgtgttacagggccacccagtgctcctgcagaagatcgttcaggaacacccgacagcattgcttcc

SEQ ID NO: 623905 - DNA, 101 bp, Homo sapiens
cctcctggggaacccgttcagcacaccagtggggcagtgcctcggtaagtaaggaggtctctgtaccatggctcgtacaaagcagactgcccgcaaatcga

SEQ ID NO: 623906 - DNA, 100 bp, Homo sapiens
gaaggcgatactctcgctcacgcagcaggagcaggggacgaaggaagagagaagggcacagttacctaagtatcaacgtaatcttcctcggccaggacag

SEQ ID NO: 623907 - DNA, 100 bp, Homo sapiens
gtacaggttcagtgtctcagcaaggcacacaacaccaatgactttgtgaccctgaggaccccagagggatgtattgaaatagaagagttacagaatgagg

SEQ ID NO: 623908 - DNA, 80 bp, Homo sapiens
cagaatagacctgaagacaaaaatccagaagtacaagcagtctgagcctcattttacagatgaggaaactgaggctggct

SEQ ID NO: 623909 - DNA, 74 bp, Homo sapiens
gttgcaaaactggaaaagacaattgatgacctggaaggctcgattccttttgtccaaagtgaacccatctcaga

SEQ ID NO: 623910 - DNA, 100 bp, Homo sapiens
acaaaatacaaatcatggagccgctggggtcccttttgcctcagatactattttgaaggatgatccagattccagtaccagtacattaggaaacatgcta

SEQ ID NO: 623911 - DNA, 74 bp, Homo sapiens
tggaattgaagaatattcccaagtccttcacccggagtcacctaaggtcctgcgagtacaagggtcgaccccca

SEQ ID NO: 623912 - DNA, 82 bp, Homo sapiens
caacaactagaagaagagaagctattggaaagagagagcaaatcacagatgaaggtctcattactatatgcagagggtgcca

SEQ ID NO: 623913 - DNA, 51 bp, Homo sapiens
ctctgctgccgctcggtcacgcttgtgttctaagaacggaagcatctgggc

SEQ ID NO: 623914 - DNA, 87 bp, Homo sapiens
gcgaagctttacgttcatgtaaacagcatgacgtgaggccgtggatgcaggcattaaggagtgacagttcatttagattctttgtat

SEQ ID NO: 623915 - DNA, 97 bp, Homo sapiens
gatgttcggcagagtctcagtccaatgtctcagaggcctgttctgaaagtttgtaaccatggtgatggagaggtgattgaacaaattataagcctgc

SEQ ID NO: 623916 - DNA, 98 bp, Homo sapiens
acctccgagggaaacaagaaaacatcaaagaggtctagcaaagagacggggtctgactgtgttacccaggctggtcttcaactcttggcctcaagtga

SEQ ID NO: 623917 - DNA, 100 bp, Homo sapiens
tactctactggacaaacatttcctccaagctgcattacaggcactaaagagaaagaagaggttcgagaaacagctcactcagattgatggcacactttct

SEQ ID NO: 623918 - DNA, 100 bp, Homo sapiens
tacaactttcggggcatgtacaatcagaggtgcaccaatgaagagttaaacagtatgcatttgaccacacatactactcgtgatccaactgggaatatat

SEQ ID NO: 623919 - DNA, 99 bp, Homo sapiens
accctttgatccagaagaaccgccgagtggtgctggcctccttcctgctcctgctgctggggctgggatttaagcgagagcctcactggttcccaggac

SEQ ID NO: 623920 - DNA, 100 bp, Homo sapiens
ggcggcggcagctgcagtgacatgtccagcatgaatcccgaatagaaaatgtttataggaggccttagctgggacactacaaagaaagatctgaaggact

SEQ ID NO: 623921 - DNA, 75 bp, Homo sapiens
tgcagccgcacctggccaagggctcttgattgcggggactaactcctccgaccttcagcagatcctgagcctact

SEQ ID NO: 623922 - DNA, 98 bp, Homo sapiens
cggaccccgccgagtcctagcgcctggcctgcgcgccgctgcccgcgccacagctctgcctgcagttgaacacaaagacctggaggagactcccacct

SEQ ID NO: 623923 - DNA, 95 bp, Homo sapiens
tcagaggagcatctgaaatcaagtaatattaggagtgaaagctggacattgaagaagccaaaatctgtttccaagaaactaaagagtgtattccg

SEQ ID NO: 623924 - DNA, 98 bp, Homo sapiens
cagccgattgatacctgtgtctcctacccaaggacagggggacagggctctgtctcgcacttcccaggttatcaatactctggctgaccatcatcatc

SEQ ID NO: 623925 - DNA, 100 bp, Homo sapiens
agttaataagatctggggtgaaaagaagtttttgagagtggatcaagataaagacaaggattgtagcttggactgtgcgggttcgccccagaaacctctc

SEQ ID NO: 623926 - DNA, 82 bp, Homo sapiens
gtttccggaagtgtatagggaaacctgggggctccctggacaactccgagcagaggctgggaggcggcagaatgcagccaga

SEQ ID NO: 623927 - DNA, 73 bp, Homo sapiens
gattttcttgttctctgctgctactgtaaaaacgaaatgagtggtttatttccaaagttgaagaagtcttgaa

SEQ ID NO: 623928 - DNA, 74 bp, Homo sapiens
cgacatgagtgatgtggaggaaaacaacttcgagggcagatccggttccagttgttggcaaaggagaggaagag

SEQ ID NO: 623929 - DNA, 74 bp, Homo sapiens
tgtcgctcttgtgccctagcaccccgagaaccgtcagtttgagccagatgataaaccacataatcctatggtaa

SEQ ID NO: 623930 - DNA, 50 bp, Homo sapiens
ctggactggcagccctgcagggtcaggggaaggtgtggctcattgacttt

SEQ ID NO: 623931 - DNA, 100 bp, Homo sapiens
ggcagatattatcatagttgctgcaggtattgggaaatgagagagcagcgcacccccactttgaaaggcaagctggttcagaaggctgatcaggagcagc

SEQ ID NO: 623932 - DNA, 101 bp, Homo sapiens
gggagagccgggtggggcctcgggatgcagccgccggtgcccgggcccctgggcctgctggaccccgcagcttgctcacttccgacagagaaaaacaaaag

SEQ ID NO: 623933 - DNA, 89 bp, Homo sapiens
caaagataaatccaaatactgcatatcagaaacaacagataagccaatggacacgtcagtgttatctgaagaaggaggagagccttttc

SEQ ID NO: 623934 - DNA, 78 bp, Homo sapiens
aacagagatgacatgccagcccagactttcatatgctgctgcagattgctgatgattttatcgagagtgtggtgacag

SEQ ID NO: 623935 - DNA, 74 bp, Homo sapiens
accatgagcgtcccggccttcatcgacatcagtgaagaagatcaggtcatagcctgcagtgctacaactgtcct

SEQ ID NO: 623936 - DNA, 98 bp, Homo sapiens
ccctgtgattcccttcgtgcctctgatcctcaaagtgctgggccgcccaaccctgtcggtgcagcagacccccgagggcagcctgctggcacgctggg

SEQ ID NO: 623937 - DNA, 82 bp, Homo sapiens
ctctggaactgaaccagaggttcacaaaacaagtgtagtagggccccggagctgcagttctacaccagcgccgctgcggtgg

SEQ ID NO: 623938 - DNA, 101 bp, Homo sapiens
acaagtacccgtttgagctggtcatggcggttgcaaaagcttctcatttcagagagatgccaggatcctaagtgcctgccaaacttaccaattctaaggaa

SEQ ID NO: 623939 - DNA, 101 bp, Homo sapiens
ggtgacgtgtcttcaagaagaggctgagctgcggtgcttgtaagctgctcagatggaagataaaaagccctttatcctgtcttccatgaggcttcctctcc

SEQ ID NO: 623940 - DNA, 49 bp, Homo sapiens
ggacgtggtggagtcctggatcggaaagaccacagcaagattctttcat

SEQ ID NO: 623941 - DNA, 89 bp, Homo sapiens
acacagctgcttccattggccagtatgaagtggtgaaggagtgtgtgcagcgctgggaccccatcctgggctacatcaacgagcaatac

SEQ ID NO: 623942 - DNA, 90 bp, Homo sapiens
cactacaggctggttagccaaaaagtcctgattttctgctcaatagagatcctgaaggacacagccctgcagaaagtgaagcgtggccag

SEQ ID NO: 623943 - DNA, 100 bp, Homo sapiens
cccaccccagaagaggatggcaaaggtggctaaggacctcaacccaggagttaaaaagggttttggccaaattgggcgagggcacaaaataaccacttac

SEQ ID NO: 623944 - DNA, 82 bp, Homo sapiens
actcctggcagtgcgtcaatcagagcgtcctgtgcggggatcctcttggtgtatgacatcaccaaccgctggtcctttgacg

SEQ ID NO: 623945 - DNA, 101 bp, Homo sapiens
aagaacacaatatgttgagatgtgctattttgacaacacttattcatcttgttcaggggaagatggtgaaaggaatgggaggtgctatggatttagtgtcc

SEQ ID NO: 623946 - DNA, 76 bp, Homo sapiens
aattggacagtacatctgtggacaaagcagtacctgaaacagaagatgtgcaggattccttacatggcttgacaga

SEQ ID NO: 623947 - DNA, 74 bp, Homo sapiens
ctgcaggttcatggtctacggcgcctgcaagttcctgagagccgggaaataaatgtgacctctgggaaaagcgg

SEQ ID NO: 623948 - DNA, 51 bp, Homo sapiens
attcgcagtggtcgcttcttctccttgaactcccccactggaaaggattct

SEQ ID NO: 623949 - DNA, 100 bp, Homo sapiens
taaagagtcttgttatttcttctttgagaaaaacctgaaagatgtctcatctccagagaatacagagggcaaagatggatccaaagtaactaaacaggag

SEQ ID NO: 623950 - DNA, 100 bp, Homo sapiens
ggcgcagccggagccggtgccgcagctgcgatggccgtggccgtggggagaccgtctgagagatcagagtggcctttgtcctgtataacaacttgggtcc

SEQ ID NO: 623951 - DNA, 96 bp, Homo sapiens
gttctgggaagatggcgaaggtctcagagctttacgatgtcacttgggaaggttaaacccatccagagtaatggctgcggccttacccaggaccct

SEQ ID NO: 623952 - DNA, 101 bp, Homo sapiens
gaggcttgggccgccgagctggacccggaccggttttggctcggacctcaggcacatgcgaatgacccggagtgtggacaacgtccagttcctgccctttc

SEQ ID NO: 623953 - DNA, 87 bp, Homo sapiens
cagaaggaaattcaacagaacttagcataaatgctgaagttggctggggaacagaccagggaattggtggatttggagaagagccgg

SEQ ID NO: 623954 - DNA, 88 bp, Homo sapiens
actccgtaatgaagtggctattttacagggcaattgaaggaacagactaaaaatcgtgtcctggaaggaaactacaggtactaccagg

SEQ ID NO: 623955 - DNA, 74 bp, Homo sapiens
gtccatctcgcagtacagcggcaagatcaagcactggaaccgcttccgagacggtctcccttgatctgagaatg

SEQ ID NO: 623956 - DNA, 75 bp, Homo sapiens
gcggaaccggcacctgcggaagccactggtggtccagctggaaaacctcatgctggacaaagatggccacatcaa

SEQ ID NO: 623957 - DNA, 101 bp, Homo sapiens
cgcctctgctctcttcttcgccagcacgctgatcaccaccgtggatccggacgctgcggctgaagatcttggcagacgcagcagctgagggggtcccggtg

SEQ ID NO: 623958 - DNA, 98 bp, Homo sapiens
ccagatgccacaatgcacagacaactcctggctccggtggaaggaaggatggcagagacattgaatcaggctgagtcatcactagagagtgggaaggg

SEQ ID NO: 623959 - DNA, 75 bp, Homo sapiens
acctggtgcagggcctgattgaggactgccagctggcgctgcagattcttctactcaaaacaaaagagccaacag

SEQ ID NO: 623960 - DNA, 51 bp, Homo sapiens
ggaggagtacgcgcgagagccttgtccctgatcatggtgttcgctcatctg

SEQ ID NO: 623961 - DNA, 75 bp, Homo sapiens
attgctggctacagcttcagaagaccgaagcgttcgtatctggaagcgtgagtgcatctccatccacgttggcca

SEQ ID NO: 623962 - DNA, 75 bp, Homo sapiens
ggccaatgttggtgctggcaaaaagctgattgggcagaaagtggcccatgctctggcagagggactcggagtaat

SEQ ID NO: 623963 - DNA, 60 bp, Homo sapiens
cactgggcctgtgcttgatgtctgctggagtgacggacttagtcatgcattgagaaagca

SEQ ID NO: 623964 - DNA, 90 bp, Homo sapiens
tgctgcatggtggcgcccctccccgtgaccaccgctgcgttttctcggggaggaaaggtcccggagagagcgagtgcgtcagtctcgaat

SEQ ID NO: 623965 - DNA, 82 bp, Homo sapiens
ccagatttttgctcattaacagaaaagaagaggagaatgctaagcagactttgctgcaagataacatcgctgatgctgtagc

SEQ ID NO: 623966 - DNA, 90 bp, Homo sapiens
ggaatatcaaatacaatttggacttctgggaaaaagaagtgtgactactggatcaggacttttgttccaggttgccagcccggcgagttc

SEQ ID NO: 623967 - DNA, 75 bp, Homo sapiens
gatggacggatgctcatcaagctgctggaggtcctctctggagagaggctggtgtaagccgtggtttcgccttcg

SEQ ID NO: 623968 - DNA, 90 bp, Homo sapiens
cacgggtgaatgctgctaaaaacaagactggggctgctcccatcattgatgtggtgcgatcgccgtgttgaaatccttgtctcctgtaga

SEQ ID NO: 623969 - DNA, 90 bp, Homo sapiens
cgcgccttcggaagcccgttcggcctggaggagccgcagtgggtcccggacaaggaggagctcgaggccatgagcagatataccagccca

SEQ ID NO: 623970 - DNA, 82 bp, Homo sapiens
caagaaactagagcaaataaccgttttgaaatttcctattttgtaacggattatgatccaaccattgaagattcttacacaa

SEQ ID NO: 623971 - DNA, 98 bp, Homo sapiens
ggcggagcgcgcagcgggggctgcaggagtctcaggagcaggggctgcggcagaggctgctggacgagcagttcgcagtgttgcggggcgctgctgcc

SEQ ID NO: 623972 - DNA, 80 bp, Homo sapiens
ggatttcagcctgcacggatggtcttgaaacacaaatggtttttggtactagcaaaggccagacgtcttactcaacaact

SEQ ID NO: 623973 - DNA, 100 bp, Homo sapiens
gtcgccggcggagggtgcatgtttgcgaggaagccgccgggcgccgcgcctttggactgtatgaaaacaagggagaggctgacttcgtggaatctttgct

SEQ ID NO: 623974 - DNA, 100 bp, Homo sapiens
acagaggtgtgctgacgacctgctacaacagaaccatttaagattaaaggacaaccagaaagtggaattctaaggacaggaacttttagagaggatacag

SEQ ID NO: 623975 - DNA, 50 bp, Homo sapiens
cacgtaccacctggatgttgtggttactccacaggatccgctgaacatag

SEQ ID NO: 623976 - DNA, 100 bp, Homo sapiens
tttgtgaaacaccagactgtcccacagaacactggggaagttcctgagtgggtgaacaccccatccacctgctgcctgaagtattatgagaaagtgttgc

SEQ ID NO: 623977 - DNA, 82 bp, Homo sapiens
tgaaacagcagttttggtagaagatgtggtacacactcagttaattaatctgcaactccgatccaatatccgagaaattgag

SEQ ID NO: 623978 - DNA, 75 bp, Homo sapiens
tcagaactgagaagctgtcaccacagctccataatgggagaagtaaagaacaaagacttaaggaacagcttggcg

SEQ ID NO: 623979 - DNA, 100 bp, Homo sapiens
acaaccgagcaaattgaagagacgttaaaatacttccgaagaaggtagataatgactataatgcccttcgagaaagactcagcaccttgcctgataaatt

SEQ ID NO: 623980 - DNA, 144 bp, Homo sapiens
ctcgggtccttgggattgaattgttggagcaggcagtggaggatgcaagatggactgcagccttcaatgagatgaagtttcgttatgttgcccaggctggtctctaactcctggcctcaagtgatcctgctgcctctgtctctg

SEQ ID NO: 623981 - DNA, 87 bp, Homo sapiens
gaagggacaatggacttctggctttggccactttacttcctgccaggaggaactaccctgccctgacagaggctggggatgaaggag

SEQ ID NO: 623982 - DNA, 100 bp, Homo sapiens
ctgacttccggtggtgccaaagccgtttccgtggaatcaggccggctggtgagggtacagaatacagattctgttcatcttgctctgaaattaaataatt

SEQ ID NO: 623983 - DNA, 112 bp, Homo sapiens
agcccctactgaagtagaagtgatggatgaaaccaacttaatgatgctgaaaataagtataagattttggaaaaagagttccaacagttcaaggaccagcaaaacaacaaac

SEQ ID NO: 623984 - DNA, 83 bp, Homo sapiens
gtcgggacaccccggaagctgggaaatggtgacgtggcaggaattggctgggagagaactgaggggactccacctcctccggg

SEQ ID NO: 623985 - DNA, 82 bp, Homo sapiens
cctgacagcatctattacctttgccttggaatacaggaggttattctggtacaagttaacccaggagaagcatttacaataa

SEQ ID NO: 623986 - DNA, 88 bp, Homo sapiens
gagaaagtgctgagggagagcgatgtcggggtggttgtgtacgttgcacccgcaaaggaaaatggcattcctatgaagaaagcacgaa

SEQ ID NO: 623987 - DNA, 100 bp, Homo sapiens
tggggccgcgctacaccaacctctcgtacatcggcgagggcgcctacggcatggtgtgcccagctgcagctccagcaggtggcgctgcagcagcagcagc

SEQ ID NO: 623988 - DNA, 89 bp, Homo sapiens
ctgtccttgaggacttaccagagtgaaggctgcagttcatggagctcgtttcaaagggcaagatctaaaactggcatggaataaaccag

SEQ ID NO: 623989 - DNA, 90 bp, Homo sapiens
ccatgtcaaaaacttggatgaaaatggcttggatttgctctcgctcaccagaacaagctagaagaaatgatcaatgagctagcagtggcg

SEQ ID NO: 623990 - DNA, 97 bp, Homo sapiens
aagatggcgacgcctttggcggtaaattcggctgtcgcctggttgggcccggaaatgggacgtcgcgctttctcagggagcgtagaagcagccaggg

SEQ ID NO: 623991 - DNA, 98 bp, Homo sapiens
gcaaagcttgtggagagaagcagtcctttttgcagttttagaaagagcgttttcgctacgtaaagcacattcgataaaggatatggaaaatactttgc

SEQ ID NO: 623992 - DNA, 87 bp, Homo sapiens
cgtggacttggtgtgcattaacctgccgccgcccctcaccagacagatcgctgtcaaaaccctagggtttggaaatcccttgtctcc

SEQ ID NO: 623993 - DNA, 98 bp, Homo sapiens
ggggctggggagctgcggctgttgccgccgggctgcgcaggcgtaggtgatttcaaatcggagaagtccaacggggagctaagtgaatctcctggagc

SEQ ID NO: 623994 - DNA, 144 bp, Homo sapiens
ggaggctgctcaactccaagcagctgggaatgatcgaggcaagacctgtaggaggatattcttcatgaaggcttgcattgatgacaatgttgatatggtgaagtttctggtagaaaatggagcaaatattaatcaacctgataa

SEQ ID NO: 623995 - DNA, 98 bp, Homo sapiens
gtgaattgatccgggagttgaagagggctgcaaggtgggaagtgaagtcagtgcctcagttgctgatcttgatgtggaagaaatggaggactcagaac

SEQ ID NO: 623996 - DNA, 101 bp, Homo sapiens
gccatcttggatccgcgggacaagaaaattcatgcgatgctgtctttgcaggtgccatgcctacaatggcaagcatcaagctgtctacacttcatcccatt

SEQ ID NO: 623997 - DNA, 50 bp, Homo sapiens
gggacacccgcgaggccggaaaatgaactaaaattccagatggcaaactc

SEQ ID NO: 623998 - DNA, 82 bp, Homo sapiens
gactacatcaggaacggggtgctctacgtcacggagaagtgagaagccctaccactgcaactgggacggctgcggctggaag

SEQ ID NO: 623999 - DNA, 100 bp, Homo sapiens
cttacttataagagagattctgtctggctctgtgttccttccttctttggatttcctagctgatccacttagcagtgtctgcaaaaacgaatcttttcct

SEQ ID NO: 624000 - DNA, 90 bp, Homo sapiens
tagaatctcaaacaagacaacttgagctgaaagcgaaaaactatgctgaccagaagctgacagtgcagatctcccaggagacgactgcag

SEQ ID NO: 624001 - DNA, 100 bp, Homo sapiens
gtcgcttcgagcgcgctagtcagctccctgaagggagtgacggcggttgggtgcccgcggccacttttgccttcccgggggcaattccaaaagtcttcag

SEQ ID NO: 624002 - DNA, 97 bp, Homo sapiens
tttgtgtcctgagatcaaatggcacttcattggccacctacagaaacaaaatgtcaacaaattgatgggaacattttagtggacaaaccaaatgacc

SEQ ID NO: 624003 - DNA, 80 bp, Homo sapiens
ctggctaaggaaaccctattacctccaggataaggaagcctgtgtgggtaccaacaatcaaagctacatctgtgacacag

SEQ ID NO: 624004 - DNA, 74 bp, Homo sapiens
ccccttccccgccatgcgcaggctgtccatcctcacagccctggcctcccacgactacatcctgaagattgtgc

SEQ ID NO: 624005 - DNA, 75 bp, Homo sapiens
ctgaattctgtggattttcgtctaaaaataacaagaatgggaggagaaggcaagatgagaagatgaagtgaattt

SEQ ID NO: 624006 - DNA, 100 bp, Homo sapiens
ctccgaggcaggcccgacccgcctccccggcgccgccgtggctcgacggagaccagctaggcatttaaatcaaacggtattgagatggattgggttatga

SEQ ID NO: 624007 - DNA, 82 bp, Homo sapiens
tcgggatctcggtgctgcagacggcgagacctcctgcacagacgttggacctctcgaacaaccagctgagcgagatccctgc

SEQ ID NO: 624008 - DNA, 82 bp, Homo sapiens
gaaaagcctctgggagcagaagggaggctccaagacctcatcaacaattaagattgatgtacagctatatattttgtccttt

SEQ ID NO: 624009 - DNA, 106 bp, Homo sapiens
ctgcctttccttccccctcggaaaatggttcccactgccgggcgaggtgctggagaatctggtaaaagcaccattgtgaagcagatgaggatcctgcatgttaatg

SEQ ID NO: 624010 - DNA, 82 bp, Homo sapiens
ctgggagcagcagtctttctgatatctaccaggcagtcttgattgatatggaagaaggggtagtgaatgaaattctgcaggg

SEQ ID NO: 624011 - DNA, 50 bp, Homo sapiens
ctgccgcggtcctcccgccggcgctggtagagacgggggttcaccatgtt

SEQ ID NO: 624012 - DNA, 100 bp, Homo sapiens
ctgttctctcggattatgaaagtgcagaagactcggaacggatagcaggctccaagctctctcccaggctccagtattttggtcagtcactgagtggggg

SEQ ID NO: 624013 - DNA, 90 bp, Homo sapiens
ttgcacttcagttcacatactatttatgggtggtgcttcccacctttatcctggagaagcgatctttgctggagatgtatgcagatttca

SEQ ID NO: 624014 - DNA, 104 bp, Homo sapiens
ataaaataccagtggaggccgacttcttgtatgcatactccacagcacctgcttccttcaaaatgtctactgttcacgaaatcctgtgcaagctcagcttggag

SEQ ID NO: 624015 - DNA, 75 bp, Homo sapiens
taaggattccaagtaactcttatttgcttgcctacatgtagcctgtgttgtacagcagaaagatgccaggcaatg

SEQ ID NO: 624016 - DNA, 111 bp, Homo sapiens
tgaactgagtgaaaatacagccaagatcttggcaaagcttctccctcagtatttagaccaggcgtagcgtgcctcctgtgattgttgaagagctgtggtgtgctgctgagt

SEQ ID NO: 624017 - DNA, 50 bp, Homo sapiens
ccctcaggagcgtgaagcaggtgaaagaatggatgatgaacttgttgttg

SEQ ID NO: 624018 - DNA, 51 bp, Homo sapiens
acgtggctcatcagcagcttatccaggtggacccccaaaagtacaagggca

SEQ ID NO: 624019 - DNA, 100 bp, Homo sapiens
gcctcccgagtggctgggattacagcctgaagaaatggtagaattggtgcattaagaatatgaagtcagtgttgatgtctgagatgcaattatgagatcc

SEQ ID NO: 624020 - DNA, 50 bp, Homo sapiens
cctgtgtcaccttctcctgttcaaatgattaaagagtctattgttgggga

SEQ ID NO: 624021 - DNA, 87 bp, Homo sapiens
agcctggcagcagcccccggggcaagagcaggagcccggcaccccccgccgacaaggagggccttcctgggctatgtgctgtatgga

SEQ ID NO: 624022 - DNA, 90 bp, Homo sapiens
gggcgcgcgctgcgggacgcggtgcttgaagtttctgggaagtcggcatccaaccctggtgcttcccttggtgccagagcttctgagcac

SEQ ID NO: 624023 - DNA, 100 bp, Homo sapiens
gcaaaccagatatatgacttggtattgaagcccctgggtgataatttgatggaggaaaacataaggcagtctgtaacaaactctatcaaagcaggcctga

SEQ ID NO: 624024 - DNA, 100 bp, Homo sapiens
aggcacctaaaaattgtataccgcagattcaggttttcagctgctactaaagataatgagcataagcgttcactgaccaagactccagccagaaagtctg

SEQ ID NO: 624025 - DNA, 82 bp, Homo sapiens
cctcgcagcccccgcgggcgcagccctttgcgcagccgccgggaccctggcccctgtcgagaattcagaaggagctggcgga

SEQ ID NO: 624026 - DNA, 100 bp, Homo sapiens
cgcgcctccctgcaccagtggcaccgcaggcggacgctgcacagaaaggatcatcccagagcccagtctgattttgctgctgctacacatcctcgtgctt

SEQ ID NO: 624027 - DNA, 101 bp, Homo sapiens
aaatggccagcattttccaagtactgtaaattcctgtgcagaaggcatcgtcgtcttccggacagactatggtcagatgctgcagttggagaagaaacttg

SEQ ID NO: 624028 - DNA, 103 bp, Homo sapiens
ctcatctctgagacccggaggaggttcgaagctgagtatgtgacaggtcccaggtgtgtgatggcggctgcaatctgtcttgtgggtattaatgcaatcttca

SEQ ID NO: 624029 - DNA, 100 bp, Homo sapiens
gttcagttgtggcggttgctggtcagtaacagccaagatgctgcggaatctgctggttgatatccctgaaagtacttaatagcatcgtgctgttggggaa

SEQ ID NO: 624030 - DNA, 74 bp, Homo sapiens
gatgccgctgccggttcaggtgtttaacttgcaggggaacgcccttttgcttgtgactggcagggctgcgacaa

SEQ ID NO: 624031 - DNA, 100 bp, Homo sapiens
gtgcagcccaatcccatcgtctacatgatgaaagcgttcgacctcatcgtggaccgacccgtgaccctcgtgagagccgcttacaaacacgcagatggca

SEQ ID NO: 624032 - DNA, 76 bp, Homo sapiens
gccaggggggacagccagccagcagcaggagggtgtgagttcttgatacgaatgaaaggccaagagtttgttgatg

SEQ ID NO: 624033 - DNA, 98 bp, Homo sapiens
gtgggatcgatgtttcaatattggaagcgctttgatttacagcagctgcaggctcttgtcaggatggtgaagctgttcatcggaaacctgccccggga

SEQ ID NO: 624034 - DNA, 82 bp, Homo sapiens
cttggagaaccaggaaaacctttcaatgaactgtgggattatgaagctgatcttgcatctttaatggataaaacatttgaga

SEQ ID NO: 624035 - DNA, 75 bp, Homo sapiens
caagcacctcagcagccagaacagatatttcagtcttcaaaccctctgtcttgatggcaactttctgactacttt

SEQ ID NO: 624036 - DNA, 100 bp, Homo sapiens
gtttctttcttaaaggactgatttttagaactccacatttgagtactatactggcaattgctggagaagattttgcaattgttgcttctgatactcgatt

SEQ ID NO: 624037 - DNA, 80 bp, Homo sapiens
cgctgacaggggggcctggccgcgcagccgatgaggacggggacttggttgccttttccagtgacgaggaattgacaatg

SEQ ID NO: 624038 - DNA, 75 bp, Homo sapiens
cgagtggtctaaggcgccagactcaaggaagaaatgttggctatttggcgatgagaggtggtgaacagtgaccat

SEQ ID NO: 624039 - DNA, 100 bp, Homo sapiens
atcaagatttaacattccaacacataaaaattatttatccaacagctcctcccaggtccgattcccatcccacttcagttcagatctcaaggaccttcta

SEQ ID NO: 624040 - DNA, 100 bp, Homo sapiens
actggttgtttctggtgggatcgttggctatgtaaaaacaggagaactgcgacacatcaccaagctgaagccctggagcctctttgatgtacttgtggaa

SEQ ID NO: 624041 - DNA, 90 bp, Homo sapiens
aatcgtctccaccgtcatggggggcggagacctggcaaccatcggcttgatcaggaatctggccctgtgcccagccaaccatgccccgct

SEQ ID NO: 624042 - DNA, 50 bp, Homo sapiens
ctctttctggcctggaggctatccagctctagatccgtcctggtgcctta

SEQ ID NO: 624043 - DNA, 75 bp, Homo sapiens
accaaacacgattgttgtttcttggactgcagaaattggaagagcatttttagatgaattcactaactggtcaag

SEQ ID NO: 624044 - DNA, 101 bp, Homo sapiens
gtttggtctcctgccgtgcccggttagcatacgtatcaaggacagtaactaccatggctcccgaagttttgccaaaacctcggatgcgtggccttctggcc

SEQ ID NO: 624045 - DNA, 100 bp, Homo sapiens
tgacaaattatgctgcagcatattgtactggcctgctgctggcccgcaggggcctgtccttgatagtggtcgggaagcgaagtcccggagaagaacgtgc

SEQ ID NO: 624046 - DNA, 100 bp, Homo sapiens
aaatccgggggcaaggccaaaaagaagatcctcaagcccgccgacaagaacaaggggaagtacgggcagttcagtggcctgaaccctggaggccgaccca

SEQ ID NO: 624047 - DNA, 100 bp, Homo sapiens
ccgtgtttgacgagaatgaggaagacaatgcagatcttcgtgaagactctgactggtaagaccatcaccctcgaggttgagcccagtgacaccatcgaga

SEQ ID NO: 624048 - DNA, 101 bp, Homo sapiens
cctgccttccggggacagccagccctcgctggaccagaccatggccgcggccttcgaacgtgctggccaaagcgctctatgacaatgtggccgagtccccg

SEQ ID NO: 624049 - DNA, 100 bp, Homo sapiens
ctctacgcagaacccgggagtaggagactcagaatcgaatctcttctccctccccttcttgccagagagatgacacgggggaaattcctcaatattctag

SEQ ID NO: 624050 - DNA, 95 bp, Homo sapiens
gtgaagacagaaggaaaattggagatacagctggatgtatgaaccctgctctgaaaacactctttaacggttatgaagacagtatggagtttcca

SEQ ID NO: 624051 - DNA, 99 bp, Homo sapiens
gggccaagtcaattctggagacctgggtgtgggtcaagcaaccaggtgcagcggaactgctgcctgacgctctgcaacttcagcatccccgaggagctg

SEQ ID NO: 624052 - DNA, 100 bp, Homo sapiens
tggtgaagaccgtggagatgcgggatggagaggcagcaaagctggccaagatgaagattccccccagtgagatgttcttgtcagaaaccgacaaatactc

SEQ ID NO: 624053 - DNA, 75 bp, Homo sapiens
ggcctaagaattttggcattgatcgagttttggttcgggttagagacttgacaatacaaaaagctgatgaagttg

SEQ ID NO: 624054 - DNA, 75 bp, Homo sapiens
ccggacccggtggcctggcaacaggggttcaactccaccagtaactgttttcaaaggttcaaaaaaaccttactt

SEQ ID NO: 624055 - DNA, 75 bp, Homo sapiens
aaggcagacatcagctcctggttcaacgaggccattgacttcatagatacacctatgaagattataagaacactg

SEQ ID NO: 624056 - DNA, 90 bp, Homo sapiens
aagaaagtcatcgccatcgccactggctccctgcactgtgtgtgctgcacagaggatggttcaccatcattaatagcaaacaaatgggaa

SEQ ID NO: 624057 - DNA, 96 bp, Homo sapiens
aaatttagattattacaaagcacgaggagcagacctcatgaataaaagccggaatggcggcgctagatagtaaggcatcagggaagatgggaatgc

SEQ ID NO: 624058 - DNA, 90 bp, Homo sapiens
cggaggaggaagtaggggtgcacctcagcactatcccaagactgctggcaacagattgtccccttggggcggaaagaagccaaggccaag

SEQ ID NO: 624059 - DNA, 100 bp, Homo sapiens
gtctatgaggcagtgctgcggagctcccgtgccgtcatgggtgccatgaagccaggaaacaaagcttagcaggagaggagagccagagaagtgacaggga

SEQ ID NO: 624060 - DNA, 75 bp, Homo sapiens
aagacagagttcctaagcttcatgaatacagaactagctgccttcacaaaggcttcaacggaccacaccaaaatg

SEQ ID NO: 624061 - DNA, 100 bp, Homo sapiens
cccgtaagctggtcatcattgagagcgacctggaacgtgcagaggagcgggctgagctctcagaaggcccaggtcagcgcacggatgaagagctggacct

SEQ ID NO: 624062 - DNA, 50 bp, Homo sapiens
tccctcgtccagccacccccaggcaagaggaggaacgacgtagaagagag

SEQ ID NO: 624063 - DNA, 80 bp, Homo sapiens
ggaggaaccggctccttgcgtcccgcctccctgggagctccgcacggggacaggagagagtggcaagagtacgtttatca

SEQ ID NO: 624064 - DNA, 90 bp, Homo sapiens
aaacagagaaagataggcggccatggtccaaccttgaagagtcttcctaatattctcaccgatgatcgatttaaagttatgtttgagaac

SEQ ID NO: 624065 - DNA, 132 bp, Homo sapiens
tgacatccttctttttagagatcgttttgatggatatatcttccttgacagcaaagaacagagtgtgaggtgtgagacaagtacttcagttcaagagtgtatttaggaggtaatcccaggaagcagaaatgg

SEQ ID NO: 624066 - DNA, 75 bp, Homo sapiens
agaacatgcatatttgggtccaactgtgaagccagatgataagatggtgtcctcagaccgaagccaactttcctt

SEQ ID NO: 624067 - DNA, 75 bp, Homo sapiens
gcggcaccaaggcccccaagccctccttcgtgtcgtacgtacgccctgaggtgaatgaaaactttgccattgatt

SEQ ID NO: 624068 - DNA, 75 bp, Homo sapiens
aaggactgtgggattccattaaaaggctcctccattaccatccgcctcatcttgatattgttccatggacattaa

SEQ ID NO: 624069 - DNA, 74 bp, Homo sapiens
accgccgtctgctgttacctcttaaagaaatgaccgcccggatgtgccactgagagccccgcgggtctcccggt

SEQ ID NO: 624070 - DNA, 49 bp, Homo sapiens
cctgtctgcaagcttgtgcaggaactgataaatttcaaacggaagagag

SEQ ID NO: 624071 - DNA, 100 bp, Homo sapiens
ggatgctgcggcgcccgctggccgggctggctgcggccgccctgggccgggccccaccggacggtcgcaatggaagaagagatcgccgcgctggtcattg

SEQ ID NO: 624072 - DNA, 100 bp, Homo sapiens
ggctgtgcttcggcgctccggctcctcagagagcctcggctaggcgaggattaaatccaccacacagggtgaaatctatctccatgacaacattcacaca

SEQ ID NO: 624073 - DNA, 75 bp, Homo sapiens
cggcgagcccttgggccgcgtctcctttgagtggaatgcagtagccctctgggcctgggatattgtggttgataa

SEQ ID NO: 624074 - DNA, 90 bp, Homo sapiens
gggaaggcgcgagtgaggaaaggaggtactgtagattcatagtgaccacttagtagctagtgagaaacagcatatgctccagtgggacaa

SEQ ID NO: 624075 - DNA, 100 bp, Homo sapiens
gcctgtgagtgtaagggaaaaatttatgtcattggaggatacactaccagaggagttcaaacttaataaccttccagagttggtatcaaattcagacgct

SEQ ID NO: 624076 - DNA, 98 bp, Homo sapiens
gaaaacctccttatgctgatatacatccaatgaggatttctcacattggcaaactgagagattttcttctggaacacaggaaagattatattaatgct

SEQ ID NO: 624077 - DNA, 90 bp, Homo sapiens
ctcactccaactgcatcgaggtctttcccgaagttatgcagctcccagagatcaagggtctgttgggatggtatatggtgaaaagtggac

SEQ ID NO: 624078 - DNA, 95 bp, Homo sapiens
agtagagaaataaatttctcccaccctaaaccagacaatgcagatcttcgtgaagactctgactggtaagaccatcaccctcgaggttgagccca

SEQ ID NO: 624079 - DNA, 90 bp, Homo sapiens
tcccgcaggcacatcagcgaagacttggagcccgagccctcggagggcggggatgtccccgaggagattcctgtcaacgtccgattctgc

SEQ ID NO: 624080 - DNA, 100 bp, Homo sapiens
caccgaacccagcattttcggcaaccgctgctggcagttttgccaggtgtttgttaccttggaatcctgcaatatggcgaacataagagaatattatgag

SEQ ID NO: 624081 - DNA, 76 bp, Homo sapiens
cagcaattaacaaagaccagccagctaaccctacagaagagttcctcagcagaagggcataccgatgctgtccttg

SEQ ID NO: 624082 - DNA, 100 bp, Homo sapiens
cctcctgtgacctgcatgtactgggggattcgcagggaggatgtcgggacaccccggaagctgggaaatggtaactcaactggacccaaataaatcatta

SEQ ID NO: 624083 - DNA, 50 bp, Homo sapiens
atggaagaggtcctatgacaggatcaagttcccagtgacctgacagcaga

SEQ ID NO: 624084 - DNA, 82 bp, Homo sapiens
ctgctcttccaacaccagtggaagatgatcacatcccaggtcagaagagatcaattctacagaaatttccagtggttctgtt

SEQ ID NO: 624085 - DNA, 99 bp, Homo sapiens
tgaagagcgacaagccgctggcagccgcggatctcaccgccgctcagggttcttgatagtccacaatgggtgaaccacagcaagtgagtgcacttccac

SEQ ID NO: 624086 - DNA, 100 bp, Homo sapiens
gagggagagcaaacttggctcagcccatattcagtcacatcactcaagacgatcccagaactgtgccgaagatgtgatacgcaaaacgaagacagatcag

SEQ ID NO: 624087 - DNA, 75 bp, Homo sapiens
ggctggtgtccgccccgcccgaaagctctactgagatgaagaaagaaaaagaatacctgctcagctccagagaca

SEQ ID NO: 624088 - DNA, 101 bp, Homo sapiens
gaggagaatgagaccctggtggagtttgctattgttggaaatggaggatgaagatacaattgatgtgttccaacagcagacgggaggtgtctactgaaaag

SEQ ID NO: 624089 - DNA, 101 bp, Homo sapiens
gttcggccgtggctcccgccaccgcaaggaggtggactacagcgactcactgacggagaagcagtggctcaaggtggacgccctgcttcatctggcccgcc

SEQ ID NO: 624090 - DNA, 74 bp, Homo sapiens
ggcgcctcaggcacctcggcccggttcttggccaggctgactgagagatttgtgctgggagtggatatgttcgt

SEQ ID NO: 624091 - DNA, 99 bp, Homo sapiens
cgggggctttcgcccgggtcctcctagaaattccccccgaagaagactcccccacatctgggcccttcctcgtgctgccgccgctgatggagtggatcc

SEQ ID NO: 624092 - DNA, 118 bp, Homo sapiens
gaggagatcgccacctccatcgaacccatccgcgacttcctggccatcgttttcttcgcctccataggctgtggaaaatctctgttctcacaaagtctccccaatgctctacaagcaa

SEQ ID NO: 624093 - DNA, 99 bp, Homo sapiens
tatgaacttgaaccttcgcccttaactcagtatatcttggaacgaaagtctccccatacctgctggcagtgtgatttggaaggaatcatgccaaatgtt

SEQ ID NO: 624094 - DNA, 129 bp, Homo sapiens
cagattctacaacacatggtggaatgtatccgggaggtcaacgaggtcatccagcaaatggttatgagccttagagtttctgaactccaagtactgttgggctacgccgggagaaacaagcacggacgc

SEQ ID NO: 624095 - DNA, 100 bp, Homo sapiens
gcaagagcggcggtagcgcaggggagattacttttctggaagctgttaaacgtttaatgaaagaagcggcagaattgaaagatccaacagatcattacca

SEQ ID NO: 624096 - DNA, 100 bp, Homo sapiens
gaagcaatgcagaagtggtattacaaagatcctcagggagaaattcaagaagcagctgtgcccccatgggttgacactaacgatgaagaaacaattcaac

SEQ ID NO: 624097 - DNA, 101 bp, Homo sapiens
cactacaacatcaaccagagcagattccagcctccacatgtacatattttaagctatgaagaaggacatccctcacactctgaaacagatctccttcagag

SEQ ID NO: 624098 - DNA, 74 bp, Homo sapiens
atagacagcaatggatagatgccattgaacagcacaaggaagaatatgttcaagagggaataagatggacaccc

SEQ ID NO: 624099 - DNA, 75 bp, Homo sapiens
gcgggcctggactgtgggctggtgtgtggaactgggtctagacagtttcaaagtgaaacagaagttcttcgctgg

SEQ ID NO: 624100 - DNA, 82 bp, Homo sapiens
tcccagagcacgacgagcgcggaggaccgggaggctcccgggcttgcgtgggagtcagagtcagaagcaaaggtagatggag

SEQ ID NO: 624101 - DNA, 100 bp, Homo sapiens
cgagcttgtgccaaataccacatggaaatgaattctaagatgatatcatcaagttgaatcgaaaggaagggaagaagcagaattttccaagactaaatag

SEQ ID NO: 624102 - DNA, 100 bp, Homo sapiens
ccagtttgcagtgggtggacgagatcagtttgtaagggttgaaaggaggagcaggaggtactgatggacaaggaggtaccttccggtacacctttcatgg

SEQ ID NO: 624103 - DNA, 100 bp, Homo sapiens
gacagaggaagtatggtggtcctccaccagacagtgtgtactctggcgtgcaacctggaattggaacggagcaatcccacagagtattgatgaggaaact

SEQ ID NO: 624104 - DNA, 80 bp, Homo sapiens
ccccgcccacgtggcagcaaggatatggcccgcaagcactgccccccaggtgttgagtaccagctctccagcccaacagg

SEQ ID NO: 624105 - DNA, 75 bp, Homo sapiens
gtgtactttgccctcagcatctcccttcatgtctgggtcatggttgtggtgcctcctggagtgacaaactcctct

SEQ ID NO: 624106 - DNA, 75 bp, Homo sapiens
gatacgcacaagccaaaacctttggggtgaaatgacaatggatgctctgttggctcgattgaaacttctgaatcc

SEQ ID NO: 624107 - DNA, 96 bp, Homo sapiens
cagctcgggggccaactctgaggagtccactgcagcaggagtccaacctataccttctcagggaggcaaactagaaatagctggcactgtggttgg

SEQ ID NO: 624108 - DNA, 83 bp, Homo sapiens
caacaagggccacaaagtgaccaagaacgtgagcaagcccaggcacagccgacgccgcggggccccttcccagctgcctgcct

SEQ ID NO: 624109 - DNA, 100 bp, Homo sapiens
gccttcgtctcccagattgcagctatgatttaggcatagagaatcgtgatgccaccaacgaccaagtcaccaaggatgctgcagaagctataaagaagca

SEQ ID NO: 624110 - DNA, 100 bp, Homo sapiens
gaatttatatagagatgtgatgttggagaactacagaaacctcgtctccctgggggctttgttatgcacctaaagccatattggaagctccagaagaaag

SEQ ID NO: 624111 - DNA, 100 bp, Homo sapiens
atcattgcagacattaagaagatggccaagcaaggccagatggatgactgtcttttgaaggtttggtataatgtagaaaactggcggacagctgttactt

SEQ ID NO: 624112 - DNA, 90 bp, Homo sapiens
ccgaacatcagggccctccagactcaggcgccccaacagagggtcagtgctgtagcccctcctaccctggctgctccgggaagtccctgc

SEQ ID NO: 624113 - DNA, 100 bp, Homo sapiens
gttaaaggagtcagcacagtgcgtcggggacgaattcctgaactgtaagctggctaccagggccaagctagttcttctggagctcaacttcttgccaacc

SEQ ID NO: 624114 - DNA, 78 bp, Homo sapiens
gggttcttttatactcaaggcaaatgaacttcttcaaacaaattggagctctggcagatcagcatatcattcatgtgg

SEQ ID NO: 624115 - DNA, 83 bp, Homo sapiens
ctgctttccactcggctcctgtcgtccgttctctcaggctcccgttcagattcccaacttcttctggagcctggggatcggtc

SEQ ID NO: 624116 - DNA, 83 bp, Homo sapiens
tgataacaccctgtaacagctgagtgaaaattatctcagtgaacgaggatgtcactcttagatcagccctcgatagaaatctg

SEQ ID NO: 624117 - DNA, 100 bp, Homo sapiens
ccccagcgggggctatgtcttccagaagcccagggcgtctgtcacagctttccaatccatgagcccatcaatcggactggacacagataaactgggacag

SEQ ID NO: 624118 - DNA, 80 bp, Homo sapiens
aggaattattagactacaaaggagttggcattagtgttcttgcccttggaaaagcacaagacataaatcttctttgaact

SEQ ID NO: 624119 - DNA, 99 bp, Homo sapiens
gatcatggcggatgatctaggcactggggatctcggttgctacgggaacaatacactgagcctcctaaaaagcctctggactatgttcaagatcattct

SEQ ID NO: 624120 - DNA, 90 bp, Homo sapiens
acgtaatgtgccagtcatcactggtagcaaagctgtctgcgagcctggctgtggtgcacatggaacctgccatgaacccaacaaatgcca

SEQ ID NO: 624121 - DNA, 98 bp, Homo sapiens
ctgagagtaggctccgggccccggacctaggttcgtcaaaaaatgttgtatgcagcaacaagagcaactctgaagaaggaatttggaggtggccacat

SEQ ID NO: 624122 - DNA, 100 bp, Homo sapiens
tggtccctcttgattatccaatggatggtagttttgttcagatattttggatggcagtagtagcagcagtggcttatcctcagacccgctggctaaaggc

SEQ ID NO: 624123 - DNA, 98 bp, Homo sapiens
gatgggatccggctcctccagctaccggcccaaggccatctacctggacatcgatggacgcattcagaagcaccagtggcagttcgcagcctccagga

SEQ ID NO: 624124 - DNA, 101 bp, Homo sapiens
agtttccatatgtaatgcaagggtcagcagcaaggacaagatggagtaaaagtccagcaagctactatagctcctgtaactgtagcagttggaggaattgc

SEQ ID NO: 624125 - DNA, 82 bp, Homo sapiens
gaacaccaatttggtgcacaaggggagaaattacgacaactacgagactgcattattgggaaaaggccagaagaagaaaatg

SEQ ID NO: 624126 - DNA, 100 bp, Homo sapiens
aaccttctctctttcgctctttggactaatgggagttgcttttggaatgaatttggaatcttcccttgaagaggacagtcattttgtttactcattcagc

SEQ ID NO: 624127 - DNA, 100 bp, Homo sapiens
tctcaagccgctcccgctggaggagcagggctaccacccgatgccccatgaagtggagatcgcacacaccaagaagctgttccgcaggaggagaaatgat

SEQ ID NO: 624128 - DNA, 100 bp, Homo sapiens
gcctaactcaagccattggcacacagatttaatccagagactgacttcactatagaacccacagttgtatcaatggttggggaaagatagtggcaacagg

SEQ ID NO: 624129 - DNA, 83 bp, Homo sapiens
ggctgctgctgagtcagacaaggactctggcttttcagctgactacacagacttagtcttctccactccgtgttcctgcagct

SEQ ID NO: 624130 - DNA, 82 bp, Homo sapiens
caaagaaacactctccttctgccacatttgttttgagctaaatattgagggacatggatttgattgacatactttggaggca

SEQ ID NO: 624131 - DNA, 80 bp, Homo sapiens
accgcgggcgccaatggggagcagaaggactcggacacagatgatatcatcaagttgaatcgaaaggaagggaagaagca

SEQ ID NO: 624132 - DNA, 100 bp, Homo sapiens
gaaaatcgcccagctcaccaagttcattatgctgacatatcttttcatgttggcctggctgggagtcacggctttcacctcactgccagtttacatgtac

SEQ ID NO: 624133 - DNA, 100 bp, Homo sapiens
ggactttctttgctcttgtcttgttttgggtgtactggatcatgacacttctttttcttggcactaccgcggagtttaagagagctgtgaaagtagcaac

SEQ ID NO: 624134 - DNA, 100 bp, Homo sapiens
ccagacgacagtcaggagctcagtatggctcttttccaggtggctataacagagaggaatgtcttcgaacagtcgaatgctataatccacatacagatca

SEQ ID NO: 624135 - DNA, 98 bp, Homo sapiens
gcagaaatcacaaagtacagctcagaatttgacttcagatgcttgtttgctactgatgggtgtgagcaagttagatattctataccggagacttctcc

SEQ ID NO: 624136 - DNA, 50 bp, Homo sapiens
cgacatcccagagagcttccagagtccagaggtgtccttctaaagctggt

SEQ ID NO: 624137 - DNA, 100 bp, Homo sapiens
agcgcctgagaaagaagtttgcccaaaagatgggtacacagcttttaatggagttgacttcgaagggaccttccatgtgaatacccagacagatgatgac

SEQ ID NO: 624138 - DNA, 100 bp, Homo sapiens
cgccgcgctcccctcgcccgcccgggccgccaggaggccccgtgtgggccgcggcccggccctcaccatggagtccatgttcgaggacgacatcagcatc

SEQ ID NO: 624139 - DNA, 83 bp, Homo sapiens
agagaatctgcctcctttaacttatgaccagatctactggtatcgacaaggagacttagaaccgaaatttagaaagctaattt

SEQ ID NO: 624140 - DNA, 100 bp, Homo sapiens
cagagcaggacgaaccgccaatcgcaaggcacctctgagaacttcagattgtagaaggcatgaaacaaaaaatgtggagtattgaaaatattgccttcgg

SEQ ID NO: 624141 - DNA, 75 bp, Homo sapiens
cggaatatggagccctgggcgcgggggcggcgtgtcaggtggttgcggagctgggctgctataacaaagtaccac

SEQ ID NO: 624142 - DNA, 100 bp, Homo sapiens
gaatggggactatggtaggggcaggtgaagttttacaggcggtcaccgaccatgatattcctcagcagttggtggagcgattacaagaagagaaaaggat

SEQ ID NO: 624143 - DNA, 100 bp, Homo sapiens
gattccaagtaactcttatttgaccctggccggctcctgtgggaagtttgccccctttgaaattaaagagcacatggtcctggcccctcggcgtcggacc

SEQ ID NO: 624144 - DNA, 100 bp, Homo sapiens
tacaaattcatgaagcgaattgctgcttgtcaggagcagattttgagggtggttctcttcccaaagtggaagccaaattcatcaattatgtgaagaattg

SEQ ID NO: 624145 - DNA, 98 bp, Homo sapiens
caggctggagaatatggtgcagaggccctccacggtggccagcatcgaaatgttcagccttttagtgatgaagatgcatcaattgaaacaatgagcca

SEQ ID NO: 624146 - DNA, 95 bp, Homo sapiens
gacagaagcgactttggtgagactctgattacaggctgtgccagccctggaaaaacagttacaattgttgttcgtggttctaacaaactggtgat

SEQ ID NO: 624147 - DNA, 100 bp, Homo sapiens
ctaaaaacaagactggggctgctcccatcattgatgtggtgcgatcggcgtgcaatggaattgagttttgccctggtaaatgggaataatatccgaggca

SEQ ID NO: 624148 - DNA, 100 bp, Homo sapiens
ccttctgctaccagaaaaccttctccaccagaatccagctcacgctgatgtccggtctgtgctacgacagcaaaatgttccaggtgcatcaggtgctctg

SEQ ID NO: 624149 - DNA, 90 bp, Homo sapiens
gtcgatggtcggcggcgcccggatgggcagctgaggtggatgaaaatactaggaaaagtttatttaagttacgttctacatgggatgaaa

SEQ ID NO: 624150 - DNA, 100 bp, Homo sapiens
cccagttccttttactgtgttgagcctcacaggaaatccctgcaaggaagactacttggcggtttgtgggctaaagttctttattggtgaaaacatgaat

SEQ ID NO: 624151 - DNA, 101 bp, Homo sapiens
gcgggtcggacgcgtccggctgtggaagagagcggcggccgctcacaacatgcacagcctggcgacggctgcggttttataggatcacattgacaaaagta

SEQ ID NO: 624152 - DNA, 82 bp, Homo sapiens
cgacattggtttacatttctcttgactgagaatggtgccacgtgtggtctgtaagtaggtttttagaacttcagccataaaa

SEQ ID NO: 624153 - DNA, 51 bp, Homo sapiens
gatgagcctgcagagcgcgcagtacctccgacactggcttcatgtcctatt

SEQ ID NO: 624154 - DNA, 98 bp, Homo sapiens
catttaccaccaatgggaacatgcacagcttgcccagtttcgacaaagaaaagctcagtcggatgggcagagtccttccaagaagcagaaaaaaaaga

SEQ ID NO: 624155 - DNA, 75 bp, Homo sapiens
ctacagatgtggcctccagagggctagcctgagacagctgtcttgtgagggactgagatgcaggatttcttcacg

SEQ ID NO: 624156 - DNA, 87 bp, Homo sapiens
caggcataaaatttgttcagcatgatgctgtagagggaatcttaacttgacccatcttatcaccgtcttctctggcactcagtattt

SEQ ID NO: 624157 - DNA, 100 bp, Homo sapiens
ggctgcccctctgactggatccagttcctcaacaaggcgtctactagaaaaatctcagagggtagaagccatcattgcatctatgcaggctactggtgca

SEQ ID NO: 624158 - DNA, 100 bp, Homo sapiens
ggatggtcaagagcgtgccctacttcaaggataagggtgacagcaacagctcggcgggctggaaggtgtacctgaaggaaatcttaaaagaaattggtgt

SEQ ID NO: 624159 - DNA, 50 bp, Homo sapiens
gccaatcatgatgaactaatttccaaggagtacgaccccagcaaagcgac

SEQ ID NO: 624160 - DNA, 100 bp, Homo sapiens
agccggagctgggcgcggattcgccgaggcaccgaggcactcagaggaggttaatttggagtggcccctggagtcagtttcctacaccatccgaggcccc

SEQ ID NO: 624161 - DNA, 88 bp, Homo sapiens
tgccaattgtgaagttcagggataaagtcagtgctgttccctcgtcacaccaatgccagtgctcgagacaacaccatcaacctgatcc

SEQ ID NO: 624162 - DNA, 95 bp, Homo sapiens
ggcgcgtccagcgcagcccgacgttccgctgctggggtactccaaagattcaggtttactcacgtcatccagcagagaatggaaagtcaaatttc

SEQ ID NO: 624163 - DNA, 100 bp, Homo sapiens
atttgaagcacatttgggaagccacattttgcaggtttctacagaagaaggcttgagtcttgcccaagaatataattgtggtttttttgagacctctgca

SEQ ID NO: 624164 - DNA, 101 bp, Homo sapiens
gccaatctctgcttgaaaggagaagacttggattctcaggtgtggccgacgacgatgccctcgctgaggagcgcatgcggagaggccagaacgccctgcca

SEQ ID NO: 624165 - DNA, 75 bp, Homo sapiens
caaaaatattatggtctttgtgcacatttacatcaagctcatgatggagcagtccaagaagtcctccctcatggt

SEQ ID NO: 624166 - DNA, 50 bp, Homo sapiens
gagacacggccagatctgccctccagcctctgagcccaagtctgcacgta

SEQ ID NO: 624167 - DNA, 75 bp, Homo sapiens
tgtattcagtggaggaagctgatacgtaggtaacctttccagagatgtgacagaagtccttatacttcagttgtt

SEQ ID NO: 624168 - DNA, 82 bp, Homo sapiens
catcttcggcctgggccttaccatcttcatcatgcacatcttcaagcatgctcagcctgacatttaccccggtaactgctgg

SEQ ID NO: 624169 - DNA, 73 bp, Homo sapiens
tttaagagcaagaagaactacttcaagttcagctccatttatcttaaagaaattggacagcatatgaagacag

SEQ ID NO: 624170 - DNA, 74 bp, Homo sapiens
ggaactacgagtacctgatccgcctcttccaggagtgggagccccactgcaggccccaccatggcgccgttcct

SEQ ID NO: 624171 - DNA, 83 bp, Homo sapiens
ggacgccttatggagccagcatattccaggcctccggtgtggctgtctctgatggtgtcatcaaggtgttcaacgacatgaag

SEQ ID NO: 624172 - DNA, 101 bp, Homo sapiens
agaagatagaggcagaactgcaggacatctgcaatgatgttctgggatagctgggagtatggccaccctgctccacgatgcggtaatgaatccagcagaag

SEQ ID NO: 624173 - DNA, 100 bp, Homo sapiens
gcgcctctgtcagacctgctaccccctcttccaacaggtcgtcagcaagatggacaacatcagccgagccgcggggagagcagagctgacatctgataaa

SEQ ID NO: 624174 - DNA, 90 bp, Homo sapiens
cgggactccctggaaacctagaaatgaaaatcgcgctgcaactcaaagccacgctggagaacatcaccaacctccggcccgtgggcgagg

SEQ ID NO: 624175 - DNA, 50 bp, Homo sapiens
gctgtgttctctgcagattctaaaatttcacggtccctcatggtgtctca

SEQ ID NO: 624176 - DNA, 74 bp, Homo sapiens
cagggtctgccgtgctggagggaaggctgctgttggaggatatggaatattatcttgtaaaatggaaaggatgg

SEQ ID NO: 624177 - DNA, 82 bp, Homo sapiens
cctctacagagacataatgttggagaacttctgccacatggcagtgctgggtggctgttgacatggaatttgctaagaatat

SEQ ID NO: 624178 - DNA, 90 bp, Homo sapiens
ctccttgggatacaccagcactcgagctccatcaagtatgatggtgaaggatgaatatgtgcatgactttgagggacagccatcgttgtc

SEQ ID NO: 624179 - DNA, 90 bp, Homo sapiens
agccgggccgggcagctagcagggcgcttcgggatattagaaatggctactccccagtcaattttcatctttgcaatctgcattttaatg

SEQ ID NO: 624180 - DNA, 100 bp, Homo sapiens
gaagcacaagcatggccttgtggagcggctctgggctttcccagctccgaagtcaatactgagatcccagatgtgtccagagacatcctgaagaggctcg

SEQ ID NO: 624181 - DNA, 83 bp, Homo sapiens
ttacaccgacaactccatcaagcctcaggagctgctgtgtttggtgctggcaccaactcgggaactggcccaacaggtgcagc

SEQ ID NO: 624182 - DNA, 100 bp, Homo sapiens
ccgacatcgcggccttcttccgatccgagcaaacgaggcccctgagagctccacctagttcacaggataaaatcccacagcagaactcggagtcagcaat

SEQ ID NO: 624183 - DNA, 75 bp, Homo sapiens
atccaggtctcctactaccactgcatctgtgtcagcaacagcagctccaagagatgtggtcttgctatgttgccc

SEQ ID NO: 624184 - DNA, 78 bp, Homo sapiens
aggagttcaaaacccacacatggatgatcatggtgattttactgctgcttgtggctatcgtggttgttgcagtctggc

SEQ ID NO: 624185 - DNA, 74 bp, Homo sapiens
cgggcggagctgtgcgagagcctcctcacttggggccaattcctgtccccccagcagcatggcatcgtgtgctg

SEQ ID NO: 624186 - DNA, 100 bp, Homo sapiens
cttgtgcaaccagggcaactctgcaccgggtgctcagcagttctgcttcttgctttccactcgagctgggggccttggaatcaatctggccactgctgac

SEQ ID NO: 624187 - DNA, 100 bp, Homo sapiens
tgctacagatgttaccacttctgtggctgctaccccactcctgggccgtccctgaaggtgctggagaatctggtaaaagcaccattgtgaagcagatgag

SEQ ID NO: 624188 - DNA, 98 bp, Homo sapiens
cccgaaggaaaaggaggaattcgccgtgcccgagaatagctccgtccagcagaaacaagtgttgaaaatgttaaaggctgtgctgaagaagagccgag

SEQ ID NO: 624189 - DNA, 101 bp, Homo sapiens
gggcgcagcagtactttgagaaaatggacgctgacatcaatgtcacaaaagcggatgttgaaaagacacatgcctggacatacaagtcgagaagtactaat

SEQ ID NO: 624190 - DNA, 73 bp, Homo sapiens
ctgtctgacagaactcattctcaccaataatagtctcgtggaactggacttgattattcttagaaatgcactt

SEQ ID NO: 624191 - DNA, 75 bp, Homo sapiens
tcaagctgcagcttgatcgccttcaactccgaccgtcctggatccctgctgccttggtgatcccgggctgacagc

SEQ ID NO: 624192 - DNA, 75 bp, Homo sapiens
caagatccgacccatcaaggcttctgtcatcactcaggagatgtaatcagtgtagagaaaaccgtgaagagatgc

SEQ ID NO: 624193 - DNA, 100 bp, Homo sapiens
ccgattacccacttcgagtcctttattgtggaggtctgcttagtggcctatcttggcttgtttatgctttgtgtctcatatcaggttgacgaacggacat

SEQ ID NO: 624194 - DNA, 83 bp, Homo sapiens
agtccacaaagggacctgatgaagcgaagatcaaggttttgattcccaccatggccatcacccagtttcggttatttaaattt

SEQ ID NO: 624195 - DNA, 90 bp, Homo sapiens
cgcttggttaaaacctgacacttttaacagacttgggaagatccccatgaaaaagataagagcacgaactgctttggagataatgatcct

SEQ ID NO: 624196 - DNA, 98 bp, Homo sapiens
gtgaccctttgtctgttgctgggtacctttcatttcgcactttctcctctgctgctctccagttcacctgtggcagatgatatcatccagcccgctgc

SEQ ID NO: 624197 - DNA, 100 bp, Homo sapiens
gggcccgtactgcacatcgtggtggtcggatttcaccacaagaagggctgccagatcacagattctgctggccatattctctactccaaagaggatgcaa

SEQ ID NO: 624198 - DNA, 83 bp, Homo sapiens
cccaggtgccagaccccaaggtccaggaactccaggccagcatggcgcagcacagacttatgtccctgatgccaaaaatgcac

SEQ ID NO: 624199 - DNA, 97 bp, Homo sapiens
ggaacttcgaaccatggaccaggccctcaagtccctgatggcctcagaggaggagcacggggtcactctggtgcccattgaggagttcagcccggag

SEQ ID NO: 624200 - DNA, 100 bp, Homo sapiens
tttcattgtctcggacgtgcggggcctgggcctcccggtccgcaagcaggtgctggagaatctggtaaaagcaccattgtgaagcagatgaggatcctgc

SEQ ID NO: 624201 - DNA, 80 bp, Homo sapiens
cgcggagcctgagccgccgtccggccgcacggagagcccagccaccgccgcaggtgacttcatggtcatgacgattttct

SEQ ID NO: 624202 - DNA, 90 bp, Homo sapiens
aaacaagcctttgaaagatgtcataggtcaagtaagggagaattgactacgcttatacatcagcttcaagaaaaggacaagttactcgct

SEQ ID NO: 624203 - DNA, 100 bp, Homo sapiens
gatttctgcatttccaactgaggctcttatcacgcgatggcatccactgtggaaggaggcgacacagctctgctcccagaattccccagggggcccctcg

SEQ ID NO: 624204 - DNA, 118 bp, Homo sapiens
caacctgctgatgagggaggtgcccctgcgttgtaccatccgcctgtgggacacctaccagggaacggcaggagcagctgatgggatatcggaagagagggccgaagcccaaaccgct

SEQ ID NO: 624205 - DNA, 98 bp, Homo sapiens
cctttgcccccctcgataccaacggcaaaaatctcaagaaagaggtgggcaagatcctgtgcactgactgcgtgttccattggcaagctacaataatg

SEQ ID NO: 624206 - DNA, 129 bp, Homo sapiens
ctgagtgacagaaccgtggacagcaacatttcccacaggacacgaagtttgtcggcccttgccttggcagagctgagccacagatccatgatgtgcagttctctggagcaggcgctggctgtgctggtc

SEQ ID NO: 624207 - DNA, 88 bp, Homo sapiens
ttgctcagtctctgtcagaggaagatcccttgtggccacagatgtctttaattccaaaaacctggccgttcaggcacaaaagaagatc

SEQ ID NO: 624208 - DNA, 75 bp, Homo sapiens
gagggtggaaaagtcattcaactcaagcagatcaaagttgttttgaggaactctaatgaatcattgattgaccag

SEQ ID NO: 624209 - DNA, 100 bp, Homo sapiens
cagggaggatgacggagctgcagtcggcactgctactgcgaagacagctggcagctgagctgactgctgcccactttggaggaggcggtgggctccttca

SEQ ID NO: 624210 - DNA, 87 bp, Homo sapiens
cgcttcgatcgcctcgcgccggctgctctttccggagagtgaatctggaagtgaaagtggagaacaaggcgaaagtggggaggaagg

SEQ ID NO: 624211 - DNA, 90 bp, Homo sapiens
cattgtttccagaatgaaaaggtcactgccatctggagtggatggacacacctggttgctcagacagtaacactttcagctgctcctccc

SEQ ID NO: 624212 - DNA, 100 bp, Homo sapiens
tgtggatggttgagcacaaaaaaccacctctacatttctcttaaagagtgactcgtccaagaagaagagagtttaatggaatgattaatggagaaaccat

SEQ ID NO: 624213 - DNA, 124 bp, Homo sapiens
actttacagaaacagtgtgtaccattccgacgttacaatggtggagttggcaggtgtgcgcaggccaacgtgcagcggctgaaggagtaccgctccaaactcatcctcttccccaggaagccct

SEQ ID NO: 624214 - DNA, 100 bp, Homo sapiens
gctagcaggaatgcttactgttgcgtggttcgttattaacagcaggctctccccggaggctcagccccctctgctccccatgggcaactgccaggcaggg

SEQ ID NO: 624215 - DNA, 100 bp, Homo sapiens
tgatccatgggcgagtctacgatgtcacccgcttcctcaacgagagttcttcgtaagtacatcttaaagctgtcaagatggttctagcagaccttggaag

SEQ ID NO: 624216 - DNA, 125 bp, Homo sapiens
ggaggccgtccagcagatggcggatgccctgcagtacctgcagaaggtctctggagacatcttcagcagctacaagcaggggggtgtcgcctctgggatgaagcacgtggagaccaatacctacg

SEQ ID NO: 624217 - DNA, 90 bp, Homo sapiens
gtatgtccaccacagttactttatcccttcatctgtggatgggcaggatttcaaatatgcgtgcattagagaatgattttttcaattctc

SEQ ID NO: 624218 - DNA, 116 bp, Homo sapiens
tgcgtctccaatgcagttggctgtggaccctggagtcagccactggtggtctcttctcatgaccgtgcagtcatctcaactcgaactccacctccaccttcaccgttgccatttcc

SEQ ID NO: 624219 - DNA, 75 bp, Homo sapiens
catctttctggatgatggagtggatgaacaagtactgatggaactaaaaactacggtatccaactgttgaaaaac

SEQ ID NO: 624220 - DNA, 150 bp, Homo sapiens
ctcggggtcccggtcgcgaggaggaggaggatgtggcgcgcggaggggaaatggctgccgaaaacaagccggaagacaatgcagatcttcgtgaagactctgactggtaagaccatcaccctcgaggttgagcccagtgacaccatcgag

SEQ ID NO: 624221 - DNA, 121 bp, Homo sapiens
catggccgacatcaagacgggcatcttcgccaagaacgtccagaagcgactcaaccgcgcgcaggaaaagctgctactgtttgaacggtcttggatgaacagatggaagtctgctgttctg

SEQ ID NO: 624222 - DNA, 75 bp, Homo sapiens
gagaagagccatggaaacaggaggaagaattcccaagccaaagctttccagacctttccaaagtgaaactgatga

SEQ ID NO: 624223 - DNA, 74 bp, Homo sapiens
gagtgatgtggaggaaaacaacttcgagggcagagcttcagggatgacttcttagggggcaggggaggtagtcg

SEQ ID NO: 624224 - DNA, 100 bp, Homo sapiens
ccatcgcccgtggaggtggcctggggagccgtggccctttcgggggaccttcgagacaaggctgtcagcccctagatctgaagaagacacttgaatcatg

SEQ ID NO: 624225 - DNA, 100 bp, Homo sapiens
cttccaagaaatgctgatattgaccaggataatgaagagttgacaattagttgcccagtgcctgcagatgagcagacagaatgcacttctgcccagcaac

SEQ ID NO: 624226 - DNA, 88 bp, Homo sapiens
gaattttccaaatgaatttgcaaaacttactgtagctgattcgtctggtcctgaggcagtcctttgaagtcttgaagcgaaatggctg

SEQ ID NO: 624227 - DNA, 100 bp, Homo sapiens
accctctggaagcctagaaatggctgttcggctcttgaatcccagcgatgaaaccaggaactcactttcccgggatgccgagtctccattcctccattcc

SEQ ID NO: 624228 - DNA, 75 bp, Homo sapiens
gcgggcggcgctgtgtccgtcgccatgacagatcctgagagtgagaagcctgactgaccccgcctagacgccagg

SEQ ID NO: 624229 - DNA, 75 bp, Homo sapiens
cctcaactgccagtgtctcctgcgtgggggccgggtgaagacgtggaagcggcgctggtttatcctcacagacaa

SEQ ID NO: 624230 - DNA, 100 bp, Homo sapiens
aagatgctcagaacagagcagaaatcaaattgaagagagcagttgaagaagtgaagaaattattggtacctgcatgatcctgccatgaagcagtttctgc

SEQ ID NO: 624231 - DNA, 100 bp, Homo sapiens
aagagaaaataagggagtactttggtggttttggtgaggtgaaatccgagaacagaatggagacagtcttgtccatgctgcttttgtagcagaaagtgct

SEQ ID NO: 624232 - DNA, 101 bp, Homo sapiens
atcaataagaacaagtcccaggacttcagactaggctcagaatctatgacacagcacagttggtggatctgaaatctgaactgacagaaacccaagcagag

SEQ ID NO: 624233 - DNA, 98 bp, Homo sapiens
acagacttcgctgtgagtgcccaaggtttcaaagcattatatgaagaaatattcccaagagactctaacttaaaagacaaattcataaagcatttcac

SEQ ID NO: 624234 - DNA, 83 bp, Homo sapiens
ctctcattattaccatatggcccatggaaaagattttgcatctagaggaattgaaagcagcagtgaggatgccagagttcatg

SEQ ID NO: 624235 - DNA, 100 bp, Homo sapiens
agaacttgcctaaagctgataagaaggcagttatccaggttgaaactgatttctcaactccaacaccaagaaggaaaaccccatttaacacaggtaatac

SEQ ID NO: 624236 - DNA, 100 bp, Homo sapiens
agcatttatcacttccttccttactttgtcttggtatactacatggcaaaatgggaaagtgcttcctctggagaggcagctccacgaggccgcccgccag

SEQ ID NO: 624237 - DNA, 110 bp, Homo sapiens
ctgcagccttgaacgtctggactctagggaccctgctgaatagctggggctacaggcgtgtgtcactgcgcccaggttcagattcagaacaagaaagtggacatctctaa

SEQ ID NO: 624238 - DNA, 95 bp, Homo sapiens
cgagacacaccaggccggcaggctgagaaaagcgagaccgcgtgcgaggaccgctccaccgggggacggctacgtgcaggcggacgcccggggcc

SEQ ID NO: 624239 - DNA, 100 bp, Homo sapiens
cggagtcagcggggctccgtccgagaacaacataatggtgtggaacgcggtcattttcgggagatgaaagaagagtttcccgaaggtatgaagattgtca

SEQ ID NO: 624240 - DNA, 75 bp, Homo sapiens
cttggatccgcgggacaagaaaattcatgcgagctccatgaacctgcctccagacaaggcccggctcctgcggca

SEQ ID NO: 624241 - DNA, 75 bp, Homo sapiens
tcaagaatgtgaacctgagaaggtggaaatcagagagaggtatggaacctggctaactgcaagctgaagaccaac

SEQ ID NO: 624242 - DNA, 75 bp, Homo sapiens
gtgggccgactgaacatcacggtggtacagggcgaccattgacgaggtggagacggacgtggtggagattgaggc

SEQ ID NO: 624243 - DNA, 75 bp, Homo sapiens
tttggcggcataccaccctgcactgtgagatgagtgaccgaggaggtggcgttcctttgaggaaaattgacagac

SEQ ID NO: 624244 - DNA, 75 bp, Homo sapiens
ctggtttcattcgaggtttcgggccgcactgtgacttctgccgtgttcaccgtgggagacaacgtggtttcaggc

SEQ ID NO: 624245 - DNA, 75 bp, Homo sapiens
gccatcagctcggcagtcgcgaagcagcaaccatgctggagctctcaaacactgctgtcctgcaccagatgcggc

SEQ ID NO: 624246 - DNA, 100 bp, Homo sapiens
ccaggagcaacagcagcagatggccggtatctggagcaacctgtatgcagccaacctccaggacagcttatactgggcctcagagcccagccagttctgg

SEQ ID NO: 624247 - DNA, 73 bp, Homo sapiens
gaaaggagcacggcctgaagccggtggtgggcgaagtgtacgatcaaggtcccagcatttgagggtgatgatg

SEQ ID NO: 624248 - DNA, 99 bp, Homo sapiens
gtgtaggcgttggtcttctgatagcaactttaatgtgtcaaggatgctatctaaatgggccttttaattcaaatctactgactatcccgaagcaaaggt

SEQ ID NO: 624249 - DNA, 101 bp, Homo sapiens
gaagggaaagcctcagcagcttctcagagtggacgagcacgacttcagcatgagacccgccttcggagctgttaaacgtttaatgaaagaagcggcagaat

SEQ ID NO: 624250 - DNA, 98 bp, Homo sapiens
tggagtctgcgaaggccgggacccggttccccggcccacagtgggggtgtgcaaacccgagagaactggtgacatattcgatgccatgttccctgtca

SEQ ID NO: 624251 - DNA, 75 bp, Homo sapiens
caccagctgaacaggccaaagccagactacagctggttcttgaagctgctgttccatacgttttgaagagctgtg

SEQ ID NO: 624252 - DNA, 87 bp, Homo sapiens
ggcatctctgccgaggctgctggaatcgactggggcatcttcccggaatcagattcaaagggaagcatgctagagtgaaagaaagag

SEQ ID NO: 624253 - DNA, 100 bp, Homo sapiens
gaaatcgagatcttaaggaacctctatcatgagaacattgtgaagtacaaaggaatctgcacagaagacgactttgagcaaagcatggtcctggttgcct

SEQ ID NO: 624254 - DNA, 100 bp, Homo sapiens
tgtgcctcccagcaccacagtccttctgcagtccctcgtccagccacccccaggatttgtacacacagatatgacgaaagacttgaaagaagaacattta

SEQ ID NO: 624255 - DNA, 74 bp, Homo sapiens
gaagatggtgtcctggatgatctccagagccgtggtgcaaaagtcaacaactctagcttaattggagtaggcta

SEQ ID NO: 624256 - DNA, 98 bp, Homo sapiens
tcctactccgccttcgagatgaaggagttgccgcagctggtggcctcagtcatcgagaggttgtatgaaatcttggaattggctgaggacatggaaat

SEQ ID NO: 624257 - DNA, 83 bp, Homo sapiens
gagagaacgaggaggaaggagagaaaatggcgtccacggacaatgcagatcttcgtgaagactctgactggtaagaccatcac

SEQ ID NO: 624258 - DNA, 87 bp, Homo sapiens
acagcgcgcggcaggcggcgagctcgggggccgcagcgacaagactctgggacgatgaagaagccgcacaccactgaagagattggt

SEQ ID NO: 624259 - DNA, 85 bp, Homo sapiens
acgacttcatccagggctgcatcgtcctgcaggagatgactgatgacatggattcatacacaaacgtatatcgtatgttctccaa

SEQ ID NO: 624260 - DNA, 75 bp, Homo sapiens
gaagaaaatcgcatgctgccccaggtgagaattatgaagatgatgacctagtaaattctgatgaggttatgaaga

SEQ ID NO: 624261 - DNA, 100 bp, Homo sapiens
ccgcagagtccgcggcgccaccgctcgccctccagaattcagaaggagctagctgaaataacccttgatcctcctcctaattgcaggtaagaaatgaatt

SEQ ID NO: 624262 - DNA, 104 bp, Homo sapiens
tttggttttagcaaaaggagcccggaggaacattccaaaggaaaaatttcaggatgtatatggaatgttactcaatttagaaaaacatcaaagtcacttgcaag

SEQ ID NO: 624263 - DNA, 82 bp, Homo sapiens
ctccactttcgccagcccgtgccgcgagcgcggcctgcaggagattgacgagatgcctgaggctgccgtgaaatcaacagcc

SEQ ID NO: 624264 - DNA, 82 bp, Homo sapiens
caagcagccaaccatgctcaacttcggtgcctctctccagcagactgcgctacgagagtacaaggtagtgggtcgctgcctg

SEQ ID NO: 624265 - DNA, 100 bp, Homo sapiens
ttcagcgttggggctgacacagcactcaatactatctgcacagtctcacactctgaggatgactgtctagctttcaaagttcaccaatactttaatgtag

SEQ ID NO: 624266 - DNA, 75 bp, Homo sapiens
gacccgcgtccggaacagtggaaggaaatagcaacagtggtgaaggtacggaatggccacatcaaaagaatcact

SEQ ID NO: 624267 - DNA, 75 bp, Homo sapiens
gtttgtgccagctctccagagagaaaagaaaatgacagatggcgagacctggacaggaaatgccctcttcagatt

SEQ ID NO: 624268 - DNA, 98 bp, Homo sapiens
ggacgcgactcgagggtgacgctcgctccgctcgtcccgctcgtcatggcctacccgggatacggaggagggctacttcagctctcagctgctgctgt

SEQ ID NO: 624269 - DNA, 75 bp, Homo sapiens
tcctgcaaaataaactgaaacagttggctcgacaggcactagacagatacttggcatatcgaaattttatgattg

SEQ ID NO: 624270 - DNA, 75 bp, Homo sapiens
ggacgcgtcatcgagtgtgacgtggtgaaagaagtccattggaatattaagcccaggagttgctttggggatggc

SEQ ID NO: 624271 - DNA, 133 bp, Homo sapiens
attaaaagatgatgagaaataaggacaaaagccaagaggaggacagttcgctacacagcaatgcatcgaggctttatcctgtggataaacgcagagtgaacgagtttggggagtcctacgaggagaaggccac

SEQ ID NO: 624272 - DNA, 90 bp, Homo sapiens
gttctggaaagttctctgtggcgacaatgcagatcttcgtgaagactctgactggtaagaccatcaccctcgaggttgagcccagtgaca

SEQ ID NO: 624273 - DNA, 90 bp, Homo sapiens
gggaaaatcacctttgcagaaaaggaagagagaagggcacagttacctaagtatcaacgtaatcttcctcggccaggacaggcccccatc

SEQ ID NO: 624274 - DNA, 75 bp, Homo sapiens
tgtcagccgatgcaccgagtccagcccaggaaaatggagaggacagtcattttgtttactcattcagccctgttg

SEQ ID NO: 624275 - DNA, 97 bp, Homo sapiens
atcccattccctgaagatgattctaattcaacaaatcataacttggaaactcccagtacagccagcagcaggccgggtaccagcagggtgccgcgca

SEQ ID NO: 624276 - DNA, 101 bp, Homo sapiens
gcccactggtggtcccccgctcccggggtccccggccggccaagcaggccaagtgcaggaacatggagcatgcactgcgggagaaggccaaggccttctgg

SEQ ID NO: 624277 - DNA, 89 bp, Homo sapiens
tgggcacgatgcttcatccaggtctcctactaccactgcatctgtgtcagcaacagcagctccaagctaccaagtcaggattgttaccc

SEQ ID NO: 624278 - DNA, 80 bp, Homo sapiens
ccaggacaatggggacccgggacgacgagtacgactacctattcaaagtttcactgttacatgccttgaagtgatgagga

SEQ ID NO: 624279 - DNA, 100 bp, Homo sapiens
tttctgaggaccatgcaccacctgctgctggaggtaactagttctcccaactgtacagacatgagtaatgtttgtcaaccaacagagttcatctcccgac

SEQ ID NO: 624280 - DNA, 100 bp, Homo sapiens
gtcagagctgtgtggacgcggtgcgcaaatccctgcaaggggtggcaggagactgctgtgccccctttgtgggaaaagcctcccttgggaagcagtggtt

SEQ ID NO: 624281 - DNA, 50 bp, Homo sapiens
ttccaacactacttagctttccaagaatcaggaaacccaggcccaacggc

SEQ ID NO: 624282 - DNA, 74 bp, Homo sapiens
gtactaggattatacattgtaagaggtgacaacgtaagtcacctgcaccggtgcccgtgacgtacgagctgccc

SEQ ID NO: 624283 - DNA, 75 bp, Homo sapiens
cagtgacctggggaacctgctcaaagccctgggtcgcttggaagaagccaagctgctacaggagctgagagaccc

SEQ ID NO: 624284 - DNA, 75 bp, Homo sapiens
ttattgttccgtgctgttcctgagtgtcaactatctgggggggacattcccaggacctgagggcactcgctttgc

SEQ ID NO: 624285 - DNA, 88 bp, Homo sapiens
caacaccaacaacagcaacagcaagaagaagagcccagctagcaccttcgccctctccagccaggtcaaaatgcagatcttcgtgaaa

SEQ ID NO: 624286 - DNA, 83 bp, Homo sapiens
gtcacaggccatgctctggcaaaaacggtaagcttgatgattaccaggaacgaatgaacaaaggggaaaggcttaatcaagat

SEQ ID NO: 624287 - DNA, 100 bp, Homo sapiens
aagttacagatttgcgatcacaaaataccaaaatttctacccagctagattttgcttctaaacggtacttaaagctttcaccaaaacacccagaatcaaa

SEQ ID NO: 624288 - DNA, 100 bp, Homo sapiens
tccttctcctggagacgcaactcaagctgtgccctcctggctgaagaagccccaagacagccagctggaggagggcaaacccggctacttggattgcctg

SEQ ID NO: 624289 - DNA, 74 bp, Homo sapiens
cagagagcccaacgcctggtgctcaagactttctccgagaatagctctccagacccccagctggccatgtggtg

SEQ ID NO: 624290 - DNA, 100 bp, Homo sapiens
ccactgcaagtctataaagaacacgctcaggaggaattcgaatttagagtttaatttctcagagcattctctccaggaagaatttttacagtatctcaaa

SEQ ID NO: 624291 - DNA, 51 bp, Homo sapiens
acccagcagttgccccatctgctcaaggccgactcgcgggccgctgcaccc

SEQ ID NO: 624292 - DNA, 100 bp, Homo sapiens
caggaccctcagggagagcgggcagccttccaggtggacaggtatttcagtgtctgtagacaagatggaatcatctccatttaatagacggcaatggacc

SEQ ID NO: 624293 - DNA, 50 bp, Homo sapiens
aggtgtccatccccgtgctgagaaggaacccagccagccggcggaatgca

SEQ ID NO: 624294 - DNA, 83 bp, Homo sapiens
aaagcatttaaccagcatggctacttcatattttggaaagcagtttttaagacaaatatgtgtcacaaagatgtctacacgga

SEQ ID NO: 624295 - DNA, 82 bp, Homo sapiens
cctcggcccgctcttctccctgcttaacgagaaccatagacgttccagaagtagagagagagacagaagccgagagcgaaga

SEQ ID NO: 624296 - DNA, 100 bp, Homo sapiens
cccggacgcgagcccgctcccctgaggttctccaaaaaatgtggaatcctttgcatctatgctgagacattctcctcttacacagatgggacctgcaaag

SEQ ID NO: 624297 - DNA, 74 bp, Homo sapiens
cgcgactccccccgggcccaaagctttatgaaggcaaagaacagatggagtttgaagaatccatgagacggctc

SEQ ID NO: 624298 - DNA, 83 bp, Homo sapiens
gaaccctggtcaccgtctcctcagacacagcattcaacccctctggaggaagtagcatttaaggcaccatcttggaagcaggg

SEQ ID NO: 624299 - DNA, 50 bp, Homo sapiens
gccgaggtcatggtggttcggaggttaatgttgaagaaggaaaatgcgga

SEQ ID NO: 624300 - DNA, 100 bp, Homo sapiens
ctgtcccagccgatgggttgtccgactgggagcagaggaagccttgaggacctactcacagataggaattgaaggcatagaatgtcaagctaaccaggcg

SEQ ID NO: 624301 - DNA, 82 bp, Homo sapiens
ccccgtaccaagccgagggcaactttggaggccccctggaaggctttaggatccagttctgtggctcctgatggatctgaga

SEQ ID NO: 624302 - DNA, 90 bp, Homo sapiens
gagcaacccgcaaacggtgggggtcggccggggccgcttcaccacttacgaaatcagggtcaaggagaccctcctgttcttaactgtggg

SEQ ID NO: 624303 - DNA, 75 bp, Homo sapiens
gcaggatgcctgggactacgtgcaggctcaggttgttgatcattatgaaaatcctagaaacgtggggtcccttga

SEQ ID NO: 624304 - DNA, 98 bp, Homo sapiens
gtgcgattgcatgaggatgctgaggctgtcctgtcctcgtccgtctcatcaaagcagtcccagctatctgacttcatgtgaaagatggctaatgcaga

SEQ ID NO: 624305 - DNA, 100 bp, Homo sapiens
aagttactgccgcgccaccgagtccggaccggagactttggggcctaactagtgagtcgtcctccaccccgggaaatggggccacgcccgaggagtggcc

SEQ ID NO: 624306 - DNA, 75 bp, Homo sapiens
gccttcaaatccatcaagctcatcaaaaggtcttgagtcaccacgtccgaatataattcttgggttagtaatctg

SEQ ID NO: 624307 - DNA, 83 bp, Homo sapiens
cgcctcgggtctcgggggccgctctgggatcccggccaccagcaattgtccggggccaaaccagtgctcctgccacctctctg

SEQ ID NO: 624308 - DNA, 100 bp, Homo sapiens
aaaggcaagagtaacagcagcgccgtcccgtccgacagccaggcccgggagaagaaatactacagagtgtgccaaagttctgttttccctttgacgttga

SEQ ID NO: 624309 - DNA, 83 bp, Homo sapiens
ctcagatctgtggagcagatccgatggagaggctgagctgctccaggacttgggccatcactggtgcaagctatatttaacgg

SEQ ID NO: 624310 - DNA, 101 bp, Homo sapiens
cggggcggcagctgaggcggaggctgacgaggaggcggatcccccggcgtcagatttcagccttccaagttctgatgtaacaaacaacttaaaacccagtc

SEQ ID NO: 624311 - DNA, 75 bp, Homo sapiens
caggcatggagccaacaaggagaacctggagctcaacggcagcatcctgagtgggctccgtaggcaccaactgca

SEQ ID NO: 624312 - DNA, 98 bp, Homo sapiens
tcagcatgtgggacctggttctctccatcgccttgtctgtggggtgcactggagtgcctgtgaagaaaacggggtattgccctgaggcttatattctg

SEQ ID NO: 624313 - DNA, 73 bp, Homo sapiens
tttgctgcaaatgaagttgatggaattacactgtgatacgactgactgaaacccagcgtttgctggcagaacc

SEQ ID NO: 624314 - DNA, 83 bp, Homo sapiens
actcggggggcggctctgcgctggccgggggcgcgggcggcggcgccggcaggaaggtgagaagccctaccactgcaactggg

SEQ ID NO: 624315 - DNA, 89 bp, Homo sapiens
acggctctgtaggaaggaacttggttccccctccctcagcttccgccccaaaaggtgattttacaacgagatgctgctctccataggga

SEQ ID NO: 624316 - DNA, 82 bp, Homo sapiens
aagaagctaatcttgtacttcaagaggaggaatcacgctcggaaacaatggattctgaaagtcaagaagacatcatccggaa

SEQ ID NO: 624317 - DNA, 138 bp, Homo sapiens
ctcgtgggagccaagatggcggcggcggcggcagcgacagcagcagcagcagccagtattcgggaaaggcagacagatgaggagcgggaaggcctcctgcaccctggagaccgtgtgggaagacaagcacaagtatga

SEQ ID NO: 624318 - DNA, 100 bp, Homo sapiens
gttgctcgatgtgcctcctggtgaagacaaggggggatatgtgatcaaagcatcagaagttgtatcacggactgattcaccgagcccaaccgtactcaac

SEQ ID NO: 624319 - DNA, 101 bp, Homo sapiens
ggcaccaatgtcgtgcagaaaatatgtttctccacccagatcatccgccattttgagtcaaagctttctgaatgacaacggcaacacgacaagaagtcctt

SEQ ID NO: 624320 - DNA, 82 bp, Homo sapiens
aaacagcccgcccgaccccgtcccgaccctggccgccccgagcggagcctggagtttcactgttacatgccttgaagtgatg

SEQ ID NO: 624321 - DNA, 130 bp, Homo sapiens
ctcgcccaagccgcgtccccagagagcgccctgagagaacagggtggccgcttggtccagcatacatctgtggatggatatactgaaccacacatccagcctaccaagtcgagtagcagacagaacatcc

SEQ ID NO: 624322 - DNA, 101 bp, Homo sapiens
gggatcatccagaagcatctgaagaccatggatcacaaccggaaccgcagggctgaaggtgatgtggccgccctcaaccgacgcatccagctcgttgagga

SEQ ID NO: 624323 - DNA, 99 bp, Homo sapiens
ctcgcggaccggcgtccccggcgcgaagaggctggactcggattcgttgcctgaggccaccagcccctcgggttccaagatgcagctactggagacaga

SEQ ID NO: 624324 - DNA, 90 bp, Homo sapiens
gccgacctcatcatccacctcaactactgtgctgggtcccagacaaagatctgaattccagagaacaggagacctgccagcctgtgcacg

SEQ ID NO: 624325 - DNA, 100 bp, Homo sapiens
atttagccggagtgagaagcaagaaggccctggacacagcaatatctctgggctttcacagaatcggtcgaggtggacggtttggccgtaaaggtgtggc

SEQ ID NO: 624326 - DNA, 97 bp, Homo sapiens
tattatcaacacgttcttaaaaacctcgggcggcatgacggatccagagaaactcatcaggatttatcctgatttttacataccgttgctcaaaaga

SEQ ID NO: 624327 - DNA, 75 bp, Homo sapiens
acctccctgatggttgggctgatccggcagggctacgcctgcgaggtatttgggaaagcagttcaagctctatca

SEQ ID NO: 624328 - DNA, 74 bp, Homo sapiens
taaagaggagtttgccaatgaatttctgatctcacattcttgaaggtggcattgaagagcactaagatcggaag

SEQ ID NO: 624329 - DNA, 99 bp, Homo sapiens
catctccccgcgtccggcttggatatcttcggggacctgaagaagatgaacaagcgccagtgagaaagatcagtctaaagaaaaggagaagaaagtgaa

SEQ ID NO: 624330 - DNA, 88 bp, Homo sapiens
tttgctggaggttgactgtgctgtctgagaatctggacgaggctagagaacagaaagaaaagagtcctccagaccagcctgcggtccc

SEQ ID NO: 624331 - DNA, 82 bp, Homo sapiens
ccgaattaaaatttatacttcgcaaaactcagcaattttttgatgaggggtttgtgaccatgactctggaaagcctagagga

SEQ ID NO: 624332 - DNA, 75 bp, Homo sapiens
ctcctccatcctttaagccagctaagaagtattctgatgtttcaggtctgcttgggccgttgacatttagggatg

SEQ ID NO: 624333 - DNA, 75 bp, Homo sapiens
tcctgctgacttacgcttgtttgagaggctaagaatattgtacacaaagattcttgatgttcttgaggaaatccc

SEQ ID NO: 624334 - DNA, 100 bp, Homo sapiens
ggcggctgctgctctgggctgggaccgccttccaggtgacccagggaacgggaccggagcttcatgcctgcaaagaggctacccacctttctgttctgag

SEQ ID NO: 624335 - DNA, 100 bp, Homo sapiens
cgtcgatctcaagccgactctcaccatcatcaagacggaaaaagtcgatctggagcttttcccctccccgggtgatttgatgaaggctgctgcaggagag

SEQ ID NO: 624336 - DNA, 99 bp, Homo sapiens
tggagtgaacttcaagcatacatcaaggaacaccacaccacgggcctcacatggagcaaaacaccaagacaatgcaaactccagtgaacattcccgtgc

SEQ ID NO: 624337 - DNA, 129 bp, Homo sapiens
ggagctgaagaaaaatctggagtacacagcttctctgctggaagccgtctacatagatgagacacgaattatatccagatcgagagacagaagattctgaaagggttcaatgaaatgagagtcatcttg

SEQ ID NO: 624338 - DNA, 76 bp, Homo sapiens
cctcgggcgccccgcagccccccaacatcctgctcctgctcatggacgacggactttgaacatgtcggggatcgcc

SEQ ID NO: 624339 - DNA, 82 bp, Homo sapiens
gcctcccaagtagctgggactgcagatacagatccacgggttttagaaaaacaagaattacagcagccaacctatgttgccc

SEQ ID NO: 624340 - DNA, 95 bp, Homo sapiens
tgctgtacttcgtctatgtggcgcccggcatagtgatcagggccaaagcggtcagtgagaaggaagtggactctggaaacgacatttatggcaac

SEQ ID NO: 624341 - DNA, 82 bp, Homo sapiens
gggagtgttccaggattcgccttgtttggtgccctggttgtcagatgttggaaagcagtaggacggaacatactcttcgtgg

SEQ ID NO: 624342 - DNA, 83 bp, Homo sapiens
tggagcgagcgggtggaaaccaggcggccagccagctggagggctgtctgtccccagaccccagagcacgtccggcaccacca

SEQ ID NO: 624343 - DNA, 100 bp, Homo sapiens
tttcagtggaatgggcagaaggaggtgccacaaagggcaaagagaatttcgctaaggagtttgtgatcagtgatcggaaggagctggaggaagatttcat

SEQ ID NO: 624344 - DNA, 75 bp, Homo sapiens
aggcaagaaaaggaaaaagcccgtgaggatgcagcccgggaaagagctagattgcaagactggaggaagataaag

SEQ ID NO: 624345 - DNA, 90 bp, Homo sapiens
agtcggtgtctgctgcgttcacggcaggattcggttaggtttggtgcacctcgatttggaggaagtagggcagggcccttatctggaaag

SEQ ID NO: 624346 - DNA, 98 bp, Homo sapiens
ccttaccagtggataatagtctactgtccaattctgtttactctgaattaccatcagctgaagggaaaatgaagcacttttcaggattagaagaggct

SEQ ID NO: 624347 - DNA, 100 bp, Homo sapiens
aagaagggccttactccttcacagatcgtgggagctggtgaggtggccaacttcgctgcgtatgcgtttgcaccagccactctagtgactccactaggag

SEQ ID NO: 624348 - DNA, 82 bp, Homo sapiens
tctcattaaaacgagtcttcactacccagaatcatttaatcatccatttcatcaaaaaagggctctaattcggccacttcca

SEQ ID NO: 624349 - DNA, 83 bp, Homo sapiens
gagcggccgaagcagctttgcggcctccaggcccaaggtcagcatcccactgtcagccatcattgaggtccgcaccaccatgc

SEQ ID NO: 624350 - DNA, 75 bp, Homo sapiens
gtggttgagaaagatcatttcatggatgatttcttccatcaggacacagattatccttatttgggtaccaccatg

SEQ ID NO: 624351 - DNA, 83 bp, Homo sapiens
taaaagagaggccaaagagccagagcaacagtggtcatctccatcagaggcaactgaaagtttcttatcaaaagaaatttggt

SEQ ID NO: 624352 - DNA, 138 bp, Homo sapiens
tgcaagtggttgaagaaacattgtccgaatcagtatcagatctacagtgagtcattcaaacagcatgacataactgaaacagaagcctatcagttgctgaagaaggccacccttcaggataatacaaatcaaactgaa

SEQ ID NO: 624353 - DNA, 85 bp, Homo sapiens
gggcggcggcgccggcaggaaggtgaaaggtgtagcagtcactcggcctacacccacagcatcgaccttgtgaacccagcgacct

SEQ ID NO: 624354 - DNA, 98 bp, Homo sapiens
agacaagtgtcctaggagagtgaacagaccccatatcatgtgaacctcctcctggctggctatgatgagcatgaagggccagcgctgtattacatgga

SEQ ID NO: 624355 - DNA, 100 bp, Homo sapiens
gggaacccgcggtggagcgggacacgaacgtggaacaagatcactcaaggtgaaggataatctactaataccagcactttgaatgaaaatttgtttctct

SEQ ID NO: 624356 - DNA, 87 bp, Homo sapiens
aacaaccagaagaagtatttgatgtcttagagaaacttggagaaggagatgcccgagtggtaaaagacatggcaacaggaaagtcta

SEQ ID NO: 624357 - DNA, 50 bp, Homo sapiens
cgccccgctccacccgtgagggctttgataaaattcaagagttatttgta

SEQ ID NO: 624358 - DNA, 140 bp, Homo sapiens
ccgtcgcctggtgcctcccgcctccgtgtgccctggttgtgagaagacgtctgtgtcgtgcgaacttggagcgtgatgcccagaagtgtgtgaactggtctgtgaccacaaagatgagaaccgcatgctgagattggtgg

SEQ ID NO: 624359 - DNA, 96 bp, Homo sapiens
ctcttgagtagcctgagtagctgggactaaaggcattgtttccaagtcgtacgagtgccgtctaaagggacaaggagccaccttcgtggagacaga

SEQ ID NO: 624360 - DNA, 91 bp, Homo sapiens
gaatattttgcctgctggaacctgctgtatctactcaagagtggaagttttcacaggttacttgaatttccactagaggagcagaaatgcc

SEQ ID NO: 624361 - DNA, 50 bp, Homo sapiens
tgttcctgtggaccccagtccagattttaccaaatgttgcaagaactctg

SEQ ID NO: 624362 - DNA, 75 bp, Homo sapiens
agcttcgaaagtgtgtggatcacccatatttgtttgatggggcaggagctgatgggtgcattaactgcacagagg

SEQ ID NO: 624363 - DNA, 99 bp, Homo sapiens
agaatctgggactttcttcgttgccatgaggaaagaattctccgagggagagaagacatattgactctgactggacaccctgattcctccaaatatata

SEQ ID NO: 624364 - DNA, 82 bp, Homo sapiens
atcgactgaatgagatcaaaggtcacctggaaattgccttattggaaaaacatttcttacatgcgacctaaagtcatgtggc

SEQ ID NO: 624365 - DNA, 74 bp, Homo sapiens
atgactctcgtgaacatagctttaatagggaatccaaccacccaggtcaaacaggaggttttgtgcgagtaccc

SEQ ID NO: 624366 - DNA, 100 bp, Homo sapiens
ggtgccgggggtcgctggctctgctgctgccgccggcgaaggaggaggcgttgccggaaaatatttacaccagcagctccagttcataccaataaagaag

SEQ ID NO: 624367 - DNA, 50 bp, Homo sapiens
gggatgattacagttcttcctaaaaaagatgtgccgtttgggggtgctaa

SEQ ID NO: 624368 - DNA, 50 bp, Homo sapiens
caaagtactcaagatgaatttgagcttcgcaaacctgggtatacttcatg

SEQ ID NO: 624369 - DNA, 75 bp, Homo sapiens
gtggagtttgatgactctcaggacaaagcagagaacttccctcagtgtgtgctagaaatctctgaccaagaagtg

SEQ ID NO: 624370 - DNA, 99 bp, Homo sapiens
ctgaactggatgctaaacttgagaatgtgagcatttgatccgccatatgttggtgttagatcccaataagcgcctctccatggagcagatctgcaagca

SEQ ID NO: 624371 - DNA, 75 bp, Homo sapiens
cccgcgtttcagccctagggaagcggagctggagtttgttcagatcatcatcatcgtggtggtgatgatggtgat

SEQ ID NO: 624372 - DNA, 97 bp, Homo sapiens
cctggctatctatccaccatgtgggaggaggaaaatcatcttatcagacgaaggcaaaatgtatggttatgggtgctacatgtgtgctttcagagca

SEQ ID NO: 624373 - DNA, 82 bp, Homo sapiens
cagcgttctgcgtcatgggggagtgctgatcaactaaaagagcttaaagcttttcaagccaggccaagaagctgtgaagtac

SEQ ID NO: 624374 - DNA, 90 bp, Homo sapiens
tggctgtctcctctctccgccatgttttgacagtgtttcctgccttgctgactcttcttccctctcggacatcacctttgatggcaatcc

SEQ ID NO: 624375 - DNA, 91 bp, Homo sapiens
ggaaagaaaccatgtgctgaaatgtttgacgacactgatggtttggatccgagccagagacaacaacggctcctacgccctgtgcctgctg

SEQ ID NO: 624376 - DNA, 100 bp, Homo sapiens
tgttcgtctgagaaaactgaagtttgccataaaagttgatggagattacctttggtgtcctgaatgacagctcatctacacagagtgaaactccagatat

SEQ ID NO: 624377 - DNA, 99 bp, Homo sapiens
ttccagaagacgaaatacgcgaggtgtgatgaatgcagactctgctaccattttggctgtttggatcctcctttgaaaaagtctcctaaacagacaggc

SEQ ID NO: 624378 - DNA, 75 bp, Homo sapiens
ctgaaggctgtcaagtatgtggagtgttctgcacttacacaggtgaagcaaaaaatttattgccatatcttggac

SEQ ID NO: 624379 - DNA, 75 bp, Homo sapiens
cgggaccggccgaaaggcgaggaaccgccatcccaggcctcaggacctgagttctccgacgcccacatgacatgg

SEQ ID NO: 624380 - DNA, 75 bp, Homo sapiens
ccgcagtccgagctttgccctcgcatcctgttccaacgcggtacagagtgaagacagtgtcctcctgtttgttat

SEQ ID NO: 624381 - DNA, 96 bp, Homo sapiens
gctcagggtatccaagtatttgatcctggggagtctgattcagatgacaactgtacagatgtcactggttgtttgctagatcccaatggagaaaag

SEQ ID NO: 624382 - DNA, 100 bp, Homo sapiens
caggcccttggagctggggagatcccggcaccttctgagacacatggcagttgaattcctgcatgaactgaatgttccatttttcaaagttggatctgga

SEQ ID NO: 624383 - DNA, 50 bp, Homo sapiens
cgaaactttcaccgcgagcggattaatactgaggaacacgtggatgcagc

SEQ ID NO: 624384 - DNA, 75 bp, Homo sapiens
tggaaaggttgaagttcaagagctcagaccctaaatggtaggaatgggatcctggtgcttccacatgactctgaa

SEQ ID NO: 624385 - DNA, 112 bp, Homo sapiens
gtggtcacatctgggttgaaggtgatcatcatggacacagttttgacagtaattcttttgggccgatgggcttaggtcacgagcaaggatttggagccccttgtttaaaatg

SEQ ID NO: 624386 - DNA, 50 bp, Homo sapiens
agaacaacttaagagcttcttcaaagataatttgcggtaaaagcctttca

SEQ ID NO: 624387 - DNA, 83 bp, Homo sapiens
ctcctgactagctggaattacaggattaacacagattcctcagatccagaagactgaaatttcctttcgtcctaatgatccca

SEQ ID NO: 624388 - DNA, 90 bp, Homo sapiens
gccgtcttctttgcctgcactaatgcaagcttagtagtggaggagcgaacaagacagatgaaaatgaaagtgcatcgatttaagcagaca

SEQ ID NO: 624389 - DNA, 124 bp, Homo sapiens
ggagagatgtgtcagaacttcttaaacctcttggtctctacgatcttcgggcaaaaaccattgtcaagttctcagaagaaagcccccaggctctcccggctgtcccgccagatggtgccccagc

SEQ ID NO: 624390 - DNA, 51 bp, Homo sapiens
gccttactccttcacagatcggctgctttgactctcccgcgaagacctttc

SEQ ID NO: 624391 - DNA, 51 bp, Homo sapiens
ctttgacaccgtcctgtgggccatagcacgtatctcccatgcgccaagtgg

SEQ ID NO: 624392 - DNA, 90 bp, Homo sapiens
agctagtggaagttactgccgcgccaccgagtccggaccggagactttggggcctaactaggcaagagggcacattgggagattcagctt

SEQ ID NO: 624393 - DNA, 83 bp, Homo sapiens
ctgagggaaaagcgaggcaaggcaggcggggactttgaacatgtcggggatcgccctcagcagactcgcccaggagaggaaag

SEQ ID NO: 624394 - DNA, 87 bp, Homo sapiens
ttgtagccatcaacccgagtgcagtttcgatggaaaatgaagaaatgggacgtcggtcatcagatactgaagaagaaagcagaagca

SEQ ID NO: 624395 - DNA, 75 bp, Homo sapiens
gaaatgtctcggattttgataatgaagaaggacccgaagattagtacaagtctgcctgttctggacctcatcgat

SEQ ID NO: 624396 - DNA, 101 bp, Homo sapiens
ctacaacatggtgacctcctggagaacagggacgtgtggtgtttctctttgtatttgtcttttgttcccagaacaggggcctggtatttccccagagcctc

SEQ ID NO: 624397 - DNA, 100 bp, Homo sapiens
caacaggaaaatcatattatagatggagtaaaggtacatcaggaacgtctctatcaagaatacaatttcagcaaggctgagggccatctgaaacagatgg

SEQ ID NO: 624398 - DNA, 98 bp, Homo sapiens
ccgtgacttcccggacgctgggaaatggtagttttccacggaatgctgtttgcttttatttatctggctttgcagaagcgtcaaatactttctgaagg

SEQ ID NO: 624399 - DNA, 83 bp, Homo sapiens
cactcgacagccaccgccgcccccaacgtccatgcctgagccagaagcggactcctagaagaggggagcagcaaggatggaat

SEQ ID NO: 624400 - DNA, 96 bp, Homo sapiens
cagccgcgcctcggccccatggacgccctgtgcggttccggggagctcggctccaagttctgggggttgtgtccactgtggtccccgactctgccc

SEQ ID NO: 624401 - DNA, 98 bp, Homo sapiens
cttcaacttgtagacacagccgggcaaacaagccatgccaatcccactaccactcttcttcctacgaacaagccaggccaatcctactaccgctcttt

SEQ ID NO: 624402 - DNA, 100 bp, Homo sapiens
caaagcagctaccaaatgcttattttctgcttccaaaggtccagagcattcagctgtctcaaatgcagtgttctaagaacggaagcatctgggctggatg

SEQ ID NO: 624403 - DNA, 75 bp, Homo sapiens
ggcatggactcgggccgggacttcctgaccctgcacgggggtggcttccaccactgctccagcgaccgtggcggg

SEQ ID NO: 624404 - DNA, 98 bp, Homo sapiens
tccagggcagctagggcctgggccgcggttcggccgcgccggccggtaccttaacatggggaatcttcttaaagttttgacatgcacagaccttgagc

SEQ ID NO: 624405 - DNA, 75 bp, Homo sapiens
aaatttggctttcattcatgaatgagaccatttaatttggcagagcggaaagctagcgcccattcaatagtagaa

SEQ ID NO: 624406 - DNA, 101 bp, Homo sapiens
agctgtcattcttctctacagaagagcttctcctcatcaactggggatgattacagttcttcctaaaaaaggtgacaacatccgggaattcttgctgagcc

SEQ ID NO: 624407 - DNA, 82 bp, Homo sapiens
gtgatagaaccccagtttcaacgagacttcatttcattgctccctaaagaggagacagtgtttcacaaaatgattttccttc

SEQ ID NO: 624408 - DNA, 82 bp, Homo sapiens
acctcccaaaaaacagaatggagcaattggaagaaagacaagcccacagggtatggctccagcagtcggagggcgcctcaga

SEQ ID NO: 624409 - DNA, 48 bp, Homo sapiens
agcggagctgacacagccaaaatggatcttctaaccaaagacggagat

SEQ ID NO: 624410 - DNA, 100 bp, Homo sapiens
tgtaaagaacttgcagttgaaggagtataacacagcgctgcaaactcctgcccctccagcccccggggagcggggtcttcagggtacaaggtgggccgag

SEQ ID NO: 624411 - DNA, 75 bp, Homo sapiens
ccgggtggttaaacttcgcaaaatgtttcataaacagaccttgagttccatcatgatgcctcatccagcaagtgc

SEQ ID NO: 624412 - DNA, 82 bp, Homo sapiens
ggtggactccttcggcagtccacccaccgccgccgcctcccaggtcagtcatatcatttggatcaaaaaatagaacaatcgg

SEQ ID NO: 624413 - DNA, 100 bp, Homo sapiens
ttgtagattttgctgggtccagcaaactccgcttccgattgggctaccacgccattccgagtatgagtgtgatccgccttattatgcagtacttgaagga

SEQ ID NO: 624414 - DNA, 75 bp, Homo sapiens
ccgcaccttcagtcttttccagcagctcattcagaggtttcagagcagcgatggagaaattaaatacttgcaatt

SEQ ID NO: 624415 - DNA, 50 bp, Homo sapiens
ctaccaggaggccaggggtgtcgccatgctgctgcacaggttctggaacc

SEQ ID NO: 624416 - DNA, 90 bp, Homo sapiens
cattggtacatcatgctcagatattgcggaggcctctgcctgtgagtttctggatattgtagagctgctgctccagtctggtgctgaccc

SEQ ID NO: 624417 - DNA, 75 bp, Homo sapiens
gacgggtctggagtgcgtgggggaccggctgttggcgggggacggcaaaacagaacagaaaggcggagataaaaa

SEQ ID NO: 624418 - DNA, 100 bp, Homo sapiens
aagtgcccgtgaaagcctttgtgattctcctcatcagaatctctcaagatgtatttgaatgaagcagggttcaactttgtgagaaaatgcattcaagctg

SEQ ID NO: 624419 - DNA, 100 bp, Homo sapiens
gtggaagcaggactgcgccgcgtcttcctcaagccattgagacccagagcagcagttctgaagagatagtgcccagccctccctcgccaccccctctacc

SEQ ID NO: 624420 - DNA, 74 bp, Homo sapiens
atattgctaattcaattcgaacacatggcacgggaattatgaatacaactgatgagctttctgatgttagccaa

SEQ ID NO: 624421 - DNA, 100 bp, Homo sapiens
gctgccccctaccaccccttcacttccagtgtgaaaaaagccagtattaaaatactgaaaaattttgatgaagcgataattgtggatgcggcaagtctgg

SEQ ID NO: 624422 - DNA, 89 bp, Homo sapiens
gatgaggatgacgaagatgatgaggatgacgatgacgatgaggaagatgctcctatgacttctagaagtacatctacttggagaatacc

SEQ ID NO: 624423 - DNA, 99 bp, Homo sapiens
cacggcttttatggacgagttcttttctgagactgctggcataggagcatctgctcacttggttaacttcaaaggaacagatacagtagcaggacttgc

SEQ ID NO: 624424 - DNA, 100 bp, Homo sapiens
cccaaggtggaatccagtgttgtaaggatagaacctaagaatccaccaccacccatcaattttcagagaatttctctgctcctcctgatgtcactacaac

SEQ ID NO: 624425 - DNA, 75 bp, Homo sapiens
tgttaggcgtggagagggagtgatgtcttccagactcggtgctgtacccgccccataaggatgagtttaccatta

SEQ ID NO: 624426 - DNA, 85 bp, Homo sapiens
gatcccatcacgggagtcggggtggtggcttctcggaaccgagccccgacaggctatgacgtagcacctgaatggacagaagagg

SEQ ID NO: 624427 - DNA, 82 bp, Homo sapiens
cgcagccttgggcctcgcgccggctatggccgtgccctggggctgagccctcagagacctgtcggccatggagcctaatgat

SEQ ID NO: 624428 - DNA, 75 bp, Homo sapiens
atgaaggcgtggatagcctgaaggcagccattcagatggaggagatgtataagaaagctcatgctgctatacgag

SEQ ID NO: 624429 - DNA, 49 bp, Homo sapiens
gcagcaccaaggaccagcaattcaaagccctatgagtttgtctctctgg

SEQ ID NO: 624430 - DNA, 75 bp, Homo sapiens
gagatgctgggcgtggcggccgggatgacccacagggaatgcagagagcaaccaatgtcacctaccaagcccatc

SEQ ID NO: 624431 - DNA, 75 bp, Homo sapiens
cggcaaaaatttaatactcttgacaaaagtatgagtggatatctctcaggagcagtgaggagaatgaataccttc

SEQ ID NO: 624432 - DNA, 100 bp, Homo sapiens
ctagaacttcactgggattttcaaagctggggagctgaccagtgctttggtgcatctaaaactgcatctttttattcagatctttactcttgcattcttc

SEQ ID NO: 624433 - DNA, 95 bp, Homo sapiens
tctctttgacagtggtctccacccagctgttaaaattgtgccttgccagtacatgctgcagacaatgaaggatgagcaagttttctacattcaat

SEQ ID NO: 624434 - DNA, 98 bp, Homo sapiens
caagtatgtggaaatagcgcggctgtgcaagtacctgccagagaacgacctgaagtttaaggaagaaatctctaaacgttttaaatcacatactgacc

SEQ ID NO: 624435 - DNA, 75 bp, Homo sapiens
gcactccagtcataggaaagaaaacaaatagaggaagaagatctaatcatattactatactggcaattgctggag

SEQ ID NO: 624436 - DNA, 100 bp, Homo sapiens
ggaccgagccgatcgccgcggggcagttcgggccggctgtcctggcgcggcagaatccagagaccacatttgaagtatatgttgaagtggcctatcccag

SEQ ID NO: 624437 - DNA, 82 bp, Homo sapiens
acaagcccgggcttcagaggatttgtttgtgaatagcacaatggaagaagctggactttgtgggttaagagagaaagcagat

SEQ ID NO: 624438 - DNA, 74 bp, Homo sapiens
tcagaaggagcaggattaccaaaggaccttcactgcctggtgtaactcccacctaaggaaagccggcacccaga

SEQ ID NO: 624439 - DNA, 137 bp, Homo sapiens
aaagacctgctttgccctgggaaatagtaaccctgccaaatacatcagcttgtaggagacagagaatgttgtaccatctttgggtaggcagacttccctgacgacatcagtgatacccaaagctgagcagagcgtgg

SEQ ID NO: 624440 - DNA, 82 bp, Homo sapiens
ggcggaggcagaggtggaggcgctttgaaagcaatcatcctcttccagtggtagcgtgtttgggtctggaaacactggaaga

SEQ ID NO: 624441 - DNA, 100 bp, Homo sapiens
gaggctctcaaagatgcccaggagaagctggagctggcagagaaaaaggccaccgatgttgatgataattagaagcatgctttccactgaacttcccgac

SEQ ID NO: 624442 - DNA, 100 bp, Homo sapiens
gctctttgtagcgtggtgcttctgttgctcacaggtgacagagctgaatgaacctctctccaatgaagatcgaaatctcctctctgtggcctacaagaat

SEQ ID NO: 624443 - DNA, 75 bp, Homo sapiens
ctgctgtttaccttggcgaggcctttcaccaagtccatgcacaacattctgaaattttttggttattgtaatgat

SEQ ID NO: 624444 - DNA, 82 bp, Homo sapiens
cccagtgccgcgcagctgctggagcaaaagactgttgaagtagagagcattttgcccagctcactcggattctttgctggca

SEQ ID NO: 624445 - DNA, 75 bp, Homo sapiens
ctgccggaggaactttcttaatagaacatcactgttaaccctagaggctcttacagcactactttcagatgatag

SEQ ID NO: 624446 - DNA, 51 bp, Homo sapiens
tgaccttcggtatattgaaatgcaggctgagaaagtgttcatggtggctcg

SEQ ID NO: 624447 - DNA, 90 bp, Homo sapiens
cccggagccgccggccgctagcgtcagcgccagccaggtgctggagaatctggtaaaagcaccattgtgaagcagatgaggatcctgcat

SEQ ID NO: 624448 - DNA, 100 bp, Homo sapiens
gaaaaacgcttttcacgtcacctggagagatgcacaggtcatacttacctggttgcttgcgcatctagtaatgttggatcatattctggatgttttgaat

SEQ ID NO: 624449 - DNA, 100 bp, Homo sapiens
agggagtgcctggccaggccggcctgtctgccgcgatggatgacagtaaggctttagaatccaaattagcagcttgcaggaattttgcaaaggaccaagc

SEQ ID NO: 624450 - DNA, 98 bp, Homo sapiens
aggaggattttgtaatggaagggcatggcaagactccacctcctggtgaagaaagcaaacactattgacctgttgtattggcgggacatcaagcagac

SEQ ID NO: 624451 - DNA, 74 bp, Homo sapiens
cgtctcctgtgtggcgatggtcttcctgctggggctcatgtttgagctcaccatggatgatgatatcgccgcgc

SEQ ID NO: 624452 - DNA, 98 bp, Homo sapiens
ggcttcacttccctcggtctgggcttctctgaggcggcgagagatggtcaggtctggagctcgaccgggccagggcggcaccttcctacttctgccca

SEQ ID NO: 624453 - DNA, 83 bp, Homo sapiens
aagaacttctacgggggcaatggcatcgtgggagcgcagggaagatcagttttcctgccatccaggctgctccctccttcagc

SEQ ID NO: 624454 - DNA, 100 bp, Homo sapiens
ctcggtgcgcggcggagagaagaggattccggcgggaactcgactcttggcgccaccgcctcatgcactgtgttatttggaaatagcggtgcttgcagcg

SEQ ID NO: 624455 - DNA, 100 bp, Homo sapiens
tagaatgaatgtggcaggagacttatttcagaatggagaatttgcaactcatcatagtcctggttggagtgcagtggtgctgtgtctggagtttgttcct

SEQ ID NO: 624456 - DNA, 75 bp, Homo sapiens
gtatatcaatgtggattgtgcaaaattaaaacgactcctgaagggtttgtgctttctggaaatctgcatggtggc

SEQ ID NO: 624457 - DNA, 90 bp, Homo sapiens
cctcggtacaccgtcccgcggggtactaggttttgacaagcttgcatcatgcgtgagtataagctagtcgttcttggctcaggaggcgtt

SEQ ID NO: 624458 - DNA, 101 bp, Homo sapiens
aagccccagctgcactacgcgcggagctcccacctccatatacagccattgccagtccagacgccagtggtattccagtaataaactgccgtgtgtgccaa

SEQ ID NO: 624459 - DNA, 90 bp, Homo sapiens
gacttgtttcttatatgtgatgccattccagcactggactcatggaggctgagcatttattcaggccctcgggaccaaggatcacgtcat

SEQ ID NO: 624460 - DNA, 83 bp, Homo sapiens
aagagatcgaggttgaggaggaactctgcaagcaggccgtcgctttcgggttctctcatcgcttcgtcgttcgccaatgtttg

SEQ ID NO: 624461 - DNA, 87 bp, Homo sapiens
cagctcagatgtgctgcagcaaatgctcgccgggccaacgtgcagcggctgaaggagtaccgctccaaactcatcctcttccccagg

SEQ ID NO: 624462 - DNA, 100 bp, Homo sapiens
ggaggggaggaggaggaggattcagggaataggagctggggagcccttctgcgccacagaagcatcagatggtgaaggagaaggagacacagaagtgatg

SEQ ID NO: 624463 - DNA, 88 bp, Homo sapiens
attttctttcaactatatttgagcatacccagaaatgaatactgcattgagggacggacttctggtcttcttcttcctaattgttccc

SEQ ID NO: 624464 - DNA, 119 bp, Homo sapiens
aaacgggccgcgaaccgcagtatcatgctggccaagaagatcatcattaaggacggaggcacggctctgacgcccgctctgcggcttcggtgtttgaacaggccacagtccaggagcgc

SEQ ID NO: 624465 - DNA, 82 bp, Homo sapiens
gcctggcagcagcccccggggcaagagcaggagcccggcaccccccgccgacaaggaggggactggtgattgcagctggaag

SEQ ID NO: 624466 - DNA, 50 bp, Homo sapiens
aagagaagatcatcgagcatttcaaacgaaggaaggggagttcaccctgc

SEQ ID NO: 624467 - DNA, 95 bp, Homo sapiens
ggaggggaggaggaggaggattcagggaataggagctggggagcccttctgcgccacagatgcctataagaaaatcttagaaaccacaatgactc

SEQ ID NO: 624468 - DNA, 103 bp, Homo sapiens
aatacccctttgaattaattatggctacttaattcagtgcacaaatgagatgaatgtgaacatcccacagttggcagacagtttatttgaaagaactactaat

SEQ ID NO: 624469 - DNA, 83 bp, Homo sapiens
ctaccggcctgagcctcgcgttgcagcaagagagatgaagtaagactttgaccccgacgcaggcttcagtgattgccgcggat

SEQ ID NO: 624470 - DNA, 83 bp, Homo sapiens
gggatctttccggatcaatccagatggcagccagtcagtggtggagaaagctgacttcatgagaccgaggatctcgttcgttg

SEQ ID NO: 624471 - DNA, 75 bp, Homo sapiens
ggagaccttcgagcaccccaacgtggtcaggtttttggattcaaagcataaaaaccattacaagatatacaatct

SEQ ID NO: 624472 - DNA, 75 bp, Homo sapiens
tcggcggccccggcgccggcaaggggacccagtgcgcccgcatcgtcgagccaagaagtatgatgcgtttttggc

SEQ ID NO: 624473 - DNA, 82 bp, Homo sapiens
tcttccaacaccagtggaagatgatcacatcccagggagaccctcacgcagggcttagagttctgtcggcggcagcagaggg

SEQ ID NO: 624474 - DNA, 99 bp, Homo sapiens
acgtggccgctgtcgccgtgggcatgctgggggcgtcctacgctgccgtacccctttatcggctctattgccagtgatcgaactgtgagaatttggaag

SEQ ID NO: 624475 - DNA, 100 bp, Homo sapiens
ccgaccgcacgggcttcaccttcaaatacaggttcaagggcagcaggaaagacgagatcctgggcatcgccaacaaccgactgatccgcatcgacttggc

SEQ ID NO: 624476 - DNA, 100 bp, Homo sapiens
gccagaaagttccgccatgagctggggcacggagctgtgggtaacacaagtggcaagacagccgggaacccctaccccatccccttattcagcacatgaa

SEQ ID NO: 624477 - DNA, 71 bp, Homo sapiens
ccctcatggacatcgcctacatctacccctggcggcgggtagacttcgcttgaaaagatcgagaatggagg

SEQ ID NO: 624478 - DNA, 100 bp, Homo sapiens
ggcggttcctgaggccagggcatgaccctgtgcgggagaggctcaagcgggacctgttccagtttaacaagatgaaacgactacaaagtgccatgacaga

SEQ ID NO: 624479 - DNA, 50 bp, Homo sapiens
gttgccttggtaggcaataaaaaatcctcagagccagaaagaaaacgcca

SEQ ID NO: 624480 - DNA, 75 bp, Homo sapiens
ccaatttgtccgtaaccttgtggagaagaccccggcgctggtgaacggaattgaatgatctggcacgggaccctc

SEQ ID NO: 624481 - DNA, 75 bp, Homo sapiens
tttgcaggggtgcagtgtgtctggtcttatgaggtgtccctggccagtgtccttccacctgtccacaagcatggg

SEQ ID NO: 624482 - DNA, 100 bp, Homo sapiens
gaacgctcctctgcattgccattgttctgagccaaggttcagaaattgcctctcaaggacgggaactggctaatcatttccaaagtgaaggaactccagt

SEQ ID NO: 624483 - DNA, 100 bp, Homo sapiens
aaaaacatgaacttaacacctctgaaattgaggaagaagagagcaatggtggaacaaagcggcaaaagatatcccatcaaaattatatagcctatcaaaa

SEQ ID NO: 624484 - DNA, 98 bp, Homo sapiens
tagacaacaagcagcctattatgcccagacaagtccccagggaatgccacagcatcctccagcacctcagatggctttggaagattcagaacagaagc

SEQ ID NO: 624485 - DNA, 75 bp, Homo sapiens
aagcaggcgaacccgcggcgcaataacggtgaatgaaaactttgccattgatttgatagcagagcagcccgtgag

SEQ ID NO: 624486 - DNA, 80 bp, Homo sapiens
gacatatcgttggacccagaattgaggactcagcccaggagagtgttattactcgagatattcatcgtacatttcccgca

SEQ ID NO: 624487 - DNA, 100 bp, Homo sapiens
gcgaagacgcggagaaaaaagttctcggcacgcacagaggctgggctgcggtccagatgcgtttgctccatgaattggtctacgcctcccgaaggatggg

SEQ ID NO: 624488 - DNA, 98 bp, Homo sapiens
gacaaggtaagaagaagacaagcgggcagaaggctggtgacaagggctcaccagcatttcagcttcaggatggttgtgagtacgtgtttatctggaga

SEQ ID NO: 624489 - DNA, 80 bp, Homo sapiens
tttccgatttaaagctgagctgcgaggaaaatggcggcgggagcggagcgggcactggacacaatgaactttgagatgct

SEQ ID NO: 624490 - DNA, 83 bp, Homo sapiens
ggagtcagtcattttactgtcaagacatttcttcggcattctgcaacagtaatagttatgcacgagtgcgagctgtggtgatg

SEQ ID NO: 624491 - DNA, 50 bp, Homo sapiens
actgtgggctggtgtgtggaactgagctggggtttcaccatgttggccag

SEQ ID NO: 624492 - DNA, 98 bp, Homo sapiens
acatccttcttctggataacactgtacaagctttcaaagtcaatgatgtaaatgaagaccctggagaagatgtggccctcctctctgttagttttgag

SEQ ID NO: 624493 - DNA, 75 bp, Homo sapiens
cacaagtaactgggattatacagatgccactgccgccaggagccctgtaacatcagccatcgtcaaccccaccgt

SEQ ID NO: 624494 - DNA, 82 bp, Homo sapiens
caggctcaggtgcagccgctggttatttggaaatagcggtgcttgcagcgcttgcggacagtcgattcctgcgagtgaactc

SEQ ID NO: 624495 - DNA, 101 bp, Homo sapiens
agctgtgggagaaggcccagcgattgatattcactgatggactccaaagaatcattaactcctggtagagaagaaaaccccagcagtgtgcttgctcagga

SEQ ID NO: 624496 - DNA, 99 bp, Homo sapiens
gaaaaacctcagcgacctgatcgacctgctggttttccaagaattgatataaagcgggaagaacagaaaacagcagtcataagtatgctactcaaaata

SEQ ID NO: 624497 - DNA, 50 bp, Homo sapiens
ctgttcaagctgcactggagaagctgcagcaaaaaattattcctgatcag

SEQ ID NO: 624498 - DNA, 101 bp, Homo sapiens
gtcaaccaagaattctacagatctagttgaatatgttgacaaaaaagaggcacagttagatgaagaaggacagtttcttgtcagaataatatatgatgact

SEQ ID NO: 624499 - DNA, 90 bp, Homo sapiens
ctggtggtgttgtcgtggccggagcggcccgcgcctgggctgccggcacttcgcggcagattcaaccctatgaaaagataaaggccaggg

SEQ ID NO: 624500 - DNA, 90 bp, Homo sapiens
cggagacccggtcgggagggaggaaggtggcaagatggtgttggaaagcactatggtgtggaaaattctgtttgaagatttccggtcctg

SEQ ID NO: 624501 - DNA, 100 bp, Homo sapiens
caggcggacgaggcggaagaccgcgcgcagggcctgcagcgggagctggacggcgagcgcgagcggcgcgagaaagtctccctgagtctttgaggacaca

SEQ ID NO: 624502 - DNA, 83 bp, Homo sapiens
cttcattgctctgtgtgccaccgatgatgaggagtctgatgaggaagctgtgaagaaaaccaacaaatgtgtactagtctggg

SEQ ID NO: 624503 - DNA, 100 bp, Homo sapiens
tactgcgcaccagcccgcctgtacgagctttcgccaaagagcttttcctaggcaaaatcaagaaggaacttaaaaggagtctagaaaatccagcagaaag

SEQ ID NO: 624504 - DNA, 80 bp, Homo sapiens
aagagctgtcagttttctgtggatgaaggcttgaagtagaaaatgccatgatgagaaaaactattaaaaaacaggatgac

SEQ ID NO: 624505 - DNA, 90 bp, Homo sapiens
caaggctgtgcaacgcggagcgtgagaggaaggtgctggagaatctggtaaaagcaccattgtgaagcagatgaggatcctgcatgttaa

SEQ ID NO: 624506 - DNA, 119 bp, Homo sapiens
aaaccaatcaccaaagactacattatgaacccaccactgggcaaagaaagtatccctttgaaggatatggagtaatagtactaaatcccaatgaaaactatattgaagtagaaaagccg

SEQ ID NO: 624507 - DNA, 50 bp, Homo sapiens
ctcagcctggaggcacttttccagtgcacagccagagaacaacacatcac

SEQ ID NO: 624508 - DNA, 102 bp, Homo sapiens
gaccacccagccattgtcaagttccatgcaagttttgtggagcaagataatttctgcattatcacggagtactgtgagggaatgacagaggaagaggaagac

SEQ ID NO: 624509 - DNA, 75 bp, Homo sapiens
gaaaatttcatttacattgctgctacatatacattctctgggttacacgcatggggagatactctggaggaagca

SEQ ID NO: 624510 - DNA, 83 bp, Homo sapiens
cagaaatttatagataacaggatcatttcatctaaggagcctcacagtctactcagagaaaaataaaagaaggcaaaatgagt

SEQ ID NO: 624511 - DNA, 83 bp, Homo sapiens
ccgaatcgctcctgcagcagaggtcgcaatggaagaagagatcgccgcgctggtcattgacaatggctccggcatgtgcaaag

SEQ ID NO: 624512 - DNA, 75 bp, Homo sapiens
ggaggaggggacctgggaagctctggattataagcgccatggctatggctagtgttaaattgcttgccggtgttt

SEQ ID NO: 624513 - DNA, 100 bp, Homo sapiens
tgggattcgcgctgctgggcacccacggagcctccggggctgatgttgacgatgagtatgaggacgaggaccagtgggaggatggagcagaggacattct

SEQ ID NO: 624514 - DNA, 101 bp, Homo sapiens
aggactgtgacctgagctgtcagatcaccattcccaaagagagacaagagagacacctccaacttcgacaaagagttcaccagacagcctgtggaactgac

SEQ ID NO: 624515 - DNA, 75 bp, Homo sapiens
actgggttgtttcaatctaacagtcaaagagaggagttgcttaaaccaatgggactaaaacctgatgggacaata

SEQ ID NO: 624516 - DNA, 83 bp, Homo sapiens
tcgtaagaagaggtcccaatcccccactctttccgccctaatggaggtctccagtttcgtcttctcaagtcttaggattgcag

SEQ ID NO: 624517 - DNA, 100 bp, Homo sapiens
caacaacaccacaataatccacagccaagactgggactcttcaattaatctgacatttcacaaatccaaaattgccgtggatgaactctttacttcactt

SEQ ID NO: 624518 - DNA, 50 bp, Homo sapiens
cagctggtgggatattctcagaaaattcccgacggccatggaggctgaag

SEQ ID NO: 624519 - DNA, 75 bp, Homo sapiens
tccagattgccgagtctgcttacagattcactctgggctcagttgctggagctggtcctatagtacccctcctca

SEQ ID NO: 624520 - DNA, 98 bp, Homo sapiens
gaacgaggggtgaagcggcccaggtgaggagacacctatggctgccgatgaaggctcagcagagaaacaggcaggagaggcccacatggctgcggacg

SEQ ID NO: 624521 - DNA, 90 bp, Homo sapiens
tttccagcagtcagttgaacaagacaacttatttgatgaaacaaacgtacttggatttaaaggtcctaggaaaatgtctgtgatcattcc

SEQ ID NO: 624522 - DNA, 80 bp, Homo sapiens
caaagagaagaggactcttgctatggttcaggttttaaaatcaaagatgggaaaatcggagaaaattgcccttccccatg

SEQ ID NO: 624523 - DNA, 100 bp, Homo sapiens
aaaagtggtgcctacctcttcttacctgatggtaatgccaaggtgacagatcagtcagtgaaagcatttgctgaacactgtcctgagcttcaatatgtag

SEQ ID NO: 624524 - DNA, 100 bp, Homo sapiens
cgacgtgatcagaacagtgctagtgaaagaatgttattctgtcttcacaaatcgaaggaaacactgtgctcctgttctggcaaagctgcgcccaccgcct

SEQ ID NO: 624525 - DNA, 100 bp, Homo sapiens
aaaggactcagcccagggcactgaggacgcacctgataacagcagcctggagctcctagcaggtcggccctcctccacgctgacttccgggtctcactct

SEQ ID NO: 624526 - DNA, 100 bp, Homo sapiens
ttctcccagcccttagggtcctgctcggccaaggtgatgcagaagatggggaagaatatgatgacccttttgctgggcctccagacactatttcattagc

SEQ ID NO: 624527 - DNA, 100 bp, Homo sapiens
tggctgagttccactgcccgaagtgtcggcacaacttccgaccaaatacacgctgatcgatgagcaggacatcccgctggtggagagctactcctttgag

SEQ ID NO: 624528 - DNA, 77 bp, Homo sapiens
aaaaaaagtaaaagaaaactcagctgtgcgagtccttctggaagagcaagatggagtttcgctcctgttgcccaggc

SEQ ID NO: 624529 - DNA, 82 bp, Homo sapiens
ctggcctgggcgctccggtggcggcggaggtgatgatgaacagtctacacagatggctgcaagttgggaagatgataaagtt

SEQ ID NO: 624530 - DNA, 100 bp, Homo sapiens
gcgggatgtggagcgggagggcctggactgggacctcatgcatcataggcgagtattagtggaatggctaagagatccatctcaggagcttgaatttatt

SEQ ID NO: 624531 - DNA, 107 bp, Homo sapiens
gtgtgggagatcgtgggcgagctgggcgacggcgccttcggcaaggtttacaaggtagttgatgtcacttggcgatattcctgcaaacatgaagaggtgattgccag

SEQ ID NO: 624532 - DNA, 82 bp, Homo sapiens
gacaaagtccaggacctgggcagagactccaagacaagctcagccgaggtcaccatccagtttgctgacctctctgaggctg

SEQ ID NO: 624533 - DNA, 98 bp, Homo sapiens
gccgaacgcggactcgccacccggttggtaggaggacagtttgatctggaaatgaatttcattatccaagaaggtgagagtattaactgcatggtgga

SEQ ID NO: 624534 - DNA, 75 bp, Homo sapiens
cgagcggggctctgtggctgctcctggctctgcgcaccgcttccccgggcgctgcctggacaggcctgcctgcgt

SEQ ID NO: 624535 - DNA, 75 bp, Homo sapiens
tgctgagttagctgaggaggtcaatttaaatggttctggcaaactgctcaagcacttttcaggattagaagaggc

SEQ ID NO: 624536 - DNA, 100 bp, Homo sapiens
ccggtaggaagagtcagaggggtgaccagagagcccaacgcctggtgctcaagactttctccgagatattgatgatgctcaaatacttccccgctcaact

SEQ ID NO: 624537 - DNA, 75 bp, Homo sapiens
cagttctacacggaggctgcccggcgcctgggcaacgatggcagcagggtagcggtagtgaagatgaagcagacg

SEQ ID NO: 624538 - DNA, 80 bp, Homo sapiens
caccgacgtcatcatgctgaccaccaatcagatccgtaaggattatatctgtccaagatgcgagtctggttttatcgagg

SEQ ID NO: 624539 - DNA, 100 bp, Homo sapiens
caggatttacttgaaacaaaaggagaccctaatcttcaggtcacgagaagagaatgccttctagatgcaaaatcacctccaaaccagaccacttttcttg

SEQ ID NO: 624540 - DNA, 98 bp, Homo sapiens
ctgccttctccccctgcacttcccatgtctctgagtgcaaagggccaacttaccaacataggcaactccccatcagatgagtctgaggagcgggaaag

SEQ ID NO: 624541 - DNA, 98 bp, Homo sapiens
ttccacctaccaccgccagcgcaggcatagcgatttctgggtcattgtcattcgaagatgtggctgtgggcttcaccagggaggagtggcagtttttg

SEQ ID NO: 624542 - DNA, 82 bp, Homo sapiens
gcatccttaccaaggaatctgcttttcaagtatgccaccaacagtgaagagaggatgccagcccccatcagattgcgggagc

SEQ ID NO: 624543 - DNA, 100 bp, Homo sapiens
ctttatgagaaaacgagaaagccagtctgttgaagaggccctcaaaaagcttggaattcaggtcaaaggtcctaggcctacttacaagcctccagtctca

SEQ ID NO: 624544 - DNA, 97 bp, Homo sapiens
ctgactggagcagcggtaaaggcgaggatggagaccgaagcttctcaataggtttggcatggacaagatctatgaaggccaagtggaggtgactggt

SEQ ID NO: 624545 - DNA, 83 bp, Homo sapiens
gtcatgtggcagtggaaaatgcgctcgggctggaccagcaggaaaactttattctcaagagatttctcattccgcagaaataa

SEQ ID NO: 624546 - DNA, 75 bp, Homo sapiens
cgaagatgggcgacccggatctcctggaagtgttggcggaggaagctccagaaacatgacaaggaggactttcct

SEQ ID NO: 624547 - DNA, 98 bp, Homo sapiens
cggccgcagcatctcggaggaacctgcgaccgcatcaagcagtccgccagcggaaccaagcggcgcgtgttcatcatcgagaccatgggcggctactg

SEQ ID NO: 624548 - DNA, 100 bp, Homo sapiens
ctcttcgcatcggcggcggcttccgtcacctccgctcccccgatcctattcccagtcgtaactcccccactggaaaggattctgaaagaaatgaagtcag

SEQ ID NO: 624549 - DNA, 82 bp, Homo sapiens
atctgggtgcccgtggaccacaggccctcgttgcccagatcacatgattaagtaccggtacatcccgttcacacatgggaag

SEQ ID NO: 624550 - DNA, 96 bp, Homo sapiens
tggagacgcttattctactggaccggctgctgtaccttcaggaacagggtacagacagtgtttgtgtgttcctgttgtggctaactttaagaagcg

SEQ ID NO: 624551 - DNA, 100 bp, Homo sapiens
ggctcagcacatgatcagggatatacagaccttactatcccggatggaggcggatcgtggaccgcatggaccgcgcgggggacggcgacggctgggtgtc

SEQ ID NO: 624552 - DNA, 98 bp, Homo sapiens
ccaagtgggacaactttctggcttttgaaaggctccttcttcagatctggacgttggtggttggctatgtgttgactgtttcattcaagtggaatgca

SEQ ID NO: 624553 - DNA, 100 bp, Homo sapiens
cggcagagcagggcggcggcgactcgcatgccaatgaagatgtggaaagaatgttactaggaaacaagtgtgatatggacgacaaaagagttgtacctaa

SEQ ID NO: 624554 - DNA, 88 bp, Homo sapiens
actattcagatcatccaagtggaggttcctacagagattcatatgagagttatggggttctccaggacaaggacctcttctctgtctt

SEQ ID NO: 624555 - DNA, 97 bp, Homo sapiens
tcatctcaaaaacaaaattctgaactcaggacttggcaaagttacactgttagaccttatgatagccaagataacgagtgatgagccactcaccaag

SEQ ID NO: 624556 - DNA, 99 bp, Homo sapiens
ctgtcatgggggacctgggatggattgcttttccaaaaaatggggtcacggtctagatcacattctcgatccagaggaaggcgatactctcgctcacgc

SEQ ID NO: 624557 - DNA, 98 bp, Homo sapiens
ccaacacgcgccagctgcggaagcacatctgcattatcgtgctgaatttgggtgaggaggaaggagaagcagagagcttggagataattctggtggct

SEQ ID NO: 624558 - DNA, 71 bp, Homo sapiens
tgcgtatccgcactgtccagcccaagcctgactatgggcaacgggcatgaggaggtagttgcatgcgcctg

SEQ ID NO: 624559 - DNA, 75 bp, Homo sapiens
agagaggcaccgctggaacactaatgagaccaagcggagcagccagctggcagtagcgccctgtaggacccccag

SEQ ID NO: 624560 - DNA, 100 bp, Homo sapiens
ctttgaattcagccagtggtcacagctggatgtttgcgacatcccagagagcttccagattccttgagaatatgtatatcgggaaggaatgtaaacgtgc

SEQ ID NO: 624561 - DNA, 116 bp, Homo sapiens
cccaactttgaggccaataccaccgtcggccgcatccgtttccacgactttctgggagactctgtggacgaatgtggaacctcgctctgtggctgtgttcccttggcactccttag

SEQ ID NO: 624562 - DNA, 101 bp, Homo sapiens
ccaggtctccgtgcagcccaacttccagcaggacaaggcctcaggcccaggcccaaggccaagtgagagagcccaggccacaggacatgctgccattctgc

SEQ ID NO: 624563 - DNA, 73 bp, Homo sapiens
ccggaaggggtcccgaagccccctgcaggaactctacaacccaatccaggacactcatgaggaccatgatact

SEQ ID NO: 624564 - DNA, 80 bp, Homo sapiens
ggacatgaagaggaggatccacctggagctgaggaaccggaccccggcagctgtactccaaagattcaggtttactcacg

SEQ ID NO: 624565 - DNA, 75 bp, Homo sapiens
ctgggtgactatgtggacagaggctatttcagtatagaggaagctgaatatggtgggcatgatcagatagatttg

SEQ ID NO: 624566 - DNA, 82 bp, Homo sapiens
cgctggagctgggtcagtccgccgctcaccccgcggccgcaccttcccgccttctcagggtttggaaatcccttgtctccag

SEQ ID NO: 624567 - DNA, 75 bp, Homo sapiens
cccaaagcagcgtcccgtgctaaagggatgacttgtcaagctcgaacatcatatactgaagatgaagttctttgg

SEQ ID NO: 624568 - DNA, 74 bp, Homo sapiens
gttgattgaaattatctctggtgctgcagctctgctcagcaacagcctcaccaaggactccatgaatatcaaag

SEQ ID NO: 624569 - DNA, 100 bp, Homo sapiens
ccgctgtgtgcaaagttcctattgatggtccccccataaattacctctggactacaaatttacaagattctcttcaagcaattcaaaaacagctggctac

SEQ ID NO: 624570 - DNA, 100 bp, Homo sapiens
ctcaagatgatcctaaccaatccagagggaaggaaggagagtgaagagacaattattcaaactgatgaagatgggctgatggagttatgagaacaatgaa

SEQ ID NO: 624571 - DNA, 83 bp, Homo sapiens
cgggacgcggagcccggagctggggcgacgaggcgattgcgggggcctgggctagggagtctccggtggactgcagcgttagc

SEQ ID NO: 624572 - DNA, 74 bp, Homo sapiens
tgccatccagctggtagccaggaagcgatcaccagaatataccaattgtcggtatctatgcaaactttgcttaa

SEQ ID NO: 624573 - DNA, 75 bp, Homo sapiens
gtgtactctggcgtgcaacctggaattggaacggaggtcctccagcagcctgacctgagtgggttagtgatccag

SEQ ID NO: 624574 - DNA, 100 bp, Homo sapiens
agttctgatccagcagatgaagagggaggcctgagaggctgctgttctaactcgctcccaggttcctttgcccaaagactcaacaggtgcagcagatccc

SEQ ID NO: 624575 - DNA, 74 bp, Homo sapiens
cgaggtggccgaatcttccttcaggatatcaaggtgttggagagcacaatggctgaacaagtccttcctcaggc

SEQ ID NO: 624576 - DNA, 97 bp, Homo sapiens
agccttcagcttttggcagcatgaaagttagcagtggtgatgatgtccagcaactctgtgaagcaggagaagaggagtttttggaaatcatggcact

SEQ ID NO: 624577 - DNA, 75 bp, Homo sapiens
cacagagagggcctgggagcttgctgcagcttcagaaagtttcctacactactgaggtttaggggcactgtgaag

SEQ ID NO: 624578 - DNA, 100 bp, Homo sapiens
ccgaggaccaggccggcgcagccatgctgttccaaagacctaatgcgcttgctgtccagcagttgacagctgctcagcagcagcagtatgcactggcagc

SEQ ID NO: 624579 - DNA, 95 bp, Homo sapiens
ttcattcagtggtgttaaggattccaacaacaattccgatggcaaagccgttgccaaggagagcacacagctgctacaaatgccgtcagtgcagt

SEQ ID NO: 624580 - DNA, 97 bp, Homo sapiens
cgtttcagggagggaaacagattcagcagcggcagcagctggagaaggtcgtggagcagcaccttgcctgcaggctcacagaacatttcctgcctgt

SEQ ID NO: 624581 - DNA, 75 bp, Homo sapiens
cctgggttctggtggacctctcggctttcctggtcagcagcgacttggcgcccaattcccagatgcctacgggaa

SEQ ID NO: 624582 - DNA, 100 bp, Homo sapiens
cgcacagccaggacatcctggaacctgggaaagggtggattctccacagttttcctcgtgcgtactcacggtggaatccgatgtgcattgaagcgaatgt

SEQ ID NO: 624583 - DNA, 98 bp, Homo sapiens
ctgatggcatcttcaaagctgaactgaatgagtttcttactcgggagctggctgaagatggctactctggagttgagctcggacctcaggcacatgcg

SEQ ID NO: 624584 - DNA, 75 bp, Homo sapiens
gcgacctgggcaccagcaggacccgaggccaggagccaggggcccagaagtggacaggttgctggaccccgccaa

SEQ ID NO: 624585 - DNA, 102 bp, Homo sapiens
ctgaaaggcaacaatgacattttaagtataactcagcctgatgtcatttaccaaatccataagtttcaccagtgatcattaaagaatgggcagcttacaaag

SEQ ID NO: 624586 - DNA, 120 bp, Homo sapiens
ctgtccggcagccgaggagaccccgcgcagtgctgccaacgccccggtggagaagctgaggaaatggccagtgatgaactgagggagttgaggaatgccatgacccaggaggccatccgt

SEQ ID NO: 624587 - DNA, 83 bp, Homo sapiens
gaggaggaagaaaaatctgaggttatcaatgacgaggttgcactgctgtgatccatcctcatctcctaaagatgcatcctgac

SEQ ID NO: 624588 - DNA, 98 bp, Homo sapiens
gaagatgcctagcacagaccttctgatgttggtaccattaggcttctcagctccaccagatggcctcccccaagtcccccacatggcatactgtgctc

SEQ ID NO: 624589 - DNA, 50 bp, Homo sapiens
cctgagaacagcgtggcatgcaaggtgctacacacgcagggccctgtcga

SEQ ID NO: 624590 - DNA, 75 bp, Homo sapiens
cctattcacgctctgtgcttgtgccaagcgccctcacaaagccaatgctgaggagatgaccaagtaccacagcga

SEQ ID NO: 624591 - DNA, 76 bp, Homo sapiens
gcccctcatcgagctcttcgtcaagttcgatcctttggtacagaagacagaccgacagatcgtccaataccacctc

SEQ ID NO: 624592 - DNA, 83 bp, Homo sapiens
cgccactacagttcatcaacatcaactacgtccctctgaaggtgaaatgacaatggatgctctgttggctcgattgaaacttc

SEQ ID NO: 624593 - DNA, 87 bp, Homo sapiens
gaaattggatcttacacttgaaatacagactgttggggaacaagagctgagatctgtatctgtggacctgaatgttgatccctcgct

SEQ ID NO: 624594 - DNA, 100 bp, Homo sapiens
tgtaatggcctttcttatactctagaatatacaaagacaaaaggagattctgatgaagaagttattcaagatggtgaacacatccagctcccaggtggat

SEQ ID NO: 624595 - DNA, 88 bp, Homo sapiens
aacagcagccggcccttgttaactacaacagaccatctggagccaaaaacctgtatatcatctccgtgaaggggatcaagggacggct

SEQ ID NO: 624596 - DNA, 90 bp, Homo sapiens
cttctgggcccacgaggcagctgtcccatgctctgctgagcacggtgggctcaagggttcttgttgatgcacgagataagcttggcattc

SEQ ID NO: 624597 - DNA, 82 bp, Homo sapiens
cgctcacctgcgctgtgatgcctgcagagctgtggcttaccagaatgattacggacctgaagccaaagaacaagatgcgcta

SEQ ID NO: 624598 - DNA, 100 bp, Homo sapiens
ctgatctccatgcattagaacacacatactctgataaaggtgaaatgacaatggatgctctgttggctcgattgaaacttctgaatccagatgaccttag

SEQ ID NO: 624599 - DNA, 90 bp, Homo sapiens
agcagatttcccaagagcagcggaaaatgatccagtcacagttcagatcccaccaagcaccacctatgccattacgcccatgaaacgccc

SEQ ID NO: 624600 - DNA, 75 bp, Homo sapiens
tcatcaacgatatatgtcagatctaaagaggccacaatcagagaatggaattcctaggtgactccataatgcaac

SEQ ID NO: 624601 - DNA, 100 bp, Homo sapiens
catggacacaggataatggctgcactctttgtgaattcgatacagtcgacttgtctgcagtagatgtttctaagcatgaattgaggaacagaagaagcag

SEQ ID NO: 624602 - DNA, 98 bp, Homo sapiens
cctcggacctcgggccgctcatttccgggctcggctttgcaaggtttcaggcacagaactgtatatccaataatagtgaaatggatcccactaattat

SEQ ID NO: 624603 - DNA, 75 bp, Homo sapiens
cgctgtttcatgtgcaggaagaaagtgggacttactgaggcatttcatccttcatgaagccattcaggattttga

SEQ ID NO: 624604 - DNA, 100 bp, Homo sapiens
aagctgcacttgaggcccagaatgcactgcacaatattaaaactttacctggggtcctcgatgggcttcctggaatattggtgtgtttatttgcatcaga

SEQ ID NO: 624605 - DNA, 74 bp, Homo sapiens
catgctccatttgggcattgacacccctacccagaacaacatctttaagcaggttcaggagaagtggcacctgg

SEQ ID NO: 624606 - DNA, 100 bp, Homo sapiens
gtgaaacggagccagcggctgaggaggggccccagcagcccccgaaggccctatcaggacatggagtatgaaagacggtatcttctgtatgacgtcaacc

SEQ ID NO: 624607 - DNA, 78 bp, Homo sapiens
agatgataaaatcatcaaaagagccaatgaggttgtaggtgacgtggacaccagcctcccacggaccctagacgagct

SEQ ID NO: 624608 - DNA, 100 bp, Homo sapiens
gagacggcggcagcagcggcattcagatggactctgtgactacatgactaataaaatatggcagaaatgacaccatgcagtttccaagcccaggccttag

SEQ ID NO: 624609 - DNA, 98 bp, Homo sapiens
gcagcccctgctgttgctacaactcaggatgcatcatctgcagacatcagaaaagcatatcgtaagctttcactaactttacatccagacaagaataa

SEQ ID NO: 624610 - DNA, 100 bp, Homo sapiens
gaaggagagcaattagtgagacagggttattatgtgtaccgtgacatgctaggcgaaaaaggagatttcattacttcacctgaaataagtcaaatctttg

SEQ ID NO: 624611 - DNA, 83 bp, Homo sapiens
tgaagatcagcgtgtgcgatgccgtcctggaccacaaccccccagtgcctccggagccagcgtggtggccatagacaacaaga

SEQ ID NO: 624612 - DNA, 100 bp, Homo sapiens
caggcggaagcgagagaagaggagcggcgagtgcgggagaccgtgcgcagggatttatcaaagatgttcatgaagactcccttacagttgtttttgaaaa

SEQ ID NO: 624613 - DNA, 100 bp, Homo sapiens
gctgcctttgccgccaccatgcccaaaacgggatgtgtttggccaaatgggagagtggttacaacacacgagctacaaactacaatgctggagacagaag

SEQ ID NO: 624614 - DNA, 100 bp, Homo sapiens
caggaatgcgtcctgagcagcagccccgcggtgctggggaacccgttgttgctcagacacccgatgtggaaatttttcttctccctcagttcaaatgaga

SEQ ID NO: 624615 - DNA, 75 bp, Homo sapiens
aggagttcgtctcttacgtctgcggaagtgcagctgcctcagttcttagcgcagagagcgaaatgtcatcagtgc

SEQ ID NO: 624616 - DNA, 100 bp, Homo sapiens
gtcgtcagccgccttcattatctcctacgtggtcgccgtgctctccgggcacgtcaaccccttcctcccgtatatcagggtgtaccagtgatggcaataa

SEQ ID NO: 624617 - DNA, 101 bp, Homo sapiens
gaagaggaaaagaggagtggccaggtcctgcatctccagtatggaatgtatgtttggccctgtgctgtggtcctggcccagtacctttggtttcacagaag

SEQ ID NO: 624618 - DNA, 100 bp, Homo sapiens
cgggctgcggcgtgtgcgcgcccgccagctgctccggagatacgggtataaaattcccgtcattgaaaatctaggtgctacgttagaccagtttgatgct

SEQ ID NO: 624619 - DNA, 82 bp, Homo sapiens
gaagccctcgtgtcccagatgaggcaggagctcatcgatctccggggaccgcacaacattctgaaattttttggttattgta

SEQ ID NO: 624620 - DNA, 100 bp, Homo sapiens
taatggattaacgtccctgtcgtgtgacattttctggaaacttggatttaactggccagaagcaggtattcaaagcagagaacaatccctgggtgacccc

SEQ ID NO: 624621 - DNA, 75 bp, Homo sapiens
ctgaagaagaacctgcgagccgacaacgccttcatgctgctcacgcagggctccctccccgtcaggtctcatgtc

SEQ ID NO: 624622 - DNA, 100 bp, Homo sapiens
tgcatttccagcgaccctcgctactggtacggtttggaaattttagcattcaggtgccaggaatgcagatgggacagccagtgccagaaacaggcccagc

SEQ ID NO: 624623 - DNA, 100 bp, Homo sapiens
tcgactcttggcgccaccgcctcatgcactgtgtagcccgtggaccgggagcccgtggaccgggagccggtggtgtgccaccccgacctggaggagcggc

SEQ ID NO: 624624 - DNA, 100 bp, Homo sapiens
taggctgggagtgtctgctgatcacttggagtgctgtcccttggaacaggaggagtaagattgagatcttctccctggggtactgccccaccggggagtg

SEQ ID NO: 624625 - DNA, 90 bp, Homo sapiens
gaattatttgctgttggatcgtttcatactttacgcttgtgtgataaaactgggccttggcaaatgcaacattatgtattcttgaaccta

SEQ ID NO: 624626 - DNA, 76 bp, Homo sapiens
gttcttttcttttccatgatatcattatatggacagtttagggatcactactcttggaatcaaagataaatccaaa

SEQ ID NO: 624627 - DNA, 83 bp, Homo sapiens
tggcagcagtgactctgctggctttggcgtatacacaggccacgtgcgagcgagggtttgcagcaatggaagaaacgcaccag

SEQ ID NO: 624628 - DNA, 51 bp, Homo sapiens
ccatcaccatgccccacgcgggtacatgtcccagagcaagcacacggaggc

SEQ ID NO: 624629 - DNA, 75 bp, Homo sapiens
ttggcgccaccgcctcatgcactgtgtaggttttaaaatcaaagatgggaaaatcggagaaaattgcccttcccc

SEQ ID NO: 624630 - DNA, 51 bp, Homo sapiens
gcaaggccaaagacagggagaaggtacatcgagaagtctgcagaggagctg

SEQ ID NO: 624631 - DNA, 46 bp, Homo sapiens
cctcaacaaacaccagcgctttggagctgaagaagcaggtggagag

SEQ ID NO: 624632 - DNA, 75 bp, Homo sapiens
tcgcagtggtcgcttcttctccttggtctcacagatttcaagcctggctactggattggtgtccgctatgatgag

SEQ ID NO: 624633 - DNA, 101 bp, Homo sapiens
aaattgcagcagaacagaacctggataatgatgaaggattgaaaatcgctgctaaacattaccagatgtccagggtgctgcagaaggacgcggagcaggag

SEQ ID NO: 624634 - DNA, 100 bp, Homo sapiens
atgtctgcgagccaggattcccgcccgcggcgccatggctcacgtcggctcccgcaagcgctcgaggagtcgcagccggtcccggggacgggggtcggaa

SEQ ID NO: 624635 - DNA, 75 bp, Homo sapiens
cttttgcagagtcactcaggacaagcttgaaggctggagtgcagtggtgtgttctcagctctgcagcccccgctt

SEQ ID NO: 624636 - DNA, 98 bp, Homo sapiens
actaccaccaggatatttcttgccaaaggaggactttctggtttgtttgatggagctgaagttgttcttggtcctgacacttccatggagcttttggg

SEQ ID NO: 624637 - DNA, 74 bp, Homo sapiens
cggcgtaggacggaggcgtcgctagagttgaaactgtgggacagccagacagaagagatagcataggagtgtgt

SEQ ID NO: 624638 - DNA, 74 bp, Homo sapiens
gtcgccgccgccgccgccatgaacaactcgggcgccgacgagatcggaccctctttcccagctgcccgctcctc

SEQ ID NO: 624639 - DNA, 137 bp, Homo sapiens
atatgacttgctcgggcaaaagttgtgcattggcccgatcaagcctgacttctagccaagaattaaacaaccaccatgtcgagcaaaaaggcaaagaccaagaccaccaagaagcgccctcagcgtgcaacatccaa

SEQ ID NO: 624640 - DNA, 95 bp, Homo sapiens
agttgcaatgtaattacagaactcagctttggaacatttcaggcctggcacggaatgcagtttttacataagttatggagtctcactctgtcacc

SEQ ID NO: 624641 - DNA, 125 bp, Homo sapiens
ttccaagacccagggggctgtcgcccgaatgcaggaagaccgtgatgggagctgcagcacagtcgggggtgtaggttatgggggtcgtcacgctgtggtacagagcacccgaagtcttgctccag

SEQ ID NO: 624642 - DNA, 75 bp, Homo sapiens
cccgcagctgctggagctgctcaaccagctggacgagcgcaggcgcagcaagagctggacaacctgctgcatgag

SEQ ID NO: 624643 - DNA, 98 bp, Homo sapiens
tcggcgggctgtggggcctccgcgccgcggccgttagtcatgtcggattatctttctcaaggaatagatctttctggaatagaagtgatagaaaatga

SEQ ID NO: 624644 - DNA, 100 bp, Homo sapiens
agctcctccaggacctgccactatgatgccggatggaactttgggattggaaacccctcctggagtttccccaaagccatggacagccctagtcttcgtg

SEQ ID NO: 624645 - DNA, 99 bp, Homo sapiens
cgccattgctgcccagcagctaggcatcaagtacatcgggatgaggaatgagcaagcggagcatctttccttgaagaagtacattattgacattgtggt

SEQ ID NO: 624646 - DNA, 90 bp, Homo sapiens
gccaagcagccaaccatgctcaacttcggtgcctctctccagcagactgcgaacccagcttagactagaaagtctagaagacacacacat

SEQ ID NO: 624647 - DNA, 100 bp, Homo sapiens
ctcagagctcacctgcatcatccactttcccagcaagaaggtccagcagcagctgtggctccagtatcagaaaggccaaccatttaaactggatcccaaa

SEQ ID NO: 624648 - DNA, 51 bp, Homo sapiens
gctcgatggcgagccaacagtcactttacagaatgtctgaaggggacagtg

SEQ ID NO: 624649 - DNA, 51 bp, Homo sapiens
ccatgtgagcaatctcagtgaccttcaggtttggcccttactacactgagc

SEQ ID NO: 624650 - DNA, 75 bp, Homo sapiens
agtgggcgagaacgtccactgcgggccggcgaaagctgctccttccgcttccagccgttcgagtcctatgactcc

SEQ ID NO: 624651 - DNA, 83 bp, Homo sapiens
tggtcagtgtggcaaccagatcggtgccaagctatttgagaaagtcaaagaagtttgtccaaatgtgcatgagaagatcagag

SEQ ID NO: 624652 - DNA, 73 bp, Homo sapiens
ctgtggacgcctggcccaccctgagtctggcaaactgatacaactcagaaactgctcaatgtcaggaaaaccg

SEQ ID NO: 624653 - DNA, 95 bp, Homo sapiens
ttatgacaaggatggacagagggtgacggtctctgaggtgccaagctctcctgatgaaatgtgttctgccccactgggctccagggacagtgtct

SEQ ID NO: 624654 - DNA, 142 bp, Homo sapiens
gtggtgtgctttgagaccctgttcgccaacacctgcgaggagtgtgggaagcccatcggctgtgactgcaaggtaagaagagttcctgggtcaagtggtcaccttcataaaaccgaagacggggactgggagtggagtgacg

SEQ ID NO: 624655 - DNA, 80 bp, Homo sapiens
gcgcagcatgatgcagacgcttgcccagaaccccgactttgctgctcaggccaaacgtaccaagaaagtcgggatcgtcg

SEQ ID NO: 624656 - DNA, 100 bp, Homo sapiens
aaacatggtggccaaagtggatgaggtgaagtccacaatcaagttccaaatgaagaaggtcaagtctggcaccatctttgacaacttcctcatcaccaac

SEQ ID NO: 624657 - DNA, 109 bp, Homo sapiens
aagtgcctcatcccctcttcagtgcaggaatatgttagcgttgtatcttgggagaaagacacagtctccatcatcccagacgccatggagttggtgctggtcttcctct

SEQ ID NO: 624658 - DNA, 49 bp, Homo sapiens
tcactgctccgggtgaattctcagatttggattcctagacttgcccaag

SEQ ID NO: 624659 - DNA, 98 bp, Homo sapiens
aaaccccacaagcactgcatacggatggccaggccatgttatgggatctcaacgaaggcaaacacctttacacgctagatggtggggacatcatcaac

SEQ ID NO: 624660 - DNA, 75 bp, Homo sapiens
ccaaatgagacccttcctggagaaccgggcccagcagcactgggatggcccactgcgtgaccttggttcagctgt

SEQ ID NO: 624661 - DNA, 100 bp, Homo sapiens
cagggcccgaggggccgacccgcagcgtccctggtctctccagccctcactcggaaccgcacgagaagatggagttccggacggcatctatccgcctctt

SEQ ID NO: 624662 - DNA, 75 bp, Homo sapiens
acagattggcacctttgcctctgagcgctatagttatgtctgcccagatttagtaaaagaatttaacaagtatga

SEQ ID NO: 624663 - DNA, 97 bp, Homo sapiens
gtgacccttcacctttgatcccctgacctgcattaccttgatgtgaaaggaccacccacccaccgtctgtcttgtggtcagtcaccctacaccgaga

SEQ ID NO: 624664 - DNA, 106 bp, Homo sapiens
cgcatccctgccccggcgccgtccgtgcccgcgggacctgacagccgggtcagagctcaccatggatgatgatatcgccgcgctcgtcgtcgacaacggctccggc

SEQ ID NO: 624665 - DNA, 75 bp, Homo sapiens
cagtgactagtaatggagaagttgatgactctcgtgaacatagctttaataggatgaaatcagacatcactgaag

SEQ ID NO: 624666 - DNA, 83 bp, Homo sapiens
agatgagaagaggttgttgttggagaagcaggctggcggaaacccttgatatggatcagaaactttcgaagttggtagaagag

SEQ ID NO: 624667 - DNA, 98 bp, Homo sapiens
atcgtctcctgtgtggcgatggtcttcctgctggggctcatgtttgaggattctttctactaatccagatacttgttgaagtgctgactagtttcttg

SEQ ID NO: 624668 - DNA, 98 bp, Homo sapiens
gaattcccataccaaccacagaggaactagaggctgctatccagccagatactagcctggtgtcagtcatgactgtgaacaatgagattggagtgaag

SEQ ID NO: 624669 - DNA, 82 bp, Homo sapiens
acgaccactgaaaacaacgccgaaactatgttccaacttcctgtcaacaatcttggcagtttaagaaaagcccggaaaactg

SEQ ID NO: 624670 - DNA, 100 bp, Homo sapiens
tcagtgaagaagaaagtaaagttggaagttaagggagacaaagttgaaaacaaagtgctggttcaaaccttgtactactcagctgatcacaagctgcttg

SEQ ID NO: 624671 - DNA, 78 bp, Homo sapiens
aacatttgggagaaacacagccagaagagtgagcacaaatggatcagatgaccctgaagatgcaggagctggtgaaaa

SEQ ID NO: 624672 - DNA, 88 bp, Homo sapiens
atgattgaagtggaaatatccaaacaggccctccagaatgagctggagagactgaaagagttgtgacttctcaccaggagatttggtt

SEQ ID NO: 624673 - DNA, 99 bp, Homo sapiens
caaaggatgctgagtccggagcgcctagccctaccggactacgagtatctggatgcagtcatcatttacatcttcagaacaagagctagagcgattaag

SEQ ID NO: 624674 - DNA, 100 bp, Homo sapiens
catcgacatccagaacgcttatttgaatggtgtcatggagaaactccagctgggcccagagattctgcagcgggaaaatccaaggcttatttatgccagg

SEQ ID NO: 624675 - DNA, 48 bp, Homo sapiens
ctctggttctggtgggaacccagggtaggattattgactgtgctttta

SEQ ID NO: 624676 - DNA, 98 bp, Homo sapiens
ttagtggcttcacgcagaagttggcaggagcatgggcttcggaggcctatagcccgcaggtcttgggcgtctttggtactggcttttttaggggtctg

SEQ ID NO: 624677 - DNA, 83 bp, Homo sapiens
tgtccacactgtggaccaggtgttgagtgaggtccagccctgctgggagttttctgccacacagatttgcggaagaacctgac

SEQ ID NO: 624678 - DNA, 100 bp, Homo sapiens
tctgctgtccttctttgtggagagcaaggaaatgggaagacatgatgacctttggtccttattctacatgttggtggagtttgtggttggtcagctgccc

SEQ ID NO: 624679 - DNA, 98 bp, Homo sapiens
atcaatgcaggctggcgctgcgatggtgacgcggactgtgatgaccagtctgatgagcgcaactgcagtgaaaggtgtagcagtcactcggcctacac

SEQ ID NO: 624680 - DNA, 92 bp, Homo sapiens
atggcggcagccgaggccgcgaactgcatcatggagcttccccgggcgctgcctggacaggcctgcctgcgtgctgggacatgtctggcctc

SEQ ID NO: 624681 - DNA, 83 bp, Homo sapiens
cctcccccctgagcccgaggtgctgacgtcgcaaaaaaattggataggtctaccttctgcttccctggaaaggatgaatttac

SEQ ID NO: 624682 - DNA, 90 bp, Homo sapiens
gctgaagcatctgcagaggatggtcagtgtgccccaggtgaaggccagtgctctcaagaggctactacttgagaagaggcaaaggaaaaa

SEQ ID NO: 624683 - DNA, 100 bp, Homo sapiens
ccctggaagacatttatgaaagcccaaatcacctgtacttggtcatgcagctctggtgagcgacctgctggaattctgcttctacaccttccgagagtcc

SEQ ID NO: 624684 - DNA, 83 bp, Homo sapiens
cgctaaggaattcccggcccctcagggccacggctttagcggtgtcttttgcgttgtcactcagcccagtccatcagtttctc

SEQ ID NO: 624685 - DNA, 83 bp, Homo sapiens
attccacagtgtcctctggaaaatggacccagatgatgtggtaccagttggccaaagaagagcctggtgttggtgcatgtgct

SEQ ID NO: 624686 - DNA, 75 bp, Homo sapiens
cgggaaccacgccgtgcgcctgccgctgatggagtgcgtgcagatgtcttaaaatccttgcacgtttgatgactg

SEQ ID NO: 624687 - DNA, 101 bp, Homo sapiens
ttcgtctgcttcttcctcttcagtcaagacaatgcagatcttcgtgaagactctgactggtaagaccatcaccctcgaggttgagcccagtgacaccatcg

SEQ ID NO: 624688 - DNA, 100 bp, Homo sapiens
gcgagccatggggctggcggatgcgtcggggttttgcacactagggaccaagaagccctcggggacactgctgagaaaagactgccgaagggaagaccag

SEQ ID NO: 624689 - DNA, 82 bp, Homo sapiens
gccgcgcacttcgtcatgttcttcgcgccctgaggctgtggccaggccagctgggctcggggagcgccagcctgagaggagc

SEQ ID NO: 624690 - DNA, 100 bp, Homo sapiens
agctggaaggacaggaaccagaacccaggcccacggaggaagagccgggcagtccctggagcgggccagtgccctctggtggtcagaagatgctgtgctg

SEQ ID NO: 624691 - DNA, 100 bp, Homo sapiens
ggcatgtaaggtgcgcggagggactgcaccttctccatcaggtgcagaagatattcaagagaagcttatgtggagttagttcaccatattagagaatcta

SEQ ID NO: 624692 - DNA, 82 bp, Homo sapiens
gagccaagcagctatggaggaaaatcagcccttgccctgttggatgaataggcacctctggaagagccaactgtgtgagatg

SEQ ID NO: 624693 - DNA, 82 bp, Homo sapiens
ctcgagacttaccagagccacaagcaccgaacaagatttgtgatgaaatggagcctggaacaaactcttttcgggtagaatt

SEQ ID NO: 624694 - DNA, 90 bp, Homo sapiens
gctccctctctgccggcctcggcttcaggcttcatagagcccagtgtgcaattaaacagactcaggtaactgttcagaaaattggaaagg

SEQ ID NO: 624695 - DNA, 74 bp, Homo sapiens
gtggttgtcccaatatccaagaagcagtagagggtgccatgcacattcagatccaaatcacaggacagtaccca

SEQ ID NO: 624696 - DNA, 75 bp, Homo sapiens
tattacagcggcgaccagtcaggaaccactcgttttgactattattttatcactctttgtgaaacttcacaatgt

SEQ ID NO: 624697 - DNA, 74 bp, Homo sapiens
gccaaggtgtacttcatctacgagattgtctccagctttaagaccacgacatcgagagctgcctgccagctcgt

SEQ ID NO: 624698 - DNA, 100 bp, Homo sapiens
aggaggtggtcgtggcgaacctggcagctgcggagcatcagatccatgctgctgctgactcggagccccacagcttggcacaggctctctcagctcaagc

SEQ ID NO: 624699 - DNA, 83 bp, Homo sapiens
gttttgcagatcttcaacaagaggacccaggagaaattcgccctcaaatctcactttatctctgcactgacagttgtgttcgt

SEQ ID NO: 624700 - DNA, 100 bp, Homo sapiens
caaacaccctggagacgaattcctgtgagaagaaatttgtttgtccagaatgttcaaaacgctttatgagaagtgaccaccttgccaaacatattaaaac

SEQ ID NO: 624701 - DNA, 101 bp, Homo sapiens
gccgggggctcagagatccaagtgcgcgccctggcgggtccggaccaagcaaatgaagctcgtgaccgagaacctgaaggaggaaccaatggaaagcggga

SEQ ID NO: 624702 - DNA, 98 bp, Homo sapiens
aaaaatgtggagcaagatgagttgcagcaagtcatacgggagatttctcgaatgctggcagccaaaaccgttttggctatccgttatgatgcttttgg

SEQ ID NO: 624703 - DNA, 82 bp, Homo sapiens
ctcgctggcctgcgacccagccagccagcaacctggaccgtccagaatgacagggtccagaaactggcgagccacgagggac

SEQ ID NO: 624704 - DNA, 100 bp, Homo sapiens
ggcagagaacttgccggtgccagctgagtaacaaatgtggcaattattttggatctatcacctgtcatcataactggcttctgcttgtcatccacacaac

SEQ ID NO: 624705 - DNA, 100 bp, Homo sapiens
caatcttccaggcaatagctgaagaagaagaggaagtagccaaagagcaactaactgatgctgacaccaaagtaccacaaagcctgctccacacctggat

SEQ ID NO: 624706 - DNA, 89 bp, Homo sapiens
gaaattgccggtctgggagttgggggcaaggagaagatcctggggacaagctgtggtgggctgatcaggtgtcggaaaagatgggcaca

SEQ ID NO: 624707 - DNA, 90 bp, Homo sapiens
ggacttccttcctgtagaccctgccacgagcaacggccgcatcaagcagctgcgttcagtcacagaagatcttattagacggaatgctga

SEQ ID NO: 624708 - DNA, 85 bp, Homo sapiens
acgatgtgcggcggatgaacaagcggcagaagatgctgtggacaattatcgagatagactaacagaataccccttctacacaccc

SEQ ID NO: 624709 - DNA, 96 bp, Homo sapiens
atgctgaaaacccctggaaacttgctaaagagctgtggtgatgttggaccaaatggacaacctggaccaatgggacctcctgggctgccaggaata

SEQ ID NO: 624710 - DNA, 75 bp, Homo sapiens
cggggagcggagccatggcctccggaattcctcctgatcagcagagactgatctttgctggcaagcagctggaag

SEQ ID NO: 624711 - DNA, 87 bp, Homo sapiens
tgaagagacatatggacaatgaatctgcaaagatgccgaatataccaactctcctttggtacctacattctgtactcctggtttgaa

SEQ ID NO: 624712 - DNA, 82 bp, Homo sapiens
gagcccccatgatccctaagaagacagcttgaacctagggtcagcttctggaggttggttggaacaatacggcaagtgctcg

SEQ ID NO: 624713 - DNA, 82 bp, Homo sapiens
tatcagctacagactttcctgagtcagacttaattcagtgcacaaatgagatgaatgtgaacatcccacagttggcagacag

SEQ ID NO: 624714 - DNA, 82 bp, Homo sapiens
aggatggtagcccttgctcaacagaagatttgctctatgatcgtgataaagcttgcctgggaccagtggcagggaccccgga

SEQ ID NO: 624715 - DNA, 87 bp, Homo sapiens
gggtggaggttcgagcgctgttctcgctccggagccgctgcacatttcggtgaagtggatcctaaagagaggatagcacgccaacga

SEQ ID NO: 624716 - DNA, 100 bp, Homo sapiens
catttttcttctctgggaaggtgaacatttgtagcattgatttcccggatctggtaacatggcaaaagatacccaacatgagtgaagtttcctgcaagaa

SEQ ID NO: 624717 - DNA, 75 bp, Homo sapiens
gccaaagaccttaggagagacgagcagccttcagggagcgtggagacaggacactgtaatttatgatcgactggc

SEQ ID NO: 624718 - DNA, 82 bp, Homo sapiens
cgcctcccgtggaagcccaggcccgcttcgcagggcgaactttctgaccaagtatacaactacccagagggcctaggagaag

SEQ ID NO: 624719 - DNA, 128 bp, Homo sapiens
gcatactgactccattgacagaaggttttgttttgacatagaagctgctgatcggattgttaaaatgagtcttcggaagcaaacccctagtgacttcttaaagcaaatcatcggacgaccagttgtgg

SEQ ID NO: 624720 - DNA, 87 bp, Homo sapiens
ttctgatgttccactgaaatcacaatggaaagtcttgacttgactgggttttgacccaccacatcagagtgacacaagaaccatcta

SEQ ID NO: 624721 - DNA, 75 bp, Homo sapiens
gtcctgaccacaatggggaggacaacttcgcccgggacttcatgggggggccctcagcctcttggccttgaacgg

SEQ ID NO: 624722 - DNA, 75 bp, Homo sapiens
aagacctgctagagccattattgcccccatctgggtactttgaaagttcctggaaaggaaatatctgcactatct

SEQ ID NO: 624723 - DNA, 126 bp, Homo sapiens
tggcgcggcgggacgcgagcggcgagccggagcgcggagcccggctcccgcaccatggaggaggacgacagctacgggcgccctgcgtccggcagaggaggcgagcatcccgctcaggtgatgagg

SEQ ID NO: 624724 - DNA, 100 bp, Homo sapiens
cgcagctcagcgcagcgctgcggcctttcggcagccgaacggccgcggcagcgttgggccggagcactagcctcacggagaaggatctgaaagaagccaa

SEQ ID NO: 624725 - DNA, 75 bp, Homo sapiens
gctctgccgccggcgcggctcatgggcagagtcggccgggcgggccgggaagctgagctggaacgcctggaacga

SEQ ID NO: 624726 - DNA, 100 bp, Homo sapiens
ctcgccgctcacagctcatgtaacagagactccagtacttcacttatttgggaaaaaattgaagagccatccatagattgtcatgaatttgaggaattat

SEQ ID NO: 624727 - DNA, 75 bp, Homo sapiens
agaatcaggaaaaagcaccattgtgaagcagatgaagactcacaccacccggcaagaactgctcactacggctcc

SEQ ID NO: 624728 - DNA, 74 bp, Homo sapiens
tgcattgcagaggatgtcatcattgtcaccagcaggagcgcctggaccatgctgctgagcgcctactggcacgg

SEQ ID NO: 624729 - DNA, 98 bp, Homo sapiens
gaggcggtcctcctagcggcctggccaagaagcttgagagaagaaaaatttcagaaaaattgtctcaatttgactagaatatcaatgaaccaggaaaa

SEQ ID NO: 624730 - DNA, 75 bp, Homo sapiens
ctacagtctctacctgaaaatattggcaagttcctatatgatagtggactcttcagatcacgaccctggagaaaa

SEQ ID NO: 624731 - DNA, 90 bp, Homo sapiens
tcctacctgaagtatgccattagttcccagcccatggacacagaggctgatttacagttccgtccccgcacgggaaaagctgcgtcgaca

SEQ ID NO: 624732 - DNA, 97 bp, Homo sapiens
gtctcctgcaagaactggctcaagaaatttgcctcgaaaaccaagtatcagcagatgttgcacacaaacttggtataccttgctacaatagcagatt

SEQ ID NO: 624733 - DNA, 100 bp, Homo sapiens
gggtccatccagccacacggtgtgttctttcggttgttcctcaaagtcattcaagctgtactcgccgaaggagcccccgaacggcaacgcctttcccccc

SEQ ID NO: 624734 - DNA, 51 bp, Homo sapiens
ttcaagagccattccttttggaacaatgcatgtagagcgcatgaagtacag

SEQ ID NO: 624735 - DNA, 75 bp, Homo sapiens
cccaccgctgccctcagctccgagtccagggcgaggtattagaaaactactcggatgctccaatgacaccaaaac

SEQ ID NO: 624736 - DNA, 83 bp, Homo sapiens
aattaataccaaaagttaccaaaactgcagacaagtaaaaccacctcagctaattgattatctgcagcagaagaaaacagaag

SEQ ID NO: 624737 - DNA, 100 bp, Homo sapiens
gtcggcaaggagagacgtcgctgaggggcttgcctgaagcgagggaataccctctaccatctgctttggtcagggtgccgctcgaggatttaaaagcaac

SEQ ID NO: 624738 - DNA, 75 bp, Homo sapiens
gatgctttggcaaaacttcggaaaaccatcataaacgagagccttaatttcaagcaccaaatgtggctccttcag

SEQ ID NO: 624739 - DNA, 90 bp, Homo sapiens
ccttgtcactgcttcagatgatggctacatcaagatctatgatgtgtcacgagaagagaatgccttctagatgcaaaatcacctccaaac

SEQ ID NO: 624740 - DNA, 73 bp, Homo sapiens
ttttgagcaatggggaacgctcacggactgtgtggaatgggtaccacagaccatgtcatcgtcctggcgtcca

SEQ ID NO: 624741 - DNA, 75 bp, Homo sapiens
aaaggaaatgtgaaacgaataacatgatggaatattggctagatgattgtaagaggacatttggtgccaaagaag

SEQ ID NO: 624742 - DNA, 100 bp, Homo sapiens
ctgggagcaacgggagtgtcctggacccagctgagcgggcggtcattcgcatcgcaggtttacccaaggtccagcctagcccctaggcaccatgtcggac

SEQ ID NO: 624743 - DNA, 82 bp, Homo sapiens
acttctcggcgctgccgtctctggaggagtactggcaacaggccaagtcctgtatctgccatgtctgtggcgtccacctcaa

SEQ ID NO: 624744 - DNA, 74 bp, Homo sapiens
cactcgtgctcccacacggacgggcgcgccgccaacccggggcaccctttggagaagaaccccagcctggggtg

SEQ ID NO: 624745 - DNA, 75 bp, Homo sapiens
gggctggcgcctcgggagagcgaatcgagggcggcgggttctccccatgacaccacctgaacgtctcttcctccc

SEQ ID NO: 624746 - DNA, 100 bp, Homo sapiens
ccgaggaacgaagaaacagacattcaacatgattgcatttgaaagccagcccctgggcaacaaagtggaaatggagattgtgagcatgttggaaaaaaac

SEQ ID NO: 624747 - DNA, 101 bp, Homo sapiens
cacgccgcccaggagacccctctgctgcaccacttcatggacgccgtggaggaccggctggacaggaacctgtggcccttcgtatccgaccccgcccccac

SEQ ID NO: 624748 - DNA, 75 bp, Homo sapiens
gaccttgttatcagtgatggctcttctctggaagatcttgtgagggctggtttttaagtttggccgcactgaaga

SEQ ID NO: 624749 - DNA, 100 bp, Homo sapiens
tcagagctacaattccgatatcaacgaatggagcctcatcacctccagtccacatccaggttcttgggtgtctctggggagtccctgggccagaccttcc

SEQ ID NO: 624750 - DNA, 50 bp, Homo sapiens
tccgtctggatcacggatgtaggaagtggagtctatactttgctcacaac

SEQ ID NO: 624751 - DNA, 98 bp, Homo sapiens
catgtttgacaagacgcggctgccgtacgtggccctcgatgtgctctgcgtgttgctggtatatgactctcaacccttctactaagaggaagaatact

SEQ ID NO: 624752 - DNA, 100 bp, Homo sapiens
acattagaggtcatccaaagcagccgtcccctctgcagcctctctgacaagtgtgtaatgaacaagtctggggtgaatcgtgtagtttggaaacgacctc

SEQ ID NO: 624753 - DNA, 82 bp, Homo sapiens
ctttctccacctcattatgggcactatggggatccgtcgcacacagcatctccaacagattggggaccacaaattcagtgcc

SEQ ID NO: 624754 - DNA, 82 bp, Homo sapiens
tgcgctggacttctgccacagctactccatctggcttgcacccttgctcggaggaatgcagacgtcttcctgaaatacctgc

SEQ ID NO: 624755 - DNA, 97 bp, Homo sapiens
tcaaacaagcaactcttcttggatgccattcaccctacagaaggtttgcgaggagcgatcgcatttgccttagctattcggaacacagaatctcagc

SEQ ID NO: 624756 - DNA, 101 bp, Homo sapiens
ttgtcagatgacaagaaaccattcaagtgtttcactcctaaaggttcatctctcaagggtctaaaattcccaggactccacagctttgcaccagataagcc

SEQ ID NO: 624757 - DNA, 80 bp, Homo sapiens
aagaagaaaggattcgttacagccagagattggcccggaacttgcctgtttggctccccaaccaggacgagccccttcct

SEQ ID NO: 624758 - DNA, 83 bp, Homo sapiens
ctctggataagtgtttcgaaaatgtgtgtgaattggatttgatcttccatatggataagagactggggatatttatatctggg

SEQ ID NO: 624759 - DNA, 98 bp, Homo sapiens
gcctggccgccactgtcactgtgttcttcctctacaccgctgagctcctccccactgtgctcaggtcttattgcgggtaaaggaatcggaaatacagt

SEQ ID NO: 624760 - DNA, 75 bp, Homo sapiens
gggagggccgggcaattcccgaccgaaccaaacggcaatgaatcgctccctggctaatgtgattcttggaggcta

SEQ ID NO: 624761 - DNA, 74 bp, Homo sapiens
gagccccggggcatctatgccagtgagaggcccaagtccctaggtgctggagaatctggtaaaagcaccattgt

SEQ ID NO: 624762 - DNA, 100 bp, Homo sapiens
aaattcttttggcttgcctggcatgttcctgtggtggtccttggagcaaaagtccatgagtcatcctttttgaacttccatgactcagactgcgaaccca

SEQ ID NO: 624763 - DNA, 96 bp, Homo sapiens
gtgatttgaaatcattatcagtggtcacagaagtctctaccaatggtgcttcagaagtttcatactttcagcttaacagagcgttccaaaaagagg

SEQ ID NO: 624764 - DNA, 96 bp, Homo sapiens
gtgcttgttggagaccccaatccgcatgagcgtcctttcggaagctgccctctgtcgacagctccccatggaagctgagactcttgccccagttca

SEQ ID NO: 624765 - DNA, 82 bp, Homo sapiens
attcgagtgaccgagaccgcggccgggaccgaggggctctctttacctatgaaggcaacagcaatgacatccgcgtggctgg

SEQ ID NO: 624766 - DNA, 98 bp, Homo sapiens
aacctagtgggtgtaatacatcatgaactgcagggtatatgaatgacctaaaggtacaaataaagacggagagagaacagtgccaactgggagcaggg

SEQ ID NO: 624767 - DNA, 75 bp, Homo sapiens
ctgtgaccagaacggcacggccatctgtgtgtctgggcagtgcaaggtagttcctgaaatgactgagatattgaa

SEQ ID NO: 624768 - DNA, 51 bp, Homo sapiens
ccgggacagtctccgaagtctcgagcagatatgaggccccaggattcctgg

SEQ ID NO: 624769 - DNA, 75 bp, Homo sapiens
ccgaggaccaggccggcgcagccatgatctttgatggaaaacagattccacagagaatggttgatggatggaatg

SEQ ID NO: 624770 - DNA, 100 bp, Homo sapiens
gatctcagctacatcacagccctgttaaaggatggctttggctttgcagacagcacagtcttacaggcagaggcaaggctggcagcaaaacgggctgccc

SEQ ID NO: 624771 - DNA, 76 bp, Homo sapiens
ccaatgtcagagaaatctttgacaagttctggatgcgggtacccttggtggcaccagaggacctgagagatgatat

SEQ ID NO: 624772 - DNA, 97 bp, Homo sapiens
ttgccagcgggagcacttcatcagaatttaattgtcctgaatccactcacagtaactgaggaggaaatacgaccatcactagagaaacgccttgaag

SEQ ID NO: 624773 - DNA, 82 bp, Homo sapiens
ttcacattgaacgcttcaagaataaaatcacagttgtttctgagaaacagttctctaaaagagaagaagaagttggatggga

SEQ ID NO: 624774 - DNA, 89 bp, Homo sapiens
ccgagaccctcgctcccccatcaacgtggagagcttgctgacctgatggccaaaagaaaggaagaaaatttttcctctcctaaaaatgc

SEQ ID NO: 624775 - DNA, 76 bp, Homo sapiens
catgcaaggaaacataagttggaggttctggaatctcagtactttggaagtgttgctgaaatcatcaggaatcatc

SEQ ID NO: 624776 - DNA, 90 bp, Homo sapiens
acaaggggactctgcagatgagaccacagcccacaagacagaagggccagtgtcgttattatccttgtggagtaatagaatcaatactgc

SEQ ID NO: 624777 - DNA, 100 bp, Homo sapiens
gaggtttacaaaatagacatgccgcccttcttcccctccgaaagttggtctccgccagctggacatgtccttgctctgccaactgtacagcctctacgag

SEQ ID NO: 624778 - DNA, 82 bp, Homo sapiens
gtggttagtttctgcgacttgtgttgggactggaatggggtttttttggcatctgaactggaagactttgaatgcttcctcc

SEQ ID NO: 624779 - DNA, 75 bp, Homo sapiens
gagaagtatatgctacaggaggagaggttcaaattgcaatgagagaaaaggaacagttccgtaagctctttattg

SEQ ID NO: 624780 - DNA, 73 bp, Homo sapiens
ttggcttcagcagctaccaaggaaagcgcttcaagtcctcggtatacagacggtacaatgacttcgtggtctt

SEQ ID NO: 624781 - DNA, 74 bp, Homo sapiens
gcactccgcacctcggggacattattgcgcgtggaacggctgcttttggaagccctccagaatacccatcatat

SEQ ID NO: 624782 - DNA, 83 bp, Homo sapiens
actgatattttatattgaaatggatcctccagttggaaaatggatataccttatttgattatgatgttggactgaatgatata

SEQ ID NO: 624783 - DNA, 100 bp, Homo sapiens
cggacgcgcggcggggcagaccgctggggactgcgggcggcgctgtgtccgtcgccatgacaggtggacacctgcgcaggtgtgtgccctccggcccctg

SEQ ID NO: 624784 - DNA, 98 bp, Homo sapiens
ctctcagcaggcctttgctggacagatgaagagtgacttgtttctggatgattctaagagaaatgtcctgtctcatggaagcactggaggataagcgg

SEQ ID NO: 624785 - DNA, 100 bp, Homo sapiens
gcggagaagaagctgcggccgcacctggccaagtgtgagacagcttccttgtgtgggactgagaagcaagatatcaatgtagcagaattgcacttgtgcc

SEQ ID NO: 624786 - DNA, 97 bp, Homo sapiens
tgcagtcccccaggatacagggtcaaaggagagcacaaccatcgcagttggaagcccatggggcagccccattggatgagaatgacctagaggaaga

SEQ ID NO: 624787 - DNA, 75 bp, Homo sapiens
ttccgtcctctgaggcgacggccgcggctgcacaggctccagcaaaccttcaccaatttacatcagttcctattc

SEQ ID NO: 624788 - DNA, 75 bp, Homo sapiens
cccactgatcgcgctggataaagatgcgcctctgcgatttgcaggcgaggattaaatccaccacacagggtgaaa

SEQ ID NO: 624789 - DNA, 100 bp, Homo sapiens
gcacctgcgcgaagctggccaaagcctgcccagacggctcacctgtgcgggatggaacaaaagactgtgccctgtccacggtgcctcctgcatgtcctgc

SEQ ID NO: 624790 - DNA, 75 bp, Homo sapiens
gctctgcagccacatactatccgtttgttcaggaaccaccagtgacagacgaagggagcaatctgaccccagcac

SEQ ID NO: 624791 - DNA, 75 bp, Homo sapiens
agagctatggtgaaacaccactgaagcattgccaaggagtgacactgctgatcctgtaacatggaggattgtctt

SEQ ID NO: 624792 - DNA, 75 bp, Homo sapiens
ctgcatgacttgtcctgggactgaggaaaatttaccagcatgtagagcgcatgaagtacaggacaataaagcttc

SEQ ID NO: 624793 - DNA, 83 bp, Homo sapiens
atttcaggaaaacagagaaagaagtgataggagggctctgtaggctgaaactgccgccaaccggatctgtaaggtgctggctg

SEQ ID NO: 624794 - DNA, 98 bp, Homo sapiens
aaaacttcagaaacttcaggaagatgcagttgagaatgatgattatgataaaggaagatttcgatgtcgatcattttgtgtctgactgtaggaagcgg

SEQ ID NO: 624795 - DNA, 90 bp, Homo sapiens
gagaaacattcagggtctatttgctccgctaaaattacagatggaattcaaggcagtgcagcaggtgattcaggattacacaacaccgcc

SEQ ID NO: 624796 - DNA, 75 bp, Homo sapiens
gccgcccagacgctgcccgcgggcccggccacggcggagccaaggagcaggccgggctctcgccatgggtcactg

SEQ ID NO: 624797 - DNA, 100 bp, Homo sapiens
agaatttgagtggcctaagaatatgatgccgtctagttttgccatgaaggagaaagaattgtgccatgaaaaatggaaaactcctgagaagctgttccag

SEQ ID NO: 624798 - DNA, 51 bp, Homo sapiens
cagaaggcgtgaaaagatttagggaattgtggtgcttggaataaacagagc

SEQ ID NO: 624799 - DNA, 100 bp, Homo sapiens
cccattgcagcccaggtggataaggaacatctcttcccagcggctcagagagcacagtccctggaggacccattggagggcaaaccagagttactctgag

SEQ ID NO: 624800 - DNA, 83 bp, Homo sapiens
ggcgcctagaacgtgtttttcgggagagcaaaggctgtgtctacggcagcctggggatataggttttggccaaattgggcgag

SEQ ID NO: 624801 - DNA, 75 bp, Homo sapiens
cgtgaccgagagcgtgaccgagagcgcgaatatcgtcatcgttagaagggtggcatggagaaatcgttgtcaaaa

SEQ ID NO: 624802 - DNA, 144 bp, Homo sapiens
tacctatttgatgaagatgtcttttgaaaggtgtactgcaaggaacaaaatgtttgtaaattctccttttaccaaggtaatagcctgcagctggtgttttgagaagccctactgctgaaaacttaacaattttgtgtaataaaa

SEQ ID NO: 624803 - DNA, 76 bp, Homo sapiens
ccgcaggcatttcaatcacattatggtaccaaccaagaagctgaagaaatatgagaaagaatatcagacaatgcga

SEQ ID NO: 624804 - DNA, 97 bp, Homo sapiens
ctggaaagctttaggagttcacagtgtctcggcgcggaagatggccggcggcgtggacggccccatcgggatcccgttccccgaccacagcagcgac

SEQ ID NO: 624805 - DNA, 100 bp, Homo sapiens
gtgcctacccccatcactgcttccctcagccataacagtcagcaaactgaaacttcaggccaaattcaaggagttgctgtgacatcttcagcagacgttg

SEQ ID NO: 624806 - DNA, 89 bp, Homo sapiens
tgggcggagttctcattccttctccagggagagtcgctgcagacaatgtggagctcatactgaaaaccatcaataaccagcacagcgtt

SEQ ID NO: 624807 - DNA, 83 bp, Homo sapiens
gcctgagcccgccagcgacgtgcgcctcgggagtcggcctgtgagaccatggtgaatccgggcagcagctcgcagccgccccc

SEQ ID NO: 624808 - DNA, 100 bp, Homo sapiens
caatgtgactgcacaccaaaaatggaaattttcaagacctggcatcaggctcctttctgtcaagggtccctgccgtagagaaatggaagacacactgaat

SEQ ID NO: 624809 - DNA, 83 bp, Homo sapiens
ccgaggagctgctgcatgtgaacgatgacctcaacaacgtcttccttcgatacgagagtagaaaccattgaaggttttcagtg

SEQ ID NO: 624810 - DNA, 89 bp, Homo sapiens
atcatttattctccgtactgatcactacatcatgagagaagtggagatcctgatgtttctcagtgccattgtgatgatgaagaaccgca

SEQ ID NO: 624811 - DNA, 51 bp, Homo sapiens
agattggacagcaggtcgacaactatgtgaaagggtttggaggaaaatttg

SEQ ID NO: 624812 - DNA, 50 bp, Homo sapiens
gctcagtctcccaacacctctgatcagattgatgaaaatctcaaactggc

SEQ ID NO: 624813 - DNA, 146 bp, Homo sapiens
ctcttggtttgaatctggtcgcttccggagggactgcaaaagctctcagggatgctggtctggcagtcagatgctcccataatactctcagatagtgaagaagaagaaatgatcattttggaaccagacaagaatccaaagaaaat

SEQ ID NO: 624814 - DNA, 75 bp, Homo sapiens
ggggagtcagtgctggggctggtgcacatggacgtcgtggagctgctgctgaagattcgggaactggagcctctc

SEQ ID NO: 624815 - DNA, 144 bp, Homo sapiens
caagagcaggcacagaagctgaaaagccagcagcctcttaaaccccaagtgcacacacctgttgctactgttaaacagaaaaatcgatgggacaactgaggaagaagataacattgagctgaatgaagaaggaaggccggtgca

SEQ ID NO: 624816 - DNA, 88 bp, Homo sapiens
cggcgggcccggagcagccgccgccgcagcgcgaacatggacgccgtcaacgccttcaaccaggagagagctttgcttcccaaatttc

SEQ ID NO: 624817 - DNA, 100 bp, Homo sapiens
gggaagcagcgtgagcagccggaggatcgcggagtcccaatgaaacgggcagccatggccctccacagcccgcagtgttctaagaacggaagcatctggg

SEQ ID NO: 624818 - DNA, 90 bp, Homo sapiens
ttcatgcagagagatgtgtacatatcccacgtgaggaaggagcacgggaaggtgtcatggagaaactccagctgggcccagagattctgc

SEQ ID NO: 624819 - DNA, 100 bp, Homo sapiens
gcgcacaccggcgagccaagttccgcagcctggcatggcttctggggacctttacgaggtgatgtgtccaatctagatcccaacttctcatttgaaggca

SEQ ID NO: 624820 - DNA, 97 bp, Homo sapiens
agacttcaaaacccattttcttgatttaaggaccatagtacagctatggatactgaaccaaacccgggaacatcttctgtgtcaacaacaaccagca

SEQ ID NO: 624821 - DNA, 50 bp, Homo sapiens
ttcgcctgcagctgctcaccggtgctgagagcagaatgagctactttgtg

SEQ ID NO: 624822 - DNA, 74 bp, Homo sapiens
ttggattctggagagcataagacttcagttttagaggaaaggagcgattggttacatgggaacaagtgcctttg

SEQ ID NO: 624823 - DNA, 74 bp, Homo sapiens
gggacagggctccccgcgccccgcgcagctgagcgctgccgccgccgcagcagctgctctgttaaaagcgaaaa

SEQ ID NO: 624824 - DNA, 75 bp, Homo sapiens
gtttcttctgggtccatcaccaaagagcagatgccaaatctgttaattggccttggtcctcacagctccaaaaag

SEQ ID NO: 624825 - DNA, 100 bp, Homo sapiens
ggacattattgcgcgtggaacggctgcttttggaaggattcctacaggaagcaagtagtaattgatggagaaacctgtctcttggatattctcgacacag

SEQ ID NO: 624826 - DNA, 88 bp, Homo sapiens
gataagtcgaaggggaaggcgcctgaagaggacgaagtgaattttgaagattgcaccggtcgacaaaggacagcctatttttccctcg

SEQ ID NO: 624827 - DNA, 75 bp, Homo sapiens
tgctgatctgtccggcatcagcaaccactcaaatatccaggtgtctgaggcggaccttgccaagtatatctgtga

SEQ ID NO: 624828 - DNA, 100 bp, Homo sapiens
gcatttgcttcccgagtatttcctccagagattgtggagcagatggatgtttactgaactgcaacagatgaggcaacagttaccagacatggaatttggc

SEQ ID NO: 624829 - DNA, 75 bp, Homo sapiens
ctccgggatgctgtactccttgtctttgcaaacaaacaggagttgtaagacgttcatcgccgtgttatccttgag

SEQ ID NO: 624830 - DNA, 133 bp, Homo sapiens
ggaggctcgggtcgttgtggtgcgctgtcttcccgcttgcgtcagggacctgcccgactcagtgctgcgccaacggaggaggctactaccactattcctactcggtggtgaggggctgcgaccgcatcgtgcc

SEQ ID NO: 624831 - DNA, 100 bp, Homo sapiens
ctggtgtttcacaagcaatccagaggtacgctacgaagtctgtgacattcctcagtgttcagaaggaaggtgggagtcaatcattttgacaagtctcctg

SEQ ID NO: 624832 - DNA, 82 bp, Homo sapiens
atgaagttcgagcactaatatttaagaaagaagatgttaactttcaggtgtatgtatggatctatgacccagttcactttaa

SEQ ID NO: 624833 - DNA, 90 bp, Homo sapiens
ctttgaagtgaagattgtcagcaaaggaagagatggctgtcaccactgactaaagaagagaaaactgcggcagagcaattcaaatttcac

SEQ ID NO: 624834 - DNA, 100 bp, Homo sapiens
aatcagcccattgcaggaatgggataccaagtctcccaacaacagagacaggaaatgggtcctgatgaatatgaagagatggaagaagaggaggaggagg

SEQ ID NO: 624835 - DNA, 75 bp, Homo sapiens
aaccacctcaaagacactggttatctgactgcagccatgagcagcaatgagtgcttcaagtgtggacgatctggc

SEQ ID NO: 624836 - DNA, 76 bp, Homo sapiens
atgatgaaagccaagctatgcagacagttggtgtacattcaattgttcagtgccagaacctactaagacctgttca

SEQ ID NO: 624837 - DNA, 82 bp, Homo sapiens
cggcgtgctgcgcctccgcggctgccctgcgccagtttggtgccctggttgtcagatgttggaaagcagtaggacggaacat

SEQ ID NO: 624838 - DNA, 83 bp, Homo sapiens
ggcagtggaaaatgcgctcgggctggaccagcagatgtgaagttcatttccaatccgccctccatggtggcagcggggagcgt

SEQ ID NO: 624839 - DNA, 100 bp, Homo sapiens
atcgggactgggagctgcgagctgctcacggcggttgttagtctggaaaacctcatgctggacaaagatggccacatcaagatcactgactttggcctct

SEQ ID NO: 624840 - DNA, 134 bp, Homo sapiens
gtctgtgaagaaatcccggatctcaagctcgctatggagaattacgttttaattgactatgacaccaaaagggtgagaactctgtctcagtcgacgggaagtgcagtgactccacgctactgagcaacttgtta

SEQ ID NO: 624841 - DNA, 100 bp, Homo sapiens
atcaagaacagaacaggccctatggggcatacctatggctttattgacctcgactcccatgcgggcatcttctctgcattcagtttcatccaagtcattc

SEQ ID NO: 624842 - DNA, 100 bp, Homo sapiens
agatgttgtcaaggtggcctaccaggaggccaggggtgtcgccatgggagagacaaaggcagcgctgccctcgggggagtattggccctggcggaacgca

SEQ ID NO: 624843 - DNA, 83 bp, Homo sapiens
gcctcagttggaagcagccgatccagcctgcggagcctgtggggcagatacgatgaatggattaaagcagataaaatagtaag

SEQ ID NO: 624844 - DNA, 126 bp, Homo sapiens
cggcgtcctcggcgctgaaggggttaattcaacagttcaccaccattaccgcttcttctcagcctgttgataaccatgttagcccatcttccttcttgggccagacaccagcatctccagccagat

SEQ ID NO: 624845 - DNA, 100 bp, Homo sapiens
tgtgttcctggcttccctctggatgctgacagaaacaaggggtggctgttgcaccacgccctccctcctgcccctgaggcccggaagccaggcgaggagc

SEQ ID NO: 624846 - DNA, 75 bp, Homo sapiens
ccgggagctggtacacagcctcagatctcagtggttcaatagcatccccagatgtcaaattaaatcttggtggag

SEQ ID NO: 624847 - DNA, 74 bp, Homo sapiens
gtcgtggcggcgggcgcccagcgcgtgcttctaatcctacgaggacaccatcagccaattactgctatggcttt

SEQ ID NO: 624848 - DNA, 95 bp, Homo sapiens
ccaggatcttataaaacaaatgctgctgctatgaatatgggtcgaccattccaaaaaaatcgatatgaattgagaattcgttatttgccaaaagg

SEQ ID NO: 624849 - DNA, 85 bp, Homo sapiens
cccaaagacgctaaacgtgccctactctgccccgggggagagcaattctgtggtgttcttggtcacacatttatggagtttctga

SEQ ID NO: 624850 - DNA, 75 bp, Homo sapiens
cttcaatcaatcatatttcacaaatgccataagttctgctaacccgagggtcatcgatgacgccagggcgaggaa

SEQ ID NO: 624851 - DNA, 97 bp, Homo sapiens
cttgtagcaatggacaaattacagagccaaagccttggctggacagtcagtacgaatctgtaaaggccccagggctgtgttttcccgcatcttgcta

SEQ ID NO: 624852 - DNA, 83 bp, Homo sapiens
tgcagccgcgaggaggcgcgggaggtgttcgagaacgaccccgagacgctaaaccatttacacagctggtgaaagaaatgcag

SEQ ID NO: 624853 - DNA, 131 bp, Homo sapiens
tcagcagcattgaacagaaagaagaaaacaagggaggagaagacaagctaaaaatgattcgggaatatcggcaaatggggtgagcccctccagactccgaataggagatcaagagtttgattcattgcctg

SEQ ID NO: 624854 - DNA, 75 bp, Homo sapiens
attgcgagggagcgatgcggtgcagcgcgaatgttggctcaattaagaaacatcagggagataaattcaacccag

SEQ ID NO: 624855 - DNA, 100 bp, Homo sapiens
cgggatttcgatctggacctggcctggcggaaatacaggtatcaggatgaagatacacctcctcaagagcatatttccccacaaatcacaaatgaagtga

SEQ ID NO: 624856 - DNA, 74 bp, Homo sapiens
cggccggtccctcgcctcccggccgagctgacggtgcttttgaagatgatgatatcacgcacgttgaaggaagt

SEQ ID NO: 624857 - DNA, 95 bp, Homo sapiens
aaaagaggcgaaaggaagcaagcagttcagaagagccaaggaataaacatgcaatgaacccaaaaggctggtttcaagagacctgtggtcttatt

SEQ ID NO: 624858 - DNA, 100 bp, Homo sapiens
ctgggctcccagcaacgcctgcattttgcacattggtttgcatgactggatttttgaccctcgtgtggacatcgtgcaggccgcttggtcaccctttcag

SEQ ID NO: 624859 - DNA, 75 bp, Homo sapiens
ttccacatcggtcagaaaaagatcttcaatagtggaacagaaatggtggtgccatatgcagccatgtctagaggg

SEQ ID NO: 624860 - DNA, 108 bp, Homo sapiens
tggcgctctccgggctcttctctagctctcagcggctgcgaagtctgtaaacctggtggccaaagtgtgaacatggctacgcctcttcattcccgtccatgccgagcc

SEQ ID NO: 624861 - DNA, 100 bp, Homo sapiens
atgaccaccaccctcgtgtctgccaccatcttcgacttgagcgaagttttatgcaaggagctgtacctgagctgggtggtggaggcccggaggcacatcc

SEQ ID NO: 624862 - DNA, 74 bp, Homo sapiens
cgttgatatcggtggtaacgacggcctcagcaggcggggaagatgaaaggcggacaaggcaaaatctcagcaag

SEQ ID NO: 624863 - DNA, 100 bp, Homo sapiens
ctcgcctcctcgcagcagcgccatgctgtgagccgtgagctttgaggcggtgggatgtgtcagcagaatgtctcctgcccccgagagcgaccccgaggcc

SEQ ID NO: 624864 - DNA, 98 bp, Homo sapiens
cgagactctccttgcttggaattctgcccactctgcggagttagcagtcacgacctccagcacaggtgaatctggattgggaaagtcgacattaatca

SEQ ID NO: 624865 - DNA, 75 bp, Homo sapiens
tctcagggcccctgaacctcccagagccctccgtgattgttggaatgtccagcctgatgagtgaagaggctaagc

SEQ ID NO: 624866 - DNA, 100 bp, Homo sapiens
tctagcagtaagtcctccaatgtcattgtcctgctattagcacagataatgagacagggaactacacagtgacgggattgaaacaaagacaacaccttga

SEQ ID NO: 624867 - DNA, 100 bp, Homo sapiens
gcggacggtcgcgcggcggcaggcacagatctgagtgggacatacttttgaaggatgtgcaatgttcaatcataagtgtgacaaaaactgacaagcagga

SEQ ID NO: 624868 - DNA, 82 bp, Homo sapiens
ggatcctgatttgaaaaaaagatattttgatgaaaatgctgctgagcagttgcgattcttgcagcatcaaatggctatggca

SEQ ID NO: 624869 - DNA, 101 bp, Homo sapiens
caggagttcgtctcttacgtctgcggaagtgcagctgcctcagttcttagcgcagggtaaactagcgctcctttccgtaaccacgggaggcacggccgaga

SEQ ID NO: 624870 - DNA, 75 bp, Homo sapiens
gcccttgaaatgaagctggacttggaggtgacttcaggtggaacattcattggcattggacggaaaacaccagat

SEQ ID NO: 624871 - DNA, 75 bp, Homo sapiens
gcggcgccagccactcggagctaatccacaatctccgcagaaaaccaattctgtgtcctcggaggaccacagccc

SEQ ID NO: 624872 - DNA, 101 bp, Homo sapiens
acacagcggggcaggagcgcttccgcaccatcacctccacacgcaaacatgcagatctttgtgaagaccctcactggcaaaaccatcacccttgaggtcga

SEQ ID NO: 624873 - DNA, 75 bp, Homo sapiens
ggaacagtctttggcagccttatcattggttatgccagggagaatgaagttgaagaggtaaaagaggagggtcca

SEQ ID NO: 624874 - DNA, 75 bp, Homo sapiens
gaagatggcggctgctgtaggacggttgctccgagcgtcgccccttcatgaataagttttttccagccagctttc

SEQ ID NO: 624875 - DNA, 82 bp, Homo sapiens
caggaatatcgagagcgtcatgaacccgagctatagagaaaggagatgagcaattctgtggtgttcttggtcacacatttat

SEQ ID NO: 624876 - DNA, 74 bp, Homo sapiens
gggttagcggagcaatgcgcaggaataaggaagcgacctgcaaccgacggtcgctttgctgttcgtgatatgag

SEQ ID NO: 624877 - DNA, 75 bp, Homo sapiens
cccagctgctcctggtgcagtggaagcagaggcacccacgctcctacaattctgtggctccagcagccttgtttc

SEQ ID NO: 624878 - DNA, 100 bp, Homo sapiens
tggattatgaaaaccctttaaagaagatgatggaagaatttgtaccccatagcaagactgtggatattcataaggagaaagtggcacgaagagagattgg

SEQ ID NO: 624879 - DNA, 96 bp, Homo sapiens
ctttgctcttccatccgcctttgatcgtcttcctcttcagccatccaggtcataatgattacggttatcagcaaccgtcgtatcctgaacaaggct

SEQ ID NO: 624880 - DNA, 142 bp, Homo sapiens
gtggacaagatctcaatgaaggaaaccgcactctcacactggccttgatttggcagctaatgagaaggttatgaagacagtatggagtttccagaccatagtagacatttgctacagtgtctgagcgagcagagacaccagg

SEQ ID NO: 624881 - DNA, 82 bp, Homo sapiens
gctgcgccgcaacgccgagcgcaccgacatctgcctgctcaaagtaaaatgtttattggaggcttgagctgggatacaagca

SEQ ID NO: 624882 - DNA, 100 bp, Homo sapiens
aggaagatgacgaatcagagggctcccagccactgaggcggctcccagctgcgttggcgacatggccgacacccccagagatgccgggctcaagcaggcg

SEQ ID NO: 624883 - DNA, 71 bp, Homo sapiens
gtgactacccctaacgcacaataatatggctccgatgggctcaaagggggctgttgtggttccgactataa

SEQ ID NO: 624884 - DNA, 83 bp, Homo sapiens
tgtcaaactaccaaatgggcgagacacacctgcactcttcaacttcaccactcaagatgacttcaaacctgcttctattgaca

SEQ ID NO: 624885 - DNA, 141 bp, Homo sapiens
ctggaaatcgacttcggtttcagttggagttggaatttgtgcaatgtttagccaacccaaattaccttaatttgtactaatggtcacttgatgtgcgctggctgttttatccacctactagcagatgcccggctgaaggag

SEQ ID NO: 624886 - DNA, 100 bp, Homo sapiens
aaacacgatgaaaacagaaccgacttctccccttgtggaattacaagagatttcgactgtggaaggagaccctgccctggttcaccaaaggccagcgcca

SEQ ID NO: 624887 - DNA, 82 bp, Homo sapiens
cctgggccatgttcctgactacctggacaagctcaccagtgccagcaaggagtccctgagcacccacaccagccccagccag

SEQ ID NO: 624888 - DNA, 100 bp, Homo sapiens
gacgcacctctgtttgggggtcctcaggtagcattcttttcaagtggatgaccatggaatcagagaagatctcagagaagcaggaggaaattctttctat

SEQ ID NO: 624889 - DNA, 75 bp, Homo sapiens
gacaagtccgggagctgggcggccatttaccaggccacaccatgaggccccagccccaccagaggccccgcgctg

SEQ ID NO: 624890 - DNA, 120 bp, Homo sapiens
cgccagttactgcacggaaagcagcgtcaggagccatagtacctacagcagcactccagtggaaattgcaacactaacaagagagaatggaaagacagtaatcagagttctcaaacaaaa

SEQ ID NO: 624891 - DNA, 83 bp, Homo sapiens
ccatggcagacttggacgctctgtctcccatacacacaccacagcggccgaaaatgagagcacacctattcagcaactcctgg

SEQ ID NO: 624892 - DNA, 100 bp, Homo sapiens
gtcccagtcccagcagaggtaccagccgcagcagccctctgattctgttcacattacaaatgatgatgaaagatttctacatcatcttatcatagaggag

SEQ ID NO: 624893 - DNA, 75 bp, Homo sapiens
cgcgcagcgcggggagctgccagccggtggacaaccagcaagccatggtgcgcagggagtctgtggtcaatctgg

SEQ ID NO: 624894 - DNA, 100 bp, Homo sapiens
gttttgaaaaaccaggacgaaaagatgtagaaataaactatcaatcttgcccagactggagaaaggactgcagcaacaaccctgtttcagtattctggaa

SEQ ID NO: 624895 - DNA, 75 bp, Homo sapiens
cttgtcttgtgccagaaggatttcttctcccagagagcagtgggttgccagcgttgatgtggtggagaatgaaga

SEQ ID NO: 624896 - DNA, 80 bp, Homo sapiens
atcgagagcgtcatgaacccgagctatagagaaaggagatgagatcaggatcctcatgaccagccaaagagaagaagaat

SEQ ID NO: 624897 - DNA, 98 bp, Homo sapiens
caggtccaaccacgctggtataccctcaaacccctcagacaatgaattcacaacctcaaacccgttctccgaaccagacataagttcagaggaatctg

SEQ ID NO: 624898 - DNA, 100 bp, Homo sapiens
ccgcgagcaaggagcgcggaatcggggagcgtccggagctagctggatcctctaggcagggaacgggtcacgcatgtggatgatcaaaggtcagctcctg

SEQ ID NO: 624899 - DNA, 75 bp, Homo sapiens
ggagaactgtgcccattacttctgcctggactgcattgtcgaatggtccaagtacggcaagaagaagctgaaata

SEQ ID NO: 624900 - DNA, 84 bp, Homo sapiens
gaagagattcagccagcacactcctcgcgagcaagggtggcccagttgaaatccttcccttcctctaccttggaagtgcctacc

SEQ ID NO: 624901 - DNA, 75 bp, Homo sapiens
gattcgcagtggtcgcttcttctccttgggccgacgagattgaaatgatcatgacggaccttgaaagggcaaacc

SEQ ID NO: 624902 - DNA, 100 bp, Homo sapiens
tgttcagcagaaataatcaagagttgacatcataccaggtgctgacagctgcagaagaaattgtacatggtgctgtacagaaggtatttctccactgtgc

SEQ ID NO: 624903 - DNA, 100 bp, Homo sapiens
ctcagtgtccatgatgaggaccgagatggccctgaaagcagcagatctcacctgcattggaggatgagacgccacatgaagaagaaagaagacgccacag

SEQ ID NO: 624904 - DNA, 104 bp, Homo sapiens
gttcttctggctctaagatctgaatgttgtgaccactaatttggaattacatgaatgacagtcttcgaaccaatgtgtttgttcgatttcaaccagagactata

SEQ ID NO: 624905 - DNA, 74 bp, Homo sapiens
ctttaatccagctactctacctctaacacagtacctgttaacaacgactttgcaagaggataatccaagtggag

SEQ ID NO: 624906 - DNA, 83 bp, Homo sapiens
tagacagagccgggcctagcccagagacatggagagttgctacaacccagctcagaggaataacgaggacatttccatcatcc

SEQ ID NO: 624907 - DNA, 100 bp, Homo sapiens
cagagtgtctggatggaacctgagctgggtctctgactcacttctgactttagacagaagcattaaaatgcgtggctcaggctagcaagaacagatcact

SEQ ID NO: 624908 - DNA, 74 bp, Homo sapiens
cagtgagcagtacgtgcctgatgtgttttataagggtgaaaatgggatggaggattgtgtcatggccctagaaa

SEQ ID NO: 624909 - DNA, 124 bp, Homo sapiens
gcagacttacgcactgtggatccagagacacaggcacgactagaagcattgctagaagcagcagtttggtcagatgatgactggttgaagaagttttctgggaagacgcttgaagagaataaag

SEQ ID NO: 624910 - DNA, 90 bp, Homo sapiens
agaatgactccgattcgtgaccctcagcgccggtgcatgtcgatcagatgggatcagagcggatggagatgcggaagcggcagatgcccg

SEQ ID NO: 624911 - DNA, 100 bp, Homo sapiens
gtcagggatggcccttactcaggattcagtgccaagagatcttccttcttggatgaaattcctccatggcaaactgggaaatccaatagtaccattaaat

SEQ ID NO: 624912 - DNA, 75 bp, Homo sapiens
ccatgggcttctcccgggaccaggccttgaaagcgctgcgggccacggttacagttcctctgagtcatctcatca

SEQ ID NO: 624913 - DNA, 101 bp, Homo sapiens
ggcggcggtggcagccatgttgtttgaataaccctataccttccaatttgaaatcagaagcaaaaaaggctgccaaaatattaagagaattcacagaaata

SEQ ID NO: 624914 - DNA, 100 bp, Homo sapiens
aaagcctaaatgtagcatatatcctaaaggagatggaagtgatgtaccatcatgggtagcctttgataaacaggaaactaaatatattttgccaactttg

SEQ ID NO: 624915 - DNA, 88 bp, Homo sapiens
cacagcatgcacttccttccagcagctacacagcgacgagtagaacagcccctctatggtttagatggcagtgctgcaaaggaggcaa

SEQ ID NO: 624916 - DNA, 83 bp, Homo sapiens
tgcaatgtcacttacaacattaatcagatactgcatttaaggtggaagaagagcccgaagaagaacctgaagagacagcagaa

SEQ ID NO: 624917 - DNA, 75 bp, Homo sapiens
acggcgacgcagcccgcggcagaaggtgattgatatgcccgagcacaaccctggcaatttgggaggaacaatgag

SEQ ID NO: 624918 - DNA, 50 bp, Homo sapiens
ccctactctgccccgggggagaggatgacagtgatgggattccgtggtca

SEQ ID NO: 624919 - DNA, 100 bp, Homo sapiens
ctctcccgcgggcaccgaggactccgctcctgcccaggcatgaatgctttacagttgcagaacctggcgacgctggctgctgctgcagctgcggcccaga

SEQ ID NO: 624920 - DNA, 90 bp, Homo sapiens
cgcggcgctggccgagagccgcggctccgtgtttctggaaagtgacagcagctatgtgatgatgatgccatttaaacgacaggctctagt

SEQ ID NO: 624921 - DNA, 100 bp, Homo sapiens
tccaaagcagtatctggagccagtgcaggttatggaggttttgatgactatggtggctataataattacggctatgggaatgatggctttgatgacagaa

SEQ ID NO: 624922 - DNA, 72 bp, Homo sapiens
gagctggacccggaccggttttggggggcttcgccaccttctcctcctgcttccccggcctctgcgagggca

SEQ ID NO: 624923 - DNA, 90 bp, Homo sapiens
cgaaggtgtgaaggggaagaagctgaccttcgagtacagagtctccgagattctggatgaaattgaagaacataacatcaaaatctatca

SEQ ID NO: 624924 - DNA, 100 bp, Homo sapiens
ggatgtgctcgactgtcgcttcctctccaaggatcagatgataaaccactacgcccgggctggctcctttaccacaaagcatcactgcaggaaatgcggg

SEQ ID NO: 624925 - DNA, 83 bp, Homo sapiens
ctccggcgtgttcatgcccccggggtttacccaaggtccagcctagcccctaggcaccatgtcggacagtgatctaggtgagg

SEQ ID NO: 624926 - DNA, 100 bp, Homo sapiens
tccagagaggaacttcgtccttccagaagagatcattcaggaggtccgagaagacacagaccagaccctgaagaaggaggggctgatctctcaggatggc

SEQ ID NO: 624927 - DNA, 98 bp, Homo sapiens
taagactgattttatgggaaaattaagcagatgctccagtttgagaaacctggatctgcgatctgtttgtgggggattttggcaattgcttggagcat

SEQ ID NO: 624928 - DNA, 73 bp, Homo sapiens
ccgagctccagccgaaggagaagggggttgcagcatttgcaagaagaagcagaatagacacttcattgttcca

SEQ ID NO: 624929 - DNA, 100 bp, Homo sapiens
agcaacctgcccatggtgcagctgtgggccgcccacgcccatgaagaaaactacccctgagtgtggtcccacaggatatgtagagaaaatcacatgcagc

SEQ ID NO: 624930 - DNA, 97 bp, Homo sapiens
gcccgacgagcaggacttcatccaggcctacgaggaggtgcgcgagaagtacaaagctcagtgtggaggctgctggccctgccatctgtaagaagat

SEQ ID NO: 624931 - DNA, 100 bp, Homo sapiens
cgcttacctgcgacagcgggtagcacaggcctttcgggagggagagaatacccaggaacctacaagcagcaattggcgcctattatgactttgagagccc

SEQ ID NO: 624932 - DNA, 82 bp, Homo sapiens
tgcagggaattgtgccggaggttctgaagaagatcgtaacaacttatgacatgcaatggctgccatccggaagaaactggtg

SEQ ID NO: 624933 - DNA, 90 bp, Homo sapiens
gttgtggattttcaaataggaaaatcaaaaggcccaaagagacagctcactggtgtacgaagccatcgacagcagagatggagcatcttg

SEQ ID NO: 624934 - DNA, 90 bp, Homo sapiens
gatcaaatggcacttcattggccacctacagaaacaaaatgtcaacaaattgatggtgagatggaagattttcgaggtatagcagaagaa

SEQ ID NO: 624935 - DNA, 99 bp, Homo sapiens
acgctgagccagcatactcatggatgatcacggacgtgcagctcgccatcttcgccaacatgctgggcgtgtcgctcttcttgcttgtcgttctctatc

SEQ ID NO: 624936 - DNA, 101 bp, Homo sapiens
ccctctcgaaggcaggacagcggtggcggcagggctgcgaataaaggagaccaaggaagtttatgaaggtgaagtcacagagctaactccgtgtgagacag

SEQ ID NO: 624937 - DNA, 76 bp, Homo sapiens
tggacagcagaacaatttcttcatcagcagctaaacagattttcagctgaactctcatctctcaacactggcaaat

SEQ ID NO: 624938 - DNA, 75 bp, Homo sapiens
acacgcataatggatgaaaggaaccgacagagagatcaaccagctttcactcctagtggaatattaactcctcat

SEQ ID NO: 624939 - DNA, 74 bp, Homo sapiens
gaagagcactggacttggagtcagaacctgacttccatgcggttgaaccctacacgaagaaagaactttctgct

SEQ ID NO: 624940 - DNA, 117 bp, Homo sapiens
gaaaattttctagttttggggagacaattacaaacatgttttatcaatgcagctaagttgaaatggatgcagtcagaactgaatgttgaagaagtggtaaatgacaggagctggaag

SEQ ID NO: 624941 - DNA, 82 bp, Homo sapiens
cctgtacagcctgcagaacttgctctgtgttgatgccttcagatgcctccagcccagtccctgttgtggtgctgcaaggctg

SEQ ID NO: 624942 - DNA, 101 bp, Homo sapiens
tacaactgcctccaccagaggaaaatagtatgggaattcctattatgcaaatgaagctcgtgaccgagaacctgaaggaggaaccaatggaaagcgggaag

SEQ ID NO: 624943 - DNA, 82 bp, Homo sapiens
tgtcacactaattgccaacaacaatgccagtgctggtttcgggggtacataaaaagctcaagtctgagctctggaagccaga

SEQ ID NO: 624944 - DNA, 50 bp, Homo sapiens
gcgtgtcctccgtgggagcccgagatttctatattcagatgaagttcaaa

SEQ ID NO: 624945 - DNA, 90 bp, Homo sapiens
gaggccacagacacttctgatagtgaaggctgccaaacgagggattctttcatctggtcggggcagaggaattcattcaagaggtcgagg

SEQ ID NO: 624946 - DNA, 100 bp, Homo sapiens
actaaaaagaaaccaaaccctaacacttccaaagttgtcaaattggaaaagaatcttcagatcccacttccagccgggcccctcatgtatccactggccg

SEQ ID NO: 624947 - DNA, 97 bp, Homo sapiens
tctggcactggcacttgtcctcctgtttctatagaaactgggttggaagtcagagctgcacaaagggaaagggcaactgcgatgtctgtggactgtc

SEQ ID NO: 624948 - DNA, 100 bp, Homo sapiens
ctggctgctgcggaccccgccgagtcctagcgcctggcctgcgcgccgctgcccgcgccacagggtcatcgagcagctcggtgggaagcagctggtcatg

SEQ ID NO: 624949 - DNA, 101 bp, Homo sapiens
ccaattaggtcacttcaacctcttgttggaagattattcaaaagacatgccaccactgctctttgaggtgtcatccctggagaatgcttttcagattggag

SEQ ID NO: 624950 - DNA, 90 bp, Homo sapiens
gccaagtggcagatttgttattggtgggcctcagatggactctgtgactacatgactaataaaatatggcagaaatgacaccatgcagtt

SEQ ID NO: 624951 - DNA, 76 bp, Homo sapiens
ggactctgcacactcttcggcctgacgcccaccctcaatggcggctgccagccttgccctggctctgaatggcgtc

SEQ ID NO: 624952 - DNA, 75 bp, Homo sapiens
aattaatggaaatggacccaccaaggtacgccgtcatgaaatacacaaatcgaagaatagagcattagtacactg

SEQ ID NO: 624953 - DNA, 89 bp, Homo sapiens
ctgtaccagagattccagggtcaacaaaaggagtttctgggaggaggaatgttttgggaacaactcgatttgctcacttgaagaaatcc

SEQ ID NO: 624954 - DNA, 75 bp, Homo sapiens
attgtatttaaccaactccaaacagttacattacttcgttcagaaccatttcacaagtgcaagaatggctttgat

SEQ ID NO: 624955 - DNA, 100 bp, Homo sapiens
agccaggaccaagagacaggcagctcaccagggtggacaaatcgccagagatgtgggaaatgtttcaacgtgcgcaagcgttgcggcggcgggcagagga

SEQ ID NO: 624956 - DNA, 99 bp, Homo sapiens
gagaaatcgcccactttctgatgaggaattagatgctatgttcccagaaggatataaggagaatgtgatccgagaatttaacttaaatgagctatacca

SEQ ID NO: 624957 - DNA, 75 bp, Homo sapiens
gccctggtggggattgacagccacgggaaggatgatcggctgaatgtaacagaggaactaacgtccaacgacaag

SEQ ID NO: 624958 - DNA, 100 bp, Homo sapiens
gagctttgtgcaaaaggggagctggctacttctcgctctgcttcatcccactattattttggcacaacaggaagtcaggatggctaaaggtgaccccaag

SEQ ID NO: 624959 - DNA, 89 bp, Homo sapiens
gttttcttatgcttataagagtggaacaggtccctgtgcgttttattgcgacctgccggtgggaactttgtctccgagtcggagcagca

SEQ ID NO: 624960 - DNA, 75 bp, Homo sapiens
atgcagtgtggctctggatagcaccttatggacagccaaaatgaagtttaatccctttgtgacttccgaccgaag

SEQ ID NO: 624961 - DNA, 87 bp, Homo sapiens
tttccagcccgtggtccttctccatattcgagaaggagggccccaccctcagtgtgcccatggttcagggtgaatgcctcctcaagt

SEQ ID NO: 624962 - DNA, 75 bp, Homo sapiens
ctgggatccagcgagcgacatgaagcggcagaagctagagccatcccaagttgggctggagcggcagctggagga

SEQ ID NO: 624963 - DNA, 82 bp, Homo sapiens
aattcctgaagacaatttcttcttccaaaatcctcggattctctacttctgctgctgggatcactatggaagcaactatgca

SEQ ID NO: 624964 - DNA, 83 bp, Homo sapiens
aggggcctccagggtctgcagacaaggcagggaattcagaaattggtattagcaggaagaatgggagaagccattgaaacaac

SEQ ID NO: 624965 - DNA, 101 bp, Homo sapiens
gccgccgcgggacgcgcccgccgctcctggcgctgctggccgcgctgctgctggccgcacgcggggctgctgcccaagctcctctggtgcaagtgtggtag

SEQ ID NO: 624966 - DNA, 89 bp, Homo sapiens
agattttttagtctaaatgatgggcagtcatggtcccagaaacgtcactatcaagaagttgcatttgctggtctggcctttgcgtcctt

SEQ ID NO: 624967 - DNA, 105 bp, Homo sapiens
ccccgacagcgccatggcccagattctgccaattcgttttcaggagcatctccagggtcagttaaatgaaagcatggaccatgggggagttggaccatatgaact

SEQ ID NO: 624968 - DNA, 82 bp, Homo sapiens
agagaggagaacgaacatcttctggacctttgtccagggctgccaggcgcccagctgtgcccagatggatgggacagagacc

SEQ ID NO: 624969 - DNA, 87 bp, Homo sapiens
ggaatctggattgtcacctttgctgcaaaaaattacgggtgaagatggttctggtaaaacaaccctcatgactaaactacaaggagc

SEQ ID NO: 624970 - DNA, 100 bp, Homo sapiens
cgaagcctaaattccaggaggatcctgcaaaagttccaggtgcccacactggaaacttggagatcctgcttcccagaccacagctgtggggaacttgggg

SEQ ID NO: 624971 - DNA, 76 bp, Homo sapiens
catggtactcagtaatctagctgcagttttgatgcacagaggttcttcacacacccccattcggcgtagtacccag

SEQ ID NO: 624972 - DNA, 100 bp, Homo sapiens
ttgcccacctggctccgccaccctgctcaccttgggatgtgtagataggattttttatcaagcagaaatgcatcgaacaacgagaatcaagatcactgag

SEQ ID NO: 624973 - DNA, 90 bp, Homo sapiens
gactctcagaataaaggaaagacctcagagtgttctcactccctgtgctgtcaggaatctacaggacttggctcgtatttacattcgacg

SEQ ID NO: 624974 - DNA, 74 bp, Homo sapiens
gcaccagatgtaccggaccctgttcttcagatatctcccggggccaattcagcatctctacctggccatcctaa

SEQ ID NO: 624975 - DNA, 100 bp, Homo sapiens
cgaagacgcggtgggccgcccctccggaaggaatcgtgtctcctagtgacctggaccttgtcatgtcagaagggttgggcatgcggtatgcattcattgg

SEQ ID NO: 624976 - DNA, 75 bp, Homo sapiens
tggatttctttttgagaaggataacattgccagcatgctacaagtgaaaactgatgagaaactgaatgtgtctga

SEQ ID NO: 624977 - DNA, 74 bp, Homo sapiens
tcagattgaagctgaaaaggctgaattacgccctactgccaataaagggaaaataagagatgctcatcgacgaa

SEQ ID NO: 624978 - DNA, 100 bp, Homo sapiens
cagatcaggacaatgaaatccgagccactgacctgcctgagaggttccaggtgatcgaggagttctacaaccagacatgggtccaccgctatggggagag

SEQ ID NO: 624979 - DNA, 139 bp, Homo sapiens
ctgcacggtgaacctggaccaggaggaggttttcaggaccaaaattgtggaaaagtcactctggtaagtaaggaggtctctgtaccatggctcgtacaaagcagactgcccgcaaatcgaccggtggtaaagcacccag

SEQ ID NO: 624980 - DNA, 82 bp, Homo sapiens
ccggccgcgcccaagcgcaggggctcctcgggctcagtggcagcagccgctcttctaaaacattcaaaccaaagaagaatat

SEQ ID NO: 624981 - DNA, 75 bp, Homo sapiens
caaccttcgatctcctgacgagtggaatgaatcttacttgttgaatatcttctggttactagttggattcatttg

SEQ ID NO: 624982 - DNA, 100 bp, Homo sapiens
tacccacccaacgaaggcttctgcccgtgcctggagtctggaattcagaacgtcagcacctgcaggttcagtggctattatcatggaaaactaatttttc

SEQ ID NO: 624983 - DNA, 101 bp, Homo sapiens
tgtaggaactccatcaaggggacctctccagagatatggacactctcttgctttatatcagtatctccagatgaaatggccactgcttgatgtccaggcag

SEQ ID NO: 624984 - DNA, 95 bp, Homo sapiens
cgcaggctgtaggggcagcagcgcaggaaatgacatcttcctggtggctgtgcacgagctgggccatgccctggggctcgagcattccagtgacc

SEQ ID NO: 624985 - DNA, 73 bp, Homo sapiens
ctcactgttcaggccctgtctggtgctgaagggcctgaccatcactcattaagaacagaggaggctgcctgtt

SEQ ID NO: 624986 - DNA, 50 bp, Homo sapiens
gcccaaggaagtggtccagttggatgttcagcccacaagagcttactggt

SEQ ID NO: 624987 - DNA, 100 bp, Homo sapiens
ggtcggactcccggggccatggccggaatgcagtaccctcagcagcagctgcattgttgtggaattcacaactactcagactgggaaaatacagattggt

SEQ ID NO: 624988 - DNA, 99 bp, Homo sapiens
ccctgacgtttcccgatcctaccactttggcatcgtcggcctcaacatgaatggctactttcacaactttccatgactggatcacagggaaaaaccgac

SEQ ID NO: 624989 - DNA, 113 bp, Homo sapiens
tggcattgtgtctggaatgctcaatgtcaaatgggaccggattgccccctatacacagaatgggattttacatatgctggacagaaataagagaatcaagccccggccagaaa

SEQ ID NO: 624990 - DNA, 100 bp, Homo sapiens
aattaaaggaggaggtgacacggctgaaggaccttcttcgtgctcagggcctgggagatattattgatagtcacggtctagatcacattctcgatccaga

SEQ ID NO: 624991 - DNA, 100 bp, Homo sapiens
ctagtacaaatggtgcttctccagtgatggataaaccaccaggttggatggcaagcatgtggtgtttggcaaagtgaaagaaggcatgaatattgtggag

SEQ ID NO: 624992 - DNA, 100 bp, Homo sapiens
tccaaggcggagatccgctacgagggcatcctctacaccatcgacaccgaaaactccaccgtagcccttgccaaaggtctcctctgagcctccggcctcc

SEQ ID NO: 624993 - DNA, 51 bp, Homo sapiens
gaacaacttcatcaagaaatatctcaggaagagagaagggcacagttacct

SEQ ID NO: 624994 - DNA, 90 bp, Homo sapiens
ggtttctatgcccctctatgcagtcatgtatcctgtgtttaatgaggtatggcatttcaaatatagatacaaccattgaaggaacgtcag

SEQ ID NO: 624995 - DNA, 88 bp, Homo sapiens
gtgctgaagtggatggagagaagtcatggaactgaaaaagcactgactgctctgcttaaagtacaggggctcaggtccaggtggcagg

SEQ ID NO: 624996 - DNA, 100 bp, Homo sapiens
agcaacatccccaaacagcggcgtttcacggtggcacatacatggtctgggaagaaaggcgtaaggatggtgaagctgaacagtaaccccagcgagaagg

SEQ ID NO: 624997 - DNA, 75 bp, Homo sapiens
ctgtgaggagttcgccgagttccagttgatattcactgatggactccaaagaatcattaactcctggtagagaag

SEQ ID NO: 624998 - DNA, 100 bp, Homo sapiens
tgaagtgggtagaagaaaatattccctcttcattcacagatgtgcatttgggcagtccttctccatccaccggaaggttgctgaagatggagagactcgg

SEQ ID NO: 624999 - DNA, 133 bp, Homo sapiens
caggaagtggagctacagatagtaaagatgatgatgacattgacctctttggatctgatgatgaggaggaaagagcatctacggtgagcgcttccccgatgagaacttcaaactgaagcactacgggcctggc

SEQ ID NO: 625000 - DNA, 51 bp, Homo sapiens
agtaattgcctgctttgattccctaaagaacctaaaggcagacccagaaga

SEQ ID NO: 625001 - DNA, 101 bp, Homo sapiens
ttgattcatcatggataatctgtcatcagaagaaattcaacagagagctcaccagattactgatgaggaggaaacaccaattggaagcctccgctcaactg

SEQ ID NO: 625002 - DNA, 100 bp, Homo sapiens
tccaatgtcattgtcctgctattagcacagataatggtgagtgtcctcacagaccaagtagaagcccagggagaaaagattcgagacctggaagtgtgtc

SEQ ID NO: 625003 - DNA, 74 bp, Homo sapiens
gaaggggaaaggtggtacacaagttgatacagaaattgaagcggagtttaagagagctgtgaaagtagcaacag

SEQ ID NO: 625004 - DNA, 82 bp, Homo sapiens
aacttagaatgcagcttcagcagaggctgcagggccagcagtcgagcaaaagatgtgataataccagcaaagccacctgtca

SEQ ID NO: 625005 - DNA, 50 bp, Homo sapiens
ttcaggtttacgcacgagcccctgtgaaatgtcctcctcgcactttctta

SEQ ID NO: 625006 - DNA, 50 bp, Homo sapiens
ctccattatgtcgtgtgcttccccgattttaccaaatgttgcaagaactc

SEQ ID NO: 625007 - DNA, 50 bp, Homo sapiens
cgatctaaggatgaccctggaaaggtcttgaagctttcacaagaatttgc

SEQ ID NO: 625008 - DNA, 99 bp, Homo sapiens
aggagggcttcacggaggagggcgccagctacttcatcgagttatgagtgccagtgagccgccttagatagaagcatcgtcagcactttattaatgatg

SEQ ID NO: 625009 - DNA, 77 bp, Homo sapiens
tacaaccttggagcccagagccacgtcaaagttgttggaagaggagcctttggagttgtttgcaaagctaagtggag

SEQ ID NO: 625010 - DNA, 82 bp, Homo sapiens
aaaaaatggaagaatttgtttgtaagctcattgctatggacagtgctatcaccctgtggcagttccttcttcagctcctgca

SEQ ID NO: 625011 - DNA, 100 bp, Homo sapiens
gcctgccccgcggccaacatgagcttcttgttcacacagatccaggtagtctctgctagtaatgagccccttgcctttgcttcctgtggcacagagggat

SEQ ID NO: 625012 - DNA, 76 bp, Homo sapiens
agcgcttttgggagagctacatctacaatggcaaaggagattcccaggactccggctctctctgcttctgtttccg

SEQ ID NO: 625013 - DNA, 75 bp, Homo sapiens
cccgggctgggctttcctcacccggctataaggaagaccagatggatgagaaactaatggaacctctgaaatatg

SEQ ID NO: 625014 - DNA, 100 bp, Homo sapiens
aatacctccgcgagaagctgcagcgggacctggaggcggagcatgtggtggtggaggaacgatgtgtttactgtgtgaactctgacaacagtggctggac

SEQ ID NO: 625015 - DNA, 90 bp, Homo sapiens
cgcacgcggcgatatggaagaggagggcaagaagggcaagaagaaagatgtagcacttaagcctcaggaacgtgtggagaaacgccagac

SEQ ID NO: 625016 - DNA, 51 bp, Homo sapiens
gccccgccgaggcttgacccctgcggttggatttctcacgatgtccagtgt

SEQ ID NO: 625017 - DNA, 100 bp, Homo sapiens
gccgagcaagtgagtagtcacatcacctccagccctctgcattcacgtagcattgctgcggtccccagtctatgtgaggatctcctgtcttctgttgacc

SEQ ID NO: 625018 - DNA, 83 bp, Homo sapiens
cggatgttcatgggcagcaccatcgagccagaagcagtatttgtcctgatgcagcagcttttttatgagaattacgagcagaa

SEQ ID NO: 625019 - DNA, 83 bp, Homo sapiens
cagagattgaactcagctatgcaaagcaactcagattctcgcttacaaggatgacttcatgtcagaaagggccgatcgggaac

SEQ ID NO: 625020 - DNA, 75 bp, Homo sapiens
caagacaagccagcagctcgctcagtacaagaggcagagatcctacaagaatccaggatgatgatcccagattgc

SEQ ID NO: 625021 - DNA, 75 bp, Homo sapiens
gaagagggaagacacgcggaaacaggtttactcctggcttgggggcattaggaagcactggaggctcttcgggaa

SEQ ID NO: 625022 - DNA, 75 bp, Homo sapiens
gccgcactggcgaactgggctaccttaaccctggggcattggttcctgtcaccattgaagtagaggtgccctttg

SEQ ID NO: 625023 - DNA, 99 bp, Homo sapiens
gcgagcgatcgagcgagcgcgcgcgcgaaaactccgggcagccacaatggtgcgcatgaatgtcctggcagatgctctcaagagtatcaacaatgccga

SEQ ID NO: 625024 - DNA, 100 bp, Homo sapiens
tgatgaaagctatactccaagcaagatctcagtcagagtaggaaataattttcacaaccttcaagaaattcggatgatgacttttttcatgaactcccag

SEQ ID NO: 625025 - DNA, 98 bp, Homo sapiens
cagcagcagccaggtgtggcagtgacagggaggtaacacgtacacagacctctcggccggaatctccagggatgaccagcccctccccacgcatccag

SEQ ID NO: 625026 - DNA, 75 bp, Homo sapiens
attttttttcaagaactgccgtcttctttgcctgcactaatggtggaaattgaaaccaatcagttacaagatggc

SEQ ID NO: 625027 - DNA, 95 bp, Homo sapiens
cactacaagggtcctgaagtcagttgttgcatcaaatacttcatatttggcttcaatgtcatattttggaaaaattggaagctccaccacccacc

SEQ ID NO: 625028 - DNA, 130 bp, Homo sapiens
atctgtgggcagaaaaatacaaagttggaagcaataccaaacagtggcatggaccacacccagcggaatccccaaagctccagagatagatccagtagagtgtttggtggcagataactctgtaacagtg

SEQ ID NO: 625029 - DNA, 88 bp, Homo sapiens
gagttggctgcagatttgtggtgcgttctgagccgtctgtcctgcgccaagctatcatggtgaacttacttcagattgtgcgggacca

SEQ ID NO: 625030 - DNA, 88 bp, Homo sapiens
ccttcgctcgtggatcgatacttcactcgctggtacaaaccgggtaaatgaaactattctaagacccttaaatgtagaaccgccttta

SEQ ID NO: 625031 - DNA, 75 bp, Homo sapiens
tgaggccgggggcggagtgtgctcacggctcctgctgccaccagtgtaagggtcctcgaagacaagccatgaaag

SEQ ID NO: 625032 - DNA, 99 bp, Homo sapiens
caggccccacgagtgggaggtgctgagccgctcaggtagatatagttgtaggtactccgggaagactagatgacttggtgtcaactggaaagctgaact

SEQ ID NO: 625033 - DNA, 83 bp, Homo sapiens
ccacgccggtcagccccatcgagggaaatcctcattgacgattcaatttgttgaaggccaatttgtggactcctacgatccaa

SEQ ID NO: 625034 - DNA, 76 bp, Homo sapiens
ccctgaagagaaactgcaccttatcacccggaacctgcaggtttttcgttggaatatacgttgcacatttatggcg

SEQ ID NO: 625035 - DNA, 88 bp, Homo sapiens
cctacatccccctgaaccatatggacccaaatcagaaggggtttctagagctgcaagctttcttcctggtggcagatgacatcatgga

SEQ ID NO: 625036 - DNA, 101 bp, Homo sapiens
gtggatttactcccttgatggaagcagctgctgctggccatgagataatcgtgcagtattttctgaatcacctgctgaatgccatggtggcaaaactgggg

SEQ ID NO: 625037 - DNA, 82 bp, Homo sapiens
gggcccagatccctgggacaccgagattctgagaggcatcagtcaagaatccgtctcttgctcaagtgaaaattgaagaagc

SEQ ID NO: 625038 - DNA, 75 bp, Homo sapiens
gcaccttcaggattgagacccggaaggcttcaaaggctgtcgcaaggaggaagctcagcattgccaagaaacatg

SEQ ID NO: 625039 - DNA, 50 bp, Homo sapiens
ggaaactccagcgtgtctccagccgtgacccctttgctgatgcaactaag

SEQ ID NO: 625040 - DNA, 100 bp, Homo sapiens
tctatttctgctccgtcatccatgccactccatttcgtagagtgacgttttctgttgtgagtcagcctcaggacccacatcaggggtcactgcagagttg

SEQ ID NO: 625041 - DNA, 90 bp, Homo sapiens
caggtccgacccgcgaacccctctgggatccccgccgctctgtctacaacccgagggatcgcttacacctgagacgaactacagaacagc

SEQ ID NO: 625042 - DNA, 74 bp, Homo sapiens
ccaggatgagtatgattggctgtgattttaggaaatgagtggcttatactctcctgtcagtgaggatagcacag

SEQ ID NO: 625043 - DNA, 75 bp, Homo sapiens
aataattttcacaaccttcaagaaattcggagcacagcaatggaggaaacagctatatgggaacaacatacagtg

SEQ ID NO: 625044 - DNA, 100 bp, Homo sapiens
taggaactcttcttttagccctactcctgactgcaaaggatgacatggaagcttaccggacccagaactgcttcctcaactccgagatccaccaggtcac

SEQ ID NO: 625045 - DNA, 98 bp, Homo sapiens
tcagcagggcgaagacgccttcccacctagctctcctctctttgcagagccatacaaagttataagcaacgatgtgctgagctgaagaaagccttgtg

SEQ ID NO: 625046 - DNA, 90 bp, Homo sapiens
ttgcagtgtgattttctttccccctttaacttagaggaacgaggattatacagaaatttgaagatgttgcttcagagtgtgaagtcaaat

SEQ ID NO: 625047 - DNA, 75 bp, Homo sapiens
gattccagaaaaattacagcacatctcagtgaatttgcaagtggactggatagaatttgaggagatagctgatct

SEQ ID NO: 625048 - DNA, 100 bp, Homo sapiens
cagtgaggagaagatccagtacctggtgtatcagatgctcaaaggccttaagcaaaccagtccagctacgggggcccagccagccagcagctgagtgggg

SEQ ID NO: 625049 - DNA, 82 bp, Homo sapiens
ttcaggctcctctctttactgctgaagctttacttcgagctcatgccgggggccatcaagtataagaccacaggaccacgtg

SEQ ID NO: 625050 - DNA, 89 bp, Homo sapiens
gcgcccagcctgccgcctcgctgtccctgcggcttctgggggtgtcagcttcctctggtgcaaccagcaagtcttccagtatgaatccc

SEQ ID NO: 625051 - DNA, 83 bp, Homo sapiens
cggatgcagatggatggactgagacgcagagtgtaccaggggatgctggactgcatggcgaccactttatcaagttcttcgct

SEQ ID NO: 625052 - DNA, 75 bp, Homo sapiens
gggccttcgagagctaccgcgccagacagcacagccatgacagtgcagatcctgctgaagctggaccgcctggac

SEQ ID NO: 625053 - DNA, 100 bp, Homo sapiens
tccacattccagcccaagggaaagtccaagaaagatggatactatgatgctgaatgtgcggaatctgtttgagcagcttgtgcgccgggtggagattctc

SEQ ID NO: 625054 - DNA, 82 bp, Homo sapiens
gaggagccagcgtctagggcagcagccgcttcctagaagaccaggccctgaagaggaaagtgaggatgactctcatctcgaa

SEQ ID NO: 625055 - DNA, 100 bp, Homo sapiens
gacgaggggagcgcggccgaagccctggacgactttactgccatccgaggcaactacagcctagagcatgcttttcacttccactgcatctctcgctggc

SEQ ID NO: 625056 - DNA, 82 bp, Homo sapiens
caggagtcatcggacgccagaatctggagtgtggccatctggggccgtgtggtatttgccactcaggagacatgtccctatg

SEQ ID NO: 625057 - DNA, 98 bp, Homo sapiens
cgcaagatggcggcagccgcgaactccggctctagcctcccgctgttcgactgcccaacctgccatcagtggcctatgtacataccacgccgggtctg

SEQ ID NO: 625058 - DNA, 100 bp, Homo sapiens
gccgcgcgccttctccggcgtccgggtcgagcgcagatggagaggagaaaacctatggtggctgtgaaggacctgatgccatgtatgtcaaattgatatc

SEQ ID NO: 625059 - DNA, 100 bp, Homo sapiens
tgatgtggaggaaaacaacttcgagggcagagcaccagaatttcctgagtttgccactaaagtccaggaagctatcaattccctcgggggcagtgtcttt

SEQ ID NO: 625060 - DNA, 50 bp, Homo sapiens
atggtgtagcgctttaggggaaggtcatcatcagatttgaaatatttaaa

SEQ ID NO: 625061 - DNA, 73 bp, Homo sapiens
ccgcggtcgcccccatcgagagggtcaaactgctgctgcagttaaaacagatggaggtgcagctagaggaaga

SEQ ID NO: 625062 - DNA, 73 bp, Homo sapiens
ggcgcggtcgcagccctcagcccacttaggataatggcgacagctgaggaatttaagcagaacggtgggaagc

SEQ ID NO: 625063 - DNA, 98 bp, Homo sapiens
atgagatcctcatctgcgggaagtgtggcctggactgaagcgttcccggctgaaggtgaggttctgcaccaacgagtcgcagaagtcccgggcagagc

SEQ ID NO: 625064 - DNA, 90 bp, Homo sapiens
attacactgctgagtcacacacaacgcttgttatgttttcatcacttctctccagaagagcattctggagctggagaaggaaagaattca

SEQ ID NO: 625065 - DNA, 74 bp, Homo sapiens
gtccgagccagccgctgttttgccggaggagcccctcaggccatgccttcaattaagttgcagagttctgatgg

SEQ ID NO: 625066 - DNA, 100 bp, Homo sapiens
gggacatagaacaggtgccacaggctgagcggaaggaggagaaaaaggcggctgcccctgctcctgaggaggagatggatgaatgtgagcaggcgctggc

SEQ ID NO: 625067 - DNA, 88 bp, Homo sapiens
gctgaccaggaacctgggcgagcagcggcgggggcccgaggggttaatttggagtggcccctggagtcagtttcctacaccatccgag

SEQ ID NO: 625068 - DNA, 83 bp, Homo sapiens
acagaaacctggttttcttggaaagaagcttccggttctgaggtcctggaggtgccatttccctctctgttgaagcaaaggcc

SEQ ID NO: 625069 - DNA, 100 bp, Homo sapiens
atagtgagtcttccaaccagagcttgtgtagcgtcagatccttgagtgataaaggagtagaggacagtcattttgtttactcattcagccctgttgcagg

SEQ ID NO: 625070 - DNA, 80 bp, Homo sapiens
ccagagactgctgagcccgtccgtccgccgccaccacccactccggacacagttgcagagtgggcaggatcttaagaccc

SEQ ID NO: 625071 - DNA, 107 bp, Homo sapiens
caaactttgacctgaggtgtgactattgccgtccatcatcagggctcggcctcagcaccctccacctccaggtcctacacaactggttcggcttccacccacaggcg

SEQ ID NO: 625072 - DNA, 100 bp, Homo sapiens
agaaactgatccgcaaagtgtctacctcggggcagatccggaccaagcctttagaagaagccacactctctgaattaaaaactgtcctcaagagcttcct

SEQ ID NO: 625073 - DNA, 74 bp, Homo sapiens
cgcgggaggtgaagttgctgctgttgggacgagcctgtggagtgggagacacctgacctttctcaagctgagat

SEQ ID NO: 625074 - DNA, 74 bp, Homo sapiens
tggggccagggaaccctggtcaccgtctcctcagacatatctgaagagatggattaagaatgctttggattaag

SEQ ID NO: 625075 - DNA, 82 bp, Homo sapiens
gtccaacagaacgacctagtatttgaatttgctagtaacgtcatggaggatgaacgacagccttatgccagcctggaccatc

SEQ ID NO: 625076 - DNA, 100 bp, Homo sapiens
gcagtctctcattggcttctttgagactgaaatggcagaagtgcctagctgccactccatttatatgaggcaagaaggcttcctggctcatcccagcaga

SEQ ID NO: 625077 - DNA, 82 bp, Homo sapiens
tggaaaatgcgctcgggctggaccagcaggtggagccttttgccagcttgaccgaggccgtgcggagctcagttccccgact

SEQ ID NO: 625078 - DNA, 97 bp, Homo sapiens
ccccactttgcctatccccgggactaagacgggtacaaatggtgatgatcatcaggtcaaggatagtctggagcaattgagatgtcactttacatgg

SEQ ID NO: 625079 - DNA, 73 bp, Homo sapiens
ttacgtctctgctcttcagtacaatcctgccttgtacctaatagcaactaatggaaccccagaacttcagaat

SEQ ID NO: 625080 - DNA, 98 bp, Homo sapiens
aagaaaaacaatcgcttcaatgatgggaaggtggatcccgccgggaggtactttgctggccttgtgaaaaagggtaaagaacaaaacacacagcgaag

SEQ ID NO: 625081 - DNA, 90 bp, Homo sapiens
gatggacaagatggtgcagaagaagaacgcgctccttcgagaactcatagaacggaagaccagctccttggatcccaacgatcaggtggc

SEQ ID NO: 625082 - DNA, 90 bp, Homo sapiens
gtgcaccaaggacaaggcggccactggtaacagtgatgatgtcaaatgcttttgctgtgatggtggactcaggtgttgggaatctggaga

SEQ ID NO: 625083 - DNA, 75 bp, Homo sapiens
tccacgttgccctcaaagccctgcattccagagcggatttcggcctggcccgggcctatggtgtcccagtaaagc

SEQ ID NO: 625084 - DNA, 141 bp, Homo sapiens
gttgaaaacaatcggcaaggggaattttgcaaaagtaaaattggcaagacatatccttacaggcagagagacaagttggatggcttgaggactggtactaaaaggaaacgtgactgggaggccattgccagcagaatggag

SEQ ID NO: 625085 - DNA, 83 bp, Homo sapiens
gcccgaggaggcagccaagctcgtggcctgcctctgcgtgcacatcaacgagtgtgtgacggacctgcacacgtgcagccggg

SEQ ID NO: 625086 - DNA, 50 bp, Homo sapiens
agcctgcagagcgcgcagtacctccgtgtggggctgccttccaggaggat

SEQ ID NO: 625087 - DNA, 80 bp, Homo sapiens
gcttttgccaaagggaacctgactttcacagctcagtacctaagatgtatcctccactcctcgctggccaccatcctgct

SEQ ID NO: 625088 - DNA, 83 bp, Homo sapiens
ctttcattgtctcggacgtgcggggcctgggcctcccggtccgcaagcaggagcatcagatccatgctgctgctgactcggag

SEQ ID NO: 625089 - DNA, 100 bp, Homo sapiens
tccagtggatttccttgcggaaaggatgttggcggtccctgtgacctgtggagacacggccagatctgccctccagcactacctggcagcaccatctaaa

SEQ ID NO: 625090 - DNA, 95 bp, Homo sapiens
ttcattgtctcggacgtgcggggcctgggcctcccggtccgcaagcagcgaggaagaaaggacccggtttcaggagctgctggccagtccggcct

SEQ ID NO: 625091 - DNA, 76 bp, Homo sapiens
aagacactgacccccggcgggcacgcggagctctggcaggctgccctgagcacgctcaaccccaaccccacggaca

SEQ ID NO: 625092 - DNA, 147 bp, Homo sapiens
ctgctgccgcgccttggagtccggagtaacttggccaggctggccccgagcggaactggagaaagctgaggaaatggtgagagaactttggatgtggaacgtggaggaggaggaacacgaagtggggatctccacttggggtggtca

SEQ ID NO: 625093 - DNA, 99 bp, Homo sapiens
gaggcggcggagcgcgagagcttcgagcggactcagtgctacacacgcagggccctgtcgatggcagcctttacgcgaaggtgaggaagaaaagctcct

SEQ ID NO: 625094 - DNA, 98 bp, Homo sapiens
ttcgtgttcttcctagcttccctgtatgtgatgatgaccgtcaccaactggttcaagtttggtgcacctcgatttggaggaagtagggcagggccctt

SEQ ID NO: 625095 - DNA, 100 bp, Homo sapiens
tattataatgtcacagttcagattaaactgcaaatatctcatgaagctgctgcctgtatcactggtctccgggcagccatggaggctttggttgttgaag

SEQ ID NO: 625096 - DNA, 100 bp, Homo sapiens
gggctctgatccccccctgccggggagggcccagcgcatccgacaggctcagctgtcgcaggccctggaggagctgggaggccagaaacaaagagcagac

SEQ ID NO: 625097 - DNA, 83 bp, Homo sapiens
cagcctgcgcggcgggaagcggcggcggcggctccagcgtcctaagagaacacaggttttttattacctaccacggcgggctg

SEQ ID NO: 625098 - DNA, 83 bp, Homo sapiens
ccaataaccaggtgcttggcaaaatcgagcgggccattgtgccctctggtggtcagaagatgctgtgctgtctcgttaggatg

SEQ ID NO: 625099 - DNA, 74 bp, Homo sapiens
tctgtttcttgatatggaagcagctacagggcaggaggtcgaggcttgaagagtggagagaactttaagttgtt

SEQ ID NO: 625100 - DNA, 95 bp, Homo sapiens
agctccagctgcagcccagttccagggaccattcttcaaagagtagacactctggctgctccctgacagaactacacgcagtacatccctctgtc

SEQ ID NO: 625101 - DNA, 100 bp, Homo sapiens
ccccactggactgggcgctgccgctttctgagtccaaaagaaactcttccttcaaaacctgtgaagaaagagaaggaacagaggacacgtcacttactca

SEQ ID NO: 625102 - DNA, 76 bp, Homo sapiens
ctgaaaagcatgcgccaagctgcagcagatgcaaagcctgaaatgagttattctccccacctcagaagtaccagct

SEQ ID NO: 625103 - DNA, 100 bp, Homo sapiens
gtggactggagaccattggatgatgcattagattcctctagtattctctatgctagaaaggtttatggctacaaatgatttgatgacggaactgcagaaa

SEQ ID NO: 625104 - DNA, 100 bp, Homo sapiens
gttacttccaagtcatcaccagaaagcattagtgccagcagtagttcccaagggctgtctcagccatccacccagacgactcagtatctgagagcagaca

SEQ ID NO: 625105 - DNA, 89 bp, Homo sapiens
caattgatgaactagtagatagagccaaacaatcttttcaaggctcagccgcccagtgggctcaggcccagagcccagagcaaccagca

SEQ ID NO: 625106 - DNA, 85 bp, Homo sapiens
agttcctattgatggtccccccatatactatactggcaattgctggagaagattttgcaattgttgcttctgatactcgattgag

SEQ ID NO: 625107 - DNA, 73 bp, Homo sapiens
cacaagtcaggtccggcacatgtttccgcggagcggacccagcaatgacgccatgcctttcttggacatccag

SEQ ID NO: 625108 - DNA, 110 bp, Homo sapiens
aaagaacccacaggtgcatttcacagcactctgggcgaaaattggatgtgaaaatgaagccagaccgaggctcctggaatcccagctgcagtcacagaagaggagccatg

SEQ ID NO: 625109 - DNA, 82 bp, Homo sapiens
ggaccagctcatgggcacggctcgggacgatgcagtgagtgaggggggggccatggcggaggagcggcccccccggctggtg

SEQ ID NO: 625110 - DNA, 83 bp, Homo sapiens
ttgtcctggctcttgccctcatcctggttctggaatcctcagttcaaggggtcggcaccaggaattattatagaaagatcggc

SEQ ID NO: 625111 - DNA, 101 bp, Homo sapiens
taaccatggaggaagtagccccagtgagtgttagtgatgcagctctcctggccccagaggagatcaaggagaagaaggaagttgtggaagaggcagaaaat

SEQ ID NO: 625112 - DNA, 50 bp, Homo sapiens
cttcagtattcacaacatcccaaggatatgctgcaggctgctagtcatta

SEQ ID NO: 625113 - DNA, 100 bp, Homo sapiens
cacagttttgtggctgaagcaaagccacctacagttactatgcctcgaatcaagatgttggatgacaataaccatcttattcagtgtataatggactctc

SEQ ID NO: 625114 - DNA, 100 bp, Homo sapiens
ctctccgatactttctcccaagattttaaacagacatcccccctttggaacccagataaaagaaactgtgatgtatctaccaaaatatgaacttaaagtg

SEQ ID NO: 625115 - DNA, 83 bp, Homo sapiens
ctccattggatttaaaagacagtcctcgtcagcactgactttcagctatggaatcgtatgacgccgtgcccatccagtccagc

SEQ ID NO: 625116 - DNA, 117 bp, Homo sapiens
ggccatcttgagtctactctgtcgctcttgtgccctagcaccccgagaaccgtcagtttgagccagatgcaattaccagctctggctgggtcgccacaacttgtttgacgacgaaaa

SEQ ID NO: 625117 - DNA, 102 bp, Homo sapiens
tgtaagacaggaaaataattaaatattcttaccgaggtcgttcttccctctttccaatagatgatggcttgcttgatgatggtcacagtgatcaagttggag

SEQ ID NO: 625118 - DNA, 100 bp, Homo sapiens
ccatttacctcggatccattcacgaaaaacccttccttaccttcgaagaatttcgaggatgtcagatgtaaatgtatctgccctccctataaagaaaatt

SEQ ID NO: 625119 - DNA, 100 bp, Homo sapiens
agctacatgagaggattgcctgaggccaggagtttgagaccagcctgaacaacatagcccgacaacaagctcaaatacgtcaccaaatggcagaggacag

SEQ ID NO: 625120 - DNA, 124 bp, Homo sapiens
caaggggcttgagcgttctgtggagagagtgcgaggtcaggccatgaacttggggtgcatacccaccttcaagtgattgaggagagggtgaatcagagcctgggcctgcttgaccagaaccccc

SEQ ID NO: 625121 - DNA, 100 bp, Homo sapiens
gggatgggttacatgcccaagaggggacttgatgttaacaaatgtgagattgccaggtgctggagaatctggtaaaagcaccattgtgaagcagatgagg

SEQ ID NO: 625122 - DNA, 55 bp, Homo sapiens
ctcctgagaatagtggttcttaactcttgtctcagtttgaaactgaattctacat

SEQ ID NO: 625123 - DNA, 90 bp, Homo sapiens
cgggcctgcaccatgagcgtcccggccttcatcgacatcagtgaagaagatcaggtcgaagaagggggcaaagcagacaccctgagctcc

SEQ ID NO: 625124 - DNA, 51 bp, Homo sapiens
gcatgggctcagcgggactcagaggtccaggccataagaggcggagtaaga

SEQ ID NO: 625125 - DNA, 141 bp, Homo sapiens
atttcagcctgcccttgccagtgcctgggccgctgggagccgttattggctgccgttaaggaccgttacgtttcccggtgccggtggtggtgtgcacattgagccccggtatagacagttcccccagctgaccagatccca

SEQ ID NO: 625126 - DNA, 83 bp, Homo sapiens
cctatttgaagtatttgacgaaaatagactggattttttatcaagcagaaatgcatcgaacaacgagaatcaagatcactgag

SEQ ID NO: 625127 - DNA, 88 bp, Homo sapiens
tcagctctcggcgcacggcccaggcttggtggagccagtgaacgtggtggacaatggagatggcacacacacagtaacctacacccca

SEQ ID NO: 625128 - DNA, 75 bp, Homo sapiens
ggaggaaaggttcgccctggtgctggtgggtttgctgagttctctcgttgtttccctggcctctgtgaaggaaaa

SEQ ID NO: 625129 - DNA, 95 bp, Homo sapiens
gaaggttcagttggcaaaccagatatatgacttggcatttgcaagtaaaatcactggcatgttgttggaattatccccagctcagctgcttctcc

SEQ ID NO: 625130 - DNA, 100 bp, Homo sapiens
aaaacgctttcaggtcggcgtctcgtttcatcctcacaacagccagatttgagttttgtcaccggctcccacgtcggagagctgatcatctgggatgccc

SEQ ID NO: 625131 - DNA, 101 bp, Homo sapiens
ccccggcgccggcggcgggaccgcggaccgtttgcctgagaatacagatcaacccacagaacaaagcggatttccaaggcatctccccagagcgagccttt

SEQ ID NO: 625132 - DNA, 115 bp, Homo sapiens
cgaaggccgggacccggttccccggcccacagtgggggtgtgcaaacccgagagaactggtgccctgcaggagtcattaaatcaaaacttcatgctgatcatcacccaccgagaa

SEQ ID NO: 625133 - DNA, 112 bp, Homo sapiens
tttaatatctgattgggacaacattcagacccatttccagtcatgagaatgtatcctgtcaggtataatgtcagtgaatggcaagaaagttcttcatatggatcgaaaccct

SEQ ID NO: 625134 - DNA, 49 bp, Homo sapiens
cgggttttgatcgcgcgtttgtgtagggcttggtgacatttggggatgt

SEQ ID NO: 625135 - DNA, 75 bp, Homo sapiens
acagatgatacgtttgatccagaacttgcagcaacaataggtggtggagacactgccacttgctgtgccaaatgg

SEQ ID NO: 625136 - DNA, 97 bp, Homo sapiens
tgtgggcttccccatgatgatcctgccatgcaggcaggccctgagcacgctgctgtgtgagcagcaggggcagccattttggggggtgctgatggat

SEQ ID NO: 625137 - DNA, 100 bp, Homo sapiens
ttttatctgcttattccgccattgatcccagagtgaagtatttgtgctataccatgaaagtatttacaaaggtaaacgccctgcagaagatatggaagag

SEQ ID NO: 625138 - DNA, 98 bp, Homo sapiens
gccccgcgagcacagagcctcgcctttgccgatccgccgcccgtccacacccgccgccaggacctgaaggagaagaaggagaaggtggaggagaaggc

SEQ ID NO: 625139 - DNA, 100 bp, Homo sapiens
gtggccttgtggagacaacgccttaacccaaggaagtgactcaaactgtgagaacttcaggttcattgcagaagaggccgcggcttctggggccaagtgt

SEQ ID NO: 625140 - DNA, 97 bp, Homo sapiens
ttggcatttttgaatacgcctaccgatgctctggatcaatttgaagcaattgccttgcctcctattgcaaagtggccttatcagaatggcttcacct

SEQ ID NO: 625141 - DNA, 74 bp, Homo sapiens
tgaggagcagcttcagtccccgccgagccgccaccgcaggtcgaggtgattgggggagcagacaagtaccactc

SEQ ID NO: 625142 - DNA, 100 bp, Homo sapiens
tggaacatctgcatcccttcctgcagaggcagcagctggattatggcatctacgtcatccaccagattgcaacacctgctcggtataccgtgactttggg

SEQ ID NO: 625143 - DNA, 100 bp, Homo sapiens
ctcaacggcagaagcttcaccacaaaagcgaaatgggcacaccacagttactgtaaaatggggaaaggagaaatttgaaggtgtagaattgaatacagat

SEQ ID NO: 625144 - DNA, 96 bp, Homo sapiens
cagaaattatagaagatttggccttctactctagtacagtagtatctctattgatgaaacctggattggcatctatacagtcaaggattgctatcc

SEQ ID NO: 625145 - DNA, 100 bp, Homo sapiens
taaatgcatggctatgtacaagaagctgagcaggtggccagagtgcaatgccctttcccggcgcctcttactaaaaaaaatcaaactgatggctgaaggc

SEQ ID NO: 625146 - DNA, 100 bp, Homo sapiens
ctttggaagatgcagatgagaaggttcagttggcaaaccagatatatgacttggaagatgaagtcctcagtacattctgaagaagatgattttgttccag

SEQ ID NO: 625147 - DNA, 73 bp, Homo sapiens
tggaaaaaggaatcattgacccaacaaaggttaggcagattttagagctttgtcctaacctggagcatctgga

SEQ ID NO: 625148 - DNA, 50 bp, Homo sapiens
gagaaaacatgctgatgaagtatgcccagagtaccaagttcgatccatag

SEQ ID NO: 625149 - DNA, 83 bp, Homo sapiens
agaacatccacagaatagacctgaagacaaaaatccagaagtacaagcagtctggtactaggttttgacaagcttgcatcatg

SEQ ID NO: 625150 - DNA, 101 bp, Homo sapiens
tccgcggcgcagactgcacctcgcagtctccccaggtccgcccagcagccgcgcttcagccaggtttttcgttggaatatacgttgcacatttatggcgat

SEQ ID NO: 625151 - DNA, 90 bp, Homo sapiens
gcgtgattcccgtgattgcgttacaagctttgtctccttcgacttggagtctttgtccaggacggaagagagaagggcacagttacctaa

SEQ ID NO: 625152 - DNA, 75 bp, Homo sapiens
aggtggacggcacggacgacagaagcgactttggtgagactctgagacaaagcatggaggacacaagaatgggag

SEQ ID NO: 625153 - DNA, 90 bp, Homo sapiens
gtccggggcttgccctggtcttgctcggccgatgaagtgcagaggtttttttctggttcttgctcagaactctggttttgaccttcagga

SEQ ID NO: 625154 - DNA, 100 bp, Homo sapiens
gcctcccaaagtactgggattacagaattagacctttacgagaagcacagttttgtcttcagtttcctctccccccacccggaatggcctgagccgaagc

SEQ ID NO: 625155 - DNA, 50 bp, Homo sapiens
tggcaggaagactgtaatcgtggggtgatcgtgcagtccggccgccaccc

SEQ ID NO: 625156 - DNA, 82 bp, Homo sapiens
gctcttcgtggctcaggcggggggagcggaccctgacaagttccagcgccgtgccgtccctgcagtgacaccgaggtgctcc

SEQ ID NO: 625157 - DNA, 100 bp, Homo sapiens
cgccgtccccagccctgcctctccctgggctctgcatgcatatgcgctagaacttctatttgatcagttgcatgaaggagctaaagctcttgatgtagga

SEQ ID NO: 625158 - DNA, 100 bp, Homo sapiens
agatccaaaggcagggcaaggaaactggccacaactctaagcgaaagacatgaggcctcagcctgaaatgaggttgttttgaggtcatctgatttctgac

SEQ ID NO: 625159 - DNA, 122 bp, Homo sapiens
cagatcatccatgtgagtgaccatgcagcaaaagaaggagggtcctctcagtgattaagaaaggggccaggggtcaagctttctgcaggctctgctgccctgaggtgccatgccggaggtgg

SEQ ID NO: 625160 - DNA, 83 bp, Homo sapiens
ctggtgcctggccctacagtgcctctgacaactcctttaccaacgttcatagcacttcaggacagagcgggatgccaccagct

SEQ ID NO: 625161 - DNA, 90 bp, Homo sapiens
gacatcaaggagcgccgagcagtcatcatcctcaggaagttgcacagagcattgaggatcaccatcaggaagtgattggtttctgcagag

SEQ ID NO: 625162 - DNA, 50 bp, Homo sapiens
tgaaggggcagatgacttacaacatcgagtacacactattctgacggcag

SEQ ID NO: 625163 - DNA, 51 bp, Homo sapiens
aaatcgcagaacttgaaagccacactgctgaagtccctgctgtaaaggaca

SEQ ID NO: 625164 - DNA, 75 bp, Homo sapiens
cctccgcagggacaagaactgcgccaagagcctctctggatgttggtctcacattggagatccccaagagtgtca

SEQ ID NO: 625165 - DNA, 127 bp, Homo sapiens
cggcggcggcgctcggcgatggtaggcgtccctggagcggccgccttccagcatatggctcgtggacagcagaaaattcagtctcagcagaaaaatgccaaaaagcaagctggacaaaagaagaaac

SEQ ID NO: 625166 - DNA, 96 bp, Homo sapiens
ctaaaacatcaatgaatgtaaatgaaatattcatggcaatagattctgctcctaagtgtaggagagaacttggtgcctcttccactctggagtgaa

SEQ ID NO: 625167 - DNA, 85 bp, Homo sapiens
agctcagaactgagaagctgtcaccacagggatgctcccatttcccagtagcctccaggcctgcaggttcccatgacccacagcc

SEQ ID NO: 625168 - DNA, 100 bp, Homo sapiens
tgcgctttgcaatgaaatctcgaaggggacctcatgtccctgtgggacacaatgcccccaagagacgagttgtactgctgtcacaggaaatggacgctgg

SEQ ID NO: 625169 - DNA, 100 bp, Homo sapiens
atttgactttctcctcattgaagctatgcagtatttctttggcatcactgcagctagtaatttgccttctggatttggaatgcagtagccctctgggcct

SEQ ID NO: 625170 - DNA, 73 bp, Homo sapiens
tttatttgtacaaatagcacaggaggcccctacaaaggcttcagagtagatatctctgccaacatgaggacag

SEQ ID NO: 625171 - DNA, 75 bp, Homo sapiens
cagcaatgaggtgaacccaggggccgaagcccacccagggagttgatgaacaactctgctcatggtgattacatg

SEQ ID NO: 625172 - DNA, 75 bp, Homo sapiens
cgccgggagcgagctgggagggagccgcgcgcctttgtgcgcgcgccgagttggaggacgagtaagtcgtgaatt

SEQ ID NO: 625173 - DNA, 100 bp, Homo sapiens
cactgttcctggaggaatccgagaagagcagagcggagggagccccagacacgaacccttaggagaaatcttgagagtggacagcaattgtgaagatcgc

SEQ ID NO: 625174 - DNA, 100 bp, Homo sapiens
catggatgtggtaggcgaaaatgaggccctgcagcagttctttgaaggtgcactaggccttccaatgagggggatgagcaacaatacccctcagttaaat

SEQ ID NO: 625175 - DNA, 100 bp, Homo sapiens
gggttcagttttcttcagaagaaggacttcggaatgcactacaacaggaaaatcatattatagatggagtaaaggagccctctggcacaaatggaagaag

SEQ ID NO: 625176 - DNA, 71 bp, Homo sapiens
ggatttggcacagacatcctatttcatggctaccaacaggggtgtgggctgcatcttctatgagatggcca

SEQ ID NO: 625177 - DNA, 90 bp, Homo sapiens
ggaccggctgtatgattaggccacaatcttcaatgagtaaacatattcctagtgcttgtgatttcacgtatttttgctgaactcgtaaaa

SEQ ID NO: 625178 - DNA, 75 bp, Homo sapiens
gatttaagcactgctgcactttatgaggtctctcggctgctgggggcattccacaacccaaaacaggtgaccaga

SEQ ID NO: 625179 - DNA, 96 bp, Homo sapiens
cagaatgcctggcatttgataaatgtttgttgaacttgaagagacatatggacaatgaatctgcaaaggcaaatacgccatgcgagacctagtcca

SEQ ID NO: 625180 - DNA, 98 bp, Homo sapiens
cggcggtggcctgaggaggcccgagcggcggcggtggcggcgaaggccgaggcgccgactccacgggaacccactccctctacacgatgtaccaggac

SEQ ID NO: 625181 - DNA, 100 bp, Homo sapiens
gggaggatcacgagcctgggagttcgaggctgcggtgagctgtgattgcaccactgcactccagcctggattatggtgacaagctgaacatggagctgag

SEQ ID NO: 625182 - DNA, 100 bp, Homo sapiens
aggttgtgctcttggaagacctggcttcccaggtgggcctacgcactcagcttcttggacacttaatgattgttggcaagaaatgtgctgctgatctggg

SEQ ID NO: 625183 - DNA, 82 bp, Homo sapiens
ggaatatttctgtggagctgagggctgatgggttctgacggataatttccaagccagaggctgggaggcggcagaatgcagc

SEQ ID NO: 625184 - DNA, 98 bp, Homo sapiens
agaggcagggtcatccttgcccttgtcctcccctttcatccctatgtggaaaacgccctactgccaataaagggaaaataagagatgctcatcgacga

SEQ ID NO: 625185 - DNA, 75 bp, Homo sapiens
aagatggtgttggaaagcactatggtgtggtgagaagccctaccactgcaactgggacggctgcggctggaagtt

SEQ ID NO: 625186 - DNA, 75 bp, Homo sapiens
cttccactgattctacattatgaaccagacgtcctgggtcctctccagcatggcagccctctactggagggtgaa

SEQ ID NO: 625187 - DNA, 83 bp, Homo sapiens
ttgtggaaattcccagaggactttggagaccaggctggctacagcaaacatcattcaagatgtccagcaaagggagcagcaca

SEQ ID NO: 625188 - DNA, 100 bp, Homo sapiens
cgagacctgaccttgcagtacaacatctacaatgttggctcaaggcaaaagctgtgcctcacttctgcgggttgaaccctttgtatgtgcccagtgccgc

SEQ ID NO: 625189 - DNA, 83 bp, Homo sapiens
acaaaatggaaaagcaaggtgatctcatccggtatatagttcttcattttggcagacagagggataaattggaagaaatcttg

SEQ ID NO: 625190 - DNA, 76 bp, Homo sapiens
ctattactattttcttccactaaaaaagcgtaatttgcatcagaggctccttgaaatgctagatacagagaaggaa

SEQ ID NO: 625191 - DNA, 107 bp, Homo sapiens
acccttgtgctcgttgtcgccgcggtcctgctgttgaattcaattcgtcataatctgtccctacacagcaagttcattcgtgtgcagaatgaaggaactggaaaaag

SEQ ID NO: 625192 - DNA, 75 bp, Homo sapiens
gacaccgattataagaagagaaactcagcgctggggaagaagggtatttgaagtataccatacaactgttttgaa

SEQ ID NO: 625193 - DNA, 82 bp, Homo sapiens
aggatcttataaaacaaatgctgctgctatgaatatgggtcgaccattccaaaaaaatcgaaattgcatctgatggtctcaa

SEQ ID NO: 625194 - DNA, 100 bp, Homo sapiens
ttcgccggtgtgctggtgggggctgtggcctttggatatctgtccgacaggcccccacccaagcacacgctgagccgtgtcatggtgtccaaggcccgag

SEQ ID NO: 625195 - DNA, 75 bp, Homo sapiens
cccgggacgcgcggcggcaccgggaggccgggccgagcggtcatgatgatgggcagcgcccgagtggcggagctg

SEQ ID NO: 625196 - DNA, 88 bp, Homo sapiens
ggggcgatcttcaaaagtctactttactatcaatatgaacctggatgtatctgacgaaaaaatgttggtgggccagtttattgctaga

SEQ ID NO: 625197 - DNA, 89 bp, Homo sapiens
gggcacagaacagcgacagtacaaagaagactcttgtcacactaattgccaacaacaatggttatgatgtgattgctcaagcccaatct

SEQ ID NO: 625198 - DNA, 50 bp, Homo sapiens
ctcttactccttttggttgaacaagcagaaccagaaggaccctggtgtcc

SEQ ID NO: 625199 - DNA, 99 bp, Homo sapiens
ctttgccgtagcaatagtaggtgttggtggagtaggtagtgtgactgctgaaatgctgacaagatgtggcattgaagcatcagatggtgaaggagaagg

SEQ ID NO: 625200 - DNA, 90 bp, Homo sapiens
gtccagttgcagcccatggagatccagttcaattatgaatctcaggaacaccaccttctgtcagggtgatcagcccatgacctaaacctc

SEQ ID NO: 625201 - DNA, 101 bp, Homo sapiens
ctgatagcccccagcagggcctgcacctgtgtcccaccccacccacagacggccttctgcaattccgacctcgattatgtttgagaccttcaacaccccgg

SEQ ID NO: 625202 - DNA, 100 bp, Homo sapiens
gtttcatgtggatcaaacacaacaacctacctggagtggaagatcatttatgttggctcggctgagagtgaggaatttgatcagatcctagactcggtgc

SEQ ID NO: 625203 - DNA, 51 bp, Homo sapiens
actggatgtctcatttcaaagagaaatcatgcccaagttcaaacaacgaag

SEQ ID NO: 625204 - DNA, 96 bp, Homo sapiens
cgcctcgggtctcgggggccgctctgggatcccggccaccagcaattgtccgccttatgccagcctggaccatcttggaggcagtgtaggatcatg

SEQ ID NO: 625205 - DNA, 98 bp, Homo sapiens
aagagacagcgattggacagaatttgtgaagattctgaaggaagatttccattaggtaatttgtttaatcagtgcaagcgaaattaagggaaaatgga

SEQ ID NO: 625206 - DNA, 83 bp, Homo sapiens
ggataggcttcagccaccctcgaccctgaactggaataattagggagactcatgcatctgtatgccgtgtgcgtggactgcct

SEQ ID NO: 625207 - DNA, 107 bp, Homo sapiens
gaggtatctccatcaagctgcaggaggaggagagagaaaggagagacaattatgttcctgaggtgatctgtgaaaatggttcgctattcacttgacccggagaaccc

SEQ ID NO: 625208 - DNA, 100 bp, Homo sapiens
gcttcatatgtttgctccacgacatgtcaacttgtctagcctggttagctgcctctgtgaactgtggctgcaccatctgtcttcatcttcccgccatctg

SEQ ID NO: 625209 - DNA, 98 bp, Homo sapiens
ggggcttgccctggtcttgctcggccgatgaagtgcagaggtttttttctggtatatttgcttacttaaactaccatgttcctcgaacgagacgagaa

SEQ ID NO: 625210 - DNA, 88 bp, Homo sapiens
cgagccgtcttccccaggcctgcgtccgagtctccgccgctgcgggcccgctccgacgcggaagcgtgccaagttggaggccgccatt

SEQ ID NO: 625211 - DNA, 74 bp, Homo sapiens
caaggaagaaattgttcagttcttctcagtccaggccttcgcgtctcctgcgccagcagacggtgcccacggag

SEQ ID NO: 625212 - DNA, 98 bp, Homo sapiens
tccagcgccggcctcctcagtgcgaagaagctgcagccgcacctggccaaggccatccgggtgacctgcataggttcctgcggggtctccaacaaggc

SEQ ID NO: 625213 - DNA, 75 bp, Homo sapiens
ggcggcggcggcggcggctgcggcccaatatagtgctgaagagacctgtcacctctgaggaactccttactcccg

SEQ ID NO: 625214 - DNA, 98 bp, Homo sapiens
agcagcccccgaaggccctatcaggacatggagtatgaaagacgtgtactaatggtcacttgatgtgcgctggctgttttatccacctactagcagat

SEQ ID NO: 625215 - DNA, 113 bp, Homo sapiens
tctctcttttctttcagtctgcaactgtgtctgatggcgctgcatcttcctcccgtgaggctggccgagctccacgctgatctgaagatacaggagagggacgaactcgcctg

SEQ ID NO: 625216 - DNA, 98 bp, Homo sapiens
atattatggctccagggctgttacatgcctacccggatgtcatccaagtctccaagaagttcctgccaggcatggccattggctactctagctcgaag

SEQ ID NO: 625217 - DNA, 100 bp, Homo sapiens
gggaggaaatagtggcaggtgacagtctgcatgtgcagttttcaggaattgaaagatgttggccatcgtgatcagatggctgcagctagaggaatcctgc

SEQ ID NO: 625218 - DNA, 51 bp, Homo sapiens
ttgacaacaaaatcgagcaagctatgggcctgtcctcccaaagccaactct

SEQ ID NO: 625219 - DNA, 90 bp, Homo sapiens
gccgtcccggcgcccctggggacgccgccctcccggcgtttgcctcagcatggagggcggggccgcggcagccacccccacagcactgcc

SEQ ID NO: 625220 - DNA, 73 bp, Homo sapiens
ccgtgacaaaatgtgttccatggtcaaaaaatggcagaggtggaggagacactgaagcgactgcagagccaga

SEQ ID NO: 625221 - DNA, 92 bp, Homo sapiens
tggaagcagccgatccagcctgcggagcctgtggggcagagccctaatttgtttagaactgtaatatgcacagttaaaacaacttgtcctct

SEQ ID NO: 625222 - DNA, 90 bp, Homo sapiens
tttggttacctatgtacctgttaccactttcaaaagcctgtctcctccctcctacacatttccagctcctgctgcagttattcctacaga

SEQ ID NO: 625223 - DNA, 83 bp, Homo sapiens
aaggacgccgcggtcttcccaggcgtcgcggagagcaggctgaaggtgatgtggccgccctcaaccgacgcatccagctcgtt

SEQ ID NO: 625224 - DNA, 83 bp, Homo sapiens
tgaagaagcagtcaaaaagatgcttgtggaagccacccgggagtttgaggaggttgtgaatccacattcatctcaatggaagg

SEQ ID NO: 625225 - DNA, 75 bp, Homo sapiens
ctgggatggtggaaaagcccttcaacatttctgttaaaggaggagatgttaaagtaacccatcttgcaggacgac

SEQ ID NO: 625226 - DNA, 80 bp, Homo sapiens
aaaacaggggcagaagaacaaggaagcggagaggcaagaggccttgctattttggaagctacaagaaaaaaatagaggaa

SEQ ID NO: 625227 - DNA, 100 bp, Homo sapiens
ggtggtggagttccgccacatgaggaaccatgcctatgagccactcgccagcttcctagacttcattacgacaccatgtaaaattgaacctagtataaac

SEQ ID NO: 625228 - DNA, 100 bp, Homo sapiens
gcttgggagagctcctgggccacccctcctttcaggtcaaggagaacgacacattggatacagaagggaggtgatcatgcaccatggcactggcccccag

SEQ ID NO: 625229 - DNA, 75 bp, Homo sapiens
gctttttgattatatgaattctcagtccaagtttaaagttaagcctggtgtgtccgtttctctggtgaatcccca

SEQ ID NO: 625230 - DNA, 100 bp, Homo sapiens
cgcagtcatgccggccggacccgtgcaggcggtgcccccgccgccgcccgtgcccacggagcccaaacagatgatgataattccgaagaaggcttccaca

SEQ ID NO: 625231 - DNA, 83 bp, Homo sapiens
cctcgccagcagccgtccggagccagccaacgagcggagctgagagaagataatatcattttaattgaaaccaaggccatgct

SEQ ID NO: 625232 - DNA, 100 bp, Homo sapiens
tatcaggagacacagtatagcttctgacagtggagacactggcattggaacttcctgttctgatagcgtggaagtctgtgaatttctggtacgtgctggt

SEQ ID NO: 625233 - DNA, 75 bp, Homo sapiens
cgacagtaacccgtttgccgacccggatctcaacaatcccttcaagcagaagatggctgtgccacccacgtatgc

SEQ ID NO: 625234 - DNA, 82 bp, Homo sapiens
gccacagttcagtgtattcgttctgtgcctgaactcaaagatgcccttaaaagaatgaagaagcagtacgacgtctcatctg

SEQ ID NO: 625235 - DNA, 75 bp, Homo sapiens
ccaggagcaccgccgaggactccagcacaccgaggaccaccatcatggcagtggagtttgacgggggcgttgtga

SEQ ID NO: 625236 - DNA, 90 bp, Homo sapiens
gaagattttatctccagcaccacttggagaacagccatctctggaagaagccatcagaatagcgtctagaatccaacaaggagaaacgcc

SEQ ID NO: 625237 - DNA, 100 bp, Homo sapiens
cgtgaccgagagcgcgaatatcgtcatcgttagaaggttttggttatgaacaggattcggattcacgtcttgccaaccaatcgggggaggatcactccag

SEQ ID NO: 625238 - DNA, 148 bp, Homo sapiens
tggtggctatccagcgcttcctgcggatgtgggcagtagaacactctctccccagaaatccaacttctcaagtattggctggagttggcgatgactcagcagatcaaggctggaagactcattctcgtcaggtggttgacgttggctg

SEQ ID NO: 625239 - DNA, 95 bp, Homo sapiens
atctcagcaactgtggtggagattgctggctactccatgtctgaggtcacgagaagagaatgccttctagatgcaaaatcacctccaaaccagac

SEQ ID NO: 625240 - DNA, 100 bp, Homo sapiens
cgcgcccggcccggagcccccagcgcagcggccgcggacctcagcagccatgtcgaagccccatagtgaagccgggactgccttcattcagacccagcag

SEQ ID NO: 625241 - DNA, 75 bp, Homo sapiens
accaggcatacatttggcagaataaatgaaccaggataagttctgaacgtcgaaaagaaaagtctcgagatgcag

SEQ ID NO: 625242 - DNA, 89 bp, Homo sapiens
gctcctcgctgaccccatcactgtgcaagctggggctgcaggtcacagttacctggagaggctcctgaatgttgaggtgccccagaaag

SEQ ID NO: 625243 - DNA, 50 bp, Homo sapiens
gcagatcggagacggggcctggaggacggagagagatgcttcaaattggt

SEQ ID NO: 625244 - DNA, 75 bp, Homo sapiens
tcacactcaagtataaactggacaaccagtttgagctggtgtttgtgggcaaacttgaagataaatcttttgact

SEQ ID NO: 625245 - DNA, 75 bp, Homo sapiens
catggagcgagcctagggcccgacagataatccaggcacatggcggcactgttgaccccaccttcacgagtcgat

SEQ ID NO: 625246 - DNA, 90 bp, Homo sapiens
cggagccccaaccgcgctgccgggattaaagcctgtggtttccacagaagcaccacctatcatatttgccacaccaactaaactgacctc

SEQ ID NO: 625247 - DNA, 80 bp, Homo sapiens
cagacgttctttctttgctgcgtctactgcgaggaactacggaagaaaatttggacaggttgatccagaatgtaaagata

SEQ ID NO: 625248 - DNA, 100 bp, Homo sapiens
ctgccttcgcttcacggcgccgagccgcggtccgagaaggatgataaagactatgctttaaaacaaatagaaggaactgggatctctatgtcggcatgta

SEQ ID NO: 625249 - DNA, 74 bp, Homo sapiens
gtgtggcacgacacaaaaatcagaaccctggaatggcgatttctggcgtgctgctggtcttctgcctcctggag

SEQ ID NO: 625250 - DNA, 75 bp, Homo sapiens
tccctggcccgggtgacccacgcggaggccgtcaagaaaatccaagagaggtcccaagcaactagcccctcaccc

SEQ ID NO: 625251 - DNA, 98 bp, Homo sapiens
gcagggcctgccaggtggcgctcgggagatgtgcattgagcaggatgggagagtccatctcactgttgtttactttgggaaagaagaaataaatgaag

SEQ ID NO: 625252 - DNA, 100 bp, Homo sapiens
ttgcctgttcagtactgtgggtgatatttgcctttagtgcactcttctccttcacagtaaagtggctggttcaacatgcactgaaaaaatcagagaaggc

SEQ ID NO: 625253 - DNA, 98 bp, Homo sapiens
ccagaacgaagaccctactaggcaaggctctctatgagaacatgctggtggagctgccctttgcaggcttctttctttccaagttgcttggaaccagt

SEQ ID NO: 625254 - DNA, 101 bp, Homo sapiens
tcggactcccgacccgccgccggctccggccgcgtttcccgggtaaagggatattggtatcaacttgactgaccctatgttcagaggaatttatagggggg

SEQ ID NO: 625255 - DNA, 75 bp, Homo sapiens
aacttcgccaccctgcggtggattgactacggcaaagtggccactcaggctgaaggtgatgtggccgccctcaac

SEQ ID NO: 625256 - DNA, 76 bp, Homo sapiens
aaatgttgccttggtttacccacccacgccgactgtgatcagcccctgttccaagatgcttatagaattttatgag

SEQ ID NO: 625257 - DNA, 75 bp, Homo sapiens
ttctctgttcctagaggcagctagtggcttctatactcaggagctagagttaatgccaaagacagcaaatggttg

SEQ ID NO: 625258 - DNA, 75 bp, Homo sapiens
aacatggggtttcgagtgggacaaggattgatagaaagacagaatttgtggaaggggaagaacacgatcacagaa

SEQ ID NO: 625259 - DNA, 100 bp, Homo sapiens
aagggaattatggagaatcctattgtaaaatcacttgctaagagaccaagaagcgggacgttcaccatgggaagaaaatcgctgtaccttctgattgtgg

SEQ ID NO: 625260 - DNA, 82 bp, Homo sapiens
cggccgccctgggagcgagcggaggagcaggcgccggagaaatcgacttaaagcctccagagaagtagaatctgtagacctt

SEQ ID NO: 625261 - DNA, 96 bp, Homo sapiens
ccacctgccgtccggcaattccctttgccaggaaacccagcgtttgctggcagaaccagttcctggcatcaaagccgaaccagatgagagcaacgc

SEQ ID NO: 625262 - DNA, 100 bp, Homo sapiens
aacaaggatatggaaaactaagcagtgatgaagacctcgaaataattgttgatcaaaagcaggagtccatagaggccactgtattctattgaagaacatg

SEQ ID NO: 625263 - DNA, 83 bp, Homo sapiens
caaatgcaaatacttgtgcactgggagagcacaacaccccgatcccccaaggaggcagaggagccatccagtttgtcacgcat

SEQ ID NO: 625264 - DNA, 90 bp, Homo sapiens
gatgaaaattctaagctgagaagaaagctgaatgaggttcagagcttctctgaagctcaaacagaaatgatgcggaagggagagctgttt

SEQ ID NO: 625265 - DNA, 90 bp, Homo sapiens
tgtcgtatctctctcgatcggagaccggatccctgcagacatccgactcactgaggtgttacagggtcttgattatttacataccaagtg

SEQ ID NO: 625266 - DNA, 100 bp, Homo sapiens
ggagatggtgcagaagatggaggagatcctggtgtatagcctggaagcaggacgccgcctcttgaagctgggtaacgttctccgtgacttcacgtgtgtc

SEQ ID NO: 625267 - DNA, 96 bp, Homo sapiens
atgaatcatacaatatttcagaggtcatgtcaaaagaggtcccagactactatgacatcatcaaaaagcccattgccttaaatataattcgtgaaa

SEQ ID NO: 625268 - DNA, 74 bp, Homo sapiens
gtggaccccaggggagaagtcggagcaaagaacttaccaccaagcagcacatatagaactggatgcccttgtgg

SEQ ID NO: 625269 - DNA, 75 bp, Homo sapiens
acggctggcagggtggacctcaggagcctcctaaaaccacagcttctggtccatcggaggatccgagtgtgaatt

SEQ ID NO: 625270 - DNA, 101 bp, Homo sapiens
cacggaccgcgcccgccgggcacacaagaatggtcactgatgatcggctgaatgtaacagaggaactaacgtccaacgacaagacgaggattctcaacgtc

SEQ ID NO: 625271 - DNA, 82 bp, Homo sapiens
caggaattgagagtcacagaggaaggacagtggagtctggcatcttattgagctggactggccattatggaggaggagctgc

SEQ ID NO: 625272 - DNA, 82 bp, Homo sapiens
taaggaaaccctattacctccagagttcctgagttggaggtagaagaagaaacccaagttcaagagatgactttagatgagt

SEQ ID NO: 625273 - DNA, 100 bp, Homo sapiens
ctgagatggctgatgaagtaatttgcagtgaaattttaagcgactgtgactctgctgcaagttccccagatcttgagaaccctcggcctcaggaaagtcg

SEQ ID NO: 625274 - DNA, 100 bp, Homo sapiens
ttgcctcaagtttctttcaccgcagtgggctaccataaacacatcaccttgatttttaatcccacggttctagagccttctttccgccaggcctttccca

SEQ ID NO: 625275 - DNA, 76 bp, Homo sapiens
gatggattgactatggaaaagttgccaaattggagctattgtgacaatcttggttaccatccattaagtgctgctg

SEQ ID NO: 625276 - DNA, 74 bp, Homo sapiens
atcagatctgtgcaccattaatgtgagtggcctgaagttctccaaggtttgcatcgccagcttctatatattac

SEQ ID NO: 625277 - DNA, 100 bp, Homo sapiens
ctcgctctgggagcctagaatgcatcagtgcccttgtggcgaatggggctcacgtcgagccctagactacttggccattggcatccatgaacttgctgca

SEQ ID NO: 625278 - DNA, 90 bp, Homo sapiens
gtggacttctacaaggcccgcatggaggtgcggctctatgagtggacaacagagaaggagctgcgcactgagtgcaaccactacaacaac

SEQ ID NO: 625279 - DNA, 100 bp, Homo sapiens
cttccagctgtttgaccgaacaggaatgtaggagccttttattctcatgtaatgcccccaccctggaatccttgaagaccttctgtctattgttcatata

SEQ ID NO: 625280 - DNA, 75 bp, Homo sapiens
gagtttgacagctattaaaaccagggctccacagttaggagtctctgctggatgaaccgaatcctaacagtccag

SEQ ID NO: 625281 - DNA, 75 bp, Homo sapiens
gggaaattgcacaagccaggaaaggacgcgtcgaagcgcgggcggcaggaggactatcgggtctgtatggacttt

SEQ ID NO: 625282 - DNA, 50 bp, Homo sapiens
gagctgtagccactgtagcagcaagtaggtgacctcacagtgactcaagc

SEQ ID NO: 625283 - DNA, 83 bp, Homo sapiens
tggggccaagggacaatggtcaccgtctcttcagattcttcgctgctgctgccttaccgccgagaaccaccacccgccaggcg

SEQ ID NO: 625284 - DNA, 75 bp, Homo sapiens
aggcaagcctattgagttaacacctctgccgctgctaaaagatcttcaacttgctgctgagcttgggaagacatt

SEQ ID NO: 625285 - DNA, 50 bp, Homo sapiens
tcagcgatggcagtttcatagtattgaaaatgatgcatcctgttgccagc

SEQ ID NO: 625286 - DNA, 74 bp, Homo sapiens
aagaatcagctggggcagaagcgcgtggtcaaggtagacaagggcgtggtccccctggcagggacaaatggcga

SEQ ID NO: 625287 - DNA, 75 bp, Homo sapiens
gcttcctcaagcagaacactgctgggagtcctaaaacctgcgacaggaagtccaagccttatgcatttgatcggg

SEQ ID NO: 625288 - DNA, 51 bp, Homo sapiens
gattcgcagtggtcgcttcttctccttggcagcctgcttctgcaaagtggt

SEQ ID NO: 625289 - DNA, 83 bp, Homo sapiens
gaccacagctcccgaaagcgacgttcggccaccggaggagcgggagccaagcaggttgtggcagcactgcctgaaggtatgag

SEQ ID NO: 625290 - DNA, 100 bp, Homo sapiens
atggacatgaagaggaggatccacctggagctgaggaaccggaccccggcagctgaacaagcacatcatgattgacttggggactggcaacaacaacaag

SEQ ID NO: 625291 - DNA, 83 bp, Homo sapiens
acctgagatctatgatcccacatctggaatctggaatgaaatcttccaagtccaaggatgtaagaagctcattcacacagaag

SEQ ID NO: 625292 - DNA, 100 bp, Homo sapiens
caacagcgaggaagaagaggacgacgacgacgaggaagaggaggtttctgagataatctcagtgataccttgaagaagctgaagataacagctgttgaca

SEQ ID NO: 625293 - DNA, 75 bp, Homo sapiens
agagggaaccgacttggaatttgaggactttgagagcgtagagtggcagctctccaagaaattgttcgactcctg

SEQ ID NO: 625294 - DNA, 103 bp, Homo sapiens
agaactttgccgataccttaggatacaacatagaacctattatgctctatcagagaatggggagaaggaacccccgacaacactactctgggttcagtatttc

SEQ ID NO: 625295 - DNA, 98 bp, Homo sapiens
ctatacaacacaattataaaatgtcagcttttaaggacaagttggatggcttgaggactggtactaaaaggaaacgtgactgggaggccattgccagc

SEQ ID NO: 625296 - DNA, 100 bp, Homo sapiens
aagagaggaacactacaaactgctgtatgaagtttcccaggaaacctcgacctgtctcccagttggttgcacagcaggttactcagcagtttgtgcctcc

SEQ ID NO: 625297 - DNA, 124 bp, Homo sapiens
gaaatccaggagaatgaagaagcagtcaaaaagatgcttgtggaagccacccgggagtttgaggaggttgtggaccaatgacactggattgcttgcttataaagaacatcttccagtaactaag

SEQ ID NO: 625298 - DNA, 75 bp, Homo sapiens
actcaggacgcccagaatgccttgagaagagcaaaagatacagatattgtggatgaagccatctattacttcaag

SEQ ID NO: 625299 - DNA, 83 bp, Homo sapiens
ttcatttagagctgcggaacaggacgccctctgatcaaattgtggctactaatttgccccctgaagatcaagatggctctggg

SEQ ID NO: 625300 - DNA, 82 bp, Homo sapiens
cacccgtctgtggagtcggggggaggccacagccacggacgccgaggccagagaagctggtgagaagccctaccactgcaac

SEQ ID NO: 625301 - DNA, 99 bp, Homo sapiens
gtcgtagctgcttcgaccacagtgactacccccacgactgctaccactactgtttcaaagatgaccaagcgagacgtgcctggcttcgccatcgggggc

SEQ ID NO: 625302 - DNA, 87 bp, Homo sapiens
aatatgttttacatccaagaactacaggctttacttttgtggtagaccgtctaagagaaggtattgaagcccctgggtgataatttg

SEQ ID NO: 625303 - DNA, 83 bp, Homo sapiens
aggcaaggagctaaagcagcgtgcgttcagccctggggtgtaccttccggtttcccagcacggccatcaagatccagttcacg

SEQ ID NO: 625304 - DNA, 100 bp, Homo sapiens
gtggtccttgtaccctacacctcggagcatgtgcccagacacctggatttcattagcatcatgacctacgattttcatggagcctggcgtgggaccacag

SEQ ID NO: 625305 - DNA, 95 bp, Homo sapiens
gcaaatgaacctacacacttcacggtggactgtactgaggctggggaagttgaaaaagcatcagaatctgaggagtcagatgaggatgacggtcc

SEQ ID NO: 625306 - DNA, 83 bp, Homo sapiens
tatagagctaattacaactttcggggcatgtacaatcagaggactccatccccgtgtctacctccctccttggagacacttcc

SEQ ID NO: 625307 - DNA, 101 bp, Homo sapiens
agaagatgtggtggcttccgtttgttggtggaggaggtggcaggcctcggcgattgcaacacctgctcggtataccgtgactttgggaggaacatctgtca

SEQ ID NO: 625308 - DNA, 88 bp, Homo sapiens
atattgatagacagctgtatcttcccaagtaccacaatagtttccgccagctgtggatgcctttgacattatgaccgcagaggattcc

SEQ ID NO: 625309 - DNA, 83 bp, Homo sapiens
gagtgcgtgggggaccggctgttggcgggtccccgttctccgtgtcctgctgtccgctgacctgaaggggttccagtacttct

SEQ ID NO: 625310 - DNA, 74 bp, Homo sapiens
tatatatagacattgcagatcgaagccaagtgctcagcaagccaaatttgtatcctactgtggggcttcaaaca

SEQ ID NO: 625311 - DNA, 76 bp, Homo sapiens
gcggcgcttctgtcctcctactcggacccgcagatgttctcagtgcagctgagtcttggtgagcagacatgggaat

SEQ ID NO: 625312 - DNA, 90 bp, Homo sapiens
cgctgcacctctacctgtggctctttctgctgggcctgcccttcaccctctacatggaatagctattcagtcagacagaaccacttatca

SEQ ID NO: 625313 - DNA, 100 bp, Homo sapiens
ccaatgtcaacattgcccagcaagtgctggtggcagcgatcgtgtttatcagttttggcgtggtggccgccttctgctgcgccatcgtggacggcgtatt

SEQ ID NO: 625314 - DNA, 100 bp, Homo sapiens
aaactatgggaagattttggtagagaagaatgaacattgtattgagaacaatatagatttgcagactcaccccacacagaccgcgtttctctccagtgtc

SEQ ID NO: 625315 - DNA, 75 bp, Homo sapiens
cagacattacgagaaatgttagagaagaaagacagctttgtggaagaggaagaatacggagttctataccagagt

SEQ ID NO: 625316 - DNA, 90 bp, Homo sapiens
aaaagcagaggccagggcgccgaagaaagctgtggtgattcgtcacttgtataatgaagataatgttgacatttctgaggatacattaag

SEQ ID NO: 625317 - DNA, 90 bp, Homo sapiens
cacagagacagatcaaagcagctcaccctgcacttgatggaccagctggcaccacccagatcaataaactggcttatttgaatttgcggc

SEQ ID NO: 625318 - DNA, 75 bp, Homo sapiens
aagtctttccaaaaggtcaaggttcacaagctaatggcagcattagccgctgttgggcctcctaatcctcgggca

SEQ ID NO: 625319 - DNA, 74 bp, Homo sapiens
ccacaagaagcggaagtatgagttggggcgcccagctgccaacaccaagggcttccgttacaagatgaggtctg

SEQ ID NO: 625320 - DNA, 102 bp, Homo sapiens
gcacgagctgtgaggggattcacttgtgtgcggaactcctcggaaccatgacctgcctagagctggaacgttacctccagagcgagccctgctatgtttcag

SEQ ID NO: 625321 - DNA, 90 bp, Homo sapiens
cacctaactacggaaaacctgatcccaaaattattgaaaacactcgaaggacctcccagtgccaagtgtataagcgtgtccagaattggt

SEQ ID NO: 625322 - DNA, 100 bp, Homo sapiens
tttctcaagtatttgaaataaaaatggatgcaagtttaggaaatctatttgtgccggtggtggtgtgcacattgagccccggtatagacagttcccccag

SEQ ID NO: 625323 - DNA, 96 bp, Homo sapiens
ctcattattaccatatggcccatggaaaagattttgcatctagaggaattgaaagtgtttaaaagaacccctcctggtgttcggaaaatagtaatt

SEQ ID NO: 625324 - DNA, 90 bp, Homo sapiens
tccaagtgaccccctcagcaactcctgatgaacaggtgatgtacctgctcccccttcaccttctgccataattggaagcttcctgaggcc

SEQ ID NO: 625325 - DNA, 49 bp, Homo sapiens
ctcaactacaacatcgtttcagggtcgtcttcaaaggtgaaaaaaggcg

SEQ ID NO: 625326 - DNA, 82 bp, Homo sapiens
cgtacgagatctccgaccagtctgggggcgctggcggcctgcgcagccacctcaaggtgagaagccctaccactgcaactgg

SEQ ID NO: 625327 - DNA, 75 bp, Homo sapiens
aaaatttaaagaaagatttgaagcactacaaacaagcagctgatgccggtggtggtgtgcacattgagccccggt

SEQ ID NO: 625328 - DNA, 90 bp, Homo sapiens
agggggcagtcccgggagaacctgcggcggccggagcgtaatctatgccagcaattatgacaatgttagcagaccatgcagctcgtcagc

SEQ ID NO: 625329 - DNA, 75 bp, Homo sapiens
taagaaagaagatgttaactttcagcttcctgcctgacacagctcacttcaagaagtgcacaatgtcagaacgtg

SEQ ID NO: 625330 - DNA, 51 bp, Homo sapiens
gatgagaagctgtcggagcttcccaaggataaaggctcactgatggctcag

SEQ ID NO: 625331 - DNA, 75 bp, Homo sapiens
cactgtcctggtctgctccaaagagatctcagcgctcaccgacttctctgtactatactggcaattgctggagaa

SEQ ID NO: 625332 - DNA, 100 bp, Homo sapiens
tgacattcaaccgtacccgccaagctgtcatcacaaaagagttgattgaaattatctctggtgctgcagctctcatgttggcagataaattgaacatgac

SEQ ID NO: 625333 - DNA, 98 bp, Homo sapiens
aggagtacgtggaccagcacctgggcagatcagtcgcatcgaatacattcattcaaagaacttcatccaccgggatgtgaagccagacaacttcctca

SEQ ID NO: 625334 - DNA, 75 bp, Homo sapiens
cgttcccgcgagagagatgaaagacgtcgaggggacgattggaatgacagcttcttggacacttaatgattgttg

SEQ ID NO: 625335 - DNA, 97 bp, Homo sapiens
tgcctgaacaacggattgagctatatcaggtggttctaactttgatggtttgagaccaaatgggaagggagtgcctatggaccaaagctccaggggt

SEQ ID NO: 625336 - DNA, 100 bp, Homo sapiens
gggagagaatttccgtctgatctatgacaccaagggtcgctttgctgtacatcgtattacacctgaggaggccaagatatgtgaaagaggccaaagaagc

SEQ ID NO: 625337 - DNA, 75 bp, Homo sapiens
tgcccccccttccccacgcaaccccagatccatttacactttacagaagctcttcgtgggcggtcttgactggag

SEQ ID NO: 625338 - DNA, 100 bp, Homo sapiens
acaaccataaagagaaagctagtgaatgggaaaatggtagcggacaaggagactggctttcacagaggtttgggttgggttcagttttcttcagaagaag

SEQ ID NO: 625339 - DNA, 50 bp, Homo sapiens
gacccccatgtgctcctggccgtggccaaccccgactatctgagatcggc

SEQ ID NO: 625340 - DNA, 101 bp, Homo sapiens
agcctattatgcccagacaagtccccagggaatgccacagcatcctccagcacctcagtcctattttgtaacggattatgatccaaccattgaagattctt

SEQ ID NO: 625341 - DNA, 82 bp, Homo sapiens
gtcggggccggctgaccaggaacctgggcgagcagcggcgggggcccgaggggctaccggctctctgaccagttccacgaca

SEQ ID NO: 625342 - DNA, 100 bp, Homo sapiens
gggggcacgacagccttgaggcccagcgctagcacccagcttcatggcggctgaagagatgcattggcctgtccctatgaaggccattggtgcccagaac

SEQ ID NO: 625343 - DNA, 50 bp, Homo sapiens
gccgtggaggcttcgccgcctagcaatcccacagagtattgatgaggaaa

SEQ ID NO: 625344 - DNA, 75 bp, Homo sapiens
cttgtgggatgtgaaaactctgttactgaagacagaatgttgctgcgggatgtaaaagctcttaccctccactat

SEQ ID NO: 625345 - DNA, 100 bp, Homo sapiens
ccctgtggtgttgggacaacttgctcatggagttgcagttcttgcctaacaggaacccaccatggctgaactggagaatgtgtctggggcgctgaacgag

SEQ ID NO: 625346 - DNA, 99 bp, Homo sapiens
gccacttccggaagactcctggcccgggattatgccaagaaaccaggtgaaatgacaatggatgctctgttggctcgattgaaacttctgaatccagat

SEQ ID NO: 625347 - DNA, 73 bp, Homo sapiens
aaaatgtgaggaactcaaaaagaagccttccgctgctctggaggtctagaggagtcccaggagcagccaggac

SEQ ID NO: 625348 - DNA, 97 bp, Homo sapiens
ttcaatcaccactgtccaaattcagaagctcagaacgctggactctccctttgcagtgttttccagaaggcacagacatggttggtatattagactt

SEQ ID NO: 625349 - DNA, 76 bp, Homo sapiens
gcagcggcagcggcaagcacctcgacagaggtacgttcttggagacacagcaatgcagaagatggccaagtcccat

SEQ ID NO: 625350 - DNA, 100 bp, Homo sapiens
tagcaagtggccatggggagcctcagcggtctgcgcctggcagcagagtgcctggaagagctgggatgtctggttgagtcctatggcatgaatgtttgcc

SEQ ID NO: 625351 - DNA, 100 bp, Homo sapiens
agaagggaggctccaagacctcatcaacaattaaggtaaaataccatgaagattttgaaaaaacaaaggggagaggctttactcccgtcgtggacgatcc

SEQ ID NO: 625352 - DNA, 90 bp, Homo sapiens
gtggctggattggacaagcaggcaaagctgaggtgcgaagcagactgaggctaccatgacattcaaatataatcggcagagtatgacctt

SEQ ID NO: 625353 - DNA, 75 bp, Homo sapiens
ttaaaattgagtcttctgtccaactgcaagcatgagatactttgatagagcagccttatttgtggaagcttgcct

SEQ ID NO: 625354 - DNA, 75 bp, Homo sapiens
ttttgttaagattcaggtcaaagacagggacgtccagatcggtgacatcgtcacagtgggcgagtgccggcctct

SEQ ID NO: 625355 - DNA, 75 bp, Homo sapiens
ggctcctggacccgcaataaagtcttattgccagcagttttgaagatgactcccgtgtagcctcaccgttagacc

SEQ ID NO: 625356 - DNA, 88 bp, Homo sapiens
agatcgggatttacgtggagatcaagcgcagcgatgcagtctctggtcccagcccaccccatggcccctcccagtcccagcaccacca

SEQ ID NO: 625357 - DNA, 50 bp, Homo sapiens
ctgggaactgatctagaataagttgatctctctaatgtattagatcttca

SEQ ID NO: 625358 - DNA, 83 bp, Homo sapiens
cattgacgccatgtcgggttattcgagtgaccgagaccgcggccgggaccgagggtgaacttcacggtagaccagatccgcgc

SEQ ID NO: 625359 - DNA, 60 bp, Homo sapiens
gaactacatattgctttagaaaaggaaaatgttctgctgctgccctggatgttcttgcaa

SEQ ID NO: 625360 - DNA, 83 bp, Homo sapiens
caaagctcgacttctcaatcccaagtggccaaaggtttactcctggcttgggggcattaggaagcactggaggctcttcggga

SEQ ID NO: 625361 - DNA, 90 bp, Homo sapiens
gctcttcactcctcagcgcgacgtcgtgtcgagttcccaaaaagctccgcaggggctgtagggaggaaattcagtgaacattatcactcc

SEQ ID NO: 625362 - DNA, 134 bp, Homo sapiens
tgctgcagcaggaataatggtcggctctatctattggacagctgtgacttatggagcagtgacagtgatgcagggtgaaaatcctatttataagagtgccgtaacaactgtggtcaatccgaagtatgagggaa

SEQ ID NO: 625363 - DNA, 80 bp, Homo sapiens
gcatcatcacaatgccaacacatctgatccagccagtacaggctactctgtcatctttgaagatgttagatgtgggaaag

SEQ ID NO: 625364 - DNA, 97 bp, Homo sapiens
gcccggcggccagggggcactcaaggctcgcccgaagatccaggagtgggagacgcggatctttacccacagtaagaatgtcaggtccccgggattc

SEQ ID NO: 625365 - DNA, 82 bp, Homo sapiens
gccgccgggtagtcgggaggaggagagcttcacctgtcggcttggagagatccagtccagaatgacagggtccagaaactgg

SEQ ID NO: 625366 - DNA, 75 bp, Homo sapiens
gcagccatgatctccttaacggacacgcagagttttacactcgtcatttgcccattgatctctcttatggaagac

SEQ ID NO: 625367 - DNA, 99 bp, Homo sapiens
tttacttcatctccaactacagcatccaagcctgcaaaaaagaagccagtatccaaacatgaacttgtgtttacaccaaacacctttgctgtctgcaca

SEQ ID NO: 625368 - DNA, 100 bp, Homo sapiens
cgccaagatggagaagaaggtgtctaagcgctcgcggaaggaggaggaagagcctaaaaggcggcaacaccaacacctcttgacatggaaatacactgat

SEQ ID NO: 625369 - DNA, 100 bp, Homo sapiens
tttggataatgacgacagcaacccgaagacagggaaatttagatttggagtcagcatatgaaaataagagtttacctacagaaaaaaacattcatgaaat

SEQ ID NO: 625370 - DNA, 83 bp, Homo sapiens
attgcttctacttcaggcagtgtcgtgggcatcaggagagagttatgtatgtggctccatagagcccttcaagaaactggagt

SEQ ID NO: 625371 - DNA, 100 bp, Homo sapiens
gaagccgcgcggccggccggccgactaggggatcgcttacacctgagacgaactacagaacagcacgtaccagaggtggaagtccaagtcaaacgcagaa

SEQ ID NO: 625372 - DNA, 80 bp, Homo sapiens
gcagcagctgagaaaggagctcggggactcccccaaagacaaggtgtgttccggggtggtcatgacatcctggtgcgctc

SEQ ID NO: 625373 - DNA, 96 bp, Homo sapiens
tgatatggagagccagcccctgattggaacccagtccacagctgaccgtatacacaaccttgatagatgttaccaaaggtcaattcgaaacttacc

SEQ ID NO: 625374 - DNA, 100 bp, Homo sapiens
cttaaagacgtttaagacgagccgttatttcccaaccagactaaacctattcgtcccgggcaacatccagcagcttctccaactcacccaagtgcaattc

SEQ ID NO: 625375 - DNA, 95 bp, Homo sapiens
aaaacagcacaggagaaccagtatggaagggttatgtggtccgaatcagtggtgggaacgacaaacaaggtttccccatgaagcagggtgtcttg

SEQ ID NO: 625376 - DNA, 82 bp, Homo sapiens
gcggaggcgcctccgctgcagtcgctgcgtctccaagcacaggaagtcctggagaacctgaaggaccgctggtaccaggcgg

SEQ ID NO: 625377 - DNA, 75 bp, Homo sapiens
ctaattgcacggattgctttgaaagccttgatcaggggaaagaaatggaatctatttggaatttgcagaagcaag

SEQ ID NO: 625378 - DNA, 100 bp, Homo sapiens
tctttgtgtcctgagatcaaatggcacttcattggccacctacagaaacaaaatgtcaacaaattgatgggcctccccatggccacccatggaccagtcg

SEQ ID NO: 625379 - DNA, 50 bp, Homo sapiens
gcctgccgcgcggagagataagtggtgaagttcatggatgtctatcagcg

SEQ ID NO: 625380 - DNA, 50 bp, Homo sapiens
agcgtccgcttccagctttgcgcagacctgcgaccgcatcaagcagtccg

SEQ ID NO: 625381 - DNA, 90 bp, Homo sapiens
ccgaggcggtgaagccccagcgccgggccaaggccaaggccagccggactaaaacaaaggagcaactttcagccagaggcatggatgctt

SEQ ID NO: 625382 - DNA, 82 bp, Homo sapiens
aaggtggcaagtcgctcctgtcatttctacaacaacgtagaaggccacggcgtatgcctccgaggacggggtcctgaccgag

SEQ ID NO: 625383 - DNA, 73 bp, Homo sapiens
agcggctcccaggtgcgggagagagtgcaaaatggcaactcttaaggaaaaactcattgcaccagttgcggaa

SEQ ID NO: 625384 - DNA, 82 bp, Homo sapiens
cggctgcgggaaatcgggctgaagcgactgagtccgcgatggagaagccgccaccacgactggctaatttttttgtgtttcc

SEQ ID NO: 625385 - DNA, 74 bp, Homo sapiens
tcgcgggccggggccacgctcagcgccgagggcgagatcgtgcagagctcttcagaaaccaggctgctttcagg

SEQ ID NO: 625386 - DNA, 89 bp, Homo sapiens
aaagccttccccctgctttgcatggctcccggggcgctgactgcgtgttaacatcaggaatccattacattgggcgtatggaagagggc

SEQ ID NO: 625387 - DNA, 50 bp, Homo sapiens
gctttggaggcaggccgtccacaacaaggtttgatgaaggccggaacaac

SEQ ID NO: 625388 - DNA, 95 bp, Homo sapiens
gttcggttcctgctgccactgctgccgccgcccccggagctgctggtttcattcgaggtttcgggccgtctgatgatttgaagaagagaagagag

SEQ ID NO: 625389 - DNA, 75 bp, Homo sapiens
ctggggctgggctcgccagtcttggggacagtgtcagcatcggcgccaatggtgtgccatagccatcctctttgc

SEQ ID NO: 625390 - DNA, 113 bp, Homo sapiens
gccggggctgctctctttgcggaggatggcgtctaatgagcgcagttgattcgaggttttaaaatcaaagatgggaaaatcggagaaaattgcccttccccatggccagcttg

SEQ ID NO: 625391 - DNA, 90 bp, Homo sapiens
ttttacaaagcatgggagtgcagctgcctgacaacaccgatcacagaccaacaaacgttccatcctcagagcagcctgaactgttcctaa

SEQ ID NO: 625392 - DNA, 100 bp, Homo sapiens
gaggcgagcgccgcgcgcaccactggagtgttgaagcctggaaatcccctccccttccccctcccccctttacagtatccccctccctccaccctttccc

SEQ ID NO: 625393 - DNA, 97 bp, Homo sapiens
ggtgaagtccacaatcaagttccaaatgaagaaggtagctacagcaagctgggtagcaggcagatccaaaggatatcatgaagtttccagggccttt

SEQ ID NO: 625394 - DNA, 98 bp, Homo sapiens
gggctcagcggccgcgaggccgcagctcccggtactccaaagattcaggtttactcacgtcatccagcagagaatggaaagtcaaatttcctgaattg

SEQ ID NO: 625395 - DNA, 100 bp, Homo sapiens
ccgaaatcaaagcgagagcgcctcggcctctccagctgtccgcgggaacttatagaaatgctggcaatttcaagaaaccaaaagttgttacaggctggag

SEQ ID NO: 625396 - DNA, 100 bp, Homo sapiens
cgacgacggctcctgggaggtcatcgaaggctaccgggcccagcacagccagcaccgcacgccctgcaagggagagtgtgaacatggctacgcctcttca

SEQ ID NO: 625397 - DNA, 100 bp, Homo sapiens
gttttggttttgatatggattatacccttgctggtgaaaggtgtagcagtcactcggcctacacccacagcatcgaccttgtgaacccagcgacctgact

SEQ ID NO: 625398 - DNA, 82 bp, Homo sapiens
gcagattctacaacacatggtggaatgtatccgggaggtcaacgaggtcatccaggacaactacacctttgcccaacctggg

SEQ ID NO: 625399 - DNA, 82 bp, Homo sapiens
ggaggtgttcgagaacgaccccgagacgatgggggctccggaggtggcgcccaggctctgagctaccctaggtctgcagact

SEQ ID NO: 625400 - DNA, 51 bp, Homo sapiens
gcagctacaaaatcaatggccggacgaaaatcaactcacaatgaaatggag

SEQ ID NO: 625401 - DNA, 83 bp, Homo sapiens
aggacgacatgttgcttttcgtggaggaactgggcaggcaaaaggcttctcttcccctccattcatgcacatggagctgagga

SEQ ID NO: 625402 - DNA, 75 bp, Homo sapiens
agagaggggagccggcgaggatcaaaatcttcgaaggaggttggctggggaacagaccagggaattggtggattt

SEQ ID NO: 625403 - DNA, 75 bp, Homo sapiens
gtggaaagagctactggggatgagagaaagaggaggaggcaggattagtgattatatggatctgacccctgtaga

SEQ ID NO: 625404 - DNA, 75 bp, Homo sapiens
ctgtcacaggccatgctctggcaaaaacgccccttcacagatgtagtcactacaaatcttaaattgcgaaatcca

SEQ ID NO: 625405 - DNA, 88 bp, Homo sapiens
ctgctgggagcccagggagcgccgcgcgaccaggaggcggcggcgccgccggctttggtgctggagaatctggtaaaagcaccattgt

SEQ ID NO: 625406 - DNA, 98 bp, Homo sapiens
agatcatggggcccaagaaaaagcacctggactaatgcggattgtggatgatgatgtgagctggacagctatctccacaaccaaactagaaaaggagg

SEQ ID NO: 625407 - DNA, 90 bp, Homo sapiens
ctagcggccgggactctgaactatggcgaggaggtggccaagttggagaagcacttgatgcttctgcggcaggagtatgtcaagctgcag

SEQ ID NO: 625408 - DNA, 101 bp, Homo sapiens
atattcacaacattaaagacatgaagctgttgaagaccctcctggatattcctgcaaacccaacagttgttgacctcctgtactggagagacattaagaag

SEQ ID NO: 625409 - DNA, 83 bp, Homo sapiens
cgcgggagctgatgcggctggaccggccggggaaacagtattttctggaagggaatcattgatcagcgattcgagaaggtttc

SEQ ID NO: 625410 - DNA, 74 bp, Homo sapiens
cacgatgatgattctagcaggttcctgagtcctcgagcgcgggaagaaagctctttcgacgtgtagcagcagct

SEQ ID NO: 625411 - DNA, 83 bp, Homo sapiens
caagtgttggcggatggaagggaggagactcctgaccctcagaatgactgatggtgcatctgcaatgttaatcatggcggagg

SEQ ID NO: 625412 - DNA, 75 bp, Homo sapiens
ccgcgtttcagccctagggaaggatgaagccaacgcacacgatggtcaactgctggttctgcaaccaggatacgc

SEQ ID NO: 625413 - DNA, 98 bp, Homo sapiens
ggaggcgaacagtctcgttgctgcctctgtgtacgctgaggggggagttgaaaacgaggcccactgcgactttgtgaagctgcgggagatgctgattc

SEQ ID NO: 625414 - DNA, 90 bp, Homo sapiens
cacactgccacctgattaaaggaattgatttctgcgccaggagatgaggggcggtagagccctggaatggagatgtccttgacgcctggg

SEQ ID NO: 625415 - DNA, 100 bp, Homo sapiens
attcatctcaaaaacaaaattctgaactcaggacttggcaagtatccagctcacatagaagacattgactacgaggaaggaaaagtactcatccatttca

SEQ ID NO: 625416 - DNA, 83 bp, Homo sapiens
cttcaaagcctccatctatctgcttgcaatctgccaggacaaagacaatacactacgtgaggctggagtgcaatggcgtgatc

SEQ ID NO: 625417 - DNA, 75 bp, Homo sapiens
gtggggccttcggaaagagagagcaggctgaggctgaggtggcctccttgaaccgtaggatccagctggttgaag

SEQ ID NO: 625418 - DNA, 75 bp, Homo sapiens
agtgattgtggactgtcaatcttagatagattcttcaatgataagcagtggccggtgtccagctgcctactttct

SEQ ID NO: 625419 - DNA, 55 bp, Homo sapiens
cccaggagctgctggaattcaccatcagaacttccagagcacctcaggaagagag

SEQ ID NO: 625420 - DNA, 100 bp, Homo sapiens
ctggagccccagattcaacccgtgtacgtgcctgtgcctaaatgaaagagtttctagccaaagccaaagaagactttttgaaaaaatgggagaatccaac

SEQ ID NO: 625421 - DNA, 75 bp, Homo sapiens
gttctggaggagatgaaagctttgtatgaacaaaaccagtctgatgtggatttcagtcataatcggttgtctaac

SEQ ID NO: 625422 - DNA, 100 bp, Homo sapiens
gatatgttgtgggttgtcgtcgacagactaagcaacctggggatccctggagtgtgggctttccatatcggcagcacttccccgttggacaatgtcaggc

SEQ ID NO: 625423 - DNA, 83 bp, Homo sapiens
catctgccggctgctccgcaccccggggtcccaggaagggcggcccagtcaggatggctaaaggtgaccccaagaaaccaaag

SEQ ID NO: 625424 - DNA, 100 bp, Homo sapiens
gaagaagcatcgttaaagtctctcttcaccctgccgtcatgtctaagtcagagactatcaaccattgatgaatctggttccattttatcagatatcagct

SEQ ID NO: 625425 - DNA, 51 bp, Homo sapiens
ctgtgtgccccttctccacccagagggagtaccctgacttctaccggaagc

SEQ ID NO: 625426 - DNA, 100 bp, Homo sapiens
gtttgatactgacctgtaaatcatcctttaggttaatgcttttggaagaagaacatgccgatcctgaggctttggctgaaattctgcttgaaacttgtaa

SEQ ID NO: 625427 - DNA, 90 bp, Homo sapiens
tgtcttcggtggactccttcggcagtccacccaccgccgccgcctcccagaggctgggaggcggcagaatgcagccagaggagggcacag

SEQ ID NO: 625428 - DNA, 82 bp, Homo sapiens
gaaaatagcagcgcagtgttactccagtggcacgaaaagatgagatccgaaatggcccataccgacagctcttccacccaga

SEQ ID NO: 625429 - DNA, 51 bp, Homo sapiens
cctccgcgagcgtccggattgcagcagctgctgaaatgggttgcggattga

SEQ ID NO: 625430 - DNA, 96 bp, Homo sapiens
attttactacagtcaagtctgaagataacatatgaggtcctgatgaagttgtagggccagaaggaatggaaaaattttgtgaagacattggtgttg

SEQ ID NO: 625431 - DNA, 98 bp, Homo sapiens
ccttctggccaaggtgattcagattgcaacgtcatcctccacagctaaggtcagaatggcggcagtggagcatcgtcattcttcaggattgccctact

SEQ ID NO: 625432 - DNA, 98 bp, Homo sapiens
gcctctgtctccgagctcgcctgcatctactcggccctcattctgcacgacgatgaggtgacagtcacgggccgcgttcgcaccaaaaccgtgaagaa

SEQ ID NO: 625433 - DNA, 75 bp, Homo sapiens
ttcctgtacagcctgcagaactagttgatctctctaatgtattagatcttcatgcctttgatagtctctctggaa

SEQ ID NO: 625434 - DNA, 90 bp, Homo sapiens
atctatggagttttcacaaccaacgtgtctcctctgagcctccggcctccataagacccaaaacagatgacacctcttcccagtcccccg

SEQ ID NO: 625435 - DNA, 89 bp, Homo sapiens
cgccttttcagccgtcaccaccatcacaaaaggttgttggaggaagagtcttccaagagggctgaactagaaaagtggcacttggagca

SEQ ID NO: 625436 - DNA, 98 bp, Homo sapiens
agtgggtgtctggtgccggcgtttgggctacggttgttgttggcgactgtgcttcaagcggtggtgagcttcattttctccaaattggaggaacctgt

SEQ ID NO: 625437 - DNA, 82 bp, Homo sapiens
agtgtctactatattgatacccttggaagaattatgaatttaacagtaatgctgatgtactttatgaaaaatcgtgcccgga

SEQ ID NO: 625438 - DNA, 74 bp, Homo sapiens
aaacctttccaacacagatgtccaagctgccaagacaaggagactggctttcacagaggtttgggttgggttca

SEQ ID NO: 625439 - DNA, 99 bp, Homo sapiens
ggggtccagccgtccccagaacgcagatcagaggtagtcggacctttcccgctggcgcgcagcctcagctaggctccaaccaggaatggagacgccatt

SEQ ID NO: 625440 - DNA, 90 bp, Homo sapiens
gaaaatgaagaagttataaatattctccttgctcaggaggatttgacagctaaggatattgaagaaattattgatgagctcaaggctggc

SEQ ID NO: 625441 - DNA, 100 bp, Homo sapiens
atctgcctaggcattttgctgtctcctcctaatacgaaataatagtgtaatccttgctgatgaaatgggcctaggaaagaccatccagaccatatcattc

SEQ ID NO: 625442 - DNA, 75 bp, Homo sapiens
aggaatgccaccagttatgccaggcatgccacctggcaaaccagtccagctacgggggcccagccagccagcagc

SEQ ID NO: 625443 - DNA, 82 bp, Homo sapiens
aatgcagcatgccatcctgaacgtctctccctgtcctagctctgtaactgtttacagtaatagcctgcagctggtgttttga

SEQ ID NO: 625444 - DNA, 98 bp, Homo sapiens
aaaagaccgtttgtgttttgtgatggaatatgttaatgggggcgaggaactcgaatcatttatgacagaaagtttctgttggatcgtcgcaattctcc

SEQ ID NO: 625445 - DNA, 100 bp, Homo sapiens
ctgatggaatccaatcctctgcttccaggacaagtcctgcgcttggggatcctctgtacgcccgttcactgcttcccatcgacggtcagtgcgcacgttg

SEQ ID NO: 625446 - DNA, 99 bp, Homo sapiens
cgacatctagccctgaatctgcagggtgaaattaagatccccgtatgtattgaggatgagtgtaacatggagctgcctccagctgctctcttattccgg

SEQ ID NO: 625447 - DNA, 75 bp, Homo sapiens
aaccaacggctcaagaatttcaagaacaaaggccgcgacttggagaccctctttcccagctgcccgctcctcagc

SEQ ID NO: 625448 - DNA, 90 bp, Homo sapiens
ctaactgcggcgggcgagacgttctcagatgtgggacctaggaaaaggcctgaagattccccagctataccagtctggagtggttgtcct

SEQ ID NO: 625449 - DNA, 82 bp, Homo sapiens
tcctccaggcatgccccgctacgagctggctttaatcctgaaagccatgcagcggggagttgaccacatttggccatttccc

SEQ ID NO: 625450 - DNA, 90 bp, Homo sapiens
gttatggatattctggtggggagatgaacccaacctagtgggtgtaatacatcatgaactgcagggcatttggattcagtcctcagtgat

SEQ ID NO: 625451 - DNA, 100 bp, Homo sapiens
gctttggagtaaccctgtgtgcggttcctattgcacagggaaagaatatggcaaagctgatgcaagatgggtttattttgatccaaccattgtgtctgtg

SEQ ID NO: 625452 - DNA, 75 bp, Homo sapiens
caggcctggtgctggcctcctgtgatgggccttcgcactcccaggtgaaaggtgtagcagtcactcggcctacac

SEQ ID NO: 625453 - DNA, 82 bp, Homo sapiens
cccttttaaatcagcttatagttcttttgtaaatctctttcgttttaacaaagtttgcagaaaaaacttcagcatgtgccag

SEQ ID NO: 625454 - DNA, 90 bp, Homo sapiens
atgaaaagctcaatgccagcaggggcttctttgctacgttagtggatgttgtcgtccagtccctggctctgaagaaagctgataagcaag

SEQ ID NO: 625455 - DNA, 107 bp, Homo sapiens
tgcctttgaagctgccgatgccagagccaggtgaactggaggagcgatttgccatcgtgctggattctggactctacttataatatccctaactgctggattctcct

SEQ ID NO: 625456 - DNA, 75 bp, Homo sapiens
tgcagcgtctccttcccgttctccaggtgtcagcggtgcccactgtgctggccatgaagaatggggacgtggtgg

SEQ ID NO: 625457 - DNA, 98 bp, Homo sapiens
cgccaggccacccggccgtcagcagcatgcaggtcaaggatgctatctaaatgggccttttaattcaaatctactgactatcccgaagcaaaggtcat

SEQ ID NO: 625458 - DNA, 100 bp, Homo sapiens
tgcaaatactatgagaaaaggttattggaattctgttcggtgtttaagccagcaatgccaagatctgttgtgttccagaaagctgagtctgatctggatt

SEQ ID NO: 625459 - DNA, 96 bp, Homo sapiens
gacagcaacagctcggcgggctggaagggtgacgagaacaagtcagtgcgcgaccgtttcaacgcccgccagttcatctcctggctccaggacgtg

SEQ ID NO: 625460 - DNA, 82 bp, Homo sapiens
ccaaagataaaaatttcaggatcaccattaacacttaagattctcacatgcttaacactggaaatgatttgaaagaaaatgt

SEQ ID NO: 625461 - DNA, 75 bp, Homo sapiens
ggcggactatgtccgaagcaaggatttccgggactacctcatgaggatctaagcctttcccacgttatggttata

SEQ ID NO: 625462 - DNA, 109 bp, Homo sapiens
actttgcgacggaaatgtgtcatcgaaagccaggtacccactgatggtaatgctggcctgctggctgaaccccagattgccatgttctgtggcagactgaacatgcaca

SEQ ID NO: 625463 - DNA, 98 bp, Homo sapiens
ccagcctgtccggctcgtcggtgtcctccggaagatgagaatgtgcctactgctcctgatcctccaagtcaacatttacgtgggcatgggacaggctt

SEQ ID NO: 625464 - DNA, 75 bp, Homo sapiens
tgctcgctggcaccccgaacgggttgcttcccccgctgcgaggactggagactgatgcatgagggggctacggag

SEQ ID NO: 625465 - DNA, 100 bp, Homo sapiens
ggctcaaagaaagatgattatatggcccactgcgtgaccttggttcagctgtccatttcctgtgaccatctcattgacaaggacatcggctccaagtctg

SEQ ID NO: 625466 - DNA, 98 bp, Homo sapiens
gagaagtatccaatagggatattgtagaaactgtctttaacctgattacaccaggaagcaaggcggcagctgccaacctgtgtcctggagatgtcatc

SEQ ID NO: 625467 - DNA, 83 bp, Homo sapiens
cgcgccgggagcggcgctggccccaaggcgctgccctgcgcaggttccacagaggacgtcccccacaggcccaaaaaacatgc

SEQ ID NO: 625468 - DNA, 82 bp, Homo sapiens
agggaaccctggtcaccgtctcctcaggataaagataaagtttctctaaccaagaccccaaaactggagcgtggcgatggcg

SEQ ID NO: 625469 - DNA, 100 bp, Homo sapiens
aactggacaaccaacggctcaagaatttcaagaacaaaggccgcgacttggagaaatgggacgtcggtcatcagatactgaagaagaaagcagaagcaag

SEQ ID NO: 625470 - DNA, 98 bp, Homo sapiens
aagagtatttgaagtctgtgtcaaacatccatatcataagtggaattttggagatattcaaaggacctgatcccaaccttgaagaaagtcctaaaaga

SEQ ID NO: 625471 - DNA, 89 bp, Homo sapiens
tggacggatgctcatcaagctgctggaggtcctctctggagagaggctgactggtcaaacaaatggattttacagaggcttacgcggac

SEQ ID NO: 625472 - DNA, 90 bp, Homo sapiens
ctcgctccgtggccttagctgtgctcgcgctactctctctttctggcctggaggctatccagcgctgttactgaggcggagacacgggtg

SEQ ID NO: 625473 - DNA, 100 bp, Homo sapiens
gtgcgatctggacgcggcgctgctgaccgacatcgaagtgcagccttcatattcatgcttcctacagcatctcccagaaactgaatgttccaatggcccc

SEQ ID NO: 625474 - DNA, 100 bp, Homo sapiens
gtaaagacgctgcgaattgacgccttttataataaagacacttatcttgcccaagagctggattgaaagtatccagctgatgatggacagtgaaactggt

SEQ ID NO: 625475 - DNA, 75 bp, Homo sapiens
acgacttttacatcatcacggaggaatcagagatcattgatttcttcctgggggcctctctcaaggatgaggttt

SEQ ID NO: 625476 - DNA, 99 bp, Homo sapiens
ttcagtaaatgcactaggatccagagagctggagagatttaccagcatgagaattaagaaggagaaggaaaagcccaattctgctcatagaaattcttc

SEQ ID NO: 625477 - DNA, 100 bp, Homo sapiens
atcacacagttcaacctgacacaggtcacctgtcactcagccctgctggacctggagaagctcccagaattcaacagtgctatacgtattggtcacgttg

SEQ ID NO: 625478 - DNA, 97 bp, Homo sapiens
tacgccatcgcagacacggcctaccggagcatgcttcaagaagtggttcagctcagcctcgcccccgaggacagggtcagtgtgaccacagtgaccg

SEQ ID NO: 625479 - DNA, 124 bp, Homo sapiens
aaaaggagagaagctgaagcattgcttcaaagcatggggctaactccagaatcccccattggtgcaatggatgagcttcatagtctggatccaagaaggcaagagttattggaagctagattta

SEQ ID NO: 625480 - DNA, 50 bp, Homo sapiens
gccagtatgatagcaatgatggcaggtactccaattcagaatgatctgca

SEQ ID NO: 625481 - DNA, 100 bp, Homo sapiens
gtccgagacacgcggtgaggcggcgacgggctccgggaaagaccacagcaagattctttcattcgtctcctcctagcctgggggaccaggctcgaactga

SEQ ID NO: 625482 - DNA, 74 bp, Homo sapiens
ccgacatcgtgtgccgctgccagagttcaagctgaagaagatgtggaaaagtcccaatggaactatccggaaca

SEQ ID NO: 625483 - DNA, 100 bp, Homo sapiens
ctgcagtgggacctatgcacaggccttggcccctccaccagaggaaggtgctgccacgtgtctgctccttctgaacctccaggtttctgctacgttgccc

SEQ ID NO: 625484 - DNA, 100 bp, Homo sapiens
ttcatggaatgtggtatcctacggttcgaagaactcttgtctgtctctccaaattatacagatgcatagatatacgtaggtaacctttccagagatgtga

SEQ ID NO: 625485 - DNA, 100 bp, Homo sapiens
cttggctcgcatccgcctcactttggctcagcatgatccatcagcggttgcagttgctgacctggctatgcaaataaatatggggatgtatgaatacaac

SEQ ID NO: 625486 - DNA, 83 bp, Homo sapiens
ctcaatatctgtcttcggtggactccttcggcagtccacccaccgccgccgcctcccaggatctcgaggacctggaagaagca

SEQ ID NO: 625487 - DNA, 100 bp, Homo sapiens
gcgtgcgggccgtgagcggcgccagagggtacctgggtactcaccagatgagctgcggtatctgccattaaacacagccctgtatgagccccctctggat

SEQ ID NO: 625488 - DNA, 105 bp, Homo sapiens
agccagcgacccaccatggagacccgctacaacctgaagagtccggctacttgaaggaaattttgccaaagaagtgagccatgaaatggatggacttatttttca

SEQ ID NO: 625489 - DNA, 96 bp, Homo sapiens
tttgactttctcctcattgaagctatgcagtatttctttggcatcactgcagctagtaatttgccttctggattatttctacctggacaaggactg

SEQ ID NO: 625490 - DNA, 100 bp, Homo sapiens
cactactcttggaatcaaagataaatccaaatactgcatatcagaaacaacaggtccttatgtcgtcagaagatcgagaagctcaggaggatgaattgct

SEQ ID NO: 625491 - DNA, 75 bp, Homo sapiens
agaaccttttccctaatacgtacctcattgtgggagctggacagactccaccacgtccacccttaggtcctccag

SEQ ID NO: 625492 - DNA, 90 bp, Homo sapiens
cacctatctatggtgcagatattaatgggagcatatatgatgaggatcctttaggaaaaagacccaatcctccccctgtttctgtgccct

SEQ ID NO: 625493 - DNA, 100 bp, Homo sapiens
caaagagttatatgaaatcaatcctccaatccatccttttacaatccctgctattattcgtccattcagcgtattgaactatgatccacctcaaagggat

SEQ ID NO: 625494 - DNA, 83 bp, Homo sapiens
cttctactggctgcgctcctttctggccggaggacttaaccaccaccatgtcgagcaaaagaacaaagaccaagaccaagaag

SEQ ID NO: 625495 - DNA, 82 bp, Homo sapiens
ggacctgctccgggacaacatgctgcggggcacagttatctaaaacagttcatgctgctgaaaacctccttcctggcagatg

SEQ ID NO: 625496 - DNA, 75 bp, Homo sapiens
cccccaaacagttatacctgaaggggaatgctgcccggtctgctccgctactggcagcaattccatttccgtgag

SEQ ID NO: 625497 - DNA, 98 bp, Homo sapiens
ctgccttccacctccagtgctggatttggagttccatggagtgatgagattttattttcaagataaagctgctggaaactttgcaacaaaatgtattc

SEQ ID NO: 625498 - DNA, 75 bp, Homo sapiens
atcaccatcacagagagcgatgtgaaaattatctcagtgaacgaggatgtcactcttagatcagccctcgataga

SEQ ID NO: 625499 - DNA, 82 bp, Homo sapiens
ttcacatttgtgcttctacaaaaaaccaaaagttttggaaggtctccatcaagaaaacaaaattattcatcaaaaaatgaaa

SEQ ID NO: 625500 - DNA, 82 bp, Homo sapiens
tcacaggctgttgtgaggactaagggtgcggcagtgcctggtacatgcttatttcaacaattccaactagccgtttaaaatt

SEQ ID NO: 625501 - DNA, 73 bp, Homo sapiens
agtgctttgggggattgcagaaagtttttgaacatgacagatatgtcttgtcgttcaagacttgcaacactaa

SEQ ID NO: 625502 - DNA, 100 bp, Homo sapiens
cgagggaatagtggacgaactgcacgtgtacaacacgggttcgtgctggccgtgggcagcgccgtctttgatgccatgttcaacgggggaatggccacaa

SEQ ID NO: 625503 - DNA, 79 bp, Homo sapiens
aaggatttcatccacacagcaaggatccacctctgttctgtatctggcaccactccttctacaatgagctgcgtgtagc

SEQ ID NO: 625504 - DNA, 115 bp, Homo sapiens
cccgacatgagggaaaagggacgtaggaagaagggcaggacctgggcggaggccgccaagacgataccggataatgactcagtgctggcaacatcagcctgaagacaggcccaac

SEQ ID NO: 625505 - DNA, 100 bp, Homo sapiens
tctgaataaaccctgtcaaatggcgttttttagagtggaccatggccttagcaattgtatgatggctatgatgaagagtatgactgtcccattttagatg

SEQ ID NO: 625506 - DNA, 100 bp, Homo sapiens
agaatccgccatgggctactcagtttacagccactgcagtatcacagccaggcattaactgaacgtctggatgctcttcttctggaaaaagcagagactg

SEQ ID NO: 625507 - DNA, 83 bp, Homo sapiens
tcacttgcatgtatttggaacaaaaaaaggagatgcctggcagccccgctctctgcactggcaggggccgcctgaagtgggag

SEQ ID NO: 625508 - DNA, 100 bp, Homo sapiens
gacggcacaccctacgttaccgtgctcaaggtcttgggtggtgcctatgatgagttcatctttgctcctcggctggacaatctgcacagctgcttctgtg

SEQ ID NO: 625509 - DNA, 75 bp, Homo sapiens
ctttctgacaatgcagcttctcttgcagtgcaggttacggcctccgctgccacagggccatcatcaccatctgcc

SEQ ID NO: 625510 - DNA, 100 bp, Homo sapiens
cggcgaaggtcagcgccgacggcagccggcacctgacggcgtgaccgacccgagccgtgagatggaagattttcgaggtatagcagaagaatcatttcca

SEQ ID NO: 625511 - DNA, 75 bp, Homo sapiens
gagacagttgcaaaggatgtggtttctcaggccctcgatggctataatggctaaaacactgtcttatgaaccatt

SEQ ID NO: 625512 - DNA, 98 bp, Homo sapiens
ctggaggacctcttcaacttctgctccaggaaattcagcctcaaaaccgtcctgctgcttgctgaccaaatgccccattgacaaaccttcagattctc

SEQ ID NO: 625513 - DNA, 82 bp, Homo sapiens
ggaagatactgcagagatattctactccatctcattcattgtacaggtgattgaattactcagatatgaagatcatcatcta

SEQ ID NO: 625514 - DNA, 100 bp, Homo sapiens
cccgctacgggaagcaggcctcgccacaggctatttttatgattcccacaaatccaccaccaacattcagaaagccagaactttggtccgatgatttcac

SEQ ID NO: 625515 - DNA, 82 bp, Homo sapiens
aaaacattcaagaatgagagcgagaacacctgtcaaggccctggccaacgtcaacattgggagcctcatctgcaatgtaggg

SEQ ID NO: 625516 - DNA, 82 bp, Homo sapiens
ggctggacacgtggacatctgccacatgctggttcaggctgaccccgcactacatctacccaccagccatcgtgcagcccag

SEQ ID NO: 625517 - DNA, 83 bp, Homo sapiens
ctgcgtcctcatcgggcttatgttcgagatcttcaaagctgctgcgggcattctatgtccccttcctgtcagatcagtataca

SEQ ID NO: 625518 - DNA, 100 bp, Homo sapiens
aatatgttttacatccaagaactacaggctttacttttgtggtagaccgtctaagagaagatgtattggcaagtcaagaacaacagatgaatgaaatagt

SEQ ID NO: 625519 - DNA, 74 bp, Homo sapiens
tccaatcgctggtagaagcaccacaccaacatctagtcccttccgtttgggcttcctgtagacacccttttcct

SEQ ID NO: 625520 - DNA, 95 bp, Homo sapiens
agtgacgatggctcttttcatatcagagaaacgggtatgcaggagattagaagccagtgggcatgagcgtggctgccaccaggtgaatgcctgtg

SEQ ID NO: 625521 - DNA, 51 bp, Homo sapiens
gcctagcagtcgggaccgtactgaggatgatgagagcctgaagtacctcac

SEQ ID NO: 625522 - DNA, 75 bp, Homo sapiens
cttggccttggagcgaggctatcacaagctgcaccagcttctaaccgaattggtggaacgagaatgcctacacgc

SEQ ID NO: 625523 - DNA, 75 bp, Homo sapiens
ctacaggatttatcaaatcgagtcactgtcaactgtgatgcagatccatccgccctagcaaaatatgttctggct

SEQ ID NO: 625524 - DNA, 100 bp, Homo sapiens
catgaccctaatggtctttttgttcaagataaagtgattttttgcctttgttgattaactggacaaattcagatttgaggcttaagcaacttcttccggg

SEQ ID NO: 625525 - DNA, 99 bp, Homo sapiens
cagcggatcaacccgcttccagggggacgcaacttctcaggcaattcagcaacagagctcttcagaaactgagggagaaggtggaaatactgcagatgc

SEQ ID NO: 625526 - DNA, 100 bp, Homo sapiens
tgaagtcggccagcctgagcaagcggaggacctacgccggcctggacacctggatttcattagcatcatgacctacgattttcatggagcctggcgtggg

SEQ ID NO: 625527 - DNA, 90 bp, Homo sapiens
atttttatctctggtggctctgctacggcggcgcagaaatgaggcagaagcggaaagatctaaatcggaaggtagcacacagacatatgc

SEQ ID NO: 625528 - DNA, 50 bp, Homo sapiens
ctggagctgcactgcgacctggacatcaccttgaagatacagtttttgag

SEQ ID NO: 625529 - DNA, 50 bp, Homo sapiens
gcaactgcgttccatcattttaacagtgtaccttgaaagacttttaacat

SEQ ID NO: 625530 - DNA, 75 bp, Homo sapiens
ttatatgctttcctttgctcccagttcgatgaagaattcacagctcgacaggaagctcaagcagagcttcaaaaa

SEQ ID NO: 625531 - DNA, 98 bp, Homo sapiens
gaaggaggaggagcagcaggcctccgggcccggcgccgccgcccgcaggcatgctgcagacagacctttccgtccttcatgaacacacgtgtggtaga

SEQ ID NO: 625532 - DNA, 88 bp, Homo sapiens
acagactatggggcctttatcaaaatcccaggctgtcggaagcaagagagaatggcttactacacctccaggatgcagttccccatgg

SEQ ID NO: 625533 - DNA, 100 bp, Homo sapiens
gccagaattaagactttcaggcagcaacatggcaagacggtggtgggccaaatcactgtggacatggaccctgatgctcccataagacagaaaatgcccc

SEQ ID NO: 625534 - DNA, 74 bp, Homo sapiens
cacaaggatgtcaacgtggtagtagtggaagggggtgacggccctgctcgggaggccctccagtctctgagcca

SEQ ID NO: 625535 - DNA, 111 bp, Homo sapiens
cccagctcttccaggactttgagccagtccagaccctgctgctgtcttcaaagaagcggggatctgatgagcttctttcttctggcatcattaacggaccttttaccatga

SEQ ID NO: 625536 - DNA, 100 bp, Homo sapiens
aggtcaccagtcccaagtcgtccccctctccgccccccaggaggggcgagagggagccgcagctgatgtcaggtgaacccgtgagcaactgtggtacctc

SEQ ID NO: 625537 - DNA, 90 bp, Homo sapiens
cagcgccgtctacgtgctggacctgaagggcaaggtagctcgtaagctggtcatcctggagggtgagctggagagggcagaggagcgtgc

SEQ ID NO: 625538 - DNA, 50 bp, Homo sapiens
acttgtttctggatgattctaagagatttttgtggtcaacaaccaggagg

SEQ ID NO: 625539 - DNA, 50 bp, Homo sapiens
gcacgtaatcacccaaatgccaaagtatcactacacagccaacaaaatct

SEQ ID NO: 625540 - DNA, 75 bp, Homo sapiens
aagcggcccctgtggctgtgtaagatctgcagtgagcaaagagagaaaaagcttgagtctccacccccatctacc

SEQ ID NO: 625541 - DNA, 75 bp, Homo sapiens
ccaccaactgcttagcacccctggccaaggtcatgcttacgttaagacaaggagactgcaaaatgactgatgtcc

SEQ ID NO: 625542 - DNA, 88 bp, Homo sapiens
ttaggagagacgagcagccttcagggagcgtggagacaggtttcatatacactggagaagtcgtacatcgaatgctaacagccacaca

SEQ ID NO: 625543 - DNA, 100 bp, Homo sapiens
agaaggtgaagcaggcggccaaggagaaggttgacagactaatggagttgcattttaaatatctgggtgcaatgcaggtggcggacaagaagattgaagg

SEQ ID NO: 625544 - DNA, 75 bp, Homo sapiens
gagcaggctctgcgggaggtggagcacctgaagagatgccagcaggagccttcacgtaaatgggtccagtcatgc

SEQ ID NO: 625545 - DNA, 75 bp, Homo sapiens
gggccattgtcgactgtggctttgagcatccgtcagaagagattgggtctctccacattgccccggctgctctcc

SEQ ID NO: 625546 - DNA, 89 bp, Homo sapiens
gaaaaagtaacaagacttacccagggaaattaaagagggtgctttactgttgccctgaaattttcaccatgcgccagcaggacattaac

SEQ ID NO: 625547 - DNA, 101 bp, Homo sapiens
agacgatgaggacgacagcaccttcacaataactgttgatcagaaaaccttccatttccagggttttggagatcatattcattggaggacactggaagatg

SEQ ID NO: 625548 - DNA, 82 bp, Homo sapiens
catgaagctactaaccagagccggctctttctcggctttatcctgtggataaacgcagagtgaacgagtttggggagtccta

SEQ ID NO: 625549 - DNA, 101 bp, Homo sapiens
ctgctggggaaggcgattggcatcgatctctccatcccttccgaggcccgacttcgataaaatcagtggttctggaagtaactctgatatgatggaaaaca

SEQ ID NO: 625550 - DNA, 90 bp, Homo sapiens
agttgtccagagaacaaacctctggtcctttagatctgttgccacctactgtgggaactttgggtcccgggattcttgagctgtgcccag

SEQ ID NO: 625551 - DNA, 101 bp, Homo sapiens
acttcaactatggcagcagcgtggcctccgccaccgtgcacatccgaatggagctaatgtcaaaccccgaaattccacaccacctagtttggcaagaaatc

SEQ ID NO: 625552 - DNA, 98 bp, Homo sapiens
gaagagtacgtcttcgggtctacccctaatcactgttctaagaacggaagcatctgggctggatggaatttagcatcaagcagagtcccctttctgtt

SEQ ID NO: 625553 - DNA, 100 bp, Homo sapiens
ctgtctggaagttacttgtggacatgatgcccatagatctggacaccctgtctcctgaggagcgccgggccaggctgcggaagcgtgaggctcagctcca

SEQ ID NO: 625554 - DNA, 82 bp, Homo sapiens
gcgagcgtctgggcgggtggtaggaagctgaatatggtgggcatgatcagatagatttgtatgacgatgtcatatctccatc

SEQ ID NO: 625555 - DNA, 100 bp, Homo sapiens
aaaaaaacaaaggtatttatggaattccactgagtggtaatggatgatgcagttcaaataactaaggtccaccttctccaatccctgcctgctgggagag

SEQ ID NO: 625556 - DNA, 75 bp, Homo sapiens
cgacgatgaagtcagtgaggagtggccataaaatgcagtaaaaacaaatccagttcccaagaagctgtacaaatg

SEQ ID NO: 625557 - DNA, 103 bp, Homo sapiens
ctcgcctttgccgatccgccgcccgtccacacccgccgccaggcttctttgcctacacgtgcggccgcctggtggtggtggaggacctgcactctggcgccca

SEQ ID NO: 625558 - DNA, 75 bp, Homo sapiens
gttaagaaccttattgatgcagagattattaaagacaggggcaagtgtccgagtggtgaatcagctacttacaga

SEQ ID NO: 625559 - DNA, 83 bp, Homo sapiens
gaggctcccgggcttgcgtgggtcgcgtggggcaggcagtggcgctgcgggccaaggccttcggcttcaacgtgctcttctac

SEQ ID NO: 625560 - DNA, 82 bp, Homo sapiens
atccggggggaccggtgctggcgagacctcacctgcatggacttccactatgagagacaagaggagcagcagcggcaccgcc

SEQ ID NO: 625561 - DNA, 100 bp, Homo sapiens
atgtgcttccagaggagcccaaaggttggtggttctgtcagatgaaagcaaagcgaggctggatcccagcgtccttcctcgagcccctggacagtcctga

SEQ ID NO: 625562 - DNA, 100 bp, Homo sapiens
catttagcattgatgggaagatggtagctgtaaacctggccactggaaaacgaaggtattgcacatctattacaaatttcctggttatgggaggattcca

SEQ ID NO: 625563 - DNA, 100 bp, Homo sapiens
tagaatgagaatgaagtatggtatgccaccacgggctgttccctgaccctgcaccatacggagaaaccagaacatgaagacatatgtgaataccgtccct

SEQ ID NO: 625564 - DNA, 100 bp, Homo sapiens
gaaggcaaagaacctctggtgttgaaagctggcataaccttgacaacagattgccttgaagatagcctccttacatgctactgggggtgcagtgttcaaa

SEQ ID NO: 625565 - DNA, 82 bp, Homo sapiens
gctctgttggacagtgatgtgaagaggttcagctgtcctaatcctcactgccgaaagacaccagagccggaagtggaaccgc

SEQ ID NO: 625566 - DNA, 82 bp, Homo sapiens
aagaaaccttccctaacactgaaaccaatggtgaatttggatgaggaagatggagagaatgcccacccatatagaaacagtg

SEQ ID NO: 625567 - DNA, 98 bp, Homo sapiens
tgcctacctgtcagccgtgggcaccttcacctgggtctgcacgccctttctggagaactgtgtttatgaaactgtagttttgcctttggatgaaaggg

SEQ ID NO: 625568 - DNA, 48 bp, Homo sapiens
gagtaggaggcaggtctccgcgttccagctcaaccaagataaaatgaa

SEQ ID NO: 625569 - DNA, 99 bp, Homo sapiens
aagcgctctcatgaagcaaccgcccattcagtctacggctggggccgtcccagttcgcaatgagaaagtgttagatgatgaagatagcaacaacatcac

SEQ ID NO: 625570 - DNA, 52 bp, Homo sapiens
aaagtttgcagaaaagaatatgaggatggaacaaaattcatctgtattgggg

SEQ ID NO: 625571 - DNA, 100 bp, Homo sapiens
caaggggagctcgtaaggtccctcaaagcgggaaatgcgtcaaagtggtttgatgataagaacccaatttgggccgggcgcggttgctcacgcctgtaat

SEQ ID NO: 625572 - DNA, 95 bp, Homo sapiens
ataaaagtcctgaaacagttttgcagtcgagctccttaataagcatttatagtcagtttttggcagcaatagaatcactaaaggcattctgggat

SEQ ID NO: 625573 - DNA, 75 bp, Homo sapiens
caagagtccctctaaagcagctcaaaaggtgtgatgaatgcagactctgctaccattttggctgtttggatcctc

SEQ ID NO: 625574 - DNA, 49 bp, Homo sapiens
tgagctactgggctgtgagctgaacgacctccttaatggagtgaagctg

SEQ ID NO: 625575 - DNA, 89 bp, Homo sapiens
cgcttcccctactgcgtggtgtggacgcccatcccggtgctcacgcacgtgtggttctcaaatataggcattctgatgggaacttgtgt

SEQ ID NO: 625576 - DNA, 97 bp, Homo sapiens
gggagagccgggtaccggccgtggaagcggccaccgactactgtcagcagctgtgccagagttttccagaaaaagaccttctgcactgtccatctaa

SEQ ID NO: 625577 - DNA, 101 bp, Homo sapiens
ttcgtgcgctaccactacgtggggacgttccccgacggccagaagttcgactccagctggtcctatagtacccctcctcaggaatgtctccccagtgcaag

SEQ ID NO: 625578 - DNA, 90 bp, Homo sapiens
ggaaacttgcagcaaagccattcgggttggagtaattgtctcagagaaagatgtcacatctgctaaagcactgtatgaacatttgactgc

SEQ ID NO: 625579 - DNA, 82 bp, Homo sapiens
gcgcttccgcgaccacccggagtgattgcccggcagagcgcgggtaatcactttgatcagtatgaggaaggacacttggaaa

SEQ ID NO: 625580 - DNA, 100 bp, Homo sapiens
acgtggttgttcgtaggaccaaacttcagatgcagactacagctctggagtttaggcaacggattatcttacgtgccagatgcccctcgaaatctccagc

SEQ ID NO: 625581 - DNA, 100 bp, Homo sapiens
actcagttgaaggagcaagtacctggtttcacaccacgcctggcaatattacaggaaatccaggatgagtcagctgtgttatggttggatgaaattcaag

SEQ ID NO: 625582 - DNA, 98 bp, Homo sapiens
ggagaaccagccgactggagcaggcagcagcccagcatttaaatcaaacggtattgagatggattgggttatgaaacataatggtccaaatgacgcta

SEQ ID NO: 625583 - DNA, 75 bp, Homo sapiens
tggaacagcacactttctggagcatatggctttcaaggtggatgagcttttagaaaagtacatggactcttatga

SEQ ID NO: 625584 - DNA, 75 bp, Homo sapiens
gtcttggaaatactaagttgggtcactacaggaaaagatatcttcattaaagtgcaacagcacactgagagcaac

SEQ ID NO: 625585 - DNA, 82 bp, Homo sapiens
ctgcgggagatgctggagaagctgatcaccaccaagtaagcgaagaaaattagagaaaccgagaaaacccataacattcgtg

SEQ ID NO: 625586 - DNA, 100 bp, Homo sapiens
aaggattccaagtaactcttatttgggactgttgacatttagggatgtggccatagaattctctctggaggagtggcaacacctggacattgcacagcag

SEQ ID NO: 625587 - DNA, 96 bp, Homo sapiens
gatgtgagacttcccttggaagttgaaaaacagaatgatttaaggctacagatggaagcccaacgcatttgcctctctctggtttattcaactcat

SEQ ID NO: 625588 - DNA, 100 bp, Homo sapiens
gccggccgcgcgggccgggaggggacggccgccggagccgcgaggccaaccctgggcgctgcctatggcacagccaagagcggtaccggcattgcggcca

SEQ ID NO: 625589 - DNA, 97 bp, Homo sapiens
aagcacgctactacctggtgcagggcctgattgaggactgccagctggcgctgcaggggcttgcttctgacatgtctgatgagcgcattcctgctgt

SEQ ID NO: 625590 - DNA, 82 bp, Homo sapiens
ggagactccctgctgctcatcggatctgctgccgtccagatgaagcccgtggaccgggagcccgtggaccgggagccggtgg

SEQ ID NO: 625591 - DNA, 100 bp, Homo sapiens
cgaatatcgtcatcgttagaaggtttccgcagacatgcagctccagttacaagaaggcagttcccacacggtgcacacaggatggattacctgcactttg

SEQ ID NO: 625592 - DNA, 74 bp, Homo sapiens
ccttcctgggctgcatgggctctatcaaggaaaacaagtgtctgcttatgtcgccacagacccctttgcttctg

SEQ ID NO: 625593 - DNA, 100 bp, Homo sapiens
tacctgaggatgatcaagcggagttcgatgcgataccattgttcttatcgcttcaatagcagttgtttctgcaaaaactcagggtaatatttttgccacg

SEQ ID NO: 625594 - DNA, 75 bp, Homo sapiens
tgactttcagctatggaatcgctgagtcagtgctgattctctcaaatagagcttgaaggataaatcttcattttt

SEQ ID NO: 625595 - DNA, 50 bp, Homo sapiens
aataacccaagcaaaacttcagatgcagatccaaactactggatacaggt

SEQ ID NO: 625596 - DNA, 75 bp, Homo sapiens
acatagacacaaaatacgtggtacatgtgaagagaaaaactgcttaaggttgaaaagagaaatttaagaaattgc

SEQ ID NO: 625597 - DNA, 75 bp, Homo sapiens
caatgatcttcaagccattgacagaagacacgggcatatcataggctgaaggatgatgtcccggaagaggtaaaa

SEQ ID NO: 625598 - DNA, 96 bp, Homo sapiens
aaatccaaaggtgaatcttttggttggtgattttgatgatagccacaaagcaagcagggcaatgcatgaaccattgcaaacttggcaagatgcacc

SEQ ID NO: 625599 - DNA, 97 bp, Homo sapiens
aacaaaacaaatatgaactatgataagctgagcagagccctgcgatactattatgacaaggagagaaaccttacaagtgtacctgggaaggctgcac

SEQ ID NO: 625600 - DNA, 87 bp, Homo sapiens
ggcttcgcgcgcgaacccggctttcgcatttgggaccctgcaggcaagagtgagccatggagctacgtgtggggaacaagtaccgcc

SEQ ID NO: 625601 - DNA, 75 bp, Homo sapiens
ggggacgaagccaagttcattcccagactgataaatgaatctttgagggaccagctgttggtgactatacagaag

SEQ ID NO: 625602 - DNA, 95 bp, Homo sapiens
ccgagaaggagttgtttcccattgcagcccaggtggataaggaacatctcttcccagcggctcaggaggaaaactccctcttcgtcatgaccaac

SEQ ID NO: 625603 - DNA, 98 bp, Homo sapiens
ccgacactgctctgctgctggccgacggcagcaacgtgtacctcctggctgaggaggccgaaggcatcggggacaagattctctttgtggccagatgg

SEQ ID NO: 625604 - DNA, 100 bp, Homo sapiens
atggatctctcctgctttctgcttgtggttcataggccatgatgtgctgatggagctccttgagcagtgcgcagatggactctggaaagccgagcgctac

SEQ ID NO: 625605 - DNA, 50 bp, Homo sapiens
gcacactccagcttccgcagcctgttgtcgagatgtccacagaaggagga

SEQ ID NO: 625606 - DNA, 124 bp, Homo sapiens
cgggccgagatgtctcgctccgtggccttagctgtgctcgcgctactctctctttctggcctggaggctatccagccatcaagatggtgctcatgtggaccagtggtgacgccttcaagacggc

SEQ ID NO: 625607 - DNA, 50 bp, Homo sapiens
gcagcatctgtgacaactgtgtggagcttgggaaagtcgaggtgacggtg

SEQ ID NO: 625608 - DNA, 83 bp, Homo sapiens
ggggccccatcgagaaatggccgcgtcggcaggtgagaagccctaccactgcaactgggacggctgcggctggaagtttgcgc

SEQ ID NO: 625609 - DNA, 85 bp, Homo sapiens
cgggcctgcaccatgagcgtcccggccttcatcgacatcagtgaagaagatcaggttctgtggacaatcacaatgggaatccaag

SEQ ID NO: 625610 - DNA, 100 bp, Homo sapiens
gaaaattgcagtcagggaacctgggacccggcaagccagcagaagggtgctggagaatctggtaaaagcaccattgtgaagcagatgaggatcctgcatg

SEQ ID NO: 625611 - DNA, 99 bp, Homo sapiens
cgaccccgtcccgaccctggccgccccgagcggagcctggaggtgatgtgtccaatctagatcccaacttctcatttgaaggcaccaaactggatgtgg

SEQ ID NO: 625612 - DNA, 75 bp, Homo sapiens
ggcctctctcagaacaacctgcgggtgcactacaaagagatgtggtactggatcttcctctgggctctcttctct

SEQ ID NO: 625613 - DNA, 100 bp, Homo sapiens
aattttgatgacaggagttgcttttgtacagcctcaaggaataggttctcctagtgtctatcatgcagttatcgtcatctttttggagttttttgcttgg

SEQ ID NO: 625614 - DNA, 83 bp, Homo sapiens
ggataggcctgtgacgaaggtgctaccatcgtgagagtaaggtcagcccaaggccaaccccactgtcactctgttcccgccct

SEQ ID NO: 625615 - DNA, 74 bp, Homo sapiens
caatggcatttacagaaagagtcaacagcagtggcaacagcgaagggagcaatctgaccccagcacatcactac

SEQ ID NO: 625616 - DNA, 51 bp, Homo sapiens
agcgccgtgtggcacgacacaaaaatcaggccgttaattaaggaaaagttg

SEQ ID NO: 625617 - DNA, 75 bp, Homo sapiens
ggcctcccggtacggatagagagtattaaatgtgacctgaaggaaaagattatgcccttcattggctagtgctgg

SEQ ID NO: 625618 - DNA, 75 bp, Homo sapiens
ggcttccggagccctcggggcggcggactggctcgcggtgcaggaaaatgtttataggaggccttagctgggaca

SEQ ID NO: 625619 - DNA, 112 bp, Homo sapiens
tggtgacctagtggacagccagatccggagtaagcaaaactggagtcttctgcctgcgcaggtctgggaggggctgaacgtggtgaagacaggccgagtgatgcttggggag

SEQ ID NO: 625620 - DNA, 80 bp, Homo sapiens
cggcccgagaacgaggaggagcggccaaagcagtacagctgggatcagcgcgagaagagccagccccagtgcctgctgag

SEQ ID NO: 625621 - DNA, 100 bp, Homo sapiens
ggaccccctgcgaaggacagtggagaagtacagcatggaggagtctccccaggacagtgctatcacccgggatattaaccgaacattcccagcccatgac

SEQ ID NO: 625622 - DNA, 101 bp, Homo sapiens
atgatatcatggaaccagcagcaaagaagtgctatctggaaagagaggaggcgattatgcagccccttgatcataagaatctggatatggatgtgccatac

SEQ ID NO: 625623 - DNA, 88 bp, Homo sapiens
gcaagtcggaacccggcggatcggatcccgcagatcggagacggggcctggagacgcaaacatgcagatctttgtgaagaccctcact

SEQ ID NO: 625624 - DNA, 83 bp, Homo sapiens
attattttaacatttgggagaaacacagccagaaggtacccactgatggtaatgctggcctgctggctgaaccccagattgcc

SEQ ID NO: 625625 - DNA, 100 bp, Homo sapiens
ctacgggaaggatcgtccagtggctgaggctggacagagcacagaccagcatctcagacatgtcgaaaaagatgttttgatccctaaaataatgagagaa

SEQ ID NO: 625626 - DNA, 82 bp, Homo sapiens
cccagtcggtgctccggggaggtcacctgacgaggaggtgctaagagatgccgtttgcaggcctcatctctgcttgagaatc

SEQ ID NO: 625627 - DNA, 99 bp, Homo sapiens
ataacaagactgtccttcggacaagttttaggatggaggatgaagctgtcctggacagaggggcttccttcctcaagcatgtgtgtgatgaagaagaag

SEQ ID NO: 625628 - DNA, 82 bp, Homo sapiens
ctcggccgatgaagtgcagaggtttttttctggctccaccgaggacaccgcgtccagcttgtgtggcgaggaggacacagag

SEQ ID NO: 625629 - DNA, 97 bp, Homo sapiens
atcctggagccccccagtgagggcctcaactccatatagcatagattcagattctttgggaatggagtgtattatttcgggaagtgcctctccaact

SEQ ID NO: 625630 - DNA, 75 bp, Homo sapiens
ctccagggaaacgcggagtgtcctggagcttgacgcgctggagcttgagagtttcagctgtgagttcaacatgga

SEQ ID NO: 625631 - DNA, 90 bp, Homo sapiens
gtttggacgccggcggagacgcgggcgagattcccaaatgctggaaaatcctctttgctaagttgtgtttctcatgcaaaacctgcaatt

SEQ ID NO: 625632 - DNA, 83 bp, Homo sapiens
cagcaacaaaaaaatattgcagtgtcctaaatgtgataaaacatttgaccgaatagagacaaataccgatactttgcttgttt

SEQ ID NO: 625633 - DNA, 83 bp, Homo sapiens
ctaaagcagcgtgcgttcagccctgggacacggcttacctggatggggtgtcgttgcccgacttcgagctgctcagtgaccct

SEQ ID NO: 625634 - DNA, 103 bp, Homo sapiens
acaaactcgaagaacagctgtggaaagaagttgcaaaacactggtgtggcaaaggagcagagaactttgacaagttcttcacacgaggacagcccgtcttaac

SEQ ID NO: 625635 - DNA, 51 bp, Homo sapiens
gtggggatctgcccaacagccaggaggtctcaccatgtcccctgcccgggg

SEQ ID NO: 625636 - DNA, 100 bp, Homo sapiens
atttctgattattgtgacatcaatagccctgcttgttgttctctacaaaatctatgatctacataagaaaagatcctgttccagtctcatcagattttcc

SEQ ID NO: 625637 - DNA, 82 bp, Homo sapiens
caacgcctggctcggagcagcagcctctgaggtgtttcccattaaacactaccaggacaaaatcaggccttacatccagctg

SEQ ID NO: 625638 - DNA, 87 bp, Homo sapiens
agcaattcatcaccatattaagctggatattcctgtttagtaaatatctttccctagctggcactaaccaggctgtatctggacaag

SEQ ID NO: 625639 - DNA, 75 bp, Homo sapiens
gagcttctcagaagacagagggttttcttttgaggggcaattccaaaagtcttcagatttccaaaaggaaggact

SEQ ID NO: 625640 - DNA, 97 bp, Homo sapiens
gttactcagcccctgcgaacctgtatgtgcgaggccacggcgtatgcctccgaggacggggtcctgaccgaggccatgatggacacccgcgtgcaag

SEQ ID NO: 625641 - DNA, 50 bp, Homo sapiens
tcacaggttgtatgatgacgttttacagttgctctaggtcgtaaccagcc

SEQ ID NO: 625642 - DNA, 100 bp, Homo sapiens
cccaggtgctctggagctggatggtgaagttaaacccatccagagtaatggctgcggccttacccaggaccctgggggagttgcagctgtatagaatatt

SEQ ID NO: 625643 - DNA, 106 bp, Homo sapiens
agttgatgctgatgtctggcaagaaggatcgtaacaacacggaagtggagaggttttcagaggaatgggtaccacagaccatgtcatcgtcctggcgtccacgaac

SEQ ID NO: 625644 - DNA, 74 bp, Homo sapiens
ggagcgcggcggagacgatgcctgagatcagagtcacgcccttggggtggatgtgaacactgaccggaagatca

SEQ ID NO: 625645 - DNA, 82 bp, Homo sapiens
gcagcttttccggggtggcaggcggcacagttggagccccgaaactacctcaacaccctgtccacggctctgaacatcctgg

SEQ ID NO: 625646 - DNA, 90 bp, Homo sapiens
gaaaatcaggcccatcgcagagaaatcgggcatttgcaagatccgcccacccgcggtcagccagagcagcctccccatgctgtcctcgcc

SEQ ID NO: 625647 - DNA, 75 bp, Homo sapiens
ccgcgttcccagcccgggtccccgcgttcacagccccagcgcagtccacaggtcctggctaccctgggaagagac

SEQ ID NO: 625648 - DNA, 75 bp, Homo sapiens
cagctgccacctgcctttgacctttttgaagcctttgcaaaagttgttcttgcagaacatgccagcagaagcatt

SEQ ID NO: 625649 - DNA, 90 bp, Homo sapiens
ctattcaccaacttggattcatccacagagacatcaaaccagacaaccttcttttggacagcaagatttcagaagaaagtggtagcttcc

SEQ ID NO: 625650 - DNA, 95 bp, Homo sapiens
aaagggaatgacttcattacagtgtatggaatgattcggttctcaggcaccacaggccagatgtctgacctgaacaaaatgatggtccaggatct

SEQ ID NO: 625651 - DNA, 83 bp, Homo sapiens
cttgtagataagcaactggattttttaactgaagatagtgcctttcagccctaccagagctttgggcactcccaataatgaag

SEQ ID NO: 625652 - DNA, 82 bp, Homo sapiens
caccgtcgcccgcccagcctccgcccggtccagtggtttacgtcttggatcttgcagatagactgatctcaaaagcctgtcc

SEQ ID NO: 625653 - DNA, 75 bp, Homo sapiens
tggaccaggagaggcccgcggtgaccgaggcctgggccccggtactatactggcaattgctggagaagattttgc

SEQ ID NO: 625654 - DNA, 50 bp, Homo sapiens
aaatgaatgccaaatgggacacggaacatcatcttcagcgggctatttca

SEQ ID NO: 625655 - DNA, 95 bp, Homo sapiens
cgtggctgaggtgacggtctcaaagtggaagagcttactgtcacagcaactcctttgcaagatgccccgtccttcagtgaatctacagacctatt

SEQ ID NO: 625656 - DNA, 102 bp, Homo sapiens
cgcatggttggaggagtgctggtggagcgaactgtcaaagaggtgctgcccgctttggagaacaacaaggagcagcttatggaagtgacagggaaaaatcag

SEQ ID NO: 625657 - DNA, 100 bp, Homo sapiens
gtgctagacaccaagaaggacgcactgactcgcctcaagcacctgcgcatcgtcatcgatgatcacggaagccttggcccaaggtgggatgcacataaga

SEQ ID NO: 625658 - DNA, 82 bp, Homo sapiens
atgggagacccggggtcggaacaattctgtggtgttcttggtcacacatttatggagtttctgaagggcagtggagattact

SEQ ID NO: 625659 - DNA, 51 bp, Homo sapiens
ggctttggaaacgacgtcatgtgttaggacctagtgaatattgagatgttc

SEQ ID NO: 625660 - DNA, 99 bp, Homo sapiens
aaccttgagattgtgctcacgggacacaatgccgacctctccttcctgcagagacgagttgtactgctgtcacaggaaatggacgctggattacaagca

SEQ ID NO: 625661 - DNA, 76 bp, Homo sapiens
cctctgcttgccactccttaattgctcaaggagtgggaatagctttgcgaaaaatgggcgcaatggccaagccaga

SEQ ID NO: 625662 - DNA, 74 bp, Homo sapiens
gtggtgacccctgccctcgtgtgcctcagtcagctgctcaccaaggttttggctacgggcctccacctccaccg

SEQ ID NO: 625663 - DNA, 99 bp, Homo sapiens
tcaggcaatgcctttgaagagcagttttctttgccaaccaaggagaaatcccttctgcaaatggttcctttggatgaaggtgccagtgagagacccctt

SEQ ID NO: 625664 - DNA, 90 bp, Homo sapiens
tggaccggcacaaggtggccctggggaagactctgggagagggagagtttggggaagtgtatcgagggaccctgaggctccccagccagg

SEQ ID NO: 625665 - DNA, 82 bp, Homo sapiens
agtggacaaagagaggagtcaggaaccacgtgaatgttgagggggcgacacacaagcaggtggtggacctgattcgagcagg

SEQ ID NO: 625666 - DNA, 80 bp, Homo sapiens
tgctcttcctcccttcgctcgcaccatgagactggctccagctttccttgaaatcctgcagagccttcattaaaatgagt

SEQ ID NO: 625667 - DNA, 74 bp, Homo sapiens
tggacctcagttctcgctggcagctttatagaaactggcgatggaatatgagaggagccctctggaaagaaaag

SEQ ID NO: 625668 - DNA, 100 bp, Homo sapiens
gaagcacctgcacatccacactccgctgctcgacaggttgcagtgtaggattttggaagtcctccctccatcacatcaaaatggttttgctaatggacat

SEQ ID NO: 625669 - DNA, 98 bp, Homo sapiens
acaagctcaacaaaattaacgatcgttggcaacatctttttgatgtcatcggatcaagatcgttaactgaagacaatatgcaaaattctcacatggat

SEQ ID NO: 625670 - DNA, 50 bp, Homo sapiens
ggaagtgactcaaactgtgagaacttcagaaggagcgatatatagttatc

SEQ ID NO: 625671 - DNA, 50 bp, Homo sapiens
tcgcctctttctgcagtgggccagagtcgctcagacaggagctgtcggag

SEQ ID NO: 625672 - DNA, 100 bp, Homo sapiens
tggaacgggactttgcagaaatgtgtgcagactacatggcatctaccatagggtgagagggtccaagcctggtaagaatgtccagcttcaggagaatgaa

SEQ ID NO: 625673 - DNA, 100 bp, Homo sapiens
ccgaagaagaaaggattcgttacagccagagattggagtatggatgtgtccaacagccaaaaactcaagaaagtaaattgaaaattggtggtgtgtcttc

SEQ ID NO: 625674 - DNA, 75 bp, Homo sapiens
agtgcaaagatccccagctagagattgcatatcgaggaaactgcaaaggataagtctacttttcttccacgtaac

SEQ ID NO: 625675 - DNA, 74 bp, Homo sapiens
aaaaagatgctgtatgacatggaaaatccacctgctgacgaatactttgaaaagagtctcatcgtggaaggcaa

SEQ ID NO: 625676 - DNA, 100 bp, Homo sapiens
ggcccgtgctggttgaggacacttgtctgtgcttcaatgcccttggagggctccccggcccctacatggtaaaaaatatttccgagataggaggggaggt

SEQ ID NO: 625677 - DNA, 100 bp, Homo sapiens
tggctatcttctgagcgtgtgccagaagatccagctttgttgaaaagcgaagccgttagtcccttaatacaaaggagacgagttgtactgctgtcacagg

SEQ ID NO: 625678 - DNA, 96 bp, Homo sapiens
tagcagcagaagagaagaagaagcaggatgaactgaaacggattgccagagaattggcagaaggaaacagagcaaatgcagcgttacaatcaaaga

SEQ ID NO: 625679 - DNA, 80 bp, Homo sapiens
acgcagctggatgtaccgcatgtgatcactctgggactcgtggggctgcagcaccgagcattggggagtcagcaatgtcc

SEQ ID NO: 625680 - DNA, 109 bp, Homo sapiens
gaccattcagatgggatctttccggatcaatccagatggcagccagtcagtggtggagggtgcagaagctgccaatgtgactggcccggatggagttcctgtggaaggg

SEQ ID NO: 625681 - DNA, 113 bp, Homo sapiens
tgacagcaaggctggcatggaggaagatcacacctacgaggctcccggacgtccctgctcctggcttttggcctgctctgcctgccctggcttcaagagggcagtgccttccc

SEQ ID NO: 625682 - DNA, 100 bp, Homo sapiens
aactgaatcatgattttcaagcacttgctctggagggaagagcgatgggagaggccaagtcatcaaggcatgggacattggggtggctaccatgaagaaa

SEQ ID NO: 625683 - DNA, 50 bp, Homo sapiens
gcggggaccgctgtgctctcgttaccgtgcagacggtctacgtgcagcac

SEQ ID NO: 625684 - DNA, 100 bp, Homo sapiens
acaatggatgctgagctggaatttgccattcagcccaatacaactggcaaacaactttttgaccaggtgcatgtgagggaaccctggcttgttcaacctg

SEQ ID NO: 625685 - DNA, 76 bp, Homo sapiens
gcgggaacgcaccacgcggctgggacaacaccatcgacttcctggagtacgtggcagctctgaatctcgtgctgag

SEQ ID NO: 625686 - DNA, 87 bp, Homo sapiens
acggcgatccgggcgctcgagacttaccagagccacaagtgcctccggagccagcgtggtggccatagacaacaagatcgaacaggc

SEQ ID NO: 625687 - DNA, 87 bp, Homo sapiens
ggcagcgacggcagcggcggcggctggactaaacaggtcacctgcaggcggctgagccagaggccaactgcagaggaactggaacag

SEQ ID NO: 625688 - DNA, 76 bp, Homo sapiens
tctaagtacactcgtcttgaataggtgcaggttttgcagcatttggacaaacaaagccagtagtaaccccttttgg

SEQ ID NO: 625689 - DNA, 50 bp, Homo sapiens
ctttgtcatttggaagaagcgaagagtataaccccgttttcacacgaatg

SEQ ID NO: 625690 - DNA, 100 bp, Homo sapiens
gtttgttccctgacaactttgtaagagctacaagatcaagctgcagagaccattgaagctctgcatgcagcaggcctgaaagtctgggtgctcactgggg

SEQ ID NO: 625691 - DNA, 100 bp, Homo sapiens
tcccccagttccaaagtgtcttaaaggagaaagaccatttatctgcgaattatgtggaaattcttacacagatattaaaaatttaaagaagcacaaaaca

SEQ ID NO: 625692 - DNA, 96 bp, Homo sapiens
agctgacttcctcatgtgttactctgttgcagaagacatcaaaatttacaagctcttcggatattccagtagaatttataagaagaaatgttaaac

SEQ ID NO: 625693 - DNA, 102 bp, Homo sapiens
cggacaggtgaggcggaccctgttcatcacaggactccccagagatgccaggaaggagactgtggagagccacttccggtgccgtgagcgatgtggagatgc

SEQ ID NO: 625694 - DNA, 75 bp, Homo sapiens
acagaaagaagatggttcttttgctggagatatttggggtgttcctccaagaaaagctggttatattgaagacct

SEQ ID NO: 625695 - DNA, 100 bp, Homo sapiens
tcagattctaggaagtgtctgtagccgcagctgcgggtccgggattcccagccatggcagattcctccgggcagcagggccctggccaacgtcaacattg

SEQ ID NO: 625696 - DNA, 100 bp, Homo sapiens
aagttatggcagagttagctaaagaactccctcaagtttcatttgtgaagtgttcaagaatactttgttcgcaaatccaatgcaaagaaaggcatgtttg

SEQ ID NO: 625697 - DNA, 51 bp, Homo sapiens
ccgatttcaaggaagccaagggggccaattcctgtccccccagcagcatgg

SEQ ID NO: 625698 - DNA, 100 bp, Homo sapiens
tattcaccttgaagaggaagacggggcggaagaccaagatcatcgagatgtggattccaaagcatgagttgggctgcttttgaatagtgggagacgggag

SEQ ID NO: 625699 - DNA, 75 bp, Homo sapiens
gaaatcagcgcggagttaccccagacccctcagcgtctggcatctgtgaatgaaaactttgccattgatttgata

SEQ ID NO: 625700 - DNA, 96 bp, Homo sapiens
gcaacaaggatgtcacatctctagattggaatacatatctgaagagatggattaagaatgctttggattaaggattgtggagcacatttcaatcat

SEQ ID NO: 625701 - DNA, 100 bp, Homo sapiens
tctcagcgaaccccttttgaagttgaggccaagaaaggatcttgtagaggggaatacggagagaacggtctggcaataccactttcggacctggccggac

SEQ ID NO: 625702 - DNA, 139 bp, Homo sapiens
ggtggccttttgtccctttgcctcatcccaggttgccttggaaaatgccaacgccgtgtctgaagaccatgctcgacagctgaccaaggccatgatgcgaaaggccacggccagccgcctggtcacgcagcgcgatgcg

SEQ ID NO: 625703 - DNA, 75 bp, Homo sapiens
agaagatggtggccaggaagaacacggttgtggcagcactgcctgaaggtatgagaccagattctaatctttatg

SEQ ID NO: 625704 - DNA, 132 bp, Homo sapiens
gtttggctgatatctttcgtatctatgccccagaagctccatatacttcccatgataaacttaagattgtttccagcaagaagctaactcgaccactggtgatgaaaactggcagacctgcaggaaaaggga

SEQ ID NO: 625705 - DNA, 83 bp, Homo sapiens
atcaagtggcatccatcataagagttcttcgtaagtacatcttaaagctgtcaagatggttctagcagaccttggaagaaaaa

SEQ ID NO: 625706 - DNA, 75 bp, Homo sapiens
ggcggatctggaggagcagttgtctgatgaagagaagaacctagaagtcggaatccggaagaagatcgaacatga

SEQ ID NO: 625707 - DNA, 100 bp, Homo sapiens
aggatttgaaaactctgtgctctgctcttcctcagcagacttctcgttgaagtggcagtttttgtctttgataaaaaactgattgacaagtatcaaaaat

SEQ ID NO: 625708 - DNA, 75 bp, Homo sapiens
tcggccggcgggcgtgcatcatccacggggtgctgcagatcctgttccagctacgagttccagggagctctgtcc

SEQ ID NO: 625709 - DNA, 75 bp, Homo sapiens
gagccactgtgtcaggatggatttttgaaatttgaaagtcatattttcatggtagctacagcaagctgggtagca

SEQ ID NO: 625710 - DNA, 100 bp, Homo sapiens
gaggctgcccagaaagcagttaacagtgccaccggtgttccaactgtttaaagatggaacaaaattcatctgtattggggctctgtattctgaacttctg

SEQ ID NO: 625711 - DNA, 100 bp, Homo sapiens
aatgcttactgttgcgtggttcgttattaacaggtcgtggccctgaagttcatcccaaaattggggcgctcagagaaggagctgaggaatttgcaacgag

SEQ ID NO: 625712 - DNA, 82 bp, Homo sapiens
gcatcggcagcggcacctacggcgacgtctacaagtaggttgtgacagttggaagtgtcatgtacaacatgcggcgattaag

SEQ ID NO: 625713 - DNA, 88 bp, Homo sapiens
tccattggcagaagaacggagactacttgtgtgtgaaagtagataggactccgaaaggcacccaggtggacccccaaaagtacaaggg

SEQ ID NO: 625714 - DNA, 90 bp, Homo sapiens
ccgtggtctactacagcctcttgctgtgcctcggtttaccagactacgtctactttgagaactcctccagcaacccatacctgatccgga

SEQ ID NO: 625715 - DNA, 51 bp, Homo sapiens
gatcctgcaatctgaaaagcagactgaaagaatcctggaagcctactgata

SEQ ID NO: 625716 - DNA, 75 bp, Homo sapiens
tacaagacatggtgggactctcagcgacctgggaaagcaagataacgaaggaggcccaacttcattcaataagga

SEQ ID NO: 625717 - DNA, 101 bp, Homo sapiens
ggcttcctggtttacctggcactcctggacaggatggattgccagggcttcctggcccgaaaggagagcctgactcagaattcatgattgaagaaatgcag

SEQ ID NO: 625718 - DNA, 75 bp, Homo sapiens
gggcgtctacaactgctgggagttcccgtccatgctggccctctctgtctgcagatctccaggggagcccaccag

SEQ ID NO: 625719 - DNA, 76 bp, Homo sapiens
cattgcctcattcaacatcaacaccaacgcctgggtggcccggagagcaaagcagttagagttcagaggccagcgg

SEQ ID NO: 625720 - DNA, 51 bp, Homo sapiens
accatggcttccgaggagctgtacgaggaaaagaatacttgagatccattt

SEQ ID NO: 625721 - DNA, 75 bp, Homo sapiens
gatgagtcaactttgaagtgtgcctcattctggaaagtgaatcacgtaatcacaccgtcattgtgtggcactgga

SEQ ID NO: 625722 - DNA, 98 bp, Homo sapiens
acagctggagcaaggcgacgaaccttggagagaggagaacgaacatcttctggacctttgtccagttctgctaagccaatattctctagaatgagcac

SEQ ID NO: 625723 - DNA, 100 bp, Homo sapiens
agatagtacatgcttttgacatggaggatttgggagataaagctgtgtactgccgttgttggaggtccaaaaaggtgttaactgtctggcctatgatgaa

SEQ ID NO: 625724 - DNA, 100 bp, Homo sapiens
aatgacagtctccaaattcgcctccatctgtaccatgggagatacttcaggggattaccggaagattctgctgaagatctgtggtggcaatgactgaaca

SEQ ID NO: 625725 - DNA, 75 bp, Homo sapiens
aaaacgcttccatatttatccagagatccatccttttacaatccctgctattattcgtccattcagcgtattgaa

SEQ ID NO: 625726 - DNA, 82 bp, Homo sapiens
tgtggatttcgaggagtgtctgaaggactcgccccgcttcaggtgtgccacgtcatcaccgaggtgaaatctggaaatttct

SEQ ID NO: 625727 - DNA, 83 bp, Homo sapiens
ctgagctcagacctgccaatttaccagagataattgataacaccctgtaacagctgagcatgggttggaattggagcctatcc

SEQ ID NO: 625728 - DNA, 100 bp, Homo sapiens
tgaggaggacatgtaccgtgctgcagatgaaatagaaaaggagaaagaattgcttatacatgaaagaggggcatcagggcaaactggaacaactggtcac

SEQ ID NO: 625729 - DNA, 82 bp, Homo sapiens
gatggttgagtcctgcttgggctcaccttgctgggccagcccccaactccttcggattaacctttggaaacatcagaagcta

SEQ ID NO: 625730 - DNA, 82 bp, Homo sapiens
aaaatcagtgattctacatctcaagctcatattttgaagtgtttacgggagaaaagccttacagatgctcatgggaagggtg

SEQ ID NO: 625731 - DNA, 50 bp, Homo sapiens
ccagggaaccctggtcaccgtctcctcagaaggggaaactgaggcccaag

SEQ ID NO: 625732 - DNA, 83 bp, Homo sapiens
gccctggtgaccttctgtgaagaactgggccgcggcgagtcctttgcacatgttggcaacacacgcatccgcatcggcctccc

SEQ ID NO: 625733 - DNA, 74 bp, Homo sapiens
ctggaggtgcagggccaggaggaacatgagagtaaagctaaaacattttgagaaatttcaggatacagcagaag

SEQ ID NO: 625734 - DNA, 100 bp, Homo sapiens
ctgagagctagcaaggaaaactcaggaccatgatggctcagtttcccacagctatgaatggggaacacttaagaatctgtcctcaggaatatacatgctg

SEQ ID NO: 625735 - DNA, 100 bp, Homo sapiens
gatgaatgaaaggaactattttgttcgtgataaactggatcctgatatggctctttgccgaaatgctagagaaatggtataatctgcagatgttggaagc

SEQ ID NO: 625736 - DNA, 113 bp, Homo sapiens
atacactggatataatcaggaagactctgttatcatgaatcgttcagctgtagaccgcggcttcttcagattactgacagccctgtcctaggagcacaacgtccgagaaatgc

SEQ ID NO: 625737 - DNA, 100 bp, Homo sapiens
cttcacttgccgaagcatgaacgaagccatccctagtggcaaggagacttccatcgagctggatgtgcaccgtccagagggggcaaacctctttatttac

SEQ ID NO: 625738 - DNA, 82 bp, Homo sapiens
tggcgccatgggtgttgtccgcagccgcagataatgtacaacggccagccaattaccaaaatggcctgtggggctgaattca

SEQ ID NO: 625739 - DNA, 100 bp, Homo sapiens
aaaggtcacaggtctcctcaatatcagttacagatgtagagctaaaacgactgaaggatgctttcaagaggacctgtggactctcatattacatgggcca

SEQ ID NO: 625740 - DNA, 75 bp, Homo sapiens
gctttcatttgtaaaacaagaattgtcaggtaaaatgtcggttccaggaccttaccaggcggccactgggccttc

SEQ ID NO: 625741 - DNA, 90 bp, Homo sapiens
tgcatagcaagaaggaagtgcctatccaccgtgttgcagatatatctggggttcatgcatgggagatctcagaccagttgttacagatcc

SEQ ID NO: 625742 - DNA, 98 bp, Homo sapiens
gggaatcgtagtcttcctaggagttatctcacattcttgaaggtggcattgaagagcactaagatcggaagatgagtgagcttgaccagttacggcag

SEQ ID NO: 625743 - DNA, 100 bp, Homo sapiens
ggatctggggatcttcgcactatcccaagcacatggattaattgatgtatgttgagtttatggagctgccttttggtggcttgctttatctgcagttttt

SEQ ID NO: 625744 - DNA, 75 bp, Homo sapiens
gcaagctgaaaaagaaatgtactccttgtgtcttttagcaacattaatgggttgttgatcattatgaaaatccta

SEQ ID NO: 625745 - DNA, 97 bp, Homo sapiens
atactacagagtgtgcacactggctatcattgatccagaaataagcgggttttgaaaacaaaaaaaagaaggagtggaagagggggccaggatccag

SEQ ID NO: 625746 - DNA, 82 bp, Homo sapiens
acaaccatctgaacaaaaagctgctttccccccacctgaacagaaaactgcatttgacaagcacaatgacagatttcctcaa

SEQ ID NO: 625747 - DNA, 90 bp, Homo sapiens
ggattcgctcccagagcagctgcggccaggaagcgtcagcccccgtagcacctctgttaccacgacttctagtgcctctgttaccaccac

SEQ ID NO: 625748 - DNA, 90 bp, Homo sapiens
cgcggctcctagcggatgggtgctattgtgaggcggttgtagaagcttttctgcaattagataaaaaaggaccacaaaaacatcactttg

SEQ ID NO: 625749 - DNA, 96 bp, Homo sapiens
ccgccctccctccgccacgatgccggggatcgacaagctgcccatcgaggagacgctggaggacagcccgcagttttagagacaaggtctgactgt

SEQ ID NO: 625750 - DNA, 90 bp, Homo sapiens
ccagatacttctcaaaatacttgtaaaagtcctccaaaaatgagcaaggatgataatgaagataattcaaatgatgggacccagccatcc

SEQ ID NO: 625751 - DNA, 100 bp, Homo sapiens
gctactgcgaagacagctggcaggcctccggtgtggctgtctctgatggtgtcatcaaggtgttcaacgacatgaaggtgcgtaagtcttcaacgccaga

SEQ ID NO: 625752 - DNA, 100 bp, Homo sapiens
tgatgatgatgctctgtccgactggaatttgaggtgtccgcaatgttgccagtgtctgtctgcagattggctacccaactgttgcatcagtaccccattc

SEQ ID NO: 625753 - DNA, 78 bp, Homo sapiens
tttgtccctcccagttttagatgatcaggcagaagctcctcctggggtagagacagatcttattgatgttggattcac

SEQ ID NO: 625754 - DNA, 75 bp, Homo sapiens
cgcgggcacagggtgccgctgaccggtggaagttgatgggtcgaaactaaatgtgaccagcacgtggaacctggc

SEQ ID NO: 625755 - DNA, 83 bp, Homo sapiens
ggttctggagtcaagtgatcataagctgaagaagaggtcagcaggcaagagaaatagggagtgcatccgccccaacccttttc

SEQ ID NO: 625756 - DNA, 100 bp, Homo sapiens
ccctgcaggctgagaaactggaccaccatcctgaatggtttaacgtgtacaacaagggtcagccagcagccggcccggggtgtcagccaccccacccaag

SEQ ID NO: 625757 - DNA, 90 bp, Homo sapiens
ccaagaaagacctggatgacatcagcaccaaaacaggcatcaccctcaagagctgccggagacagtttggccctttcctggatgctaagc

SEQ ID NO: 625758 - DNA, 50 bp, Homo sapiens
tctggcggaggtttctgcagaggttgtttacattcagagctctatcaata

SEQ ID NO: 625759 - DNA, 97 bp, Homo sapiens
agagcccagagcgacccttcctggccatcctgggcggaggcgacaggaagaagggtattacagccgcctggaagccgagaggcgcagacagcacgac

SEQ ID NO: 625760 - DNA, 50 bp, Homo sapiens
actgaatcgcacacctcaatctatgaaacgttcctggatccgaacactgc

SEQ ID NO: 625761 - DNA, 50 bp, Homo sapiens
gcacctggccccgctacagcaaaccagtgtcaacagcatctccaccctgg

SEQ ID NO: 625762 - DNA, 100 bp, Homo sapiens
gtgcaaccattggcgtggatccgctggcctatccggggatttctttcacggtttgataatgtccttcccgtcagcctggcatttgacaaatgtacagctt

SEQ ID NO: 625763 - DNA, 51 bp, Homo sapiens
cgcgaatatcgtcatcgttagaaggctcaaagtgctgacaaataaagcttc

SEQ ID NO: 625764 - DNA, 90 bp, Homo sapiens
gcacggactgctggagatggtggagtccgtcaggttttttgattaactcaaaaccagagaatgcctgtgaacccatagtgcctccaccag

SEQ ID NO: 625765 - DNA, 48 bp, Homo sapiens
tgggaccttaacagggagccatgatttccacaagacggcaccctatgt

SEQ ID NO: 625766 - DNA, 75 bp, Homo sapiens
tcactgcagctgaagccgctgcccctgctacagaaacgctaatggactccactacagcgactgctgagctgggct

SEQ ID NO: 625767 - DNA, 83 bp, Homo sapiens
atggggaacgctcacggactgtgtggtatttgaaatggacatcgctaaacagttacaagcttatgaagttgagtaccacgtcc

SEQ ID NO: 625768 - DNA, 90 bp, Homo sapiens
aattatgacttttggacagtccaagctatatcgaaggtccccttcccctgagcccatctacaatagcgaggggaagcggcttaacacccg

SEQ ID NO: 625769 - DNA, 80 bp, Homo sapiens
gctcctacgggacgaggagagggaggtgaatccgtggcagaggcttgctatgggtgttctccaggatcaaagtgtgactg

SEQ ID NO: 625770 - DNA, 100 bp, Homo sapiens
tgcctatgatgccaacgtgtccttcaatgtttcccgggagctcttcttcatcaacatgtggcagaagtggtcatatgcattagaaaaacccaacactggc

SEQ ID NO: 625771 - DNA, 75 bp, Homo sapiens
tgcacgaaaggctctggaaagatgtggtgatggggcattcttgctaacaacaataccctctaccatctgctttgg

SEQ ID NO: 625772 - DNA, 100 bp, Homo sapiens
tcgactgtcgcttcctctccaaggatcagatgataaaccactacgcccgggctggctcctttaccacaaagggacatgggcggctttgccatctggtgca

SEQ ID NO: 625773 - DNA, 96 bp, Homo sapiens
gagaacggcaacccatccagatcaccatgccggtttctttttggagacaggcccttttggtgggtccatgagtctggttactacagccaggctcca

SEQ ID NO: 625774 - DNA, 50 bp, Homo sapiens
acaaataattgagtgctttcgatcaggcattgaatgccccagaggagccc

SEQ ID NO: 625775 - DNA, 97 bp, Homo sapiens
tttacgggccttctggagatgcttccgaactgtgggcaaaaatggcgttggctactcactttccatcggaagatattctcttggtaacagcttctcc

SEQ ID NO: 625776 - DNA, 80 bp, Homo sapiens
ggaccttttaccatgaatagttctactccttctacagttcaaggagcagggacaagttacaggaatgttctccaagcagc

SEQ ID NO: 625777 - DNA, 83 bp, Homo sapiens
gcgcggaggcggaggcttggggtcatgcaagacaagataatctgccttccgaaaagagtgcagcctgctcagaaccactcttc

SEQ ID NO: 625778 - DNA, 98 bp, Homo sapiens
agaacggaaaactcccaacttcctgaaagaagattggcccatgcacaagctggaatgttctcccatggttgtttttggggaaaactggaatccctcgg

SEQ ID NO: 625779 - DNA, 100 bp, Homo sapiens
atgatttgcagtgaccattttgttgcagttgactcacgattatagtcatagccttggaatggatggctttggccaaccagttggcattcttggacgccct

SEQ ID NO: 625780 - DNA, 75 bp, Homo sapiens
aaaaacccacaaacatgttcacaacgggcatggcatatctttttcttgcacatcaaggaggccctcttggcaggc

SEQ ID NO: 625781 - DNA, 50 bp, Homo sapiens
cccggcagcccgcaggagtgctaaaagagaagctgaatttggacgacagc

SEQ ID NO: 625782 - DNA, 75 bp, Homo sapiens
gatttgttaaggattccaagtaactcttatttggcttgcagatgggtcaagggttgtggagagtggtcagaaacc

SEQ ID NO: 625783 - DNA, 101 bp, Homo sapiens
gcttctgctgtatgacatcaccaacaaatcttctttcgacaacatcagggcattgaagttgatatcgatgtggagcacggagggaaaagaagccgcctgac

SEQ ID NO: 625784 - DNA, 101 bp, Homo sapiens
ccggctctccgcctcctgcctcccgtcgcagccgcgcagccgccgcagagtccgcggcgccaccgctcgccctccaggtcgtccttggtggaaggaaccat

SEQ ID NO: 625785 - DNA, 101 bp, Homo sapiens
gaccccgtcagcatgccagggtcatcccgtccagtctctgatcgaaggggagtttccacagtgattgatgctgcctcagggtcgtgtagggataaaaagaa

SEQ ID NO: 625786 - DNA, 97 bp, Homo sapiens
tcgccccctcctcgtcgggaagaatcgtttggtctcctgccgtgcccggctctgacgcccgctctgcggcttcggtgtttgaacaggccacagtcca

SEQ ID NO: 625787 - DNA, 98 bp, Homo sapiens
aattgcctgctttgattccctaaaggcctaccccttgctcaggttcaagaagacagtgaagaggctcattccgcatcttctttctttgcagaaatttc

SEQ ID NO: 625788 - DNA, 51 bp, Homo sapiens
atcttcacttggcaaactcaacaagggcggcgactggcggcgcgatggacc

SEQ ID NO: 625789 - DNA, 51 bp, Homo sapiens
gatatgtgccccaggaggaggtcccagtgtgaatatgaccatctcccagaa

SEQ ID NO: 625790 - DNA, 101 bp, Homo sapiens
gctgattcggcgcgatttgaggagctgctgctgcagggcgacatggagtccaatgggaaatacatcaccaaatctggaacccgtgtggaccaccagacagg

SEQ ID NO: 625791 - DNA, 88 bp, Homo sapiens
gccatggggccttacaacgtggcagtgccttcagatgtatctcatgcccgcttttatatacactgcctctaggactgggacagatagc

SEQ ID NO: 625792 - DNA, 100 bp, Homo sapiens
gcaggacttcgaccagcgcgcgcgcgaggagttccgccccaccatctacagcaacgtgatcaaaggtgtgagcgccactttgaagggcatccaacccgcg

SEQ ID NO: 625793 - DNA, 75 bp, Homo sapiens
cgtccttctggaagaggcgaaactggtaccgaagacactgggattattaaggatgttaagtgtcaagttttacag

SEQ ID NO: 625794 - DNA, 100 bp, Homo sapiens
tcagagcgtgtggaccccaaacaagtctgcgcaaaatttgtcgaggaggtttgccgcggcaggttgtaggtcataaagaaggtctggatgttatggagag

SEQ ID NO: 625795 - DNA, 100 bp, Homo sapiens
gtttggatgattgtctctcggcggcggagtcgatatgtcttgtcgttcaagacttgcaacactaaacgagaaattgacagcccttgaacggagaatagag

SEQ ID NO: 625796 - DNA, 98 bp, Homo sapiens
aggagtggagtgatatcagacaccgagcttcagcaagctctctccaacgaaattacagaagacatccccgtgaagactttgaatatgaagactgtgta

SEQ ID NO: 625797 - DNA, 90 bp, Homo sapiens
ttcagatgcaattggaccaagagaacaatgggaaccagtctttcaaaatgttttgattcccaccatggccatcacccagtttcggttatt

SEQ ID NO: 625798 - DNA, 144 bp, Homo sapiens
agtgactgatgaagggaaggaaatcatgtcaagcgaagccttgaaaaagctgccctgagacggtgtcccgccgaaagaggctgacccgcggctgattgagtccctctcccagatgctgtccatgggcttctctgatgaaggcgg

SEQ ID NO: 625799 - DNA, 99 bp, Homo sapiens
gttaggattcgaaatggtctcctgaactgtaatgattgctacatgcgatccagaagcaaaatggcaatacctgtgctttggaagtttctggagaagtat

SEQ ID NO: 625800 - DNA, 100 bp, Homo sapiens
ttctgatacacaccaaccaaccagtcaaccagccattgctgtttactggatacctggactatcctattaagtgtaatctcactgcttaatgagcccaaca

SEQ ID NO: 625801 - DNA, 50 bp, Homo sapiens
gggaagtcactcataagcgcgctcaagactcaaatagctataactgtacc

SEQ ID NO: 625802 - DNA, 82 bp, Homo sapiens
taacgaaagggcagtacagactttggcagggagtgcatccgccccaacccttttccccctcgtctcctgtgagaattccccg

SEQ ID NO: 625803 - DNA, 75 bp, Homo sapiens
acttactactatcctcattatctccaaaccaagtgtttacaggcattggagtttttacatgctaatcaagtgatc

SEQ ID NO: 625804 - DNA, 81 bp, Homo sapiens
agtcgcgagcgaacgaccaagagggtgttcgactgctagagccgagcgaagccgccggcatcggccgcacaggcaccatca

SEQ ID NO: 625805 - DNA, 90 bp, Homo sapiens
aactgagcctccctagcagctgggactattagtgcacaccaccacacctaggtctccatcatcaccagttccagtagtgaaaaacagaac

SEQ ID NO: 625806 - DNA, 74 bp, Homo sapiens
ggcacttcctcactaatatcagggcttattttgttcttcctgtccaagatccggtcccacgtggctacttgttc

SEQ ID NO: 625807 - DNA, 82 bp, Homo sapiens
aacagaagaggaagcatatgcactgaagaaaatatcctatcaacttaagtggccaatccgccatggtatagttgaagattgg

SEQ ID NO: 625808 - DNA, 100 bp, Homo sapiens
ctggcccggccatgtcgtcgtccttcttcaaccccagcttcgccttcagctcgcacttcgaccccggtagctgcaatcaacccaaatcaccctcttgctc

SEQ ID NO: 625809 - DNA, 100 bp, Homo sapiens
gaacaatctcacccaattactctgctcagaagacttaactgatggttcatatgatgatgttctaaatgctgaacaacttcagaaactcctttacctgctg

SEQ ID NO: 625810 - DNA, 90 bp, Homo sapiens
gaagaggagggcaagaagggcaagaagggtgactgacgaagtcttcaacttcctgctggtgtggtattactgcaccctgaccattcggga

SEQ ID NO: 625811 - DNA, 82 bp, Homo sapiens
tcctagaaattccccccgaagaagactcccccacatctggcttaaagcttttcaagccaggccaagaagctgtgaagtacca

SEQ ID NO: 625812 - DNA, 50 bp, Homo sapiens
actgcagaggtgctggagctggcaggtatgatctcgtgaaatcttgagag

SEQ ID NO: 625813 - DNA, 74 bp, Homo sapiens
gggtcctttatatagaagggagagtaggcctggttggtttacacaacattggacagacctgctgccttaactcc

SEQ ID NO: 625814 - DNA, 50 bp, Homo sapiens
gtttgtctccactccctccttgatattgcggtggtggagatgagcgatgc

SEQ ID NO: 625815 - DNA, 90 bp, Homo sapiens
aacaagcttcattgttttcagctaacagtaaccccaggggtctctctttttggcatgtcggccctgttactccctgggaactttgagtct

SEQ ID NO: 625816 - DNA, 82 bp, Homo sapiens
gaggccttatgaagaaaaccggggacgggggtactttgagcaccgagaggataggagcaggttcacaactacatgatgccac

SEQ ID NO: 625817 - DNA, 80 bp, Homo sapiens
caatatctgtcttcggtggactccttcggcagtccacccaccgccgccgcctcccagtatcttcagctcaagaagaagtt

SEQ ID NO: 625818 - DNA, 101 bp, Homo sapiens
ttccggagggattccatcatagatgccagagacgcggaacaattgagcaagaacaaggtgacacatattctgtctgtccacgatagtgccaggcctatgtt

SEQ ID NO: 625819 - DNA, 140 bp, Homo sapiens
caaactgcctgtcaagtggctggccctggagagcctggccgacaacctgtatactgtgcagagtgacgtgtcttccaggatctcaaccagttctctcactgcagagtctggagaagcccagccctcattgtgaagggaga

SEQ ID NO: 625820 - DNA, 90 bp, Homo sapiens
ccagcaatacgaatggcaccgatatattcgactttatgggagaaaatttagcaaagaagatcatgttctttttattaagttattgtatga

SEQ ID NO: 625821 - DNA, 74 bp, Homo sapiens
gctccccgtgtggatcaggagaagtgggcccagcgttcattcaggcatttccctggaaatggcagctgtgacag

SEQ ID NO: 625822 - DNA, 100 bp, Homo sapiens
ccgcctaccgcgagagccctgacagttgctatagcgagaggctggaaccgcatcatcgtggagaagcccttcgggagggacctgcagagctctgaccggc

SEQ ID NO: 625823 - DNA, 90 bp, Homo sapiens
gggaggggcccatctgtgctcagagcatgatgggcccacctcctggtatgagacctcctatgggtcccccaatggggatcccccctggaa

SEQ ID NO: 625824 - DNA, 50 bp, Homo sapiens
cttcttcgagtatttgtagaaggcaaccatgtccaagggacctgcagttg

SEQ ID NO: 625825 - DNA, 100 bp, Homo sapiens
ggggactctgtgtgagggaaagaaaacaatttctcctgctctgcagcttctgttcagcccacaccagttatcctattgaaagaggggactgatagctccc

SEQ ID NO: 625826 - DNA, 96 bp, Homo sapiens
cttttcgtaaagggaagtcatttctactggacttcatgcttagatacatgtataacaagagtggagagatctacagaccaagtaatcaagccagtc

SEQ ID NO: 625827 - DNA, 101 bp, Homo sapiens
ggcgcaggccagtgcccatcaaacgcttcaatggagacgtcctctccccggtgacctgttgggcaagaggctgggccgctccccccgtatcagcagcgact

SEQ ID NO: 625828 - DNA, 95 bp, Homo sapiens
aactcctgggctcaaaccatcctcccacctcagccttggggtgaagccagccagttttgacaaagtagcaattcctgaagtgaaggaaattattg

SEQ ID NO: 625829 - DNA, 98 bp, Homo sapiens
cagtttgcacaagggaggcgacagagacagcagcagtgctacacacgcagggccctgtcgatggcagcctttacgcgaaggtgaggaagaaaagctcc

SEQ ID NO: 625830 - DNA, 80 bp, Homo sapiens
cgtgtgtacctcctgctccggcagcctgacatggatttgattgacatactttggaggcaagatatagatcttggagtaag

SEQ ID NO: 625831 - DNA, 75 bp, Homo sapiens
gcggatgccctgcagtacctgcagaaggtctctggagacatcttcagcagaacctgatgttgttgttaaacgaca

SEQ ID NO: 625832 - DNA, 100 bp, Homo sapiens
atcaagtttgccaagaaacagatgatgctaatacagaaagctaaatcaaggtgtacagaaacctccacagctgttgagaaaaaggagaaacctcttccaa

SEQ ID NO: 625833 - DNA, 50 bp, Homo sapiens
gaaaggttcagtttcgtgacgattatagctggacagacatccgctgcccc

SEQ ID NO: 625834 - DNA, 75 bp, Homo sapiens
cgggaagcgtcgggattaggtgaaagaactgtggctgcaccatctgtcttcatcttcccgccatctgatgagcag

SEQ ID NO: 625835 - DNA, 100 bp, Homo sapiens
ctacgttcattcagggcctgctgtggaagaccagccccaaaggagactacctaggtggagaagcgtactgggccggcggcctgcacctctacaccccatt

SEQ ID NO: 625836 - DNA, 118 bp, Homo sapiens
agtcataatagatttcgagacaacagtggccttctgatgaatactttaagaaaattattgcaagtgaattcaggtgccagagaacaacttttttttgaagctccaagaggcaaacggc

SEQ ID NO: 625837 - DNA, 101 bp, Homo sapiens
aacgtagggaccacatcaaagacagctttcacagtttgcgggactcagtcccatcactccaaggagagaaggtggctgtgaaaaacaatatcgatgtcttc
